(19) United States
(12) Patent Application Publication
(10) Pub. No.: US 2025/0333808 A1
(43) Pub. Date: Oct. 30, 2025

(54) PROBES FOR IMPROVING ENVIRONMENTAL SAMPLE SURVEILLANCE

(71) Applicant: ILLUMINA, INC., San Diego, CA (US)

(72) Inventors: Brian Hawks, San Diego, CA (US); Stephen Gross, San Diego, CA (US); Gary Schroth, Alamo, CA (US); Rachel Adams, El Cerrito, CA (US); Keith Arora-Williams, Laguna Nigel, CA (US); Kate Broadbent, Salt Lake City, UT (US)

(21) Appl. No.: 18/987,420

(22) Filed: Dec. 19, 2024

Related U.S. Application Data
(63) Continuation of application No. PCT/US2023/076171, filed on Oct. 6, 2023.
(60) Provisional application No. 63/378,636, filed on Oct. 6, 2022.
(60) Provisional application No. 63/479,827, filed on Jan. 13, 2023.
(60) Provisional application No. 63/480,862, filed on Jan. 20, 2023.

(30) Foreign Application Priority Data
Oct. 6, 2023 (WO) PCT/US2023/076171

(51) Int. Cl. C12Q 1/70; C12N 15/10; C12Q 1/6806; C12Q 1/6869

(52) U.S. Cl. CPC C12Q 1/701; C12N 15/1006; C12N 15/1065; C12N 15/1096; C12Q 1/6806; C12Q 1/6869; C12Q 2600/16

(57) ABSTRACT

Described herein are compositions and methods for enriching library fragments comprising viral sequences prepared from a variety of samples. These methods may incorporate microfluidics and flowcells for greater ease of use. Libraries enriched with the present methods may be used for sequencing. Also described are probes and methods for enzymatic depletion of unwanted RNA.

### RELATED APPLICATIONS

[0001] This application is a bypass continuation of PCT/2023/076171, filed on Oct. 6, 2023. PCT/2023/076171 claims priority to U.S. provisional application 63/378,636 filed on Oct. 6, 2023; U.S. provisional application 63/479,827 filed on Jan. 13, 2023; and U.S. provisional application 63/480,862 filed on Jan. 20, 2023. Each application is incorporated herein by reference in its entirety.

### REFERENCE TO ELECTRONIC SEQUENCE LISTING

[0002] The application contains a Sequence Listing that has been submitted on a Read-Only Optical Disc in .XML format and is hereby incorporated by reference in its entirety. Said .XML file, created on Jan. 4, 2024, is named “IP-2397-US SL” and is 209,829 KB in size. The Sequence Listing is on a Read-Only Optical Disc created on Mar. 11, 2025. The sequence listing contained in this .XML file is part of the specification and is hereby incorporated by reference herein in its entirety.

### DESCRIPTION

### Field

[0003] This disclosure relates to probes for improving environmental sample (including wastewater samples and other samples) surveillance and surveillance of other samples for various viruses. Libraries enriched with the present methods may be used to generate sequencing data. Also described are viral probes and methods for viral probe design and for enzymatic depletion of unwanted RNA and cDNA from human wastewater and other samples.

### BACKGROUND

[0004] Viruses continue to develop naturally resulting in new strains and diseases to human populations. For example, the World Health Organization (WHO) declared infection by the novel Severe Acute Respiratory Syndrome Coronavirus 2 (SARS-COV-2) as a pandemic and termed the related disease as coronavirus disease 2019 (COVID-19). SARS-COV-2 can be detected in feces. Additionally, most persons infected with enterically transmitted viruses shed large amounts of virus in feces for days or weeks, both before and after onset of symptoms. Therefore, viruses causing gastroenteritis may be detected in wastewater, even if only a few persons are infected. The abundance and diversity of pathogenic viruses in wastewater has been shown to reflect the pattern of infection in human population. Adenovirus (HAdV), rotavirus (RoV), hepatitis A virus (HAV), and other enteric viruses, such as norovirus (NoV), coxsackievirus, echovirus, reovirus and astrovirus are some of the principal human pathogenic viruses transmissible via water media.

[0005] Viruses are ubiquitous and persistent in raw wastewater and treated wastewater. One of the main sources of viruses, including viral pathogens in wastewater is human fecal matter, particularly that from infected persons. Sewage systems receive enteric viruses excreted by infected individuals. In addition to human pathogenic viruses, waterborne viruses that originate from food production, animal husbandry, seasonal surface runoff and other sources are present in wastewater. Wastewater can serve as a significant source of information for public health and agricultural officials on the pathogens present in a population and the levels of those pathogens.

[0006] The bodies that receive treated wastewater are oftentimes used for recreational activities and agriculture, and as a source of raw water for drinking water production. The presence of potentially pathogenic viruses in wastewater is of concern since it can pose risks to human health. While this presents an opportunity to investigate wastewater for incidence of disease or presence of potentially pathogenic viruses, sampling and measuring wastewater for a virus-of-interest is problematic due to low concentrations of this virus or particles thereof alone. The mixture of contaminants (e.g., other waterborne pathogens including bacterial, fungal, and parasitic pathogens, as well as viruses not of interest or human nucleic acids) and a virus-of-interest presents a difficult medium for viral DNA and RNA extraction therefrom, especially where concentrations of a virus-of-interest are low. As such, methods of enriching wastewater samples for viral targets are needed to quantify incidence of viral infection or disease in a community and to identify novel viruses of interest in wastewater, such as from a sewer system, and methods of recovering nucleic acids from a virus-of-interest in wastewater. Public health officials also need methods of recovering nucleic acids from a virus-of-interest in wastewater. Investigations of other types of samples would also benefit from improved methods of recovering nucleic acids.

[0007] Described herein is the development of a viral probe set for enrichment and detection of novel strains or variants of genetically related viruses. Through an iterative design process, the viral probes described herein are optimized to capture a broad diversity of viral sequences to increase the chance of capturing genomic sequence from a yet to be discovered strain or novel variant coronavirus or other virus-of-interest. The viral probe set and viral probe design methods described herein minimize probe redundancy to reduce the overall number of oligonucleotides that are necessary to detect such a broad diversity of viral sequences.

### SUMMARY

[0008] In accordance with the description, described herein are methods of enriching a sample for one or more virus-of-interest nucleic acids and/or for improving environmental wastewater surveillance for various viruses. These methods may be performed with standard lab equipment, such as flowcells comprised in sequencers. In some embodiments, standard sequencing consumables and platform (i.e., sequencer) can be used as a microfluidic device for enriching and/or depleting library fragments. In some embodiments, depleting abundant small noncoding RNA is performed after cDNA synthesis and amplification.

[0009] Embodiment 1. A method of enriching a sample for one or more target viral nucleic acids comprising the steps of: (a) providing a probe set comprising at least two nucleic acid probes complementary to one or more target viral nucleic acids, wherein the probe set comprises at least two of SEQ ID NOs: 1-213,280, or its complement; (b) allowing the probes in the probe set to hybridize to the target viral nucleic acids; (c) enriching the sample for the one or more target viral nucleic acids by amplifying the target viral nucleic acids and/or separating the target viral nucleic acids from the sample.

[0010] Embodiment 2. A method of enriching a sample for one or more target viral nucleic acids comprising the steps of: (a) providing a probe set comprising at least two nucleic acid probes complementary to one or more target viral nucleic acids, wherein the nucleic acid probes are affixed to a support; (b) capturing the one or more target viral nucleic acids on the support; (c) using the one or more captured target viral nucleic acids as a template strand to produce one or more nucleic acid duplexes immobilized on the support, wherein one or more target viral nucleic acids hybridize to one or more probes of the probe set on the support; (d) contacting a transposase and transposon with the one or more nucleic acid duplexes under conditions wherein the one or more nucleic acid duplexes and transposon composition undergo a transposition reaction to produce one or more tagged nucleic acid duplexes, wherein the transposon composition comprises a double stranded nucleic acid molecule comprising a transferred strand and a non-transferred strand; (e) contacting the one or more tagged nucleic acid duplexes with a nucleic acid modifying enzyme under conditions to extend the 3′ end of the immobilized strand to the 5′ end of the template strand to produce one or more end-extended tagged nucleic acid duplexes; (f) amplifying the one or more end-extended tagged nucleic acid duplexes to produce a plurality of tagged nucleic acid strands; (g) contacting the plurality of tagged nucleic acid strands with a probe set to create an enriched library; and (h) amplifying the enriched library.

[0011] Embodiment 3. The method of embodiment 1 or 2, wherein the sample comprises a sample from a mammal.

[0012] Embodiment 4. The method of embodiment 3, wherein the sample comprises a sample from a human, monkey, bat, dog, cat, horse, goat, sheep, cow, pig, rat and/or mouse.

[0013] Embodiment 5. The method of any one of embodiments 1-4, wherein the sample comprises a blood sample, a serum sample, and/or a whole blood sample.

[0014] Embodiment 6. The method of any one of embodiments 1-4, wherein the sample comprises a tissue sample.

[0015] Embodiment 7. The method of any one of embodiments 1-4, wherein the sample comprises a fecal sample, a urine sample, a mucus sample, a saliva sample, a lymph sample, a vaginal fluid sample, a semen sample, an amniotic sample, and/or a sweat sample.

[0016] Embodiment 8. The method of embodiment 1 or 2, comprises a freshwater sample, a wastewater sample, a saline water sample, or a combination thereof.

[0017] Embodiment 9. The method of embodiment 8, wherein the sample comprises a wastewater sample.

[0018] Embodiment 10. The method of any one of embodiments 1-9, wherein the probe set is biotinylated.

[0019] Embodiment 11. The method of any one of embodiments 1-10, wherein the one or more target nucleic acids are viral RNA molecules.

[0020] Embodiment 12. The method of any one of embodiments 1-11, wherein the one or more target nucleic acids are genomic viral DNA or RNA molecules.

[0021] Embodiment 13. The method of any one of embodiments 1-12, wherein the probe set further comprises at least two DNA probes that each hybridize to at least one target virus molecule from an adenovirus, Aichivirus, Andes virus, Anjozorobe hantavirus, Araraquara virus, Bayou virus, Bermejo virus, Black Creek Canal virus, Castelo dos Sonhos virus, Chapare virus, Chikungunya virus, Choclo virus, coxsackievirus, Crimean-Congo haemorrhagic fever virus, Dengue virus, Dobrava virus, Eastern equine encephalitis virus, Ebola virus, enterovirus, Guanarito virus, Hantaan virus, Hendra virus, hepatitis A virus, hepatitis B virus, hepatitis C virus, human coronavirus, human immunodeficiency virus 1, human immunodeficiency virus 2, human metapneumovirus, human papillomavirus, influenza A virus, influenza B virus, Japanese encephalitis virus, Juquitiba virus, KI polyomavirus Stockholm 60, Kyasanur forest disease virus, Laguna Negra virus, Lassa virus, Lechiguanas virus, Lujo virus, Machupo virus, Maciel virus, Marburg virus, Merkel cell polyomavirus, Middle East respiratory syndrome-related coronavirus, monkeypox virus, Monongahela hantavirus, Mopeia Lassa virus, Nipah virus, norovirus, Omsk hemorrhagic fever virus, orthohantavirus, parainfluenza, parechovirus, parvovirus, polyomavirus, Puumala virus, respiratory syncytial virus, rhinovirus A, rhinovirus B, rhinovirus C, Rift Valley fever, Rio Mamore virus, rotavirus A, rotavirus B, rotavirus B, rotavirus C, rotavirus H, rubella virus, Saaremaa virus, Sabia virus, salivirus, Sangassou virus, sapovirus, SARS coronavirus, Seoul virus, sin nombre virus, tick-borne encephalitis virus, torque teno virus, Tula virus, variola virus, Venezuelan equine encephalitis virus, West Nile virus, Western equine encephalomyelitis virus, yellow fever virus, and/or Zika virus.

[0022] Embodiment 14. The method of any one of embodiments 1-13, wherein the probe set further comprises at least two DNA probes that each hybridize to at least one target virus molecule selected from Table 2.

[0023] Embodiment 15. The method of any one of embodiments 1-14, wherein the probe set further comprises at least two DNA probes that each hybridize to at least one target virus molecule selected from Adeno-associated virus 2 (AAV2), Aichi virus 1 (AiV-A1), Alkhumra hemorrhagic fever virus (AHFV), Andes virus (ANDV), Anjozorobe virus (ANJV), Araucaria virus, Australian bat lyssavirus (ABLV), Bayou virus (BAYV), BK polyomavirus (BKPyV), Black Creek Canal virus (BCCV), Bombali virus (BOMV), Bourbon virus (BRBV), Bundibugyo virus (BDBV), Cache Valley virus (CVV), California encephalitis virus (CEV), Cedar virus (CedV), Chapare virus (CHAPV), Chikungunya virus (CHIKV), Choclo virus (CHOV), Colorado tick fever virus (CTFV), Crimean-Congo hemorrhagic fever virus (CCHFV), Crimean-Congo hemorrhagic fever virus 2 (CCHFV-2), Dengue virus (DENV), Dobrava-Belgrade virus (DOBV), Duvenhage virus (DUVV), Eastern equine encephalitis virus (EEEV), Ebola virus (EBOV), Enterovirus A, Enterovirus B, Enterovirus C, Enterovirus D, Epstein-Barr virus (EBV), European bat lyssavirus (EBLV), Ghana virus (GhV), Guanarito virus (GTOV), Hantaan virus (HTNV), Heartland virus (HRTV), Hendra virus (HeV), Henipavirus unclassified, Hepatitis A virus (HAV), Hepatitis B virus (HBV), Hepatitis C virus (HCV), Hepatitis D virus (HDV), Hepatitis E virus (HEV), Herpes simplex virus 1 (HSV1), Herpes simplex virus 2 (HSV2), Human adenovirus A, Human adenovirus B, Human adenovirus C, Human adenovirus D, Human adenovirus E, Human adenovirus F, Human adenovirus G, Human bocavirus (HBoV), Human coronavirus 229E (HCOV_229E), Human coronavirus HKU1 (HCOV_HKU1), Human coronavirus NL63 (HCoV_NL63), Human coronavirus OC43 (HCoV_OC43), Human cytomegalovirus (HCMV), Human immunodeficiency virus 1 (HIV-1), Human immunodeficiency virus 2 (HIV-2), Human metapneumovirus (HMPV), Human papillomavirus 11 (HPV11), Human papillomavirus 16 (HPV16; high-risk), Human papillomavirus 18 (HPV18; high-risk), Human papillomavirus 26 (HPV26), Human papillomavirus 31 (HPV31; high-risk), Human papillomavirus 33 (HPV33; high-risk), Human papillomavirus 35 (HPV35; high-risk), Human papillomavirus 39 (HPV39; high-risk), Human papillomavirus 40 (HPV40), Human papillomavirus 42 (HPV42), Human papillomavirus 43 (HPV43), Human papillomavirus 44 (HPV44), Human papillomavirus 45 (HPV45; high-risk), Human papillomavirus 51 (HPV51; high-risk), Human papillomavirus 52 (HPV52; high-risk), Human papillomavirus 53 (HPV53), Human papillomavirus 54 (HPV54), Human papillomavirus 56 (HPV56; high-risk), Human papillomavirus 58 (HPV58; high-risk), Human papillomavirus 59 (HPV59; high-risk), Human papillomavirus 6 (HPV6), Human papillomavirus 61 (HPV61), Human papillomavirus 66 (HPV66; high-risk), Human papillomavirus 68 (HPV68; high-risk), Human papillomavirus 69 (HPV69), Human papillomavirus 70 (HPV70), Human papillomavirus 73 (HPV73), Human papillomavirus 82 (HPV82), Human parainfluenza virus 1 (HPIV-1), Human parainfluenza virus 2 (HPIV-2), Human parainfluenza virus 3 (HPIV-3), Human parainfluenza virus 4 (HPIV-4), Human parechovirus (HPeV), Human parvovirus B19 (B19V), Human polyomavirus 6 (HPyV6), Human polyomavirus 7 (HPyV7), Human polyomavirus 9 (HPyV9), Human respiratory syncytial virus A (HRSV-A), Human respiratory syncytial virus B (HRSV-B), Influenza A virus, Influenza B virus, Influenza C virus, Isla Vista virus, Itapua virus, Jamestown Canyon virus (JCV), Japanese encephalitis virus (JEV), JC polyomavirus (JCPyV), Junin virus (JUNV), Juquitiba virus, KI polyomavirus (KIPyV), Kyasanur Forest disease virus (KFDV), La Crosse virus (LACV), Lagos bat virus (LBV), Laguna Negra virus (LANV), Langya virus, Lassa virus (LASV), LI polyomavirus (LIPyV), Lloviu virus (LLOV), Lujo virus (LUJV), Luxi virus (LUXV), Lymphocytic choriomeningitis virus (LCMV), Machupo virus (MACV), Mamastrovirus 1 (MAstV1), Mamastrovirus 6 (MAstV6), Mamastrovirus 8 (MAstV8), Mamastrovirus 9 (MAstV9), Maporal virus (MAPV), Marburg virus (MARV), Mayaro virus (MAYV), Measles virus (MV), Menangle virus (MenV), Merkel cell polyomavirus (MCPyV), Middle East respiratory syndrome-related coronavirus (MERS-COV), Mojiang virus (MojV), Mokola virus (MOKV), Monkeypox virus (MPV), Monongahela hantavirus, Muleshoe virus, Mumps virus (MuV), Murray Valley encephalitis virus (MVEV), MW polyomavirus (MWPyV), New Jersey polyomavirus (NJPyV), Nipah virus (NiV), Norovirus, Omsk hemorrhagic fever virus (OHFV), Onyong-nyong virus (ONNV), Oropouche virus (OROV), Paranoa virus, Powassan virus (POWV), Punta Toro virus (PTV), Puumala virus (PUUV), Rabies virus (RABV), Ravn virus (RAVV), Reston virus (RESTV), Rhinovirus A (RV-A), Rhinovirus B (RV-B), Rhinovirus C (RV-C), Rift Valley fever virus (RVFV), Ross River virus (RRV), Rotavirus A (RVA), Rotavirus B (RVB), Rotavirus C (RVC), Rubella virus (RuV), Sabia virus (SBAV), Salivirus A (SaV-A), Sandfly fever Sicilian virus (SFCV), Sangassou virus (SANGV), Sapovirus, Semliki Forest virus (SFV), Seoul virus (SEOV), Severe acute respiratory syndrome coronavirus (SARS-COV), Severe acute respiratory syndrome coronavirus 2 (SARS-COV-2), Severe fever with thrombocytopenia syndrome virus (SFTSV), Simian virus 40 (SV40), Sin nombre virus (SNV), Sindbis virus (SINV), Snowshoe hare virus (SSHV), Sosuga virus (SoRV), St. Louis encephalitis virus (SLEV), STL polyomavirus (STLPyV), Sudan virus (SUDV), Tacheng tick virus 2 (TcTV-2), Tahyna virus (TAHV), Tai Forest virus (TAFV), Tick-borne encephalitis virus (TBEV), Torque teno virus (TTV), Toscana virus (TOSV), Trichodysplasia spinulosa-associated polyomavirus (TSPyV), Tula virus (TULV), Usutu virus (USUV), Varicella-zoster virus (VZV), Variola virus (VARV), Venezuelan equine encephalitis virus (VEEV), West Nile virus (WNV), Western equine encephalitis virus (WEEV), WU polyomavirus (WUPyV), Yellow fever virus (YFV), and Zika virus (ZIKV).

[0024] Embodiment 16. The method of any one of embodiments 1-15, wherein the DNA probes further comprise any one of SEQ ID NOs: 213,288-213,747, or its complement.

[0025] Embodiment 17. The method of any one of embodiments 1-16, wherein the DNA probes further comprise two or more, or five or more, or 10 or more, or 25 or more sequences, or all of the sequences selected from SEQ ID NOs: 213,288-213,747, or its complement.

[0026] Embodiment 18. The method of any one of embodiments 1-17, wherein the method further comprises depleting unwanted nucleic acid molecules from a nucleic acid sample.

[0027] Embodiment 19. The method of embodiment 18, wherein the depleting unwanted nucleic acid molecules comprises depleting unwanted cDNA library fragments from a library of cDNA fragments prepared from RNA, wherein the unwanted library fragments comprise those prepared from unwanted RNA sequences, further comprising: (a) preparing a solid support comprising at least one immobilized oligonucleotide, wherein each immobilized oligonucleotide comprises a nucleic acid sequence corresponding to an unwanted RNA sequence or its complement; (b) adding the library of fragments to the solid support and hybridizing the library fragments to at least one immobilized oligonucleotide to allow binding of unwanted library fragments to at least one immobilized oligonucleotide, and (c) collecting library fragments not bound to at least one immobilized oligonucleotide.

[0028] Embodiment 20. The method of embodiment 19, wherein the at least one immobilized oligonucleotide comprises a sequence comprising any one or more of SEQ ID NOs: 213,288-214,878 or its complement.

[0029] Embodiment 21. The method of embodiment 20, wherein depleting unwanted nucleic acid molecules comprises depleting off-target RNA nucleic acid molecules from a nucleic acid sample comprises: (a) contacting a nucleic acid sample comprising at least one RNA or DNA target sequence and at least one off-target RNA molecule from a first species with a probe set comprising at least two DNA probes complementary to discontiguous sequences along the full length of the at least one off-target RNA molecule from a second species, thereby hybridizing the DNA probes to the off-target RNA molecules to form DNA:RNA hybrids, wherein each DNA:RNA hybrid is at least 5 bases apart, or at least 10 bases apart, along a given off-target RNA molecule sequence from any other DNA:RNA hybrid, wherein the off-target DNA comprises at least one small noncoding RNA chosen from RN7SK, RN7SL1, RN7SL2, RN7SL5P, RPPH1, SNORD3A; (b) contacting the DNA:RNA hybrids with a ribonuclease that degrades the RNA from the DNA:RNA hybrids, thereby degrading the off-target RNA molecules in the nucleic acid sample to form a degraded mixture; (c) separating the degraded RNA from the degraded mixture; (d) sequencing the remaining RNA from the sample; (e) evaluating the remaining RNA sequences for the presence of off-target RNA molecules from the first species, thereby determining gap sequence regions; and (f) supplementing the probe set with additional DNA probes complementary to discontiguous sequences in one or more of the gap sequence regions.

[0030] Embodiment 22. The method of embodiment 21, wherein the probe set comprises any one or more of SEQ ID NOs: 213,288-213,878, or its complement.

[0031] Embodiment 23. The method of any one of embodiments 1-22, wherein the method further comprises depleting unwanted cDNA library fragments from a library of cDNA fragments prepared from RNA, wherein the unwanted library fragments comprise those prepared from unwanted RNA sequences.

[0032] Embodiment 24. A composition comprising a probe set comprising at least two DNA probes complementary to at least one target viral nucleic acid molecule in a nucleic acid sample wherein the target viral nucleic acid comprises at least one molecule selected from Table 2.

[0033] Embodiment 25. A composition comprising a probe set comprising at least two DNA probes complementary to at least one target viral nucleic acid molecule in a nucleic acid sample wherein the target viral nucleic acid comprises at least one molecule selected from Adeno-associated virus 2 (AAV2), Aichi virus 1 (AiV-A1), Alkhumra hemorrhagic fever virus (AHFV), Andes virus (ANDV), Anjozorobe virus (ANJV), Araucaria virus, Australian bat lyssavirus (ABLV), Bayou virus (BAYV), BK polyomavirus (BKPyV), Black Creek Canal virus (BCCV), Bombali virus (BOMV), Bourbon virus (BRBV), Bundibugyo virus (BDBV), Cache Valley virus (CVV), California encephalitis virus (CEV), Cedar virus (CedV), Chapare virus (CHAPV), Chikungunya virus (CHIKV), Choclo virus (CHOV), Colorado tick fever virus (CTFV), Crimean-Congo hemorrhagic fever virus (CCHFV), Crimean-Congo hemorrhagic fever virus 2 (CCHFV-2), Dengue virus (DENV), Dobrava-Belgrade virus (DOBV), Duvenhage virus (DUVV), Eastern equine encephalitis virus (EEEV), Ebola virus (EBOV), Enterovirus A, Enterovirus B, Enterovirus C, Enterovirus D, Epstein-Barr virus (EBV), European bat lyssavirus (EBLV), Ghana virus (GhV), Guanarito virus (GTOV), Hantaan virus (HTNV), Heartland virus (HRTV), Hendra virus (HeV), Henipavirus unclassified, Hepatitis A virus (HAV), Hepatitis B virus (HBV), Hepatitis C virus (HCV), Hepatitis D virus (HDV), Hepatitis E virus (HEV), Herpes simplex virus 1 (HSV1), Herpes simplex virus 2 (HSV2), Human adenovirus A, Human adenovirus B, Human adenovirus C, Human adenovirus D, Human adenovirus E, Human adenovirus F, Human adenovirus G, Human bocavirus (HBoV), Human coronavirus 229E (HCOV_229E), Human coronavirus HKU1 (HCOV_HKU1), Human coronavirus NL63 (HCOV_NL63), Human coronavirus OC43 (HCoV_OC43), Human cytomegalovirus (HCMV), Human immunodeficiency virus 1 (HIV-1), Human immunodeficiency virus 2 (HIV-2), Human metapneumovirus (HMPV), Human papillomavirus 11 (HPV11), Human papillomavirus 16 (HPV16; high-risk), Human papillomavirus 18 (HPV18; high-risk), Human papillomavirus 26 (HPV26), Human papillomavirus 31 (HPV31; high-risk), Human papillomavirus 33 (HPV33; high-risk), Human papillomavirus 35 (HPV35; high-risk), Human papillomavirus 39 (HPV39; high-risk), Human papillomavirus 40 (HPV40), Human papillomavirus 42 (HPV42), Human papillomavirus 43 (HPV43), Human papillomavirus 44 (HPV44), Human papillomavirus 45 (HPV45; high-risk), Human papillomavirus 51 (HPV51; high-risk), Human papillomavirus 52 (HPV52; high-risk), Human papillomavirus 53 (HPV53), Human papillomavirus 54 (HPV54), Human papillomavirus 56 (HPV56; high-risk), Human papillomavirus 58 (HPV58; high-risk), Human papillomavirus 59 (HPV59; high-risk), Human papillomavirus 6 (HPV6), Human papillomavirus 61 (HPV61), Human papillomavirus 66 (HPV66; high-risk), Human papillomavirus 68 (HPV68; high-risk), Human papillomavirus 69 (HPV69), Human papillomavirus 70 (HPV70), Human papillomavirus 73 (HPV73), Human papillomavirus 82 (HPV82), Human parainfluenza virus 1 (HPIV-1), Human parainfluenza virus 2 (HPIV-2), Human parainfluenza virus 3 (HPIV-3), Human parainfluenza virus 4 (HPIV-4), Human parechovirus (HPeV), Human parvovirus B19 (B19V), Human polyomavirus 6 (HPyV6), Human polyomavirus 7 (HPyV7), Human polyomavirus 9 (HPyV9), Human respiratory syncytial virus A (HRSV-A), Human respiratory syncytial virus B (HRSV-B), Influenza A virus, Influenza B virus, Influenza C virus, Isla Vista virus, Itapua virus, Jamestown Canyon virus (JCV), Japanese encephalitis virus (JEV), JC polyomavirus (JCPyV), Junin virus (JUNV), Juquitiba virus, KI polyomavirus (KIPyV), Kyasanur Forest disease virus (KFDV), La Crosse virus (LACV), Lagos bat virus (LBV), Laguna Negra virus (LANV), Langya virus, Lassa virus (LASV), LI polyomavirus (LIPyV), Lloviu virus (LLOV), Lujo virus (LUJV), Luxi virus (LUXV), Lymphocytic choriomeningitis virus (LCMV), Machupo virus (MACV), Mamastrovirus 1 (MAstV1), Mamastrovirus 6 (MAstV6), Mamastrovirus 8 (MAstV8), Mamastrovirus 9 (MAstV9), Maporal virus (MAPV), Marburg virus (MARV), Mayaro virus (MAYV), Measles virus (MV), Menangle virus (MenV), Merkel cell polyomavirus (MCPyV), Middle East respiratory syndrome-related coronavirus (MERS-COV), Mojiang virus (MojV), Mokola virus (MOKV), Monkeypox virus (MPV), Monongahela hantavirus, Muleshoe virus, Mumps virus (MuV), Murray Valley encephalitis virus (MVEV), MW polyomavirus (MWPyV), New Jersey polyomavirus (NJPyV), Nipah virus (NiV), Norovirus, Omsk hemorrhagic fever virus (OHFV), Onyong-nyong virus (ONNV), Oropouche virus (OROV), Paranoa virus, Powassan virus (POWV), Punta Toro virus (PTV), Puumala virus (PUUV), Rabies virus (RABV), Ravn virus (RAVV), Reston virus (RESTV), Rhinovirus A (RV-A), Rhinovirus B (RV-B), Rhinovirus C (RV-C), Rift Valley fever virus (RVFV), Ross River virus (RRV), Rotavirus A (RVA), Rotavirus B (RVB), Rotavirus C (RVC), Rubella virus (RuV), Sabia virus (SBAV), Salivirus A (SaV-A), Sandfly fever Sicilian virus (SFCV), Sangassou virus (SANGV), Sapovirus, Semliki Forest virus (SFV), Seoul virus (SEOV), Severe acute respiratory syndrome coronavirus (SARS-COV), Severe acute respiratory syndrome coronavirus 2 (SARS-COV-2), Severe fever with thrombocytopenia syndrome virus (SFTSV), Simian virus 40 (SV40), Sin nombre virus (SNV), Sindbis virus (SINV), Snowshoe hare virus (SSHV), Sosuga virus (SoRV), St. Louis encephalitis virus (SLEV), STL polyomavirus (STLPyV), Sudan virus (SUDV), Tacheng tick virus 2 (TcTV-2), Tahyna virus (TAHV), Tai Forest virus (TAFV), Tick-borne encephalitis virus (TBEV), Torque teno virus (TTV), Toscana virus (TOSV), Trichodysplasia spinulosa-associated polyomavirus (TSPyV), Tula virus (TULV), Usutu virus (USUV), Varicella-zoster virus (VZV), Variola virus (VARV), Venezuelan equine encephalitis virus (VEEV), West Nile virus (WNV), Western equine encephalitis virus (WEEV), WU polyomavirus (WUPyV), Yellow fever virus (YFV), and Zika virus (ZIKV).

[0034] Embodiment 26. A composition comprising a probe set comprising at least one DNA probe comprising at least one sequence of SEQ ID NOs: 1-213,280, or its complement.

[0035] Embodiment 27. The composition of any one of embodiments 25-26, comprising at least 5, at least at least 10, at least 50, at least 100, at least 250, at least 500, at least 750, at least 1000, at least 1500, or at least 2000 sequences of SEQ ID NOs: 1-213,280, or its complement.

[0036] Embodiment 28. The compositions of embodiments 25-27, further comprising at least one DNA probe comprising at least one sequence comprising at least one of SEQ ID NOs: 213,288-214,878, or its complement.

[0037] Embodiment 29. A kit comprising a probe set comprising: (a) at least one DNA probe comprising at least one sequence comprising at least one of SEQ ID NOs: 1-213,280, or its complement; (b) a buffer.

[0038] Embodiment 30. The kit of embodiments 29, further comprising at least one DNA probe comprising at least one sequence comprising at least one of SEQ ID NOs: 213,288-214,878, or its complement.

[0039] Embodiment 31. The kit of embodiments 29 and 30, wherein the buffer is a wash buffer and/or an elution buffer.

[0040] Embodiment 32. The kit of embodiment 29-31, further comprising an RNA depletion buffer, a probe depletion buffer, and/or a probe removal buffer.

[0041] Embodiment 33. The kit of any of one embodiments 29-32, further comprising: (a) a ribonuclease; (b) a DNase; and (c) RNA purification beads.

[0042] Embodiment 34. The kit of embodiment 33, wherein the ribonuclease is RNase H.

[0043] Embodiment 35. The kit of any of one embodiments 29-34, comprising a buffer and nucleic acid purification medium.

[0044] Embodiment 36 The kit of embodiment 35, wherein the buffer is an RNA depletion buffer, a probe depletion buffer, and/or a probe removal buffer.

[0045] Embodiment 37. The kit of any one of embodiments 28-34, further comprising a nucleic acid destabilizing chemical.

[0046] Embodiment 38. The kit of embodiment 35, wherein the nucleic acid destabilizing chemical comprises betaine, DMSO, formamide, glycerol, or a derivative thereof, or a mixture thereof.

[0047] Embodiment 39. The kit of any one of embodiments 35-36, wherein the nucleic acid destabilizing chemical comprises formamide.

[0048] Embodiment 40. The kit of any one of embodiments 29-39, wherein the at least one DNA probe comprises 2 or more, 5 or more, 10 or more, 25 or more, 50 or more, 100 or more, 200 or more, 300 or more, 400 or more, 500 or more, 600 or more, 700 or more, 800 or more, 900 or more, 1000 or more, 1100 or more, or 213,280 probes comprising sequences selected from SEQ ID NOs: 1-213,280, or its complement.

[0049] Embodiment 41. The kit of any one of embodiments 28-38, wherein the at least one DNA probe comprises 500 or more, 600 or more, 700 or more, 800 or more, 900 or more, 1000 or more, 1100 or more, 1200 or more, 1300 or more, 1400 or more, 1500 or more, 2000 or more, 3000 or more, 3500 or more, 4000 or more, 5000 or more, 10000 or more, 20000 or more, 3000, or more, 40000 or more, 50000 or more, 100000 or more, 200000 or more, or 213,280 probes comprising sequences selected from SEQ ID NOs: 1-213,280, or its complement.

[0050] Additional objects and advantages will be set forth in part in the description which follows, and in part will be understood from the description, or may be learned by practice. The objects and advantages will be realized and attained by means of the elements and combinations particularly pointed out in the appended claims.

DESCRIPTION OF SEQUENCES

| | SEQ ID | |
|---|---|---|
| Description | NO: | Sequence (3′ to 5′) |
| RN7SK | 213281 | GATGTGAGGGCGATCTGGCTGCGACATCTGTCACCCCATTGATCGCCAGGG |
| | | TTGATTCGGCTGATCTGGCTGGCTAGGCGGGTGTCCCCTTCCTCCCTCACC |
| | | GCTCCATGTGCGTCCCTCCCGAAGCTGCGCGCTCGGTCGAAGAGGACGACC |
| | | ATCCCCGATAGAGGAGGACCGGTCTTCGGTCAAGGGTATACGAGTAGCTGC |
| | | GCTCCCCTGCTAGAACCTCCAAACAAGCTCTCAAGGTCCATTTGTAGGAGA |
| | | ACGTAGGGTAGTCAAGCTTCCAAGACTCCAGACACATCCAAATGAGGCGCT |
| | | GCATGTGGCAGTCTGCCTTTCT |
| RN7SL1 | 213282 | GCCGGGCGCGGTGGCGCGTGCCTGTAGTCCCAGCTACTCGGGAGGCTGAGG |
| | | CTGGAGGATCGCTTGAGTCCAGGAGTTCTGGGCTGTAGTGCGCTATGCCGA |
| | | TCGGGTGTCCGCACTAAGTTCGGCATCAATATGGTGACCTCCCGGGAGCGG |
| | | GGGACCACCAGGTTGCCTAAGGAGGGGTGAACCGGCCCAGGTCGGAAACGG |
| | | AGCAGGTCAAAACTCCCGTGCTGATCAGTAGTGGGATCGCGCCTGTGAATA |
| | | GCCACTGCACTCCAGCCTGGGCAACATAGCGAGACCCCGTCTCT |
| RN7SL2 | 213283 | GCCGGGCGCGGTGGCGCGTGCCTGTAGTCCCAGCTACTCGGGAGGCTGAGG |
| | | TGGGAGGATCGCTTGAGCCCAGGAGTTCTGGGCTGTAGTGCGCTATGCCGA |
| | | TCGGGTGTCCGCACTAAGTTCGGCATCAATATGGTGACCTCCCGGGAGCGG |
| | | GGGACCACCAGGTTGCCTAAGGAGGGGTGAACCGGCCCAGGTCGGAAACGG |
| | | AGCAGGTCAAAACTCCCGTGCTGATCAGTAGTGGGATCGCGCCTGTGAATA |
| | | GCCACTGCACTCCAGCCTGAGCAACATAGCGAGACCCCGTCTCTT |
| RN7SL5P | 213284 | GCCGGGCGCGGTGGCGCGTGCCTGTGGTCCCAGCTACTCGGGAGGCTGAGG |
| | | CTGGAGGATCGCTTGAGTCCAGGAGTTCTGGGCTGTAGTGCGCTATGCCGA |
| | | TCGGGTGTCCGCACTAAGTTCGGCATCAATATGGTGACCTCCCGGGAGCGG |
| | | GGGACCACCAGGTTGCCTAAGGAGGGGTGAACCGGCCCAGGTCGGAAACGG |
| | | AGCAGGTCAAAACTCCCGTGCTGATCAGTAGAAGTCTGTAATGCTACTGGT |
| | | GTCCCCTAATTTTCTTATAGCCACAGTTCCTTTCGCCTGAGCTCATTACAG |
| | | AGACAAATATCCATT |
| RPPH1 | 213285 | GGCGGAGGGAAGCTCATCAGTGGGGCCACGAGCTGAGTGCGTCCTGTCACT |
| | | CCACTCCCATGTCCCTTGGGAAGGTCTGAGACTAGGGCCAGAGGCGGCCCT |
| | | AACAGGGCTCTCCCTGAGCTTCGGGGAGGTGAGTTCCCAGAGAACGGGGCT |
| | | CCGCGCGAGGTCAGACTGGGCAGGAGATGCCGTGGACCCCGCCCTTCGGGG |
| | | AGGGGCCCGGCGGATGCCTCCTTTGCCGGAGCTTGGAACAGACTCACGGCC |
| | | AGCGAAGTGAGTTCAATGGCTGAGGTGAGGTACCCCGCAGGGGACCTCATA |
| | | ACCCAATTCAGACTACTCTCCTCCGCC |
| SNORD3A with | 213286 | AAGACTATACTTTCAGGGATCATTTCTATAGTGTGTTACTAGAGAAGTTTC |
| the ALU region in | | TCTGAACGTGTAGAGCACCGAAAACCACGAGGAAGAGAGGTAGCGTTTTCT |
| bold and italics, in | | CCTGAGCGTGAAGCCGGCTTTCTGGCGTTGCTTGGCTGCAACTGCCGTCAG |
| some embodiments | | CCATTGATGATCGTTCTTCTCTCCGTATTGGGGAGTGAGAGGGAGAGAACG |
| the ALU region | | CGGTCTGAGTGGTTTTTCCTTCTTGATGGCTCAATGACAGAGACTAGCTCG |
| was not used to | | TAAACTCCGGGGCGTTTCTGGGCTGTTCGCTCCTGCTTGGCATGTCGCGAG |
| generate probes | | AAAGGTTTTCGCCTCCTGTTTCAGCGGTGACGGCTCTTGGGTTTTCTCGGG |
| because it is a | | GTGGCTTTTTAATTTTAGTCTTGGCGCGAGGCGGGGGATGCTGTGTGGCAC |
| repetitive region in | | CTCCTATTGTCTCTTTTTGCGTTTTCTCCCATTCTCGCTCCCTCTTTTGTC |
| other areas of the | | GCCGTTTCCCGCCCGCCACTCCCACCCCCAGACGGGGTCTCCGGGTCTCTT |
| genome. | | GTTCTGTCTGCCGGCCCCGGCTGGATTGCAGTGGCGCGATCTCGGCTCCTA |
| | | GCAACATCTGCCTCCCGGGCTCAAGCGAGTCTCCCGCCTAAGCCCTCCCGA |
| | | GTAGCCGGGGCTTAAAGGCGCACACGCCACTCCAGGCTTTTTTTTTTTTTT |
| | | TTTTTTTTTTTTTGGCAGAAACGGGGTGTCAGCATG |
| Reverse | 213287 | AGAAAGGCAGACTGCCACATGCAGCGCCTCATTTGGATGTGTCTGGAGTCT |
| complement of | | TGGAAGCTTGACTACCCTACGTTCTCCTACAAATGGACCTTGAGAGCTTGT |
| RN7SK with probe | | TTGGAGGTTCTAGCAGGGGAGCGCAGCTACTCGTATACCCTTGACCGAAGA |
| sequences in bold | | CCGGTCCTCCTCTATCGGGGATGGTCGTCCTCTTCGACCGAGCGCGCAGCT |
| and italics (and | | TCGGGAGGGACGCACATGGAGCGGTGAGGGAGGAAGGGGACACCCGCCTAG |
| with gaps between | | CCAGCCAGATCAGCCGAATCAACCCTGGCGATCAATGGGGTGACAGATGTC |
| the probes) | | GCAGCCAGATCGCCCTCACATC |
| Probe for RN7SK | 213288 | AGAAAGGCAGACTGCCACATGCAGCGCCTCATTTGGATGTGTCTGGAGTC |
| Probe for RN7SK | 213289 | CCCTACGTTCTCCTACAAATGGACCTTGAGAGCTTGTTTGGAGGTTCTAG |
| Probe for RN7SK | 213290 | ACTCGTATACCCTTGACCGAAGACCGGTCCTCCTCTATCGGGGATGGTCG |
| Probe for RN7SK | 213291 | CGCGCAGCTTCGGGAGGGACGCACATGGAGCGGTGAGGGAGGAAGGGGAC |
| Probe for RN7SK | 213292 | CAGATCAGCCGAATCAACCCTGGCGATCAATGGGGTGACAGATGTCGCAG |
| Probe for RN7SL1 | 213293 | AGAGACGGGGTCTCGCTATGTTGCCCAGGCTGGAGTGCAGTGGCTATTCA |
| Probe for RN7SL1 | 213294 | TACTGATCAGCACGGGAGTTTTGACCTGCTCCGTTTCCGACCTGGGCCGG |
| Probe for RN7SL1 | 213295 | GCAACCTGGTGGTCCCCCGCTCCCGGGAGGTCACCATATTGATGCCGAAC |
| Probe for RN7SL1 | 213296 | GATCGGCATAGCGCACTACAGCCCAGAACTCCTGGACTCAAGCGATCCTC |
| Probe for RN7SL2 | 213297 | AAGAGACGGGGTCTCGCTATGTTGCTCAGGCTGGAGTGCAGTGGCTATTC |
| Probe for RN7SL2 | 213298 | CTACTGATCAGCACGGGAGTTTTGACCTGCTCCGTTTCCGACCTGGGCCG |
| Probe for RN7SL2 | 213299 | GGCAACCTGGTGGTCCCCCGCTCCCGGGAGGTCACCATATTGATGCCGAA |
| Probe for RN7SL2 | 213300 | CGATCGGCATAGCGCACTACAGCCCAGAACTCCTGGGCTCAAGCGATCCT |
| Probe | 213301 | AATGGATATTTGTCTCTGTAATGAGCTCAGGCGAAAGGAACTGTGGCTAT |
| for RN7SL5P | | |
| Probe | 213302 | CACCAGTAGCATTACAGACTTCTACTGATCAGCACGGGAGTTTTGACCTG |
| for RN7SL5P | | |
| Probe | 213303 | GGGCCGGTTCACCCCTCCTTAGGCAACCTGGTGGTCCCCCGCTCCCGGGA |
| for RN7SL5P | | |
| Probe | 213304 | GCCGAACTTAGTGCGGACACCCGATCGGCATAGCGCACTACAGCCCAGAA |
| for RN7SL5P | | |
| Probe | 213305 | GATCCTCCAGCCTCAGCCTCCCGAGTAGCTGGGACCACAGGCACGCGCCA |
| for RN7SL5P | | |
| Probe for RPPH1 | 213306 | GGCGGAGGAGAGTAGTCTGAATTGGGTTATGAGGTCCCCTGCGGGGTACC |
| Probe for RPPH1 | 213307 | AACTCACTTCGCTGGCCGTGAGTCTGTTCCAAGCTCCGGCAAAGGAGGCA |
| Probe for RPPH1 | 213308 | CCCGAAGGGCGGGGTCCACGGCATCTCCTGCCCAGTCTGACCTCGCGCGG |
| Probe for RPPH1 | 213309 | GAACTCACCTCCCCGAAGCTCAGGGAGAGCCCTGTTAGGGCCGCCTCTGG |
| Probe for RPPH1 | 213310 | TTCCCAAGGGACATGGGAGTGGAGTGACAGGACGCACTCAGCTCGTGGCC |
| Probe | 213311 | CCCGGAGACCCCGTCTGGGGGTGGGAGTGGCGGGCGGGAAACGGCGACAA |
| for SNORD3A | | |
| Probe | 213312 | TGGGAGAAAACGCAAAAAGAGACAATAGGAGGTGCCACACAGCATCCCCC |
| for SNORD3A | | |
| Probe | 213313 | TAAAATTAAAAAGCCACCCCGAGAAAACCCAAGAGCCGTCACCGCTGAAA |
| for SNORD3A | | |
| Probe | 213314 | TTTCTCGCGACATGCCAAGCAGGAGCGAACAGCCCAGAAACGCCCCGGAG |
| for SNORD3A | | |
| Probe | 213315 | CTGTCATTGAGCCATCAAGAAGGAAAAACCACTCAGACCGCGTTCTCTCC |
| for SNORD3A | | |
| Probe for | 213316 | ACGGAGAGAAGAACGATCATCAATGGCTGACGGCAGTTGCAGCCAAGCAA |
| SNORD3A | | |
| Probe for | 213317 | TTCACGCTCAGGAGAAAACGCTACCTCTCTTCCTCGTGGTTTTCGGTGCT |
| SNORD3A | | |
| Probe for | 213318 | AAACTTCTCTAGTAACACACTATAGAAATGATCCCTGAAAGTATAGTCTT |
| SNORD3A | | |
| (additional probe | | |
| added at start of | | |
| SNORD3A | | |
| transcript) | | |
| Probe for RN7SL1 | 213319 | CTCAGCCTCCCGAGTAGCTGGGACTACAGGCACGCGCCACCGCGCCCGGC |
| and RN7SL2 | | |
| (additional probe | | |
| added at start of | | |
| RN7SL1 and | | |
| RN7SL2 transcript) | | |

Additional Probes

| | | |
|---|---|---|
| 12S_P1 | 213320 | GTTCGTCCAAGTGCACTTTCCAGTACACTTACCATGTTACGACTTGTCTC |
| 12S_P2 | 213321 | TAGGGGTTTTAGTTAAATGTCCTTTGAAGTATACTTGAGGAGGGTGACGG |
| 12S_P3 | 213322 | TTCAGGGCCCTGTTCAACTAAGCACTCTACTCTCAGTTTACTGCTAAATC |
| 12S_P4 | 213323 | AGTTTCATAAGGGCTATCGTAGTTTTCTGGGGTAGAAAATGTAGCCCATT |
| 12S_P5 | 213324 | GGCTACACCTTGACCTAACGTCTTTACGTGGGTACTTGCGCTTACTTTGT |
| 12S_P6 | 213325 | TTGCTGAAGATGGCGGTATATAGGCTGAGCAAGAGGTGGTGAGGTTGATC |
| 12S_P7 | 213326 | CAGAACAGGCTCCTCTAGAGGGATATGAAGCACCGCCAGGTCCTTTGAGT |
| 12S_P8 | 213327 | GTAGTGTTCTGGCGAGCAGTTTTGTTGATTTAACTGTTGAGGTTTAGGGC |
| 12S_P9 | 213328 | ATCTAATCCCAGTTTGGGTCTTAGCTATTGTGTGTTCAGATATGTTAAAG |
| 12S_P10 | 213329 | ATTTTGTGTCAACTGGAGTTTTTTACAACTCAGGTGAGTTTTAGCTTTAT |
| 12S_P11 | 213330 | CTAAAACACTCTTTACGCCGGCTTCTATTGACTTGGGTTAATCGTGTGAC |
| 12S_P12 | 213331 | GAAATTGACCAACCCTGGGGTTAGTATAGCTTAGTTAAACTTTCGTTTAT |
| 12S_P13 | 213332 | ACTGCTGTTTCCCGTGGGGGTGTGGCTAGGCTAAGCGTTTTGAGCTGCAT |
| 12S_P14 | 213333 | GCTTGTCCCTTTTGATCGTGGTGATTTAGAGGGTGAACTCACTGGAACGG |
| 12S_P15 | 213334 | TAATCTTACTAAGAGCTAATAGAAAGGCTAGGACCAAACCTATTTGTTTA |
| 16S_P1 | 213335 | AAACCCTGTTCTTGGGTGGGTGTGGGTATAATACTAAGTTGAGATGATAT |
| 16S_P2 | 213336 | GCGCTTTGTGAAGTAGGCCTTATTTCTCTTGTCCTTTCGTACAGGGAGGA |
| 16S_P3 | 213337 | AAACCGACCTGGATTACTCCGGTCTGAACTCAGATCACGTAGGACTTTAA |
| 16S_P4 | 213338 | ACCTTTAATAGCGGCTGCACCATCGGGATGTCCTGATCCAACATCGAGGT |
| 16S_P5 | 213339 | TGATATGGACTCTAGAATAGGATTGCGCTGTTATCCCTAGGGTAACTTGT |
| 16S_P6 | 213340 | ATTGGATCAATTGAGTATAGTAGTTCGCTTTGACTGGTGAAGTCTTAGCA |
| 16S_P7 | 213341 | TTGGGTTCTGCTCCGAGGTCGCCCCAACCGAAATTTTTAATGCAGGTTTG |
| 16S_P8 | 213342 | TGGGTTTGTTAGGTACTGTTTGCATTAATAAATTAAAGCTCCATAGGGTC |
| 16S_P9 | 213343 | GTCATGCCCGCCTCTTCACGGGCAGGTCAATTTCACTGGTTAAAAGTAAG |
| 16S_P10 | 213344 | CGTGGAGCCATTCATACAGGTCCCTATTTAAGGAACAAGTGATTATGCTA |
| 16S_P11 | 213345 | GGTACCGCGGCCGTTAAACATGTGTCACTGGGCAGGCGGTGCCTCTAATA |
| 16S_P12 | 213346 | GTGATGTTTTTGGTAAACAGGCGGGGTAAGGTTTGCCGAGTTCCTTTTAC |
| 16S_P13 | 213347 | CTTATGAGCATGCCTGTGTTGGGTTGACAGTGAGGGTAATAATGACTTGT |
| 16S_P14 | 213348 | ATTGGGCTGTTAATTGTCAGTTCAGTGTTTTGATCTGACGCAGGCTTATG |
| 16S_P15 | 213349 | TCATGTTACTTATACTAACATTAGTTCTTCTATAGGGTGATAGATTGGTC |
| 16S_P16 | 213350 | AGTTCAGTTATATGTTTGGGATTTTTTAGGTAGTGGGTGTTGAGCTTGAA |
| 16S_P17 | 213351 | TGGCTGCTTTTAGGCCTACTATGGGTGTTAAATTTTTTACTCTCTCTACA |
| 16S_P18 | 213352 | GTCCAAAGAGCTGTTCCTCTTTGGACTAACAGTTAAATTTACAAGGGGAT |
| 16S_P19 | 213353 | GGCAAATTTAAAGTTGAACTAAGATTCTATCTTGGACAACCAGCTATCAC |
| 16S_P20 | 213354 | TGTCGCCTCTACCTATAAATCTTCCCACTATTTTGCTACATAGACGGGTG |
| 16S_P21 | 213355 | TCTTAGGTAGCTCGTCTGGTTTCGGGGGTCTTAGCTTTGGCTCTCCTTGC |
| 16S_P22 | 213356 | TAATTCATTATGCAGAAGGTATAGGGGTTAGTCCTTGCTATATTATGCTT |
| 16S_P23 | 213357 | TCTTTCCCTTGCGGTACTATATCTATTGCGCCAGGTTTCAATTTCTATCG |
| 16S_P24 | 213358 | GGTAAATGGTTTGGCTAAGGTTGTCTGGTAGTAAGGTGGAGTGGGTTTGG |
| 18S_P1 | 213359 | TAATGATCCTTCCGCAGGTTCACCTACGGAAACCTTGTTACGACTTTTAC |
| 18S_P2 | 213360 | AAGTTCGACCGTCTTCTCAGCGCTCCGCCAGGGCCGTGGGCCGACCCCGG |
| 18S_P3 | 213361 | GGCCTCACTAAACCATCCAATCGGTAGTAGCGACGGGCGGTGTGTACAAA |
| 18S_P4 | 213362 | CAACGCAAGCTTATGACCCGCACTTACTCGGGAATTCCCTCGTTCATGGG |
| 18S_P5 | 213363 | CCGATCCCCATCACGAATGGGGTTCAACGGGTTACCCGCGCCTGCCGGCG |
| 18S_P6 | 213364 | CTGAGCCAGTCAGTGTAGCGCGCGTGCAGCCCCGGACATCTAAGGGCATC |
| 18S_P7 | 213365 | CTCAATCTCGGGTGGCTGAACGCCACTTGTCCCTCTAAGAAGTTGGGGGA |
| 18S_P8 | 213366 | GGTCGCGTAACTAGTTAGCATGCCAGAGTCTCGTTCGTTATCGGAATTAA |
| 18S_P9 | 213367 | CACCAACTAAGAACGGCCATGCACCACCACCCACGGAATCGAGAAAGAGC |
| 18S_P10 | 213368 | CCTGTCCGTGTCCGGGCCGGGTGAGGTTTCCCGTGTTGAGTCAAATTAAG |
| 18S_P11 | 213369 | CTGGTGGTGCCCTTCCGTCAATTCCTTTAAGTTTCAGCTTTGCAACCATA |
| 18S_P12 | 213370 | AAAGACTTTGGTTTCCCGGAAGCTGCCCGGCGGGTCATGGGAATAACGCC |
| 18S_P13 | 213371 | GGCATCGTTTATGGTCGGAACTACGACGGTATCTGATCGTCTTCGAACCT |
| 18S_P14 | 213372 | GATTAATGAAAACATTCTTGGCAAATGCTTTCGCTCTGGTCCGTCTTGCG |
| 18S_P15 | 213373 | CACCTCTAGCGGCGCAATACGAATGCCCCCGGCCGTCCCTCTTAATCATG |
| 18S_P16 | 213374 | ACCAACAAAATAGAACCGCGGTCCTATTCCATTATTCCTAGCTGCGGTAT |
| 18S_P17 | 213375 | CTGCTTTGAACACTCTAATTTTTTCAAAGTAAACGCTTCGGGCCCCGCGG |
| 18S_P18 | 213376 | GCATCGAGGGGGCGCCGAGAGGCAAGGGGCGGGGACGGGCGGTGGCTCGC |
| 18S_P19 | 213377 | CCGCCCGCTCCCAAGATCCAACTACGAGCTTTTTAACTGCAGCAACTTTA |
| 18S_P20 | 213378 | GCTGGAATTACCGCGGCTGCTGGCACCAGACTTGCCCTCCAATGGATCCT |
| 18S_P21 | 213379 | AGTGGACTCATTCCAATTACAGGGCCTCGAAAGAGTCCTGTATTGTTATT |
| 18S_P22 | 213380 | CCCGGGTCGGGAGTGGGTAATTTGCGCGCCTGCTGCCTTCCTTGGATGTG |
| 18S_P23 | 213381 | GCTCCCTCTCCGGAATCGAACCCTGATTCCCCGTCACCCGTGGTCACCAT |
| 18S_P24 | 213382 | TACCATCGAAAGTTGATAGGGCAGACGTTCGAATGGGTCGTCGCCGCCAC |
| 18S_P25 | 213383 | GGCCCGAGGTTATCTAGAGTCACCAAAGCCGCCGGCGCCCGCCCCCCGGC |
| 18S_P26 | 213384 | GCTGACCGGGTTGGTTTTGATCTGATAAATGCACGCATCCCCCCCGCGAA |
| 18S_P27 | 213385 | TCGGCATGTATTAGCTCTAGAATTACCACAGTTATCCAAGTAGGAGAGGA |
| 18S_P28 | 213386 | AACCATAACTGATTTAATGAGCCATTCGCAGTTTCACTGTACCGGCCGTG |
| 18S_P29 | 213387 | ATGGCTTAATCTTTGAGACAAGCATATGCTACTGGCAGGATCAACCAGGT |
| 28S_P1 | 213388 | GACAAACCCTTGTGTCGAGGGCTGACTTTCAATAGATCGCAGCGAGGGAG |
| 28S_P2 | 213389 | CGAAACCCCGACCCAGAAGCAGGTCGTCTACGAATGGTTTAGCGCCAGGT |
| 28S_P3 | 213390 | GGTGCGTGACGGGCGAGGGGGCGGCCGCCTTTCCGGCCGCGCCCCGTTTC |
| 28S_P4 | 213391 | CTCCGCACCGGACCCCGGTCCCGGCGCGCGGCGGGGCACGCGCCCTCCCG |
| 28S_P5 | 213392 | AGGGGGGGGCGGCCCGCCGGCGGGGACAGGCGGGGGACCGGCTATCCGAG |
| 28S_P6 | 213393 | GCGGCGCTGCCGTATCGTTCGCCTGGGCGGGATTCTGACTTAGAGGCGTT |
| 28S_P7 | 213394 | AGATGGTAGCTTCGCCCCATTGGCTCCTCAGCCAAGCACATACACCAAAT |
| 28S_P8 | 213395 | TCCTCTCGTACTGAGCAGGATTACCATGGCAACAACACATCATCAGTAGG |
| 28S_P9 | 213396 | CTCACGACGGTCTAAACCCAGCTCACGTTCCCTATTAGTGGGTGAACAAT |
| 28S_P10 | 213397 | TTCTGCTTCACAATGATAGGAAGAGCCGACATCGAAGGATCAAAAAGCGA |
| 28S_P11 | 213398 | TTGGCCGCCACAAGCCAGTTATCCCTGTGGTAACTTTTCTGACACCTCCT |
| 28S_P12 | 213399 | GGTCAGAAGGATCGTGAGGCCCCGCTTTCACGGTCTGTATTCGTACTGAA |
| 28S_P13 | 213400 | AGCTTTTGCCCTTCTGCTCCACGGGAGGTTTCTGTCCTCCCTGAGCTCGC |
| 28S_P14 | 213401 | TTACCGTTTGACAGGTGTACCGCCCCAGTCAAACTCCCCACCTGGCACTG |
| 28S_P15 | 213402 | GCGCCCGGCCGGGCGGGCGCTTGGCGCCAGAAGCGAGAGCCCCTCGGGCT |
| 28S_P16 | 213403 | CCGGGTCAGTGAAAAAACGATCAGAGTAGTGGTATTTCACCGGCGGCCCG |
| 28S_P17 | 213404 | CGCCCCGGGCCCCTCGCGGGGACACCGGGGGGGCGCCGGGGGCCTCCCAC |
| 28S_P18 | 213405 | CATGTCTCTTCACCGTGCCAGACTAGAGTCAAGCTCAACAGGGTCTTCTT |
| 28S_P19 | 213406 | CCAAGCCCGTTCCCTTGGCTGTGGTTTCGCTGGATAGTAGGTAGGGACAG |
| 28S_P20 | 213407 | TCCATTCATGCGCGTCACTAATTAGATGACGAGGCATTTGGCTACCTTAA |
| 28S_P21 | 213408 | TCCCGCCGTTTACCCGCGCTTCATTGAATTTCTTCACTTTGACATTCAGA |
| 28S_P22 | 213409 | CACATCGCGTCAACACCCGCCGCGGGCCTTCGCGATGCTTTGTTTTAATT |
| 28S_P23 | 213410 | CCTGGTCCGCACCAGTTCTAAGTCGGCTGCTAGGCGCCGGCCGAGGCGAG |
| 28S_P24 | 213411 | CGGCCCCGGGGGGGGACCCGGCGGGGGGGACCGGCCCGCGGCCCCTCCGC |
| 28S_P25 | 213412 | CCGCCGCGCGCCGAGGAGGAGGGGGGAACGGGGGGCGGACGGGGCCGGGG |
| 28S_P26 | 213413 | ACGAACCGCCCCGCCCCGCCGCCCGCCGACCGCCGCCGCCCGACCGCTCC |
| 28S_P27 | 213414 | CGCGCGCGACCGAGACGTGGGGTGGGGGTGGGGGGCGCGCCGCGCCGCCG |
| 28S_P28 | 213415 | GCGGCCGCGACGCCCGCCGCAGCTGGGGCGATCCACGGGAAGGGCCCGGC |
| 28S_P29 | 213416 | GCGCCGCCGCCGGCCCCCCGGGTCCCCGGGGCCCCCCTCGCGGGGACCTG |
| 28S_P30 | 213417 | CCGGCGGCCGCCGCGCGGCCCCTGCCGCCCCGACCCTTCTCCCCCCGCCG |
| 28S_P31 | 213418 | CTCCCCCGGGGAGGGGGGAGGACGGGGAGCGGGGGAGAGAGAGAGAGAGA |
| 28S_P32 | 213419 | AGGGAGCGAGCGGCGCGCGCGGGTGGGGCGGGGGAGGGCCGCGAGGGGGG |
| 28S_P33 | 213420 | GGGGGCGCGCGCCTCGTCCAGCCGCGGCGCGCGCCCAGCCCCGCTTCGCG |
| 28S_P34 | 213421 | CCCAGCCCTTAGAGCCAATCCTTATCCCGAAGTTACGGATCCGGCTTGCC |
| 28S_P35 | 213422 | CATTGTTCCAACATGCCAGAGGCTGTTCACCTTGGAGACCTGCTGCGGAT |
| 28S_P36 | 213423 | CGCGAGATTTACACCCTCTCCCCCGGATTTTCAAGGGCCAGCGAGAGCTC |
| 28S_P37 | 213424 | AACCGCGACGCTTTCCAAGGCACGGGCCCCTCTCTCGGGGCGAACCCATT |
| 28S_P38 | 213425 | CTTCACAAAGAAAAGAGAACTCTCCCCGGGGCTCCCGCCGGCTTCTCCGG |
| 28S_P39 | 213426 | CGCACTGGACGCCTCGCGGCGCCCATCTCCGCCACTCCGGATTCGGGGAT |
| 28S_P40 | 213427 | TTTCGATCGGCCGAGGGCAACGGAGGCCATCGCCCGTCCCTTCGGAACGG |
| 28S_P41 | 213428 | CAGGACCGACTGACCCATGTTCAACTGCTGTTCACATGGAACCCTTCTCC |
| 28S_P42 | 213429 | GTTCTCGTTTGAATATTTGCTACTACCACCAAGATCTGCACCTGCGGCGG |
| 28S_P43 | 213430 | CGCCCTAGGCTTCAAGGCTCACCGCAGCGGCCCTCCTACTCGTCGCGGCG |
| 28S_P44 | 213431 | TCCGGGGGCGGGGAGCGGGGCGTGGGCGGGAGGAGGGGAGGAGGCGTGGG |
| 28S_P45 | 213432 | AGGACCCCACACCCCCGCCGCCGCCGCCGCCGCCGCCCTCCGACGCACAC |
| 28S_P46 | 213433 | GCGCGCCGCCCCCGCCGCTCCCGTCCACTCTCGACTGCCGGCGACGGCCG |
| 28S_P47 | 213434 | CTCCAGCGCCATCCATTTTCAGGGCTAGTTGATTCGGCAGGTGAGTTGTT |
| 28S_P48 | 213435 | GATTCCGACTTCCATGGCCACCGTCCTGCTGTCTATATCAACCAACACCT |
| 28S_P49 | 213436 | GAGCGTCGGCATCGGGCGCCTTAACCCGGCGTTCGGTTCATCCCGCAGCG |
| 28S_P50 | 213437 | AAAAGTGGCCCACTAGGCACTCGCATTCCACGCCCGGCTCCACGCCAGCG |
| 28S_P51 | 213438 | CCATTTAAAGTTTGAGAATAGGTTGAGATCGTTTCGGCCCCAAGACCTCT |
| 28S_P52 | 213439 | CGGATAAAACTGCGTGGCGGGGGTGCGTCGGGTCTGCGAGAGCGCCAGCT |
| 28S_P53 | 213440 | TCGGAGGGAACCAGCTACTAGATGGTTCGATTAGTCTTTCGCCCCTATAC |
| 28S_P54 | 213441 | GATTTGCACGTCAGGACCGCTACGGACCTCCACCAGAGTTTCCTCTGGCT |
| 28S_P55 | 213442 | ATAGTTCACCATCTTTCGGGTCCTAACACGTGCGCTCGTGCTCCACCTCC |
| 28S_P56 | 213443 | AGACGGGCCGGTGGTGCGCCCTCGGCGGACTGGAGAGGCCTCGGGATCCC |
| 28S_P57 | 213444 | CGCGCCGGCCTTCACCTTCATTGCGCCACGGCGGCTTTCGTGCGAGCCCC |
| 28S_P58 | 213445 | TTAGACTCCTTGGTCCGTGTTTCAAGACGGGTCGGGTGGGTAGCCGACGT |
| 28S_P59 | 213446 | GCGCTCGCTCCGCCGTCCCCCTCTTCGGGGGACGCGCGCGTGGCCCCGAG |
| 28S_P60 | 213447 | CCCGACGGCGCGACCCGCCCGGGGCGCACTGGGGACAGTCCGCCCCGCCC |
| 28S_P61 | 213448 | GCACCCCCCCCGTCGCCGGGGCGGGGGCGCGGGGAGGAGGGGTGGGAGAG |
| 28S_P62 | 213449 | AGGGGTGGCCCGGCCCCCCCACGAGGAGACGCCGGCGCGCCCCCGCGGGG |
| 28S_P63 | 213450 | GGGGATTCCCCGCGGGGGTGGGCGCCGGGAGGGGGGAGAGCGCGGCGACG |
| 28S_P64 | 213451 | GCCCCGGGATTCGGCGAGTGCTGCTGCCGGGGGGGCTGTAACACTCGGGG |
| 28S_P65 | 213452 | CCGCCCCCGCCGCCGCCGCCACCGCCGCCGCCGCCGCCGCCCCGACCCGC |
| 28S_P66 | 213453 | AGGACGCGGGGCCGGGGGGCGGAGACGGGGGAGGAGGAGGACGGACGGAC |
| 28S_P67 | 213454 | AGCCACCTTCCCCGCCGGGCCTTCCCAGCCGTCCCGGAGCCGGTCGCGGC |
| 28S_P68 | 213455 | AAATGCGCCCGGCGGCGGCCGGTCGCCGGTCGGGGGACGGTCCCCCGCCG |
| 28S_P69 | 213456 | CCGCCCGCCCACCCCCGCACCCGCCGGAGCCCGCCCCCTCCGGGGAGGAG |
| 28S_P70 | 213457 | GGGAAGGGAGGGCGGGTGGAGGGGTCGGGAGGAACGGGGGGCGGGAAAGA |
| 28S_P71 | 213458 | ACACGGCCGGACCCGCCGCCGGGTTGAATCCTCCGGGCGGACTGCGCGGA |
| 28S_P72 | 213459 | TCTTAACGGTTTCACGCCCTCTTGAACTCTCTCTTCAAAGTTCTTTTCAA |
| 28S_P73 | 213460 | CTTGTTGACTATCGGTCTCGTGCCGGTATTTAGCCTTAGATGGAGTTTAC |
| 28S_P74 | 213461 | GCATTCCCAAGCAACCCGACTCCGGGAAGACCCGGGCGCGCGCCGGCCGC |
| 28S_P75 | 213462 | GTCCACGGGCTGGGCCTCGATCAGAAGGACTTGGGCCCCCCACGAGCGGC |
| 28S_P76 | 213463 | TTCCGTACGCCACATGTCCCGCGCCCCGCGGGGCGGGGATTCGGCGCTGG |
| 28S_P77 | 213464 | CTCGCCGTTACTGAGGGAATCCTGGTTAGTTTCTTTTCCTCCGCTGACTA |
| 28S_P78 | 213465 | GCGGGTCGCCACGTCTGATCTGAGGTCGCGTCTCGGAGGGGGACGGGCCG |
| 5.8S_P1 | 213466 | AAGCGACGCTCAGACAGGCGTAGCCCCGGGAGGAACCCGGGGCCGCAAGT |
| 5.8S_P3 | 213467 | GCAGCTAGCTGCGTTCTTCATCGACGCACGAGCCGAGTGATCCACCGCTA |
| 5S_P1 | 213468 | AAAGCCTACAGCACCCGGTATTCCCAGGCGGTCTCCCATCCAAGTACTAA |
| 5S_P3 | 213469 | TTCCGAGATCAGACGAGATCGGGCGCGTTCAGGGTGGTATGGCCGTAGAC |
| HBA1_P1 | 213470 | GCCGCCCACTCAGACTTTATTCAAAGACCACGGGGGTACGGGTGCAGGAA |
| HBA1_P2 | 213471 | GGGGGAGGCCCAAGGGGCAAGAAGCATGGCCACCGAGGCTCCAGCTTAAC |
| HBA1_P3 | 213472 | GCACGGTGCTCACAGAAGCCAGGAACTTGTCCAGGGAGGCGTGCACCGCA |
| HBA1_P4 | 213473 | GGGAGGTGGGCGGCCAGGGTCACCAGCAGGCAGTGGCTTAGGAGCTTGAA |
| HBA1_P5 | 213474 | CCGAAGCTTGTGCGCGTGCAGGTCGCTCAGGGCGGACAGCGCGTTGGGCA |
| HBA1_P6 | 213475 | CCACGGCGTTGGTCAGCGCGTCGGCCACCTTCTTGCCGTGGCCCTTAACC |
| HBA1_P7 | 213476 | CTCAGGTCGAAGTGCGGGAAGTAGGTCTTGGTGGTGGGGAAGGACAGGAA |
| HBA1_P8 | 213477 | CTCCGCACCATACTCGCCAGCGTGCGCGCCGACCTTACCCCAGGCGGCCT |
| HBA1_P9 | 213478 | CGGCAGGAGACAGCACCATGGTGGGTTCTCTCTGAGTCTGTGGGGACCAG |
| HBA2_P1 | 213479 | GAGGGGAGGAGGGCCCGTTGGGAGGCCCAGCGGGCAGGAGGAACGGCTAC |
| HBA2_P2 | 213480 | ACGGTATTTGGAGGTCAGCACGGTGCTCACAGAAGCCAGGAACTTGTCCA |
| HBA2_P3 | 213481 | CAGGGGTGAACTCGGCGGGGAGGTGGGCGGCCAGGGTCACCAGCAGGCAG |
| HBA2_P4 | 213482 | AAGTTGACCGGGTCCACCCGAAGCTTGTGCGCGTGCAGGTCGCTCAGGGC |
| HBA2_P5 | 213483 | CATGTCGTCCACGTGCGCCACGGCGTTGGTCAGCGCGTCGGCCACCTTCT |
| HBA2_P6 | 213484 | CCTGGGCAGAGCCGTGGCTCAGGTCGAAGTGCGGGAAGTAGGTCTTGGTG |
| HBA2_P7 | 213485 | AACATCCTCTCCAGGGCCTCCGCACCATACTCGCCAGCGTGCGCGCCGAC |
| HBA2_P8 | 213486 | CTTGACGTTGGTCTTGTCGGCAGGAGACAGCACCATGGTGGGTTCTCTCT |
| HBB_P1 | 213487 | GCAATGAAAATAAATGTTTTTTATTAGGCAGAATCCAGATGCTCAAGGCC |
| HBB_P2 | 213488 | CAGTTTAGTAGTTGGACTTAGGGAACAAAGGAACCTTTAATAGAAATTGG |
| HBB_P3 | 213489 | GCTTAGTGATACTTGTGGGCCAGGGCATTAGCCACACCAGCCACCACTTT |
| HBB_P4 | 213490 | CACTGGTGGGGTGAATTCTTTGCCAAAGTGATGGGCCAGCACACAGACCA |
| HBB_P5 | 213491 | GCCTGAAGTTCTCAGGATCCACGTGCAGCTTGTCACAGTGCAGCTCACTC |
| HBB_P6 | 213492 | CCCTTGAGGTTGTCCAGGTGAGCCAGGCCATCACTAAAGGCACCGAGCAC |
| HBB_P7 | 213493 | CTTCACCTTAGGGTTGCCCATAACAGCATCAGGAGTGGACAGATCCCCAA |
| HBB_P8 | 213494 | TCTGGGTCCAAGGGTAGACCACCAGCAGCCTGCCCAGGGCCTCACCACCA |
| HBB_P9 | 213495 | ACCTTGCCCCACAGGGCAGTAACGGCAGACTTCTCCTCAGGAGTCAGATG |
| HBG1_P1 | 213496 | GTGATCTCTCAGCAGAATAGATTTATTATTTGTATTGCTTGCAGAATAAA |
| HBG1_P2 | 213497 | CTCTGAATCATGGGCAGTGAGCTCAGTGGTATCTGGAGGACAGGGCACTG |
| HBG1_P3 | 213498 | ATCTTCTGCCAGGAAGCCTGCACCTCAGGGGTGAATTCTTTGCCGAAATG |
| HBG1_P4 | 213499 | CACCAGCACATTTCCCAGGAGCTTGAAGTTCTCAGGATCCACATGCAGCT |
| HBG1_P5 | 213500 | CACTCAGCTGGGCAAAGGTGCCCTTGAGATCATCCAGGTGCTTTGTGGCA |
| HBG1_P6 | 213501 | AGCACCTTCTTGCCATGTGCCTTGACTTTGGGGTTGCCCATGATGGCAGA |
| HBG1_P7 | 213502 | GCCAAAGCTGTCAAAGAACCTCTGGGTCCATGGGTAGACAACCAGGAGCC |
| HBG1_P8 | 213503 | CTCCAGCATCTTCCACATTCACCTTGCCCCACAGGCTTGTGATAGTAGCC |
| HBG1_P9 | 213504 | AAATGACCCATGGCGTCTGGACTAGGAGCTTATTGATAACCTCAGACGTT |
| HBG2_P1 | 213505 | GTGATCTCTTAGCAGAATAGATTTATTATTTGATTGCTTGCAGAATAAAG |
| HBG2_P2 | 213506 | TCTGCATCATGGGCAGTGAGCTCAGTGGTATCTGGAGGACAGGGCACTGG |
| HBG2_P3 | 213507 | TCTTCTGCCAGGAAGCCTGCACCTCAGGGGTGAATTCTTTGCCGAAATGG |
| HBG2_P4 | 213508 | ACCAGCACATTTCCCAGGAGCTTGAAGTTCTCAGGATCCACATGCAGCTT |
| HBG2_P5 | 213509 | ACTCAGCTGGGCAAAGGTGCCCTTGAGATCATCCAGGTGCTTTATGGCAT |
| HBG2_P6 | 213510 | GCACCTTCTTGCCATGTGCCTTGACTTTGGGGTTGCCCATGATGGCAGAG |
| HBG2_P7 | 213511 | CCAAAGCTGTCAAAGAACCTCTGGGTCCATGGGTAGACAACCAGGAGCCT |
| HBG2_P8 | 213512 | TCCAGCATCTTCCACATTCACCTTGCCCCACAGGCTTGTGATAGTAGCCT |
| HBG2_P9 | 213513 | AATGACCCATGGCGTCTGGACTAGGAGCTTATTGATAACCTCAGACGTTC |
| 5S_GNbac_P1 | 213514 | ATGCCTGGCAGTTCCCTACTCTCGCATGGGGAGACCCCACACTACCATCG |
| 5S_GNbac_P2 | 213515 | ACTTCTGAGTTCGGCATGGGGTCAGGTGGGACCACCGCGCTACGGCCGCC |
| 16S_GNbac_P1 | 213516 | GGTTACCTTGTTACGACTTCACCCCAGTCATGAATCACAAAGTGGTAAGT |
| 16S_GNbac_P2 | 213517 | AAGCTACCTACTTCTTTTGCAACCCACTCCCATGGTGTGACGGGCGGTGT |
| 16S_GNbac_P3 | 213518 | ACGTATTCACCGTGGCATTCTGATCCACGATTACTAGCGATTCCGACTTC |
| 16S_GNbac_P4 | 213519 | AGACTCCAATCCGGACTACGACGCACTTTATGAGGTCCGCTTGCTCTCGC |
| 16S_GNbac_P5 | 213520 | TGTATGCGCCATTGTAGCACGTGTGTAGCCCTGGTCGTAAGGGCCATGAT |
| 16S_GNbac_P6 | 213521 | CCACCTTCCTCCAGTTTATCACTGGCAGTCTCCTTTGAGTTCCCGGCCGG |
| 16S_GNbac_P7 | 213522 | GGATAAGGGTTGCGCTCGTTGCGGGACTTAACCCAACATTTCACAACACG |
| 16S_GNbac_P8 | 213523 | TGCAGCACCTGTCTCACGGTTCCCGAAGGCACATTCTCATCTCTGAAAAC |
| 16S_GNbac_P9 | 213524 | GACCAGGTAAGGTTCTTCGCGTTGCATCGAATTAAACCACATGCTCCACC |
| 16S_GNbac_P10 | 213525 | CGTCAATTCATTTGAGTTTTAACCTTGCGGCCGTACTCCCCAGGCGGTCG |
| 16S_GNbac_P11 | 213526 | TCCGGAAGCCACGCCTCAAGGGCACAACCTCCAAGTCGACATCGTTTACG |
| 16S_GNbac_P12 | 213527 | GTATCTAATCCTGTTTGCTCCCCACGCTTTCGCACTGAGCGTCAGTCTTC |
| 16S_GNbac_P13 | 213528 | TTCGCCACCGGTATTCCTCCAGATCTCTACGCATTTCACCGCTACACCTG |
| 16S_GNbac_P14 | 213529 | CTACGAGACTCAAGCTTGCCAGTATCAGATGCAGTTCCCAGGTTGAGCCC |
| 16S_GNbac_P15 | 213530 | GACTTAACAAACCGCCTGCGTGCGCTTTACGCCCAGTAATTCCGATTAAC |
| 16S_GNbac_P16 | 213531 | ATTACCGCGGCTGCTGGCACGGAGTTAGCCGGTGCTTCTTCTGCGGGTAA |
| 16S_GNbac_P17 | 213532 | GTATTAACTTTACTCCCTTCCTCCCCGCTGAAAGTACTTTACAACCCGAA |
| 16S_GNbac_P18 | 213533 | CGCGGCATGGCTGCATCAGGCTTGCGCCCATTGTGCAGTATTCCCCACTG |
| 16S_GNbac_P19 | 213534 | GTCTGGACCGTGTCTCAGTTCCAGTGTGGCTGGTCATCCTCTCAGACCAG |
| 16S_GNbac_P20 | 213535 | TAGGTGAGCCGTTACCCCACCTACTAGCTAATCCCATCTGGGCACATCCG |
| 16S_GNbac_P21 | 213536 | AAGGTCCCCCTCTTTGGTCTTGCGACGTTATGCGGTATTAGCTACCGTTT |
| 16S_GNbac_P22 | 213537 | CTCCATCAGGCAGTTTCCCAGACATTACTCACCCGTCCGCCACTCGTCAG |
| 23S_GNbac_P1 | 213538 | AAGGTTAAGCCTCACGGTTCATTAGTACCGGTTAGCTCAACGCATCGCTG |
| 23S_GNbac_P2 | 213539 | CCTATCAACGTCGTCGTCTTCAACGTTCCTTCAGGACCCTTAAAGGGTCA |
| 23S_GNbac_P3 | 213540 | GGGGCAAGTTTCGTGCTTAGATGCTTTCAGCACTTATCTCTTCCGCATTT |
| 23S_GNbac_P4 | 213541 | CCATTGGCATGACAACCCGAACACCAGTGATGCGTCCACTCCGGTCCTCT |
| 23S_GNbac_P5 | 213542 | CCCCCTCAGTTCTCCAGCGCCCACGGCAGATAGGGACCGAACTGTCTCAC |
| 23S_GNbac_P6 | 213543 | GCTCGCGTACCACTTTAAATGGCGAACAGCCATACCCTTGGGACCTACTT |
| 23S_GNbac_P7 | 213544 | ATGAGCCGACATCGAGGTGCCAAACACCGCCGTCGATATGAACTCTTGGG |
| 23S_GNbac_P8 | 213545 | ATCCCCGGAGTACCTTTTATCCGTTGAGCGATGGCCCTTCCATTCAGAAC |
| 23S_GNbac_P9 | 213546 | ACCTGCTTTCGCACCTGCTCGCGCCGTCACGCTCGCAGTCAAGCTGGCTT |
| 23S_GNbac_P10 | 213547 | CCTCCTGATGTCCGACCAGGATTAGCCAACCTTCGTGCTCCTCCGTTACT |
| 23S_GNbac_P11 | 213548 | GCCCCAGTCAAACTACCCACCAGACACTGTCCGCAACCCGGATTACGGGT |
| 23S_GNbac_P12 | 213549 | AAACATTAAAGGGTGGTATTTCAAGGTCGGCTCCATGCAGACTGGCGTCC |
| 23S_GNbac_P13 | 213550 | CCACCTATCCTACACATCAAGGCTCAATGTTCAGTGTCAAGCTATAGTAA |
| 23S_GNbac_P14 | 213551 | TTCCGTCTTGCCGCGGGTACACTGCATCTTCACAGCGAGTTCAATTTCAC |
| 23S_GNbac_P15 | 213552 | GACAGCCTGGCCATCATTACGCCATTCGTGCAGGTCGGAACTTACCCGAC |
| 23S_GNbac_P16 | 213553 | CTTAGGACCGTTATAGTTACGGCCGCCGTTTACCGGGGCTTCGATCAAGA |
| 23S_GNbac_P17 | 213554 | ACCCCATCAATTAACCTTCCGGCACCGGGCAGGCGTCACACCGTATACGT |
| 23S_GNbac_P18 | 213555 | CACAGTGCTGTGTTTTTAATAAACAGTTGCAGCCAGCTGGTATCTTCGAC |
| 23S_GNbac_P19 | 213556 | CCGCGAGGGACCTCACCTACATATCAGCGTGCCTTCTCCCGAAGTTACGG |
| 23S_GNbac_P20 | 213557 | TTCCTTCACCCGAGTTCTCTCAAGCGCCTTGGTATTCTCTACCTGACCAC |
| 23S_GNbac_P21 | 213558 | GTACGATTTGATGTTACCTGATGCTTAGAGGCTTTTCCTGGAAGCAGGGC |
| 23S_GNbac_P22 | 213559 | ACCGTAGTGCCTCGTCATCACGCCTCAGCCTTGATTTTCCGGATTTGCCT |
| 23S_GNbac_P23 | 213560 | ACGCTTAAACCGGGACAACCGTCGCCCGGCCAACATAGCCTTCTCCGTCC |
| 23S_GNbac_P24 | 213561 | ACCAAGTACAGGAATATTAACCTGTTTCCCATCGACTACGCCTTTCGGCC |
| 23S_GNbac_P25 | 213562 | ACTCACCCTGCCCCGATTAACGTTGGACAGGAACCCTTGGTCTTCCGGCG |
| 23S_GNbac_P26 | 213563 | CGCTTTATCGTTACTTATGTCAGCATTCGCACTTCTGATACCTCCAGCAT |
| 23S_GNbac_P27 | 213564 | TTCGCAGGCTTACAGAACGCTCCCCTACCCAACAACGCATAAGCGTCGCT |
| 23S_GNbac_P28 | 213565 | CATGGTTTAGCCCCGTTACATCTTCCGCGCAGGCCGACTCGACCAGTGAG |
| 23S_GNbac_P29 | 213566 | TAAATGATGGCTGCTTCTAAGCCAACATCCTGGCTGTCTGGGCCTTCCCA |
| 23S_GNbac_P30 | 213567 | AACCATGACTTTGGGACCTTAGCTGGCGGTCTGGGTTGTTTCCCTCTTCA |
| 23S_GNbac_P31 | 213568 | CCCGCCGTGTGTCTCCCGTGATAACATTCTCCGGTATTCGCAGTTTGCAT |
| 23S_GNbac_P32 | 213569 | GGATGACCCCCTTGCCGAAACAGTGCTCTACCCCCGGAGATGAATTCACG |
| 23S_GNbac_P33 | 213570 | AGCTTTCGGGGAGAACCAGCTATCTCCCGGTTTGATTGGCCTTTCACCCC |
| 23S_GNbac_P34 | 213571 | CGCTAATTTTTCAACATTAGTCGGTTCGGTCCTCCAGTTAGTGTTACCCA |
| 23S_GNbac_P35 | 213572 | ATGGCTAGATCACCGGGTTTCGGGTCTATACCCTGCAACTTAACGCCCAG |
| 23S_GNbac_P36 | 213573 | CCTTCGGCTCCCCTATTCGGTTAACCTTGCTACAGAATATAAGTCGCTGA |
| 23S_GNbac_P37 | 213574 | GTACGCAGTCACACGCCTAAGCGTGCTCCCACTGCTTGTACGTACACGGT |
| 23S_GNbac_P38 | 213575 | ACTCCCCTCGCCGGGGTTCTTTTCGCCTTTCCCTCACGGTACTGGTTCAC |
| 23S_GNbac_P39 | 213576 | AGTATTTAGCCTTGGAGGATGGTCCCCCCATATTCAGACAGGATACCACG |
| 23S_GNbac_P40 | 213577 | ATCGAGCTCACAGCATGTGCATTTTTGTGTACGGGGCTGTCACCCTGTAT |
| 23S_GNbac_P41 | 213578 | ACGCTTCCACTAACACACACACTGATTCAGGCTCTGGGCTGCTCCCCGTT |
| 23S_GNbac_P42 | 213579 | GGGGAATCTCGGTTGATTTCTTTTCCTCGGGGTACTTAGATGTTTCAGTT |
| 23S_GNbac_P43 | 213580 | ATTAACCTATGGATTCAGTTAATGATAGTGTGTCGAAACACACTGGGTTT |
| 23S_GNbac_P44 | 213581 | GCCGGTTATAACGGTTCATATCACCTTACCGACGCTTATCGCAGATTAGC |
| 5S_GPbac_P1 | 213582 | GCTTGGCGGCGTCCTACTCTCACAGGGGGAAACCCCCGACTACCATCGGC |
| 5S_GPbac_P2 | 213583 | TTCCGTGTTCGGTATGGGAACGGGTGTGACCTCTTCGCTATCGCCACCAA |
| 16S_GPbac_P1 | 213584 | TAGAAAGGAGGTGATCCAGCCGCACCTTCCGATACGGCTACCTTGTTACG |
| 16S_GPbac_P2 | 213585 | TCTGTCCCACCTTCGGCGGCTGGCTCCTAAAAGGTTACCTCACCGACTTC |
| 16S_GPbac_P3 | 213586 | TCGTGGTGTGACGGGCGGTGTGTACAAGGCCCGGGAACGTATTCACCGCG |
| 16S_GPbac_P4 | 213587 | ATTACTAGCGATTCCAGCTTCACGCAGTCGAGTTGCAGACTGCGATCCGA |
| 16S_GPbac_P5 | 213588 | GTGGGATTGGCTTAACCTCGCGGTTTCGCTGCCCTTTGTTCTGTCCATTG |
| 16S_GPbac_P6 | 213589 | CCAGGTCATAAGGGGCATGATGATTTGACGTCATCCCCACCTTCCTCCGG |
| 16S_GPbac_P7 | 213590 | CACCTTAGAGTGCCCAACTGAATGCTGGCAACTAAGATCAAGGGTTGCGC |
| 16S_GPbac_P8 | 213591 | ACCCAACATCTCACGACACGAGCTGACGACAACCATGCACCACCTGTCAC |
| 16S_GPbac_P9 | 213592 | GACGTCCTATCTCTAGGATTGTCAGAGGATGTCAAGACCTGGTAAGGTTC |
| 16S_GPbac_P10 | 213593 | ATTAAACCACATGCTCCACCGCTTGTGCGGGCCCCCGTCAATTCCTTTGA |
| 16S_GPbac_P11 | 213594 | CCGTACTCCCCAGGCGGAGTGCTTAATGCGTTAGCTGCAGCACTAAGGGG |
| 16S_GPbac_P12 | 213595 | ACTTAGCACTCATCGTTTACGGCGTGGACTACCAGGGTATCTAATCCTGT |
| 16S_GPbac_P13 | 213596 | TCGCTCCTCAGCGTCAGTTACAGACCAGAGAGTCGCCTTCGCCACTGGTG |
| 16S_GPbac_P14 | 213597 | ACGCATTTCACCGCTACACGTGGAATTCCACTCTCCTCTTCTGCACTCAA |
| 16S_GPbac_P15 | 213598 | ATGACCCTCCCCGGTTGAGCCGGGGGCTTTCACATCAGACTTAAGAAACC |
| 16S_GPbac_P16 | 213599 | ACGCCCAATAATTCCGGACAACGCTTGCCACCTACGTATTACCGCGGCTG |
| 16S_GPbac_P17 | 213600 | CCGTGGCTTTCTGGTTAGGTACCGTCAAGGTACCGCCCTATTCGAACGGT |
| 16S_GPbac_P18 | 213601 | ACAACAGAGCTTTACGATCCGAAAACCTTCATCACTCACGCGGCGTTGCT |
| 16S_GPbac_P19 | 213602 | CCATTGCGGAAGATTCCCTACTGCTGCCTCCCGTAGGAGTCTGGGCCGTG |
| 16S_GPbac_P20 | 213603 | GGCCGATCACCCTCTCAGGTCGGCTACGCATCGTCGCCTTGGTGAGCCGT |
| 16S_GPbac_P21 | 213604 | CTAATGCGCCGCGGGTCCATCTGTAAGTGGTAGCCGAAGCCACCTTTTAT |
| 16S_GPbac_P22 | 213605 | TTCAAACAACCATCCGGTATTAGCCCCGGTTTCCCGGAGTTATCCCAGTC |
| 16S_GPbac_P23 | 213606 | CCACGTGTTACTCACCCGTCCGCCGCTAACATCAGGGAGCAAGCTCCCAT |
| 16S_GPbac_P24 | 213607 | GCATGTATTAGGCACGCCGCCAGCGTTCGTCCTGAGCCAGGATCAAACTC |
| 23S_GPbac_P1 | 213608 | TGGTTAAGTCCTCGATCGATTAGTATCTGTCAGCTCCATGTGTCGCCACA |
| 23S_GPbac_P2 | 213609 | TATCAACCTGATCATCTTTCAGGGATCTTACTTCCTTGCGGAATGGGAAA |
| 23S_GPbac_P3 | 213610 | GGCTTCATGCTTAGATGCTTTCAGCACTTATCCCGTCCGCACATAGCTAC |
| 23S_GPbac_P4 | 213611 | GCAGAACAACTGGTACACCAGCGGTGCGTCCATCCCGGTCCTCTCGTACT |
| 23S_GPbac_P5 | 213612 | CAAATTTCCTGCGCCCGCGACGGATAGGGACCGAACTGTCTCACGACGTT |
| 23S_GPbac_P6 | 213613 | GTACCGCTTTAATGGGCGAACAGCCCAACCCTTGGGACTGACTACAGCCC |
| 23S_GPbac_P7 | 213614 | CGACATCGAGGTGCCAAACCTCCCCGTCGATGTGGACTCTTGGGGGAGAT |
| 23S_GPbac_P8 | 213615 | GGGGTAGCTTTTATCCGTTGAGCGATGGCCCTTCCATGCGGAACCACCGG |
| 23S_GPbac_P9 | 213616 | TTTCGTCCCTGCTCGACTTGTAGGTCTCGCAGTCAAGCTCCCTTGTGCCT |
| 23S_GPbac_P10 | 213617 | GATTTCCAACCATTCTGAGGGAACCTTTGGGCGCCTCCGTTACCTTTTAG |
| 23S_GPbac_P11 | 213618 | GTCAAACTGCCCACCTGACACTGTCTCCCCGCCCGATAAGGGCGGCGGGT |
| 23S_GPbac_P12 | 213619 | GCCAGGGTAGTATCCCACCGATGCCTCCACCGAAGCTGGCGCTCCGGTTT |
| 23S_GPbac_P13 | 213620 | ATCCTGTACAAGCTGTACCAACATTCAATATCAGGCTGCAGTAAAGCTCC |
| 23S_GPbac_P14 | 213621 | CCTGTCGCGGGTAACCTGCATCTTCACAGGTACTATAATTTCACCGAGTC |
| 23S_GPbac_P15 | 213622 | GCCCAGATCGTTGCGCCTTTCGTGCGGGTCGGAACTTACCCGACAAGGAA |
| 23S_GPbac_P16 | 213623 | ACCGTTATAGTTACGGCCGCCGTTTACTGGGGCTTCAATTCGCACCTTCG |
| 23S_GPbac_P17 | 213624 | CCTCTTAACCTTCCAGCACCGGGCAGGCGTCAGCCCCTATACTTCGCCTT |
| 23S_GPbac_P18 | 213625 | CCTGTGTTTTTGCTAAACAGTCGCCTGGGCCTATTCACTGCGGCTCTCTC |
| 23S_GPbac_P19 | 213626 | CAGAGCACCCCTTCTCCCGAAGTTACGGGGTCATTTTGCCGAGTTCCTTA |
| 23S_GPbac_P20 | 213627 | ATCACCTTAGGATTCTCTCCTCGCCTACCTGTGTCGGTTTGCGGTACGGG |
| 23S_GPbac_P21 | 213628 | TAGAGGCTTTTCTTGGCAGTGTGGAATCAGGAACTTCGCTACTATATTTC |
| 23S_GPbac_P22 | 213629 | TCAGCCTTATGGGAAACGGATTTGCCTATTTCCCAGCCTAACTGCTTGGA |
| 23S_GPbac_P23 | 213630 | CCGCGCTTACCCTATCCTCCTGCGTCCCCCCATTGCTCAAATGGTGAGGA |
| 23S_GPbac_P24 | 213631 | TCAACCTGTTGTCCATCGCCTACGCCTTTCGGCCTCGGCTTAGGTCCCGA |
| 23S_GPbac_P25 | 213632 | CGAGCCTTCCTCAGGAAACCTTAGGCATTCGGTGGAGGGGATTCTCACCC |
| 23S_GPbac_P26 | 213633 | TACCGGCATTCTCACTTCTAAGCGCTCCACCAGTCCTTCCGGTCTGGCTT |
| 23S_GPbac_P27 | 213634 | GCTCTCCTACCACTGTTCGAAGAACAGTCCGCAGCTTCGGTGATACGTTT |
| 23S_GPbac_P28 | 213635 | TCGGCGCAGAGTCACTCGACCAGTGAGCTATTACGCACTCTTTAAATGGT |
| 23S_GPbac_P29 | 213636 | AACATCCTGGTTGTCTAAGCAACTCCACATCCTTTTCCACTTAACGTATA |
| 23S_GPbac_P30 | 213637 | TGGCGGTCTGGGCTGTTTCCCTTTCGACTACGGATCTTATCACTCGCAGT |
| 23S_GPbac_P31 | 213638 | AAGTCATTGGCATTCGGAGTTTGACTGAATTCGGTAACCCGGTAGGGGCC |
| 23S_GPbac_P32 | 213639 | GCTCTACCTCCAAGACTCTTACCTTGAGGCTAGCCCTAAAGCTATTTCGG |
| 23S_GPbac_P33 | 213640 | TCCAGGTTCGATTGGCATTTCACCCCTACCCACACCTCATCCCCGCACTT |
| 23S_GPbac_P34 | 213641 | TTCGGGCCTCCATTCAGTGTTACCTGAACTTCACCCTGGACATGGGTAGA |
| 23S_GPbac_P35 | 213642 | TCTACGACCACGTACTCATGCGCCCTATTCAGACTCGCTTTCGCTGCGGC |
| 23S_GPbac_P36 | 213643 | TAACCTTGCACGGGATCGTAACTCGCCGGTTCATTCTACAAAAGGCACGC |
| 23S_GPbac_P37 | 213644 | GGCTCTGACTACTTGTAGGCACACGGTTTCAGGATCTCTTTCACTCCCCT |
| 23S_GPbac_P38 | 213645 | ACCTTTCCCTCACGGTACTGGTTCACTATCGGTCACTAGGGAGTATTTAG |
| 23S_GPbac_P39 | 213646 | CTCCCGGATTCCGACGGAATTTCACGTGTTCCGCCGTACTCAGGATCCAC |
| 23S_GPbac_P40 | 213647 | GTTTTGACTACAGGGCTGTTACCTCCTATGGCGGGCCTTTCCAGACCTCT |
| 23S_GPbac_P41 | 213648 | CTTTGTAACTCCGTACAGAGTGTCCTACAACCCCAAGAGGCAAGCCTCTT |
| 23S_GPbac_P42 | 213649 | CGTTTCGCTCGCCGCTACTCAGGGAATCGCATTTGCTTTCTCTTCCTCCG |
| 23S_GPbac_P43 | 213650 | CAGTTCCCCGGGTCTGCCTTCTCATATCCTATGAATTCAGATATGGATAC |
| 23S_GPbac_P44 | 213651 | GGTGGGTTTCCCCATTCGGAAATCTCCGGATCAAAGCTTGCTTACAGCTC |
| 23S_GPbac_P45 | 213652 | TGTTCGTCCCGTCCTTCATCGGCTCCTAGTGCCAAGGCATCCACCGTGCG |
| 16S:A1 | 213653 | AAACTAGATTCGAATATAACAAAACATTACATCCTCATCCAATCCCTTTT |
| 16S:A2 | 213654 | GCGGTGTGTGCAAGGAGCAGGGACGTATTCACCGCGCGATTGTGACACGC |
| 16S:A3 | 213655 | GCCTTTCGGCGTCGGAACCCATTGTCTCAGCCATTGTAGCCCGCGTGTTG |
| 16S:A4 | 213656 | GCATACGGACCTACCGTCGTCCACTCCTTCCTCCTATTTATCATAGGCGG |
| 16S:A5 | 213657 | CGGCATCCAAAAAAGGATCCGCTGGTAACTAAGAGCGTGGGTCTCGCTCG |
| 16S:A6 | 213658 | CAACCTGGCTATCATACAGCTGTCGCCTCTGGTGAGATGTCCGGCGTTGA |
| 16S:A7 | 213659 | AGGCTCCACGCGTTGTGGTGCTCCCCCGCCAATTCCTTTAAGTTTCAGTC |
| 16S:A8 | 213660 | CCAGGCGGCGGACTTAACAGCTTCCCTTCGGCACTGGGACAGCTCAAAGC |
| 16S:A9 | 213661 | TCCGCATCGTTTACAGCTAGGACTACCCGGGTATCTAATCCGGTTCGCGC |
| 16S:A10 | 213662 | TTCCCACAGTTAAGCTGCAGGATTTCACCAGAGACTTATTAAACCGGCTA |
| 16S:A12 | 213663 | CTCTTATTCCAAAAGCTCTTTACACTAATGAAAAGCCATCCCGTTAAGAA |
| 16S:A13 | 213664 | CCCCCGTCGCGATTTCTCACATTGCGGAGGTTTCGCGCCTGCTGCACCCC |
| 16S:A14 | 213665 | TTGTCTCAGGTTCCATCTCCGGGCTCTTGCTCTCACAACCCGTACCGATC |
| 16S:A16 | 213666 | CATTACCTAACCAACTACCTAATCGGCCGCAGACCCATCCTTAGGCGAAA |
| 16S:A17 | 213667 | AAACCATTACAGGAATAATTGCCTATCCAGTATTATCCCCAGTTTCCCAG |
| 16S:A18 | 213668 | AAGGGTAGGTTATCCACGTGTTACTGAGCCGTACGCCACGAGCCTAAACT |
| 23S:A1 | 213669 | ACCTAGCGCGTAGCTGCCCGGCACTGCCTTATCAGACAACCGGTCGACCA |
| 23S:A2 | 213670 | CGTTCCTCTCGTACTGGAGCCACCTTCCCCTCAGACTACTAACACATCCA |
| 23S:A3 | 213671 | CCTGTCTCACGACGGTCTAAACCCAGCTCACGTTCCCCTTTAATGGGCGA |
| 23S:A4 | 213672 | GGTGCTGCTGCACACCCAGGATGGAAAGAACCGACATCGAAGTAGCAAGC |
| 23S:A5 | 213673 | GGCTCTTGCCTGCGACCACCCAGTTATCCCCGAGGTAGTTTTTCTGTCAT |
| 23S:A6 | 213674 | AGGAGGACTCTGAGGTTCGCTAGGCCCGGCTTTCGCCTCTGGATTTCTTG |
| 23S:A7 | 213675 | CAAAGTAAGTTAGAAACACAGTCATAAGAAAGTGGTGTCTCAAGAACGAA |
| 23S:A8 | 213676 | GACTTATAATCGAATTCTCCCACTTACACTGCATACCTATAACCAAGCTT |
| 23S:A9 | 213677 | GTAAAACTCTACGGGGTCTTCGCTTCCCAATGGAAGACTCTGGCTTGTGC |
| 23S:A10 | 213678 | TCACTAAGTTCTAGCTAGGGACAGTGGGGACCTCGTTCTACCATTCATGC |
| 23S:A11 | 213679 | CGACAAGGCATTTCGCTACCTTAAGAGGGTTATAGTTACCCCCGCCGTTT |
| 23S:A12 | 213680 | AACTGAACTCCAGCTTCACGTGCCAGCACTGGGCAGGTGTCGCCCTCTGT |
| 23S:A13 | 213681 | CTAGCAGAGAGCTATGTTTTTATTAAACAGTCGGGCCCCCCTAGTCACTG |
| 23S:A14 | 213682 | TTAAAACGCCTTAGCCTACTCAGCTAGGGGCACCTGTGACGGATCTCGGT |
| 23S:A15 | 213683 | ACAAAACTAACTCCCTTTTCAAGGACTCCATGAATCAGTTAAACCAGTAC |
| 23S:A16 | 213684 | ATAATGCCTACACCTGGTTCTCGCTATTACACCTCTCCCCAGGCTTAAAC |
| 23S:A17 | 213685 | CAATCCTACAAAACATATCTCGAAGTGTCAGAAATTAGCCCTCAACGTCA |
| 23S:A18 | 213686 | CTTTGCTGCTACTACTACCAGGATCCACATACCTGCAAGGTCCAAAGGAA |
| 23S:A19 | 213687 | CAACCCACACAGGTCGCCACTCTACACAATCACCAAAAAAAAGGTGTTCC |
| 23S:A20 | 213688 | GGATTAATTCCCGTCCATTTTAGGTGCCTCTGACCTCGATGGGTGATCTG |
| 23S:A21 | 213689 | AGGGTGGCTGCTTCTAAGCCCACCTTCCCATTGTCTTGGGCCAAAGACTC |
| 23S:A22 | 213690 | GTATTTAGGGGCCTTAACCATAGTCTGAGTTGTTTCTCTTTCGGGACACA |
| 23S:A23 | 213691 | CCTCACTCCAACCTTCTACGACGGTGACGAGTTCGGAGTTTTACAGTACG |
| 23S:A24 | 213692 | CCCTAAACGTCCAATTAGTGCTCTACCCCGCCACCAACCTCCAGTCAGGC |
| 23S:A25 | 213693 | AATAGATCGACCGGCTTCGGGTTTCAATGCTGTGATTCCAGGCCCTATTA |
| 23S:A26 | 213694 | ACAACGCTGCGGGCATATCGGTTTCCCTACGACTACAAGGATAAAAACCT |
| 23S:A27 | 213695 | ACAAAGAACTCCCTGGCCCGTGTTTCAAGACGGACGATGCAACACTAGTC |
| 23S:A28 | 213696 | ACAATGTTACCACTGATTCTTTCGGAAGAATTCATTCCTTACGCGCCACA |
| 23S:A29 | 213697 | CTGGTTTCAGGTACTTTTCACCCCCCTATAGGGGTACTTTTCAGCATTCC |
| 23S:A30 | 213698 | CTCTATCGGTCTTGAGACGTATTTAGAATTGGAAGTTGATGCCTCCCACA |
| 23S:A31 | 213699 | ATCACCCTCTACGGTTCTAAAATTCCAAATAAAATTCGATTTATCCCACG |
| 23S:A32 | 213700 | TCTATACACCACATCTCCCTAATATTACTAAAAGGGATTCAGTTTGTTCT |
| 23S:A33 | 213701 | GCCGTTACTAACGACATCGCATATTGCTTTCTTTTCCTCCGCCTACTAAG |
| 23S:A34 | 213702 | GGGTTCCCAATCCTACACGGATCAACACAAAAAAAATGTGCTAGGAAGTC |
| 5S:A1 | 213703 | ACTACTGGGATCGAAACGAGACCAGGTATAACCCCCATGCTATGACCGCA |
| MM_16S_P10 | 213704 | GCGTATGCCTGGAGAATTGGAATTCTTGTTACTCATACTAACAGTGTTGC |
| MM_16S_P11 | 213705 | GATTAACCCAATTTTAAGTTTAGGAAGTTGGTGTAAATTATGGAATTAAT |
| MM_16S_P12 | 213706 | AGCTTGAACGCTTTCTTTATTGGTGGCTGCTTTTAGGCCTACAATGGTTA |
| MM_16S_P13 | 213707 | ATTATTCACTATTAAAGGTTTTTTCCGTTCCAGAAGAGCTGTCCCTCTTT |
| MM_16S_P14 | 213708 | CTTACTTTTTGATTTTGTTGTTTTTTTAGCAAGTTTAAAATTGAACTTAA |
| MM_16S_P15 | 213709 | AACCAGCTATCACCAAGCTCGTTAGGCTTTTCACCTCTACCTAAAAATCT |
| MM_16S_P7 | 213710 | AATACTTGTAATGCTAGAGGTGATGTTTTTGGTAAACAGGCGGGGTTCTT |
| MM_16S_P8 | 213711 | TTTATCTTTTTGGATCTTTCCTTTAGGCATTCCGGTGTTGGGTTAACAGA |
| MM_16S_P9 | 213712 | TTATTTATAGTGTGATTATTGCCTATAGTCTGATTAACTAACAATGGTTA |
| RN_16S_P4 | 213713 | AGTGATTGTAGTTGTTTATTCACTATTTAAGGTTTTTTCCTTTTCCTAAA |
| RN_16S_P5 | 213714 | TGGCTATATTTTAAGTTTACATTTTGATTTGTTGTTCTGATGGTAAGCTT |
| RN_16S_P6 | 213715 | TTTTTTTAATCTTTCCTTAAAGCACGCCTGTGTTGGGCTAACGAGTTAGG |
| RN_16S_P7 | 213716 | TGTTGGGTTAGTACCTATGATTCGATAATTGACAATGGTTATCCGGGTTG |
| RN_16S_P8 | 213717 | AGGAGAATTGGTTCTTGTTACTCATATTAACAGTATTTCATCTATGGATC |
| RN_16S_P9 | 213718 | TTTGTGATATAGGAATTTATTGAGGTTTGTGGAATTAGTGTGTGTAAGTA |
| MM_28S_P1 | 213719 | GCCGGGGAGTGGGTCTTCCGTACGCCACATTTCCCACGCCGCGACGCGCG |
| MM_28S_P10 | 213720 | ACCTCGGGCCCCCGGGGGGGGCCCTTCACCTTCATTGCGCCACGGCGGCT |
| MM_28S_P14 | 213721 | TCGCGTCCAGAGTCGCCGCCGCCGCCGGCCCCCCGAGTGTCCGGGCCCCC |
| MM_28S_P15 | 213722 | CGCTGGTTCCTCCCGCTCCGGAACCCCCGCGGGGTTGGACCCGCCGCCCC |
| MM_28S_P16 | 213723 | CGCCGACCCCCGACCCGCCCCCCGACGGGAAGAAGGAGGGGGGAAGAGAG |
| MM_28S_P17 | 213724 | GGGACGACGGGGCCCCGCGGGGAAGAGGGGAGGGCGGGCCCGGGCGGAAA |
| MM_28S_P18 | 213725 | GGCGCCGCGCGGAAAACCGCGGCCCGGGGGGCGGACCCGGCGGGGGAACA |
| MM_28S_P19 | 213726 | CCCCCACACGCGCGGGACACGCCCGCCCGCCCCCGCCACGCACCTCGGGA |
| MM_28S_P2 | 213727 | CACCCGCTTTGGGCTGCATTCCCAAGCAACCCGACTCCGGGAAGACCCGA |
| MM_28S_P20 | 213728 | TGGAGCGAGGCCCCGCGGGGAGGGGACCCGCGCCGGCACCCGCCGGGCTC |
| MM_28S_P21 | 213729 | CGAGGCCGGCGTGCCCCGACCCCGACGCGAGGACGGGGCCGGGCGCCGGG |
| MM_28S_P22 | 213730 | TCCCCGGAGCGGGTCGCGCCCGCCCGCACGCGCGGGACGGACGCTTGGCG |
| MM_28S_P23 | 213731 | TCCACACGAACGTGCGTTCAACGTGACGGGCGAGAGGGCGGCCCCCTTTC |
| MM_28S_P24 | 213732 | TCCCAAGACGAACGGCTCTCCGCACCGGACCCCGGTCCCGACGCCCGGCG |
| MM_28S_P25 | 213733 | CCGCCGCGGGGACGACGCGGGGACCCCGCCGAGCGGGGACGGACGGGGAC |
| MM_28S_P3 | 213734 | GCACCGCCACGGTGGAAGTGCGCCCGGCGGCGGCCGGTCGCCGGCCGGGG |
| MM_28S_P6 | 213735 | CCCACCGGGCCCCGAGAGAGGCGACGGAGGGGGGTGGGAGAGCGGTCGCG |
| MM_28S_P7 | 213736 | CCCGGCCCCCACCCCCACGCCCGCCCGGGAGGCGGACGGGGGGAGAGGGA |
| MM_28S_P8 | 213737 | TATCTGGCTTCCTCGGCCCCGGGATTCGGCGAAAGCGCGGCCGGAGGGCT |
| MM_28S_P9 | 213738 | CGCCGCCGACCCCGTGCGCTCGGCTTCGTCGGGAGACGCGTGACCGACGG |
| RN_28S_P12 | 213739 | GCGCCCCCCCGCACCCGCCCCGTCCCCCCCGCGGACGGGGAAGAAGGGAG |
| RN_28S_P14 | 213740 | CGAACCCCGGGAACCCCCGACCCCGCGGAGGGGGAAGGGGGAGGACGAGG |
| RN_28S_P16 | 213741 | CACCCGGGGGGGCGACGAGGCGGGGACCCGCCGGACGGGGACGGACGGGG |
| RN_28S_P17 | 213742 | GCCAACCGAGGCTCCTTCGGCGCTGCCGTATCGTTCCGCTTGGGCGGATT |
| RN_28S_P4 | 213743 | CCCGGGCCCCCGGACCCCCGAGAGGGACGACGGAGGCGACGGGGGGTGGG |
| RN_28S_P5 | 213744 | TGGGAGGGGCGGCCCGGCCCCCGCGACCGCCCCCCTTTCCGCCACCCCAC |
| RN_28S_P6 | 213745 | GGGAGAGGCCGGGGGGAGAGCGCGGCGACGGGTATCCGGCTCCCTCGGCC |
| RN_28S_P7 | 213746 | CGCTGCTGCCGGGGGGCTGTAACACTCGGGGGGGGGTGGTCCGGCGCCCA |
| RN_28S_P8 | 213747 | CGCCGCCGACCCCGTGCGCTCGGCTTCGCTCCCCCCCACCCCGAGAAGGG |
| | 213748 | CTCATCCCCACCCTTTTCAACGGATGTGGGTTCGGTCCTCCACTGCCTCT |
| | 213749 | AGCCGGGGCTTCTTAGTCAGGTACCGTCATTTTTTCTTCCCTGCTGATAG |
| | 213750 | TAGATGATCAACCTACCGGGTTAGAGTAGCCATCACACAAGGGTAGTATC |
| | 213751 | CAGATGGCGGCATTGTCACTGCTCCGTCTCCACGTCACTCCTGAAGGTAG |
| | 213752 | GGGAAGCAGGGTGGACCACCACCCAAGGCTAAATACTACCTGATGACCGA |
| | 213753 | ACTAAACTTCACTCCGCATCACGTCTTCCCATTGCCGCACGGTTTTTCCA |
| | 213754 | GTTCCTCCGCTTGTGCGGGCCCCCGTCAATTCCTTTGAGTTTCACCGTTG |
| | 213755 | GCCCCAGACAACCATCGCTGGGGTTGAGCTACCTCACTGCGTCCCTCCGC |
| | 213756 | CTTTCGTGCGGGTCGGAACTTACCCGACAAGGAATTTCGCTACCTTAGGA |
| | 213757 | CAGGCGTCAGCTCGTATACGTCATCTTTCGATTTAGCACAAACCTGTGTT |
| | 213758 | GGCTTCATGCTTAGATGCTTTCAGCACTTATCCCGTCCGCACATAGCTAC |
| | 213759 | ATTACCGCGGCTGCTGGCACGTAGTTAGCCGGGGCTTCTTAGTCAGGTAC |
| | 213760 | TTCACGCAAGATTTCTCGTGTCCCGCGCTACTCAGGATACCACTACGCTT |
| | 213761 | ATCTAAAGTCTTCTCGTTTAAAATACTGGGCTGTTACCATCTGTGGCGGA |
| | 213762 | GGGCTCTGACTTCTTGTAGGCATACGGTTTCAGGTTCTCTTTCACTCCGC |
| | 213763 | GCTATGGATCGTCGGTTTGGTGGGCCGTTACCCCGCCAACTGCCTAATCC |
| | 213764 | ATGACTTCAGCATGGGCGGTCATAACGCGGTACCAGAATATCAACTGGTT |
| | 213765 | TTTCAGTTCAGGCGGTTCCCCTCATATACCTATGTATTCAGTATATGATG |
| | 213766 | CGAAAGGGGAGACGGCACGGGCCCGGAGGTTAGCGCCCCAGGCCTCGGTT |
| | 213767 | TTTCGTCCCTGCTCGACTTGTAGGTCTCGCAGTCAAGCTCCCTTGTGCCT |
| | 213768 | CTCTTATCGATGACATCTCCTCTTAACCTTCCAGCACCGGGCAGGTGTCA |
| | 213769 | TCGTCCCTGACAACAGAGCTTTACGATCCGAAAACCTTCTTCACTCACGC |
| | 213770 | ACCCAACATCTCACGACACGAGCTGACGACAACCATGCACCACCTGTCAC |
| | 213771 | GTCCTCTCGTACTAAGGACAGAGCTCCTCAAATATCCTGCGCCCACGACA |
| | 213772 | TTATAGTTACGGCCGCCGTTTACCGGGGCTTCAATTCAGAGCTCTCACTC |
| | 213773 | CGTTTCTACGAGTTAGAACTCAAATAATCAAAGGGCCGTATTTCAACAGC |
| | 213774 | CACCAGTGTCGGTTTAGGGTACGGGCGGACCCGCCACCTCGCTCACGAAG |
| | 213775 | CGTCCATCCCGGTCCTCTCGTACTAGGGACAGCTCCTCTCAAATATCCTG |
| | 213776 | AGCTGACGCTCATGTTTCCAAGTCTCCCGCCTATCCTGTACATAGATTTC |
| | 213777 | CTCTTTTAATGAGTGGCTGCTTCTAAGCCAACATCCTGGTTGTCTAAGCA |
| | 213778 | ACAGCTTTTCTCGCCATCTTCCATCCCAGACTTCGGTACTAACTTCCCTC |
| | 213779 | CATAGACCTGTGTTTTTGCTAAACAGTTGCTTGAGCCTATTCTCTGCGGC |
| | 213780 | TCACGGTACTGGTTCACTATCGCTCACTCGTTTATATTTAGCCTTGGCGG |
| | 213781 | ACTCACCCTGCCCCGATTAACGTTGGACAGGAACCCTTGGTCTTCCGGCG |
| | 213782 | GGCTACAGTAAAGCTCCATGGGGTCTTTCCGTCTTGTCGCGGGTAACCGG |
| | 213783 | GTACGATTTGATGTTACCTGATGCTTAGAGGCTTTTCCTGGAAGCAGGGC |
| | 213784 | AAGTCATTGGCATTCGGAGTTTGACTGAATTCGGTAACCCGGTAGGGGCC |
| | 213785 | GGTTACCTTGTTACGACTTCACCCCAGTCATGAATCACAAAGTGGTAAGT |
| | 213786 | CCCTTCTCCCGTTGGCCTTAGAATCTTCTTCCTACCTACCTGTGTCGGTT |
| | 213787 | TACCTTCACTAAGGTTCTTTCCGACGCTAGCCCTAAAGCTATTTCGGGGA |
| | 213788 | CCCCCCTGCTTCCCACAGGGTTTCACGTGTCCCGTGGTACTCTGGATCAC |
| | 213789 | GACCGGCCTTCCCATGCCGTTCGGTTAACAGATTAAGTCTTAAAAGCAGT |
| | 213790 | TTCCTTTGACCCCCCCCCCCCCCCTCCCTATCCCCCCCCGCCCCCCCCCA |
| | 213791 | CCCCCTCAGTTCTCCAGCGCCCACGGCAGATAGGGACCGAACTGTCTCAC |
| | 213792 | CTTTGGGAGGCAACCGCCCCAGTTAAACTACCCGCCAGGCACTCTCCCCG |
| | 213793 | ACATGATCGGTTCACACACTCACCACCACACAAGACCTCAAAGAGACCCC |
| | 213794 | CCAGCACCGGGCAGGTGTCACCCCCTATACTTCGTCTTGCGACTTCGCAG |
| | 213795 | GTACCGCTTTAATGGGCGAACAGCCCAACCCTTGGGACTGACTACAGCCC |
| | 213796 | CCATTGCGGAAGATTCCCTACTGCTGCCTCCCGTAGGAGTCTGGGCCGTG |
| | 213797 | TTCTCTGCGGCTCATGTTTCCATGAGCACCCCTTATCCCTAAGTTACGGG |
| | 213798 | TTTGACTCATATCACACCTCACTGCTTAGACGTGCACTTCCAATCGCACG |
| | 213799 | CCGGTTTGCCCTCTTCCGCGTTCGCTCGCCACTACTTACGGAATCTCGTT |
| | 213800 | TACCTGATCGACTTGTCAGTCTCCCAGTCAAGCGCCCTTATGCCATTACA |
| | 213801 | TCCCAAGCTTCGGTGTATGATTTAGCCCCGTTAAATTTTCGGCGCAGGGT |
| | 213802 | CCTAGTCTTTTCAGTGCTCTACAAGCCGTGGTCATGGTTCGAGGCTGTAC |
| | 213803 | TCGGGGTGCTTTTCACCTTTCCTTCACAGTACTCGTACGCTATCGGTCTC |
| | 213804 | GGTCTGGGCTCTTTCCCTTTCGACTGCCCAACTTATCTCGTGCAGTCTGA |
| | 213805 | GCACTCCACAGCTCCTTCCGGTACTGCTTCTTCGCGTTAAGAATGCTCCT |
| | 213806 | GACTGCGAACCGTGAGCATTCGGAGTTCGTCAGGACTCGATAGGCGGTGA |
| | 213807 | GTAAACAGTCGCTTGGGTCTATTCTCTGCGGCCCATTCCTGGGCACTCCT |
| | 213808 | CCCACTTTCGTGCCTGCTCGACGTGTCTGTCTCGCAGTCAAGCCACCTTG |
| | 213809 | TTTCCCTGCGGCTCCGGGACTTTATCCCTTAACCTTGCCAGTATGCACAA |
| | 213810 | GGGCGCCTTCGCTTCGTAGCAGCTTTTCTCGCCAGCGTGAATTCAGCAGC |
| | 213811 | TTCCGCCTGACCTTAGCTCCCGACTAACCCTGAGCGGACGAACCTTCCTC |
| | 213812 | CTCTCAGGTCGGCTACTGATCGTCGGCTTGGTAGGCCGTTACCCCACCAA |
| | 213813 | CTTCCTCCGGCTACTTAGATGTTTCAGTTCACCGGGTTCCCCTCCATACG |
| | 213814 | TACCTGATCGACTTGTTAGTCTCCCAGTCAAGCGCCCTTATGCCATTACA |
| | 213815 | GCAACCGCCCCAGTTAAACTACCCGCCAGGCACTGTCCCTGAACAGGATG |
| | 213816 | TTCCTCGTGTCTCGCCGTACTCAGGATCCCATTAGGCTTCGATCGGATTT |
| | 213817 | ACGGATCGTCGCCTTGGTAGGCCTTTACCCCACCAACTAGCTAATGCACC |
| | 213818 | TGTCGGTTTGGGGTACGGGCGGCAACGCGCCTGACGCCGGGGCTTTTCTC |
| | 213819 | CGGTTTCCGTTCGCGCTGAGGGAACCTTTGGGCGCCTCCGTTACATTTTG |
| | 213820 | TTATAGTTACGGCCGCCGTTTACTGGGGCTTCAATTCAATGCTCTCACAT |
| | 213821 | TGTAGCATGCGTGAAGCCCTGGACGTAAGGGGCATGATGATCTGACGTCA |
| | 213822 | AGCACCGGGCAGGTGTCAGCACCTATACGTCAGCTCTCGCTTTCGCAGAT |
| | 213823 | GCTGATAGGACGCGACCCCATCCCACGCCGATAGAATCTTTCCCACAATC |
| | 213824 | GTTTCAGGTTCTATTTCACTCCCCTCCCGGGGTGCTTTTCACCTTTCCCT |
| | 213825 | CGGCTCCCATTCCGTGTCACCCCTGCGCTCACCTACCACGGCTACGCTCC |
| | 213826 | TAGAGGCTTTTCTTGGCAGTGTGGAATCAGGAACTTCGCTACTATATTTC |
| | 213827 | GGGGAATCTCGGTTGATTTCTTTTCCTCGGGGTACTTAGATGTTTCAGTT |
| | 213828 | CATACCAGAGGTTCGTCCACCCAGGTCCTCTCGTACTATGGGCAGGCCTC |
| | 213829 | CGCGGGTCCATCTTATACCACCGGAGTTTTTCACACTGAGCCATGCAGCT |
| | 213830 | CTCCCGCAACCCCGGCCACGCAACCCCCGACGGGTATCGCGCGCGGCCGG |
| | 213831 | TTCTCTGCGGCTCCATCTCTGGAGCACCCCTTCTCCCGAAGTTACGGGGT |
| | 213832 | GAACATCCGGCATTACCACCCGTTTCCAGGAGCTATTCCGGAGCATGGGG |
| | 213833 | AGGTCCCGGGGTCTTTTCGTCCTTCTGCGCTTAACGAGCATCTTTACTCG |
| | 213834 | GCTTCGGTGGCATGTTTTAGCCCCGGACATTTTCGGCGCAGGACCTCTCG |
| | 213835 | GCTTCAAAGCCTCCGACCTATCCTACACATCACGTGCCCAGATTCAATGA |
| | 213836 | TACTTTATTTCGCTCCACATCACGGCTTCGTCTCATGCACAGCGGATTTG |
| | 213837 | CATGGGGTCTTTCCGTCCTGTCGCGGGTAACCTGCATCTTCACAGGTACT |
| | 213838 | GACCTTCCTCTCAGAACCCCTACTGATCGTTGCCTTGGTGGGCCGTTACC |
| | 213839 | ATGTTTCAGTTCCCCGGGTTCCCCTCCATACGTTATGGATTGGCGTATGG |
| | 213840 | TTAACGCTTTCGCTTGGCCGCTTACTGTATATCGCAAACAGCGAGTATTC |
| | 213841 | CCACGGAAAACCACCTCCGCGGCCGGCTCCCATTCCGTGTCACCCCTGCG |
| | 213842 | TCGTAACTCGCCGGTTCATTCTACAAAAGGCACGCTCTCACCCATTAACG |
| | 213843 | AGGATGCGACGAGCCGACATCGAGGTGCCAAACCTCCCCGCCGATATGGA |
| | 213844 | TCCCCGGAGTACCTTTTATCCTTTGAGCGATGTCCCTTCCATACGGAAAC |
| | 213845 | CGGCTTCCCTACTTTAATTTCGGTCCCTTACGCCCGGGTCAACCAACGCC |
| | 213846 | CTGCTTCCAAGCCAACATCCTAGCTGTCTTAGCAGTCAGACTTCGTTAGT |
| | 213847 | GCTACTCATACCGGCATTCTCACTTCTATGCGTTCCAGCGCTCCTCACGG |
| | 213848 | GCCTTCGGTGTCTGCCTTATACCCGATTATTATCCATGCCCGGACCCTCG |
| | 213849 | CCGGCTTTCCCAAAACCGTTCCACTAACATTGCAGAATCTTAAATGCAGT |
| | 213850 | TACCTGTGTCGGTTTGCGGTACGGGCACCTTAGTATACACATAAGCTTTT |
| | 213851 | TGTTACGCACTCTTTCAAGGGTGGCTGCTTCTGAGCCAACCTCCTGGCTG |
| | 213852 | CTGGAGACCTTGGATATTCGGCCACAAGGATTCTCACCTTGTTCTCGCTA |
| | 213853 | CAGTAACCCGCAAGGCTGCACCTAAATGCATTTCGGGGAGTACGAGCTAT |
| | 213854 | AAACCTTGGATATTCGGCCTAGAGGATTCTCACCTCTATCTCGCTACTCA |
| | 213855 | CGCTTGTGCGGGCCCCCGTCAATTTCTTTGAGTTTTAGCCTTGCGACCGT |
| | 213856 | ACCGGGACACGTGATCCCACAACACCGGCAACGCAACCCCCGACGGGTAT |
| | 213857 | GCTTTTCTCGCCTTCAGCCAAGTGTGCTTCCCTACTCTAATTTCGGTCCC |
| | 213858 | CACTACTCACGGAGTATCCCTTCCTGCAGGTACTGAGATGTTTCACTTCC |
| | 213859 | GATTGGAATTTCTCCGCTACCCACAGTTCATCCGCTACCATTTCAACGGG |
| | 213860 | TTCCACGAGTCCCGCGCTACTCGGGAGACACCATCCATGGTGCACGCGCA |
| | 213861 | GTCTTTTCGTCCCATCGCGGGTAATCGGCATCTTCACCGATACTACAATT |
| | 213862 | CCGTACATCATCTCGATGGCATTCGGAGTTTGATATTCTTTGGTAAGCTT |
| | 213863 | GGGCTTGGCTACCCGGCTATAGACTTGGCAGTCTAACCGGTGCACCAGCG |
| | 213864 | ACTTTCGTTACTGCTCGACCCGTCAGTCTCGCAGTTAGGCTCGCTTCTGC |
| | 213865 | CTACTGTTTCTCCGCGTATACAACGCTCCCCTACCCAATCCATTACTGGA |
| | 213866 | ACTTATAGTCAGCGCCCCTTCTCCCGAAGTTACGGGGCCATTTTGCCGAG |
| | 213867 | CTTCCAAGCCAACATCCTAGCTGTCTTAGCAATCTGACTTCGTTAGTTCA |
| | 213868 | CCTCGGCAACTGGCGTTACCGATTCTCAGCCTCCCACCTATCCTGTACAT |
| | 213869 | CCATAACGGCTCCCATCATCACACCTCGCCATGCATGCCATGCGGATTTG |
| | 213870 | CGTGCAGGTCGGAACTTACCCGACAAGGAATTTCGCTACCTTAGGACCGT |
| | 213871 | CATCCAAACACTTTTCAACGTGTCCTGGTTCGGTCCTCCAGTGCGTTTTA |
| | 213872 | GCCCTAAAGCTATTTCGGGGAGAACCAGCTATATCCGGGTTCGATTGGAA |
| | 213873 | CAGTAAAGCTCTACGGGGTCTCTCCGTCCAGTCGCGGGTAATGGGCATCT |
| | 213874 | GGAACCTTTGGGCGCCTCCGTTACGCTTTAGGAGGCGACCGCCCCAGTCA |
| | 213875 | CCCGCCGTGTGTCTCCCGTGATAACATTCTCCGGTATTCGCAGTTTGCAT |
| | 213876 | CAGGTGTCAGCCCCTATACTTCATCTTTCGATTTGGCAGAGACCTGTGTT |
| | 213877 | GACTCTTCCCAGAGTCTTCTTCTATTCCCTTGGCTGCTTTATCGCAGTCC |
| | 213878 | GGCAACCCAACAACCCACACACCATCATCTTCAGCTACAGGACTATCACC |
| | 213879 | AGCACCGGGCAGGTGTCAGGCTATATACCTCATGTTTCCATTTCGCATAG |
| | 213880 | TTGCATACTATTAAGTTCAGCTCGGAAGGTGGATTTGCCTGCCTTCCTCA |
| | 213881 | CCGGCGGATTTGCCAACCGGACACCCTACACCCTTGGACCAGGTCAATTC |
| | 213882 | GCCGGTTATAACGGTTCATATCACCTTACCGACGCTTATCGCAGATTAGC |
| | 213883 | CTGATACAACCAGTATCGCTCCGTCCATTTGCGCAGCACCAGTAATCATG |
| | 213884 | TCTTTGAATGTATGGCTGCTTCTGAGCCAACATCCTAGTTGTCTTCGAGA |
| | 213885 | TGGATTCTCGCCCTCTTGTACTCATTTCGACTACGGGACTGTTACCCTCT |
| | 213886 | CAGTATCAACTGCAATTTTACGGTTGAGCCGCAAACTTTCACAACTGACT |
| | 213887 | TTCTCTGCGGCTTACCTTCGTAAGCACCCCTTCTCCCGAAGTTACGGGGT |
| | 213888 | ATTACTAGCGATTCCAGCTTCACGCAGTCGAGTTGCAGACTGCGATCCGA |
| | 213889 | CATAGACCTGTGTTTTTGCTAAACAGTTGCTTGAGCCTATTCTCTGCGGC |
| | 213890 | TATAAGTCGAGGCTGCACCTAAATGCATTTCGGGGAGTACGAGCTATCTC |
| | 213891 | TCAACCTGTTGTCCATCGCCTACGCCTTTCGGCCTCGGCTTAGGTCCCGA |
| | 213892 | GGGGTAGCTTTTATCCGTTGAGCGATGGCCCTTCCATGCGGAACCACCGG |
| | 213893 | ATTAACCTATGGATTCAGTTAATGATAGTGTGTCGAAACACACTGGGTTT |
| | 213894 | CCTCTTAACCTTCCAGCACCGGGCAGGCGTCAGCCCCTATACTTCGCCTT |
| | 213895 | AAAAAGCAAGCTCTCTCAAGTTCCGTTCGACTTGCATGTGTTAGGCGCGC |
| | 213896 | GGGCCCGTGTCTCAGTGCCCATGTGGGGGACCCTCCTCAGGCCGGCTATC |
| | 213897 | GACTTAACAAACCGCCTGCGTGCGCTTTACGCCCAGTAATTCCGATTAAC |
| | 213898 | CAACCTGTTGTCCATCGGCTACGCTTTTCAGCCTCACCTTAGGTCCCGAC |
| | 213899 | CACACACCACCACCACCCGAAAGCGGAGGCGGGGCGCGGGCAGATTGGTT |
| | 213900 | CCGTTCGACTTGCATGTGTTAAGCACGCCGCCAGCGTTCATCCTGAGCCA |
| | 213901 | GGCACCCTCTACGGCCAGGCCTTCAAGCCTGTTCCCCTGGCAAGCCGTTT |
| | 213902 | GCCCTTCAAAAGCGTCCCTGTGTTTAAATCTTCGGAGGTTACGGAATTTC |
| | 213903 | TCGTGGTGTGACGGGCGGTGTGTACAAGGCCCGGGAACGTATTCACCGCG |
| | 213904 | TCCCGGGGTTCTTTTCACCGTTCCTTCACAGTACTATGCGCTATCGGTCA |
| | 213905 | GACTGTTCGAGGTTAGACATCAAACGAGAACAGAGCGGTATTTCACCTTG |
| | 213906 | CACCTTAGAGTGCCCAACTGAATGCTGGCAACTAAGATCAAGGGTTGCGC |
| | 213907 | TATGGCACTTAAGCCGACACCTCACGGCACGAGCTGACGACAACCATGCA |
| | 213908 | TCTCGTCCATTGACCAATATTCCTCACTGCTGCCTCCCGTAGGAGTTTGG |
| | 213909 | TTTTCACCTTTCCCTCACGGTACTGGTTCGCTATCGGTCTCTCGGGAGTA |
| | 213910 | TTCCCCATTCAGAGATCTCCGGATCAATGGATATTTGCTCCTCCCCGAAG |
| | 213911 | TGAGCCAACATCCTGGTTGTCTGCGTATCTTCACATCGTTTTCCACTTAA |
| | 213912 | TCGGAGTTTGATATTCTTCGGTAGGCTTTGACGCCCCCTAGGAAATTCAG |
| | 213913 | CCTTCGGCTCCCCTATTCGGTTAACCTTGCTACAGAATATAAGTCGCTGA |
| | 213914 | GTCTGGACCGTGTCTCAGTTCCAGTGTGGCTGGTCATCCTCTCAGACCAG |
| | 213915 | TTATCCGTTCCGTACATAGCTGCCCAGCCGTGCCATTGGCATGACAACTG |
| | 213916 | TTCACAGTACTATGCGCTATCGGTCACTAAGGAGTATTTAGCCTTGCGGG |
| | 213917 | GACTCACCCGGGGACGACGAACGTGGCCCCGGAACCCTTGGTCATCCAGC |
| | 213918 | GGCAACTTCAACCTGCACATGGATAGATCACCCGGTTTCGGGTCTACGTA |
| | 213919 | ACCACGAATTCCGCCTGCCTCAACTGCACTCAAGATATCCAGTATCAACT |
| | 213920 | ACCACGCATTGCTGCATCCCAAGCTTCGGTTACATGCTTAGCCCCGTTAC |
| | 213921 | CCAGAGCTTTTCTCGCCTCCGTCCAAGCATGCTTCCCTACTAAATTTCAG |
| | 213922 | GCTGCACCTAAATGCATTTCGGAGAGAACCAGCTATCACGGAATTTGATT |
| | 213923 | CCTGGTTCGGGCCTCCAGTGAGTTTTACCTCACCTTCACCCTGCTCATGG |
| | 213924 | ACTCACCCGGGGACGACGAACGTGGCCCCGGAACCCTTGGTCATCCAGCG |
| | 213925 | AACATCCTGGTTGTCTGTGCAATTCCACATCCTTCTCCACTTAACGTGAA |
| | 213926 | CTACGACTTCTCCCCATACAGAACGCTCTCCTACCATACATTAGATGTAT |
| | 213927 | CACACTTAGCCCCGGACAACCATCACCGGGGATGAGCTACCTCACTGCGT |
| | 213928 | GGGCGACCCTCCAACAGCGGCGGAACACATTTCGACTACGGGACTCTCAC |
| | 213929 | CTCCGGTGCTTAACCTTGCCAGTGAGCGCAACTCGCCGGACCGTTCTACA |
| | 213930 | TTCGCAGGCTTACAGAACGCTCCCCTACCCAACAACGCATAAGCGTCGCT |
| | 213931 | CCGTCAAGCCATGGGAGCCGGGTGTACCTAAAGTCGGTAACCGCAAGGAG |
| | 213932 | TTACCTACACCATCACCTACACGCTTACACCAACAATCCACTAAGCGGCA |
| | 213933 | GCGTACACCTGCAGCCTATCTACCTCGTAGTCTTCAAGGGGTCTTACCTG |
| | 213934 | GCCGTCGCCCGTTAGTACCGGTCGGCTCCACCCCTCGCGGGGCTTCCACC |
| | 213935 | CACAGTGCTGTGTTTTTAATAAACAGTTGCAGCCAGCTGGTATCTTCGAC |
| | 213936 | CTGTTATCCCCAGGGTAGCTTTTATCCGTTGAGCGACGGCATTTCCACTC |
| | 213937 | ACTTAGATGCTTTCAGCACTTATCCAATCCCGACTTAGATACCCGGCAAT |
| | 213938 | GCTTGCGCTAACCTCTCCTCTTAACCTTCCAGCACCGGGCAGGCGTCAGC |
| | 213939 | ACCTATCCTGTACATGTGGTACAGATACTCAATATCAAACTGCAGTAAAG |
| | 213940 | CTCCACCAGACTAAAACGAGGCTAGCCCTAAAGCTATTTCGAGGAGAACC |
| | 213941 | CCCGGCTTACCTTGGGCGGACGAACCTTCCCCAAGAAACCTTAGATTTTC |
| | 213942 | GCAGAACAACTGGTACACCAGCGGTGCGTCCATCCCGGTCCTCTCGTACT |
| | 213943 | GACCAGGTCGATTCCATTGCCTGGCCCGGCTACCTTCCTGCGTCACACCT |
| | 213944 | CTCTGAGACTTCAAATGTGTCCCTGTGCTTAACTCTTTTGGTGGTGACGG |
| | 213945 | ACCTCGCGGTACGCCTTCGACGCTGACTGGAATGCTCCCCTACCGATCAT |
| | 213946 | CGTCCATCCTGAGGGAACCTTTGGGCGCCTCCGATACCCTTTCGGAGGCG |
| | 213947 | CACCTATCGGTCTCTCCTTAGGTCCCGACTAACCCAGGGCGGACGAGCCT |
| | 213948 | CGCTCGCCGCTACTAAGGAAATCGATGTTTCTTTCTCTTCCTCCGGCTAC |
| | 213949 | CGCGAGTCCATCTTCAAGCGATAAAATCTTTGATATCAAAACCATGTGGT |
| | 213950 | TGACTGGAGTTTGTCCAGCCGGGTTTCCCCATTCAGAGATCTGCGGATCA |
| | 213951 | CCTACTTAGCTACCCGGCTATGCCCCTGGCGGAACAACCGGTGCACCAGC |
| | 213952 | ACGCTTAAACCGGGACAACCGTCGCCCGGCCAACATAGCCTTCTCCGTCC |
| | 213953 | GATTTGCCTGGGATAATCAACATCTACACCCTTTAACGGACTATTCCGTC |
| | 213954 | CTAATGCGCCGCGGGTCCATCTGTAAGTGGTAGCCGAAGCCACCTTTTAT |
| | 213955 | GGATCTTAGCACTCGCAGTCTGACTGCCGACCATAAATCAATGGCATTCG |
| | 213956 | ACCTATCCTGTACATGTGGTACAGGTACTCAATATCAAACTGCAGTAAAG |
| | 213957 | TCACCGGGGATGAGCTACCTCACTGCGTCCCTCCGCAGCTTGCCTACTAC |
| | 213958 | GCCATGCAGATTCTCACTGCATTCGCGCTACTCATTCCGGCATTCTCACT |
| | 213959 | CTTCACCTCACATACGACGCTCCCCTACCCCTGACAATTACTTGTCAAGC |
| | 213960 | CCCTACTGATCGTCGCCTTGGTGGGCCGTTACCCCGCCAACAAGCTAATC |
| | 213961 | ACGCATTCGGAGTTTGTCAAGACTTGATAGGCGGTGAAGCCCTCGCATCT |
| | 213962 | ACATTTTAGGAGGCGACCGCCCCAGTCAAACTGCCCGTCAGACACTGTCT |
| | 213963 | GGTGGGTTTCCCCATTCGGAAATCTCCGGATCAAAGCTTGCTTACAGCTC |
| | 213964 | CTCATCCCCACCCTTTTCAACGGATGTGGGTTCGGTCCTCCATTGCCTTT |
| | 213965 | AGGTCACTTGGTTTCGGGTCTACATCTACGTACTTAACCGCCCTTTTCAG |
| | 213966 | ACACACTCACCACACCACCACAACATCAAAGACATCACAATGGCAGGCTC |
| | 213967 | TGACAACTGGTGCACCAGAGGTGCGTCCATCCCGGTCCTCTCGTACTAGG |
| | 213968 | TCTGCCTCTGCACATTGCTCCTCTACCGCGCATCTTCTTCAGACGCACCC |
| | 213969 | CTTTTCTCGACAGTACGGGATCACCAACTTCACCAATTAAGGCTACGCAT |
| | 213970 | CCCTCATGTCACTATTTATTCATGACATGATGACACGCTGTTAACGTGCC |
| | 213971 | GTACGCAGTCACACGCCTAAGCGTGCTCCCACTGCTTGTACGTACACGGT |
| | 213972 | GGCGACCACCCCAGTCAAACTACCCACCAAGCAATGTCCGCGCATAGCGC |
| | 213973 | GACTTAGTCCCAATCACGAGCCTCACCTTAGACGGCTCCATCCCACAAGG |
| | 213974 | GCGCTTATGCGGTATTAGCAGTCATTTCTAACTGTTATCCCCCTGTATAA |
| | 213975 | CGCTTTCACTGCGGCTACGTGTCTCGTGACACTCAACCTCGCCAGTGACG |
| | 213976 | ATGCTTTTCGCTTACAGGACTATAACCTTCTTTGGTGTGCCTTCCCATAC |
| | 213977 | CGACTAACCCAGGGCGGACGAGCCTTCCCCTGGAAACCTTAGTCTTACGG |
| | 213978 | TAGGACCCGACTAACCCTGATCCGATTAGCGTTGATCAGGAAACCTTAGT |
| | 213979 | ACAGCTTTTCTCGTCTCTTTCCAAACTGACTTCCGCTTACGCGTCCCTTA |
| | 213980 | TAAGACTTGCTCTCGCTGCGGCTTCAGACCTTAAGTCCTTAACCTTGCCA |
| | 213981 | CTCTCAAACCAGCTATGGATCGTCGGCTTGGTAGGCCATTACCCCACCAA |
| | 213982 | GGAATTTCTCCCCTATCCACACGTCATCTCCACCCTTTTCAACGGATGTG |
| | 213983 | CCGGTCCATGGTCGGTACGGGAATATCCACCCGTTCATCCATTCGACTAC |
| | 213984 | CCCCCGACCGGTTTCACGGCCGCAGGTTAGAATTCCAGAAACCTAAGGGC |
| | 213985 | AAGTTTCGGTGGCTACGGAATTTCAACCGTATGTGCATCGACTACGCCTC |
| | 213986 | TGCGCTCCCTTTACACCCAGTAAATCCGGATAACGCTTGCCCCCTACGTA |
| | 213987 | ATTTCGCCTACGGGACTGTCACCCTCTATGGTCCACCTTTCCAGGTGAGT |
| | 213988 | GCTTCGGTGGCATGTTTTAGCCCCGGACATTTTCGGCGCAGGACCTCTCG |
| | 213989 | GACATGTCTCCACATCATTCAGTTGCAATTCAAGCCCGGGTAAGGTTCCT |
| | 213990 | CGATAACTGGCACACCAGAGGTGCGTCCTTCCCGGTCCTCTCGTACTAGG |
| | 213991 | AACGCTTATCGGTGCGGACCTCCATCCCGTGTTACCGGGACTTCATCCTG |
| | 213992 | CCACTCCGTCGATGTGAACTCTTGGGAGTGATAAGCCTGTTATCCCCAGG |
| | 213993 | GCCGCCTTTTCAACGGAGGTCGGTTCGGCCCTCCATGGAGTTTTACCTCC |
| | 213994 | ACCGTTATAGTTACGGCCGCCGTTTACTGGGGCTTCAATTCGCACCTTCG |
| | 213995 | AGGTGTTCTCATGTGGGTTTCCCCATTCAGAGATCTGCGGGTCAATGGAT |
| | 213996 | AGCCTGTTCCCCTGGCAAGCCGTTTTATGACTCCCGCCCGGTCCGTCGGA |
| | 213997 | GCTGACCTACTACGAGGGGGGATCCCAACGCGCCCGCGCCGCGACCCCCC |
| | 213998 | GTTATCCCCCTGTATGAGGCAGGTTACCCACGCGTTACTCACCCGTCCGC |
| | 213999 | CGGACATCTTCGGCGCACAATCACTCGACCAGTGAGCTATTACGCACTCT |
| | 214000 | TGCTTGATGCCCGATTATTATCCACGCCAAACTCCTCGACTAGTGAGCTG |
| | 214001 | CTCCATTCGGAAATCTGCGGATCAAAGCCTACTTACGGCTCCCCGCAGCT |
| | 214002 | GCTGTTGGTCCGGATTGTTCTCCTTTAGGACATGGACCTTAGCACCCATG |
| | 214003 | TGCTGGCACGGAGTTAGCCGTCACTTCCTTGTTGAGTACCGTCATTATCT |
| | 214004 | GCTATCGGTCAGACAGGTATGCTTAGACTTACCCAACGGTCTGGGCTGAT |
| | 214005 | TATTCCTCACTGCTGCCTCCCGTAGGAGTTTGGACCGTGTCTCAGTTCCA |
| | 214006 | TCCCGCTGGCCTTAGAATTCTCTTCCTGTCCACCTGTGTCGGTTTGCGGT |
| | 214007 | CGACTATTGTCCTCGGCTTAGGTCCCGACTTACCCTGAGAGGACGAGCCT |
| | 214008 | GGTCCTTTTCACCTTTCCTTCACAGTACTATGCGCTATCGGTCACTAAGT |
| | 214009 | TCGGCTACTGATCGTCGCCTTGGTAGGCCGTTGCCCTGCCAACTAGCTAA |
| | 214010 | CTTGGGAGTATGTTTACACGCACTATTACCGTTTTCCGAGGAAATTGGTA |
| | 214011 | CACACAACCCCTACCAGGTATCACATGCACACGGTTTAGCCTCATCCACG |
| | 214012 | CCACGGCTTCGGTGTTGTGTTTTAGCCCCGGACATTTTCGGCGCAGGGCC |
| | 214013 | CCACCTTCCTCCAGTTTATCACTGGCAGTCTCCTTTGAGTTCCCGGCCGG |
| | 214014 | AGCTTTCGGGGAGAACCAGCTATCTCCCGGTTTGATTGGCCTTTCACCCC |
| | 214015 | CGAGCCTTCCTCAGGAAACCTTAGGCATTCGGTGGAGGGGATTCTCACCC |
| | 214016 | CCCAGGGCTAGATCATCCCGCTTCGGGTCCAGGACAAGCGACTGAAAACG |
| | 214017 | AAAATCATGGGAAATCTCATCTTGAGGGGGGCTTCGCACTTAGATGCTTT |
| | 214018 | ATCCTGTACAAGCTGTACCAACATTCAATATCAGGCTGCAGTAAAGCTCC |
| | 214019 | TTAGCAGGTGGTCCGGATTCTTCTCCTCTCGGGCACGGACCTTAGCACCC |
| | 214020 | GTCCGTTTACGGTACGGGTACCTCAAGGATAAGTTTAGCGGGTTTTCTAG |
| | 214021 | CACTGGCGTGCTGCCTTCTCTGCCTCCCACCTATCCTGTACATGAAATAC |
| | 214022 | TGCGGTATTAGCAGTCATTTCTAACTGTTATCCCCCTGTATAAGGCAGGT |
| | 214023 | GCTATCGGTCAGACAGGTATGCTTAGACTTACACCACGGTCGGTGCGGAT |
| | 214024 | TTTACTCCTTTCGGATGGGATATCTCATCTTGAGGGGGGCTTCACGCTTA |
| | 214025 | TGGCCGGTCGCCCTCTCAGGCCGGCTACCCGTCGAAGCCTTGGTGAGCCG |
| | 214026 | AAGCCTGTTCCCCTGGCAAGCCGTTTTATGACTCCCGCCCGGCCCGTCGG |
| | 214027 | AAGGTTAAGCCTCACGGTTCATTAGTACCGGTTAGCTCAACGCATCGCTG |
| | 214028 | GACATCATACTAACGCGCCCTATTAAGACTCGGTTTCCCTACGGCTCCGT |
| | 214029 | TGTGTTTTTGTTAAACAGTTGCCTGGACCGATTCTCTGCGCCTCAAGTCG |
| | 214030 | GCCCCAGTCAAACTACCCACCAGACACTGTCCGCAACCCGGATTACGGGT |
| | 214031 | GCGTCACACCTGTTAATGCGCTTGCCTTACCGGTTCAGGTCCCGCGCTCC |
| | 214032 | GCGATGGCCCTTCCATGCGGAACCACCGGATCACTAAGCCCGACTTTCGT |
| | 214033 | AAGCTCCATGGGGTCTTTCCGTCTAGTCGCGGGTAACCGGCATCTTCACC |
| | 214034 | CGCTAGCCCTAAAGCTATTTCGGAGAGAACCAGCTATCTCCAAGTTCGTT |
| | 214035 | TCCCATCCGCACTTCGCTTCCCTGCTATGCCGTTGGCACGACAACAGTTG |
| | 214036 | TTTCACTCCCCTCCCGGGGTCCTTTTCACCTTTCCTTCACAGTACTCTGC |
| | 214037 | CGTCCTCGGCTTAGGCCCCGACTTACCCTGGGCGGATGAACCTTCCCCAG |
| | 214038 | CGACATCGAGGTGCCAAACCTCCCCGTCGATGTGGACTCTTGGGGGAGAT |
| | 214039 | TACCTGATCGACTTGTCAGTCTCCCAGTCAAGCGCCCTTATGCCATTACA |
| | 214040 | CTTCCAAGCCAACATCCTAGCTGTCTTAGCAATCTGACTTCGTTAGTTCA |
| | 214041 | ACGCCTTAACCATGTGAAGGGTAGATTTTCTGACCCCTTCGGCCTGAACG |
| | 214042 | CTCAAGGATTAAGTTTAGCGGATTTTCTCGGGAGTATGTTTACACGCACT |
| | 214043 | CCCCATCCATCACCGATAAATCTTTAATCTCTTTCAGATGTCTTCTAGAG |
| | 214044 | ATACTTTGGGACCTTAGCTGTGGGTCTGGGCTGTTTCCCTTTTGACAATG |
| | 214045 | CGCCCATAGGCGGTGCCGGCCCATGACGGCCGGCGGGTTCCCCCATTCGG |
| | 214046 | AAAATCATGGGAAATCTCATCTTGAGGTGGGCTTCGCACTTAGATGCTTT |
| | 214047 | ACAACTTGATACCCGATTATTATCCACGCCCGACTCCTCGACTAGTGAGC |
| | 214048 | CTGAGTTTGATAAGCTTCGCTAACCTCTCGGCCGCTAGGCTATTCAGTGC |
| | 214049 | GCCCAGATCGTTGCGCCTTTCGTGCGGGTCGGAACTTACCCGACAAGGAA |
| | 214050 | TTATAGTTACGGCCGCCGTTCACTGGGGCTTCGGATCACTGCTTCAGATC |
| | 214051 | GGCATTGTCCCACCGCCGGGTCACGGCGGCTGGTTAGAAACCCAATACTG |
| | 214052 | GTCCACACATTTAGCCCCAGACAACCATCGCTGGGGTTGAGCTACCTCAC |
| | 214053 | TCTCACGACGTTCTGAACCCAGCTCGCGTGCCGCTTTAATGGGCGAACAG |
| | 214054 | ATGCGACGAGCCGACATCGAGGTGCCAAACCTCCCCGTCGATGTGAACTC |
| | 214055 | CCTGTGTCGGTTTAGGGTACGGGCAGTTTGAACCTCGCGCCGATGCTTTT |
| | 214056 | CGATATTGCAAGGGTGGTATCCCAACAGCGCCTCCTCAGAGACTGGCGTC |
| | 214057 | CCCCCGACCGGATTCACGGCCGCAGGTTAGAATTTCAGCACCTCAAGAGT |
| | 214058 | TCAGATGGCGGCATTGTCACTACTGCGTCTCCACATCACTCCTGGAGGTA |
| | 214059 | CTTTTCGTCCCATCGCGGGTAATCGGCATCTTCACCGATACTACAATTTC |
| | 214060 | ACAACGAATTCCGCCAACTTCCCGCGCACTCAAGCCCTCCAGTTCGCGCT |
| | 214061 | CCCGAAGTTACGGGGCCAATTTGCCGAGTTCCTTAACAACCCTTCTCCCG |
| | 214062 | TCAAGGGGGTTTACTTCTTTCGAATGGGATATCTCATCTTAAGGGGGGCT |
| | 214063 | CTTCACAGTACTATACGCTATCGGTCACTGGGTAGTATTTAGGGTTGGAG |
| | 214064 | ATTCCGTCAGACGGCCGGACTGTCACTTCTCCGTCACCACATCGCTCTCT |
| | 214065 | CGGTACTGGTTCACTATCGGTCACTAGGGAGTATTTAGGGTTGGGAGATG |
| | 214066 | AGCTGATGGTCCGGATTCTTCTCCTTTAGGACATGGACCTTAGCACCCAT |
| | 214067 | CGTATTACCGCGGCTGCTGGCACGGAATTAGCCGGTCCTTATTCATAAGG |
| | 214068 | ACGGGTTAGCCTCGCCACGCACCACTGACTCGCAGACTCATTTTTCGATA |
| | 214069 | ACGGCGTGGACTACCAGGGTATCTAATCCTGTTCGCTCCCCACGCTTTCG |
| | 214070 | TGCGCATTCGGAGTTTATCAAGACTTGATAGGCGGTGAAGCCCTCGCATC |
| | 214071 | CTGTTGTCCATCGGCTACGACTCTCGTCCTCACCTTAGGCCCCGACTTAC |
| | 214072 | GGCTCACGCCTCACCTTCGACGCGGAGTGGAATGCTCCCCTACCGATGTT |
| | 214073 | GATGTTTCAGTTCAGGCGGTTCCCTCGATATACCTATTTTTAAGTTCAGT |
| | 214074 | CATTGTCTAAGATTCCCCACTGCTGCCTCCCGTAGGAGTCTGGGCCGTGT |
| | 214075 | TCACAGTACTATGCGCTATCGGTCACTAAGTGGTATTTAGCCTTAGGGGG |
| | 214076 | GTAGTATTTAGGCTTGGAGGATGGTCCCTCCTGCTTCCCACAGGGTTTCA |
| | 214077 | TTGGGACCTTAGCTGCGGGTCTGGGCTCTTTCCCTTTTGACTATCCAACT |
| | 214078 | CAGCTTGGTGGCGCAGAACTAAGCATTTGACTCAGTCCTCACCTCACTGC |
| | 214079 | ACCAAGTACAGGAATATTAACCTGTTTCCCATCGACTACGCCTTTCGGCC |
| | 214080 | AAGCCCGCTTGTGCGATTACACTCGACACCCGATTGCCAACCGGGCCGAG |
| | 214081 | CCTTAAATACGCACAACCATCGGCGCACTGCAGCTACCTGTCTGCGTCAC |
| | 214082 | CTACCCAGCGATGCCTTTGGCAAGACAACTGGTACACCAGCGGTAAGTCC |
| | 214083 | CCTGTGTCGGTTTACGGTACGGGCGCATGGCAAACAATAGCGGCTTTTCT |
| | 214084 | CCGCGCTTACCCTATCCTCCTGCGTCCCCCCATTGCTCAAATGGTGAGGA |
| | 214085 | GGCTCTCTGTACTGTCAGGTTTCAGCAAGGACTAACTCTTAATCTGCCCC |
| | 214086 | GGATCACCGGATTCGGGCCGTAAGGCCCCCATCATCGCGCCTCGCCCCGA |
| | 214087 | TGGTCTCCGCTCGTTCAGACAAGGTTTCACGTGTCTCGTCCTACTCTGGA |
| | 214088 | CAATCCCACTTTATGCCACCGGATCACTAAGTCCTACTTTCGTACCTGCT |
| | 214089 | GTCACCAAGTAGTATTTAGCCTTGGGGGGTGGGCCCCCCGTCTTCCCACC |
| | 214090 | ATCCCCGGAGTACCTTTTATCCGTTGAGCGATGGCCCTTCCATTCAGAAC |
| | 214091 | TACCTCTCACGGTGACCATCCGACGCGGCACCTAAATGCCTTTCGGGGAG |
| | 214092 | CCGTACTCCCCAGGCGGAGTGCTTAATGCGTTAGCTGCAGCACTAAGGGG |
| | 214093 | ATCACCAGTTTTACCCTAGGGCGCTCCTTGCGGTTACGCACTTCAGGTAC |
| | 214094 | GGAGGGCACCTTTAGAAGCCTCCGTTACGCTTTTGGAGGCGACCACCCCA |
| | 214095 | CTGGAGACCTTGGATATTCGGCCACAAGGATTCTCACCTTGTTCTCGCTA |
| | 214096 | GGGCTTTCACCCTCTTTGGCTGGCTTTCCCAAAACCATTCTGCTAGGATC |
| | 214097 | GTGGGATTGGCTTAACCTCGCGGTTTCGCTGCCCTTTGTTCTGTCCATTG |
| | 214098 | ATGCTACGCAGAGAAGTCCGGATATCAATGCCAGACTAGAGTAAAGCTCC |
| | 214099 | TCCGTATACTCTCAGGTTCGACTCTCCCCGCGGATTTGCCTACGGGAATC |
| | 214100 | CTGGACCTATTCTCTGCGCCTCACATTGCTGTGAGGACCCTTTATCCCGA |
| | 214101 | TTAGCAGGTGGTCCGGATTCTTCTCCTCTCGGGCACGGACCTTAGCACCC |
| | 214102 | GCCTGTACACCTGCATCCTATCAACGTCATAGTCTTTGACGACCCTGAGA |
| | 214103 | AGACTCCAATCCGGACTACGACGCACTTTATGAGGTCCGCTTGCTCTCGC |
| | 214104 | GGTTTGCCCTCCTGCCTCTTCGCTCGCCGCTACTGAGGCAATCGCTCTTG |
| | 214105 | ACCTTTCCCTCACGGTACTGGTACGCTATCGGTCAGACAGGTATGCTTAG |
| | 214106 | CCGGTCCTCTCGTACTAGGGACAGCTCCCATCAAATATCCTGCGCCCACG |
| | 214107 | CCATTGGCATGACAACCCGAACACCAGTGATGCGTCCACTCCGGTCCTCT |
| | 214108 | ATGTGCTTGTAAGCACAGAGTTTCAGGTTCTTTTCACTCCCCTCCCGGGG |
| | 214109 | CCCTTCTCCCGAAGTTACGGGGTAATTTTGCCGAGTTCCTTAACAACCCT |
| | 214110 | CCTGAGTCGGTTTAGGGTACGGGCGCGTTATGCCCTCACGTCGAGGCTTT |
| | 214111 | ATCTGGGCTGTTTCCCTTTCGACAATGAAACTTATCTCACACTGTCTGAC |
| | 214112 | CGTATTTCAAGGATGGCTCCACAAACACTGGCGTGCCTGCTTCAAAGCCT |
| | 214113 | GGTCATTGCCTGCTTGCGGCTGACCATGGCTTATCGCAGCTGACCACGTC |
| | 214114 | CCTGGCGCGGGTAACCAGCATCTTCACTGGTACTTCAATTTCACCGGGTG |
| | 214115 | GTAACTCACAAGGCTGCACCTAAATGCATTTCGGGGAGTACGAGCTATCT |
| | 214116 | GTCGGTTTGGGGTACGGGCGGCCATAGCCCTCACGCCGAGGCTTTTCTCG |
| | 214117 | CACCGTCTATGGTCCCATTTTCCAAAGGGTTCTACTCATGAAATGTCTTG |
| | 214118 | CCGGCAACGCAACCCCCGACGGGTATCACGCGCAACCGGTTTGGTCTGAT |
| | 214119 | TTATCCTTCTGTGTCACTGCTTCATTCCATCGGTAGTGCAGGAATCTACA |
| | 214120 | CAGAGCACCCCTTCTCCCGAAGTTACGGGGTCATTTTGCCGAGTTCCTTA |
| | 214121 | ATACTATCAGGTTCGATTCTCATGGTGGATTTGCCTGCCAAGATCAACAT |
| | 214122 | CTTACGGGGCTTTCACCCTCTCTGGCCGGCTTTCCCAAAACCGTTCTGCT |
| | 214123 | GACCGGCCTTCCCATGCCGTTCGGTTAACAACTTAAGTCCTAAATGCGGT |
| | 214124 | CGTTTATCCGATCCGTACGTAGTTGCCCAGCTATGCTCCTGGCGGAACAA |
| | 214125 | GTATCTAATCCTGTTTGATACCCACACTTTCGAGCATCAGCGTCAGTTAC |
| | 214126 | GGTGCTTGTAAACACAAGGTTTCAGGTTCTTTTTCACTCCCCGTCAGGGG |
| | 214127 | GTAGGCGCACGGTTTCAGGAACTCTTTCACTCCCCTCCCGGGGTGCTTTT |
| | 214128 | ACTTCTGAGTTCGGCATGGGGTCAGGTGGGACCACCGCGCTACGGCCGCC |
| | 214129 | TTCCGTGTTCGGTATGGGAACGGGTGTGACCTCTTCGCTATCGCCACCAA |
| | 214130 | TCGCCTTAGGACCCGACTCACCCGGGGACGTTAACCGTGGCCCCGGAACC |
| | 214131 | CACTCACCCACAACCATGGGCTCCCCATCATGCCTCAACCTTCACGCCCA |
| | 214132 | CTCCGAGACTTCATATGTGTCCCTGTGTTTAACTCTTTTGGTGGTGACGG |
| | 214133 | AAAATTCCCTACTGCTGCCTCCCGTAGGAGTTTGGGCCGTGTCTCAGTCC |
| | 214134 | GACCAGGTAAGGTTCTTCGCGTTGCATCGAATTAAACCACATGCTCCACC |
| | 214135 | CGAAGTTTGATAGGGTTCGGTAAGCTTTGTGGCCCCCTAGCCCATTCAGT |
| | 214136 | AGGCTTGCGCCGCCGCTTCGCCCCGATGGGGACGCTCTCCTACCCAGCGT |
| | 214137 | CGAACAGAGCGGTATTTCACCTTACGGCTCCGCGCGATCTGGCGACCGCG |
| | 214138 | ACCGTTCTACAAAAAGTACGCGGTTGTACTCGTATGGTACTTCCACAGTT |
| | 214139 | CGTTTCGCTCGCCGCTACTCAGGGAATCGCATTTGCTTTCTCTTCCTCCG |
| | 214140 | GCTACTTGGGACAACACGATCGGAAGACGGCTCACGTCCAGGTACGGGGC |
| | 214141 | AAGGTCCCCCTCTTTGGTCTTGCGACGTTATGCGGTATTAGCTACCGTTT |
| | 214142 | GTTCTGAACCCAGCTCGCGTACCACTTTAATCGGCGAACAGCCGAACCCT |
| | 214143 | TGATTCAAAGCCTCCGGCCTATCCTACACATCAATCACCCAAATTCAATG |
| | 214144 | GTCTTTTCGTCCCATCGCGGGTAATCGGCATCTTCACCGATACTACAATT |
| | 214145 | CCCCCCCCCCCCTTCCCCCCTCTCCTCCCCCTTCCCCCTTTCGCGCCCCC |
| | 214146 | CAGGTGTCACCCCATATACGTCATCTTTCGATTTAGCATAGAGCTGTGTT |
| | 214147 | CTCCACCAGACTAAAACGAGGCTAGCCCTAAAGCTATTTCGAGGAGAACC |
| | 214148 | TTCCGTCAGCCGGCAGGACTGTCACTTCTCCGTCTCCACGTCACTCCATG |
| | 214149 | CGCTAATTTTTCAACATTAGTCGGTTCGGTCCTCCAGTTAGTGTTACCCA |
| | 214150 | CTTGGCAGTGTGACATCACTAACTTCGCTACTAAACTTCGCTCCCCATCA |
| | 214151 | CCCGTTAAATTTTCGGCGCAGAGTCACTCGACCAGTGAGCTATTACGCAC |
| | 214152 | CCCGGAGTACCTTTTATCCTTTGAGCGATGTCCCTTCCATGCGGAAACAC |
| | 214153 | TTCTCTGCGGCTCCATCGCTGCAGCACCCCTTCTCCCGAAGTTACGGGGT |
| | 214154 | AAGCTACCTACTTCTTTTGCAACCCACTCCCATGGTGTGACGGGCGGTGT |
| | 214155 | GCACAGCCATGTGTTTTTGTTAAACAGTTGCCTGGACCTATTCTCTGCGC |
| | 214156 | GCCAACATCCTGGTTGTCTGTGCAATTCCACATCCTTTTCCACTTAACTA |
| | 214157 | GGTCACCCGGTTTCGGGCCCATTATATGCAACTTAACGCCCTTTTCAAAC |
| | 214158 | TTATAGTTACGGCCGCCGTTCACTGGGGCTTCGATTCAATGCTTGCACAT |
| | 214159 | GTTTATCTGAGATTGGTAATCCGGGATGGACCCCTCAATCAAACAGTGCT |
| | 214160 | CGAAGTTACGGGGTCATTTTGCCGAGTTCCTTGACAATGCTTCTTCCGCC |
| | 214161 | GTCCACACACGCGTGTGTCCCTCATCAGTTCTCACCCTCCATGCCCCCCG |
| | 214162 | CCGGCCCGTCGGGGCCGGGACACACGCTCCCGCAACCCCGGCCACGCAAC |
| | 214163 | CCGGTACATTTTCGGCGCAGGGTCACTCGACTAGTGAGCTATTACGCACT |
| | 214164 | CTCGAACTTCTTGTAAGCACACGGTTTCAGGTTCTCTTTCACTCCCCTTC |
| | 214165 | TTTCAGTTCAGGCGGTTCCCCCCGTATCCCTATGGATTCAGAATACGGTG |
| | 214166 | TCCGTTACATTTTGGGAGGCGACCGCCCCAGTCAAACTGCCTACCTGACA |
| | 214167 | CCGCTCCTTCCATCAAGGTTCCACGTGTCTCGATGTACTCTGGATCCTGC |
| | 214168 | CCACGTGTTACTCACCCGTCCGCCGCTAACATCAGGGAGCAAGCTCCCAT |
| | 214169 | GACTCCGTACTGTCAGGTTCGGCTCAACGGGTGGATTTGCCTGCCCATCT |
| | 214170 | ACGTGTCCGGCGGTACTCTGGATACAGATGGCTGTTCAGGCTTTTCGTGT |
| | 214171 | TGGGCTGTTTCCCTTTGGACAATGAAACTTATCTCCCACTGTCTGACTCC |
| | 214172 | ACATAGCTACCCAGCCATGCCCTTGGCAGAACAACTGGTACACCAGCGGT |
| | 214173 | CAGAGGTCAGTCCAACACGGTCCTCTCGTACTAGTGTCAGAGCCACGCAA |
| | 214174 | GTTTGATAGGGTTCAGTAACTTCTCAGCCCCTAGCCCATTCAGTGCTTTA |
| | 214175 | CGGCACCGGGCAGGCGTCACACCCTATACGTCCACTGTTCGTGTTGGCAG |
| | 214176 | AACCCAATAAATCCGGATAACGCTTGCCCCCTACGTATTACCGCGGCTGC |
| | 214177 | CCATACATCAATTATCTGGCATTCTGAGTTTGATAGGGTTCAGTAACCTC |
| | 214178 | CCTCCGTTACACTTTGGGAGGCGACCGCCCCAGTCAAACTGCCCGCCAAG |
| | 214179 | CTGTTATCCCCGAGGTAGCTTTTATCCGTTAAGCGACGGCTTTTCCACTC |
| | 214180 | TAGCCCATTCAGTGCTTTACCTCCGGTAATCTAAATCAACGCTAGCCCTA |
| | 214181 | TCCACAGCTCCTTACGGTACTGCTTCGTCCCGCATGCAATGCTCCTCTAC |
| | 214182 | CCATCGCGGGTAATCGGCATCTTCACCGATACTACAATTTCACCGAGCTC |
| | 214183 | CTGGACCTATTCTCTGCGCCCAACTCTCGTTGGGACCCTTTATCCCGAAG |
| | 214184 | CTTTTACCTTTACACTCTACGATTGATTTCCAACCAATCTGAGCCAACCT |
| | 214185 | TTATAGTTACGGCCGCCGTTTACCGGGGCTTCAATTCAAAGCTTCATATT |
| | 214186 | GCCATTAAGATTCTCACTTAATTCTCGCTACTTATTCCGGCATTCTCACT |
| | 214187 | GGCCGATCACCCTCTCAGGTCGGCTACGCATCGTCGCCTTGGTGAGCCGT |
| | 214188 | CTTCTCCCGCTGGCCTTAGAATCTTCTTCCTATCTACCTGTGTCGGTTTG |
| | 214189 | TTCCTTCACCCGAGTTCTCTCAAGCGCCTTGGTATTCTCTACCTGACCAC |
| | 214190 | GCTAGTCCTAAAACTATTTCGGGGAGAACCAGCTATCTCCGGGTTCGATT |
| | 214191 | CCTCCGGCCGGTTTCACGGCCGCAAGTTAGAATTCCAGCACTACAAGAGT |
| | 214192 | TGTTCGTCCCGTCCTTCATCGGCTCCTAGTGCCAAGGCATCCACCGTGCG |
| | 214193 | GCCAGGCCTTCAAGCCTGTTCCCCTGGCTAGCCGCTTTATGACTCCCGCC |
| | 214194 | CTTTCTTTTCCTCCGGCTACTTAGATGTTTCAGTTCACCGGGTTCCCTTC |
| | 214195 | ATGATTCTCACATAATTCTCGCTACTCATTCCGGCATTCTCACTCGTATG |
| | 214196 | CGGGCACGGACCTTAGCACCCATGCCCTTACTGCCGGACTGCAGACCGTG |
| | 214197 | GTGAGTTTCCTCATTCAGAGATCTCCGGATCAATGCTTATTTGCAGCTCC |
| | 214198 | TAAATGCAGTCCGAACCCCGGAGTGCACGCACTCCGGTTTGGGCTCTTTC |
| | 214199 | GCCCAAGGGTAGATCACTTGGTTTCGCGTCTACTCCTTCCGACTATACGC |
| | 214200 | AGCTTAGCGGATTTTCTCGGGAGTCTGATTACCGGCGCTATTGGATTCCA |
| | 214201 | CTCGCAGTCAAGCTCCCTTCTGCCTTTGCACTCTCCGAATGATTTCCAAC |
| | 214202 | GTCTAGTCCCACGTACTTGTGCGCCCTGTTCAGACTCGCTTTCGCTCCGC |
| | 214203 | TTCTCCGCTATCCACACCTCATCGCCACCCTTTTCAACGGATGTGCGTTC |
| | 214204 | GCCGGCTCCCATTCCGTGTCACCCCTGCGCTCACCTACCACGGCTACGCT |
| | 214205 | TCCCGGGGTCCTTTTCACCTTTCCTTCACAGTACTATGCGCTATCGGTCA |
| | 214206 | CCAACATCCTGGTTGTCTGTGCAATTCCACATCCTTTTCCACTTAAATCC |
| | 214207 | GCTGGCGCCGCGGCTTCGAAGCCTCCCGCCTATGCTACACAATCCGCACC |
| | 214208 | ACGCCCAATAATTCCGGACAACGCTTGCCACCTACGTATTACCGCGGCTG |
| | 214209 | CCCTACCAGGTATCACATGCACACGGTTTAGCCTCATCCACGTTCGTTCG |
| | 214210 | AGCACCGGGCAGGTGTCAGGCTGTATACGTGATCTTTCAATTTGGCACAG |
| | 214211 | CTCCCCATCATGCCTCAACCTTCACGCCCAGCGGATTTACCTACCAGACA |
| | 214212 | CTTCAACTTAACCTCGCACGTAAACGTAACTCGCCGGTTCATTCTACAAA |
| | 214213 | AGAGTAGCCATAACACAAGGGTAGTATCCCAACAACGCCTCAGTCGAAAC |
| | 214214 | GCTCGCGTACCACTTTAAATGGCGAACAGCCATACCCTTGGGACCTACTT |
| | 214215 | CATAGACCTGTGTTTTTGCTAAACAGTTGCTTGAGCCTATTCTCTGCGGC |
| | 214216 | ACACACAACCCCTACCAAGTATCACATGCACACGGTTTAGCCTCATCCAC |
| | 214217 | TCTACGACCACGTACTCATGCGCCCTATTCAGACTCGCTTTCGCTGCGGC |
| | 214218 | CATTCGGATATCTCTGGATCAAGGCTTACTTACAGCTCCCCAAAGCATGT |
| | 214219 | GCTCTCCTACCACTGTTCGAAGAACAGTCCGCAGCTTCGGTGATACGTTT |
| | 214220 | TCTTTTCGTCCCATCGCGGGTAATCGGCATCTTCACCGATACTACAATTT |
| | 214221 | TGTACCCCCCATTGTAACACGTGTGTAGCCCCGGACGTAAGGGCCGTGCT |
| | 214222 | TCCCCGGAGTACCTTTTATCCTTTGAGCGATGTCCCTTCCATACGGAAAC |
| | 214223 | CGTTGAGCGATGGCCCTTCCTTTCGGTACCACCGGATCACTAAGCCCGAC |
| | 214224 | TTCAAGGGGTCTTACTCGTTATACGATGGGATATCTAATCTTGGAGTCGG |
| | 214225 | CCTCCTGATGTCCGACCAGGATTAGCCAACCTTCGTGCTCCTCCGTTACT |
| | 214226 | ACCTTGGTCTTACGGCGGGAGGGAATCTCACCCTCCTTATCGTTACTTAT |
| | 214227 | CGTGCCCCGCCCTACTCAGGATACTGCTAGCCACGATCAACTTTTAGGTA |
| | 214228 | CACCCTCAGTTCATCCGGAAGCTTTTCAACGCTTATCGGTTCGGTCCTCC |
| | 214229 | TCTACCTCCATGAGACTAATACGAGGCTAGCCCTAAAGCTATTTCGAGGA |
| | 214230 | TACCTGTGTCGGTTTGCGGTACGGGCACCTTAGCATACACTAGAACTTTT |
| | 214231 | AGCGGTTCCACAGCTTGTAAACATATGGTTTCAGGTTCTCTTTCACTCCC |
| | 214232 | TTATAGTTACGGCCGCCGTTCACTGGGGCTTCGGGTCAAAGCTTGCACTC |
| | 214233 | TTATAGTTACGGCCGCCGTTTACTGGGGCTTCGGTTCGATGCTTCGATTG |
| | 214234 | GCCTTACGGGGTGGTCCCCGCTCATTCCCACAAGGTTTCTCGTGTCTCGT |
| | 214235 | CCGGAGTTTTTCACACTGAGCCATGCAGCTCTGTGCGCTTATGCGGTATT |
| | 214236 | CTTCTCCCGTTGGCCTTAGAATCTTCTTCCTACCTACCTGTGTCGGTTTG |
| | 214237 | TGCCGCTTTAATGGGCGAACAGCCCAACCCTTGGGACCGACTACAGCCCC |
| | 214238 | GGAGTTCTTCGTGATATCTAAGCATTTCACCGCTACACCACGAATTCCGC |
| | 214239 | AGTGATGGGCAGGTTGGATACGCGTTACTCACCCGTGCGCCGGTCGACGC |
| | 214240 | TCACGGTACTCGTACGCTATCGGTCAGACAGGTATACTCAGGCTTACCCG |
| | 214241 | ACGCATTCGGAGTTTGTCAAGACTTGATAGGCGGTGAAGCCCTCGCATCT |
| | 214242 | CATCATCTGTATGGCATTCGGAGTTTGATATCCCTTAGTAAGCTTTGACG |
| | 214243 | TTCTCCGCTATCCACACCTCATCGCCACCCTTTTCAACGGATGTGCGTTC |
| | 214244 | AAGCACTTTGGTTTGGGCTGTTCCCCGTTCGCTCGCCGCTACTTAGGGAA |
| | 214245 | CACTTATGCCCGATTATTATCCACGCCAAACTCCTCGACTAGTGAGCTGT |
| | 214246 | CTTAGGACCCGACTCACCCAGGGCAGACAAACTTGACCCTGGAACCCTTG |
| | 214247 | CTCATCAGTTCTCACCCCCAATGTCCCCCGGATTTACCTGAGGGACGGGC |
| | 214248 | CCCATGGTGCACGCACCATGGTTTGGGCTCTTCCGCGTTCGCTCGCCGCT |
| | 214249 | GCTAGTCCTAAAACTATTTCGGGGAGAACCAGCTATCTCCGGGTTCGATT |
| | 214250 | ACCCCATCAATTAACCTTCCGGCACCGGGCAGGCGTCACACCGTATACGT |
| | 214251 | CATTCCGGCATTCTCACTCGAATACAATCCACCGCTGCTTCCGCTACGAC |
| | 214252 | GTTTCAGTTCGCCGGGTACCTCTCTTGCAGGCCATGTATTCACCTGCAGA |
| | 214253 | ACCTGAGGCTACTCGCCTCGACTACCTGTGTCGGTTTGCGGTACGGGTAG |
| | 214254 | AAGGCTAGCCCTAAAGCTATTTCGAGGAGAACCAGCTATCTCCGGGTTCG |
| | 214255 | ATTATTATTTTCTCCTCCTACGGGTACTGAGATGTTTCACTTCCCCGCGT |
| | 214256 | GCTTGCGCTAACCTCTCCTCTTAACCTTCCAGCACCGGGCAGGCGTCAGC |
| | 214257 | CAGAGGTCTGTCCAACACGGTCCTCTCGTACTAGTGTCAGAGCCACGCAA |
| | 214258 | ATCCTCTCAGACCAGTTACGGATCGTCGCCTTGGTAGGCCTTTACCCCAC |
| | 214259 | TCACGCAGAATTCCTCGTGCTCCGCGCTACTCAGGATACCACTAGGCTTC |
| | 214260 | CGCGTCTTCGGTGGCGTGCTTGAGCCCCGCTACATTGTCGGCGCGGAACC |
| | 214261 | TACTTATGCCCGATTATTATCCACGCCAAACTCCTCGACTAGTGAGCTGT |
| | 214262 | ACCGTAGTGCCTCGTCATCACGCCTCAGCCTTGATTTTCCGGATTTGCCT |
| | 214263 | AGCTGACGCCTGTATTTCCCAGTCTCCCACCTATCCTGTACATGAAATAC |
| | 214264 | GGCGTTGCTGATCCGCGATTACTAGCGACTCCGCCTTCACGGAGCCGGGT |
| | 214265 | GGGTGCCGCATGGGTTAAGCTTAGCGGATTTTCTCGGGAGTATGGTTACC |
| | 214266 | TCTTCAGCCCCAGGATGCGATGAGCCGACATCGAGGTGCCAAACTTCCTC |
| | 214267 | CGCCGGCACCGGATCACTATCTCCGACTTTCGTCCCTGCTCGATCCGTCG |
| | 214268 | CACACTATCCGTCTCCGTCACTCCTTCGCTCCATATACGGGTGCAGGAAT |
| | 214269 | ACTGTCAGGTTCGACTCTTCCTGCGGATTTGCCTGCAGGAATCAACATCT |
| | 214270 | TCTTTCGGCGAGGGGGTTTCCCACCCCCTTTATCGTTACTTATACCTACA |
| | 214271 | CTTTTCAGTGCTCTACAGGACACATCCATCACCTGAGGCTGTACCTCAAT |
| | 214272 | ATGACCCTCCCCGGTTGAGCCGGGGGCTTTCACATCAGACTTAAGAAACC |
| | 214273 | TTTCACAACTGACTTAAATATCCATCTACGCTCCCTTTAAACCCAATAAA |
| | 214274 | CTACTTATTTTCGGTCCCTTACGCCCGGGTCAACCAACGCCCGGGTCCAG |
| | 214275 | GTATTTAGGCTTACCGGGTGGTCCCGGCAGATTCACAGCAGATTCCACGA |
| | 214276 | CTTCAACCTGGACATGGATAGGTCACCCGGTTTCGGGTCTGCACACACTG |
| | 214277 | TCCGGAAGCCACGCCTCAAGGGCACAACCTCCAAGTCGACATCGTTTACG |
| | 214278 | GGTCACCCGGTTTCGGGCCCATTGTATGCAACTTAACGCCCTTTTCAAAC |
| | 214279 | GGCTACACATTTTAAAATGCTTAACCTTGCCGGAAAAAGTAACTCGTAGG |
| | 214280 | CAAATTTCCTGCGCCCGCGACGGATAGGGACCGAACTGTCTCACGACGTT |
| | 214281 | GCCAGGGTAGTATCCCACCGATGCCTCCACCGAAGCTGGCGCTCCGGTTT |
| | 214282 | TTCACTGAAGGGTAACACCCCATAACAGGTGCCAGGTTTCCCCATTCGGA |
| | 214283 | TCCAGCTAATCAGACGCGGGTCCATCTTATACCACCGGAGTTTTTCACAC |
| | 214284 | CTTTATGAATATGCTTAGCGGATTTTCTTGGGAGCCTGATTACGTCCATT |
| | 214285 | CATCAGGTAGTATTCAGGCTTACCAGGTGGTCCTGGCAGATTCACACGAA |
| | 214286 | CATGCACCACGGATTTGCCTATGATGCGCGCTGCGTGCTTGACCACGGAA |
| | 214287 | GACAGCCTGGCCATCATTACGCCATTCGTGCAGGTCGGAACTTACCCGAC |
| | 214288 | TCACTGCTTTAAGCAGCTCCGACCGCTTGTAGGCGCACGGTTTCAGGAAC |
| | 214289 | GCTCCCAACACCACGCGGCGATACCAACCCGAAGGAAGGAACCACCACGA |
| | 214290 | GACTTCCCATTCCATTCCACTAAACCTTTACAATACCGTTTTCTGTCCGA |
| | 214291 | ACTTAACGACCCGTCTGCGCTCCCTTTAAACCCAATAAATCCGGATAACG |
| | 214292 | GGGGTGGGTTTCATACTTAGATGCTTTCAGCAGTTATCCGCTCCGCACTT |
| | 214293 | GAAATCCTCGGATCAAAGCCCTGCTGGCGGCTCCCCGAGGCATATCGCAG |
| | 214294 | CTTTCATGGCCCCTACTGATCATCGCCTTGGTAGGCCATTACCCTACCAA |
| | 214295 | CTGTTATCCCCAGGGTAACTTTTATCCGTTGAGCGATGGCATTTCCACTC |
| | 214296 | CCTACCCTCAGCTCATCCAGAAGCTTTTCAACGCTTATTGGTGCGGTCCT |
| | 214297 | ACCAAGAAGGTGCTCCGACCGCTTGTAGGCACATGGTTTCAGGAACTATT |
| | 214298 | CTTCTCCCGTTGGCCTTAGAATCTTCTTCCTACCTACCTGTGTCGGTTTG |
| | 214299 | CCTGGCCAAGGGTAGATCACTTGGTTTCGCGTCTGCCACTGCCGACTATA |
| | 214300 | GGGGGTCTCCCTTATGCCGAAGGCACGGGAGCAATTTGCCGAGTTCCTTG |
| | 214301 | CATGGTTTAGCCCCGTTACATCTTCCGCGCAGGCCGACTCGACCAGTGAG |
| | 214302 | ATCCGCCGCCTTTTCAACGGAGGTCGGTTCGGTCCTCCATGGAATTTTAC |
| | 214303 | CCAAAGTCAATGCTAAGCTGTAGTAAAGGTTCACGGGGTCTTTTCGTCCC |
| | 214304 | AAAGTTCGGTGGTTACGGAATTTCTACCGTATGTGCATCGACTACGCCGT |
| | 214305 | CAGGTGTCAGCCCCTATACTTCATCTTTCGATTTAGCAGAGACCTGTGTT |
| | 214306 | ACTTAAAGCCAGCGCCCCTTCTCCCGAAGTTACGGGGCCATTTTGCCGAG |
| | 214307 | ACTTAGATGCTTTCAGCACTTATCCGATCCAGACTTAGATACCCGGCAAT |
| | 214308 | CTACAGGATTTAGTTTAGCGGATTTTCTTGGCAGCATGATTACATGCACT |
| | 214309 | CCTTAACCTTCCGGCACTGGGCAGGTGTCAGCCCGTATACGTCGTATCTC |
| | 214310 | TGAGCCAACATCCTAGTTGTCTTCGAAATCCCACATCCTTTTCCACTTAA |
| | 214311 | CAGGATGTGACGAGCCGACATCGAGGTGCCAAACCCCTCCGTCGATATGA |
| | 214312 | GGTTTTGCCGGTCCATGGTCGGTACGGGAATATCCACCCGTTCATCCATT |
| | 214313 | CTTTACGCTATCGGTCATTGGGTAGTATTTAGGCTTGGAGGGTGGTCCCC |
| | 214314 | GCATGGATTAAGTTTAGCGGATTTTCTAGGAAGTATGATTACCTACGCTA |
| | 214315 | ACTGTCCATCCTCTGGTTTCACAGAGCTATGTTAGAATTTCAGTAACCGA |
| | 214316 | ACCTCGCGGTACGCCTTCGACGCCGACTGGAATGCTCCCCTACCGATCAT |
| | 214317 | CTCTTGCGATGAGCTCTCCTCTTAACCTTCCAGCACCGGGCAGGTGTCAG |
| | 214318 | AGCTGACGCCTTGGCTTCCCAGTCTCCCACCTATCCTGTACATGTAATAC |
| | 214319 | GAATGAATGGCTGCTTCCAAGCCAACATCCTAGCTGTCACTGGGACCAGA |
| | 214320 | TGAGCCAACATCCTGGTTGTCTACGTATCTTCACATCGTTTTCCACTTAA |
| | 214321 | TGAGGGCACCTTTAGAAGCCTCCGTTACGCTTTTGGAGGCGACCACCCCA |
| | 214322 | TTAAATCGACCGAAGTTTCAATAAAGTAATTCCCGTTCGACTTGCATGTG |
| | 214323 | AGTCGGGTTGCAGACTCCAATCCGAACTGAGAGAGGCTTTAGGGATTAGC |
| | 214324 | CCTGTGTCGGTTTACGGTACGGGTATGGTATGAACAATAGCGGCTTTTCT |
| | 214325 | CTCCCGGATTCCGACGGAATTTCACGTGTTCCGCCGTACTCAGGATCCAC |
| | 214326 | AAACATTAAAGGGTGGTATTTCAAGGTCGGCTCCATGCAGACTGGCGTCC |
| | 214327 | CCTGAGTATATTCAACCCGACTACGTGTGTCCGTTTACGGTACGGGTACC |
| | 214328 | ACCACGAATTCCGCCTGCCTCAACTGCACTCAAGATATCCAGTATCAACT |
| | 214329 | AGTGAGCTATTACGCACTCTTTTAATGAGTGGCTGCTTCTAAGCCAACAT |
| | 214330 | GGCTCACGCCCCGCCTTCAACGCCGAGTGGAATGCTCCCCTACCGATGAT |
| | 214331 | AGGGCACCTTTAGAAGCCTCCGTTACACTTTTGGAGGCGACCACCCCAGT |
| | 214332 | CTCTGCCATCGCCATCGCCGTTCGGCTTAGACTTAGGACCCGACTGACCC |
| | 214333 | GCCGAGTTCCTTAACAAGGGTTCTCCCGCTCGTCTTAGGATTCTCTCCTC |
| | 214334 | CTCCCCCCCCCCCCTTCCCCTCCGCGGCCACCTTTCCCCCCCCCTCCCCA |
| | 214335 | CCCATATACACGGGTTAGAATCCAAACAAATGAAGGGTCGTATTTCAACA |
| | 214336 | CCCGCATCAGCGGGTTAGAACTCAAATAATCAAAGGGCCGTATTTCAACA |
| | 214337 | CTTCACAGTACTATACGCTATCGGTCACTGGGTAGTATTTAGGGTTGGAG |
| | 214338 | CATTCCCACTTAATACCACCGGATCACTAAGCCCTACTTTCGTACCTGCT |
| | 214339 | CTTCCGTCGCCCCGCGGTGGTTTCACTGCTCCGTCTCCACGTCGCCCCAT |
| | 214340 | GCGGGTAACCTGCATCTTCACAGGTACTAAAATTTCACCGAGTCTCTCGT |
| | 214341 | AAAAGTACGCGGTTGAGCTAATAATGCTCTTCCACAGCTTGTAAACACAG |
| | 214342 | CGGTACGGGAATATCAACCCGTTCATCCATTCGACTACGCCTGTCGGCCT |
| | 214343 | CCTCATCTACCTGTGTCGGTTTGCGGTACGGGCGCCTTAGTATACCTCAT |
| | 214344 | GTAGTATTTAGCCTTGGAGGGTGGTCCCTCCTGCTTCCCACAGGGTTTCA |
| | 214345 | TTCCGTCAGGTGGCGGCACTTACGTTCCTTCGTCTCTCCATCGAGGTATA |
| | 214346 | CTTCAAAGTCTCCGGCCTATCCTACACATCAATTACCCAAATTCAATGTT |
| | 214347 | CTCTCAGGGCTCTTACTAACTGAACGTTATGGGAAATCTCATCTTGAGGG |
| | 214348 | AAGTCCTCGAGCGATTAGTATTGGTCCGCTTCACGTCTCACAACGCTTCC |
| | 214349 | ACGCCTTTCGTGCAGGTCGGAACTTACCCGACAAGGAATTTCGCTACCTT |
| | 214350 | CCTGATCGACTTGTATGTCTCCCAGTCAAGCGCCCTTATGCCATTACACT |
| | 214351 | CGTTTTCCACTTAGCATGTATTAGGGACCTTAGCTGTGGGTCTGGGCTGT |
| | 214352 | TAGTCAAGTATCGTCTCTCTTCTTCCTTGCTGATAGACCTTTACATACCG |
| | 214353 | GACACATGGTTTTCTGCAACTGCCGGCCGGCCCGTCGGAGCCGGCGCACG |
| | 214354 | TTTCTCGTGTCTCGTGGTACTCTGGATCCCGCCTTGCCGCTCCCGGTTTC |
| | 214355 | CTAATGAGATGTTTCAGTTCACAGCGTTTACCTCCAACTAGACTATGAAT |
| | 214356 | ATCCTTTCCCACTTAGCACGCGCTTGGGGACCTTAGACGACGATCTGGGC |
| | 214357 | GTTTCACGTGTCTGGCCGTACTCTGGAACTCGCTCAGCTCTTGTCGTTTT |
| | 214358 | ATGGTTATAGTTACCACCGCCGTTTACCGGGGCTTGAATTCACCGCTTCG |
| | 214359 | CCGCACGGAATGGCCGTCTCGTCTCGGGGGGGGCTTCCCGCTTAGATGCT |
| | 214360 | TGCTCGACTTGTCTGTCTCGCAGTCAAGCTCCCTTATACCTTTACACTCT |
| | 214361 | ATGCATTGCCAGAAGCTTTTCCTGGAAGCCGTCATCATGTGCTTCGCTAC |
| | 214362 | TCTTGCGGCGAGCAGGTTTCTCACCTGCTTTATCGTTACTTATACCTACA |
| | 214363 | CGCGCACGCAACCCCCGACGGGTATCACGCGCACGCGGTTTGGTCTGATC |
| | 214364 | CGCTTTATCGTTACTTATGTCAGCATTCGCACTTCTGATACCTCCAGCAT |
| | 214365 | GACAGTGCCCAAATCATTACGCCTTTCGTGCGGGTCGGAACTTACCCGAC |
| | 214366 | TCCCATCTATCCTGTGCATGCAACACCGAAACCCAATATTAGGCTACAGT |
| | 214367 | CCCGGGTCATGCCCTTTCAGAGTGTCCCTCTGCTTAAAACTTTCGGTGGT |
| | 214368 | GGGATCCCATTCCCGGCTTCCGCTCTCTGCACGTGTCCCCACAGTTCTGT |
| | 214369 | CACCTCGCCATACACGCCGCACGGATTTGCCTATGCGACTGGCTGCGTGC |
| | 214370 | TCGCTCCTCAGCGTCAGTTACAGACCAGAGAGTCGCCTTCGCCACTGGTG |
| | 214371 | TATCGAACCATAACGGCTCCCATCATCACACCTCGCCATGCATGCCATGC |
| | 214372 | TTCACCGGGGCTTCAATTCGGAGCTTGCACCCCTCCTCTTGACCTTCCGG |
| | 214373 | CTGCAGGATTAAGTTTAGCGGATTTTCTCGGCAGCATGCTTACGCGCACT |
| | 214374 | TCTCCTACCATACCTATAAAGGTATCCACAGCTTCGGTAATATGTTTTAG |
| | 214375 | GGGCGCGTCATGCCCTCACGTCGAGGCTTTTCTCGGCAGCATAGGATCAC |
| | 214376 | CTCCGACGGATTGTAGGCGCACGGTTTCAGGAACTCTTTCACTCCCCTCC |
| | 214377 | CACTCGACTAGTGAGCTATTACGCACTCTTTGAATGAATAGCTGCTTCTA |
| | 214378 | ACTCCCCTCGCCGGGGTTCTTTTCGCCTTTCCCTCACGGTACTGGTTCAC |
| | 214379 | CCCTCCCGGGGTTCTTTTCACCTTTCCCTCACGGTACTATGCGCTATCGG |
| | 214380 | CTGGTCCTCTCGTACTAGGAGCAGATCCTCTCAAATTTCCTTCGCCCGCG |
| | 214381 | ACTTTCGTTACTGCTCGGGCCGTCACCCTCGCAGTTAGGCTAGCTTTTGC |
| | 214382 | TGTAATAGCCACGTAATTTAAAACTGAAATTGAGAGAGACTTACCCAGAG |
| | 214383 | GGTGGTCTACCGGGAGACTTACCCTCATGTGAGGTGGGAATACTCATCTT |
| | 214384 | TGGCGGTCTGGGCTGTTTCCCTTTCGACTACGGATCTTATCACTCGCAGT |
| | 214385 | TCTCCACATCACTCTTATAGGTAGTACAGGAATATTAACCTGTTCTGCCA |
| | 214386 | CCATTCTGAGGGTACCTTTGGGCGCCTCCGTTACTCTTTCGGAGGCGACC |
| | 214387 | GATGGCAGGACTGTCACTTCTCCGTCTCCACATCGCTCCATAAAGTAGTA |
| | 214388 | TCGGCGCAGAGTCACTCGACCAGTGAGCTATTACGCACTCTTTAAATGGT |
| | 214389 | CGCGGCATGGCTGCATCAGGCTTGCGCCCATTGTGCAGTATTCCCCACTG |
| | 214390 | CGGACATCCTTAATGACATTCGCAGTTTGATTGTATTCAGTACCCCGGGA |
| | 214391 | TACCGGCATTCTCACTTCTAAGCGCTCCACCAGTCCTTCCGGTCTGGCTT |
| | 214392 | TTCGGGCCTCCATTCAGTGTTACCTGAACTTCACCCTGGACATGGGTAGA |
| | 214393 | CGGAGGCGACCGCCCCAGTCAAACTCCCCGCCTGGCATTGTCCCACCGCC |
| | 214394 | ACCTTTTAGGAGGCGACCGCCCCAGTCAAACTGCCCGTCAGACACTGTCT |
| | 214395 | ACAGCCCAGCCTTCCGTTGTGCGTACTTCACTACACAACAGCCTCACTGC |
| | 214396 | TCATACCACCGGAGTTTTTACCCCTGCACCATGCGGTGCTGTGGTCTTAT |
| | 214397 | CACTCACCCGAAGGCTTGCTCCCAAACAAAAGAGGTTTACAACCCGAAGG |
| | 214398 | CGTCAATTCATTTGAGTTTTAACCTTGCGGCCGTACTCCCCAGGCGGTCG |
| | 214399 | ACTTTCGTTCCTGCTCGACTTGTCAGTCTCGCAGTCAGGCTGGCTTGTGC |
| | 214400 | CCACCAGGGAGGCTCCGACGGTTTGTGGGCGCACGGTTTCAGGAACTGTT |
| | 214401 | ACTGGCGTGCACGTCTCTTTGTCTCCCACCTATCCTGTACATGTATGACC |
| | 214402 | TGATAGCGTGAGGTCCGAAGATCCCCCACTTTCTCCCTCAGGACGTATGC |
| | 214403 | AAATCTTTAATCTCTTTCAGATGTCTTCTAGAGACGTCATTGGGTATTAG |
| | 214404 | CACCGGGGCCCCAAGACCCACACACACCAACAAACCCGAAGGCTTAGTGG |
| | 214405 | TACTTTTCCAATTTTTTTTTTTTTTTTTTTTTTTTTTTTCTTCCAATAAA |
| | 214406 | CTCTGCCTATCCTTCTGTGTCACTGCATCCGGTTGCTCGGCGGTATCGGA |
| | 214407 | ATGCCTGGCAGTTCCCTACTCTCGCATGGGGAGACCCCACACTACCATCG |
| | 214408 | AACATCCTGGTTGTCTAAGCAACTCCACATCCTTTTCCACTTAACGTATA |
| | 214409 | CTCCGGCCGGGCCCGCCAGGACCCGGACACACGCTCCCTCAACACCACGC |
| | 214410 | TTCTCTGCGGCTCTTTCGAGCACTCCTTATTCCGAAGTTACGGAGTCAAT |
| | 214411 | GGCACAGCCCTGTGTTTTTGTTAAACAGTTGCCTGGACCGATTCTCTGCG |
| | 214412 | TGCTCCCCACGCTTTCGAGCCTCAACGTCAGTTACTGTCCAGTAAGCCGC |
| | 214413 | ATGCGTCCCACGGATTTGCCTATGGGACGGGCTGCGTGCTTGACCACGGA |
| | 214414 | CCCAGACAACCATCGCTGGGGTTGAGCTACCTCCCTGCGTCCCTCCGCAG |
| | 214415 | ACGCCGTTAGGCCTCACCTTAGCTCCCGACTGACCTGGAGCGGACGAACC |
| | 214416 | GCCTTTAGCCTTAACCTTGCCAGCCGGCGTAACTCGCCGGACCGTTCTAC |
| | 214417 | TGGCCGTTCAACCTCTCAGTCCGGCTACTGATCGTCGCCATGGTGAGCCG |
| | 214418 | CGCTTTCGCTCGCCACTACTCACGGAGTATCCCTTCCTGCAGGTACTGAG |
| | 214419 | AGGACCCGACTCACCCGGGGACGACGAACGTGGCCCCGGAACCCTTGGTC |
| | 214420 | CATTGCGGAAGATTCCCCACTGCTGCCTCCCGTAGGAGTCTGGACCGTGT |
| | 214421 | GCATGTATTAGGCACGCCGCCAGCGTTCGTCCTGAGCCAGGATCAAACTC |
| | 214422 | CCCGTTACCCATCATCGCCATGGTAGGCCTTTACCCTACCATCTAGCTAA |
| | 214423 | GCCCTCACCCGATTAGTAACAGTCAGCTCCATGTGTTGCCACACTTCCAC |
| | 214424 | ACCCCAAGTCATCCCCCGGTTTTCAACCCAGGTGGGTTCGGTCCTCCACG |
| | 214425 | CGCCTTAGGACCCGACTAACCCAGGGCGGATAAACCTAGCCCTGGAACCC |
| | 214426 | TTCCGTCTTGCCGCGGGTACACTGCATCTTCACAGCGAGTTCAATTTCAC |
| | 214427 | GTACGGGTAACACAGAAATATGCTTAGCGGGTTTTCTTGGGAGCCGGTTT |
| | 214428 | AAGCTCCATGGGGTCTTTCCGTCTTGTCGCGGGTAACCGGCATCTTCACC |
| | 214429 | AACTTTATTCCCTTATAGAAGCAGTTTACAACCCATAGGGCCGTCTTCGT |
| | 214430 | GGGCGGGATTCGCACCCGCCTCTCGCTACTCATGTCTGCATTCTCACTCC |
| | 214431 | ATACTATCAGGTTCGGATCTCATGGTGGATTTGCCTGCCATGATCGACTC |
| | 214432 | ACGCCGTCGGGCATATAAAGCCCTCCGACAGTTTGTAAACACAGGGTTTC |
| | 214433 | GCCTATCGACCACGTGTTCTGCATGGGGTCTTCAGCGGCTCGGGGCCGCA |
| | 214434 | GGATAAGGGTTGCGCTCGTTGCGGGACTTAACCCAACATTTCACAACACG |
| | 214435 | GCCCCCGAGCCTTGGCAGTGCTCTACACGGCGTGAGGTTCATCCGAGGCT |
| | 214436 | TTCCTTAACCAAGAATCTCTCAACGCCTTAGTATGTTCTACCCGACCACG |
| | 214437 | TTTCCCTGCGGCTCCGGGACTTTATCCCTTAACCTTGCCAGTATGCACAA |
| | 214438 | TACTGTCAGGTTCGACTCTTGCACCGGATTTGCCTGGCACAATCAACATC |
| | 214439 | GCCTTCCCATGCCATTCTGCTAGATACCTTCCATACCGTGCGCTGTCCGA |
| | 214440 | ATGAGCCGACATCGAGGTGCCAAACACCGCCGTCGATATGAACTCTTGGG |
| | 214441 | TTCGGCTCAAAGTCCGGATTTGCCTGGACCTCTCATCACCTACACTCTTC |
| | 214442 | ACGCATTTCACCGCTACACGTGGAATTCCACTCTCCTCTTCTGCACTCAA |
| | 214443 | TTTCCGTTTCGCCTACGGGGCTCTCACCCTCTCTGGCCGGTCTTTCCAGA |
| | 214444 | GCCCCGGACAACCATCGCCGGGGATGAGCTACCTCCCTGCGTCCCTCCGC |
| | 214445 | TGTCGCGGGTAACCGGCATCTTCACCGGTACTACAATTTCGCCGGGCGGG |
| | 214446 | AAGCCCTCGATCTATTAGTACACACTTGCTGAATGGATCGCTCCACTTAC |
| | 214447 | CCTTGGCAACAGTTCTCTCGCTCACCTCGGGATACTCTCCCTGCCCACCT |
| | 214448 | TCTCCGCCAAAGCCAAAGCCTTGGTTTCCCAGAGTCCCATCTATCCTGTG |
| | 214449 | AGGAGTATTCAGGCTTACCAGGTGGTCCTGGCAGATTCACACGAGATTTC |
| | 214450 | CAGGATGTGACGAGCCGACATCGAGGTGCCAAACCACTCCGTCGATATGA |
| | 214451 | CAACCTGTTGTCCATCGGCTACGCTTTTCAGCCTCACCTTAGGTCCCGAC |
| | 214452 | TCAGATGGCGGCACTGCCACGACTCCGTCTCCACGTCACTCCCCAAGGTA |
| | 214453 | CTACGGGGCCATCACCCTCTGCGGCCCGGCATTCAATCCGGTTCGCCTCA |
| | 214454 | CCAGGTCATAAGGGGCATGATGATTTGACGTCATCCCCACCTTCCTCCGG |
| | 214455 | CCTTTAATCATGTGAACATGCGGACTCATGATGCCATCTTGTATTAATCT |
| | 214456 | TTTTCACACCTGACTTAAGATCCCGCCTTAAGCTTCCCTTTACACCCAGT |
| | 214457 | CCTACCCTCAGCTCATCCAGAAGCTTTTCAACGCTTATTGGTGCGGTCCT |
| | 214458 | GTCACACTGAGTATTTAGGCTTACCGGGTGGTCCCGGCAGATTCACAGCA |
| | 214459 | CCAGGATAACTTACGTACACCATTCGACGCCGTGAGTATGCTCCCCTACC |
| | 214460 | AGAGAACCAGCTATCTCCAAGTTCGTTTGGAATTTCTCCGCTACCCACAA |
| | 214461 | CCCGAAGTTACGGGGTAATTTTGCCGAGTTCCTTAACAACCCTTCTCCCG |
| | 214462 | GGCTCACGCCCCACCTTCGACGCGGAGTGGAATGCTCCCCTACCGATGTT |
| | 214463 | GTATCTAATCCTGTTTGCTCCCCACGCTTTCGCACTGAGCGTCAGTCTTC |
| | 214464 | CGCGAGTCCATCCTGAAGCGAATAAATCCTTTTCCCTCAGCACCATGCGG |
| | 214465 | TTATCGCAGCTTATCACGTCTTTCTTCGGCTCTTAGTGCCAAGGCATCCA |
| | 214466 | CGGCAAAGATTCTCACTTTGCTCTCGCTACTCATGCCGGCATTCTCTCTC |
| | 214467 | CCGGCAGACCGATCAAGAAAAAACCCACAACCCCGCACGCGCAACCCCTG |
| | 214468 | GGGCTGTTTCCCTTTTGACTATGAGACTTATCTCACATAGTCTGACTGCT |
| | 214469 | CCCCACTGCTGCCTCCCGTAGGAGTCTGGACCGTGTCTCAGTTCCAGTGT |
| | 214470 | TTGTGACTATTCTCTGCGGCCTGCTCTCGCAGGCACCCCTTATCCCGAAG |
| | 214471 | TTACCTCCACTTCAACCTGGACATGGGTAGGTCACCCGGTTTCGGGTCGA |
| | 214472 | TCGCAAGGTTATCCCCAAGTGAAGGGCAGGTTGGATACGCGTTACTCACC |
| | 214473 | CGCGATCGGCAGACCATGCGCGTTCAGGTACGGGGCCCTCACCCTCTGCG |
| | 214474 | GCCTTTCACTCCTACACTCGGCTCATCCAGAAGCTTTTCAACGCTTATTG |
| | 214475 | AGTTTGATAAGGTTCAGTAACCTCTCGGCCCCTAGCCAATTCAGTGCTTT |
| | 214476 | GGCTGCAACACGGTGACGTGAAGCGAATCCCAAAAACCATCTCTCAGTTC |
| | 214477 | CCGGTCTCTCGACTAGTGAGCTGTTACGCACTCTTTGAATGAATGGCTGC |
| | 214478 | GGATCACTAACTCCAACTTTCGTTACTGCTCGAACTGTCGCTCTCGCAGT |
| | 214479 | CTCGCGTACCGCTTTAATGGGCGAACAGCCCAACCCTTGGGACCGACTAC |
| | 214480 | CGGCTACGCCTTTCGGCCTCACCTTAGCTCCCGACTAACTTGGAGCGGAC |
| | 214481 | ACCTTTCCCTCACGGTACTGGTTCACTATCGGTCACTAGGGAGTATTTAG |
| | 214482 | ATACTGTCAGGTTCGACTCTTGCACCGGATTTGCCTGGCGCAATCAGCAT |
| | 214483 | TGTCATGCTCTATGGTCTTTCTTTCCAGAAAGTTCTTCTCCGATGTCTTC |
| | 214484 | ATCACCTTAGGATTCTCTCCTCGCCTACCTGTGTCGGTTTGCGGTACGGG |
| | 214485 | ACGTATTCACCGTGGCATTCTGATCCACGATTACTAGCGATTCCGACTTC |
| | 214486 | TAGAGCATTTTCTTGGAAGCAGGATTACCCACACTATTGGTTTACTCCGA |
| | 214487 | CATTGACCAATATTCCTCACTGCTGCCTCCCGTAGGAGTTTGGGCCGTGT |
| | 214488 | ATCCGCCGCCTTTTCAACGGAGGTCGGTTCGGTCCTCCATGGAATTTTAC |
| | 214489 | CCTGTGTCGGTTTACGGTACGGGCGCATGGCAAACGATAGCGGCTTTTCT |
| | 214490 | GCCCAAGGGTAGATCACTTGGTTTCGCGTCTACTCCTTCCGACTATACGC |
| | 214491 | GGCGGATTTTCCCAAATCCTTCGACTATCAAGTTCTTTGGTAACTCAAAT |
| | 214492 | CTTTCGGGGAGTACGAGCTATCTCCGAGTTTGATTGGCCTTTCACTCCTA |
| | 214493 | CTCTAGTTAGCCTGCTGCGTCCCTCCTTCACTCAATACTCTAGTACAGGA |
| | 214494 | CGCCGTCGATGTGAACTCTTGGGCGAGATCAGCCTGTTATCCCCAGGGTA |
| | 214495 | AGTCGTTTCCAACTGTTGTCCCCCACTCCAGGGCAGGTTACTCACGCGTT |
| | 214496 | GCATGCTTAAAGTTCGGCGGCTACGGAATTTCAACCGTATGTGCATCGAC |
| | 214497 | ATTACCGCGGCTGCTGGCACGGAATTAGCCGGTCCTTATTCTTATGGTAC |
| | 214498 | CGCACAGCCCTGTGTTTTTGTTAAACAGTTGCCTGGACCTATTCTCTGCG |
| | 214499 | CATAATTTTATTTTCTTCTCCTACGGGTACTGAGATGTTTCACTTCCCCG |
| | 214500 | ACCTTGGGCGGACGAACCTTCCCCAAGAAACCTTAGATTTTCGGCCATTA |
| | 214501 | TACTATCAGGTTCGGCTCTCAAGGTGGATTTGCCTGCCTCGATCTGCGCC |
| | 214502 | CTGTACATGCAATACCAAGCTCCAGTACCAAACTGGAGTAAAGCTCCATG |
| | 214503 | TGCTTGACCACGGAAAACCACCTCCGCGGCCGGCTCCCATTCCGTGTCAC |
| | 214504 | CAGTAACCCGCAAGGCTGCACCTAAATGCATTTCGGGGAGTACGAGCTAT |
| | 214505 | AAGCCAACATCCTGGTTGTCTACGCAATTGCACATCCTTTTCCACTTAAC |
| | 214506 | CACATCTTACGACGGCAGTCTCGACAGAGTCCCCAGCATCACCTGATGGT |
| | 214507 | TTATAGTTACGGCCGCCGTTCACTGGGGCTTCGATTCAATGCTTGCACAT |
| | 214508 | CATCTTTACTCGTACTGCAATTTCGCCGAGCTCCTGGTCGAGACAGTGGG |
| | 214509 | ACACCGAGCCATGCAGCTCTGTGCGCTTATGCGGTATTAGCAGTCATTTC |
| | 214510 | AGGTCCCGCGCTCCCCACCACCGTCCCCGTCAAAGACGGGGTTCGGGATG |
| | 214511 | ATCGAGCTCACAGCATGTGCATTTTTGTGTACGGGGCTGTCACCCTGTAT |
| | 214512 | GGAATTTCTCCCCTAGCCACAAGTCATCCGCTAACTTTTCAACGGTAGTC |
| | 214513 | GCTCTACCTCCAAGACTCTTACCTTGAGGCTAGCCCTAAAGCTATTTCGG |
| | 214514 | TTATAGTTACGGCCGCCGTTTACTGGGGCTTCAATTCAATGCTTCTCTTG |
| | 214515 | CTTCAACCTGGACATGGATAGGTCACCCGGTTTCGGGTCTGCACACACTG |
| | 214516 | GAGGCTAGCCCTAAAGCTATTTCGAGGAGAACCAGCTATCTCCGGGTTCG |
| | 214517 | TGGGCTGTTTCCCTTTCGACTACGGATCTTAGCACTCGCAGTCTGACTGC |
| | 214518 | CTCCGGCCTATCCTACACATCGATTGCCCAAATTCAATGTAAAGCTATAG |
| | 214519 | CCACTTCACCTAACAACAATGCAAAAAGGGCGTGCCACTGGTAGATGACA |
| | 214520 | ACCCTCAGGTCATCCAGAAGCTTTTCAACGCTTATTGGTTCGGTCCTCCA |
| | 214521 | AGTATCCCTTCCTGCAGGTACTGAGATGTTTCACTTCCCTGCGTACCCCC |
| | 214522 | ACTTGGTATCCCTTCGGCTCCGCACCTTAAGTGCTTAACCTCGCCAGTAT |
| | 214523 | TCGGATACGTGTGTCGTCACACTTAACCTTGCCGGCAAAGGCAACTCGTA |
| | 214524 | GGATCACTAACTCCAACTTTCGTTACTGCTCGAACTGTCGCTCTCGCAGT |
| | 214525 | CGAACGCCTTAGTATTTTCAACCTGACTACCTGTGTCGGTTTGGGGTACG |
| | 214526 | TTCTGCTTCTGCCCGTACACGTTGCTCCCCTACCCAGAAGTTTCCTTCTG |
| | 214527 | TCACGGTACTAGTTCGCTATCGGTCAGACAGGTATATCTAGGCTTACCCC |
| | 214528 | ACTTCTTACAAAGCTCCGACCGCTTGTAGGCGCATGGTTTCAGGGACTAT |
| | 214529 | TCTTTAAAGGATGGCTGCTTCTGAGCCAACCTCCTAGTTGTCTGGGCATC |
| | 214530 | CCCCATTGGGGCCCACAACACCGCACACACAACCCCTACCAAGTATCACA |
| | 214531 | CTCAACTTCAACCTGCTCATGGCTAGATCACCCGGTTTCGGGTCTGCAAC |
| | 214532 | GCATACGCCACACGGCTTATGCTCGCCACCCGCCACTGACTCGCAGACTC |
| | 214533 | GTTCGTCTATATGCCCGCACCTCACTGCGCCATGCCGGCAGACATGACCA |
| | 214534 | ATCTGGGCTGTTTCCCTTTTGACAATGACATTTATCTGACACTGTCTGAC |
| | 214535 | CTATTAGTAGCAGTCAGCTCCATGTGTTACCACACTTCCACCCCTGCCCT |
| | 214536 | TTTCACAACTGACTTAAACATCCATCTACGCTCCCTTTAAACCCAATAAA |
| | 214537 | CCGTTGAATTTTCGGCGCAGAGTCACTCGACCAGTGAGCTATTACGCACT |
| | 214538 | TCCTTAACGAGAGTTCGCTCGCTCACCTGAGGCTACTCGCCTCGACTACC |
| | 214539 | CCACTCCGTCGATGTGAACTCTTGGGAGTGATAAGCCTGTTATCCCCAGG |
| | 214540 | CAACAGGATGAAGTTTAGCGGATTTTCTCGGGAGTATGATTACATGCGCT |
| | 214541 | GACGGGCTGCGTGCTTGACCACGGAAAACCACCTCCGCGGCCGGCTACCC |
| | 214542 | CGGATTTGCCTATGATGCGCGCTGCGTGCTTGACCACGGAAAACCACCTC |
| | 214543 | CTGAGTTTGATAAGCTTCGCTAACCTCTCGGCCGCTAGGCTATTCAGTGC |
| | 214544 | TGCAGCACCTGTCTCACGGTTCCCGAAGGCACATTCTCATCTCTGAAAAC |
| | 214545 | AGGCTAGCCCTAAAGCTATTTCGGGGAGAACCAGCTATCTCCGAGTTCGA |
| | 214546 | GACGTCCTATCTCTAGGATTGTCAGAGGATGTCAAGACCTGGTAAGGTTC |
| | 214547 | GTTTTGACTACAGGGCTGTTACCTCCTATGGCGGGCCTTTCCAGACCTCT |
| | 214548 | CTGGGGCTTCAATTCAGATCTTCGCTAACGCTAAACCCTCCTCTTAACCT |
| | 214549 | CCTTAGTATATTCAACCCGACTACGTGTGTCCGTTTACGGTACGGGTACC |
| | 214550 | CTATACATCATCTTACGATTTAGCAGAGAGCTGTGTTTTTGATAAACAGT |
| | 214551 | CTAACAATGTCCCCCGACTCGATTCAGAGCCGCAGGTTAGAATTCCAATA |
| | 214552 | TTTGGCCTCTTCCGCGTTCGCTCGCCACTACTTACGGAATCTCAGTTGAT |
| | 214553 | CCCGCCAACTGGCTAATCAGACGCGGGTCCATCTTATACCACCGGAGTTT |
| | 214554 | GCTACTTGGGACACGCGATCGGAAGACGGCAAGCGTCCAGGTACGGGGCT |
| | 214555 | CATCACCGGGGATGAGCTACCTCACTGCGTCCCTCCGCAGCTTGCCTACT |
| | 214556 | ACAACTTAATACCCGATTATTATCCACGCCAGACTCCTCGACTAGTGAGC |
| | 214557 | CTCTCAGACCAGTTACGGATCGTCGCCTTGGTAGGCCTTTACCCCACCAA |
| | 214558 | TCACGTAGTCTGACTGCTGATCATCAATTAGCCGGCATTCAGAGTTTGAT |
| | 214559 | TAGGTCACCCGGTTTCGGGTGTACTGCATGCAACTTTACGCCCTTTTCAG |
| | 214560 | TACTTTAGTTCGCTCCACATCACGGCTTCGTCTCATGCACAGCGGATTTG |
| | 214561 | CTTACGGGGCTTTCACCCTCTCTGGCAGGCTTTCCCAAAAACCTTTCTGC |
| | 214562 | GGCCGGGCTTTCGATCCCGTTCTTCTATCCTCTCTCTTGCCATATCATGG |
| | 214563 | ACGGCTTCTACTCGTATACAACGCTCCCCTACCACTATAGTTTCCTACAA |
| | 214564 | ATCGAGTTTTCTTTCTCTTCCTCCGGCTACTTAGATGTTTCAGTTCACCG |
| | 214565 | GCTTTACATACCGAAATACTTCTTCACTCACGCGGCGTCGCTGCATCAGG |
| | 214566 | TCCCTTCTGCCTTTGCACTCTTCTAATGGTTTCCGACCATTATGAGGGAA |
| | 214567 | CTCCATCAGGCAGTTTCCCAGACATTACTCACCCGTCCGCCACTCGTCAG |
| | 214568 | TGCCAAACCTCCCCGTCGATGTGAACTCTTGGGGGAGATAAGCCTGTTAT |
| | 214569 | GCCTGGACCTATTCTCTGCGCCTCACATTACTGTGAGGACCCTTTATCCC |
| | 214570 | ACCTTTACACCTGCATCCTATCAACGTCGTAGTCTACAACGACCCTCAGA |
| | 214571 | GTATTCATTAACGCTAGAAGCTTTTCTTGGCAGAGTGACATCACTAGCTT |
| | 214572 | GCTGTTGGTCCGGATTGTTCTCCTTTAGGACATGGACCTTAGCACCCATG |
| | 214573 | AAAAACCCTCCCCCCCCCCCCTTCCCCTCCGCGGCCACCTTTCCCCCCCC |
| | 214574 | CTGTCGGTACCCGATACGGGCCCTCAAGCATCCAGTAGCTCTACCCCCCG |
| | 214575 | ATCTACGCATTTCACCGCTACACTAGGAATTCCGCTTACCTCTGTTGCAC |
| | 214576 | TCTGTCCCACCTTCGGCGGCTGGCTCCTAAAAGGTTACCTCACCGACTTC |
| | 214577 | TGACCAAGGGTAGATCACTTGGTTTCGCGTCTACTCCTTCCGACTAATCG |
| | 214578 | TGTGCACTTGCACTCGCCACCCGATTGCCAACCGGGCTGAGCGGACCTTT |
| | 214579 | CAGCCTCACTCCCAGGCTGTAAAATATGCCCCTTCGGAGTTTGATAAGGT |
| | 214580 | ACGCTTCCACTAACACACACACTGATTCAGGCTCTGGGCTGCTCCCCGTT |
| | 214581 | CTGTCAAGGTCGACTCTCCCTGCGGATTTGCCTACAGGAATCTACATCTA |
| | 214582 | CCTGTGTTTTTGGTAAACAGTCGCTACCCCCTGGCCTGTGCCACCCCCCG |
| | 214583 | ATCTGATAGCGTGAGGTCCGAAGATCCCCCACTTTCTCCCTCAGGACGTA |
| | 214584 | ACACTTTGGGACCTTAGCCGGTGGTCTGGGCTCTTTCCCTTTTGACTACC |
| | 214585 | CTACAAGGGATCTTACCTGATTGAATCAGTGGGATATCTTATCTTTGGGT |
| | 214586 | CTGAAGGGTAACCCCACATAACCAGGGCCAGGTTTCCCCATTCGGACATC |
| | 214587 | TCAGTCCGCGGCGCTGTCACGCCTCCGTCTCCACGTCACTCCTTAAGGTA |
| | 214588 | TTAACAAGGGTTCTCCCGTTCGTCTCAGGATTCTCTCCTCGCCCACCTGC |
| | 214589 | CTAACATCCTAGTTGTCTGTGCAACCCCACATCCTTTTCCACTTAACAAT |
| | 214590 | GATAAATCTTTCCCCCGTAGGGCACATTCGGTATTACTCCCAGTTTCCCG |
| | 214591 | GTTTACAATCCGAAGACCTTCTTCCCACACGCGGCGTTGCTGCATCAGGG |
| | 214592 | CGGCGCACTGCAGCTACCTGTCTGCGTCACCCCTGTTAACACGCTTGCCT |
| | 214593 | ATGAAGCTGGAATCGCTAGTAATCGTATATCAGCAATGATACGGTGAATA |
| | 214594 | CGGATTTGCCTATGGGACGGGCTGCGTGCTTGACCACGGAAAACCACCTC |
| | 214595 | GGATGACCCCCTTGCCGAAACAGTGCTCTACCCCCGGAGATGAATTCACG |
| | 214596 | GGTACGGGTAACATATACTATAACTTAGAAGATTTTCTCGGAAGTCGACT |
| | 214597 | CTTTGTAACTCCGTACAGAGTGTCCTACAACCCCAAGAGGCAAGCCTCTT |
| | 214598 | TCTTACTTCTTGCGAATGGGAGATCTCATCTTGGAGTAGGCTTCGTGCTT |
| | 214599 | GTCAAGCTCCCTTATACCTTTACACTCTGCGATTGATTTCCAACCAATCT |
| | 214600 | CCACCTATCCTACACATCAAGGCTCAATGTTCAGTGTCAAGCTATAGTAA |
| | 214601 | AAAAGCAGTTTACAACCCATAGGGCCGTCATCCTGCACGCTACTTGGCTG |
| | 214602 | TGAGGGCACCTTTAGAAGCCTCCGTTACACTTTTGGAGGCGACCACCCCA |
| | 214603 | ACGCTCTAACCTTATGGTAACCGGATTTGCCTGGTAACCAGCCGCTTCGC |
| | 214604 | GCTTCCAAGCCAACATCCTAGCTGTCTTAGCAATCTGACTTCGTTAGTTC |
| | 214605 | TGGCCGTTCACCCTCTCAGGCCGGCTATGGATCGTCGCCTTGGTAGGCCG |
| | 214606 | TGAGCCAACATCCTGGTTGTCTTCGAAATCCCACATCCTTTTCCACTTAA |
| | 214607 | CTAGAGAGTATTTAGGGTTAGGAGATGGTCCTCCCAGATTCCGACGAGAT |
| | 214608 | GCCTTTCGGCCTCGCGTTAGGTCCCGACTTACCCAGGGCGGACGAACCTT |
| | 214609 | GTCAAACTGCCCACCTGACACTGTCTCCCCGCCCGATAAGGGCGGCGGGT |
| | 214610 | TGGAGTAAAGCTCCATGGGGTCTTTCCGTCCTGGCGCAGGTAACCAGCAT |
| | 214611 | TTTCTTCTCCTACGGGTACTGAGATGTTTCACTTCCCCGCGTAACCCCCA |
| | 214612 | ACCAGCTATGGATCGTCGGCTTGGTAGGCCATTACCCCACCAACTACCTA |
| | 214613 | GGGGCAAGTTTCGTGCTTAGATGCTTTCAGCACTTATCTCTTCCGCATTT |
| | 214614 | CACCAGTGTCGGTTTGGGGTACGGGCGGCCATAGCCCTCACGCCGAGGCT |
| | 214615 | GACGTTCTGAACCCAGCTCGCGTGCCGCTTTAATGGGCGAACAGCCCAAC |
| | 214616 | GGTTAGAATTCCAATATCGCAAGGATGGTATCCCAACGGCCTCTCCGCCA |
| | 214617 | AGGTTACCCACGCGTTACTCACCCGTCCGCCACTAGAAACAATCTAAATC |
| | 214618 | CAGGTGTCACCCCATATACGTCATCTTTCGATTTAGCATAGAGCTGTGTT |
| | 214619 | TCTTTCGGCGAGGGGGTTTCCCACCCCCTTTATCGTTACTTATACCTACA |
| | 214620 | CTTAGGACCGTTATAGTTACGGCCGCCGTTTACCGGGGCTTCGATCAAGA |
| | 214621 | CCACTTAGTGATGATTTGGGGACCTTAGCTGGCGGTCTGGGTTGTTTCCC |
| | 214622 | TCCCCCATTCGGACACCTCCGCTTCTTCGCTTCCTTACAGCTTCACGGAG |
| | 214623 | ATAGATCACCCGGTTTCGGGTCTGCCCCCACTGACTCTGGCCCTCTTAAG |
| | 214624 | GCCTATCAAACACGTGTTCCACATGCGGGCTTCAGGACCCCGAAGGGCCC |
| | 214625 | CCATTTCTGACTGTTATCCCCCTGTATAAGGCAGGTTGCCCACGCGTTAC |
| | 214626 | CATCATCTGTATGGCATTCGGAGTTTGATATCCCTTAGTAAGCTTTGACG |
| | 214627 | GTTTGGGGTACGGGCGGCTAAAACCTCGCGCCGATGCTTTTCTAGGCAGC |
| | 214628 | GCGATGGCCCTTCCATACGGTACCACCGGATCACTAAGCCCGACTTTCGT |
| | 214629 | GAGTTAACCCCGGCGGTCCCCCGTGAGTTCCCACCATAACGTGCTGGCAA |
| | 214630 | GGATAATCGGCGGACGGGATTCCCACCCGTCACACGCTACTCATGCCTGC |
| | 214631 | TACCTCTTCGTTATGATATGTCCGCAACCCCAATAAAGAAAACTTTATTG |
| | 214632 | ACGTGTCCGGCGGTACTCTGGATTCAGCTGGCGGATCTTCTCTTTCGCAT |
| | 214633 | TCGAGACCAGACTTCGTTAGACTAACTCAGACAGGATTCCGGGACCTTAG |
| | 214634 | TGGCCGTTCAACCTCTCAGTCCGGCTACCAATCGTCGCCTTGGTGGGCCG |
| | 214635 | TATAAGTCAAGGCTGCACCTAAATGCATTTCGGGGAGTACGAGCTATCTC |
| | 214636 | CTACTGTTTCACCGCGTATACAACGCTCCCCTACCCAGCATGTAAACATG |
| | 214637 | TTATAGTTACGGCCGCCGTTTACTGGGGCTTCAATTCACACCTTCGACAA |
| | 214638 | GGATGGACCCCTCACCCAAACAGTGCTCTACCTCCATGATTCTTAATGTC |
| | 214639 | TTGGGACCTTAGCTGCGGGTCTGGGCTCTTTCCCTTTTGACTATCCAACT |
| | 214640 | GGCTCTGACTACTTGTAGGCACACGGTTTCAGGATCTCTTTCACTCCCCT |
| | 214641 | TCGCTACTCATTCCGGCATTCTCACTCGTGTACAGTCCACCGCTGCTTTC |
| | 214642 | CCTCCCCCCCCCCCCCCCCCCCCCCCCCTTCCCCCCTCTCCTCCCCCTTC |
| | 214643 | TAACACCCCATAACAGGTGCCAGGTTTCCCCATTCGGACATCCTCGGATC |
| | 214644 | ACCTCGACACGGACGGTGACAAGCCGGTACCAGAATATCAACTGGTTACC |
| | 214645 | ATAGATCACCCGGTTTCGGGTCTACTCCGGCTGACTCGCTCGCCCTATTC |
| | 214646 | TAAATGATGGCTGCTTCTAAGCCAACATCCTGGCTGTCTGGGCCTTCCCA |
| | 214647 | CAGCTTATAGGGTTGCGTACTTCACTACAACCCAACCTTGATGCTTGCAC |
| | 214648 | GCTTGGGCCTTTTCACTGCGGCTGACTTATCGCCAGCGCCCCTTCTCCCG |
| | 214649 | TGAGGTCGGCTTCACGCTTAGATGCTTTCAGCGTTTATCCGTTCCGCACT |
| | 214650 | CTCCGGGTACTGTCAGGTTCGACTCTCAGGGCGGATTTGCCTACCCCGAT |
| | 214651 | GCTTGGGCCTCTTCACTGCGGCTTAATTGCTTAAGCACTCCTTCTCGCTA |
| | 214652 | TTTATCCCGAAGTTACAGGGTCAGTTTGCCTAGTTCCTTAACCGTGAATC |
| | 214653 | GTAGTTAGCCGGAGCTTCCTCCTAAAGTACCGTCATTATCGTCCTTTAAG |
| | 214654 | TCTTTCGGCGAGGGGGTTTCCCGCCCCCTTTATCGTTACTTATACCTACA |
| | 214655 | GGATGTACTAGCAGCTTTTCTCGCCAGCGTGAACTCACTCGCTTCCCTAC |
| | 214656 | TTAGTATCAGTGCTTTATCAGGGGCGCATATACTCGGGTACCAGAATATC |
| | 214657 | GCTTGGCGGCGTCCTACTCTCACAGGGGGAAACCCCCGACTACCATCGGC |
| | 214658 | AGATTCACGCAGAATTCCTCGTGCTCCGCGCTACTCAGGATACTACTATG |
| | 214659 | TATCAACCTGATCATCTTTCAGGGATCTTACTTCCTTGCGGAATGGGAAA |
| | 214660 | TCAATAGGCACGCCACCACACTCTTATGGAGCGGTGACTGCTTGTAAGTC |
| | 214661 | CTACTATATTTCGGTCCCTTACGCCCGGGGCAACCATCGCCCGGGATAAC |
| | 214662 | TGCCATGACTGCTTGTAAGTCCACGGTTTCAGGTTCTCTTTCACTCCCCT |
| | 214663 | TCCATTTGCGCAGCACCAGTAATCATGTTCTTAACATAGTCAGCATGTCC |
| | 214664 | TCTCAGTCCCAATGTGGCCGGTCACCCTCTCAGGTCGGCTACTGATCGTC |
| | 214665 | TGGCCGTTCAACCTCTCAGTCCGGCTACTGATCGTCGCCTTGGTGGGCCT |
| | 214666 | TTATAGTTACGGCCGCCGTTTACCGGGGCTTCAATTCGGAGCTCTCACTC |
| | 214667 | TAGTGAAAGGTAGATTTTCTGACCCTTTCGACCTGAACGTACCAACCAGC |
| | 214668 | TCTTGGCAGTGTGACATCACTAACTTCGCTACTAAACTTCGCTCCCCATC |
| | 214669 | ACCTGCTTTCGCACCTGCTCGCGCCGTCACGCTCGCAGTCAAGCTGGCTT |
| | 214670 | TCGGAGTTTGATATTCTTCGGTAAGCTTTGACGCCCCCTAGGAAATTCAG |
| | 214671 | ACCCACCGAGTGGGCGCCCATCAGGTCTCAAGCACATAGCCGGCGGATTT |
| | 214672 | TACGGGTGCCGCATGGATAAGTTTAGCGGATTTTCTCGGGAGCATGGTTA |
| | 214673 | TTCAAACAACCATCCGGTATTAGCCCCGGTTTCCCGGAGTTATCCCAGTC |
| | 214674 | TCCTTAACCACGCTGCATACCATAACTCGCCGGACCATTCTACAAAAGGT |
| | 214675 | CCGGCACCGGGCAGGTGTCAGGCTGTATACGTCATCTTTCGAGTTTGCAC |
| | 214676 | CAGGAATATTCAGGCTTACCCAACGGTCTGGGCGGATTCGCACGGGGTTC |
| | 214677 | TTTATCCCGAAGTTACAGGGTCAGTTTGCCTAGTTCCTTAACCGTGAATC |
| | 214678 | CTTCTGCAATTGCACTCGTCGATTGGTTTCCATCCAATCTGAGCGTACCT |
| | 214679 | TCGGTTTGCCCTCTTCCGCGTTCGCTCGCCACTACTTACGGAATCTCGTT |
| | 214680 | AAGCTCCATGGGGTCTTTCCGTCTTGTCGCGGGTAACCGGCATCTTCACC |
| | 214681 | CATCGGCCTCACCGTTCGGCTGAGCCTTAGGACCCGACTAACCCTGATCC |
| | 214682 | CCTCGCCATACACGCCGCACGGATTTGCCTATGCGACTGGCTGCGTGCTT |
| | 214683 | CCTGTCGCGGGTAACCTGCATCTTCACAGGTACTATAATTTCACCGAGTC |
| | 214684 | TCAGCCTTATGGGAAACGGATTTGCCTATTTCCCAGCCTAACTGCTTGGA |
| | 214685 | TTTCACAACACGCTTAAAAGGCGGCCTACGCTCCCTTTAAACCCAATAAA |
| | 214686 | CCCCGCGGTACTCTGGATCCTGCTAGCTCTCGCTCCTTTTCGTCTACGTG |
| | 214687 | ATCGGTTCACACACTCACCCACCCCAGAAGCATCAAAAACACTCCCAAGA |
| | 214688 | TAGAAAGGAGGTGATCCAGCCGCACCTTCCGATACGGCTACCTTGTTACG |
| | 214689 | GCCCATTGTCCAATATTCCCCACTGCTGCCTCCCGTAGGAGTCTGGACCG |
| | 214690 | TCACCTTTCCCTCACGGTACTGGTTCGCTATCGGTCTCTCGGGAGTATTT |
| | 214691 | CGAAGTTACGGGGTCATTTTGCCGAGTTCCTTGACAATGCTTCTCCCGCC |
| | 214692 | AGATCCTCTCAAATTTCCTACGCCCGCGACGGATAGGGACCGAACTGTCT |
| | 214693 | TCTCAGTCCCAATGTGGCCGGTCACCCTCTCAGGTCGGCTACTGATCGTC |
| | 214694 | GGCAACCCAACAACCCACACATCATCATCTTCAGCTACAGGACTCTCACC |
| | 214695 | GCACTATTGCCTTGTCCCGGAGGACGCGGCATACTGTCAGGTTCGAATCA |
| | 214696 | CCGTGGCTTTCTGGTTAGGTACCGTCAAGGTACCGCCCTATTCGAACGGT |
| | 214697 | ATACTATCAGGTTCGACTCTTATCCCGGATTTGCCTGGGATAATCAACAT |
| | 214698 | TAAGTCCTTAACCTTGCTGCATACAATCGCTCGCCGGACCGTTCTACAAA |
| | 214699 | ATCTGGGCTGTTTCCCTTTTGACAATGACATTTATCTGACACTGTCTGAC |
| | 214700 | AGAGTAACCATAACACAAGGGTAGTATCCCAACAACGCCTCCTCCGAAAC |
| | 214701 | TGGACAGGATTCTCACCTGTCTTACGCTACTCATACCGGCATTCTCACTT |
| | 214702 | GCCCGGCTACCTTCCTGCGTCACACCTGTTAATACGCTTGGCTCCCCAGT |
| | 214703 | GTCAAGCTCCCTTATACCTTTACACTCTGCGAATGATTTCCAACCATTCT |
| | 214704 | CCCAACCCTTGGAACATACTACAGCCCCAGGTGGCGAAGAGCCGACATCG |
| | 214705 | TCTTTCGGCGAGGGGGTTTCCCACCCCCTTTATCGTTACTTATACCTACA |
| | 214706 | GGGTGTTCCCCTTTTGCCCGCGGAACTTATCTCTCGCGGACTGACTCCCA |
| | 214707 | ACCCGGTTTCGGGTCTATGGCATACAACTTCTCGCCCTTGTCAGACTCGC |
| | 214708 | CTGCCTGGCTTACGCCTACGGGGCTTTCACCCTCTCCGGCGCCGGCATTC |
| | 214709 | GCTGCGGGGCTGAGCCCCTTAACCTCGCCGGAAAAAGTAACTCGTAGGTT |
| | 214710 | AAGGATGGCTCTCTTCAAATCTCCTGCGCCCGCGACGGATAGGGACCGAA |
| | 214711 | CAGGCCCCACAACACCGCACACACAACCCCCGCCGGGTATCACATGCACA |
| | 214712 | CCCCTACGGATCCATGCCTTGGTGGGCCATTACCCCACCAACTAGCTAAT |
| | 214713 | ACTTAGCACTCATCGTTTACGGCGTGGACTACCAGGGTATCTAATCCTGT |
| | 214714 | TATCCATCGAAGACTAGGTGGGCCGTTACCCCGCCTACTATCTAATGGAA |
| | 214715 | CAGGCGTCAGCTCGTATACGTCATCTTTCGATTTAGCACAAACCTGTGTT |
| | 214716 | TGGCCGTTCAACCTCTCAGTCCGGCTACCGATCGCGGTCTTGGTGAGCCG |
| | 214717 | CCTGTGTTTTTGCTAAACAGTCGCCTGGGCCTATTCACTGCGGCTCTCTC |
| | 214718 | ACGCCTTTCGGCCTGACCTTAGCTCCCGACTTACTTGGAGCGGACGAACC |
| | 214719 | GGTCTGGGCTCTTTCCCTTTTGACTGCCCAACTTATCTCGTGCAGTCTGA |
| | 214720 | GAATGAATGGCTGCTTCTGAGCCAACATCCTAGTTGTCTTAGAGATCCCA |
| | 214721 | CCCCATCATGCCTCAACCTTCACGCCCAGCGGATTTACCTACCAGACAGT |
| | 214722 | AAAAGTACGCGGTTCATCATATAAAGATGTTCCACAGCTTGTAAACACAG |
| | 214723 | ATCTGAAGTCTTCTCGTTTAACATACAGGACTATTACCTTCTGTGGTGAG |
| | 214724 | GGTCACACCCTTTTGAAGTGTCCCTTTGCTTAAATTACAGATGGTTACGG |
| | 214725 | CAGCTTATCACGTCTTTCATCGGCTCTTAGTGCCAAGGCATCCACCCTGC |
| | 214726 | TTCCATTCGGCACCGCCGGATCACTATTCCCGACTTTCGTCCCTGTTCGA |
| | 214727 | TCCAGGTTCGATTGGCATTTCACCCCTACCCACACCTCATCCCCGCACTT |
| | 214728 | TACACCTTCTGCGTACATAGAACGCTCTCCTACCATCCCCTAAGGGATCC |
| | 214729 | GCTTGCGCTAACCTCTCCTCTTAACCTTCCAGCACCGGGCAGGCGTCAGC |
| | 214730 | CGCCCGTTAGTACCGGTCGGCTCCACCCCTCGCGGGGCTTCCACCTCCGG |
| | 214731 | CTCCGGGACCTTAGACGGCGGTCTGGATTCTTCTCCTCTCGGGGACGGAC |
| | 214732 | TGGTTAAGTCCTCGATCGATTAGTATCTGTCAGCTCCATGTGTCGCCACA |
| | 214733 | TAAGTCCTTAACCTTGCTGCATACAATCGCTCGCCGGACCGTTCTACAAA |
| | 214734 | ACCGGACTTTCCATTTCCGGCCCATGTTTCCCTCCCGTGTCCCCACAGTT |
| | 214735 | CGGCTCCCACCTATGCTACGCAGAAGAATCCGGATATCAATGCCAGACTA |
| | 214736 | ACCCCACATCCTTTTCCACTTAACATATATTTGGGGACCTTAGCTGGTGG |
| | 214737 | CCACACCACTTCACCTAACAACAACACACAAGCACGATGATGGTAGTCAC |
| | 214738 | TCATCCCCGCACTTTTCACGTACGTGTGGTTCGGACCTCCACGACGTCTT |
| | 214739 | CCCTTCAAAGCCTCCGACCTATCCTACACATCACGTGCCCAGATTCAATG |
| | 214740 | CTTCACCTAACAACAATGCGCAAGCAGGACGTCAGTAGCCATCCTCATCA |
| | 214741 | GGGGTACGGGCGGCAACGCGCCTGACGCCGAAGCTTTTCTCGGCACCACG |
| | 214742 | ATGGCTAGATCACCGGGTTTCGGGTCTATACCCTGCAACTTAACGCCCAG |
| | 214743 | ATTAAACCACATGCTCCACCGCTTGTGCGGGCCCCCGTCAATTCCTTTGA |
| | 214744 | GCCGGCTTTCCCAAAGCCGTTCTGCTACCTCTCGCGGATCAATTATGCGG |
| | 214745 | ACGCCTTCCGGCCTCACCTTAGCTCCCGACTAACTTGGAGCGGACGAACC |
| | 214746 | ACACCACGCGGCGATACCAACCCGAAGGAAGGAACCACCACGAGGCGGAG |
| | 214747 | CCGAACCCCGAGATGCACGCATCTCGGTTTGGCCTCTTTCGCGTTCGCTC |
| | 214748 | GGGACTTCATCCTGGCCAAGTGTAGATCACTTGGTTTCGCGTCTACCCCC |
| | 214749 | AGCCCTCGACCTATTAGTACTGCCAAGCTGAATGCCTCACGGCACTTACA |
| | 214750 | GGGAGCGGGATTACCTTCACTATCAATCCACCCGAAGGTTTCATGTACTA |
| | 214751 | CACGCGGGATTCCACGAGGCCCGCGCTACTTGGGACAACACGATCGGAAG |
| | 214752 | CCTACACCCTTCAACCATCTATTCCGTCAGATGGCGGCACTGTCACTACT |
| | 214753 | CCCCGTACCTGTTCTCGATACCAGGTTAGAACCCCGGTCACACAAGAGTG |
| | 214754 | GTTTCACGTGTCTGGCCGTACTCTGGATCCTGCGCAGCTCTCTCCGTTTT |
| | 214755 | TTCCCGCTTAGATGCTTTCAGCGGTTATCCCTCCCGAACGTAGCCAACCG |
| | 214756 | GCACTCCCACAGCTTGTAGACACAGGGTTTCAGGTTCTCTTTCACTCCCC |
| | 214757 | CCTGGCCAAGGGTAGATCACTTGGTTTCGCGTCTGCCACTGCCGACTATA |
| | 214758 | CCGCGAGGGACCTCACCTACATATCAGCGTGCCTTCTCCCGAAGTTACGG |
| | 214759 | AAGCTCCATGGGGTCTTTCCGTCTTGCCGCAGGTAACCGGCATCTTCACC |
| | 214760 | CGTCGGCTTGGTGGGCCGTTACCTCACCAACTACCTAATCCAACGCGGGT |
| | 214761 | GCTCCCACCTATCCTGTACATGCAATACCAAGCTCCAGTACCAAACTGGA |
| | 214762 | ACCGGACTTTCCATTTCCGGCCCATGTTTCCCTCCCGTGTCCCCACAGTT |
| | 214763 | CAGTTCCCCGGGTCTGCCTTCTCATATCCTATGAATTCAGATATGGATAC |
| | 214764 | GGTCCCGGCAGATTCGCGCAGGATTCCTCGTGTCCCGCGTTACTCAGGAT |
| | 214765 | GTATTAACTTTACTCCCTTCCTCCCCGCTGAAAGTACTTTACAACCCGAA |
| | 214766 | GGGGGCGGGGAGCGGGGCGTGGGCGGGAGGAGGGGAGGAGGCGTGGGGGG |
| | 214767 | CACGAGGCCCGCGCTACTTGGGACACGCGATCGGGAGACGGCAAGCGTCC |
| | 214768 | CGTTTATCCCCTCCCTACTTAGCTACCCAGCGATGCTCTTGGCAGAACAA |
| | 214769 | CCTCTTAACCTTCCGGCACCGGGCAGGCGTCAGAGCGTATACAGCGGCTT |
| | 214770 | ACCTTGGGCGGACGAACCTTCCCCAAGAAACCTTAGATTTTCGGCCATTA |
| | 214771 | TTCGTTCGCCACTACTAGCAGAATCATAATTTTATTTTCTTCTCCTACGG |
| | 214772 | GTTTCTCGCATGCCTCTCGCTACTCATACCGGCATTCTCTCTTGTGCAGT |
| | 214773 | CCTATCAACGTCGTCGTCTTCAACGTTCCTTCAGGACCCTTAAAGGGTCA |
| | 214774 | CTGTTATCCCCAGGGTAGCTTTTATCCGTTGAGCGACGGCATTTCCATTC |
| | 214775 | CAACAATATATGGAACACCTACCTGGCGAGACAATAGAATGTGTTCCCTC |
| | 214776 | TTATAGTTACGGCCGCCGTTTACTGGGGCTTCAATTCAATGCTTCTCTTG |
| | 214777 | ACAACAGAGCTTTACGATCCGAAAACCTTCATCACTCACGCGGCGTTGCT |
| | 214778 | CCCGTTCCACGGGTTAGAATCCAAACAAATAAAGGGTCGTATTTCAACAG |
| | 214779 | CCCCCTTCCCCCCTCTCCTCCCCCTTCCCCCTTTCGCGCCCCCTTTTCCC |
| | 214780 | TGGTGTTCCAACCAATTCGGCTTGGGGGGATGGATCTTAAAAACTGGTCC |
| | 214781 | CTCGTGTCCCGCCGTACTCAGGATCCTGCTTGGCATCAAGTGAATTTCAA |
| | 214782 | AGCTTCTACACCCTTCAACCATCTATTCCGTCAGATGGCGGCACTGTCAC |
| | 214783 | CCGATTAGTACCAGTCAACTCCGTACATCACTGCACTTCCATCCCTGGCC |
| | 214784 | CGCTTGAACCACACATCAGGCCCCACGGCTTGCCACCATGTTAACCCGAA |
| | 214785 | TGGCGAGACAATAGAATGTGTTCCCTCGTTTGTGGCATAGGACCATCAGC |
| | 214786 | CGTCCATCCCGGTCCTCTCGTACTAGGGACAGCTCCTCTCAAATATCCTG |
| | 214787 | TCGAGGTGCCAAACCTCCCCGTCGATGTGAACTCTTGGGGGAGATAAGCC |
| | 214788 | CTTAACAACTTAACCTCGCTGCACACAGTAACTCGCCGGCCCGTTCTACA |
| | 214789 | GTCAACAGGTAGTATTCAGGCTTACCAGGTGGTCCTGGCAGATTCACACG |
| | 214790 | AGGCACGCCGTCACACATTGCTGTGCTCCGACCGCTTGTAGGCGTATGGT |
| | 214791 | TCCCTTTCCCCCTTCCCCCCCCCCCCCCCCCCCCCCCCCTTTCCCCCCCC |
| | 214792 | AACCATGACTTTGGGACCTTAGCTGGCGGTCTGGGTTGTTTCCCTCTTCA |
| | 214793 | TGCCATTACACTCTATGAGACCGGTTACCAATCGGTCCGAAGGGCACCTT |
| | 214794 | GATTGGAATTTCTCCGCTACCCACACCTCATCCGCTACCATTTCAACGGG |
| | 214795 | TTCTCGTGTCCCGCGGTACTCTGGATCCTGCTCAGTCTGCTCTGTTTTCG |
| | 214796 | GTAAACCCCCACAACAGCTATGAATTCACTGAAGGGTAACACCCCATAAC |
| | 214797 | TCCCGAAGTTACAGGGTCAATTTGCCTAGTTCCTTAACCGTGAATCACTC |
| | 214798 | CCCCCGACGGGTATCACACGCGCAAGGTTTGGCCATCATCCGCTTTCGCT |
| | 214799 | CCCTTGTCTCAGTGCCCATCTCCGGGCTCCTCCTTCCAGAGCCCGTACCC |
| | 214800 | TCAGACTTGCTCTCGCTGCGGCTTCACACCTTAAGTGCTTAACCTCGCCG |
| | 214801 | CTCCATTCGGAAATCCACGGATCAATGCCTACTTACGGCTCCCCGTGGCT |
| | 214802 | TTTTACGGTTGAGCCGCAAACTTTCACAACTGACTTAACAACCCGCCTAC |
| | 214803 | CGGTTTAGGCTCTTCCGCGTTCGCTCGCCGCTACTTACGGAATCGAGTTT |
| | 214804 | CTTCACTATATACTCTAGTACAGGAATATCAACCTGTTGGCCATCGGATA |
| | 214805 | TGTTTCAGTTCACTGCGTCTTCCTTCTCATAACCTTAACAGTTATGGATA |
| | 214806 | GACGGAGCTTATCCCCCGCCGACTCACTGCCGGGATACGCGTCACGGGTA |
| | 214807 | CCGAACTGTCTCACGACGTTCTGAACCCAGCTCGCGTACCGCTTTAATGG |
| | 214808 | GACGGTGACAAGCCGGTACCAGAATATCAACTGGTTACCCATCGACTACG |
| | 214809 | GATGCGCATTCGGAGTTTGTCAAGACTTGATAGGCGGTGAAGCCCTCGCA |
| | 214810 | TAGGTGAGCCGTTACCCCACCTACTAGCTAATCCCATCTGGGCACATCCG |
| | 214811 | TGGTCCCCGCTCATTCCATCAAGGTTTCTCGTGTCTCGATGTACTCTGGA |
| | 214812 | ATGCTCCCCTACCGATACTTTTTAATGCTATCCCGCGCCTTCGGTACCTG |
| | 214813 | TTACCTTTACTTCAACCTGACCATGGGTAGGTCACCCGGTTTCGGGTCGA |
| | 214814 | GTAGTATTTAGCCTTGGAGGATGGTCCCTCCTGCTTCCCACAGGGTTTCA |
| | 214815 | GATTTCCAACCATTCTGAGGGAACCTTTGGGCGCCTCCGTTACCTTTTAG |
| | 214816 | ATCCCTTCCGGGCTTGGCTACTCGGCCGTAGACTTGGCAGTCTAACCGAT |
| | 214817 | GATGCGCATTCGGAGTTTGTCAAGACTTGATAGGCGGTGAAGCCCTCGCA |
| | 214818 | GTAATCGCCTTGGTGGGCCATTACCCCACCAACAAGCTGATAGGCCGCAG |
| | 214819 | ACCCTCAGGTCATCCAGAAGCTTTTCAACGCTTATTGGTTCGGTCCTCCA |
| | 214820 | AGCTCCATGGGGTCTTTCCGTCTAGTTGCGGGTAACCTGCATTTTCACAG |
| | 214821 | CGTGGGGATTAAGTTTAGCGGATTTTCTCGGGAGTATGATTACGTGCGCT |
| | 214822 | TATTTTGGGACCTTAACTGGCGGTCTGGGCTGTTTCCCTCTTGACCATGG |
| | 214823 | TAACCTTGCACGGGATCGTAACTCGCCGGTTCATTCTACAAAAGGCACGC |
| | 214824 | GACGGCCCAGAGACCTGCCTTCGCCATCGGTGTTCTTCCCGATATCTACA |
| | 214825 | TCACACGGGATTCCACGAGTCCCGCGCTACTTGGGAGACACGATCCGGAG |
| | 214826 | AGTATTTAGCCTTGGAGGATGGTCCCCCCATATTCAGACAGGATACCACG |
| | 214827 | TTTGGCCTCTTCCGCGTTCGCTCGCCACTACTAGCGGAATCTCGGTTGAT |
| | 214828 | CTGCTTCCAAGCCAACATCCTAGCTGTCTTAGCAGTCAGACTTCGTTAGT |
| | 214829 | CTGGGGCTTCAATTCACACCTTCGCTTACGCTAAGCGCTCCTCTTAACCT |
| | 214830 | GTTTGGGCTTCTCCCCTTTCGCTCGCCGCTACTCAGGGAATCACTGTTGT |
| | 214831 | ACAATCCACACCGAATGCCAATACCAAGGTATAGTAAAGGTCCCGGGGTC |
| | 214832 | CAGGGTAGCTTTTATCCGTTGAGCGATGGCCCTTCCATACGGTACCACCG |
| | 214833 | ATAGGCGGTGAAGCCCTCTTGACCTATCGGTCGCTCTACCTCTCACGGTG |
| | 214834 | GCCATGCAGATTCTCACTGCATTCGCGCTACTCATTCCGGCATTCTCACT |
| | 214835 | CGGTACGCCGCCGGTACGGGAATATCCACCCGTTCATCCATTCGACTACG |
| | 214836 | GCACTCCACAGCTCCTTCCGGTACTGCTTCTTCGCGTTAAGAATGCTCCT |
| | 214837 | CGTTCACTCTTCCTTGGCTCCTACCTATCCTGTACATGTGTAACAGATAC |
| | 214838 | CCCCTGACCTGATTCAAGGCCACAGGTTAGAATTTCAGCACTTCAAGAGT |
| | 214839 | CTACCCAGCAATGCCTTTGGCAAGACAACTGGTACACCAGCGGTAAGTCC |
| | 214840 | CCAGCACCGGGCAGGCGTCACCCCCTATACTTCATCTTACGATTTCGCAG |
| | 214841 | ATTCCTCACTGCTGCCTCCCGTAGGAGTTTGGACCGTGTCTCAGTCCCAA |
| | 214842 | CTACGAGACTCAAGCTTGCCAGTATCAGATGCAGTTCCCAGGTTGAGCCC |
| | 214843 | CTCTCAACGATGACGTCTCCTCTTAACCTTCCAGCACCGGGCAGGTGTCA |
| | 214844 | ATTACCGCGGCTGCTGGCACGGAGTTAGCCGGTGCTTCTTCTGCGGGTAA |
| | 214845 | GCGATGGACTTTCACACCGGACGCGACGAGCCGCCTACGAGCCCTTTACG |
| | 214846 | CCCACACCGGATATGGACCGAACTGTCTCACGACGTTCTGAACCCAGCTC |
| | 214847 | GAATGAATGGCTGCTTCTGAGCCAACATCCTAGTTGTCTTAGAGATCCCA |
| | 214848 | TCCCCGGAGTACCTTTTATCCTTTGAGCGATGTCCCTTCCATACGGAAAC |
| | 214849 | GTAAAGCCACCTTATACCCTTGCATTCTACAGGAGATTTCTGACCTCCTT |
| | 214850 | TCCGCCTGCGCACCCTTTAAACCCAATAAATCCGGATAACGCTCGTATCC |
| | 214851 | AGGAAGTATTCAGGCTTACCAGGTGGTCCTGGCAGATTCACACACGATTC |
| | 214852 | GTGTAGGATTCTCACCTACATCTCGCTACTCACACCGGCATTCTCACTTC |
| | 214853 | GAACTGAGACCGGTTTTCAGGGATCCGCTCCATGTCGCCATGTCGCATCC |
| | 214854 | TTCCTGAAGTTGATTCTTCGGGTTAGACAGCCAAACTTCTCAGGGTGGTA |
| | 214855 | CGGTACTGGTACGCTATCGGTCAGACAGGTATGCTTAGACTTACGCCACG |
| | 214856 | GTTTCCCCTCGACTTGCATGTGTTAAGCCTGTAGCTAGCGTTCATCCTGA |
| | 214857 | CGAAGTTACGGGGTCATTTTGCCGAGTTCCTTGACAATGCTTCTCCCGCC |
| | 214858 | CTTGGGAATGATCAGCCTGTTATCCCCGGGGTACCTTTTATCCGTTGAGC |
| | 214859 | GTCTATAAGTACTTCGATTTTTGCAAGTCCGAACCCCGAACGTCCGTAGA |
| | 214860 | CACCTTTCCTTCACAGTACTGGTTCACTATCGGTCTCTCGGGAGTATTTA |
| | 214861 | CCGGGAATTCCAGTCTCCCCTACCGCACTCCAGCCCGCCCGTACCCGGCG |
| | 214862 | ACAGCTTTTCTCGCCATCTTCCATCTCGGACTTCGGTACTAATTTCCCTC |
| | 214863 | TCTTTCGGCGAGGGGGGTTCCCGCCCCCTTTATCGTTACTTATACCTACA |
| | 214864 | TGTATGCGCCATTGTAGCACGTGTGTAGCCCTGGTCGTAAGGGCCATGAT |
| | 214865 | CTTTCGTCTCTGATCGAGTTGTCACTCTCGCAGTCAGGCACCCTTCTGCC |
| | 214866 | GATACTACAATTTCACTGAGCTCTTGGTTGAGACAGCGTCCGGATCATTA |
| | 214867 | GATGTTTCAGTTCAGGCGGTTCCCTCAATACACCTATTTTAAATTTCAGT |
| | 214868 | AAAAAAAAACAAAAAAAAAAACCCTCCCCCCCCCCCCTTCCCCTCCGCGG |
| | 214869 | GCCCTGTTAAGACTTGGTATCCCTTCGGCTCCGCACCTTAAGTGCTTAAC |
| | 214870 | ACCACGAATTCCGCCTGCCTCAACTGCACTCAAGATATCCAGTATCAACT |
| | 214871 | GAGTTTTTCACACTGTGCCATGCAGCACTGTGCGCTTATGCGGTATTAGC |
| | 214872 | TGCCTAGTTCCTTAACCATGAATCTCTCAACGCCTCAGTATGTTCTACCC |
| | 214873 | GGTGTGTACAAGGCCCGGGAACGTATTCACCGCGCCGTGGCTGATGCGCG |
| | 214874 | TTCGCCACCGGTATTCCTCCAGATCTCTACGCATTTCACCGCTACACCTG |
| | 214875 | CGCTTAACGCGTTAGCTCCGACACGGAACACGTGGAACGTGCCCCACATC |
| | 214876 | ACACGAGCCGAAACCCGTGTCTCTCAGACTCCCACCTATCCTGTGCATCA |
| | 214877 | ACTCGATTTCTCTTCGGCTCCACACCTTAAGTGCTTAACCTTGCCGGCAC |
| | 214878 | TGAACCCGCCCCGAAGGGAAACGCCATCTCTGGCGTCGTCGGGAACATGT |

### DESCRIPTION OF THE EMBODIMENTS

### I. Target and Off-Target Nucleic Acids

[0051] Described herein are methods for enriching viral molecules from a nucleic acid sample. In some embodiments, the viral molecules are viral RNA molecules. In some embodiments, the viral molecules are genomic viral DNA or RNA molecules. In some embodiments, solid supports can be prepared for enriching desired library fragments or depleting unwanted library fragments, wherein oligonucleotides are immobilized to the solid support. In some embodiments, the solid support is a flowcell.

[0052] Also disclosed herein are compositions comprising a probe set comprising at least two DNA probes complementary to at least one target viral nucleic acid molecules in a nucleic acid sample.

[0053] Disclosed herein are also kits for depleting or enriching libraries. In some embodiments, the kit comprises a probe compositions disclosed herein and instructions for using the probe set. Such a kit may further comprise reagents for preparing a cDNA library from RNA, such as reagents for a stranded method of cDNA preparation from a sample comprising RNA, as described below.

### A. Viral Targets

[0054] Public health officials need to be able to detect viral pathogens in a variety of environmental samples to detect disease outbreaks in a population and measure the intensity of disease outbreaks. Thus, this approach may be used to detect a variety of viral pathogens. In some embodiments, at least one viral molecule is from a virus listed in Table 1.

TABLE 1
Viral Targets

| | | | | |
|---|---|---|---|---|
| adenovirus | Aichivirus | Chapare | chikungunya | enterovirus |
| coxsackievirus | Crimean-Congo | Dengue virus | eastern equine | Guanarito virus |
| | haemorrhagic | | encephalitis | |
| | fever virus | | virus | |
| Dobrava virus | Saaremaa virus | Puumala virus | Tula virus | Hantaan virus |
| Seoul virus | Anjozorobe | Anjozorobe | Sangassou | |
| | hantavirus | hantavirus | virus | |
| Andes virus | Bermejo virus | Lechiguanas | Rio Mamore | choclo virus |
| | | virus | virus | |
| Maciel virus | Laguna Negra | Araraquara | Castelo dos | Juquitiba virus |
| | | virus | Sonhos virus | |
| bayou virus | Black Creek | sin nombre | orthohantavirus | Monongahela |
| | Canal virus | virus | | hantavirus |
| Hendra virus | hepatitis A | hepatitis B | hepatitis C | human |
| | virus | virus | virus | immunodeficiency |
| | | | | virus 1 |
| human | human | influenza A | influenza B | Japanese |
| immunodeficiency | metapneumovirus | virus | virus | encephalitis |
| virus 2 | | | | virus |
| Lassa virus | Mopeia Lassa | Lujo virus | Machupo virus | Marburg virus |
| | virus | | | |
| Ebola virus | monkeypox | Nipah virus | norovirus | human |
| | virus | | | papillomavirus |
| parainfluenza | parechovirus | Merkel cell | KI | polyomavirus |
| | | polyomavirus | polyomavirus | |
| | | | Stockholm 60 | |
| rhinovirus A | rhinovirus B, | rhinovirus C | Rift Valley | rotavirus A |
| | | | fever | |
| rotavirus B | rotavirus C | rotavirus H | respiratory | Sabia virus |
| | | | syncytial virus | |
| salivirus | sapovirus | SARS | Middle East | human |
| | | coronavirus | respiratory | coronavirus |
| | | | syndrome- | |
| | | | related | |
| | | | coronavirus | |
| tick-borne | Kyasanur forest | Omsk | torque teno | variola virus |
| encephalitis virus | disease virus | hemorrhagic | virus | |
| | | fever virus | | |
| Venezuelan equine | West Nile virus | western equine | yellow fever | Zika virus, |
| encephalitis | | encephalomyelitis | virus | parvovirus |
| virus | | virus | | |
| rubella virus | | | | |

[0055] In some embodiments, at least one viral molecule is selected from Adeno-associated virus 2 (AAV2), Aichi virus 1 (AiV-A1), Alkhumra hemorrhagic fever virus (AHFV), Andes virus (ANDV), Anjozorobe virus (ANJV), Araucaria virus, Australian bat lyssavirus (ABLV), Bayou virus (BAYV), BK polyomavirus (BKPyV), Black Creek Canal virus (BCCV), Bombali virus (BOMV), Bourbon virus (BRBV), Bundibugyo virus (BDBV), Cache Valley virus (CVV), California encephalitis virus (CEV), Cedar virus (CedV), Chapare virus (CHAPV), Chikungunya virus (CHIKV), Choclo virus (CHOV), Colorado tick fever virus (CTFV), Crimean-Congo hemorrhagic fever virus (CCHFV), Crimean-Congo hemorrhagic fever virus 2 (CCHFV-2), Dengue virus (DENV), Dobrava-Belgrade virus (DOBV), Duvenhage virus (DUVV), Eastern equine encephalitis virus (EEEV), Ebola virus (EBOV), Enterovirus A, Enterovirus B, Enterovirus C, Enterovirus D, Epstein-Barr virus (EBV), European bat lyssavirus (EBLV), Ghana virus (GhV), Guanarito virus (GTOV), Hantaan virus (HTNV), Heartland virus (HRTV), Hendra virus (HeV), Henipavirus unclassified, Hepatitis A virus (HAV), Hepatitis B virus (HBV), Hepatitis C virus (HCV), Hepatitis D virus (HDV), Hepatitis E virus (HEV), Herpes simplex virus 1 (HSV1), Herpes simplex virus 2 (HSV2), Human adenovirus A, Human adenovirus B, Human adenovirus C, Human adenovirus D, Human adenovirus E, Human adenovirus F, Human adenovirus G, Human bocavirus (HBOV), Human coronavirus 229E (HCoV_229E), Human coronavirus HKU1 (HCOV_HKU1), Human coronavirus NL63 (HCoV_NL63), Human coronavirus OC43 (HCoV_OC43), Human cytomegalovirus (HCMV), Human immunodeficiency virus 1 (HIV-1), Human immunodeficiency virus 2 (HIV-2), Human metapneumovirus (HMPV), Human papillomavirus 11 (HPV11), Human papillomavirus 16 (HPV16; high-risk), Human papillomavirus 18 (HPV18; high-risk), Human papillomavirus 26 (HPV26), Human papillomavirus 31 (HPV31; high-risk), Human papillomavirus 33 (HPV33; high-risk), Human papillomavirus 35 (HPV35; high-risk), Human papillomavirus 39 (HPV39; high-risk), Human papillomavirus 40 (HPV40), Human papillomavirus 42 (HPV42), Human papillomavirus 43 (HPV43), Human papillomavirus 44 (HPV44), Human papillomavirus 45 (HPV45; high-risk), Human papillomavirus 51 (HPV51; high-risk), Human papillomavirus 52 (HPV52; high-risk), Human papillomavirus 53 (HPV53), Human papillomavirus 54 (HPV54), Human papillomavirus 56 (HPV56; high-risk), Human papillomavirus 58 (HPV58; high-risk), Human papillomavirus 59 (HPV59; high-risk), Human papillomavirus 6 (HPV6), Human papillomavirus 61 (HPV61), Human papillomavirus 66 (HPV66; high-risk), Human papillomavirus 68 (HPV68; high-risk), Human papillomavirus 69 (HPV69), Human papillomavirus 70 (HPV70), Human papillomavirus 73 (HPV73), Human papillomavirus 82 (HPV82), Human parainfluenza virus 1 (HPIV-1), Human parainfluenza virus 2 (HPIV-2), Human parainfluenza virus 3 (HPIV-3), Human parainfluenza virus 4 (HPIV-4), Human parechovirus (HPeV), Human parvovirus B19 (B19V), Human polyomavirus 6 (HPyV6), Human polyomavirus 7 (HPyV7), Human polyomavirus 9 (HPyV9), Human respiratory syncytial virus A (HRSV-A), Human respiratory syncytial virus B (HRSV-B), Influenza A virus, Influenza B virus, Influenza C virus, Isla Vista virus, Itapua virus, Jamestown Canyon virus (JCV), Japanese encephalitis virus (JEV), JC polyomavirus (JCPyV), Junin virus (JUNV), Juquitiba virus, KI polyomavirus (KIPyV), Kyasanur Forest disease virus (KFDV), La Crosse virus (LACV), Lagos bat virus (LBV), Laguna Negra virus (LANV), Langya virus, Lassa virus (LASV), LI polyomavirus (LIPyV), Lloviu virus (LLOV), Lujo virus (LUJV), Luxi virus (LUXV), Lymphocytic choriomeningitis virus (LCMV), Machupo virus (MACV), Mamastrovirus 1 (MAstV1), Mamastrovirus 6 (MAstV6), Mamastrovirus 8 (MAstV8), Mamastrovirus 9 (MAstV9), Maporal virus (MAPV), Marburg virus (MARV), Mayaro virus (MAYV), Measles virus (MV), Menangle virus (MenV), Merkel cell polyomavirus (MCPyV), Middle East respiratory syndrome-related coronavirus (MERS-COV), Mojiang virus (MojV), Mokola virus (MOKV), Monkeypox virus (MPV), Monongahela hantavirus, Muleshoe virus, Mumps virus (MuV), Murray Valley encephalitis virus (MVEV), MW polyomavirus (MWPyV), New Jersey polyomavirus (NJPyV), Nipah virus (NiV), Norovirus, Omsk hemorrhagic fever virus (OHFV), Onyong-nyong virus (ONNV), Oropouche virus (OROV), Paranoa virus, Powassan virus (POWV), Punta Toro virus (PTV), Puumala virus (PUUV), Rabies virus (RABV), Ravn virus (RAVV), Reston virus (RESTV), Rhinovirus A (RV-A), Rhinovirus B (RV-B), Rhinovirus C (RV-C), Rift Valley fever virus (RVFV), Ross River virus (RRV), Rotavirus A (RVA), Rotavirus B (RVB), Rotavirus C (RVC), Rubella virus (RuV), Sabia virus (SBAV), Salivirus A (SaV-A), Sandfly fever Sicilian virus (SFCV), Sangassou virus (SANGV), Sapovirus, Semliki Forest virus (SFV), Seoul virus (SEOV), Severe acute respiratory syndrome coronavirus (SARS-COV), Severe acute respiratory syndrome coronavirus 2 (SARS-COV-2), Severe fever with thrombocytopenia syndrome virus (SFTSV), Simian virus 40 (SV40), Sin nombre virus (SNV), Sindbis virus (SINV), Snowshoe hare virus (SSHV), Sosuga virus (SoRV), St. Louis encephalitis virus (SLEV), STL polyomavirus (STLPyV), Sudan virus (SUDV), Tacheng tick virus 2 (TcTV-2), Tahyna virus (TAHV), Tai Forest virus (TAFV), Tick-borne encephalitis virus (TBEV), Torque teno virus (TTV), Toscana virus (TOSV), Trichodysplasia spinulosa-associated polyomavirus (TSPyV), Tula virus (TULV), Usutu virus (USUV), Varicella-zoster virus (VZV), Variola virus (VARV), Venezuelan equine encephalitis virus (VEEV), West Nile virus (WNV), Western equine encephalitis virus (WEEV), WU polyomavirus (WUPyV), Yellow fever virus (YFV), and Zika virus (ZIKV).

[0056] As used herein, the term “nucleic acid” is intended to be consistent with its use in the art and includes naturally occurring nucleic acids or functional analogs thereof. Particularly useful functional analogs are capable of hybridizing to a nucleic acid in a sequence specific fashion or capable of being used as a template for replication of a particular nucleotide sequence. Naturally occurring nucleic acids generally have a backbone containing phosphodiester bonds. An analog structure can have an alternate backbone linkage including any of a variety of those known in the art. Naturally occurring nucleic acids generally have a deoxyribose sugar (e.g., found in deoxyribonucleic acid (DNA)) or a ribose sugar (e.g., found in ribonucleic acid (RNA)). A nucleic acid can contain any of a variety of analogs of these sugar moieties that are known in the art. A nucleic acid can include native or non-native bases. In this regard, a native deoxyribonucleic acid can have one or more bases selected from the group consisting of adenine, thymine, cytosine or guanine and a ribonucleic acid can have one or more bases selected from the group consisting of uracil, adenine, cytosine, or guanine. Useful non-native bases that can be included in a nucleic acid are known in the art. The term “target,” when used in reference to a nucleic acid, is intended as a semantic identifier for the nucleic acid in the context of a method or composition set forth herein and does not necessarily limit the structure or function of the nucleic acid beyond what is otherwise explicitly indicated.

[0057] In some embodiments, the present methods decrease library preparation costs and hands-on-time, as compared to prior art methods of enrichment, followed by library preparation.

[0058] As used herein, “desired RNA” or “a desired RNA sequence” refers to any RNA that a user wants to analyze. As used herein, a desired RNA includes the complement of a desired RNA sequence. Desired RNA may be RNA from which a user would like to collect sequencing data, after cDNA and library preparation. In some instances, the desired RNA is mRNA (or messenger RNA). In some instances, the desired RNA is a portion of the mRNA in a sample. For example, a user may want to analyze RNA transcribed from cancer-related genes, and thus this is the desired RNA.

[0059] As used herein, “desired library fragments” refers to library fragments prepared from cDNA prepared from desired RNA.

[0060] In some embodiments, the desired RNA sequence is sequence from a virus listed in Table 1.

### B. Off Target RNA

[0061] Also described herein are methods for depleting off-target RNA molecules from a nucleic acid sample. Samples comprising RNA often have a high abundance of RNA that is not of interest to the user. For example, ribosomal RNA (rRNA) typically comprises most of the RNA molecules in total RNA (approximately 80%-95%). One challenge in RNA sequencing for gene expression analysis is that following RNA extraction most of the extracted material is dominated by a small number of highly abundant transcripts, such as the non-coding ribosomal ribonucleic acids (rRNAs). In a total RNA sample from human blood, globin messenger RNAs (mRNAs) can be present at a dominating level. Accordingly, sequencing RNA transcripts (RNA-Seq) is often inefficient and cost prohibitive for many users and applications. There is a need to deplete abundant transcripts, such as rRNAs and mRNAs, in a sample prior to RNA sequencing.

[0062] As used herein, “off-target RNA,” “an off-target RNA sequence”, “unwanted RNA,” or “an unwanted RNA sequence” refers to any RNA that a user does not wish to analyze. As used herein, an unwanted RNA includes the complement of an unwanted RNA sequence. When RNA is converted into cDNA and this cDNA is prepared into a library, a user would sequence library fragments that were prepared from all RNA transcripts in the absence of depletion. Methods described herein for depleting library fragments prepared from unwanted RNA can thus save the user time and consumables related to sequencing and analyzing sequencing data prepared from unwanted RNA. In some embodiments, off-target RNA relates to small non-coding RNA (sncRNA). In some embodiments, the off-target RNA comprises sncRNA with MALAT 1. In some embodiments, off-target RNA comprises at least one small noncoding RNA chosen from RN7SK, RN7SL1, RN7SL2, RN7SL5P, RPPH1, SNORD3A. In some embodiments the off-target RNA is not MALAT1.Small noncoding RNAs are highly abundant as reads during the sequencing process and can lead to noise when analyzing sequencing data. MALAT1 is also highly abundant in the genome. MALAT1 is a highly conserved large, infrequently spliced non-coding RNA which is highly expressed in the nucleus. Trying to remove these reads after sequencing results in wasted sequencing, both in terms of reagents and analysis.

[0063] As used herein, “off-target RNA,” “unwanted RNA” or “unwanted RNA sequence” also includes fragments of such RNA. For example, an unwanted RNA may comprise part of the sequence of an unwanted RNA. In some embodiments, unwanted RNA sequence is from human, rat, mouse, or bacteria. In some embodiments, the bacteria are Archaea species, E. Coli, or B. subtilis.

[0064] As used herein, “off-target library fragments” or “unwanted library fragments” also includes library fragments prepared from cDNA prepared from unwanted RNA.

[0065] Also described herein are compositions comprising a probe set comprising at least two DNA probes complementary to discontiguous sequences at least 5, or at least 10, or 15 bases apart along the full length of at least one off-target RNA molecule in a nucleic acid sample and a ribonuclease capable of degrading RNA in a DNA:RNA hybrid, wherein the off-target RNA comprises at least one small noncoding RNA chosen from RN7SK, RN7SL1, RN7SL2, RN7SL5P, RPPH1, and SNORD3A

[0066] In some embodiments, the off-target RNA is high-abundance RNA. High-abundance RNA is RNA that is very abundant in many samples and which users do not wish to sequence, but it may or may not be present in a given sample. In some embodiments, the high-abundance RNA sequence is a ribosomal RNA (rRNA) sequence. Exemplary high-abundance RNAs are disclosed in WO2021/127191 and WO 2020/132304.

[0067] In some embodiments, the high-abundance RNA sequences are the most abundant RNA sequences determined to be in a sample. In some embodiments, the high-abundance RNA sequences are the most abundant RNA sequences across a plurality of samples even though they may not be the most abundant in a given sample. In some embodiments, a user utilizes a method of determining the most abundant RNA sequences in a sample, as described herein.

[0068] In a given sample, the most abundant sequences are the 100 most abundant sequences. In some embodiments, in addition to depleting the 100 most abundant sequences, the method also is capable of depleting the 1,000 most abundant sequences, or the 10,000 most abundant sequences in a sample. In some embodiments, the off-target RNA sequence comprises a sequence with homology of at least 90%, at least 95%, or at least 99% to a most abundant sequence in a sample comprising RNA. In some embodiments, the off-target RNA sequence comprises a sequence with homology of at least 90%, at least 95%, or at least 99% to a most abundant sequence in a sample comprising RNA, wherein the most abundant sequences comprise the 100 most abundant sequences. In some embodiments, homology is measured against the 1,000 most abundant sequences, or the 10,000 most abundant sequences.

[0069] In some embodiments, the high-abundance RNA sequences are comprised in RNA known to be highly abundant in a range of samples.

[0070] In some embodiments, the off-target RNA sequence is globin mRNA or 28S, 23S, 18S, 5.8S, 5S, 16S, 12S, HBA-A1, HBA-A2, HBB, HBB-B1, HBB-B2, HBG1, or HBG2 RNA, or a fragment thereof.

[0071] In some embodiments, the off-target RNA sequence is 28S, 18S, 5.8S, 5S, 16S, or 12S RNA from humans, or a fragment thereof. In some embodiments, the off-target RNA sequence is rat 16S, rat 28S, mouse 16S, or mouse 28S RNA.

[0072] In some embodiments, the off-target RNA sequence is comprised in mRNA related to one or more “housekeeping” genes. For example, a housekeeping gene may be one that is commonly expressed in a sample from a tumor or other oncology-related sample, but that is not implicated in tumor genesis or progression. Housekeeping genes are typically constitutive genes that are required for the maintenance of basal cellular functions that are essential for the existence of a cell, regardless of its specific role in the tissue or organism.

[0073] In some embodiments, the off-target RNA sequence is comprised in 23S, 16S, or 5S RNA from Gram-positive or Gram-negative bacteria.

### II. Compositions

[0074] Described herein are compositions comprising a probe set comprising at least one DNA probe comprising at least one sequence of SEQ ID NOs: 1-213,280, or its complement.

[0075] Also described herein are compositions comprising a probe set comprising at least two DNA probes complementary to at least one target viral nucleic acid molecules in a nucleic acid sample wherein the target viral nucleic comprises at least one virus molecule selected from Table 2.

[0076] In some embodiments, the one or more target viral nucleic acids are viral RNA molecules. In some embodiments, the one or more target viral nucleic acids are genomic viral RNA molecules. In some embodiments, the one or more target viral nucleic acids are viral DNA molecules. In some embodiments, the one or more target viral nucleic acids are genomic viral DNA molecules.

[0077] In some embodiments, the probe set further comprises at least two DNA probes that each hybridize to at least one target viral molecule selected from Table 1.

[0078] In some embodiments, the probe set further comprises at least two DNA probes that each hybridize to at least one target virus molecule selected from Table 2.

TABLE 2
VIRAL TARGETS AND SOURCES

| Virus | Target | Type | Source | Description |
|---|---|---|---|---|
| Adenovirus B3 | Full | type 3, 4, 7 | Consensus | |
| | genome | cause more | | |
| | | outbreaks- 4 | | |
| | | and 7 are live | | |
| | | vaccines for | | |
| | | the army and | | |
| | | are monitored | | |
| | | in env for | | |
| | | shedding | | |
| Adenovirus B7 | Full | | Consensus | |
| | genome | | | |
| Adenovirus E4 | Full | | Consensus | |
| | genome | | | |
| Aichivirus A | Full | | NC_001918.1 | Aichivirus |
| | genome | | | |
| Aichivirus B | Full | | NC_004421.1 | Aichivirus B genomic RNA, |
| | genome | | | complete genome, strain: U-1 |
| Aichivirus C | Full | | Consensus | NC_027054.1, NC_016769.1, |
| | genome | | | NC_011829.1 |
| Astrovirus | Full | | NC_001943.1 | |
| | genome | | | |
| Chapare virus | Segment | | NC_010562.1 | Chapare virus segment S |
| | S | | | |
| Chapare virus | Segment | | NC_010563.1 | Chapare virus segment L |
| | L | | | |
| Chikungunya | Full | | NC_004162.2 | Chikungunya virus |
| | genome | | | |
| Enterovirus | Full | Enterovirus | NC_002058.3 | Poliovirus, complete genome |
| | genome | is a species of | | |
| | | enterovirus. | | |
| | | Its best known | | |
| | | subtype is | | |
| | | poliovirus, the | | |
| | | cause of | | |
| | | poliomyelitis. | | |
| | | [1] There are | | |
| | | three | | |
| | | serotypes of | | |
| | | poliovirus, | | |
| | | PV1, PV2, | | |
| | | and PV3. | | |
| | | Other | | |
| | | subtypes of | | |
| | | Enterovirus | | |
| | | include EV- | | |
| | | C95, EV-C96, | | |
| | | EV-C99, EV- | | |
| | | C102, EV- | | |
| | | C104, EV- | | |
| | | C105, EV- | | |
| | | C109, EV- | | |
| | | C116, EV- | | |
| | | C117, and | | |
| | | EV-C118. | | |
| | | Some non- | | |
| | | polio types of | | |
| | | Enterovirus | | |
| | | have been | | |
| | | associated | | |
| | | with the polio- | | |
| | | like condition | | |
| | | AFP (acute | | |
| | | flaccid | | |
| | | paralysis), | | |
| | | including 2 | | |
| | | isolates of | | |
| | | EV-C95 from | | |
| | | Chad. | | |
| Enterovirus A | Full | | NC_001612.1 | Human enterovirus A, complete |
| | genome | | | genome |
| Enterovirus B | Full | | NC_001472.1 | Human enterovirus B, complete |
| | genome | | | genome |
| Enterovirus D | Full | | NC_001430.1 | Human enterovirus D, complete |
| | genome | | | genome |
| Coxsackieviruses | Full | Enterovirus | AF499635.1 | Human coxsackievirus A1 strain |
| A1 | genome | | | Tompkins |
| Coxsackieviruses | Full | Enterovirus A | NC_038306.1 | Human coxsackievirus A2 strain |
| A2 | genome | | | Fleetwood |
| Coxsackieviruses | Full | Enterovirus A | AY421761.1 | Human coxsackievirus A3 strain |
| A3 | genome | | | Olson |
| Coxsackieviruses | Full | abolished | Consensus | |
| A4 | genome | | | |
| Coxsackieviruses | Full | Enterovirus A | Consensus | |
| A5 | genome | | | |
| Coxsackieviruses | Full | abolished | Consensus | |
| A6 | genome | | | |
| Coxsackieviruses | Full | Enterovirus A | Consensus | |
| A7 | genome | | | |
| Coxsackieviruses | Full | Enterovirus A | Consensus | |
| A8 | genome | | | |
| Coxsackieviruses | Full | Enterovirus B | Consensus | |
| A9 | genome | | | |
| Coxsackieviruses | Full | Enterovirus A | Consensus | |
| A10 | genome | | | |
| Coxsackieviruses | Full | Enterovirus | Consensus | |
| A11 | genome | | | |
| Coxsackieviruses | Full | Enterovirus A | Consensus | |
| A12 | genome | | | |
| Coxsackieviruses | Full | Enterovirus | Consensus | |
| A13 | genome | | | |
| Coxsackieviruses | Full | Enterovirus A | Consensus | |
| A14 | genome | | | |
| Coxsackieviruses | Full | Enterovirus | AF465512.1 | |
| A15 | genome | | | |
| Coxsackieviruses | Full | Enterovirus A | Consensus | |
| A16 | genome | | | |
| Coxsackieviruses | Full | Enterovirus C | Consensus | |
| A17 | genome | | | |
| Coxsackieviruses | Full | Enterovirus C | Consensus | |
| A18 | genome | | | |
| Coxsackieviruses | Full | Enterovirus C | Consensus | |
| A19 | genome | | | |
| Coxsackieviruses | Full | Enterovirus C | Consensus | |
| A20 | genome | | | |
| Coxsackieviruses | Full | Enterovirus C | Consensus | |
| A21 | genome | | | |
| Coxsackieviruses | Full | Enterovirus C | Consensus | |
| A24 | genome | | | |
| Coxsackieviruses | Full | Enterovirus B | Consensus | |
| B1 | genome | | | |
| Coxsackieviruses | Full | Enterovirus B | Consensus | |
| B2 | genome | | | |
| Coxsackieviruses | Full | Enterovirus B | Consensus | |
| B3 | genome | | | |
| Coxsackieviruses | Full | Enterovirus B | Consensus | |
| B4 | genome | | | |
| Coxsackieviruses | Full | Enterovirus B | Consensus | |
| B5 | genome | | | |
| Coxsackieviruses | Full | Enterovirus B | Consensus | |
| B6 | genome | | | |
| Crimean-congo | Full | hhs Select | NC_005300.2 | Crimean-Congo hemorrhagic |
| haemorrhagic | genome | agent | | fever virus segment M |
| fever virus | | | | |
| Crimean-congo | Full | | NC_005301.3 | Crimean-Congo hemorrhagic |
| haemorrhagic | genome | | | fever virus segment L |
| fever virus | | | | |
| Crimean-congo | Full | | NC_005302.1 | Crimean-Congo hemorrhagic |
| haemorrhagic | genome | | | fever virus segment S |
| fever virus | | | | |
| Dengue | Full | Differentiate 4 | NC_001474.2 | Dengue virus 2 |
| serotype 1, 2 , 3, 4 | genome | serotypes | | |
| Dengue | Full | | NC_001475.2 | Dengue virus 3 |
| serotype 1, 2, 3, 4 | genome | | | |
| Dengue | Full | | NC_001477.1 | Dengue virus 1 |
| serotype 1, 2, 3, 4 | genome | | | |
| Dengue | Full | | NC_002640.1 | Dengue virus 4 |
| serotype 1, 2, 3, 4 | genome | | | |
| Eastern equine | full | | NC_003899.1 | Eastern equine encephalitis virus |
| encephalitis | genome | | | |
| Enterovirus 68 | full | enterovirus | NC_038308.1 | Human enterovirus 68 strain |
| | genome | D68 is a | | Fermon |
| | | serotype of | | |
| | | Enterovirus D | | |
| Enterovirus 69 | full | Enterovirus | AY302560.1 | Enterovirus 69 strain Toluca-1 |
| | genome | B69 is a | | |
| | | serotype of | | |
| | | Enterovirus B | | |
| Enterovirus 70 | full | enterovirus | Consensus | EVD70 |
| | genome | D70 is a | | |
| | | serotype of | | |
| | | Enterovirus D | | |
| Enterovirus 71 | full | Enterovirus | Consensus | EVA71b |
| | genome | A71 is a | | |
| | | serotype of | | |
| | | Enterovirus A | | |
| Enterovirus 75 | full | Enterovirus | Consensus | EVB75 |
| | genome | B75 is a | | |
| | | serotype of | | |
| | | Enterovirus B | | |
| Enterovirus 76 | full | Enterovirus | Consensus | EVA76 |
| | genome | A76 is a | | |
| | | serotype of | | |
| | | Enterovirus A | | |
| Enterovirus 77 | full | Enterovirus | AY843302.1 | Human enterovirus 77 strain |
| | genome | B77 is a | | USA/TX97-10394 |
| | | serotype of | | |
| | | Enterovirus B | | |
| Enterovirus 79 | full | enterovirus | Consensus | EVB79 |
| | genome | B79 is a | | |
| | | below-species | | |
| | | classification | | |
| | | of Enterovirus | | |
| | | B | | |
| Enterovirus 80 | full | Enterovirus | Consensus | EVB80 |
| | genome | B80 is a | | |
| | | serotype of | | |
| | | Enterovirus B | | |
| Enterovirus 81 | full | Enterovirus | Consensus | EVB81 |
| | genome | B81 is a | | |
| | | serotype of | | |
| | | Enterovirus B | | |
| Enterovirus 82 | full | Enterovirus | AY843300.1 | Human enterovirus 82 strain |
| | genome | B82 is a | | USA/CA64-10390 |
| | | serotype of | | |
| | | Enterovirus B | | |
| Enterovirus 83 | full | Enterovirus | Consensus | EVB83 |
| | genome | B83 is a | | |
| | | serotype of | | |
| | | Enterovirus B | | |
| Enterovirus 84 | full | Enterovirus | Consensus | EVB84 |
| | genome | B84 is a | | |
| | | serotype of | | |
| | | Enterovirus B | | |
| Enterovirus 85 | full | Enterovirus | Consensus | EVB85 |
| | genome | B85 is a | | |
| | | serotype of | | |
| | | Enterovirus B | | |
| Enterovirus 86 | full | Enterovirus | AY843304.1 | Human enterovirus 86 strain |
| | genome | B86 is a | | BAN00-10354 |
| | | serotype of | | |
| | | Enterovirus B | | |
| Enterovirus 87 | full | Enterovirus | AY843305.1 | Human enterovirus 87 strain |
| | genome | B87 is a | | BAN01-10396 |
| | | serotype of | | |
| | | Enterovirus B | | |
| Enterovirus 88 | full | Enterovirus | Consensus | EVB88 |
| | genome | B88 is a | | |
| | | serotype of | | |
| | | Enterovirus B | | |
| Enterovirus 89 | full | Enterovirus | KT277550.1 | Enterovirus A89 strain KSYPH- |
| | genome | A89 is a | | TRMH22F/XJ/CHN/2011 |
| | | serotype of | | |
| | | Enterovirus A | | |
| Enterovirus 90 | full | Enterovirus | Consensus | EVA90 |
| | genome | A90 is a | | |
| | | serotype of | | |
| | | Enterovirus A | | |
| Enterovirus 91 | full | Enterovirus | AY697461.1 | Human enterovirus 91 |
| | genome | A91 is a | | polyprotein gene |
| | | serotype of | | |
| | | Enterovirus A | | |
| Enterovirus 100 | full | Enterovirus | DQ902713.1 | Human enterovirus 100 isolate |
| | genome | B100 is a | | BAN2000-10500 |
| | | serotype of | | |
| | | Enterovirus B | | |
| Enterovirus 101 | full | Enterovirus | AY843308.1 | Human enterovirus 101 strain |
| | genome | B101 is a | | CIV03-10361 |
| | | serotype of | | |
| | | Enterovirus B | | |
| Guanarito virus | Full | | NC_005077.1 | Guanarito virus segment S |
| | genome | | | |
| Guanarito virus | Full | | NC_005082.1 | Guanarito virus segment L |
| | genome | | | |
| Dobrava- | Segment | | NC_005235.1 | |
| Belgrade | L | | | |
| Dobrava- | Segment | | NC_005234.1 | Dobrava virus complete M |
| Belgrade | M | | | segment gene for glycoprotein |
| | | | | precursor (G1-G2), strain |
| | | | | DOBV/Ano-Poroia/Af19/1999) |
| Dobrava- | Segment | | NC_005233.1 | Dobrava virus complete S |
| Belgrade | S | | | segment gene for nucleocapsid |
| | | | | protein, strain DOBV/Ano- |
| | | | | Poroia/Af19/1999 |
| Saaremaa | Segment | | AJ410618.2 | Saaremaa virus pol gene for |
| | L | | | polymerase, segment L, strain |
| | | | | Saaremaa-160V, genomic RNA |
| Saaremaa | Segment | | AJ616855.1 | Saaremaa virus, segment M, |
| | M | | | partial M gene for G1G2 |
| | | | | glycoprotein precursor, genomic |
| | | | | RNA |
| Saaremaa | Segment | | AJ616854.1 | Saaremaa virus, segment S, S |
| | S | | | gene for nucleocapsid protein, |
| | | | | complete sequence, genomic |
| | | | | RNA |
| Puumala | Segment | | NC_005225.1 | Puumala virus segment L, |
| | L | | | complete genome |
| Puumala | Segment | | NC_005224.1 | Puumala virus segment S, |
| | S | | | complete sequence |
| Puumala | Segment | | NC_005223.1 | Puumala virus segment M, |
| | M | | | complete sequence |
| Tula | Segment | | NC_005226.1 | Tula virus segment L |
| | L | | | |
| Tula | Segment | | NC_005227.2 | Tula virus segment S |
| | S | | | |
| Tula | Segment | | NC_005228.1 | Tula virus segment M |
| | M | | | |
| Hantaan | Segment | | NC_005222.1 | Hantaan virus segment L, |
| | L | | | complete genome |
| Hantaan | Segment | | NC_005219.1 | Hantaan virus, complete genome |
| | M | | | |
| Hantaan | Segment | | NC_005218.1 | Hantaan virus, complete genome |
| | S | | | |
| Seoul | Segment | | NC_005238.1 | Seoul virus strain Seoul 80-39 |
| | L | | | clone 1 |
| Seoul | Segment | | NC_005236.1 | Seoul virus strain 80-39 segment |
| | S | | | S, complete sequence |
| Seoul | Segment | | NC_005237.1 | Seoul virus segment M, complete |
| | M | | | sequence |
| Thailand | Segment | | NC_034555.1 | Anjozorobe hantavirus strain |
| | S | | | Anjozorobe/Em/MDG/2009/AT |
| | | | | D49 nucleocapsid protein (N) |
| | | | | gene |
| Thailand | Segment | | NC_034556.1 | Anjozorobe hantavirus strain |
| | L | | | Anjozorobe/Em/MDG/2009/AT |
| | | | | D49 RNA-dependent RNA |
| | | | | polymerase gene |
| Thailand | Segment | | NC_034563.1 | Anjozorobe hantavirus strain |
| | M | | | Anjozorobe/Em/MDG/2009/AT |
| | | | | D49 glycoprotein precursor gene |
| Sangassou or | Segment | | NC_034516.1 | Sangassou virus strain SA14 |
| related viruses | M | | | glycoprotein precursor (M) gene |
| Sangassou or | Segment | | NC_034517.1 | Sangassou virus strain SA14 |
| related viruses | L | | | RNA polymerase (L) gene |
| Sangassou or | Segment | | NC_034526.1 | Sangassou virus strain SA14 N |
| related viruses | S | | | protein (S) gene |
| Andes | Segment | | NC_003466.1 | Andes virus segment S |
| | S | | | |
| Andes | Segment | | NC_003467.2 | Andes virus segment M |
| | M | | | |
| Andes | Segment | | NC_003468.2 | Andes virus segment L |
| | L | | | |
| Bermejo | Segment | | AF482713.1 | Bermejo virus strain Oc22531 |
| | S | | | segment S, complete sequence |
| Lechiguanas | Segment | | AF028022.1 | Lechiguanas virus strain |
| | M | | | Of22819 glycoprotein G1 and |
| | | | | G2 precursor, gene, complete cds |
| Lechiguanas | Segment | | AF482714.1 | Lechiguanas virus strain 22819 |
| | S | | | segment S, complete sequence |
| Rio Mamore | Segment | | FJ809772.1 | Rio Mamore virus isolate HTN- |
| | L | | | 007 segment L, complete |
| | | | | sequence |
| Rio Mamore | Segment | | FJ608550.1 | Rio Mamore virus strain HTN- |
| | M | | | 007 segment M, complete |
| | | | | sequence |
| Rio Mamore | Segment | Only partial S | FJ532244.1 | Rio Mamore virus strain HTN- |
| | S | available | | 007 nucleocapsid protein gene, |
| | | | | complete cds |
| Choclo | Segment | | EF397003.1 | Choclo virus strain 588 segment |
| | L | | | L, complete sequence |
| Choclo | Segment | | NC_038374.1 | Choclo virus segment M |
| | M | | | |
| Choclo | Segment | | NC_038373.1 | Choclo virus segment S |
| | S | | | |
| Maciel | Segment | | AF482716.1 | Maciel virus strain 13796 |
| | S | | | segment S, complete sequence |
| Maciel | Segment | | AF028027.1 | Maciel virus strain Bo13796 |
| | M | | | glycoprotein G1 and G2 |
| | | | | precursor, gene, partial cds |
| Laguna Negra | Segment | | NC_038506.1 | Laguna Negra virus glycoprotein |
| | M | | | precursor gene |
| Laguna Negra | Segment | | NC_038505.1 | Laguna Negra virus nucleocapsid |
| | S | | | protein and putative |
| | | | | nonstructural protein genes |
| Araraquara | Segment | | AF307327.1 | Araraquara virus medium RNA |
| | M | | | segment, G1/G2 glycoprotein |
| | | | | precursor gene, partial cds |
| Araraquara | Segment | | EF571895.1 | Araraquara-like virus strain |
| | S | | | P5/Cajuru segment S, complete |
| | | | | sequence |
| Castelo dos | Segment | | AF307326.1 | Castelo dos Sonhos virus |
| Sonhos | M | | | medium RNA segment, G1/G2 |
| | | | | glycoprotein precursor gene, |
| | | | | partial cds |
| Castelo dos | Segment | | JX443691.1 | Castelo dos Sonhos-2 virus strain |
| Sonhos | S | | | AN717307/BRA299 |
| | | | | nucleocapsid protein gene, |
| | | | | complete cds |
| Juquitiba | Segment | | KF913849.1 | Juquitiba virus strain LBCE |
| | S | | | 12070 nucleoprotein gene, |
| | | | | complete cds |
| Bayou | Segment | | NC_038298.1 | Bayou virus nucleocapsid protein |
| | L | | | |
| Bayou | Segment | | NC_038299.1 | Bayou virus isolate HV |
| | M | | | F0260003 segment L |
| Bayou | Segment | | NC_038300.1 | Bayou virus glycoprotein |
| | S | | | precursor |
| Black Creek | Segment | | GU997097.1 | Black Creek Canal virus strain |
| Canal | L | | | SPB 9408076 segment L, |
| | | | | complete sequence |
| Black Creek | Segment | | NC_043073.1 | Black Creek Canal virus M |
| Canal | M | | | segment |
| Black Creek | Segment | | NC_043075.1 | Black Creek Canal virus S |
| Canal | S | | | segment sequence |
| Sin Nombre | Segment | | NC_005215.1 | Sin Nombre virus segment M |
| | M | | | |
| Sin Nombre | Segment | | NC_005216.1 | Sin Nombre virus segment S |
| | S | | | |
| Sin Nombre | Segment | | NC_005217.1 | Sin Nombre virus map viral |
| | L | | | genome L segment |
| New York | Segment | | MG717393.1 | Orthohantavirus sp. strain New |
| | L | | | York 1 segment L, complete |
| | | | | sequence |
| New York | Segment | | MG717392.1 | Orthohantavirus sp. strain New |
| | M | | | York 1 segment M, complete |
| | | | | sequence |
| New York | Segment | | MG717391.1 | Orthohantavirus sp. strain New |
| | S | | | York 1 segment S, complete |
| | | | | sequence |
| Monongahela | Segment | | MH539865.1 | Monongahela hantavirus isolate |
| | L | | | USA_PA_1997 segment L, |
| | | | | complete sequence |
| Monongahela | Segment | | MH539866.1 | Monongahela hantavirus isolate |
| | M | | | USA_PA_1997 segment M, |
| | | | | complete sequence |
| Monongahela | Segment | | MH539867.1 | Monongahela hantavirus isolate |
| | S | | | USA_PA_1997 segment S, |
| | | | | complete sequence |
| Hendra | full | HHS Select | NC_001906.3 | Hendra virus, complete genome |
| henipavirus | genome | agents | | |
| Hepatitis A | Full | | NC_001489.1 | Hepatitis A virus, complete |
| | genome | | | genome |
| Hepatitis B | Full | | NC_003977.2 | Hepatitis B virus (strain ayw) |
| | genome | | | genome |
| Hepatitis C | Full | | NC_004102.1 | Hepatitis C virus genotype 1 |
| | genome | | | |
| Hepatitis C | Full | | NC_009823.1 | Hepatitis C virus genotype 2 |
| | genome | | | |
| Hepatitis C | Full | | NC_009824.1 | Hepatitis C virus genotype 3 |
| | genome | | | |
| Hepatitis C | Full | | NC_009825.1 | Hepatitis C virus genotype 4 |
| | genome | | | |
| Hepatitis C | Full | | NC_009826.1 | Hepatitis C virus genotype 5 |
| | genome | | | |
| Hepatitis C | Full | | NC_009827.1 | Hepatitis C virus genotype 6 |
| | genome | | | |
| Hepatitis C | Full | | NC_030791.1 | Hepatitis C virus genotype 7 |
| | genome | | | |
| Hepatitis E | Full | | NC_001434.1 | Hepatitis E virus, complete |
| | genome | | | genome |
| HIV 1 | Full | | NC_001802.1 | Human immunodeficiency virus |
| | genome | | | 1 |
| HIV 2 | Full | | NC_001722.1 | Human immunodeficiency virus |
| | genome | | | 2 |
| Human | Full | | NC_0391991 | Human metapneumovirus isolate |
| Metapneumovirus | genome | | | 00-1 |
| Influenza A | Segment | | NC_007366.1 | Influenza A virus (A/New |
| virus | 4 | | | York/392/2004(H3N2)) |
| Influenza A | Segment | | NC_007367.1 | Influenza A virus (A/New |
| virus | 7 | | | York/392/2004(H3N2)) |
| Influenza A | Segment | | NC_007368.1 | Influenza A virus (A/New |
| virus | 6 | | | York/392/2004(H3N2)) |
| Influenza A | Segment | | NC_007369.1 | Influenza A virus (A/New |
| virus | 5 | | | York/392/2004(H3N2)) |
| Influenza A | Segment | | NC_007370.1 | Influenza A virus (A/New |
| virus | 8 | | | York/392/2004(H3N2)) |
| Influenza A | Segment | | NC_007371.1 | Influenza A virus (A/New |
| virus | 3 | | | York/392/2004(H3N2)) |
| Influenza A | Segment | | NC_007372.1 | Influenza A virus (A/New |
| virus | 2 | | | York/392/2004(H3N2)) |
| Influenza A | Segment | | NC_007373.1 | Influenza A virus (A/New |
| virus | 1 | | | York/392/2004(H3N2)) |
| Influenza A | Segment | | NC_007382.1 | Influenza A virus |
| virus | 6 | | | (A/Korea/426/1968(H2N2)) |
| Influenza A | Segment | | NC_007374.1 | Influenza A virus |
| virus | 4 | | | (A/Korea/426/1968(H2N2)) |
| Influenza A | Segment | | NC_007381.1 | Influenza A virus |
| virus | 5 | | | (A/Korea/426/1968(H2N2)) |
| Influenza A | Segment | | NC_007375.1 | Influenza A virus |
| virus | 2 | | | (A/Korea/426/1968(H2N2)) |
| Influenza A | Segment | | NC_007380.1 | Influenza A virus |
| virus | 8 | | | (A/Korea/426/1968(H2N2)) |
| Influenza A | Segment | | NC_007376.1 | Influenza A virus |
| virus | 3 | | | (A/Korea/426/1968(H2N2)) |
| Influenza A | Segment | | NC_007377.1 | Influenza A virus |
| virus | 7 | | | (A/Korea/426/1968(H2N2)) |
| Influenza A | Segment | | NC_007378.1 | Influenza A virus |
| virus | 1 | | | (A/Korea/426/1968(H2N2)) |
| Influenza A | Segment | | NC_026422.1 | Influenza A virus |
| virus | 1 | | | (A/Shanghai/02/2013(H7N9)) |
| Influenza A | Segment | | NC_026423.1 | Influenza A virus |
| virus | 2 | | | (A/Shanghai/02/2013(H7N9)) |
| Influenza A | Segment | | NC_026424.1 | Influenza A virus |
| virus | 3 | | | (A/Shanghai/02/2013(H7N9)) |
| Influenza A | Segment | | NC_026425.1 | Influenza A virus |
| virus | 4 | | | (A/Shanghai/02/2013(H7N9)) |
| Influenza A | Segment | | NC_026426.1 | Influenza A virus |
| virus | 5 | | | (A/Shanghai/02/2013(H7N9)) |
| Influenza A | Segment | | NC_026429.1 | Influenza A virus |
| virus | 6 | | | (A/Shanghai/02/2013(H7N9)) |
| Influenza A | Segment | | NC_026427.1 | Influenza A virus |
| virus | 7 | | | (A/Shanghai/02/2013(H7N9)) |
| Influenza A | Segment | | NC_026428.1 | Influenza A virus |
| virus | 8 | | | (A/Shanghai/02/2013(H7N9)) |
| Influenza A | Segment | | NC_026436.1 | Influenza A virus |
| virus | 5 | | | (A/California/07/2009(H1N1)) |
| Influenza A | Segment | | NC_026431.1 | Influenza A virus |
| virus | 7 | | | (A/California/07/2009(H1N1)) |
| Influenza A | Segment | | NC_026432.1 | Influenza A virus |
| virus | 8 | | | (A/California/07/2009(H1N1)) |
| Influenza A | Segment | | NC_026433.1 | Influenza A virus |
| virus | 4 | | | (A/California/07/2009(H1N1)) |
| Influenza A | Segment | | NC_026437.1 | Influenza A virus |
| virus | 3 | | | (A/California/07/2009(H1N1)) |
| Influenza A | Segment | | NC_026434.1 | Influenza A virus |
| virus | 6 | | | (A/California/07/2009(H1N1)) |
| Influenza A | Segment | | NC_026435.1 | Influenza A virus |
| virus | 2 | | | (A/California/07/2009(H1N1)) |
| Influenza A | Segment | | NC_026438.1 | Influenza A virus |
| virus | 1 | | | (A/California/07/2009(H1N1)) |
| Influenza A | Segment | | NC_002023.1 | Influenza A virus (A/Puerto |
| virus | 1 | | | Rico/8/1934(H1N1)) |
| Influenza A | Segment | | NC_002021.1 | Influenza A virus (A/Puerto |
| virus | 2 | | | Rico/8/1934(H1N1)) |
| Influenza A | Segment | | NC_002022.1 | Influenza A virus (A/Puerto |
| virus | 3 | | | Rico/8/1934(H1N1)) |
| Influenza A | Segment | | NC_002017.1 | Influenza A virus (A/Puerto |
| virus | 4 | | | Rico/8/1934(H1N1)) |
| Influenza A | Segment | | NC_002019.1 | Influenza A virus (A/Puerto |
| virus | 5 | | | Rico/8/1934(H1N1)) |
| Influenza A | Segment | | NC_002018.1 | Influenza A virus (A/Puerto |
| virus | 6 | | | Rico/8/1934(H1N1)) |
| Influenza A | Segment | | NC_002016.1 | Influenza A virus (A/Puerto |
| virus | 7 | | | Rico/8/1934(H1N1)) |
| Influenza A | Segment | | NC_002020.1 | Influenza A virus (A/Puerto |
| virus | 8 | | | Rico/8/1934(H1N1)) |
| Influenza A | | | NC_007357.1 | Influenza A virus |
| virus | | | | (A/goose/Guangdong/1/1996(H5N1)) |
| | | | | polymerase (PB1) and PB1- |
| | | | | F2 protein (PB1-F2) genes |
| Influenza A | Segment | | NC_007358.1 | Influenza A virus |
| virus | 2 | | | (A/goose/Guangdong/1/1996(H5N1)) |
| | | | | polymerase (PB1) and PB1- |
| | | | | F2 protein (PB1-F2) genes |
| Influenza A | | | NC_007359.1 | Influenza A virus |
| virus | | | | (A/goose/Guangdong/1/1996(H5N1)) |
| | | | | polymerase (PA) and PA-X |
| | | | | protein (PA-X) genes, complete |
| | | | | cds |
| Influenza A | Segment | | NC_007362.1 | Influenza A virus |
| virus | 4 | | | (A/goose/Guangdong/1/1996(H5N1)) |
| | | | | hemagglutinin (HA) gene |
| Influenza A | | | NC_007360.1 | Influenza A virus |
| virus | | | | (A/Goose/Guangdong/1/96(H5N1)) |
| | | | | nucleocapsid protein (NP) |
| | | | | gene |
| Influenza A | | | NC_007361.1 | Influenza A virus |
| virus | | | | (A/Goose/Guangdong/1/96(H5N1)) |
| | | | | neuraminidase (NA) gene |
| Influenza A | Segment | | NC_007363.1 | Influenza A virus |
| virus | 7 | | | (A/goose/Guangdong/1/1996(H5N1)) |
| | | | | segment 7, complete |
| | | | | sequence |
| Influenza A | Segment | | NC_007364.1 | Influenza A virus |
| virus | 8 | | | (A/goose/Guangdong/1/1996(H5N1)) |
| | | | | segment 8 |
| Influenza A | | | NC_004910.1 | Influenza A virus pb2 gene for |
| virus | | | | polymerase Pb2, genomic RNA, |
| | | | | strain A/Hong |
| | | | | Kong/1073/99(H9N2) |
| Influenza A | | | NC_004911.1 | Influenza A virus pbl gene for |
| virus | | | | polymerase Pb1, genomic RNA, |
| | | | | strain A/Hong |
| | | | | Kong/1073/99(H9N2) |
| Influenza A | | | NC_004912.1 | Influenza A virus pa gene for |
| virus | | | | polymerase PA, genomic RNA, |
| | | | | strain A/Hong |
| | | | | Kong/1073/99(H9N2) |
| Influenza A | | | NC_004908.1 | Influenza A virus ha gene for |
| virus | | | | Hemagglutinin, genomic RNA, |
| | | | | strain A/Hong |
| | | | | Kong/1073/99(H9N2) |
| Influenza A | Segment | | NC_004905.2 | Influenza A virus (A/Hong |
| virus | 5 | | | Kong/1073/99(H9N2)) segment |
| | | | | 5 |
| Influenza A | | | NC_004909.1 | Influenza A virus na gene for |
| virus | | | | neuraminidase, genomic RNA, |
| | | | | strain A/Hong |
| | | | | Kong/1073/99(H9N2) |
| Influenza A | Segment | | NC_004907.1 | Influenza A virus (A/Hong |
| virus | 7 | | | Kong/1073/99(H9N2)) segment |
| | | | | 7 |
| Influenza A | Segment | | NC_004906.1 | Influenza A virus (A/Hong |
| virus | 8 | | | Kong/1073/99(H9N2)) segment |
| | | | | 8 |
| Influenza B | RNA 1 | | NC_002205.1 | Influenza B virus (B/Lee/1940) |
| virus | | | | |
| Influenza B | RNA 2 | | NC_002204.1 | Influenza B virus (B/Lee/1940) |
| virus | | | | segment 2 |
| Influenza B | RNA 3 | | NC_002206.1 | Influenza B virus (B/Lee/1940) |
| virus | | | | segment 3 |
| Influenza B | RNA 4 | | NC_002210.1 | Influenza B virus (B/Lee/1940) |
| virus | | | | segment 4 |
| Influenza B | RNA 5 | | NC_002209.1 | Influenza B virus (B/Lee/1940) |
| virus | | | | segment 5 |
| Influenza B | RNA 6 | | NC_002207.1 | Influenza B virus (B/Lee/1940) |
| virus | | | | segment 6 |
| Influenza B | RNA 7 | | NC_002211.1 | Influenza B virus (B/Lee/1940) |
| virus | | | | segment 7 |
| Influenza B | RNA 8 | | NC_002208.1 | Influenza B virus (B/Lee/1940) |
| virus | | | | segment 8 |
| Japanese | full | | NC_001437.1 | Japanese encephalitis virus |
| ecephalitis virus | genome | | | |
| JEV | | | | |
| Junin virus | Full | | NC_005081.1 | Junin virus segment S |
| | genome | | | |
| Junin virus | Full | | NC_005080.1 | Junin virus segment L |
| | genome | | | |
| Lassa fever | Full | hhs Select | NC_004296.1 | Lassa virus segment S |
| virus | genome | agent | | |
| Lassa fever | Full | | NC_004297.1 | Lassa virus segment L |
| virus | genome | | | |
| Mopeia Lassa | Full | | NC_006573.1 | Mopeia Lassa reassortant 29 |
| | genome | | | segment S |
| Mopeia Lassa | Full | | NC_006572.1 | Mopeia Lassa reassortant 29 |
| | genome | | | segment L |
| Lujo virus | Full | hhs Select | NC_012776.1 | Lujo virus segment S |
| | genome | agent | | |
| Lujo virus | Full | | NC_012777.1 | Lujo virus segment L |
| | genome | | | |
| Machupo virus | Full | | NC_005078.1 | Machupo virus segment S |
| | genome | | | |
| Machupo virus | Full | | NC_005079.1 | Machupo virus segment L |
| | genome | | | |
| Marburg virus | Full | | NC_001608.3 | Marburg marburgvirus isolate |
| | genome | | | Marburg virus/H. sapiens- |
| | | | | tc/KEN/1980/Mt. Elgon-Musoke |
| Ebola virus | Full | | NC_002549.1 | Zaire ebolavirus isolate Ebola |
| | genome | | | virus/H. sapiens- |
| | | | | tc/COD/1976/Yambuku- |
| | | | | Mayinga |
| Monkeypox | Full | hhs Select | NC_003310.1 | Monkeypox virus Zaire-96-1-16 |
| virus | genome | agent | | |
| Nipah | Full | HHS Select | NC_002728.1 | Nipah virus |
| | genome | agent | | |
| Norovirus GI | Full | Alignment | NC_044856.1 | |
| | genome | run - low | | |
| | | percentage | | |
| | | identity | | |
| Norovirus GI | Full | | NC_044854.1 | |
| | genome | | | |
| Norovirus GI | Full | | NC_044853.1 | |
| | genome | | | |
| Norovirus GI | Full | | NC_001959.2 | |
| | genome | | | |
| Norovirus GI | Full | | NC_039897.1 | |
| | genome | | | |
| Norovirus GII | Full | Alignment | NC_044932.1 | |
| | genome | run - low | | |
| | | percentage | | |
| | | identity | | |
| Norovirus GII | Full | | NC_039477.1 | |
| | genome | | | |
| Norovirus GII | Full | | NC_040876.1 | |
| | genome | | | |
| Norovirus GII | Full | | NC_039475.1 | |
| | genome | | | |
| Norovirus GII | Full | | NC_039476.1 | |
| | genome | | | |
| Norovirus GII | Full | | NC_044046.1 | |
| | genome | | | |
| Norovirus GII | Full | | NC_044045.1 | |
| | genome | | | |
| Norovirus GII | Full | | NC_029646.1 | |
| | genome | | | |
| Norovirus GII | Full | | NC_029647.1 | |
| | genome | | | |
| Norovirus GIV | Full | | NC_029647.1 | Norovirus GIV |
| | genome | | | |
| HPV16 | Full | | NC_001526.1 | Human papillomavirus type 16 |
| | genome | | | |
| HPV18 | Full | | NC_001357.1 | Human papillomavirus type 18 |
| | genome | | | |
| HPV31 | Full | | HQ537675.1 | Human papillomavirus type 31 |
| | genome | | | isolate IN221709 |
| HPV33 | Full | | HQ537689.1 | Human papillomavirus type 33 |
| | genome | | | isolate Qv22751 |
| HPV35 | Full | | HQ537729.1 | Human papillomavirus type 35 |
| | genome | | | isolate QV29782 |
| HPV39 | Full | | KC470236.1 | Human papillomavirus type 39 |
| | genome | | | isolate Qv29509 |
| HPV45 | Full | | LR861845.1 | Human papillomavirus type 45 |
| | genome | | | isolate LNS2400068_HPV45 |
| HPV51 | Full | | KF436887.1 | Human papillomavirus 51 isolate |
| | genome | | | BF315 |
| HPV52 | Full | | LC270039.1 | Human papillomavirus type 52 |
| | genome | | | DNA isolate: K0485 |
| HPV56 | Full | | EF177176.1 | Human papillomavirus type 56 |
| | genome | | | clone Qv26762 |
| HPV58 | Full | | KY225961.1 | Human papillomavirus 58 isolate |
| | genome | | | ZWE054176 |
| HPV59 | Full | | LR862007.1 | Human papillomavirus type 59 |
| | genome | | | isolate LNS7199256_HPV59 |
| HPV66 | Full | | U31794.1 | Human papillomavirus type 66 |
| | genome | | | |
| HPV68 | Full | | KC470281.1 | Human papillomavirus type 68 |
| | genome | | | isolate Rw826 |
| Parainfluenza 1 | Full | | NC_003461 | Human parainfluenza virus 1 |
| | genome | | | |
| Parainfluenza 2 | Full | | NC_003443.1 | Human rubulavirus 2 |
| | genome | | | |
| Parainfluenza 3 | Full | | NC_001796.2 | Human parainfluenza virus 3 |
| | genome | | | |
| Parainfluenza 4 | Full | | NC_021928.1 | Human parainfluenza virus 4a |
| | genome | | | viral cRNA strain: M-25 |
| Parechovirus | Full | | NC_001897.1 | Human parechovirus |
| | genome | | | |
| Merkel cell | Full | | NC_010277.2 | Merkel cell polyomavirus isolate |
| polyomavirus | genome | | | R17b |
| isolate R17b | | | | |
| KI | Full | | NC_009238.1 | KI polyomavirus Stockholm 60 |
| polyomavirus | genome | | | |
| Stockholm 60 | | | | |
| BK | Full | | NC_001538.1 | BK polyomavirus |
| polyomavirus | genome | | | |
| JC | Full | | NC_001699.1 | JC polyomavirus |
| polyomavirus | genome | | | |
| WU | Full | | EU711054.1 | WU Polyomavirus strain |
| Polyomavirus | genome | | | WU/Wuerzburg/01/03 |
| Human | Full | | NC_014406.1 | Human polyomavirus 6 |
| polyomavirus 6 | genome | | | |
| Human | Full | | NC_014407.1 | Human polyomavirus 7 |
| polyomavirus 7 | genome | | | |
| Human | Full | | NC_015150.1 | Human polyomavirus 9 |
| polyomavirus 9 | genome | | | |
| Trichodysplasia | Full | | NC_014361.1 | Trichodysplasia spinulosa- |
| spinulosa- | genome | | | associated polyomavirus |
| associated | | | | |
| polyomavirus | | | | |
| Rhinovirus A | Full | | NC_038311.1 | Human rhinovirus 1 strain |
| | genome | | | ATCC VR-1559 |
| Rhinovirus B | Full | | NC_038312.1 | Human rhinovirus 3 |
| | genome | | | |
| Rhinovirus C | Full | | NC_009996.1 | Human rhinovirus C |
| | genome | | | |
| Rift valley fever | Full | HHS Select | NC_014395.1 | Rift Valley fever virus segment S |
| | genome | Agent | | |
| Rift valley fever | Full | | NC_014396.1 | Rift Valley fever virus segment |
| | genome | | | M |
| Rift valley fever | Full | | NC_014397.1 | Rift Valley fever virus segment |
| | genome | | | L |
| Rotavirus A | Segment | | NC_011507.2 | Rotavirus A Segment 1 |
| Segment 1 | 1 | | | |
| Rotavirus A | Segment | | NC_011506.2 | Rotavirus A Segment 2 |
| Segment 2 | 2 | | | |
| Rotavirus A | Segment | | NC_011508.2 | Rotavirus A Segment 3 |
| Segment 3 | 3 | | | |
| Rotavirus A | Segment | | NC_011510.2 | Rotavirus A Segment 4 |
| Segment 4 | 4 | | | |
| Rotavirus A | Segment | | NC_011500.2 | Rotavirus A Segment 5 |
| Segment 5 | 5 | | | |
| Rotavirus A | Segment | | NC_011509.2 | Rotavirus A Segment 6 |
| Segment 6 | 6 | | | |
| Rotavirus A | Segment | | NC_011501.2 | Rotavirus A Segment 7 |
| Segment 7 | 7 | | | |
| Rotavirus A | Segment | | NC_011502.2 | Rotavirus A Segment 8 |
| Segment 8 | 8 | | | |
| Rotavirus A | Segment | | NC_011503.2 | Rotavirus A Segment 9 |
| Segment 9 | 9 | | | |
| Rotavirus A | Segment | | NC_011504.2 | Rotavirus A Segment 10 |
| Segment 10 | 10 | | | |
| Rotavirus A | Segment | | NC_011505.2 | Rotavirus A Segment 11 |
| Segment 11 | 11 | | | |
| Rotavirus B | Segment | | NC_021541.1 | Human rotavirus B strain |
| Segment 1 | 1 | | | Bang373 RNA dependent RNA |
| | | | | polymerase (VP1) mRNA |
| Rotavirus B | Segment | | NC_021545.1 | Human rotavirus B strain |
| Segment 2 | 2 | | | Bang373 inner capsid protein |
| | | | | (VP2) gene |
| Rotavirus B | Segment | | NC_021551.1 | Human rotavirus B strain |
| Segment 3 | 3 | | | Bang373 VP3 (VP3) mRNA |
| Rotavirus B | Segment | | NC_021543.1 | Human rotavirus B strain |
| Segment 4 | 4 | | | Bang373 outer capsid protein |
| | | | | (VP4) gene |
| Rotavirus B | Segment | | NC_021546.1 | Human rotavirus B strain |
| Segment 5 | 5 | | | Bang373 nonstructural protein 1- |
| | | | | 1 (NSP1-1), nonstructural |
| | | | | protein 1-2 (NSP1-2), and |
| | | | | nonstructural protein 1-3 (NSP1- |
| | | | | 3) genes |
| Rotavirus B | Segment | | NC_021544.1 | Human rotavirus B strain |
| Segment 6 | 6 | | | Bang373 inner capsid protein |
| | | | | (VP6) gene |
| Rotavirus B | Segment | | NC_021547.1 | Human rotavirus B strain |
| Segment 7 | 7 | | | Bang373 nonstructural protein |
| | | | | (NSP3) gene |
| Rotavirus B | Segment | | NC_021548.1 | Human rotavirus B strain |
| Segment 8 | 8 | | | Bang373 nonstructural protein |
| | | | | (NSP2) gene |
| Rotavirus B | Segment | | NC_021542.1 | Human rotavirus B strain |
| Segment 9 | 9 | | | Bang373 outer capsid protein |
| | | | | (VP7) gene |
| Rotavirus B | Segment | | NC_021550.1 | Human rotavirus B strain |
| Segment 10 | 10 | | | Bang373 nonstructural protein |
| | | | | (NSP4) gene |
| Rotavirus B | Segment | | NC_021549.1 | Human rotavirus B strain |
| Segment 11 | 11 | | | Bang373 nonstructural protein |
| | | | | (NSP5) gene |
| Rotavirus C | Segment | | NC_007547.1 | Rotavirus C Segment 1 |
| Segment 1 | 1 | | | |
| Rotavirus C | Segment | | NC_007546.1 | Rotavirus C Segment 2 |
| Segment 2 | 2 | | | |
| Rotavirus C | Segment | | NC_007572.1 | Rotavirus C Segment 3 |
| Segment 3 | 3 | | | |
| Rotavirus C | Segment | | NC_007574.1 | Rotavirus C Segment 4 |
| Segment 4 | 4 | | | |
| Rotavirus C | Segment | | NC_007570.1 | Rotavirus C Segment 5 |
| Segment 5 | 5 | | | |
| Rotavirus C | Segment | | NC_007543.1 | Rotavirus C Segment 6 |
| Segment 6 | 6 | | | |
| Rotavirus C | Segment | | NC_007544.1 | Rotavirus C Segment 7 |
| Segment 7 | 7 | | | |
| Rotavirus C | Segment | | NC_007571.1 | Rotavirus C Segment 8 |
| Segment 8 | 8 | | | |
| Rotavirus C | Segment | | NC_007545.1 | Rotavirus C Segment 9 |
| Segment 9 | 9 | | | |
| Rotavirus C | Segment | | NC_007569.1 | Rotavirus C Segment 10 |
| Segment 10 | 10 | | | |
| Rotavirus C | Segment | | NC_007573.1 | Rotavirus C Segment 11 |
| Segment 11 | 11 | | | |
| Rotavirus H | Segment | | NC_007548.1 | Adult diarrheal rotavirus strain |
| Segment 1 | 1 | | | J19 |
| Rotavirus H | Segment | | NC_007549.1 | Adult diarrheal rotavirus strain |
| Segment 2 | 2 | | | J19 |
| Rotavirus H | Segment | | NC_007550.1 | Adult diarrheal rotavirus strain |
| Segment 3 | 3 | | | J19 |
| Rotavirus H | Segment | | NC_007551.1 | Adult diarrheal rotavirus strain |
| Segment 4 | 4 | | | J19 |
| Rotavirus H | Segment | | NC_007552.1 | Adult diarrheal rotavirus strain |
| Segment 5 | 5 | | | J19 |
| Rotavirus H | Segment | | NC_007553.1 | Adult diarrheal rotavirus strain |
| Segment 6 | 6 | | | J19 |
| Rotavirus H | Segment | | NC_007554.1 | Adult diarrheal rotavirus strain |
| Segment 7 | 7 | | | J19 |
| Rotavirus H | Segment | | NC_007555.1 | Adult diarrheal rotavirus strain |
| Segment 8 | 8 | | | J19 |
| Rotavirus H | Segment | | NC_007556.1 | Adult diarrheal rotavirus strain |
| Segment 9 | 9 | | | J19 |
| Rotavirus H | Segment | | NC_007557.1 | Adult diarrheal rotavirus strain |
| Segment 10 | 10 | | | J19 |
| Rotavirus H | Segment | | NC_007558.1 | Adult diarrheal rotavirus strain |
| Segment 11 | 11 | | | J19 |
| RSV | Full | | NC_001803.1 | Respiratory syncytial virus |
| | genome | | | |
| Sabia virus | Segment | | NC_006313.1 | Sabia virus segment L |
| segment L | L | | | |
| Sabia virus | Segment | 3366 | NC_006317.1 | Sabia virus segment S |
| segment S | S | | | |
| Salivirus | Full | | NC_025114.1 | Salivirus FHB |
| | genome | | | |
| Sapovirus | Full | | NC_027026.1 | Sapovirus Hu/Nagoya/NGY- |
| | genome | | | 1/2012/JPN genomic RNA |
| SARS-CoV | Full | | NC_004718.3 | SARS coronavirus Tor2 |
| | genome | | | |
| SARS-CoV-2 | Full | Covers VOC, | NC_045512.2 | Severe acute respiratory |
| | genome | including | | syndrome coronavirus 2 isolate |
| | | alpha, beta, | | Wuhan-Hu-1 |
| | | gamma, delta, | | |
| | | Omicron | | |
| | | (BA1 and | | |
| | | BA2) | | |
| MERS-CoV | Full | | NC_019843.3 | Middle East respiratory |
| | genome | | | syndrome-related coronavirus |
| | | | | isolate HCoV-EMC/2012 |
| hCoV-HKU1 | Full | | NC_006577.2 | Human coronavirus HKU1 |
| | genome | | | |
| hCoV-229E | Full | | NC_002645.1 | Human coronavirus 229E |
| | genome | | | |
| hCoV-NL63 | Full | | NC_005831.2 | Human Coronavirus NL63 |
| | genome | | | |
| hCoV-OC43 | Full | | NC_006213.1 | Human coronavirus OC43 strain |
| | genome | | | ATCC VR-759 |
| Tick-borne | Full | | NC_001672.1 | Tick-borne encephalitis virus |
| encephalitis | genome | | | |
| virus | | | | |
| Kyasanur | Full | | NC_039218.1 | Kyasanur forest disease virus |
| Forest disease | genome | | | polyprotein gene |
| Omsk | Full | | NC_005062.1 | Omsk hemorrhagic fever virus |
| hemorrhagic | genome | | | |
| fever virus | | | | |
| Torque Teno | Full | SSDNA | NC_015783.1 | Torque teno virus |
| virus | genome | | | |
| Variola major | Full | hhs select | NC_001611.1 | Variola virus |
| | genome | agent | | |
| Venezuelan | full | hhs select | NC_001449.1 | Venezuelan equine encephalitis |
| equine | genome | agent | | virus |
| encephalitis | | | | |
| virus | | | | |
| West Nile | Full | | NC_001563.2 | West Nile virus lineage 2 |
| | genome | | | |
| West Nile | Full | | NC_009942.1 | West Nile virus lineage 1 |
| | genome | | | |
| Western equine | full | | NC_003908.1 | Western equine |
| encephalitis | genome | | | encephalomyelitis virus |
| Yellow fever | Full | | NC_002031.1 | Yellow fever virus |
| virus | genome | | | |
| Zika | Full | | NC_012532.1 | Zika virus |
| | genome | | | |
| Zika | Full | | NC_035889.1 | Zika virus isolate ZIKV/H. |
| | genome | | | sapiens/Brazil/Natal/2015 |
| Parvovirus | Full | | NC_000883.2 | Human parvovirus B19 |
| | genome | | | |
| Rubella | Full | | NC_001545.2 | Rubella virus |
| | genome | | | |

[0079] In some embodiments, the probe set further comprises at least two DNA probes that each hybridize to at least one target virus molecule selected from Adeno-associated virus 2 (AAV2), Aichi virus 1 (AiV-A1), Alkhumra hemorrhagic fever virus (AHFV), Andes virus (ANDV), Anjozorobe virus (ANJV), Araucaria virus, Australian bat lyssavirus (ABLV), Bayou virus (BAYV), BK polyomavirus (BKPyV), Black Creek Canal virus (BCCV), Bombali virus (BOMV), Bourbon virus (BRBV), Bundibugyo virus (BDBV), Cache Valley virus (CVV), California encephalitis virus (CEV), Cedar virus (CedV), Chapare virus (CHAPV), Chikungunya virus (CHIKV), Choclo virus (CHOV), Colorado tick fever virus (CTFV), Crimean-Congo hemorrhagic fever virus (CCHFV), Crimean-Congo hemorrhagic fever virus 2 (CCHFV-2), Dengue virus (DENV), Dobrava-Belgrade virus (DOBV), Duvenhage virus (DUVV), Eastern equine encephalitis virus (EEEV), Ebola virus (EBOV), Enterovirus A, Enterovirus B, Enterovirus C, Enterovirus D, Epstein-Barr virus (EBV), European bat lyssavirus (EBLV), Ghana virus (GhV), Guanarito virus (GTOV), Hantaan virus (HTNV), Heartland virus (HRTV), Hendra virus (HeV), Henipavirus unclassified, Hepatitis A virus (HAV), Hepatitis B virus (HBV), Hepatitis C virus (HCV), Hepatitis D virus (HDV), Hepatitis E virus (HEV), Herpes simplex virus 1 (HSV1), Herpes simplex virus 2 (HSV2), Human adenovirus A, Human adenovirus B, Human adenovirus C, Human adenovirus D, Human adenovirus E, Human adenovirus F, Human adenovirus G, Human bocavirus (HBOV), Human coronavirus 229E (HCoV_229E), Human coronavirus HKU1 (HCOV_HKU1), Human coronavirus NL63 (HCOV_NL63), Human coronavirus OC43 (HCoV_OC43), Human cytomegalovirus (HCMV), Human immunodeficiency virus 1 (HIV-1), Human immunodeficiency virus 2 (HIV-2), Human metapneumovirus (HMPV), Human papillomavirus 11 (HPV11), Human papillomavirus 16 (HPV16; high-risk), Human papillomavirus 18 (HPV18; high-risk), Human papillomavirus 26 (HPV26), Human papillomavirus 31 (HPV31; high-risk), Human papillomavirus 33 (HPV33; high-risk), Human papillomavirus 35 (HPV35; high-risk), Human papillomavirus 39 (HPV39; high-risk), Human papillomavirus 40 (HPV40), Human papillomavirus 42 (HPV42), Human papillomavirus 43 (HPV43), Human papillomavirus 44 (HPV44), Human papillomavirus 45 (HPV45; high-risk), Human papillomavirus 51 (HPV51; high-risk), Human papillomavirus 52 (HPV52; high-risk), Human papillomavirus 53 (HPV53), Human papillomavirus 54 (HPV54), Human papillomavirus 56 (HPV56; high-risk), Human papillomavirus 58 (HPV58; high-risk), Human papillomavirus 59 (HPV59; high-risk), Human papillomavirus 6 (HPV6), Human papillomavirus 61 (HPV61), Human papillomavirus 66 (HPV66; high-risk), Human papillomavirus 68 (HPV68; high-risk), Human papillomavirus 69 (HPV69), Human papillomavirus 70 (HPV70), Human papillomavirus 73 (HPV73), Human papillomavirus 82 (HPV82), Human parainfluenza virus 1 (HPIV-1), Human parainfluenza virus 2 (HPIV-2), Human parainfluenza virus 3 (HPIV-3), Human parainfluenza virus 4 (HPIV-4), Human parechovirus (HPeV), Human parvovirus B19 (B19V), Human polyomavirus 6 (HPyV6), Human polyomavirus 7 (HPyV7), Human polyomavirus 9 (HPyV9), Human respiratory syncytial virus A (HRSV-A), Human respiratory syncytial virus B (HRSV-B), Influenza A virus, Influenza B virus, Influenza C virus, Isla Vista virus, Itapua virus, Jamestown Canyon virus (JCV), Japanese encephalitis virus (JEV), JC polyomavirus (JCPyV), Junin virus (JUNV), Juquitiba virus, KI polyomavirus (KIPyV), Kyasanur Forest disease virus (KFDV), La Crosse virus (LACV), Lagos bat virus (LBV), Laguna Negra virus (LANV), Langya virus, Lassa virus (LASV), LI polyomavirus (LIPyV), Lloviu virus (LLOV), Lujo virus (LUJV), Luxi virus (LUXV), Lymphocytic choriomeningitis virus (LCMV), Machupo virus (MACV), Mamastrovirus 1 (MAstV1), Mamastrovirus 6 (MAstV6), Mamastrovirus 8 (MAstV8), Mamastrovirus 9 (MAstV9), Maporal virus (MAPV), Marburg virus (MARV), Mayaro virus (MAYV), Measles virus (MV), Menangle virus (MenV), Merkel cell polyomavirus (MCPyV), Middle East respiratory syndrome-related coronavirus (MERS-COV), Mojiang virus (MojV), Mokola virus (MOKV), Monkeypox virus (MPV), Monongahela hantavirus, Muleshoe virus, Mumps virus (MuV), Murray Valley encephalitis virus (MVEV), MW polyomavirus (MWPyV), New Jersey polyomavirus (NJPyV), Nipah virus (NiV), Norovirus, Omsk hemorrhagic fever virus (OHFV), Onyong-nyong virus (ONNV), Oropouche virus (OROV), Paranoa virus, Powassan virus (POWV), Punta Toro virus (PTV), Puumala virus (PUUV), Rabies virus (RABV), Ravn virus (RAVV), Reston virus (RESTV), Rhinovirus A (RV-A), Rhinovirus B (RV-B), Rhinovirus C (RV-C), Rift Valley fever virus (RVFV), Ross River virus (RRV), Rotavirus A (RVA), Rotavirus B (RVB), Rotavirus C (RVC), Rubella virus (RuV), Sabia virus (SBAV), Salivirus A (SaV-A), Sandfly fever Sicilian virus (SFCV), Sangassou virus (SANGV), Sapovirus, Semliki Forest virus (SFV), Seoul virus (SEOV), Severe acute respiratory syndrome coronavirus (SARS-COV), Severe acute respiratory syndrome coronavirus 2 (SARS-COV-2), Severe fever with thrombocytopenia syndrome virus (SFTSV), Simian virus 40 (SV40), Sin nombre virus (SNV), Sindbis virus (SINV), Snowshoe hare virus (SSHV), Sosuga virus (SoRV), St. Louis encephalitis virus (SLEV), STL polyomavirus (STLPyV), Sudan virus (SUDV), Tacheng tick virus 2 (TcTV-2), Tahyna virus (TAHV), Tai Forest virus (TAFV), Tick-borne encephalitis virus (TBEV), Torque teno virus (TTV), Toscana virus (TOSV), Trichodysplasia spinulosa-associated polyomavirus (TSPyV), Tula virus (TULV), Usutu virus (USUV), Varicella-zoster virus (VZV), Variola virus (VARV), Venezuelan equine encephalitis virus (VEEV), West Nile virus (WNV), Western equine encephalitis virus (WEEV), WU polyomavirus (WUPyV), Yellow fever virus (YFV), and Zika virus (ZIKV).

[0080] Also described herein are compositions comprising a probe set comprising at least one DNA probe comprising at least one sequence of SEQ ID NOs: 28,453-213,182, or its complement. In some embodiments, the composition comprises 2 or more, 5 or more, 10 or more, 25 or more, 50 or more, 100 or more, 200 or more, 300 or more, 400 or more, 500 or more, 600 or more, 700 or more, 800 or more, 900 or more, 1000 or more, 2000 or more sequences selected from SEQ ID NOs: 1-184,730 or its complement. In some embodiments, the at least one DNA probe comprises 500 or more, 600 or more, 700 or more, 800 or more, 900 or more, 1000 or more, 1100 or more, 1200 or more, 1300 or more, 1400 or more, 1500 or more, 2000 or more, 3000 or more, 3500 or more, 4000 or more, 5000 or more, 10000 or more, 20000 or more, 3000, or more, 40000 or more, 50000 or more, 100000 or more, or 184,730 sequences selected from SEQ ID NOs: 1-184,730 or its complement. In some embodiments, the at least one DNA probe comprises 500 or more, 600 or more, 700 or more, 800 or more, 900 or more, 1000 or more, 2000 or more, or 184,828 sequences selected from SEQ ID NOs: 28,453-213,280, or its complement. In some embodiments, the at least one DNA probe comprises 500 or more, 600 or more, 700 or more, 800 or more, 900 or more, 1000 or more, 1100 or more, 1200 or more, 1300 or more, 1400 or more, 1500 or more, 2000 or more, 3000 or more, 3500 or more, 4000 or more, 5000 or more, 10000 or more, 20000 or more, 3000, or more, 40000 or more, 50000 or more, 100000 or more sequences selected from SEQ ID NOs: 28,453-213,182; 213,288-214,878 or its complement.

[0081] Also described herein are compositions comprising a probe set comprising at least one DNA probe comprising at least one sequence of SEQ ID NOs: 1-28,452, or its complement. In some embodiments, the composition comprises 2 or more, 5 or more, 10 or more, 25 or more, 50 or more, 100 or more, 200 or more, 300 or more, 400 or more, 500 or more, 600 or more, 700 or more, 800 or more, 900 or more, 1000 or more, 2000 or more sequences selected from SEQ ID NOs: 1-28,452 or its complement. In some embodiments, the at least one DNA probe comprises 500 or more, 600 or more, 700 or more, 800 or more, 900 or more, 1000 or more, 1100 or more, 1200 or more, 1300 or more, 1400 or more, 1500 or more, 2000 or more, 3000 or more, 3500 or more, 4000 or more, 5000 or more, 10000 or more, 20000 or more sequences selected from SEQ ID NOs: 1-28,452 or its complement. In some embodiments, the at least one DNA probe comprises 500 or more, 600 or more, 700 or more, 800 or more, 900 or more, 1000 or more, 2000 or more sequences selected from SEQ ID NOs: 1-28.452; 213,183-213,280 or its complement. In some embodiments, the at least one DNA probe comprises 500 or more, 600 or more, 700 or more, 800 or more, 900 or more, 1000 or more, 2000 or more sequences selected from SEQ ID NOs: 1-28,452; 213,288-214,878 or its complement.

[0082] Also described herein are compositions comprising a probe set comprising at least one DNA probe comprising at least one sequence of SEQ ID NOs: 1-213,280, or its complement. In some embodiments, the composition comprises 2 or more, 5 or more, 10 or more, 25 or more, 50 or more, 100 or more, 200 or more, 300 or more, 400 or more, 500 or more, 600 or more, 700 or more, 800 or more, 900 or more, 1000 or more, 2000 or more, or 213,280 sequences selected from SEQ ID NOs: 1-213,280, or its complement. In some embodiments, the at least one DNA probe comprises 500 or more, 600 or more, 700 or more, 800 or more, 900 or more, 1000 or more, 1100 or more, 1200 or more, 1300 or more, 1400 or more, 1500 or more, 2000 or more, 3000 or more, 3500 or more, 4000 or more, 5000 or more, 10000 or more, 20000 or more, 3000, or more, 40000 or more, 50000 or more, 100000 or more, 200000 or more, sequences selected from SEQ ID NOs: 1-213,280, or its complement. In some embodiments, the at least one DNA probe comprises 500 or more, 600 or more, 700 or more, 800 or more, 900 or more, 1000 or more, 2000 or more, or 213,280 sequences selected from SEQ ID NOs: 1-213,280, or its complement.

[0083] In some embodiments, the composition comprises at least 5, at least at least 10, at least 50, at least 100, at least 250, at least 500, at least 750, at least 1000, at least 1500, or at least 2000 sequences of SEQ ID NOs: 1-213,280, or its complement. In some embodiments, the composition comprises two or more, five or more, 10 or more, or 25 or more sequences selected from SEQ ID NOs: 1-213,280, or its complement.

[0084] In some embodiments the probe set comprises any one or more of SEQ ID NOs: 213,288-214,878, or its complement.

[0085] In some embodiments the probe set is biotinylated.

### III. Methods of Use

### A. Methods of Enriching for Viral Nucleic Acids

[0086] Described herein are methods of enriching a sample for one or more target viral nucleic acids.

[0087] In some embodiments, the present methods decrease library preparation costs and hands-on-time, as compared to prior art methods of enriching for vial nucleic acids, followed by library preparation.

[0088] In some embodiments, the method comprises providing any of the compositions described herein, in Section II (Compositions) above. In some embodiments, the method comprises providing a probe set comprising any of the compositions described herein, in Section II (Compositions) above; allowing the probes in the probe set to hybridize to the target viral nucleic acids; and enriching the sample for the one or more target viral nucleic acids by amplifying the target viral nucleic acids and/or separating the target viral nucleic acids from the sample. In some embodiments, the probe set comprises 1 or more, 2 or more, 5 or more, 10 or more, 25 or more, 50 or more, 100 or more, 200 or more, 300 or more, 400 or more, 500 or more, 600 or more, 700 or more, 800 or more, 900 or more, 1000 or more, 1100 or more, 1200 or more, 1300 or more, 1400 or more, 1500 or more, 2000 or more, 3000 or more, 3500 or more, 4000 or more, 5000 or more, 10000 or more, 20000 or more, 3000, or more, 40000 or more, 50000 or more, 100000 or more sequences selected from SEQ ID Nos: 28,453-213,182 or its complement. In some embodiments, the probe set comprises 1 or more, 2 or more, 5 or more, 10 or more, 25 or more, 50 or more, 100 or more, 200 or more, 300 or more, 400 or more, 500 or more, 600 or more, 700 or more, 800 or more, 900 or more, 1000 or more, 1100 or more, 1200 or more, 1300 or more, 1400 or more, 1500 or more, 2000 or more, 3000 or more, 3500 or more, 4000 or more, 5000 or more, 10000 or more, 20000 or more, 3000, or more, 40000 or more, 50000 or more, 100000 or more sequences selected from SEQ ID Nos: 28,453-213,182 or its complement.

[0089] In some embodiments, the probe set comprises 1 or more, 2 or more, 5 or more, 10 or more, 25 or more, 50 or more, 100 or more, 200 or more, 300 or more, 400 or more, 500 or more, 600 or more, 700 or more, 800 or more, 900 or more, 1000 or more, 1100 or more, 1200 or more, 1300 or more, 1400 or more, 1500 or more, 2000 or more, 3000 or more, 3500 or more, 4000 or more, 5000 or more, 10000 or more, 20000 or more, 3000, or more, 40000 or more, 50000 or more, 100000 or more sequences selected from SEQ ID Nos: 1-28,452 or its complement. In some embodiments, the probe set comprises 1 or more, 2 or more, 5 or more, 10 or more, 25 or more, 50 or more, 100 or more, 200 or more, 300 or more, 400 or more, 500 or more, 600 or more, 700 or more, 800 or more, 900 or more, 1000 or more, 1100 or more, 1200 or more, 1300 or more, 1400 or more, 1500 or more, 2000 or more, 3000 or more, 3500 or more, 4000 or more, 5000 or more, 10000 or more, 20000 or more, 3000, or more, 40000 or more, 50000 or more, 100000 or more sequences selected from SEQ ID Nos: 1-28,452 or its complement.

[0090] In some embodiments, the probe set comprises 1 or more, 2 or more, 5 or more, 10 or more, 25 or more, 50 or more, 100 or more, 200 or more, 300 or more, 400 or more, 500 or more, 600 or more, 700 or more, 800 or more, 900 or more, 1000 or more, 1100 or more, 1200 or more, 1300 or more, 1400 or more, 1500 or more, 2000 or more, 3000 or more, 3500 or more, 4000 or more, 5000 or more, 10000 or more, 20000 or more, 3000, or more, 40000 or more, 50000 or more, 100000 or more, 200000 or more, sequences selected from SEQ ID NOs: 1-213,280, or its complement.

[0091] In some embodiments, the method comprises providing a probe set comprising at least two nucleic acid probes complementary to one or more target viral nucleic acids, wherein the probe set comprises at least two of SEQ ID NOs: 1-28,452 or SEQ ID NOS: 28,453-213,182 or SEQ ID Nos: 213,183-213,280 or SEQ ID NOs: 1-213,280, or the complements of the foregoing; allowing the probes in the probe set to hybridize to the target viral nucleic acids; and enriching the sample for the one or more target viral nucleic acids by amplifying the target viral nucleic acids and/or separating the target viral nucleic acids from the sample.

[0092] Also described herein are methods of enriching a sample for one or more target viral nucleic acids. In some embodiments, the present methods detect or enrich for new or unknown viral pathogens or new or unknown strains of viral pathogens. This may include analysis of patient samples. In some embodiments, the present methods detect co-infections with one or more additional pathogens, including viruses or bacteria. In some embodiments, the present methods detect or enrich for specific viral pathogen strains. In some embodiments, the present methods can be used to perform strain typing and/or strain characterization for monitoring viral pathogen evolution and epidemiology (e.g., viral evolution and epidemiology). In some embodiments, the present methods detect or enrich for viral nucleic acids that exhibit resistance. Resistance can include resistance to anti-viral therapies (whether small molecule therapy or other therapies including treatment with antibodies (including antigen-binding fragments thereof or other biologics with CDRs responsible for specific binding), viral entry inhibitors, viral assembly inhibitors, viral DNA and RNA polymerase inhibitors, viral reverse transcriptase inhibitors, viral protease inhibitors, viral integrase inhibitors, and inhibitors of viral shedding. In some embodiments, the present methods are used to identify hospital-associated viral infections. As used herein, a hospital-associated viral infection refers to an infection whose development spread through and/or is favored by a hospital environment, nursing home, rehabilitation facility, group home, residential facility, medical office, clinic, or other clinical settings. This infection is spread to a subject in the clinical setting by a number of means, for example through contaminated equipment, bed linens, or air droplets. In some embodiments, the present methods are used for viral resequencing. In some embodiments, resequencing allows for testing for known mutations or scanning for one or more mutations in a given target region. Such methods may be used in a panel used for detection of and/or typing of viral pathogens (e.g., viruses-of-interest).

[0093] In some embodiments, the method comprises providing a probe set comprising at least two nucleic acid probes complementary to one or more target viral nucleic acids, wherein the nucleic acid probes are affixed to a support; capturing one or more target viral nucleic acids on a support; using the one or more captured target viral nucleic acids as a template strand to produce one or more nucleic acid duplexes immobilized on the support, wherein the at least one target viral nucleic acids hybridize to one or more probes in a probe set on the support; contacting a transposase and transposon with the one or more nucleic acid duplexes under conditions wherein the one or more nucleic acid duplexes and transposon composition undergo a transposition reaction to produce one or more tagged nucleic acid duplexes, wherein the transposon composition comprises a double stranded nucleic acid molecule comprising a transferred strand and a non-transferred strand; contacting the one or more tagged nucleic acid duplexes with a nucleic acid modifying enzyme under conditions to extend the 3′ end of the immobilized strand to the 5′ end of the template strand to produce one or more end-extended tagged nucleic acid duplexes; amplifying the one or more end-extended tagged nucleic acid duplexes to produce a plurality of tagged nucleic acid strands; contacting the plurality of tagged nucleic acid strands with a probe set to create an enriched library; and amplifying the enriched library.

[0094] A wide variety of solid supports may be used to immobilize oligonucleotides for depleting or enriching as described herein, including those described in WO 2014/108810, which is incorporated in its entirety herein.

[0095] The composition and geometry of the solid support can vary with its use. In some embodiments, the solid support is a planar structure such as a slide, chip, microchip and/or array. As such, the surface of a substrate can be in the form of a planar layer. In some embodiments, the solid support comprises one or more surfaces of a flowcell. The term “flowcell” as used herein refers to a chamber comprising a solid surface across which one or more fluid reagents can be flowed. Examples of flowcells and related fluidic systems and detection platforms that can be readily used in the methods of the present disclosure are described, for example, in Bentley et al., Nature 456:53-59 (2008), WO 04/018497; U.S. Pat. No. 7,057,026; WO 91/06678; WO 07/123744; U.S. Pat. Nos. 7,329,492; 7,211,414; 7,315,019; 7,405,281, and US 2008/0108082.

[0096] In some embodiments, a flowcell is comprised within an apparatus or device for sequencing nucleic acids, which may be referred to as a sequencer. In some embodiments, a sequence may also comprise reservoirs for collection of samples or tubing (such as for collecting samples in a reservoir of for exiting of waste). In some embodiments, one or more reservoirs are separate from the flowcell and are comprised in the sequencer. In some embodiments, modifications are made to standard sequencers to improve fluidics system recipes and/or hardware for use of reservoirs in the present methods.

[0097] As used herein, a “flowcell” may comprise a flowcell-like device that is not intended to be imaged. While standard flowcells used for imaging may be employed in the present methods, flowcells can also be engineered differently than flowcells intended for imaging. In some embodiments, a flowcell may have a high density of immobilized oligonucleotides, wherein imaging infrastructure would have difficulty separating out into different bridge-amplified clusters associated with different immobilized oligonucleotides. In some embodiments, a high density of immobilized oligonucleotides improves hybridization efficiency. In some embodiments, standard clear glass may be used in a flowcell. In other embodiments, hard plastic may be used in the flowcell. Use of glass in a flowcell may allow use of a standard flowcell without further optimization, whereas use of hard plastic may reduce the cost of manufacturing the flowcell and/or improve stability of a flowcell. Depending on the advantages desired, different materials may be used. In some embodiments, immobilized oligonucleotides are embedded in a substrate other than that of a standard flowcell (i.e., embedded in a substrate other than PAZAM) to improve immobilization of oligonucleotides of longer length.

### B. Methods of Supplementing a Probe Set for Use in Enriching for Viral Nucleic Acids

[0098] Also described herein are methods of supplementing a probe set for use in enriching for viral nucleic acid molecules from a nucleic acid sample.

[0099] In some embodiments, the methods of enriching for viral nucleic acids described herein can be supplemented with or used in conjunction with other enrichment panels. In some embodiments, the method also targets genitourinary pathogens, Antimicrobial Resistance (AMR) markers, respiratory viruses, respiratory pathogens (e.g., viruses, bacteria, fungi, and/or parasites), and/or exonic content. In some embodiments, the method is used with, supplemented with, or used in conjunction with the Urinary Pathogen ID/AMR Panel or Enrichment Kit (UPIP; Illumina). In some embodiments, the method is used with, supplemented with, or used in conjunction with the Virus Surveillance Panel or Enrichment Kit (VSP; Illumina). In some embodiments, the method is used with, supplemented with, or used in conjunction with the Respiratory Pathogen ID/AMR Panel or Enrichment Kit (RPIP; Illumina). In some embodiments, the method is used with, supplemented with, or used in conjunction with the Pan-Coronavirus Panel or Enrichment Kit (Pan-Cov; Illumina). In some embodiments, the method is used with, supplemented with, or used in conjunction with the Respiratory Virus Oligos Panel or Enrichment Kit (RVOP; Illumina). In some embodiments, the method is supplemented with or used in conjunction with the Illumina Exome Panel (Illumina). In some embodiments, the method targets and enriches for coding RNA sequences. In some embodiments, the method is used with the Illumina RNA Prep with Enrichment (Illumina).

[0100] Examples of supplemental probe sets that can be readily used in the methods of the present disclosure are described, for example, in U.S. Provisional Application No. 63/250,563, filed Sep. 30, 2021, U.S. Provisional Application No. 63/351,170 filed Jun. 10, 2022, and U.S. Provisional Application No. 63/378,610, filed Oct. 6, 2022.

[0101] In some embodiments the method comprises depleting unwanted nucleic acid molecules from a nucleic acid sample.

[0102] In some embodiments, the depleting unwanted nucleic acid molecules comprises depleting unwanted cDNA library fragments from a library of cDNA fragments prepared from RNA, wherein the unwanted library fragments comprise those prepared from unwanted RNA sequences, further comprising: preparing a solid support comprising at least one immobilized oligonucleotide, wherein each immobilized oligonucleotide comprises a nucleic acid sequence corresponding to an unwanted RNA sequence or its complement, adding the library of fragments to the solid support and hybridizing the library fragments to at least one immobilized oligonucleotide to allow binding of unwanted library fragments to at least one immobilized oligonucleotide, and collecting library fragments not bound to at least one immobilized oligonucleotide.

[0103] In some embodiments, the at least one immobilized oligonucleotide comprises a sequence comprising any one or more of SEQ ID NOs: 213,288-214,878 or its complement.

[0104] In some embodiments, a solid support comprises more than one pool of immobilized oligonucleotides on its surface.

[0105] For example, a solid support may comprise a first pool of immobilized oligonucleotides for depleting and a second pool of immobilized oligonucleotides for enriching. In some embodiments, one pool of immobilized oligonucleotides may be blocked (such as with complementary nucleic acid sequences) to avoid binding to complementary library fragments during certain steps of methods using the solid support.

[0106] In some embodiments, a solid support has two pools of immobilized oligonucleotides on its surface, wherein the first pool comprises immobilized oligonucleotides each comprising an unwanted RNA sequence and the second pool comprises immobilized oligonucleotides each comprising a solid support adapter sequence that can bind to a library adapter comprised in library fragments. In some embodiments, solid support adapter sequences are bound by adapter complements, wherein the adapter complements can be denatured during a method to allow binding of solid support adapter sequences to library adapters in library fragments. Such a solid support can be used for methods of preparing a depleted library and amplifying the depleted library on the same solid support.

[0107] In some embodiments, at least one unwanted RNA sequence has at least 90%, at least 95%, or at least 99% homology to a high-abundance RNA sequence in a sample used to prepare the library of fragments. In some embodiments, all unwanted sequences have at least 90%, at least 95%, or at least 99% homology to a high-abundance RNA sequence in a sample used to prepare the library of fragments.

[0108] In some embodiments, the depleting unwanted nucleic acid molecules comprises depleting off-target RNA nucleic acid molecules from a nucleic acid sample comprises contacting a nucleic acid sample comprising at least one RNA or DNA target sequence and at least one off-target RNA molecule from a first species with a probe set comprising at least two DNA probes complementary to discontiguous sequences along the full length of the at least one off-target RNA molecule from a second species, thereby hybridizing the DNA probes to the off-target RNA molecules to form DNA:RNA hybrids, wherein each DNA:RNA hybrid is at least 5 bases apart, or at least 10 bases apart, along a given off-target RNA molecule sequence from any other DNA:RNA hybrid, wherein the off-target DNA comprises at least one small noncoding RNA chosen from RN7SK, RN7SL1, RN7SL2, RN7SL5P, RPPH1, SNORD3A; contacting the DNA:RNA hybrids with a ribonuclease that degrades the RNA from the DNA:RNA hybrids, thereby degrading the off-target RNA molecules in the nucleic acid sample to form a degraded mixture; separating the degraded RNA from the degraded mixture; sequencing the remaining RNA from the sample; evaluating the remaining RNA sequences for the presence of off-target RNA molecules from the first species, thereby determining gap sequence regions; and supplementing the probe set with additional DNA probes complementary to discontiguous sequences in one or more of the gap sequence regions.

[0109] In some embodiments, the probe set comprises any one or more of SEQ ID NOS: 213,288-214,878, or its complement.

[0110] In some embodiments, the method further comprises depleting unwanted cDNA library fragments from a library of cDNA fragments prepared from RNA, wherein the unwanted library fragments comprise those prepared from unwanted RNA sequences.

### C. Samples

[0111] The present methods are not limited to a specific type of sample comprising viral RNA or DNA, and these methods can be used with libraries prepared from any sample comprising RNA or DNA. Described below are a few exemplary types of samples, wherein sequencing of library fragments prepared from these samples can be improved by enriching or depleting.

[0112] In some embodiments, the sample comprises a microbe sample, a microbiome sample, a bacteria sample, a yeast sample, a plant sample, an animal sample, a patient sample, an epidemiology sample, an environmental sample, a soil sample, a water sample, a metatranscriptomics sample, or a combination thereof. In some embodiments, samples are from mixed populations of microbes such as microbial populations or viral populations from patients.

[0113] In some embodiments the sample is a water sample. In some embodiments, the water sample is a freshwater sample, a wastewater sample, a saline water sample, or a combination thereof. In some embodiments, the sample comprises a wastewater sample. In some embodiments, the sample comprises wastewater from food production, animal husbandry, seasonal surface runoff or other sources.

[0114] In some embodiments, the sample may be from a mammal. In some embodiments the sample may be from a human, monkey, bat, dog, cat, horse, goat, sheep, cow, pig, rat and/or mouse. In some instances, reservoirs of microbes (including viruses) in animal populations can serve as samples to predict what diseases or strains of diseases may become human pathogens or to compare sequences in animal reservoirs to sequences of pathogens infecting humans.

[0115] In some embodiments, samples may be from a patient. In some embodiments, samples may be from a patient with cancer (i.e., an oncology sample). In some embodiments, samples may be from a patient with a rare disease. In some embodiments, samples may be from a patient with a viral infection. In some embodiments, samples may be from a patient with coronavirus SARS-CoV2 (COVID-19). In some embodiments, the sample may be a tumor sample. In some embodiments, the sample may be a blood sample, a serum sample, and/or a whole blood sample. In some embodiments the sample may be a tissue sample. In some embodiments the sample may be a fecal sample, a urine sample, a mucus sample, a saliva sample, a lymph sample, a vaginal fluid sample, a semen sample, an amniotic sample, and/or a sweat sample.

### D. Library Preparation

[0116] Libraries prepared by any method can be used together with the present methods of enriching and/or depleting. In some embodiments, probes are single-stranded to allow for hybridizing and capturing of single-stranded library fragments that are complementary. In some embodiments, specific binding of a single-stranded library fragment to a probe generates a double-stranded oligonucleotide. In some embodiments, the double-stranded oligonucleotide forms a DNA:RNA hybrid. The probe specifically bound to the library fragment may be bound with a high-enough affinity to be recognized for degradation with a ribonuclease. In some embodiments, the off-target RNA molecules are degraded after contacting the sample with a ribonuclease to form a degraded mixture.

[0117] As used herein, the term “library” refers to a collection of members. In one embodiment, the library includes a collection of nucleic acid members, for example, a collection of whole genomic, subgenomic fragments, cDNA, cDNA fragments, RNA, RNA fragments, or a combination thereof. In some embodiments, a portion or all library members include a non-target adaptor sequence. The adaptor sequence can be located at one or both ends. The adaptor sequence can be used in, for example, a sequencing method (for example, an NGS method), for amplification, for reverse transcription, or for cloning into a vector.

[0118] In some embodiments, this DNA:RNA hybrid-specific cleavage comprises use of RNase H. This methodology is implemented as part of the current Illumina Total RNA Stranded Library Prep workflow and New England Biolabs NEBNext rRNA Depletion Kit and RNA depletion methods as described in U.S. Pat. Nos. 9,745,570 and 9,005,891.

### E. Amplification

[0119] In some embodiments, methods described herein comprise one or more amplification step. In some embodiments, library fragments are amplified before being added to a solid support. In some embodiments library fragments are amplified after a method of depleting described herein. In some embodiments, amplifying is by PCR amplification.

[0120] As used herein, “amplify,” “amplifying,” or “amplification reaction” and their derivatives, refer generally to any action or process whereby at least a portion of a nucleic acid molecule is replicated or copied into at least one additional nucleic acid molecule. The additional nucleic acid molecule optionally includes sequence that is substantially identical or substantially complementary to at least some portion of the template nucleic acid molecule. The template nucleic acid molecule can be single-stranded or double-stranded and the additional nucleic acid molecule can independently be single-stranded or double-stranded. Amplification optionally includes linear or exponential replication of a nucleic acid molecule. In some embodiments, such amplification can be performed using isothermal conditions; in other embodiments, such amplification can include thermocycling. In some embodiments, the amplification is a multiplex amplification that includes the simultaneous amplification of a plurality of target sequences in a single amplification reaction. In some embodiments, “amplification” includes amplification of at least some portion of DNA and RNA based nucleic acids alone, or in combination. The amplification reaction can include any of the amplification processes known to one of ordinary skill in the art. In some embodiments, the amplification reaction includes polymerase chain reaction (PCR).

1. Amplification after Enriching

[0121] In some embodiments, collected library fragments are amplified after a method of enriching. In some embodiments, an enriched library is amplified.

[0122] In some embodiments, the amplifying is performed with a thermocycler. In some embodiments, the amplifying is by PCR amplification.

[0123] As used herein, the term “polymerase chain reaction” (“PCR”) refers to the method as described in U.S. Pat. Nos. 4,683,195 and 4,683,202, which describe a method for increasing the concentration of a segment of a polynucleotide of interest in a mixture of genomic DNA without cloning or purification. This process for amplifying the polynucleotide of interest consists of introducing a large excess of two oligonucleotide primers to the DNA mixture containing the desired polynucleotide of interest, followed by a series of thermal cycling in the presence of a DNA polymerase. The two primers are complementary to their respective strands of the double stranded polynucleotide of interest. The mixture is denatured at a higher temperature first and the primers are then annealed to complementary sequences within the polynucleotide of interest molecule. Following annealing, the primers are extended with a polymerase to form a new pair of complementary strands. The steps of denaturation, primer annealing, and polymerase extension can be repeated many times (referred to as thermocycling) to obtain a high concentration of an amplified segment of the desired polynucleotide of interest. The length of the amplified segment of the desired polynucleotide of interest (amplicon) is determined by the relative positions of the primers with respect to each other, and therefore, this length is a controllable parameter. By virtue of repeating the process, the method is referred to as the “polymerase chain reaction” (hereinafter “PCR”). Because the desired amplified segments of the polynucleotide of interest become the predominant nucleic acid sequences (in terms of concentration) in the mixture, they are said to be “PCR amplified.” In a modification to the method discussed above, the target nucleic acid molecules can be PCR amplified using a plurality of different primer pairs, in some cases, one or more primer pairs per target nucleic acid molecule of interest, thereby forming a multiplex PCR reaction.

[0124] In some embodiments, the amplifying is performed without PCR amplification. In some embodiments, the amplifying does not require a thermocycler. In some embodiments, depleting and amplifying after the depleting is performed in a sequencer.

[0125] In some embodiments, the amplifying is performed without a thermocycler. In some embodiments, the amplifying is performed by bridge or cluster amplification.

### F. Sequencing of Enriched Libraries

[0126] In some embodiments, a library enriched for target viral sequences library fragments is sequenced.

[0127] In some embodiments, sequencing data generated after enriching for target viral sequences is capable of capturing novel viruses with homology to the sequence in the probe set. In some embodiments, sequencing data generated after enriching for target viral sequences is capable of capturing new or unknown viruses (e.g., new or unknown viruses-of-interest). In some embodiments, sequencing data generated after enriching for target viral sequences is capable of capturing co-infections. In some embodiments, sequencing data generated after enriching for target viral sequences is capable of capturing specific viral strains (e.g., specific strains of a virus-of-interest). In some embodiments, sequencing data generated after enriching for target viral sequences is capable of capturing viral nucleic acids that exhibit resistance. In some embodiments, sequencing data generated after enriching for target viral sequences provides unbiased viral pathogen detection. In some embodiments, sequencing data generated after enriching for target viral sequences is capable of capturing viral nucleic acids present in hospital-associated infection management.

[0128] Enriched libraries prepared by the present method can be used with any type of RNA sequencing, such as RNA-seq, small RNA sequencing, long non-coding RNA (lncRNA) sequencing, circular RNA (circRNA) sequencing, targeted RNA sequencing, exosomal RNA sequencing, and degradome sequencing.

[0129] Enriched libraries can be sequenced according to any suitable sequencing methodology, such as direct sequencing, including sequencing by synthesis, sequencing by ligation, sequencing by hybridization, nanopore sequencing and the like. In some embodiments, the enriched libraries are sequenced on a solid support. In some embodiments, the solid support for sequencing is the same solid support on which the enriching is performed. In some embodiments, the solid support for sequencing is the same solid support upon which amplification occurs after the enriching.

[0130] Flowcells provide a convenient solid support for performing sequencing. One or more library fragments (or amplicons produced from library fragments) in such a format can be subjected to an SBS or other detection technique that involves repeated delivery of reagents in cycles. For example, to initiate a first SBS cycle, one or more labeled nucleotides, DNA polymerase, etc., can be flowed into/through a flowcell that houses one or more amplified nucleic acid molecules. Those sites where primer extension causes a labeled nucleotide to be incorporated can be detected. Optionally, the nucleotides can further include a reversible termination property that terminates further primer extension once a nucleotide has been added to a primer. For example, a nucleotide analog having a reversible terminator moiety can be added to a primer such that subsequent extension cannot occur until a deblocking agent is delivered to remove the moiety. Thus, for embodiments that use reversible termination, a deblocking reagent can be delivered to the flowcell (before or after detection occurs). Washes can be carried out between the various delivery steps. The cycle can then be repeated n times to extend the primer by n nucleotides, thereby detecting a sequence of length n. Exemplary SBS procedures, fluidic systems and detection platforms that can be readily adapted for use with amplicons produced by the methods of the present disclosure are described, for example, in Bentley et al., Nature 456:53-59 (2008), WO 04/018497; U.S. Pat. No. 7,057,026; WO 91/06678; WO 07/123744; U.S. Pat. Nos. 7,329,492; 7,211,414; 7,315,019; 7,405,281, and US 2008/0108082.

[0131] The term “flow cell” as used herein refers to a chamber comprising a solid surface across which one or more fluid reagents can be flowed. Examples of flow cells and related fluidic systems and detection platforms that can be readily used in the methods of the present disclosure are described, for example, in Bentley et al., Nature 456:53-59 (2008); WO 04/018497; WO 91/06678; WO 07/123744; U.S. Pat. Nos. 7,057,026; 7,211,414; 7,315,019; 7,329,492; 7,405,281; and US Pat. Publication No. 2008/0108082.

### G. Whole Genome Sequencing, Amplicon Sequencing, Metagenomic Analysis, and Metatranscriptomic Analysis

[0132] In some embodiments, samples are sequenced using whole-genome sequencing and/or amplicon sequencing. Whole genome sequencing refers to sequencing the genome of any organism including viral pathogens (e.g., viruses-of-interest) and host organisms. For example, whole genome sequencing may be performed on a microbial isolate. Transmission dynamics may be evaluated by whole genome sequencing. Whole genome sequencing also provides useful information on strain characterization, resistance detection, and hospital-associated infection management.

[0133] In some embodiments, samples are sequenced using amplicon sequencing. The term “amplicon” refers to the resultant mixture of compounds after two or more cycles of the PCR steps of denaturation, annealing and extension. Thus, amplicon sequencing is the sequencing of amplicons and this can provide useful information on variant identification and characterization. In some embodiments, amplicon sequencing encompasses amplification of one or more segments of one or more target sequences, which can be performed by using probes to target and amplify regions of interest, followed by sequencing, such as next-generation sequencing. Amplicon sequencing may be performed on a variety of samples, including patient samples or microbial isolates, and is useful for strain characterization. It is also useful for viral resequencing and resistance detection.

[0134] In some embodiments, additional information may be obtained about samples using metagenomic and/or metatranscriptomic analyses. Metagenomic and/or metatranscriptomic analysis may be performed on patient samples and may provide unbiased viral pathogen detection. In some embodiments, metagenomic or metatranscriptomic analyses comprises sequencing the genomes of a plurality of individuals of different species in a given sample. In some embodiments, metagenomic or metatranscriptomic analyses is done without prior knowledge regarding the biological species in the sample, whether they be viral or human. In some embodiments, metagenomic or metatranscriptomic analyses enables determination of which species are present, and their relative abundances. Thus, metagenomic and/or metatranscriptomic analysis may be useful for unknown viral pathogen detection, co-infection detection, resistance detection, and/or strain characterization.

[0135] In some embodiments, whole genome sequencing, amplicon sequencing, metgenomic analysis, and/or metatranscriptomic analyses may be used in combination with each other.

### IV. Kits

[0136] Described herein is a kit comprising any of the compositions described herein in Section II, Compositions, above.

[0137] Disclosed herein are also kits for depleting or enriching libraries. In some embodiments, the kit comprises a solid support disclosed herein and instructions for using the solid support. Such a kit may further comprise reagents for preparing a cDNA library from RNA, such as reagents for a stranded method of cDNA preparation from a sample comprising RNA, as described below.

[0138] In some embodiments the kit comprises at least one DNA probe comprising at least one sequence comprising at least one of SEQ ID NOs: 28,453-213,182, or its complement and a buffer. In some embodiments, the kit comprises 2 or more, 5 or more, 10 or more, 25 or more, 50 or more, 100 or more, 200 or more, 300 or more, 400 or more, 500 or more, 600 or more, 700 or more, 800 or more, 900 or more, 1000 or more, 2000 or more, or 184,730 sequences selected from SEQ ID NOs: 1-184,730, or its complement. In some embodiments, the at least one DNA probe comprises 500 or more, 600 or more, 700 or more, 800 or more, 900 or more, 1000 or more, 2000 or more, or 184,828 sequences selected from SEQ ID NOs: 28,453-213,280, or its complement.

[0139] In some embodiments the kit comprises at least one DNA probe comprising at least one sequence comprising at least one of SEQ ID NOs: 1-28,452, or its complement and a buffer. In some embodiments, the kit comprises 2 or more, 5 or more, 10 or more, 25 or more, 50 or more, 100 or more, 200 or more, 300 or more, 400 or more, 500 or more, 600 or more, 700 or more, 800 or more, 900 or more, 1000 or more, 2000 or more sequences selected from SEQ ID NOs: 184,829-213,280, or its complement. In some embodiments, the at least one DNA probe comprises 500 or more, 600 or more, 700 or more, 800 or more, 900 or more, 1000 or more, 2000 or more sequences selected from SEQ ID NOs: 1-28,452; 213,183-213,280 or its complement.

[0140] In some embodiments the kit comprises at least one DNA probe comprising at least one sequence comprising at least one of SEQ ID NOs: 1-213,280, or its complement and a buffer. In some embodiments, the kit comprises 2 or more, 5 or more, 10 or more, 25 or more, 50 or more, 100 or more, 200 or more, 300 or more, 400 or more, 500 or more, 600 or more, 700 or more, 800 or more, 900 or more, 1000 or more, 2000 or more, or 213,280 sequences selected from SEQ ID NOs: 1-213,280, or its complement. In some embodiments, the at least one DNA probe comprises 500 or more, 600 or more, 700 or more, 800 or more, 900 or more, 1000 or more, 2000 or more, or 213,280 sequences selected from SEQ ID NOs: 1-213,280, or its complement.

[0141] In some embodiments, the kit further comprises at least one DNA probe comprising at least one sequence comprising at least one of SEQ ID Nos: 213,288-214,878, or its complement.

[0142] In some embodiments, the buffer is a wash buffer and/or an elution buffer.

[0143] In some embodiments, the kit further comprises an RNA depletion buffer, a probe depletion buffer, and/or a probe removal buffer.

[0144] In some embodiments, the kit further comprises a ribonuclease; a DNase; and RNA purification beads. In some embodiments, the ribonuclease is RNase H.

[0145] In some embodiments, the kit comprises a buffer and nucleic acid purification medium. In some embodiments, the buffer is an RNA depletion buffer, a probe depletion buffer, and/or a probe removal buffer.

[0146] In some embodiments, the kit comprises a nucleic acid destabilizing chemical. In some embodiments, the nucleic acid destabilizing chemical comprises betaine, DMSO, formamide, glycerol, or a derivative thereof, or a mixture thereof. In some embodiments, the nucleic acid destabilizing chemical comprises formamide.

[0147] Throughout this application and claims, the term “and/or” means one or more of the listed elements or a combination of any two or more of the listed elements.

[0148] The term “comprises” and variations thereof do not have a limiting meaning where these terms appear in the description and claims.

[0149] It is understood that wherever embodiments are described herein with the language “include,” “includes,” or “including,” and the like, otherwise analogous embodiments described in terms of “consisting of” and/or “consisting essentially of” are also provided. The term “consisting of” is limited to whatever follows the phrase “consisting of.” That is, “consisting of” indicates that the listed elements are required or mandatory, and that no other elements may be present. The term “consisting essentially of” indicates that any elements listed after the phrase are included, and that other elements than those listed may be included provided that those elements do not interfere with or contribute to the activity or action specified in the disclosure for the listed elements.

[0150] Unless otherwise specified, “a,” “an,” “the,” and “at least one” are used interchangeably and mean one or more than one.

[0151] As used herein, the term “each,” when used in reference to a collection of items, is intended to identify an individual term in the collection but does not necessarily refer to every term in the collection unless the context clearly dictates otherwise.

[0152] The recitations of numerical ranges by endpoints include all numbers subsumed within that range (e.g., 1 to 5 includes 1, 1.5, 2, 2.75, 3, 3.80, 4, 5, etc.).

[0153] For any method disclosed herein that includes discrete steps, the steps may be conducted in any feasible order. And, as appropriate, any combination of two or more steps may be conducted simultaneously.

[0154] The above summary of the present invention is not intended to describe each disclosed embodiment or every implementation of the present invention. The description that follows more particularly exemplifies illustrative embodiments. In several places throughout the application, guidance is provided through lists of examples, which examples can be used in various combinations. In each instance, the recited list serves only as a representative group and should not be interpreted as an exclusive list.

[0155] Reference throughout this specification to “one embodiment,” “an embodiment,” “certain embodiments,” or “some embodiments,” etc., means that a particular feature, configuration, composition, or characteristic described in connection with the embodiment is included in at least one embodiment of the disclosure. Thus, the appearances of such phrases in various places throughout this specification are not necessarily referring to the same embodiment of the disclosure. Furthermore, the particular features, configurations, compositions, or characteristics may be combined in any suitable manner in one or more embodiments.

[0156] Unless otherwise indicated, all numbers expressing quantities of components, molecular weights, and so forth used in the specification and claims are to be understood as being modified in all instances by the term “about.” Accordingly, unless otherwise indicated to the contrary, the numerical parameters set forth in the specification and claims are approximations that may vary depending upon the desired properties sought to be obtained by the present invention. At the very least, and not as an attempt to limit the doctrine of equivalents to the scope of the claims, each numerical parameter should at least be construed in light of the number of reported significant digits and by applying ordinary rounding techniques.

[0157] All headings are for the convenience of the reader and should not be used to limit the meaning of the text that follows the heading, unless so specified.

[0158] Notwithstanding that the numerical ranges and parameters setting forth the broad scope of the invention are approximations, the numerical values set forth in the specific examples are reported as precisely as possible. All numerical values, however, inherently contain a range necessarily resulting from the standard deviation found in their respective testing measurements.

[0159] Unless defined otherwise, all technical and scientific terms used herein have the same meaning as commonly understood by one of ordinary skill in the art pertinent to the methods and compositions described. All patents, applications, published applications and other publications referred to herein are incorporated by reference in their entirety. If a definition set forth in this section is contrary to or otherwise inconsistent with a definition set forth in the patents, applications, published applications, and other publications that are herein incorporated by reference, the definition set forth in this section prevails over the definition that is incorporated herein by reference.

### EXAMPLES

### Example 1. Preparation of Probes to Improve Enrichment of Viruses of Interest in Wastewater Samples

### A. Probe Design

[0160] Probes were designed that would bind to viruses present in wastewater and known to cause human diseases (i.e., viruses-of-interest).

[0161] For most viral species, the RefSeq reference sequences were used. RefSeq is an NCBI Reference Sequence Database. Where no RefSeq genome was available, and few sequences were available in the NCBI database, just one of these accessions was chosen. Where many options were available (generally >3-5) all sequences were aligned, and a consensus sequence was used for the design. See Table 2.

[0162] Probes were designed by a proprietary algorithm for enrichment probes running on a Linux server. The weighting for spacing and probe scoring variables were set to 6 and 2 respectively. Probe spacing was set to ‘adjacent’, or 80 bp center to center. After the initial panel was submitted to manufacturing, it was determined that there were some strains of Monkeypox that contained additional sequence not captured in the initial panel. Additional probes were designed to supplement these gaps.

### B. Mitigation of Poly G Sequences

[0163] Poly G sequences pose manufacturing problems for enrichment probes and can often result in a failure or premature termination of the oligonucleotide. To mitigate this in the current probe pool, the pool of designed probes was scrutinized and every probe with a run of 4 Gs or more was flagged. In addition, the complete list of candidate probes (outputted by a proprietary algorithm) was scrutinized, and any probe candidates with a run of 4 or more Gs was evaluated for deletion from the list. Finally, an overlap was run on the flagged probes, and they were replaced by a probe candidate which had the greatest amount of overlap with the original. If no probe from the candidate list (not containing >3 Gs) was available, the original flagged probe was retained.

### C. Deduplication of Probes

[0164] Due to the inclusion in the panel of several viral species with high homology, a deduplication was run using stringent hybridization settings to minimize probe removal.

### D. Specificity Check

[0165] The probe list of SEQ ID NOs: 1-28,452 was checked back against all viral sequences for specificity. Theoretical pulldown was calculated using only high stringency assumptions, 90% minimum identity over 50 bp for high stringency. The full probe pool is expected to pull down greater than 90% of all viral genomes designed against, plus all isolate sequences that went into the consensus sequences.

[0166] Additional probes include SEQ ID Nos: 28,453-213,182, which were designed using a different method. These additional probes may be included in the panel in order to more completely cover the full genomes of genetically diverse viruses such as HIV.

### Example 2. RNA Preparation and Tagmentation Enrichment of RNAs of Interest in Wastewater Samples

[0167] RNA sequencing (RNA-Seq) with next-generation sequencing (NGS) is a powerful method for discovering, profiling, and quantifying RNA transcripts. Targeted RNA-Seq analyzes expression in a focused set of genes. Enrichment enables cost-effective RNA exome analysis using sequence-specific capture of the coding regions of the transcriptome. It is ideal for low-quality samples.

[0168] This tagmentation enrichment uses on-bead tagmentation followed by a single 90-minute hybridization step to provide a rapid workflow. On-bead tagmentation features enrichment Bead-Linked Transposomes (eBLT) optimized for RNA (eBLTL) that mediate a uniform tagmentation reaction. In addition to manual preparation, RNA Preparation and Tagmentation Enrichment is designed to be compatible with liquid-handling platforms for an automated workflow, providing highly reproducible sample handling, reduced risk of human error, and less hands-on time.

A. cDNA Synthesis and Tagmentation

[0169] Wastewater is collected for evaluation of viral RNA. RNA collected from wastewater is denatured and then random hexamers are annealed. The random hexamers prime the sample for cDNA synthesis. The hexamer-primed RNA fragments are then reverse transcribed to produce first strand cDNA. Enrichment Bead-Linked Transposomes are used to tagment double-stranded cDNA.

### B. Amplification and Purification

[0170] After tagmentation, the fragments are purified and amplified to add index adapter sequences for dual indexing and P7 and P5 sequences for clustering. Next, magnetic beads are implemented to purify the tagmented library. Then the purified library is quantified and normalized.

### C. Enrichment

[0171] After normalization, the library is combined into one pool for one- or three-plex enrichment. Results are optimized for 200 ng of each library. Following quantification and normalization, the magnetic beads are implemented to capture probes hybridized to the targeted library fragments of interest. Using heated washes, nonspecific sequences bound to the beads are removed. The enriched library is then eluted from the beads. The enriched library is then amplified using a PCR program. In some embodiments, the PCR program is 14 cycles. After amplification, magnetic beads are used purify the enriched library.

### D. Evaluation

[0172] The enriched library is then evaluated using either or both of the following methods: (1) analyzing 1 μl of the enriched library with the Qubit dsDNA HS Assay kit (Illumina) to quantify library concentration (ng/μl); and/or (2) analyzing 1 μl of the enriched library with the Agilent 2100 Bioanalyzer System and a DNA 1000 Kit to qualify.

[0173] After diluting to the starting concentration depending on the sequence system, libraries are denatured and diluted to the final loading concentration. Paired-end runs are used for sequencing. The number of cycles per index read is 10, and the number of cycles per read varies depending on the sequencing system.

### Example 3. Enrichment Using a Solid Support

[0174] A solid support, such as a flowcell, is prepared for enrichment. Oligonucleotides are prepared corresponding to desired RNA, and these oligonucleotides are immobilized to a solid support. For example, oligonucleotides comprising sequences complementary to desired RNA (e.g., RNA sequences associated with viruses-of-interest) are immobilized to a solid support to allow for enrichment. A flowcell with such immobilized oligonucleotides may be termed an enrichment flowcell.

[0175] A cDNA library is prepared using the probe sets described above in Example 1 from a wastewater sample comprising RNA. Library fragments are then be added to the enrichment flowcell. Library fragments prepared from desired RNA bind to the enrichment flowcell, and the fluid that does not bind to the enrichment flowcell (comprising library fragments not prepared from desired RNA) is siphoned to a waste container. The bound library fragments are denatured, collected, and sequenced (with optional amplification before sequencing). In this way, the library that is sequenced is enriched for library fragments prepared from desired RNA.

### Example 4. Pathogen and AMR Detection in Wastewater

[0176] The Concentrating Pipette (InnovaPrep) and Nanotrap Microbiome Particles (Ceres Nanosciences) methods of microbial concentration were evaluated. In addition, four different extraction techniques were used on samples taken from different wastewater sources, including college dorms and water treatment plants in Colorado and Wisconsin. The nucleic acid was sequenced with either: (1) Shotgun metatranscriptomics performed by depleting ribosomal RNA (rRNA) using RiboZero Plus™ Microbiome (Illumina) coupled with total RNAseq library preps to profile the entire microbial content in the samples; or (2) The Urinary Pathogen ID/AMR Panel (UPIP) and a Viral Surveillance Panel (VSP) comprising viral enrichment probes described herein. UPIP targets 174 genitourinary pathogens and >3700 AMR markers while VSP targets 66 DNA and RNA viruses.

[0177] Content of concentrated wastewater samples changed over time and with the number of individuals contributing to the wastewater system. Shotgun metatranscriptomics demonstrated high levels of viruses known to be abundant in wastewater, such as hCoV-OC43 and Rotavirus A. Precision metagenomics with UPIP and VSP allowed for more in-depth strain identification as well as discovery of a greater number of less abundant pathogens, such as various noroviruses and enterovirus.

[0178] The results from these studies (not shown) provide a framework for how collecting and concentration methods can impact the variety and types of pathogens detected in samples and highlight the benefits of NGS assays that provide a comprehensive view of wastewater surveillance.

### EQUIVALENTS

[0179] The foregoing written specification is considered to be sufficient to enable one skilled in the art to practice the embodiments. The foregoing description and Examples detail certain embodiments and describes the best mode contemplated by the inventors. It will be appreciated, however, that no matter how detailed the foregoing may appear in text, the embodiment may be practiced in many ways and should be construed in accordance with the appended claims and any equivalents thereof.

[0180] As used herein, the term about refers to a numeric value, including, for example, whole numbers, fractions, and percentages, whether or not explicitly indicated. The term about generally refers to a range of numerical values (e.g., +/−5-10% of the recited range) that one of ordinary skill in the art would consider equivalent to the recited value (e.g., having the same function or result). When terms such as at least and about precede a list of numerical values or ranges, the terms modify all of the values or ranges provided in the list. In some instances, the term about may include numerical values that are rounded to the nearest significant FIGURE.

The application's sequence listing, which the Patent Office published only in electronic form, follows.

SEQUENCE LISTING (213280 sequences)

SEQ ID NO: 1 - DNA, 80 bp, synthetic construct
  misc_feature 1..80: note = Synthetic: >AdVB3-cand-27170-27249
  source 1..80: mol_type = other DNA
ctgcgaccagacggagttttccagatcgccggctgtgggagatcttccttcactcctcgtcaggctgtgctaactttgga

SEQ ID NO: 2 - DNA, 80 bp, synthetic construct
  misc_feature 1..80: note = Synthetic: >AdVB3-cand-27250-27329
  source 1..80: mol_type = other DNA
gagttcgtcttcgcagccccgctcaggcggcattggaactctccagtttgtggaggagtttactccctctgtctacttta

SEQ ID NO: 3 - DNA, 80 bp, synthetic construct
  misc_feature 1..80: note = Synthetic: >AdVB3-cand-27580-27659
  source 1..80: mol_type = other DNA
ggaatagactctcgcctgcatcgcatcttctcccagcggcccgtgctgattgaacgcgaccagggaaatacaaccatctc

SEQ ID NO: 4 - DNA, 80 bp, synthetic construct
  misc_feature 1..80: note = Synthetic: >AdVB3-cand-27800-27879
  source 1..80: mol_type = other DNA
ttccagaagacccagacccttcctcctttgatccaggactctaactctaccttgccagcaccctccactactaaccttcc

SEQ ID NO: 5 - DNA, 80 bp, synthetic construct
  misc_feature 1..80: note = Synthetic: >AdVB3-cand-28040-28119
  source 1..80: mol_type = other DNA
gggcttgtgctgatcctttgctacctatacacaccttgctgtgcatatttagtcatattgtgctgttggtttaagaaatg

SEQ ID NO: 6 - DNA, 80 bp, synthetic construct
  misc_feature 1..80: note = Synthetic: >AdVB3-cand-28130-28209
  source 1..80: mol_type = other DNA
tagtcgtgcttgctttactttcgcttttgggtctgggctctgctaatctcaatcctcttgatcacgatccatgtctagac

SEQ ID NO: 7 - DNA, 80 bp, synthetic construct
  misc_feature 1..80: note = Synthetic: >AdVB3-cand-28590-28669
  source 1..80: mol_type = other DNA
tattcgccctagacaaagcaatgaggaaaaagagaaaatgccttaacctttttcctcataccttttctttacagcatggc

SEQ ID NO: 8 - DNA, 80 bp, synthetic construct
  misc_feature 1..80: note = Synthetic: >AdVB3-cand-28670-28749
  source 1..80: mol_type = other DNA
ttctgttacagctctaattattgccagcattgtcactgtcgttcacgggcaaacaattgtccatattaccttaggacata

SEQ ID NO: 9 - DNA, 80 bp, synthetic construct
  misc_feature 1..80: note = Synthetic: >AdVB3-cand-29460-29539
  source 1..80: mol_type = other DNA
tattatggaaccaactataaaaatagtttagattacaacattattgtagtgccagccaccacgtctgctccccgcaaatc

SEQ ID NO: 10 - DNA, 80 bp, synthetic construct
  misc_feature 1..80: note = Synthetic: >AdVB3-cand-29770-29849
  source 1..80: mol_type = other DNA
taaattttgatgtttaatttttttatagaattattatattgtctcaatcaaataccactacctcctatgcatacacaaac

SEQ ID NO: 11 - DNA, 80 bp, synthetic construct
  misc_feature 1..80: note = Synthetic: >AdVB3-cand-29850-29929
  source 1..80: mol_type = other DNA
attcagcctaaatacactatcaatgtgcagactactttactaatcatgacatggaaaaccacactacctcctatgcttta

SEQ ID NO: 12 - DNA, 80 bp, synthetic construct
  misc_feature 1..80: note = Synthetic: >AdVB3-cand-29930-30009
  source 1..80: mol_type = other DNA
ttttatattctgccgtcaaatacccaatgttcatagaaattctaaaagacgtcccatctattcttctatgattagtcgtc

SEQ ID NO: 13 - DNA, 80 bp, synthetic construct
  misc_feature 1..80: note = Synthetic: >AdVB3-cand-30010-30089
  source 1..80: mol_type = other DNA
cccatatggctctgaatgaaatctaagatctttttttttttttttctcttacagtatggtgaacatcaatcatgatccct

SEQ ID NO: 14 - DNA, 80 bp, synthetic construct
  misc_feature 1..80: note = Synthetic: >AdVB3-cand-30650-30729
  source 1..80: mol_type = other DNA
atatcccactacaacacgtacaacaaccactagcactggtagagtatgaaaatgagccacaaccttcactgccccctgcc

SEQ ID NO: 15 - DNA, 80 bp, synthetic construct
  misc_feature 1..80: note = Synthetic: >AdVB3-cand-30730-30809
  source 1..80: mol_type = other DNA
attagttacttcaacctaaccggcggagatgactgacccaatcgccacatcatccaccgctgccaaggagctgctggaca

SEQ ID NO: 16 - DNA, 80 bp, synthetic construct
  misc_feature 1..80: note = Synthetic: >AdVB3-cand-30810-30889
  source 1..80: mol_type = other DNA
tggacggacgtgcctcagaacagcgactcatccaactacgcattcgtcagcagcaggaacgagcagtaaaagagctaagg

SEQ ID NO: 17 - DNA, 80 bp, synthetic construct
  misc_feature 1..80: note = Synthetic: >AiVC-cand-2060-2139
  source 1..80: mol_type = other DNA
acactgcctcaatagaggtcccctacattggtccaacaccgaactcttcaacctgtgttcgggcaccttggactttctac

SEQ ID NO: 18 - DNA, 80 bp, synthetic construct
  misc_feature 1..80: note = Synthetic: >AiVC-cand-2140-2219
  source 1..80: mol_type = other DNA
ctaatggtcctcactccactttctgttcccactggttctcctacttctctctccgtttccatctatgtcactcctcttaa

SEQ ID NO: 19 - DNA, 80 bp, synthetic construct
  misc_feature 1..80: note = Synthetic: >AiVC-cand-2200-2279
  source 1..80: mol_type = other DNA
atctatgtcactcctcttaacacctccttccatggcctcagacaagtccaaacccaacattggaaaatccggtcccttcc

SEQ ID NO: 20 - DNA, 80 bp, synthetic construct
  misc_feature 1..80: note = Synthetic: >AiVC-cand-2300-2379
  source 1..80: mol_type = other DNA
atgtggttgctggtcaggaaattcccatctacgcgatggagtctttccgtccaccagttgactacctgccagccaaagtc

SEQ ID NO: 21 - DNA, 80 bp, synthetic construct
  misc_feature 1..80: note = Synthetic: >AiVC-cand-2380-2459
  source 1..80: mol_type = other DNA
actgattggcttgagttcgcccaccgacctggtctgttcgagtcctacacttggacaatggctgagacgacgggtgaaaa

SEQ ID NO: 22 - DNA, 80 bp, synthetic construct
  misc_feature 1..80: note = Synthetic: >AiVC-cand-2460-2539
  source 1..80: mol_type = other DNA
agttgctgaggctgtgattgaacctgtccttcttgctgctactggaactcctatatcttttgtcactaacctcttcgccc

SEQ ID NO: 23 - DNA, 80 bp, synthetic construct
  misc_feature 1..80: note = Synthetic: >AiVC-cand-2540-2619
  source 1..80: mol_type = other DNA
aatggcgaggagagctccagctttcccttcttttcactggttctgcccaacactttgggcgtcttgctatttgtttcact

SEQ ID NO: 24 - DNA, 80 bp, synthetic construct
  misc_feature 1..80: note = Synthetic: >AiVC-cand-2620-2699
  source 1..80: mol_type = other DNA
cctgctgctggaacaccccccacttctctccaggatgccctgcgcggtacttacaccgtgtgggacatcaactcttcttc

SEQ ID NO: 25 - DNA, 80 bp, synthetic construct
  misc_feature 1..80: note = Synthetic: >AiVC-cand-2700-2779
  source 1..80: mol_type = other DNA
aactctagactttaccatccctttcatctcacaatcttactggaaagtcaccaacatggctaaccagaactccctcctcg

SEQ ID NO: 26 - DNA, 80 bp, synthetic construct
  misc_feature 1..80: note = Synthetic: >AiVC-cand-2780-2859
  source 1..80: mol_type = other DNA
ccactcttggcactgtttccatctgggtgatgaacccgctcactgggccatcatccgctcccccttctgctgtgatccag

SEQ ID NO: 27 - DNA, 80 bp, synthetic construct
  misc_feature 1..80: note = Synthetic: >AiVC-cand-2860-2939
  source 1..80: mol_type = other DNA
gcttttgtttctgctggtgaatctttcactctgcgtggtatccaagctcctggattccaaatccaggctgctgacgatga

SEQ ID NO: 28 - DNA, 80 bp, synthetic construct
  misc_feature 1..80: note = Synthetic: >AiVC-cand-2950-3029
  source 1..80: mol_type = other DNA
ccaccagtatccaacattgagtctggatctgctaccactgaacctgaaccacgtactaccttctcttacactgacaatcc

SEQ ID NO: 29 - DNA, 80 bp, synthetic construct
  misc_feature 1..80: note = Synthetic: >AiVC-cand-3030-3109
  source 1..80: mol_type = other DNA
cactcctcctgacaccaacctgcagcgtttcttctccatttacagacccatctttgtgaatggtgaggattactctgtag

SEQ ID NO: 30 - DNA, 80 bp, synthetic construct
  misc_feature 1..80: note = Synthetic: >AiVC-cand-3110-3189
  source 1..80: mol_type = other DNA
gcttcaccgctgaggctggctacaccttccctctcaaccccgttgattgggtggccaacgccggtcctggcgacaccctt

SEQ ID NO: 31 - DNA, 80 bp, synthetic construct
  misc_feature 1..80: note = Synthetic: >AiVC-cand-3200-3279
  source 1..80: mol_type = other DNA
tttcctgtttcacttactttactgctgacccgcgtgtggcgctcactttttccaaccctgctccttacgccgcatgcatc

SEQ ID NO: 32 - DNA, 80 bp, synthetic construct
  misc_feature 1..80: note = Synthetic: >AiVC-cand-3280-3359
  source 1..80: mol_type = other DNA
actatctactttgccccacctggttcctctcctcagtctgaagaaactcctggttcatctatgggctgtttctactcaat

SEQ ID NO: 33 - DNA, 80 bp, synthetic construct
  misc_feature 1..80: note = Synthetic: >EU711054.1-cand-5050-5129
  source 1..80: mol_type = other DNA
ggtattttgttctcattagtggtaaatttccccagcaggtcatatcaagacccagcagctgcataagttcttttgcttca

SEQ ID NO: 34 - DNA, 80 bp, synthetic construct
  misc_feature 1..80: note = Synthetic: >EU711054.1-cand-5130-5209
  source 1..80: mol_type = other DNA
tttctggacaaagttttatccattttgccttctttagcctcaaggcgcctcagcaaggccctctgcttttagttcaaaaa

SEQ ID NO: 35 - DNA, 80 bp, synthetic construct
  misc_feature 1..80: note = Synthetic: >EVA71-cand-0-79
  source 1..80: mol_type = other DNA
aacagcctgtgggttgcacccactcacagggcccactgggcgctagcactctggtaccacggtacctttgtgcgcctgtt

SEQ ID NO: 36 - DNA, 80 bp, synthetic construct
  misc_feature 1..80: note = Synthetic: >EVA71-cand-80-159
  source 1..80: mol_type = other DNA
tttataacccccctccccccaacatttgaaacttagaagcagcatgcaaccacgatcaatagcaggcataacgctccagt

SEQ ID NO: 37 - DNA, 80 bp, synthetic construct
  misc_feature 1..80: note = Synthetic: >EVA71-cand-160-239
  source 1..80: mol_type = other DNA
tatgtcttgatcaagcacttctgtttccccggactgagtatcaatagactgctcgcgcggttgaaggagaaaacgttcgt

SEQ ID NO: 38 - DNA, 80 bp, synthetic construct
  misc_feature 1..80: note = Synthetic: >EVA71-cand-310-389
  source 1..80: mol_type = other DNA
ccagtgtagatcaggtcgatgagtcaccgcattccccacgggcgaccgtggcggtggctgcgttggcggcctgcccatgg

SEQ ID NO: 39 - DNA, 80 bp, synthetic construct
  misc_feature 1..80: note = Synthetic: >EVA71-cand-640-719
  source 1..80: mol_type = other DNA
ccatccggtgtgcaacagagcaattatttacctatttattggttttgtaccattaaccttgaaatctgtgaccaccctta

SEQ ID NO: 40 - DNA, 80 bp, synthetic construct
  misc_feature 1..80: note = Synthetic: >EVA71-cand-720-799
  source 1..80: mol_type = other DNA
attatatcttgacccttaacacagctaaacatgggttcgcaagtgtctacacagcgctccggttctcatgaaaactcaaa

SEQ ID NO: 41 - DNA, 80 bp, synthetic construct
  misc_feature 1..80: note = Synthetic: >EVA71-cand-790-869
  source 1..80: mol_type = other DNA
aaaactcaaactcagccactgagggttccaccataaactacaccaccattaattactacaaagactcctatgctgccaca

SEQ ID NO: 42 - DNA, 80 bp, synthetic construct
  misc_feature 1..80: note = Synthetic: >EVA71-cand-870-949
  source 1..80: mol_type = other DNA
gcaggcaaacagagtctcaagcaggatccagacaagtttgcaaatcctgttaaagacatcttcactgaaatggcagcgcc

SEQ ID NO: 43 - DNA, 80 bp, synthetic construct
  misc_feature 1..80: note = Synthetic: >EVA71-cand-950-1029
  source 1..80: mol_type = other DNA
actgaagtccccatccgctgaggcatgtggttacagtgatcgagtggcacaattaactattggcaactccaccatcacca

SEQ ID NO: 44 - DNA, 80 bp, synthetic construct
  misc_feature 1..80: note = Synthetic: >EVA71-cand-1030-1109
  source 1..80: mol_type = other DNA
cgcaagaagcggctaacatcatagtcggttatggtgagtggccttcctactgctcagattctgacgctacagcagtggat

SEQ ID NO: 45 - DNA, 80 bp, synthetic construct
  misc_feature 1..80: note = Synthetic: >EVA71-cand-1110-1189
  source 1..80: mol_type = other DNA
aaaccaacgcgcccagatgtttcagtgaataggttttacacattggacactaaattgtgggagaaatcgtccaagggatg

SEQ ID NO: 46 - DNA, 80 bp, synthetic construct
  misc_feature 1..80: note = Synthetic: >EVA71-cand-1230-1309
  source 1..80: mol_type = other DNA
tttgggcaaaatgcacaattccactacctctaccgatcagggttctgcatccacgtgcagtgtaatgctagtaaattcca

SEQ ID NO: 47 - DNA, 80 bp, synthetic construct
  misc_feature 1..80: note = Synthetic: >EVA71-cand-1270-1349
  source 1..80: mol_type = other DNA
ggttctgcatccacgtgcagtgtaatgctagtaaattccaccaaggagcactcctagtcgctgtcctaccagagtatgtc

SEQ ID NO: 48 - DNA, 80 bp, synthetic construct
  misc_feature 1..80: note = Synthetic: >EVA71-cand-1350-1429
  source 1..80: mol_type = other DNA
attgggacagtggcaggcggcacagggacggaagatagtcaccccccttacaagcagactcaacccggtgccgatggctt

SEQ ID NO: 49 - DNA, 80 bp, synthetic construct
  misc_feature 1..80: note = Synthetic: >EVB100-cand-2920-2999
  source 1..80: mol_type = other DNA
gcagacatccacgaaccctagtgtattctggactgagggtaatgcgcccgctagaatgtccatcccctttataagcgtgg

SEQ ID NO: 50 - DNA, 80 bp, synthetic construct
  misc_feature 1..80: note = Synthetic: >EVB100-cand-2970-3049
  source 1..80: mol_type = other DNA
ctagaatgtccatcccctttataagcgtgggtaatgcatatagcaccttctatgatggatggtcacacttcagtcaatcc

SEQ ID NO: 51 - DNA, 80 bp, synthetic construct
  misc_feature 1..80: note = Synthetic: >EVB100-cand-3090-3169
  source 1..80: mol_type = other DNA
tgtacgttagacacgtcaatgccaagagcccaacgcaaataacaagcacaatcagggtgtacttcaagccaaagcatgtg

SEQ ID NO: 52 - DNA, 80 bp, synthetic construct
  misc_feature 1..80: note = Synthetic: >EVB100-cand-3170-3249
  source 1..80: mol_type = other DNA
aaagcgtgggtgccaagacctccacgcctgtgtccatacctgcgaaaggccagcgtgaacttcgacgttaccaacataac

SEQ ID NO: 53 - DNA, 80 bp, synthetic construct
  misc_feature 1..80: note = Synthetic: >EVB100-cand-3230-3309
  source 1..80: mol_type = other DNA
ttcgacgttaccaacataaccgaagagcgcaccactattaacaaagtccccactgaggaccattcggctctgaaaaacta

SEQ ID NO: 54 - DNA, 80 bp, synthetic construct
  misc_feature 1..80: note = Synthetic: >EVB100-cand-3340-3419
  source 1..80: mol_type = other DNA
gtacgtaggcagctacagaattgtgaacagacatctggctacatatacggactggcagaattgtatatgggaggactaca

SEQ ID NO: 55 - DNA, 80 bp, synthetic construct
  misc_feature 1..80: note = Synthetic: >EVB100-cand-3420-3499
  source 1..80: mol_type = other DNA
acagggatctgcttgtgagcaccacgacagcccaaggatgtgacatcatagctaggtgccagtgcaccacagggatatac

SEQ ID NO: 56 - DNA, 80 bp, synthetic construct
  misc_feature 1..80: note = Synthetic: >EVB100-cand-3500-3579
  source 1..80: mol_type = other DNA
ttttgccaatccaagaataaacactacccagttagcttcgagggtcctggcctagtggaagttcaagagagtgaatatta

SEQ ID NO: 57 - DNA, 80 bp, synthetic construct
  misc_feature 1..80: note = Synthetic: >EVB100-cand-3580-3659
  source 1..80: mol_type = other DNA
cccaaagagataccaatcccatgtactgctcgcggcaggtttttcagaacctggcgactgtggtgggattctaagatgtg

SEQ ID NO: 58 - DNA, 80 bp, synthetic construct
  misc_feature 1..80: note = Synthetic: >EVB100-cand-3670-3749
  source 1..80: mol_type = other DNA
cattggcgtcgtgactatgggtggtgagggcgttgttggtttcgctgacgtgcgcgacctcttgtggttagaggatgatg

SEQ ID NO: 59 - DNA, 80 bp, synthetic construct
  misc_feature 1..80: note = Synthetic: >EVB100-cand-3750-3829
  source 1..80: mol_type = other DNA
caatggaacagggtgttaaagactatgttgagcaattgggaaacgcctttggctcaggtttcaccaaccagatatgtgaa

SEQ ID NO: 60 - DNA, 80 bp, synthetic construct
  misc_feature 1..80: note = Synthetic: >EVB100-cand-3830-3909
  source 1..80: mol_type = other DNA
caggtcaacctcctgaaggagtcgctgattggtcaagattccattttagaaaagtccctcaaagctttgattaaaattat

SEQ ID NO: 61 - DNA, 80 bp, synthetic construct
  misc_feature 1..80: note = Synthetic: >EVB100-cand-3910-3989
  source 1..80: mol_type = other DNA
atcagcactagttattgtggtgagaaaccatgatgacctcattaccgtgacagccactcttgctcttataggatgtacca

SEQ ID NO: 62 - DNA, 80 bp, synthetic construct
  misc_feature 1..80: note = Synthetic: >EVB100-cand-4000-4079
  source 1..80: mol_type = other DNA
gcggtggcttagacagaaggtgtcccaatattatggaatccctatggccgaaagacaaagtaatgggtggttaaagaagt

SEQ ID NO: 63 - DNA, 80 bp, synthetic construct
  misc_feature 1..80: note = Synthetic: >EVB100-cand-4080-4159
  source 1..80: mol_type = other DNA
tcactgaaatgactaatgcctgcaagggcatggaatggattgccgtgaagattcaaaaatttatagagtggctcaaggtc

SEQ ID NO: 64 - DNA, 80 bp, synthetic construct
  misc_feature 1..80: note = Synthetic: >EVB100-cand-4160-4239
  source 1..80: mol_type = other DNA
aaaatcctgccggaagtcaaggaaaaacatgaattcctgaatagattaaagcaactacccttattagagagtcagatcgc

SEQ ID NO: 65 - DNA, 80 bp, synthetic construct
  misc_feature 1..80: note = Synthetic: >EVB75-cand-60-139
  source 1..80: mol_type = other DNA
tacggtacctttgtgcgcctgttttatacgcccttcccccgtaaagtaacttagaagcacatcctacgcggtcgatagat

SEQ ID NO: 66 - DNA, 80 bp, synthetic construct
  misc_feature 1..80: note = Synthetic: >EVB75-cand-140-219
  source 1..80: mol_type = other DNA
agctcagcaatccagctgggctctgaccaagcacttctgttaccccggaccgagtatcaataggctgctcacgcggctga

SEQ ID NO: 67 - DNA, 80 bp, synthetic construct
  misc_feature 1..80: note = Synthetic: >EVB75-cand-390-469
  source 1..80: mol_type = other DNA
acccatgggacgcttcaataccgacatggtgcgaagagtctattgagctaattggtagtcctccggcccctgaatgcggc

SEQ ID NO: 68 - DNA, 80 bp, synthetic construct
  misc_feature 1..80: note = Synthetic: >EVB75-cand-620-699
  source 1..80: mol_type = other DNA
atagctattggattggccatccagtgacaagtagagcgatcatttacctatttgttggctttgtaccattgaattttaaa

SEQ ID NO: 69 - DNA, 80 bp, synthetic construct
  misc_feature 1..80: note = Synthetic: >EVB75-cand-690-769
  source 1..80: mol_type = other DNA
gaattttaaagccttgaaaaccttaaatctcgttatattgctcaacgctacaaaatgggagctcaagtatcaacacaaaa

SEQ ID NO: 70 - DNA, 80 bp, synthetic construct
  misc_feature 1..80: note = Synthetic: >EVB75-cand-780-859
  source 1..80: mol_type = other DNA
cacgagaccgggctgagtgctagtggcaattcaatcatacactacacaaacatcaattattacaaagatgctgcttcaaa

SEQ ID NO: 71 - DNA, 80 bp, synthetic construct
  misc_feature 1..80: note = Synthetic: >EVB75-cand-860-939
  source 1..80: mol_type = other DNA
ttcggccaatcggcaggatttcacccaagaccctggaaaattcacagaacccatgaaagatatcatgatcaaatcaatgc

SEQ ID NO: 72 - DNA, 80 bp, synthetic construct
  misc_feature 1..80: note = Synthetic: >EVB75-cand-940-1019
  source 1..80: mol_type = other DNA
ccgcgttgaactcacctacagtggaagagtgcggttacagtgatagagtgaggtcaataaccctcggaaattccaccata

SEQ ID NO: 73 - DNA, 80 bp, synthetic construct
  misc_feature 1..80: note = Synthetic: >EVB75-cand-1060-1139
  source 1..80: mol_type = other DNA
tatggcctagttatctcaaggataacgaagctgttgctgaagatcaacccacgcaaccagatgtggctacgtgtcggttt

SEQ ID NO: 74 - DNA, 80 bp, synthetic construct
  misc_feature 1..80: note = Synthetic: >EVB75-cand-1100-1179
  source 1..80: mol_type = other DNA
agatcaacccacgcaaccagatgtggctacgtgtcggttttacactctggactctgtgcaatggcaaaagacatcaaatg

SEQ ID NO: 75 - DNA, 80 bp, synthetic construct
  misc_feature 1..80: note = Synthetic: >EVB75-cand-1170-1249
  source 1..80: mol_type = other DNA
acatcaaatgggtggtggtggaagttcccggatgccctaaaggatatgggcttgtttggacaaaacatgctgtaccacta

SEQ ID NO: 76 - DNA, 80 bp, synthetic construct
  misc_feature 1..80: note = Synthetic: >EVB75-cand-1260-1339
  source 1..80: mol_type = other DNA
gccggttacaccattcacgtgcaatgtaatgcatctagatttcaccagggtgcgcttctagttgtgtgtgtccctgaggc

SEQ ID NO: 77 - DNA, 80 bp, synthetic construct
  misc_feature 1..80: note = Synthetic: >EVB75-cand-1350-1429
  source 1..80: mol_type = other DNA
tgcgctaccattgataggacagttaacgccacagctctgtgtgaaggagacaaggcaaaagagtttactgcagggagcgt

SEQ ID NO: 78 - DNA, 80 bp, synthetic construct
  misc_feature 1..80: note = Synthetic: >EVB75-cand-1410-1489
  source 1..80: mol_type = other DNA
gagtttactgcagggagcgtgtcgtcgcaaaatggagtccaaaccgctgtgtacaatgctgccatgggtgttgcagtggg

SEQ ID NO: 79 - DNA, 80 bp, synthetic construct
  misc_feature 1..80: note = Synthetic: >EVB75-cand-1490-1569
  source 1..80: mol_type = other DNA
aaacctaacaatcttcccacaccagtggatcaatctgaggacaaataacagcgccaccatcgtcatgccttacattaaca

SEQ ID NO: 80 - DNA, 80 bp, synthetic construct
  misc_feature 1..80: note = Synthetic: >EVB75-cand-1570-1649
  source 1..80: mol_type = other DNA
gtgtcccaatggataacatgtaccgtcaccacaacttcactctcatggttatccctttcgtgccacttgactattccact

SEQ ID NO: 81 - DNA, 80 bp, synthetic construct
  misc_feature 1..80: note = Synthetic: >EVB82-cand-3380-3459
  source 1..80: mol_type = other DNA
tagacaccttgccacacacaccgattggcaaaactgtgtgtgggaggactacaacagagatctcctggtcagcaccacaa

SEQ ID NO: 82 - DNA, 80 bp, synthetic construct
  misc_feature 1..80: note = Synthetic: >EVB82-cand-3460-3539
  source 1..80: mol_type = other DNA
cagcccatggatgtgatactatagcaagatgccagtgtaccaccggcgtatacttctgtgcttctagaaacaaacactac

SEQ ID NO: 83 - DNA, 80 bp, synthetic construct
  misc_feature 1..80: note = Synthetic: >EVB82-cand-3560-3639
  source 1..80: mol_type = other DNA
aggcttggtggaagtccaagagagtgagtactaccctaagagataccagtcccatgtcctcctagcagcagggttctctg

SEQ ID NO: 84 - DNA, 80 bp, synthetic construct
  misc_feature 1..80: note = Synthetic: >EVB82-cand-3620-3699
  source 1..80: mol_type = other DNA
cctagcagcagggttctctgaaccgggcgactgcggtggtattctaaggtgtgagcacggcgtcattggcctagtcacta

SEQ ID NO: 85 - DNA, 80 bp, synthetic construct
  misc_feature 1..80: note = Synthetic: >EVB82-cand-3700-3779
  source 1..80: mol_type = other DNA
tgggcggtgagggtgtcgtgggtttcgcagatgtccgtgatctactgtggcttgaggatgacgccatggagcaaggtgtt

SEQ ID NO: 86 - DNA, 80 bp, synthetic construct
  misc_feature 1..80: note = Synthetic: >EVB82-cand-3780-3859
  source 1..80: mol_type = other DNA
aaggattacgtggaacagctgggaaatgcctttggttcaggtttcactaaccagatttgtgaacaggtcaacctcctgaa

SEQ ID NO: 87 - DNA, 80 bp, synthetic construct
  misc_feature 1..80: note = Synthetic: >EVB82-cand-3860-3939
  source 1..80: mol_type = other DNA
agaatccctggtgggtcaagattctatactagaaaagtccttgaaggcactggtcaagatcatatcagccctggtgattg

SEQ ID NO: 88 - DNA, 80 bp, synthetic construct
  misc_feature 1..80: note = Synthetic: >EVB82-cand-3940-4019
  source 1..80: mol_type = other DNA
tggtgagaaaccatgacgatctgattacagtaactgctacattagcccttattggctgcacctcttcaccatggaggtgg

SEQ ID NO: 89 - DNA, 80 bp, synthetic construct
  misc_feature 1..80: note = Synthetic: >EVB82-cand-4020-4099
  source 1..80: mol_type = other DNA
ctcaagcagaaagtgtcccaatattacggaatacccatggctgagcgccagaacagtggatggcttaagaagtttaccga

SEQ ID NO: 90 - DNA, 80 bp, synthetic construct
  misc_feature 1..80: note = Synthetic: >EVB82-cand-4180-4259
  source 1..80: mol_type = other DNA
taccagaagtcagggaaaagcatgaatttctgaacagacttaaacaacttcctcttttagagagccaaatcgccacaatc

SEQ ID NO: 91 - DNA, 80 bp, synthetic construct
  misc_feature 1..80: note = Synthetic: >EVB82-cand-4260-4339
  source 1..80: mol_type = other DNA
gagcaaagtgcaccatctcagagtgaccaggaacaactgttttccaacgttcagtactttgcccactattgcaggaagta

SEQ ID NO: 92 - DNA, 80 bp, synthetic construct
  misc_feature 1..80: note = Synthetic: >EVB82-cand-4340-4419
  source 1..80: mol_type = other DNA
cgccccactctatgcagcagaggcaaagagggttttctctcttgaaaagaagataagcaattacatacagttcaagtcca

SEQ ID NO: 93 - DNA, 80 bp, synthetic construct
  misc_feature 1..80: note = Synthetic: >EVB82-cand-4420-4499
  source 1..80: mol_type = other DNA
aatgccgtattgaacctgtatgcttgcttctgcacggaagtcctggcgccggcaaatcagttgcaacaaacctaattggt

SEQ ID NO: 94 - DNA, 80 bp, synthetic construct
  misc_feature 1..80: note = Synthetic: >EVB82-cand-4500-4579
  source 1..80: mol_type = other DNA
aggtcactggctgagaagcttaacagctcagtgtactcactaccaccagacccagatcacttcgacggttacaaacaaca

SEQ ID NO: 95 - DNA, 80 bp, synthetic construct
  misc_feature 1..80: note = Synthetic: >EVB82-cand-4580-4659
  source 1..80: mol_type = other DNA
ggccgtagtgatcatggatgatctgtgccagaatcctgacggtaaggacgtctccttattctgccaaatggtttccagtg

SEQ ID NO: 96 - DNA, 80 bp, synthetic construct
  misc_feature 1..80: note = Synthetic: >EVB82-cand-4660-4739
  source 1..80: mol_type = other DNA
tggattttgtaccacccatggctgcactggaagagaaaggcatcctattcacctccccgttcgtcttggcatcaaccaat

SEQ ID NO: 97 - DNA, 80 bp, synthetic construct
  misc_feature 1..80: note = Synthetic: >EVB86-cand-5500-5579
  source 1..80: mol_type = other DNA
taatgaatgaccaggaagtgagcgtggttgatgccaaagagttagtggacaaagatggtaccaacctggaactgacgctc

SEQ ID NO: 98 - DNA, 80 bp, synthetic construct
  misc_feature 1..80: note = Synthetic: >EVB86-cand-5580-5659
  source 1..80: mol_type = other DNA
ttgaaactaaacaggaatgaaaagttcagagacatccgcggtttcttggcacgcgaggaagtggaagtcaatgaagctgt

SEQ ID NO: 99 - DNA, 80 bp, synthetic construct
  misc_feature 1..80: note = Synthetic: >EVB86-cand-5660-5739
  source 1..80: mol_type = other DNA
gcttgccattaacaccagcaaattcccaaatatgtacatcccagtcggacaggtgacagactatggtttccttaacttgg

SEQ ID NO: 100 - DNA, 80 bp, synthetic construct
  misc_feature 1..80: note = Synthetic: >EVB86-cand-5740-5819
  source 1..80: mol_type = other DNA
gtggcacccccaccaagcgcatgctaatgtacaactttccaacacgcgcgggccaatgtggaggtgttctgatgtcaaca

SEQ ID NO: 101 - DNA, 80 bp, synthetic construct
  misc_feature 1..80: note = Synthetic: >EVB86-cand-5820-5899
  source 1..80: mol_type = other DNA
ggcaaagtgcttggaattcacgttggcggtaacggacatcaaggattctcagcagctctattgcgtcattatttcaatga

SEQ ID NO: 102 - DNA, 80 bp, synthetic construct
  misc_feature 1..80: note = Synthetic: >EVB86-cand-6020-6099
  source 1..80: mol_type = other DNA
ggagccagcagtgttgaggaatggagaccccaggctgaaggtcaattttgaggaagccatcttttcaaagtacataggca

SEQ ID NO: 103 - DNA, 80 bp, synthetic construct
  misc_feature 1..80: note = Synthetic: >EVB86-cand-6140-6219
  source 1..80: mol_type = other DNA
cgaccactatgcaggacaactggcaactctggacatttgcacagaacccatgaaattggaggacgcagtctatggtactg

SEQ ID NO: 104 - DNA, 80 bp, synthetic construct
  misc_feature 1..80: note = Synthetic: >EVB86-cand-6220-6299
  source 1..80: mol_type = other DNA
agggcttagaggctctagatctgaccacaagtgcagggtacccatatgttgcccttggtattaaaaagagagacatccta

SEQ ID NO: 105 - DNA, 80 bp, synthetic construct
  misc_feature 1..80: note = Synthetic: >EVB86-cand-6300-6379
  source 1..80: mol_type = other DNA
tccaagaagactaaggatctaacgaagcttaaagagtgcatggacaagtatggtctgaaccttcccatggtcacttatgt

SEQ ID NO: 106 - DNA, 80 bp, synthetic construct
  misc_feature 1..80: note = Synthetic: >EVB86-cand-6380-6459
  source 1..80: mol_type = other DNA
gaaagatgaactgagatcagcagagaaggtagccaaaggcaagtccaggctaattgaagcatcaagtctaaatgactcag

SEQ ID NO: 107 - DNA, 80 bp, synthetic construct
  misc_feature 1..80: note = Synthetic: >EVB86-cand-6460-6539
  source 1..80: mol_type = other DNA
tggccatgagacagacctttggaaacttgtacaaaactttccacctgaatccaggcatagtgacaggcagtgcagttggg

SEQ ID NO: 108 - DNA, 80 bp, synthetic construct
  misc_feature 1..80: note = Synthetic: >EVB86-cand-6540-6619
  source 1..80: mol_type = other DNA
tgtgaccctgatcttttctggagtaaaatcccagtcatgctcgacggccatctcattgctttcgactacagtggttatga

SEQ ID NO: 109 - DNA, 80 bp, synthetic construct
  misc_feature 1..80: note = Synthetic: >EVB86-cand-6620-6699
  source 1..80: mol_type = other DNA
tgccagtttaagtccagtgtggttcgcatgcctaaagttggtgctagagaagttgggatactcgcacaaagaaaccaact

SEQ ID NO: 110 - DNA, 80 bp, synthetic construct
  misc_feature 1..80: note = Synthetic: >EVB86-cand-6680-6759
  source 1..80: mol_type = other DNA
ctcgcacaaagaaaccaactacatagattacctatgcaactcccaccatctatatagagacaaacactactttgtaagag

SEQ ID NO: 111 - DNA, 80 bp, synthetic construct
  misc_feature 1..80: note = Synthetic: >EVB86-cand-6770-6849
  source 1..80: mol_type = other DNA
atctggatgctcgggaaccagtattttcaactcgatgatcaacaacatcatcatcagaacactaatgttgaaggtgtata

SEQ ID NO: 112 - DNA, 80 bp, synthetic construct
  misc_feature 1..80: note = Synthetic: >EVB86-cand-7090-7169
  source 1..80: mol_type = other DNA
tgaaggatatccatgaatcgatcaggtggaccaaagaccccaaaaacacccaagatcatgtgcgatccttgtgtttattg

SEQ ID NO: 113 - DNA, 80 bp, synthetic construct
  misc_feature 1..80: note = Synthetic: >FJ608550.1-cand-3040-3119
  source 1..80: mol_type = other DNA
cctaacagaatgcccaagcttcattacatctattaaagcttgtgacctcgcaatgtgctatggatcaactgtagcaacac

SEQ ID NO: 114 - DNA, 80 bp, synthetic construct
  misc_feature 1..80: note = Synthetic: >FJ608550.1-cand-3160-3239
  source 1..80: mol_type = other DNA
gggacattcgggttctgcatttaaatgctgtcatgactctgactgctcatcagaagggttggtagcatctgctccacacc

SEQ ID NO: 115 - DNA, 80 bp, synthetic construct
  misc_feature 1..80: note = Synthetic: >FJ608550.1-cand-3210-3289
  source 1..80: mol_type = other DNA
cagaagggttggtagcatctgctccacacctagaaagggtgactgggttcaatcaaatagattctgataaagtctatgat

SEQ ID NO: 116 - DNA, 80 bp, synthetic construct
  misc_feature 1..80: note = Synthetic: >FJ608550.1-cand-3300-3379
  source 1..80: mol_type = other DNA
ctccatgcacgtttaagtgttggttcactaagtctggtgaatggctcttagggattctcaatggcaattggatcgtagtt

SEQ ID NO: 117 - DNA, 80 bp, synthetic construct
  misc_feature 1..80: note = Synthetic: >FJ608550.1-cand-3350-3429
  source 1..80: mol_type = other DNA
gggattctcaatggcaattggatcgtagttgtagttctagttattattctctttatctctatcatattatttagcttctt

SEQ ID NO: 118 - DNA, 80 bp, synthetic construct
  misc_feature 1..80: note = Synthetic: >FJ608550.1-cand-3430-3509
  source 1..80: mol_type = other DNA
atgccctagacgtagccataagaaaactgtctgagtatataagtgaataaatatatgtccatatcaatatatcatgttta

SEQ ID NO: 119 - DNA, 80 bp, synthetic construct
  misc_feature 1..80: note = Synthetic: >FJ608550.1-cand-3520-3599
  source 1..80: mol_type = other DNA
atataaccgtgtattaactttaacataagatgcttgtataaactaatgtctgacttactaacatcacctatattacagat

SEQ ID NO: 120 - DNA, 80 bp, synthetic construct
  misc_feature 1..80: note = Synthetic: >FJ608550.1-cand-3600-3679
  source 1..80: mol_type = other DNA
catattttagtcaaaaaaaacaaaaccttcactctcataaaattctatatccttttaccgaggcttttgttcctgcggag

SEQ ID NO: 121 - DNA, 80 bp, synthetic construct
  misc_feature 1..80: note = Synthetic: >FJ809772.1-cand-0-79
  source 1..80: mol_type = other DNA
agtagactccgggatagaaaagatcagaataatggaaaagtatagagaaattcatcagagggtaaaggaccaagctcctg

SEQ ID NO: 122 - DNA, 80 bp, synthetic construct
  misc_feature 1..80: note = Synthetic: >FJ809772.1-cand-80-159
  source 1..80: mol_type = other DNA
gcacggtctcagcattagaatgtattgatctcctggatcgtctctacgctgttcggcatgatctcgtcgatcagatgatt

SEQ ID NO: 123 - DNA, 80 bp, synthetic construct
  misc_feature 1..80: note = Synthetic: >FJ809772.1-cand-160-239
  source 1..80: mol_type = other DNA
aaacatgattggtctgacaataaagatgttgaaaggccaattggagaagtcctactcatggcagggatatcaaatgatat

SEQ ID NO: 124 - DNA, 80 bp, synthetic construct
  misc_feature 1..80: note = Synthetic: >FJ809772.1-cand-240-319
  source 1..80: mol_type = other DNA
aatccacgggatggaaaaaaagatcatccccaatagtccctcaggacagatattgaagagtttttttaaaatgacacctg

SEQ ID NO: 125 - DNA, 80 bp, synthetic construct
  misc_feature 1..80: note = Synthetic: >FJ809772.1-cand-320-399
  source 1..80: mol_type = other DNA
ataattttaaaattaccgggaatttgattgagtttgttgaagtcacagtgactgccgatgtggcccgaggcatcagagaa

SEQ ID NO: 126 - DNA, 80 bp, synthetic construct
  misc_feature 1..80: note = Synthetic: >FJ809772.1-cand-400-479
  source 1..80: mol_type = other DNA
aaatgtttaaaatacgaagatggtctaaagttcattgaagcattactagagattgagacaaaaagaggaaacttgccaca

SEQ ID NO: 127 - DNA, 80 bp, synthetic construct
  misc_feature 1..80: note = Synthetic: >FJ809772.1-cand-480-559
  source 1..80: mol_type = other DNA
aatttataagataacattttcagttgttgctgtgaaaactgatgggtcaaatatatccactcaatggcctagccgaagga

SEQ ID NO: 128 - DNA, 80 bp, synthetic construct
  misc_feature 1..80: note = Synthetic: >FJ809772.1-cand-560-639
  source 1..80: mol_type = other DNA
atgatggagttgttcaacacatgaggcttgttcaggcagacattaattatgtaagggaacaccttataaaacatgatgag

SEQ ID NO: 129 - DNA, 80 bp, synthetic construct
  misc_feature 1..80: note = Synthetic: >HCV.A14-cand-1210-1289
  source 1..80: mol_type = other DNA
cagatgtgttagcaatgacaggtgtcttcggacaaaacgcacaataccactacttgtatagatcaggcttttgcatccat

SEQ ID NO: 130 - DNA, 80 bp, synthetic construct
  misc_feature 1..80: note = Synthetic: >HCV.A14-cand-1290-1369
  source 1..80: mol_type = other DNA
gtacaatgcaatgctagcaaatttcaccaaggcgcacttctcgtagccatagtgccggagtatgtgactggcacgatagc

SEQ ID NO: 131 - DNA, 80 bp, synthetic construct
  misc_feature 1..80: note = Synthetic: >HCV.A14-cand-1370-1449
  source 1..80: mol_type = other DNA
tggcaacaccggtaatgagcacacacaccccccatacgccaccacacagccagggttagacggattccctctatccaacc

SEQ ID NO: 132 - DNA, 80 bp, synthetic construct
  misc_feature 1..80: note = Synthetic: >HCV.A14-cand-1450-1529
  source 1..80: mol_type = other DNA
catatgtgttggacgctggtatacccatcagccaattactgatatgcccacaccagtggatcaaccttaggaccaacaat

SEQ ID NO: 133 - DNA, 80 bp, synthetic construct
  misc_feature 1..80: note = Synthetic: >HCV.A14-cand-1530-1609
  source 1..80: mol_type = other DNA
tgtgccaccctcatagtaccttacatcaacacagtacctttcgattcggctctaaaccattgtaattttggcttagtggt

SEQ ID NO: 134 - DNA, 80 bp, synthetic construct
  misc_feature 1..80: note = Synthetic: >HCV.A14-cand-1610-1689
  source 1..80: mol_type = other DNA
gatcccaatatcaccattgtcctatgcatcttcagcaaccaccacaatcccaataacaatcacagtggcaccaatgtgct

SEQ ID NO: 135 - DNA, 80 bp, synthetic construct
  misc_feature 1..80: note = Synthetic: >HCV.A14-cand-1690-1769
  source 1..80: mol_type = other DNA
cagaatttgcaggcctcaggcaggccgtgcaacaaggcatcccagcagaacttagaccaggcaccaaccaattcctcacc

SEQ ID NO: 136 - DNA, 80 bp, synthetic construct
  misc_feature 1..80: note = Synthetic: >HCV.A14-cand-1750-1829
  source 1..80: mol_type = other DNA
gcaccaaccaattcctcaccactgaagatggtacatcagctccgatactacccgggtttcacccaactcaggttatccat

SEQ ID NO: 137 - DNA, 80 bp, synthetic construct
  misc_feature 1..80: note = Synthetic: >HCV.A14-cand-1850-1929
  source 1..80: mol_type = other DNA
ccttctcgaattatgccaagtagagacaatgctagaagttaacaacttaaagtcaaacgagagtgacccaatgcaacggc

SEQ ID NO: 138 - DNA, 80 bp, synthetic construct
  misc_feature 1..80: note = Synthetic: >HCV.A14-cand-1930-2009
  source 1..80: mol_type = other DNA
tcctgatcccagttcagtctcagagtgagaaaggaaagctgtgtgctgtcttccgagcagacccaggactcgatggacca

SEQ ID NO: 139 - DNA, 80 bp, synthetic construct
  misc_feature 1..80: note = Synthetic: >HCV.A14-cand-2010-2089
  source 1..80: mol_type = other DNA
tggcaatcaaccttattagggcaactatgcaggtactacacacagtggtccggatcactgaaactcaccttcatgttcac

SEQ ID NO: 140 - DNA, 80 bp, synthetic construct
  misc_feature 1..80: note = Synthetic: >HCV.A14-cand-2060-2139
  source 1..80: mol_type = other DNA
cggatcactgaaactcaccttcatgttcacaggttcattcatggctacaggaaaaatgctaatagcctacactccaccag

SEQ ID NO: 141 - DNA, 80 bp, synthetic construct
  misc_feature 1..80: note = Synthetic: >HCV.A14-cand-2170-2249
  source 1..80: mol_type = other DNA
caatgttaggcactcacatcatatgggactttgggttacaatcttcagtttcattagtcataccctggatcagcaacaca

SEQ ID NO: 142 - DNA, 80 bp, synthetic construct
  misc_feature 1..80: note = Synthetic: >HCV.A14-cand-2250-2329
  source 1..80: mol_type = other DNA
cactatagagcgcaatccaagaaccagtactttgattactactcctctggaattatatccatatggtaccagacaaactt

SEQ ID NO: 143 - DNA, 80 bp, synthetic construct
  misc_feature 1..80: note = Synthetic: >HCV.A14-cand-2330-2409
  source 1..80: mol_type = other DNA
cgttgtaccagctgaaacacccaccacagccaacataatagtcctgggagcagctcaacccaacttcactatgcgactat

SEQ ID NO: 144 - DNA, 80 bp, synthetic construct
  misc_feature 1..80: note = Synthetic: >HCV.A14-cand-2420-2499
  source 1..80: mol_type = other DNA
tgactccttaacccaaactgctgagtaccaaggtgacaaggtggcagacatgattgagactgctgtagagaaaactgtat

SEQ ID NO: 145 - DNA, 80 bp, synthetic construct
  misc_feature 1..80: note = Synthetic: >HCV.A20-cand-4970-5049
  source 1..80: mol_type = other DNA
aagatgttgccccttagtgtgtggtaaagcaatccagttgatggacaaatcttccagagtcagatacagcattgaccaaa

SEQ ID NO: 146 - DNA, 80 bp, synthetic construct
  misc_feature 1..80: note = Synthetic: >HCV.A20-cand-5130-5209
  source 1..80: mol_type = other DNA
caatacaaagatctgaaaatagacatcaaaaccacccctccaccagagtgcatcaatgacctgctacaagcagtggactc

SEQ ID NO: 147 - DNA, 80 bp, synthetic construct
  misc_feature 1..80: note = Synthetic: >HCV.A20-cand-5210-5289
  source 1..80: mol_type = other DNA
ccaagaagttagagactactgtgagaagaaaggatggattgtgaacatcacaagccaggttcaaatggaaagaaacatca

SEQ ID NO: 148 - DNA, 80 bp, synthetic construct
  misc_feature 1..80: note = Synthetic: >HCV.A20-cand-5290-5369
  source 1..80: mol_type = other DNA
acagagcaatgaccatcctacaagctgttaccacctttgctgcagtggctggagtagtgtatgtaatgtacaaactcttt

SEQ ID NO: 149 - DNA, 80 bp, synthetic construct
  misc_feature 1..80: note = Synthetic: >HCV.A20-cand-5370-5449
  source 1..80: mol_type = other DNA
gcaggacaccaaggtgcatacactggactaccaaacaagaaacccaatgtccccaccattagaacagccaaagtgcaagg

SEQ ID NO: 150 - DNA, 80 bp, synthetic construct
  misc_feature 1..80: note = Synthetic: >HCV.A20-cand-5450-5529
  source 1..80: mol_type = other DNA
cccaggatttgattacgcagtggctatggcaaagagaaacattgttacagccaccaccagcaaaggagagttcacgatgc

SEQ ID NO: 151 - DNA, 80 bp, synthetic construct
  misc_feature 1..80: note = Synthetic: >HCV.A20-cand-5540-5619
  source 1..80: mol_type = other DNA
tgacaacgtggccatactaccaactcacgcctcaccaggtgaaaccatagtcattgatggtaaggaagttgaagtcctag

SEQ ID NO: 152 - DNA, 80 bp, synthetic construct
  misc_feature 1..80: note = Synthetic: >HCV.A20-cand-5610-5689
  source 1..80: mol_type = other DNA
gaagtcctagacgccaaggcacttgaagaccaagctggcaccaatctggaaatcaccattgtcactctcaaaagaaatga

SEQ ID NO: 153 - DNA, 80 bp, synthetic construct
  misc_feature 1..80: note = Synthetic: >HCV.A20-cand-5680-5759
  source 1..80: mol_type = other DNA
aaagaaatgaaaagttcagagacatcagacctcacattcccactcaaatcaccgagacaaatgatggagtgttgatcgtg

SEQ ID NO: 154 - DNA, 80 bp, synthetic construct
  misc_feature 1..80: note = Synthetic: >HCV.A20-cand-5840-5919
  source 1..80: mol_type = other DNA
aactgctcgtactctaatgtacaactttccaaccagagcaggacagtgtggtggaatcatcacatgcactggcaaggtca

SEQ ID NO: 155 - DNA, 80 bp, synthetic construct
  misc_feature 1..80: note = Synthetic: >HCV.A20-cand-6000-6079
  source 1..80: mol_type = other DNA
gaaatccagtggatgagaccatcaaaagaagttggatacccaataatcaatgcaccaagcaaaaccaaattggaacccag

SEQ ID NO: 156 - DNA, 80 bp, synthetic construct
  misc_feature 1..80: note = Synthetic: >HCV.A20-cand-6080-6159
  source 1..80: mol_type = other DNA
tgccttccactatgtgtttgagggagtgaaagaaccagcagtgctcaccaagaatgaccctagactgaaaacagattttg

SEQ ID NO: 157 - DNA, 80 bp, synthetic construct
  misc_feature 1..80: note = Synthetic: >HCV.A20-cand-6160-6239
  source 1..80: mol_type = other DNA
aagaagccatcttctctaagtatgtaggcaacaagatcactgaggtggatgagtacatgaaagaagcagtagaccactat

SEQ ID NO: 158 - DNA, 80 bp, synthetic construct
  misc_feature 1..80: note = Synthetic: >HCV.A20-cand-6240-6319
  source 1..80: mol_type = other DNA
gcaggacaactcatgtcactagacatcaacacagaacaaatgtgtctggaggatgccatgtatggcactgatggcctaga

SEQ ID NO: 159 - DNA, 80 bp, synthetic construct
  misc_feature 1..80: note = Synthetic: >HCV.A20-cand-6320-6399
  source 1..80: mol_type = other DNA
agctctagatctcaccaccagtgcaggatacccctatgtggcactgggaaagaaaaagagagacatcctaaacaaacaaa

SEQ ID NO: 160 - DNA, 80 bp, synthetic construct
  misc_feature 1..80: note = Synthetic: >HCV.A20-cand-6380-6459
  source 1..80: mol_type = other DNA
agacatcctaaacaaacaaaccagagacaccaaagaaatgcagagactgttggacacctatggaatcaatctaccattag

SEQ ID NO: 161 - DNA, 80 bp, synthetic construct
  misc_feature 1..80: note = Synthetic: >HCV.A9-cand-3380-3459
  source 1..80: mol_type = other DNA
actacagagtggtgaataggcatcttgccactcacagtgattggcaaaactgtgtgtgggaagattacaacagggacatt

SEQ ID NO: 162 - DNA, 80 bp, synthetic construct
  misc_feature 1..80: note = Synthetic: >HCV.A9-cand-3460-3539
  source 1..80: mol_type = other DNA
ctcgtgagcactacaacggcccatggttgcgacaccatcgccagatgtcaatgcacgacaggtgtgtacttctgcgcatc

SEQ ID NO: 163 - DNA, 80 bp, synthetic construct
  misc_feature 1..80: note = Synthetic: >HCV.A9-cand-3540-3619
  source 1..80: mol_type = other DNA
aaggaacaaacactacccagttagcttcgagggaccaggtttagttgaagtacaggagagtgaatactaccccaaaagat

SEQ ID NO: 164 - DNA, 80 bp, synthetic construct
  misc_feature 1..80: note = Synthetic: >HCV.A9-cand-3620-3699
  source 1..80: mol_type = other DNA
accagtcccatgtgctgcttgcagcagggttctcagagccgggagactgtggaggaattcttaggtgtgaacatggtgtg

SEQ ID NO: 165 - DNA, 80 bp, synthetic construct
  misc_feature 1..80: note = Synthetic: >HCV.A9-cand-3720-3799
  source 1..80: mol_type = other DNA
gggcgagggagttgttggatttgctgacgtccgcgacttgctgtggctggaggatgatgcaatggaacagggtgtcaagg

SEQ ID NO: 166 - DNA, 80 bp, synthetic construct
  misc_feature 1..80: note = Synthetic: >HCV.A9-cand-3780-3859
  source 1..80: mol_type = other DNA
aatggaacagggtgtcaaggattatgtggaacaacttgggaacgcttttggctcgggattcactaatcaaatctgtgaac

SEQ ID NO: 167 - DNA, 80 bp, synthetic construct
  misc_feature 1..80: note = Synthetic: >HCV.A9-cand-3860-3939
  source 1..80: mol_type = other DNA
aggtcaatctcctcaaggagtcactggtgggccaggattccatcctggagaagtctcttaaagcgttggtaaaaatcatc

SEQ ID NO: 168 - DNA, 80 bp, synthetic construct
  misc_feature 1..80: note = Synthetic: >HCV.A9-cand-4020-4099
  source 1..80: mol_type = other DNA
atcgccatggcgatggctcaagcagaaggtgtcacagtactatggcatacccatggctgagcgccaaaacaatgggtggc

SEQ ID NO: 169 - DNA, 80 bp, synthetic construct
  misc_feature 1..80: note = Synthetic: >HCV.A9-cand-4100-4179
  source 1..80: mol_type = other DNA
tcaagaagttcactgagatgaccaacgcctgcaaagggatggagtggattgccattaaaattcagaagtttatagagtgg

SEQ ID NO: 170 - DNA, 80 bp, synthetic construct
  misc_feature 1..80: note = Synthetic: >HCV.A9-cand-4180-4259
  source 1..80: mol_type = other DNA
ctcaaagttaagatcctgccagaggtcagggaaaaacacgagtttctcaacaggcttaaacaactccccctactggaaag

SEQ ID NO: 171 - DNA, 80 bp, synthetic construct
  misc_feature 1..80: note = Synthetic: >HCV.A9-cand-4270-4349
  source 1..80: mol_type = other DNA
accattgagcagagtgcaccatcccaaagtgaccaagagcaactcttctcaaatgtccagtactttgcccattactgcag

SEQ ID NO: 172 - DNA, 80 bp, synthetic construct
  misc_feature 1..80: note = Synthetic: >HCV.A9-cand-4510-4589
  source 1..80: mol_type = other DNA
atcgggcgatcactagctgaaaaactcaacagttcagtgtactccctaccaccagacccagaccacttcgacggttataa

SEQ ID NO: 173 - DNA, 80 bp, synthetic construct
  misc_feature 1..80: note = Synthetic: >HCV.A9-cand-4590-4669
  source 1..80: mol_type = other DNA
acaacaggccgtcgtgatcatggatgacctgtgccaaaacccagatggaaaggatgtgtccctattctgccaaatggtgt

SEQ ID NO: 174 - DNA, 80 bp, synthetic construct
  misc_feature 1..80: note = Synthetic: >HCV.A9-cand-4670-4749
  source 1..80: mol_type = other DNA
caagtgtggattttgtcccaccaatggctgcactagaagagaaaggcatcctgttcacatcaccttttgtcctggcctcc

SEQ ID NO: 175 - DNA, 80 bp, synthetic construct
  misc_feature 1..80: note = Synthetic: >HCV.A9-cand-4750-4829
  source 1..80: mol_type = other DNA
acaaatgcagggtccatcaatgcaccaacagtgtcagacagcagagccctggctagaaggttccactttgatatgaacat

SEQ ID NO: 176 - DNA, 80 bp, synthetic construct
  misc_feature 1..80: note = Synthetic: >HCV.A9-cand-4910-4989
  source 1..80: mol_type = other DNA
cagtcaacttcaagagatgttgcccgcttgtgtgtgggaaagccatccagttcattgacagaagaacacaggtgaggtac

SEQ ID NO: 177 - DNA, 80 bp, synthetic construct
  misc_feature 1..80: note = Synthetic: >HQ537675.1-cand-200-279
  source 1..80: mol_type = other DNA
gcaaaggtcagttaacagaaacagaggtattagattttgcatttacagatttaacaatagtatatagggacgacacacca

SEQ ID NO: 178 - DNA, 80 bp, synthetic construct
  misc_feature 1..80: note = Synthetic: >HQ537675.1-cand-280-359
  source 1..80: mol_type = other DNA
cacggagtgtgtacaaaatgtttaagattttattcaaaagtaagtgaatttagatggtatagatatagtgtgtatggaac

SEQ ID NO: 179 - DNA, 80 bp, synthetic construct
  misc_feature 1..80: note = Synthetic: >HQ537675.1-cand-360-439
  source 1..80: mol_type = other DNA
aacattagaaaaattgacaaacaaaggtatatgtgatttgttaattaggtgtataacgtgtcaaagaccgttgtgtccag

SEQ ID NO: 180 - DNA, 80 bp, synthetic construct
  misc_feature 1..80: note = Synthetic: >HQ537675.1-cand-440-519
  source 1..80: mol_type = other DNA
aagaaaaacaaagacatttggataaaaagaaacgattccacaacataggaggaaggtggacaggacgttgcatagcatgt

SEQ ID NO: 181 - DNA, 80 bp, synthetic construct
  misc_feature 1..80: note = Synthetic: >HQ537675.1-cand-520-599
  source 1..80: mol_type = other DNA
tggagaagacctcgtactgaaacccaagtgtaaacatgcgtggagaaacacctacgttgcaagactatgtgttagatttg

SEQ ID NO: 182 - DNA, 80 bp, synthetic construct
  misc_feature 1..80: note = Synthetic: >HQ537675.1-cand-610-689
  source 1..80: mol_type = other DNA
caactgacctctactgttatgagcaattacccgacagctcagatgaggaggatgtcatagacagtccagctggacaagca

SEQ ID NO: 183 - DNA, 80 bp, synthetic construct
  misc_feature 1..80: note = Synthetic: >HQ537675.1-cand-690-769
  source 1..80: mol_type = other DNA
gaaccggacacatccaattacaatatcgttaccttttgttgtcagtgtgagtctacacttcgtttgtgtgtacagagcac

SEQ ID NO: 184 - DNA, 80 bp, synthetic construct
  misc_feature 1..80: note = Synthetic: >HQ537675.1-cand-770-849
  source 1..80: mol_type = other DNA
acaagtagatattcgcatattgcaagagctgttaatgggctcatttggaatcgtgtgccccaactgttctactagactgt

SEQ ID NO: 185 - DNA, 80 bp, synthetic construct
  misc_feature 1..80: note = Synthetic: >HQ537675.1-cand-800-879
  source 1..80: mol_type = other DNA
gttaatgggctcatttggaatcgtgtgccccaactgttctactagactgtaactacaatggctgatccagcaggtacaga

SEQ ID NO: 186 - DNA, 80 bp, synthetic construct
  misc_feature 1..80: note = Synthetic: >HQ537675.1-cand-990-1069
  source 1..80: mol_type = other DNA
aggatatggttgactttattgacaattgtaatgtatacaacaatcaggcagaagcagagacagcacaggcattgtttcat

SEQ ID NO: 187 - DNA, 80 bp, synthetic construct
  misc_feature 1..80: note = Synthetic: >HQ537675.1-cand-1010-1089
  source 1..80: mol_type = other DNA
gacaattgtaatgtatacaacaatcaggcagaagcagagacagcacaggcattgtttcatgcacaggaagcggaggaaca

SEQ ID NO: 188 - DNA, 80 bp, synthetic construct
  misc_feature 1..80: note = Synthetic: >HQ537675.1-cand-1090-1169
  source 1..80: mol_type = other DNA
tgcagaggctgtgcaggttctaaaacgaaagtatgtaggtagtcctttaagtgatattagtagttgtgtggattataata

SEQ ID NO: 189 - DNA, 80 bp, synthetic construct
  misc_feature 1..80: note = Synthetic: >HQ537675.1-cand-1170-1249
  source 1..80: mol_type = other DNA
ttagtccacggttaaaagctatatgcatagaaaataacagtaaaacagcaaaacgaagactctttgaacttccagacagc

SEQ ID NO: 190 - DNA, 80 bp, synthetic construct
  misc_feature 1..80: note = Synthetic: >HQ537675.1-cand-1250-1329
  source 1..80: mol_type = other DNA
gggtatggcaatactgaagtggaaacgcagcagatggtacaggtagaggagcaacaaacaacattaagttgtaatggtag

SEQ ID NO: 191 - DNA, 80 bp, synthetic construct
  misc_feature 1..80: note = Synthetic: >HQ537675.1-cand-1330-1409
  source 1..80: mol_type = other DNA
tgacgggacacatagtgaacgagagaatgaaactccaacacgtaatatattgcaagtgttaaaaactagcaatggtaaag

SEQ ID NO: 192 - DNA, 80 bp, synthetic construct
  misc_feature 1..80: note = Synthetic: >HQ537675.1-cand-1410-1489
  source 1..80: mol_type = other DNA
ctgctatgttaggtaaatttaaagaattatatggtgtaagttttatggaactaattaggccatttcaaagcaataaaagc

SEQ ID NO: 193 - DNA, 80 bp, synthetic construct
  misc_feature 1..80: note = Synthetic: >HQ537675.1-cand-4140-4219
  source 1..80: mol_type = other DNA
ataaacttttttactttttttttattattaccatgcggtccaaacgctctacaaaacgcactaaacgtgcgtctgctaca

SEQ ID NO: 194 - DNA, 80 bp, synthetic construct
  misc_feature 1..80: note = Synthetic: >HQ537675.1-cand-4200-4279
  source 1..80: mol_type = other DNA
ctaaacgtgcgtctgctacacaattatatcaaacatgtaaagcagcaggtacttgtccatcagacgttatacctaaaata

SEQ ID NO: 195 - DNA, 80 bp, synthetic construct
  misc_feature 1..80: note = Synthetic: >HQ537675.1-cand-4280-4359
  source 1..80: mol_type = other DNA
gaacatactaccattgcagaccaaatattaaggtatggtagtatgggtgttttttttggtgggttgggtattgggtccgg

SEQ ID NO: 196 - DNA, 80 bp, synthetic construct
  misc_feature 1..80: note = Synthetic: >HQ537675.1-cand-4380-4459
  source 1..80: mol_type = other DNA
ctggatatgtccctcttagtacacgtccttctacagtatctgaggcaagtatacctattagaccaccagttagcattgac

SEQ ID NO: 197 - DNA, 80 bp, synthetic construct
  misc_feature 1..80: note = Synthetic: >HQ537675.1-cand-4440-4519
  source 1..80: mol_type = other DNA
gaccaccagttagcattgaccctgtaggtcccttggacccctctatagtaagtcttgttgaagaatctggaattgttgat

SEQ ID NO: 198 - DNA, 80 bp, synthetic construct
  misc_feature 1..80: note = Synthetic: >HQ537675.1-cand-4500-4579
  source 1..80: mol_type = other DNA
aagaatctggaattgttgatgttggtgcccctgctcctataccacaccctcctacaacatctgggtttgacattgctaca

SEQ ID NO: 199 - DNA, 80 bp, synthetic construct
  misc_feature 1..80: note = Synthetic: >HQ537675.1-cand-4580-4659
  source 1..80: mol_type = other DNA
actgcagacacaacacctgcaattttagatgtaacaagtgttagcacacatgaaaatcctacttttactgatccatctgt

SEQ ID NO: 200 - DNA, 80 bp, synthetic construct
  misc_feature 1..80: note = Synthetic: >HQ537675.1-cand-4660-4739
  source 1..80: mol_type = other DNA
attgcagcctcctacacctgcagaaacatcaggtcatttactactttcatcatcatctattagcacacataattatgagg

SEQ ID NO: 201 - DNA, 80 bp, synthetic construct
  misc_feature 1..80: note = Synthetic: >HQ537675.1-cand-4730-4809
  source 1..80: mol_type = other DNA
aattatgaggaaatacctatggatacatttattgtttctactaataatgaaaacataacaagtagcacacccattccagg

SEQ ID NO: 202 - DNA, 80 bp, synthetic construct
  misc_feature 1..80: note = Synthetic: >HQ537675.1-cand-4820-4899
  source 1..80: mol_type = other DNA
cctgcacgtttagggttatatagtaaggctacacaacaagtaaaagttattgatccaacgtttcttagtgctccaaaaca

SEQ ID NO: 203 - DNA, 80 bp, synthetic construct
  misc_feature 1..80: note = Synthetic: >HQ537675.1-cand-4870-4949
  source 1..80: mol_type = other DNA
tgatccaacgtttcttagtgctccaaaacagctaattacatatgaaaaccctgcctatgaaactgtaaatgctgaagaaa

SEQ ID NO: 204 - DNA, 80 bp, synthetic construct
  misc_feature 1..80: note = Synthetic: >HQ537675.1-cand-4950-5029
  source 1..80: mol_type = other DNA
ctttatacttttccaatacatcgcataatatagcccctgatcccgactttctagatattatagcattacataggcctgcc

SEQ ID NO: 205 - DNA, 80 bp, synthetic construct
  misc_feature 1..80: note = Synthetic: >HQ537675.1-cand-5030-5109
  source 1..80: mol_type = other DNA
cttacctcacgtaggaacactgttagatatagtagactaggtaataaacaaactttgcgcactcgtagtggtgctactat

SEQ ID NO: 206 - DNA, 80 bp, synthetic construct
  misc_feature 1..80: note = Synthetic: >HQ537675.1-cand-5100-5179
  source 1..80: mol_type = other DNA
gtgctactattggtgcaagggtgcattattattatgatattagtagtattaatcctgcaggtgaaagtattgaaatgcaa

SEQ ID NO: 207 - DNA, 80 bp, synthetic construct
  misc_feature 1..80: note = Synthetic: >HQ537675.1-cand-5190-5269
  source 1..80: mol_type = other DNA
cgtctgcaactactacttctactttaaatgatggcttatatgacatttatgcagacactgattttactgtggatacacct

SEQ ID NO: 208 - DNA, 80 bp, synthetic construct
  misc_feature 1..80: note = Synthetic: >HQ537675.1-cand-5270-5349
  source 1..80: mol_type = other DNA
gccacacataatgtttccccttctactgctgtacagtccacatctgctgtgtctgcctatgtacctacaaataccactgt

SEQ ID NO: 209 - DNA, 80 bp, synthetic construct
  misc_feature 1..80: note = Synthetic: >HQ537675.1-cand-6630-6709
  source 1..80: mol_type = other DNA
aattttaaagagtatttaagacatggtgaggaatttgatttacaatttatatttcagttatgcaaaataacattatctgc

SEQ ID NO: 210 - DNA, 80 bp, synthetic construct
  misc_feature 1..80: note = Synthetic: >HQ537675.1-cand-6710-6789
  source 1..80: mol_type = other DNA
agacataatgacatatattcacagtatgaatcctgctattttggaagattggaattttggattgaccacacctccctcag

SEQ ID NO: 211 - DNA, 80 bp, synthetic construct
  misc_feature 1..80: note = Synthetic: >HQ537675.1-cand-6790-6869
  source 1..80: mol_type = other DNA
gttctttggaggatacctataggtttgtaacctcacaggccattacatgtcaaaaaactgccccccaaaagcccaaggaa

SEQ ID NO: 212 - DNA, 80 bp, synthetic construct
  misc_feature 1..80: note = Synthetic: >HQ537675.1-cand-6870-6949
  source 1..80: mol_type = other DNA
gatccatttaaagattatgtattttgggaggttaatttaaaagaaaagttttctgcagatttagatcagtttccactggg

SEQ ID NO: 213 - DNA, 80 bp, synthetic construct
  misc_feature 1..80: note = Synthetic: >HQ537675.1-cand-6950-7029
  source 1..80: mol_type = other DNA
tcgcaaatttttattacaggcaggatatagggcacgtcctaaatttaaagcaggtaaacgtagtgcaccctcagcatcta

SEQ ID NO: 214 - DNA, 80 bp, synthetic construct
  misc_feature 1..80: note = Synthetic: >HQ537675.1-cand-7030-7109
  source 1..80: mol_type = other DNA
ccactacaccagcaaaacgtaaaaaaactaaaaagtaatggatgtgtatgtaatacatgtgtctgtatgtgtatgtgctt

SEQ ID NO: 215 - DNA, 80 bp, synthetic construct
  misc_feature 1..80: note = Synthetic: >HQ537675.1-cand-7110-7189
  source 1..80: mol_type = other DNA
gtgctgtattgtatatgtgtgtgtttgtgtgttatatatggtatatgtatgtttatgtatgcgtgtgtacttgtatatat

SEQ ID NO: 216 - DNA, 80 bp, synthetic construct
  misc_feature 1..80: note = Synthetic: >HQ537675.1-cand-7190-7269
  source 1..80: mol_type = other DNA
gtatagtatgttatgtgtgtatgtatgctatgtatgttaataaatatatgtgtgtatgtatgctatgtatgttaataaat

SEQ ID NO: 217 - DNA, 80 bp, synthetic construct
  misc_feature 1..80: note = Synthetic: >HQ537675.1-cand-7270-7349
  source 1..80: mol_type = other DNA
atatgtgtatacctgtgtgtgttgtgtatgttgtccttatatacaccctattagtaacatactattactattttataaac

SEQ ID NO: 218 - DNA, 80 bp, synthetic construct
  misc_feature 1..80: note = Synthetic: >HQ537675.1-cand-7350-7429
  source 1..80: mol_type = other DNA
tattgttcctacttgttcctgctcctcccaatagtcatgtacttatttctgcctataatttacgtgtcacgccatagtaa

SEQ ID NO: 219 - DNA, 80 bp, synthetic construct
  misc_feature 1..80: note = Synthetic: >HQ537675.1-cand-7430-7509
  source 1..80: mol_type = other DNA
aagttgtacacccggtccgttttttgcaactaaagctactccattttgattttatacagccattttaaatccttaaccgt

SEQ ID NO: 220 - DNA, 80 bp, synthetic construct
  misc_feature 1..80: note = Synthetic: >HQ537675.1-cand-7510-7589
  source 1..80: mol_type = other DNA
tttcggttgcattgtttaaacatgctagtacaactatgctgatgcagtagttctgcggtttttggtttcctgaatactag

SEQ ID NO: 221 - DNA, 80 bp, synthetic construct
  misc_feature 1..80: note = Synthetic: >HQ537675.1-cand-7590-7669
  source 1..80: mol_type = other DNA
tttttgccaacattctggcttgtagtttcctgcctaacacaccttgccaacatataatccagtccaactttgcaattata

SEQ ID NO: 222 - DNA, 80 bp, synthetic construct
  misc_feature 1..80: note = Synthetic: >HQ537675.1-cand-7670-7749
  source 1..80: mol_type = other DNA
ctatgaatcatgtttgtttaaatacaactgtagttcaactatgtgtcatgcacatatattatattatcctacacacctta

SEQ ID NO: 223 - DNA, 80 bp, synthetic construct
  misc_feature 1..80: note = Synthetic: >HQ537675.1-cand-7750-7829
  source 1..80: mol_type = other DNA
aactgcttttaggcacatattttgtagattatctatatccttgattgcagtgctggcttttgcacatgtttaaactgcca

SEQ ID NO: 224 - DNA, 80 bp, synthetic construct
  misc_feature 1..80: note = Synthetic: >HQ537675.1-cand-7830-7909
  source 1..80: mol_type = other DNA
aggttgtgtcatgcattataaataagttgtatgttactcatataattaattgcatataggtattacaccgttttcggtta

SEQ ID NO: 225 - DNA, 80 bp, synthetic construct
  misc_feature 1..80: note = Synthetic: >KF913849.1-cand-1070-1149
  source 1..80: mol_type = other DNA
aagtcagttggcactgctgaagaaaagctaaagaagaagtctgcattctaccaatcctatctacggagaactcagtctat

SEQ ID NO: 226 - DNA, 80 bp, synthetic construct
  misc_feature 1..80: note = Synthetic: >KF913849.1-cand-1200-1279
  source 1..80: mol_type = other DNA
gtaaggaagcagtcaatcacttccatttaggagatgatatggacccagaactcaggcagcttgctcaatctcttattgac

SEQ ID NO: 227 - DNA, 80 bp, synthetic construct
  misc_feature 1..80: note = Synthetic: >KF913849.1-cand-1260-1339
  source 1..80: mol_type = other DNA
ttgctcaatctcttattgacactaaggtcaaggagatctccaaccaagagccattaaaactgtaggtgcgccataacagt

SEQ ID NO: 228 - DNA, 80 bp, synthetic construct
  misc_feature 1..80: note = Synthetic: >KF913849.1-cand-1350-1429
  source 1..80: mol_type = other DNA
gtgaaggcgtttcgggcttgagccaatcagttattcatctcaggatctgtctttaatgtgattactaagggtttattata

SEQ ID NO: 229 - DNA, 80 bp, synthetic construct
  misc_feature 1..80: note = Synthetic: >KF913849.1-cand-1390-1469
  source 1..80: mol_type = other DNA
caggatctgtctttaatgtgattactaagggtttattataagggtggtagattaagggtttattataagggtggtagatt

SEQ ID NO: 230 - DNA, 80 bp, synthetic construct
  misc_feature 1..80: note = Synthetic: >KF913849.1-cand-1540-1619
  source 1..80: mol_type = other DNA
gagttatacatttactgtttactagatcatatagattgataagtttaggattatttagccataattatgtaggatcacac

SEQ ID NO: 231 - DNA, 80 bp, synthetic construct
  misc_feature 1..80: note = Synthetic: >KF913849.1-cand-1610-1689
  source 1..80: mol_type = other DNA
aggatcacactggctatatgaaattaattgttgattagccgggattgttgtatcatatgtatgtaggtttatgcatattg

SEQ ID NO: 232 - DNA, 80 bp, synthetic construct
  misc_feature 1..80: note = Synthetic: >KF913849.1-cand-1690-1769
  source 1..80: mol_type = other DNA
ataagttgactataataagtagataatcatatatcttgtattagtttttaaggttactaacaaatcatattactcaaata

SEQ ID NO: 233 - DNA, 80 bp, synthetic construct
  misc_feature 1..80: note = Synthetic: >KF913849.1-cand-1770-1849
  source 1..80: mol_type = other DNA
gatgtaaatttcgttcaatgctttgctactgcctcattgctttactaacactacaacaacactacctcatccacaacccc

SEQ ID NO: 234 - DNA, 80 bp, synthetic construct
  misc_feature 1..80: note = Synthetic: >KF913849.1-cand-1830-1909
  source 1..80: mol_type = other DNA
actacctcatccacaacccctccccttaactacctcaacaaaactacctcaataatgcttttttcttgttgggctttcaa

SEQ ID NO: 235 - DNA, 80 bp, synthetic construct
  misc_feature 1..80: note = Synthetic: >KY225961.1-cand-0-79
  source 1..80: mol_type = other DNA
actataatgccaaatcttgtaaaaagtagggtgtaaccgaaaacggttcaaccgaaaacggtgcatatataaagcagaca

SEQ ID NO: 236 - DNA, 80 bp, synthetic construct
  misc_feature 1..80: note = Synthetic: >KY225961.1-cand-50-129
  source 1..80: mol_type = other DNA
accgaaaacggtgcatatataaagcagacattttttggtaggctactgcaggactatgttccaggacgcagaggagaaac

SEQ ID NO: 237 - DNA, 80 bp, synthetic construct
  misc_feature 1..80: note = Synthetic: >KY225961.1-cand-130-209
  source 1..80: mol_type = other DNA
cacggacattgcatgatttgtgtcaggcgttggagacatctgtgcatgaaattgaattgaaatgcgttgaatgcaaaaag

SEQ ID NO: 238 - DNA, 80 bp, synthetic construct
  misc_feature 1..80: note = Synthetic: >KY225961.1-cand-210-289
  source 1..80: mol_type = other DNA
actttgcagcgatctgaggtatatgactttgtatttgcagatttaagaatagtgtatagagatggaaatccatttgcagt

SEQ ID NO: 239 - DNA, 80 bp, synthetic construct
  misc_feature 1..80: note = Synthetic: >KY225961.1-cand-290-369
  source 1..80: mol_type = other DNA
atgtaaagtgtgtttacgattgctatctaaaataagtgagtatagacattataattattcgctatatggagaaacattag

SEQ ID NO: 240 - DNA, 80 bp, synthetic construct
  misc_feature 1..80: note = Synthetic: >KY225961.1-cand-370-449
  source 1..80: mol_type = other DNA
aacaaacactaaaaaagtgtttaaatgaaatattaattagatgtattatttgtcaaagaccattgtgtccacaagaaaaa

SEQ ID NO: 241 - DNA, 80 bp, synthetic construct
  misc_feature 1..80: note = Synthetic: >NC_000883.2-cand-4140-4219
  source 1..80: mol_type = other DNA
catgcaattcagccccaaaacttcatgccagggccactagtaaactcagtgtctacaaaggagggagacagctctaatac

SEQ ID NO: 242 - DNA, 80 bp, synthetic construct
  misc_feature 1..80: note = Synthetic: >NC_000883.2-cand-4210-4289
  source 1..80: mol_type = other DNA
gctctaatactggagctgggaaagccttaacaggccttagcacaggtacctctcaaaacactagaatatccttacgcccg

SEQ ID NO: 243 - DNA, 80 bp, synthetic construct
  misc_feature 1..80: note = Synthetic: >NC_000883.2-cand-4310-4389
  source 1..80: mol_type = other DNA
ccaccactgggacacagataaatatgtcacaggaataaatgctatttctcatggtcagaccacttatggtaacgctgaag

SEQ ID NO: 244 - DNA, 80 bp, synthetic construct
  misc_feature 1..80: note = Synthetic: >NC_000883.2-cand-4390-4469
  source 1..80: mol_type = other DNA
acaaagagtatcagcaaggagtgggtagatttccaaatgaaaaagaacagctaaaacagttacagggtttaaacatgcac

SEQ ID NO: 245 - DNA, 80 bp, synthetic construct
  misc_feature 1..80: note = Synthetic: >NC_000883.2-cand-4470-4549
  source 1..80: mol_type = other DNA
acctactttcccaataaaggaacccagcaatatacagatcaaattgagcgccccctaatggtgggttctgtatggaacag

SEQ ID NO: 246 - DNA, 80 bp, synthetic construct
  misc_feature 1..80: note = Synthetic: >NC_000883.2-cand-4550-4629
  source 1..80: mol_type = other DNA
aagagcccttcactatgaaagccagctgtggagtaaaattccaaatttagatgacagttttaaaactcagtttgcagcct

SEQ ID NO: 247 - DNA, 80 bp, synthetic construct
  misc_feature 1..80: note = Synthetic: >NC_000883.2-cand-4640-4719
  source 1..80: mol_type = other DNA
gggtttgcatcagccacctcctcaaatatttttaaaaatattaccacaaagtgggccaattggaggtattaaatcaatgg

SEQ ID NO: 248 - DNA, 80 bp, synthetic construct
  misc_feature 1..80: note = Synthetic: >NC_000883.2-cand-4700-4779
  source 1..80: mol_type = other DNA
tggaggtattaaatcaatgggaattactaccttagttcagtatgccgtgggaattatgacagtaaccatgacatttaaat

SEQ ID NO: 249 - DNA, 80 bp, synthetic construct
  misc_feature 1..80: note = Synthetic: >NC_000883.2-cand-4790-4869
  source 1..80: mol_type = other DNA
taaagctacgggacggtggaatcctcaacctggagtatatcccccgcacgcagcaggtcatttaccatatgtactatatg

SEQ ID NO: 250 - DNA, 80 bp, synthetic construct
  misc_feature 1..80: note = Synthetic: >NC_000883.2-cand-4860-4939
  source 1..80: mol_type = other DNA
gtactatatgaccctacagctacagatgcaaaacaacaccacagacatggatatgaaaagcctgaagaattgtggacagc

SEQ ID NO: 251 - DNA, 80 bp, synthetic construct
  misc_feature 1..80: note = Synthetic: >NC_000883.2-cand-4940-5019
  source 1..80: mol_type = other DNA
caaaagccgtgtgcacccattgtaaacactccccaccgtgccctcagccaggatgcgtaactaaacgcccaccagtacca

SEQ ID NO: 252 - DNA, 80 bp, synthetic construct
  misc_feature 1..80: note = Synthetic: >NC_000883.2-cand-5020-5099
  source 1..80: mol_type = other DNA
cccagactgtacctgccccctcctatacctataagacagcctaacacaaaagatatagacaatgtagaatttaagtattt

SEQ ID NO: 253 - DNA, 80 bp, synthetic construct
  misc_feature 1..80: note = Synthetic: >NC_000883.2-cand-5100-5179
  source 1..80: mol_type = other DNA
aaccagatatgaacaacatgttattagaatgttaagattgtgtaatatgtatcaaaatttagaaaaataaacgtttgttg

SEQ ID NO: 254 - DNA, 80 bp, synthetic construct
  misc_feature 1..80: note = Synthetic: >NC_000883.2-cand-5180-5259
  source 1..80: mol_type = other DNA
tggttaaaaaattatgttgttgcgctttaaaaatttaaaagaagacaccaaatcagatgccgccggtcgccgccggtagg

SEQ ID NO: 255 - DNA, 80 bp, synthetic construct
  misc_feature 1..80: note = Synthetic: >NC_000883.2-cand-5300-5379
  source 1..80: mol_type = other DNA
cctgtgacgtcatttcctgtgacgtcacttccggtgggcggaacttccggaattagggttggctctgggccagcgcttgg

SEQ ID NO: 256 - DNA, 80 bp, synthetic construct
  misc_feature 1..80: note = Synthetic: >NC_001357.1-cand-0-79
  source 1..80: mol_type = other DNA
atacttttaacaattgtagtatataaaaaagggagtaaccgaaaacggtcgggaccgaaaacggtgtatataaaagatgt

SEQ ID NO: 257 - DNA, 80 bp, synthetic construct
  misc_feature 1..80: note = Synthetic: >NC_001545.2-cand-5120-5199
  source 1..80: mol_type = other DNA
cgccgtgcggcgctaccgcgcgggcgaggatgggtcgaccctccgcactgctgtggcccgccagcacccgcgcccttttc

SEQ ID NO: 258 - DNA, 80 bp, synthetic construct
  misc_feature 1..80: note = Synthetic: >NC_001545.2-cand-5230-5309
  source 1..80: mol_type = other DNA
gggtcgcccaggagtggcgcatgacgtacttgcgggaacggatcgacctcactgatgtctacacgcagatgggcgtggcc

SEQ ID NO: 259 - DNA, 80 bp, synthetic construct
  misc_feature 1..80: note = Synthetic: >NC_001545.2-cand-5280-5359
  source 1..80: mol_type = other DNA
actgatgtctacacgcagatgggcgtggccgcgcgggagctcaccgaccgctacgcgcgccgctatcctgagatcttcgc

SEQ ID NO: 260 - DNA, 80 bp, synthetic construct
  misc_feature 1..80: note = Synthetic: >NC_001545.2-cand-5360-5439
  source 1..80: mol_type = other DNA
cggcatgtgtaccgcccagagcctgagcgtccccgccttcctcaaagccaccttgaagtgcgtagacgccgccctcggcc

SEQ ID NO: 261 - DNA, 80 bp, synthetic construct
  misc_feature 1..80: note = Synthetic: >NC_001545.2-cand-5480-5559
  source 1..80: mol_type = other DNA
cggccttgagatccgggcgtgggccaaggagtgggttcaggttatgtccccgcatttccgcgcgatccagaagatcatca

SEQ ID NO: 262 - DNA, 80 bp, synthetic construct
  misc_feature 1..80: note = Synthetic: >NC_001545.2-cand-5520-5599
  source 1..80: mol_type = other DNA
gttatgtccccgcatttccgcgcgatccagaagatcatcatgcgcgccttgcgcccgcaattccttgtggccgctggcca

SEQ ID NO: 263 - DNA, 80 bp, synthetic construct
  misc_feature 1..80: note = Synthetic: >NC_001545.2-cand-5600-5679
  source 1..80: mol_type = other DNA
tacggagcccgaggtcgatgcgtggtggcaggcccattacaccaccaacgccatcgaggtcgacttcactgagttcgaca

SEQ ID NO: 264 - DNA, 80 bp, synthetic construct
  misc_feature 1..80: note = Synthetic: >NC_001545.2-cand-5680-5759
  source 1..80: mol_type = other DNA
tgaaccagaccctcgctactcgggacgtcgagctcgagattagcgccgctctcttgggcctcccttgcgccgaagactac

SEQ ID NO: 265 - DNA, 80 bp, synthetic construct
  misc_feature 1..80: note = Synthetic: >NC_001545.2-cand-5760-5839
  source 1..80: mol_type = other DNA
cgcgcgctccgcgccggcagctactgcaccctgcgcgaactgggctccactgagaccggctgcgagcgcacaagcggcga

SEQ ID NO: 266 - DNA, 80 bp, synthetic construct
  misc_feature 1..80: note = Synthetic: >NC_001545.2-cand-5840-5919
  source 1..80: mol_type = other DNA
gcccgccacgctgctgcacaacaccaccgtggccatgtgcatggccatgcgcatggtccccaaaggcgtgcgctgggccg

SEQ ID NO: 267 - DNA, 80 bp, synthetic construct
  misc_feature 1..80: note = Synthetic: >NC_001545.2-cand-5920-5999
  source 1..80: mol_type = other DNA
ggattttccagggtgacgatatggtcatcttcctccccgagggcgcgcgcagcgcggcactcaagtggacccccgccgag

SEQ ID NO: 268 - DNA, 80 bp, synthetic construct
  misc_feature 1..80: note = Synthetic: >NC_001545.2-cand-6000-6079
  source 1..80: mol_type = other DNA
gtgggcttgtttggcttccacatcccggtgaagcacgtgagcacccctacccccagcttctgcgggcacgtcggcaccgc

SEQ ID NO: 269 - DNA, 80 bp, synthetic construct
  misc_feature 1..80: note = Synthetic: >NC_001545.2-cand-6080-6159
  source 1..80: mol_type = other DNA
ggccggcctcttccatgatgtcatgcaccaggcgatcaaggtgctttgccgccgtttcgacccagacgtgcttgaagaac

SEQ ID NO: 270 - DNA, 80 bp, synthetic construct
  misc_feature 1..80: note = Synthetic: >NC_001545.2-cand-6190-6269
  source 1..80: mol_type = other DNA
gggtctacgcggctctgcctgacaccgttgccgccaatgctgcgtactacgactacagcgcggagcgcgtcctcgctatc

SEQ ID NO: 271 - DNA, 80 bp, synthetic construct
  misc_feature 1..80: note = Synthetic: >NC_001545.2-cand-6210-6289
  source 1..80: mol_type = other DNA
gacaccgttgccgccaatgctgcgtactacgactacagcgcggagcgcgtcctcgctatcgtgcgcgaacttaccgcgta

SEQ ID NO: 272 - DNA, 80 bp, synthetic construct
  misc_feature 1..80: note = Synthetic: >NC_001545.2-cand-6320-6399
  source 1..80: mol_type = other DNA
caccatcggcgcgctcgaggagattcagaccccctacgcgcgcgccaatctccacgacgccgactaacgcccctgtacgt

SEQ ID NO: 273 - DNA, 80 bp, synthetic construct
  misc_feature 1..80: note = Synthetic: >NC_001563.2-cand-670-749
  source 1..80: mol_type = other DNA
gaaatcatctgtttacgtgcgctatggaagatgcacaaaaactcggcattcccgtcgaagcagaaggtctctgacagtcc

SEQ ID NO: 274 - DNA, 80 bp, synthetic construct
  misc_feature 1..80: note = Synthetic: >NC_001563.2-cand-750-829
  source 1..80: mol_type = other DNA
agacacatggagaaagtacactggccaacaagaaaggagcttggttggacagcacaaaagccacgagatatctggtgaag

SEQ ID NO: 275 - DNA, 80 bp, synthetic construct
  misc_feature 1..80: note = Synthetic: >NC_001563.2-cand-830-909
  source 1..80: mol_type = other DNA
acagaatcatggatactgagaaacccgggctacgccctcgttgcagctgtcattggatggatgctaggaagcaacacaat

SEQ ID NO: 276 - DNA, 80 bp, synthetic construct
  misc_feature 1..80: note = Synthetic: >NC_001563.2-cand-910-989
  source 1..80: mol_type = other DNA
gcaacgcgtcgtgtttgccattctattgctcctggtggcaccagcatacagcttcaactgtttaggaatgagtaacagag

SEQ ID NO: 277 - DNA, 80 bp, synthetic construct
  misc_feature 1..80: note = Synthetic: >NC_001563.2-cand-990-1069
  source 1..80: mol_type = other DNA
acttcctggagggagtgtctggagctacatgggttgatctggtactggaaggcgatagttgtgtgaccataatgtcaaaa

SEQ ID NO: 278 - DNA, 80 bp, synthetic construct
  misc_feature 1..80: note = Synthetic: >NC_001563.2-cand-1070-1149
  source 1..80: mol_type = other DNA
gacaagccaaccattgatgtcaaaatgatgaacatggaagcagccaacctcgcagatgtgcgcagttactgttacctagc

SEQ ID NO: 279 - DNA, 80 bp, synthetic construct
  misc_feature 1..80: note = Synthetic: >NC_001563.2-cand-1150-1229
  source 1..80: mol_type = other DNA
ttcggtcagtgacttgtcaacaagagctgcgtgtccaaccatgggtgaagcccacaacgagaaaagagctgaccccgcct

SEQ ID NO: 280 - DNA, 80 bp, synthetic construct
  misc_feature 1..80: note = Synthetic: >NC_001563.2-cand-1180-1259
  source 1..80: mol_type = other DNA
gtgtccaaccatgggtgaagcccacaacgagaaaagagctgaccccgccttcgtttgcaagcaaggcgttgtggacagag

SEQ ID NO: 281 - DNA, 80 bp, synthetic construct
  misc_feature 1..80: note = Synthetic: >NC_001563.2-cand-1310-1389
  source 1..80: mol_type = other DNA
gcgaagtttgcctgtacaaccaaagcaactggatggatcatccagaaggaaaacatcaagtatgaggttgccatatttgt

SEQ ID NO: 282 - DNA, 80 bp, synthetic construct
  misc_feature 1..80: note = Synthetic: >NC_001563.2-cand-1350-1429
  source 1..80: mol_type = other DNA
tccagaaggaaaacatcaagtatgaggttgccatatttgtgcatggcccgacgaccgttgaatctcatggcaagataggg

SEQ ID NO: 283 - DNA, 80 bp, synthetic construct
  misc_feature 1..80: note = Synthetic: >NC_001563.2-cand-1470-1549
  source 1..80: mol_type = other DNA
catcttacacgctaaagttgggtgagtatggtgaggttacggttgattgtgagccacggtcaggaatagacaccagcgcc

SEQ ID NO: 284 - DNA, 80 bp, synthetic construct
  misc_feature 1..80: note = Synthetic: >NC_001563.2-cand-1550-1629
  source 1..80: mol_type = other DNA
tattacgttatgtcagttggtgagaagtccttcctggttcaccgagaatggtttatggatctgaacctgccatggagcag

SEQ ID NO: 285 - DNA, 80 bp, synthetic construct
  misc_feature 1..80: note = Synthetic: >NC_001563.2-cand-1630-1709
  source 1..80: mol_type = other DNA
tgctggaagcaccacgtggaggaaccgggaaacactgatggagtttgaagaacctcatgccaccaaacaatctgttgtgg

SEQ ID NO: 286 - DNA, 80 bp, synthetic construct
  misc_feature 1..80: note = Synthetic: >NC_001563.2-cand-1710-1789
  source 1..80: mol_type = other DNA
ctctagggtcgcaggaaggtgcgttgcaccaagctctggccggagcgattcctgttgagttctcaagcaacactgtgaag

SEQ ID NO: 287 - DNA, 80 bp, synthetic construct
  misc_feature 1..80: note = Synthetic: >NC_001563.2-cand-1790-1869
  source 1..80: mol_type = other DNA
ttgacatcaggacatctgaagtgtcgggtgaagatggagaagttgcagctgaagggaacaacatatggagtatgttcaaa

SEQ ID NO: 288 - DNA, 80 bp, synthetic construct
  misc_feature 1..80: note = Synthetic: >NC_001563.2-cand-1870-1949
  source 1..80: mol_type = other DNA
agcgttcaaattcgctaggactcccgctgacactggccacggaacggtggtgttggaactgcaatataccggaacagacg

SEQ ID NO: 289 - DNA, 80 bp, synthetic construct
  misc_feature 1..80: note = Synthetic: >NC_001611.1-cand-100350-100429
  source 1..80: mol_type = other DNA
tgtttcaaagcaattgtattattgatacaattattatataattcttcgccctcaatttcccaaataacaccattacacga

SEQ ID NO: 290 - DNA, 80 bp, synthetic construct
  misc_feature 1..80: note = Synthetic: >NC_001611.1-cand-100430-100509
  source 1..80: mol_type = other DNA
agagaccgatacatgattaatacatttatatccaacatatggtacgtaaccgaatcttcccatacctttaacttctggaa

SEQ ID NO: 291 - DNA, 80 bp, synthetic construct
  misc_feature 1..80: note = Synthetic: >NC_001611.1-cand-100510-100589
  source 1..80: mol_type = other DNA
gttccaaacttagaaccaaatgattaagcgcagtaatatactgatccctaatttcgaagctagcgatagtctgattgtcg

SEQ ID NO: 292 - DNA, 80 bp, synthetic construct
  misc_feature 1..80: note = Synthetic: >NC_001611.1-cand-100590-100669
  source 1..80: mol_type = other DNA
ggaccattgtttgtcataactccggatagagaaatatattgcggcatatataaagttggaatttgactatcgactgcgaa

SEQ ID NO: 293 - DNA, 80 bp, synthetic construct
  misc_feature 1..80: note = Synthetic: >NC_001611.1-cand-100670-100749
  source 1..80: mol_type = other DNA
gacattagaccgtttaatagagtcatccccaccaatcaacgaattaatgatagtattattcattttctatttaaaatgga

SEQ ID NO: 294 - DNA, 80 bp, synthetic construct
  misc_feature 1..80: note = Synthetic: >NC_001611.1-cand-100750-100829
  source 1..80: mol_type = other DNA
aaaagcttacaataaactccgtagagaaatatctataatttgtgagttttccttaaagtaacaacttccgtaaacgccgt

SEQ ID NO: 295 - DNA, 80 bp, synthetic construct
  misc_feature 1..80: note = Synthetic: >NC_001611.1-cand-100830-100909
  source 1..80: mol_type = other DNA
ctttatctcttagtaagtttattgtatttatgaccttttccttatcttcataaaatactaaaggcaacaaagaaattttt

SEQ ID NO: 296 - DNA, 80 bp, synthetic construct
  misc_feature 1..80: note = Synthetic: >NC_001611.1-cand-101310-101389
  source 1..80: mol_type = other DNA
ttttttagatctcatatgtgctaaaaagttttcccatactaactgattactattatttttcgtataatttttaactgttt

SEQ ID NO: 297 - DNA, 80 bp, synthetic construct
  misc_feature 1..80: note = Synthetic: >NC_001611.1-cand-101550-101629
  source 1..80: mol_type = other DNA
ctcatcttttacttgattgattatttcaaagactaacttataatcctttttatttatcctctcgttagccttaagaaaac

SEQ ID NO: 298 - DNA, 80 bp, synthetic construct
  misc_feature 1..80: note = Synthetic: >NC_001611.1-cand-101920-101999
  source 1..80: mol_type = other DNA
tctcgtcgtccaatattttatataaaaacattttatttctagacgttgccaaaaaatcctgtaatacttttagtttttgg

SEQ ID NO: 299 - DNA, 80 bp, synthetic construct
  misc_feature 1..80: note = Synthetic: >NC_001611.1-cand-102030-102109
  source 1..80: mol_type = other DNA
ttaccatcttccgccaatatagtagttagattatcagcacatgaagaaaaacacctcttaggtggattcagtacaatgtt

SEQ ID NO: 300 - DNA, 80 bp, synthetic construct
  misc_feature 1..80: note = Synthetic: >NC_001611.1-cand-102190-102269
  source 1..80: mol_type = other DNA
atcctgtgcataaattaaaatacaacaatgtctcgaaatcattgacatggcttcttccatagttagaagatcgtcgtcaa

SEQ ID NO: 301 - DNA, 80 bp, synthetic construct
  misc_feature 1..80: note = Synthetic: >NC_001611.1-cand-102270-102349
  source 1..80: mol_type = other DNA
agttagcaacgtgattcatcaacatttgctgttttgaggcagcaaatactgaaccgtcaccattcaaccattcataaaaa

SEQ ID NO: 302 - DNA, 80 bp, synthetic construct
  misc_feature 1..80: note = Synthetic: >NC_001611.1-cand-102420-102499
  source 1..80: mol_type = other DNA
ctcccggattgaaaacagaaagaggatcgtacatccagggtccattttctgtaaatagaatagtataatgtccctttaag

SEQ ID NO: 303 - DNA, 80 bp, synthetic construct
  misc_feature 1..80: note = Synthetic: >NC_001611.1-cand-102500-102579
  source 1..80: mol_type = other DNA
aagatatcagacgatccacaatcaaaaaattggtctccgagtttgtaacagactgcggactttaacctatacatgatacc

SEQ ID NO: 304 - DNA, 80 bp, synthetic construct
  misc_feature 1..80: note = Synthetic: >NC_001611.1-cand-102580-102659
  source 1..80: mol_type = other DNA
gtttagcatgatttctggtgatacgtcaattggagtatcatctattagagatctaaagccggtgtaacattctccaccaa

SEQ ID NO: 305 - DNA, 80 bp, synthetic construct
  misc_feature 1..80: note = Synthetic: >NC_001611.1-cand-111780-111859
  source 1..80: mol_type = other DNA
tcatcgaagattactcggttaccattgtaataaattggtactctatcataatcgtcgacaaagtactgttcatacatgat

SEQ ID NO: 306 - DNA, 80 bp, synthetic construct
  misc_feature 1..80: note = Synthetic: >NC_001611.1-cand-111860-111939
  source 1..80: mol_type = other DNA
gagatgtttatatgttggcatagtagtgagatcgacgtttggtaatggcaatgtattaagattaactccataatgtctag

SEQ ID NO: 307 - DNA, 80 bp, synthetic construct
  misc_feature 1..80: note = Synthetic: >NC_001611.1-cand-111980-112059
  source 1..80: mol_type = other DNA
atcttgtgctgttatatattgtctaacacctataagattatcaaaatcttgtctgcttaatacaccgttaacaattttcg

SEQ ID NO: 308 - DNA, 80 bp, synthetic construct
  misc_feature 1..80: note = Synthetic: >NC_001611.1-cand-112170-112249
  source 1..80: mol_type = other DNA
gagtcggagccatctggtttaatataaccaccgataaatctagctctgtattctgtatccgtcaatctaatattaagaag

SEQ ID NO: 309 - DNA, 80 bp, synthetic construct
  misc_feature 1..80: note = Synthetic: >NC_001611.1-cand-112240-112319
  source 1..80: mol_type = other DNA
tattaagaaggtgttgagtgaaaggtggaagatcgtaaaagctgtgagtattaatgatagggttagtttccgaactaatg

SEQ ID NO: 310 - DNA, 80 bp, synthetic construct
  misc_feature 1..80: note = Synthetic: >NC_001611.1-cand-112330-112409
  source 1..80: mol_type = other DNA
tattaataatatcgatatttccagcgttaagtgtaacattaaacagttttaattcacgtgacgtggtatcaattaaataa

SEQ ID NO: 311 - DNA, 80 bp, synthetic construct
  misc_feature 1..80: note = Synthetic: >NC_001611.1-cand-112410-112489
  source 1..80: mol_type = other DNA
ttaatgcccaatttggatatagcagcctgaagctcatcttgtttagttacggatcctaatgagttattaagaaatacatc

SEQ ID NO: 312 - DNA, 80 bp, synthetic construct
  misc_feature 1..80: note = Synthetic: >NC_001611.1-cand-112490-112569
  source 1..80: mol_type = other DNA
aaacggatgaacgaaggttgttttaagttggtcacatactttgtaatctagacatagatgcggaagaacggtagaaacta

SEQ ID NO: 313 - DNA, 80 bp, synthetic construct
  misc_feature 1..80: note = Synthetic: >NC_001611.1-cand-112570-112649
  source 1..80: mol_type = other DNA
tacgaaatagatattcagagtcctctaattgatcaagagtaactattgacttaataggcatcatttatttagtattaaat

SEQ ID NO: 314 - DNA, 80 bp, synthetic construct
  misc_feature 1..80: note = Synthetic: >NC_001611.1-cand-112650-112729
  source 1..80: mol_type = other DNA
gacgaccgtaccagtgacagatatacaaaacgacttaattacagagttttcagaagataattatccatctaacaaaaatt

SEQ ID NO: 315 - DNA, 80 bp, synthetic construct
  misc_feature 1..80: note = Synthetic: >NC_001611.1-cand-112730-112809
  source 1..80: mol_type = other DNA
atgaaataactcttcgtcaaatgtctattctaactcacgttaataacgtggtagatagagaacataatgccgccgtagtg

SEQ ID NO: 316 - DNA, 80 bp, synthetic construct
  misc_feature 1..80: note = Synthetic: >NC_001611.1-cand-112810-112889
  source 1..80: mol_type = other DNA
tcatctccagaggaaatatcatcacaacttaatgaagatttatttccagacgatgattctccggccactattattgaaag

SEQ ID NO: 317 - DNA, 80 bp, synthetic construct
  misc_feature 1..80: note = Synthetic: >NC_001611.1-cand-112890-112969
  source 1..80: mol_type = other DNA
agtacaacaaccgcatactactattattgacgatacgccacctcctacgtttcgtagagagttattgatatcggaacaac

SEQ ID NO: 318 - DNA, 80 bp, synthetic construct
  misc_feature 1..80: note = Synthetic: >NC_001611.1-cand-112970-113049
  source 1..80: mol_type = other DNA
gtcagcaacgagaaaaaagatttaatattacggtatcaaaaaatgccgaagcgataatggaatctagatcgatgataact

SEQ ID NO: 319 - DNA, 80 bp, synthetic construct
  misc_feature 1..80: note = Synthetic: >NC_001611.1-cand-113460-113539
  source 1..80: mol_type = other DNA
taccgacatcacttcagaaattatcgatgtggagatcggagacgactgtgatgctgtagcatcaaaactaggaatcggca

SEQ ID NO: 320 - DNA, 80 bp, synthetic construct
  misc_feature 1..80: note = Synthetic: >NC_001611.1-cand-113940-114019
  source 1..80: mol_type = other DNA
gatgtagaagaagacgaggattttgatttacatgtgatacattttgaactctttgattttgtgtcacatgcgccggcagt

SEQ ID NO: 321 - DNA, 80 bp, synthetic construct
  misc_feature 1..80: note = Synthetic: >NC_001611.1-cand-125770-125849
  source 1..80: mol_type = other DNA
cttcaatgcgaggaaatgtataatttggtaatgtttcttatgtggatctgaagaagaggtaagatatctactagaaagat

SEQ ID NO: 322 - DNA, 80 bp, synthetic construct
  misc_feature 1..80: note = Synthetic: >NC_001611.1-cand-125850-125929
  source 1..80: mol_type = other DNA
accgatcacgttctagttctcttttgtagaacttaactttttctttctcagcatctagttgatattccaacctcttcacg

SEQ ID NO: 323 - DNA, 80 bp, synthetic construct
  misc_feature 1..80: note = Synthetic: >NC_001611.1-cand-125930-126009
  source 1..80: mol_type = other DNA
ttactacgttcatattccaattcacgttcgcatgggttaccttcgcagtttttacgagcgatttcacgttccagattacg

SEQ ID NO: 324 - DNA, 80 bp, synthetic construct
  misc_feature 1..80: note = Synthetic: >NC_001611.1-cand-126010-126089
  source 1..80: mol_type = other DNA
tttagccttcatgtgtctctcactctctctatcgagtttatcagagcagtctttctaaaggcgatcgaactccataaatt

SEQ ID NO: 325 - DNA, 80 bp, synthetic construct
  misc_feature 1..80: note = Synthetic: >NC_001611.1-cand-126090-126169
  source 1..80: mol_type = other DNA
tctccaacgatttgattgtttccatagatttccgaagttcagcttctaggacggcgattctttttctttcgaattcacag

SEQ ID NO: 326 - DNA, 80 bp, synthetic construct
  misc_feature 1..80: note = Synthetic: >NC_001611.1-cand-126170-126249
  source 1..80: mol_type = other DNA
ctggatgtacaaccgtttcctccgtttccattaccatctctaagtttctttcctagatcggcaatctttctcaacatttc

SEQ ID NO: 327 - DNA, 80 bp, synthetic construct
  misc_feature 1..80: note = Synthetic: >NC_001611.1-cand-126250-126329
  source 1..80: mol_type = other DNA
atccccatacattttacattcctcgagtctaccgtcgtcgaaatatctttccaactccttttcgacctcaataactttaa

SEQ ID NO: 328 - DNA, 80 bp, synthetic construct
  misc_feature 1..80: note = Synthetic: >NC_001611.1-cand-126330-126409
  source 1..80: mol_type = other DNA
cacgttgtctttcaagctctcgtttgtagcaactatcattttatctgattccctggcgcgtttaagatcttcatgcaatt

SEQ ID NO: 329 - DNA, 80 bp, synthetic construct
  misc_feature 1..80: note = Synthetic: >NC_001611.1-cand-126410-126489
  source 1..80: mol_type = other DNA
gagtcagctcttaacgcaatctcttgcttcttcgtcatagtactcacaatcactgtgagatccattgctaccacgtctac

SEQ ID NO: 330 - DNA, 80 bp, synthetic construct
  misc_feature 1..80: note = Synthetic: >NC_001611.1-cand-126490-126569
  source 1..80: mol_type = other DNA
acttggtgagctcgcgtttaagagattcaatttcccgtttgtattggtccatgtctccattgccgcaaccattagattta

SEQ ID NO: 331 - DNA, 80 bp, synthetic construct
  misc_feature 1..80: note = Synthetic: >NC_001611.1-cand-126570-126649
  source 1..80: mol_type = other DNA
caggctgttagctgtcgttcaagatcagaaatacggtttttcttggaattgatttcgtcaatgtacttaacatgattaac

SEQ ID NO: 332 - DNA, 80 bp, synthetic construct
  misc_feature 1..80: note = Synthetic: >NC_001611.1-cand-126650-126729
  source 1..80: mol_type = other DNA
atcgaaacacttattaagttctttttccaattctacgattttatttctttcgcgagtcaattccctcctgtagtagctat

SEQ ID NO: 333 - DNA, 80 bp, synthetic construct
  misc_feature 1..80: note = Synthetic: >NC_001611.1-cand-126730-126809
  source 1..80: mol_type = other DNA
cggttttgtcagattcacgctctctacgtagactttcttgcaagttactaatttgttccctgacacgtccaagttcagtt

SEQ ID NO: 334 - DNA, 80 bp, synthetic construct
  misc_feature 1..80: note = Synthetic: >NC_001611.1-cand-126810-126889
  source 1..80: mol_type = other DNA
ttatatgccgaatagagttctgatttatcctttaagcagatctctagcgattgtttaagatcactaattctagtctttag

SEQ ID NO: 335 - DNA, 80 bp, synthetic construct
  misc_feature 1..80: note = Synthetic: >NC_001611.1-cand-126890-126969
  source 1..80: mol_type = other DNA
cctatttacctcctcagaagatgttccgttaccgttgcgtttacactcgttaagctgtctatcaagatccatgattctat

SEQ ID NO: 336 - DNA, 80 bp, synthetic construct
  misc_feature 1..80: note = Synthetic: >NC_001611.1-cand-126970-127049
  source 1..80: mol_type = other DNA
ctctaagacgttgtatctctttttccatatcagcattgctttcattattacgtctgtagtcacttaactatctttcaaga

SEQ ID NO: 337 - DNA, 80 bp, synthetic construct
  misc_feature 1..80: note = Synthetic: >NC_001699.1-cand-4080-4159
  source 1..80: mol_type = other DNA
aatattatgacccccaaaaccatgtctacttataaaagttacagaatatttttccataagtttcttatataaaatttgag

SEQ ID NO: 338 - DNA, 80 bp, synthetic construct
  misc_feature 1..80: note = Synthetic: >NC_001699.1-cand-4160-4239
  source 1..80: mol_type = other DNA
ctttttctttagtggtatacacagcaaaagaagcaacagttctattactaaacacagcttgactgaggaatgcatgcaga

SEQ ID NO: 339 - DNA, 80 bp, synthetic construct
  misc_feature 1..80: note = Synthetic: >NC_001699.1-cand-4210-4289
  source 1..80: mol_type = other DNA
aacacagcttgactgaggaatgcatgcagatctacaggaaagtctttagggtcttctaccttttttttctttttaggtgg

SEQ ID NO: 340 - DNA, 80 bp, synthetic construct
  misc_feature 1..80: note = Synthetic: >NC_001699.1-cand-4320-4399
  source 1..80: mol_type = other DNA
atcactggcaaacatttcttcatggcaaaacaggtcttcatcccacttctcattaaatgtattccaccaggattcccatt

SEQ ID NO: 341 - DNA, 80 bp, synthetic construct
  misc_feature 1..80: note = Synthetic: >NC_001699.1-cand-4390-4469
  source 1..80: mol_type = other DNA
gattcccattcatctgttccataggttggcacctaaaaaaaaacaattaagtttattgtaaaaaacaaaatgccctgcaa

SEQ ID NO: 342 - DNA, 80 bp, synthetic construct
  misc_feature 1..80: note = Synthetic: >NC_001699.1-cand-4430-4509
  source 1..80: mol_type = other DNA
aaacaattaagtttattgtaaaaaacaaaatgccctgcaaaagaaaaatagtggtttaccttaaagctttagatccctgt

SEQ ID NO: 343 - DNA, 80 bp, synthetic construct
  misc_feature 1..80: note = Synthetic: >NC_001699.1-cand-4550-4629
  source 1..80: mol_type = other DNA
ttcttgggttaagtcacacccaaaccattgtctgaagcaatcaaagcaatagcaatctatccacacaagtgggctgcttc

SEQ ID NO: 344 - DNA, 80 bp, synthetic construct
  misc_feature 1..80: note = Synthetic: >NC_001699.1-cand-4600-4679
  source 1..80: mol_type = other DNA
agcaatctatccacacaagtgggctgcttcttaaaaattttctgtttctatgccttaattttagcatgcacattaaacag

SEQ ID NO: 345 - DNA, 80 bp, synthetic construct
  misc_feature 1..80: note = Synthetic: >NC_001699.1-cand-4710-4789
  source 1..80: mol_type = other DNA
ttaggccattccttgcaataaagggtatcagaattaggaggaaaatcacaaccaacctctgaactattccatgtaccaaa

SEQ ID NO: 346 - DNA, 80 bp, synthetic construct
  misc_feature 1..80: note = Synthetic: >NC_001699.1-cand-4790-4869
  source 1..80: mol_type = other DNA
atcaggctgatgagcaacttttacaccttgttccatttttttatataaaaaattcattctcttcatcttgtcttcgtccc

SEQ ID NO: 347 - DNA, 80 bp, synthetic construct
  misc_feature 1..80: note = Synthetic: >NC_001699.1-cand-4870-4949
  source 1..80: mol_type = other DNA
cacctttatcagggtggagttctttgcattttttcagataagcttttctcatgacaggaatgttcccccatgcagaccta

SEQ ID NO: 348 - DNA, 80 bp, synthetic construct
  misc_feature 1..80: note = Synthetic: >NC_001699.1-cand-4950-5029
  source 1..80: mol_type = other DNA
tcaaggcctaataaatccataagctccatggattcctccctattcagcactttgtccattttagctttttgcagcaaaaa

SEQ ID NO: 349 - DNA, 80 bp, synthetic construct
  misc_feature 1..80: note = Synthetic: >NC_001699.1-cand-5030-5109
  source 1..80: mol_type = other DNA
attactgcaaaaaagggaaaaacaagggaatttccctggcctcctaaaaagcctccacgcccttactacttctgagtaag

SEQ ID NO: 350 - DNA, 80 bp, synthetic construct
  misc_feature 1..80: note = Synthetic: >NC_001722.1-cand-0-79
  source 1..80: mol_type = other DNA
agggatgttttacagtaggaggagacatagaatcctagacatatacctagaaaaagaggaagggataataccagattggc

SEQ ID NO: 351 - DNA, 80 bp, synthetic construct
  misc_feature 1..80: note = Synthetic: >NC_001722.1-cand-80-159
  source 1..80: mol_type = other DNA
agaattatactcatgggccaggagtaaggtacccaatgtacttcgggtggctgtggaagctagtatcagtagaactctca

SEQ ID NO: 352 - DNA, 80 bp, synthetic construct
  misc_feature 1..80: note = Synthetic: >NC_001722.1-cand-150-229
  source 1..80: mol_type = other DNA
agaactctcacaagaggcagaggaagatgaggccaactgcttagtacacccagcacaaacaagcagacatgatgatgagc

SEQ ID NO: 353 - DNA, 80 bp, synthetic construct
  misc_feature 1..80: note = Synthetic: >NC_001722.1-cand-3310-3389
  source 1..80: mol_type = other DNA
tactgcatttaccctaccagcagtaaacaatatggaaccaggaaaaagatatatatataaagtcttgccacaaggatgga

SEQ ID NO: 354 - DNA, 80 bp, synthetic construct
  misc_feature 1..80: note = Synthetic: >NC_001722.1-cand-3390-3469
  source 1..80: mol_type = other DNA
agggatcaccagcaatttttcaatacacaatgaggcaagtcttagaacctttcagaaaagcaaacccagatgtcattctc

SEQ ID NO: 355 - DNA, 80 bp, synthetic construct
  misc_feature 1..80: note = Synthetic: >NC_001722.1-cand-3470-3549
  source 1..80: mol_type = other DNA
atccagtacatggatgatatcttaatagctagtgacaggacaggtttagagcatgacaaagtggtcctgcagctaaaaga

SEQ ID NO: 356 - DNA, 80 bp, synthetic construct
  misc_feature 1..80: note = Synthetic: >NC_001722.1-cand-3550-3629
  source 1..80: mol_type = other DNA
acttctaaatggcctagggttttctactccagatgagaagttccaaaaagaccctccatttcaatggatgggctgtgaac

SEQ ID NO: 357 - DNA, 80 bp, synthetic construct
  misc_feature 1..80: note = Synthetic: >NC_001722.1-cand-3630-3709
  source 1..80: mol_type = other DNA
tatggccaactaaatggaagctgcagaaactacaactgccccagaaagacatatggacagtcaatgacatccaaaagcta

SEQ ID NO: 358 - DNA, 80 bp, synthetic construct
  misc_feature 1..80: note = Synthetic: >NC_001722.1-cand-3710-3789
  source 1..80: mol_type = other DNA
gtgggagtcttaaattgggcggcacaaatctattcaggaataaaaaccaaacacttatgtagactaattagaggaaaaat

SEQ ID NO: 359 - DNA, 80 bp, synthetic construct
  misc_feature 1..80: note = Synthetic: >NC_001722.1-cand-3800-3879
  source 1..80: mol_type = other DNA
gaagaagtgcagtggacagaactagcagaagcagagctagaagaaaacaaaattatcttgagccaggaacaagaaggata

SEQ ID NO: 360 - DNA, 80 bp, synthetic construct
  misc_feature 1..80: note = Synthetic: >NC_001722.1-cand-3880-3959
  source 1..80: mol_type = other DNA
ttattaccaagaagaaaaagaattagaggcaacaatccaaaaaagccaaggacatcaatggacatacaaaatacaccagg

SEQ ID NO: 361 - DNA, 80 bp, synthetic construct
  misc_feature 1..80: note = Synthetic: >NC_001722.1-cand-3930-4009
  source 1..80: mol_type = other DNA
gacatcaatggacatacaaaatacaccaggaagagaaaatcctaaaagtaggaaagtatgcaaagataaaaaatacccat

SEQ ID NO: 362 - DNA, 80 bp, synthetic construct
  misc_feature 1..80: note = Synthetic: >NC_001722.1-cand-4080-4159
  source 1..80: mol_type = other DNA
ggataccaaaatttcacctgccagtggagagagagacctgggagcagtggtgggataactactggcaagtgacatggatc

SEQ ID NO: 363 - DNA, 80 bp, synthetic construct
  misc_feature 1..80: note = Synthetic: >NC_001722.1-cand-4120-4199
  source 1..80: mol_type = other DNA
ggagcagtggtgggataactactggcaagtgacatggatcccagagtgggactttgtatctaccccaccactggtcaggt

SEQ ID NO: 364 - DNA, 80 bp, synthetic construct
  misc_feature 1..80: note = Synthetic: >NC_001722.1-cand-4200-4279
  source 1..80: mol_type = other DNA
taacatttaacctagtaggagatcctataccaggcgcagagaccttctacacagatggatcatgcaatagacagtcaaaa

SEQ ID NO: 365 - DNA, 80 bp, synthetic construct
  misc_feature 1..80: note = Synthetic: >NC_001722.1-cand-4280-4359
  source 1..80: mol_type = other DNA
gagggaaaagcaggatatgtaacagatagaggaaaagacaaagtaaaagtattagaacaaactaccaatcagcaggcaga

SEQ ID NO: 366 - DNA, 80 bp, synthetic construct
  misc_feature 1..80: note = Synthetic: >NC_001722.1-cand-4350-4429
  source 1..80: mol_type = other DNA
agcaggcagaattagaagtctttcggatggcactggcagactcaggcccaaaggttaatatcatagtagattcacagtat

SEQ ID NO: 367 - DNA, 80 bp, synthetic construct
  misc_feature 1..80: note = Synthetic: >NC_001722.1-cand-4440-4519
  source 1..80: mol_type = other DNA
tagtagcaggccagccaacagagtcagaaaatagaatagtgaaccagatcatagaagaaatgataaagaaggaagcagtc

SEQ ID NO: 368 - DNA, 80 bp, synthetic construct
  misc_feature 1..80: note = Synthetic: >NC_001722.1-cand-4520-4599
  source 1..80: mol_type = other DNA
tatgttgcatgggtcccagcccataaaggcataggaggaaaccaggaagtagaccatttagtaagtcaaggcatcagaca

SEQ ID NO: 369 - DNA, 80 bp, synthetic construct
  misc_feature 1..80: note = Synthetic: >NC_001906.3-cand-6890-6969
  source 1..80: mol_type = other DNA
ccatcgaactgtacaataataacacgcatgacctagttggtgatgtcaagcttgcaggtgtggtgatggcagggattgca

SEQ ID NO: 370 - DNA, 80 bp, synthetic construct
  misc_feature 1..80: note = Synthetic: >NC_001906.3-cand-6970-7049
  source 1..80: mol_type = other DNA
atcgggatagctactgctgcacaaatcacagcaggtgttgccttatatgaggcaatgaagaacgcagacaatatcaataa

SEQ ID NO: 371 - DNA, 80 bp, synthetic construct
  misc_feature 1..80: note = Synthetic: >NC_001906.3-cand-7050-7129
  source 1..80: mol_type = other DNA
actcaagagcagcatagagtctacaaatgaggctgttgtcaaattacaggaaacagctgagaaaacagtctacgtcctta

SEQ ID NO: 372 - DNA, 80 bp, synthetic construct
  misc_feature 1..80: note = Synthetic: >NC_001906.3-cand-7130-7209
  source 1..80: mol_type = other DNA
ctgctcttcaagattacatcaacactaaccttgttcctacaatagatcaaattagctgcaagcaaacagagctcgcatta

SEQ ID NO: 373 - DNA, 80 bp, synthetic construct
  misc_feature 1..80: note = Synthetic: >NC_001906.3-cand-7210-7289
  source 1..80: mol_type = other DNA
gacttggcgttgtctaagtatctgtctgatctgctctttgttttcggacctaacttacaggatccagtctctaattccat

SEQ ID NO: 374 - DNA, 80 bp, synthetic construct
  misc_feature 1..80: note = Synthetic: >NC_001906.3-cand-7240-7319
  source 1..80: mol_type = other DNA
ctgctctttgttttcggacctaacttacaggatccagtctctaattccatgactatccaagcaatatctcaagcatttgg

SEQ ID NO: 375 - DNA, 80 bp, synthetic construct
  misc_feature 1..80: note = Synthetic: >NC_001906.3-cand-7360-7439
  source 1..80: mol_type = other DNA
accgaggacttcgacgaccttttagaaagtgatagcatagcaggccagatagtctatgtagatctcagtagctattacat

SEQ ID NO: 376 - DNA, 80 bp, synthetic construct
  misc_feature 1..80: note = Synthetic: >NC_001906.3-cand-7440-7519
  source 1..80: mol_type = other DNA
aatagtaagggtgtattttcccatactaacagagatccaacaggcttatgtgcaggagttgcttccagtgagttttaata

SEQ ID NO: 377 - DNA, 80 bp, synthetic construct
  misc_feature 1..80: note = Synthetic: >NC_001906.3-cand-7520-7599
  source 1..80: mol_type = other DNA
acgataattcagaatggatcagcattgtcccgaatttcgtgctgattaggaacacgctgatttcaaatatagaagtcaag

SEQ ID NO: 378 - DNA, 80 bp, synthetic construct
  misc_feature 1..80: note = Synthetic: >NC_001906.3-cand-7600-7679
  source 1..80: mol_type = other DNA
tactgcttaatcaccaagaaaagtgtgatttgtaatcaggactatgctacacccatgacggctagcgtgagagaatgctt

SEQ ID NO: 379 - DNA, 80 bp, synthetic construct
  misc_feature 1..80: note = Synthetic: >NC_001906.3-cand-7680-7759
  source 1..80: mol_type = other DNA
gacaggatccacagataagtgcccaagggagttagtagtctcatcccatgttccaagatttgccctctcaggaggagtct

SEQ ID NO: 380 - DNA, 80 bp, synthetic construct
  misc_feature 1..80: note = Synthetic: >NC_001906.3-cand-7740-7819
  source 1..80: mol_type = other DNA
tgccctctcaggaggagtcttgtttgcaaattgtataagtgtgacatgtcagtgtcagactactgggagggcaatatctc

SEQ ID NO: 381 - DNA, 80 bp, synthetic construct
  misc_feature 1..80: note = Synthetic: >NC_001906.3-cand-7840-7919
  source 1..80: mol_type = other DNA
ctgatgattgacaatactacctgcacaacagttgttctaggaaacataatcataagccttggaaaatatttgggatcaat

SEQ ID NO: 382 - DNA, 80 bp, synthetic construct
  misc_feature 1..80: note = Synthetic: >NC_001906.3-cand-7920-7999
  source 1..80: mol_type = other DNA
aaattacaattctgagagcattgctgttgggccaccagtctatacagacaaagttgatatctcaagtcagatatctagta

SEQ ID NO: 383 - DNA, 80 bp, synthetic construct
  misc_feature 1..80: note = Synthetic: >NC_001906.3-cand-8000-8079
  source 1..80: mol_type = other DNA
tgaatcaatcactacaacaatctaaggattacattaaagaagctcaaaagatcttggacactgtgaatccgtcgttgata

SEQ ID NO: 384 - DNA, 80 bp, synthetic construct
  misc_feature 1..80: note = Synthetic: >NC_001906.3-cand-8080-8159
  source 1..80: mol_type = other DNA
agtatgctatcaatgatcatcctttatgttttgtccattgcagcactgtgcattggtctgatcactttcataagctttgt

SEQ ID NO: 385 - DNA, 80 bp, synthetic construct
  misc_feature 1..80: note = Synthetic: >NC_002204.1-cand-1060-1139
  source 1..80: mol_type = other DNA
gctagattgggaaaagggttcatgataacaagtaaaacaaaaagactaaaagctcaaataccttgtcccgatctgtttaa

SEQ ID NO: 386 - DNA, 80 bp, synthetic construct
  misc_feature 1..80: note = Synthetic: >NC_002204.1-cand-1150-1229
  source 1..80: mol_type = other DNA
gaaagatataatgaagaaacaagggcaaaactgaaaaagctaaaacctttcttcaatgaagaaggaacggcatctctttc

SEQ ID NO: 387 - DNA, 80 bp, synthetic construct
  misc_feature 1..80: note = Synthetic: >NC_002204.1-cand-1230-1309
  source 1..80: mol_type = other DNA
gccaggaatgatgatgggaatgtttaatatgctatctacagtattaggagtagccgcactagggataaaaaacattggaa

SEQ ID NO: 388 - DNA, 80 bp, synthetic construct
  misc_feature 1..80: note = Synthetic: >NC_002204.1-cand-1320-1399
  source 1..80: mol_type = other DNA
cttatgggatggactgcagtcttcggatgattttgctctgtttgttaatgcaaaagatgaagagacatgtatggaaggaa

SEQ ID NO: 389 - DNA, 80 bp, synthetic construct
  misc_feature 1..80: note = Synthetic: >NC_002204.1-cand-1400-1479
  source 1..80: mol_type = other DNA
taaacgatttttaccgaacatgtaagctattgggaataaacatgagcaaaaagaaaagttactgtaatgaaactgggatg

SEQ ID NO: 390 - DNA, 80 bp, synthetic construct
  misc_feature 1..80: note = Synthetic: >NC_002204.1-cand-1480-1559
  source 1..80: mol_type = other DNA
tttgaatttaccagcatgttttacagagatggatttgtatctaattttgcaatggaactcccttcatttggagtcgctgg

SEQ ID NO: 391 - DNA, 80 bp, synthetic construct
  misc_feature 1..80: note = Synthetic: >NC_002204.1-cand-1560-1639
  source 1..80: mol_type = other DNA
agtgaatgaatcagcagacatggcaataggaatgacaataataaagaacaatatgatcaacaatgggatgggcccagcaa

SEQ ID NO: 392 - DNA, 80 bp, synthetic construct
  misc_feature 1..80: note = Synthetic: >NC_002204.1-cand-1620-1699
  source 1..80: mol_type = other DNA
caatgggatgggcccagcaacggcacaaacagccatacaattattcatagctgactatagatacacctacaaatgccaca

SEQ ID NO: 393 - DNA, 80 bp, synthetic construct
  misc_feature 1..80: note = Synthetic: >NC_002204.1-cand-1720-1799
  source 1..80: mol_type = other DNA
gggaagagaatgaaaattataaaggagctatgggaaaacactaaaggaagagatggtctattagtagcagatggtgggcc

SEQ ID NO: 394 - DNA, 80 bp, synthetic construct
  misc_feature 1..80: note = Synthetic: >NC_002204.1-cand-1790-1869
  source 1..80: mol_type = other DNA
atggtgggcctaatctttacaatttgagaaacctgcatattccagaaataatattaaaatacaacataatggaccctgag

SEQ ID NO: 395 - DNA, 80 bp, synthetic construct
  misc_feature 1..80: note = Synthetic: >NC_002204.1-cand-1870-1949
  source 1..80: mol_type = other DNA
tacaaaggacggttactgcatcctcaaaatccctttgtaggacatttgtctattgagggtatcaaagaagcagatataac

SEQ ID NO: 396 - DNA, 80 bp, synthetic construct
  misc_feature 1..80: note = Synthetic: >NC_002204.1-cand-1950-2029
  source 1..80: mol_type = other DNA
acctgcacatggcccaataaagaaaatggactacgatgcggtatctggaactcatagttggagaaccaaaaggaacagat

SEQ ID NO: 397 - DNA, 80 bp, synthetic construct
  misc_feature 1..80: note = Synthetic: >NC_002204.1-cand-2030-2109
  source 1..80: mol_type = other DNA
ctatactaaacactgatcagaggaacatgattcttgaggaacaatgctacgctaagtgttgcaacctttttgaggcttgc

SEQ ID NO: 398 - DNA, 80 bp, synthetic construct
  misc_feature 1..80: note = Synthetic: >NC_002204.1-cand-2110-2189
  source 1..80: mol_type = other DNA
tttaacagtgcgtcatacaggaaaccagtaggccagcacagcatgcttgaagctatggcccacagattaagaatggatgc

SEQ ID NO: 399 - DNA, 80 bp, synthetic construct
  misc_feature 1..80: note = Synthetic: >NC_002204.1-cand-2190-2269
  source 1..80: mol_type = other DNA
acgactggactatgagtcaggaaggatgtcaaaagaggatttcgaaaaagcaatggctcaccttggtgagattgggtaca

SEQ ID NO: 400 - DNA, 80 bp, synthetic construct
  misc_feature 1..80: note = Synthetic: >NC_002204.1-cand-2210-2289
  source 1..80: mol_type = other DNA
gaaggatgtcaaaagaggatttcgaaaaagcaatggctcaccttggtgagattgggtacatgtaagctccggaaatgtct

SEQ ID NO: 401 - DNA, 80 bp, synthetic construct
  misc_feature 1..80: note = Synthetic: >NC_002206.1-cand-1620-1699
  source 1..80: mol_type = other DNA
gctccctatttgtgagtggaagagaaaaacctgtgtacctatattgccgagtgaatggtacaaacaaaatccaaatgaaa

SEQ ID NO: 402 - DNA, 80 bp, synthetic construct
  misc_feature 1..80: note = Synthetic: >NC_002206.1-cand-1740-1819
  source 1..80: mol_type = other DNA
aacaaatggaggcaattgttgatcaagaatcatcgatacaagggtatgatatgaccaaagcttgtttcaagggagacaga

SEQ ID NO: 403 - DNA, 80 bp, synthetic construct
  misc_feature 1..80: note = Synthetic: >NC_002206.1-cand-1820-1899
  source 1..80: mol_type = other DNA
gtgaataatcccaaaactttcagtattgggactcaggaaggcaaactagtaaaagggtcctttgggaaagcactaagagt

SEQ ID NO: 404 - DNA, 80 bp, synthetic construct
  misc_feature 1..80: note = Synthetic: >NC_002206.1-cand-1870-1949
  source 1..80: mol_type = other DNA
aaaagggtcctttgggaaagcactaagagtaatattcaccaaatgtttgatgcattatgtatttggaaatgctcaattgg

SEQ ID NO: 405 - DNA, 80 bp, synthetic construct
  misc_feature 1..80: note = Synthetic: >NC_002206.1-cand-1980-2059
  source 1..80: mol_type = other DNA
tactgttaattcaggcattaaaagacaggaagggcccttgggtatttgacttggagggaatgtactttggagtagaggaa

SEQ ID NO: 406 - DNA, 80 bp, synthetic construct
  misc_feature 1..80: note = Synthetic: >NC_002206.1-cand-2030-2109
  source 1..80: mol_type = other DNA
ttggagggaatgtactttggagtagaggaatgtattagtaacaatccttgggtaatacagagtgcatactggtttaatga

SEQ ID NO: 407 - DNA, 80 bp, synthetic construct
  misc_feature 1..80: note = Synthetic: >NC_002206.1-cand-2110-2189
  source 1..80: mol_type = other DNA
atggttgggcattgaaaaagaaggaagtaaagtgttagaatcaatagatgaaataatggatgaatgaacgaagggcatag

SEQ ID NO: 408 - DNA, 80 bp, synthetic construct
  misc_feature 1..80: note = Synthetic: >NC_002207.1-cand-0-79
  source 1..80: mol_type = other DNA
gaagcgttgcattttctaatatccacaaaatgaaggcaataattgtactactcatggtagtaacatccaatgcagatcga

SEQ ID NO: 409 - DNA, 80 bp, synthetic construct
  misc_feature 1..80: note = Synthetic: >NC_002207.1-cand-60-139
  source 1..80: mol_type = other DNA
taacatccaatgcagatcgaatctgcactgggataacatcgtcaaactcacctcatgtggttaaaactgccactcaaggg

SEQ ID NO: 410 - DNA, 80 bp, synthetic construct
  misc_feature 1..80: note = Synthetic: >NC_002207.1-cand-160-239
  source 1..80: mol_type = other DNA
gataccactaacaacaacacctaccaaatctcattttgcaaatctcaaaggaacacagaccagaggaaaactatgcccaa

SEQ ID NO: 411 - DNA, 80 bp, synthetic construct
  misc_feature 1..80: note = Synthetic: >NC_002207.1-cand-210-289
  source 1..80: mol_type = other DNA
gaacacagaccagaggaaaactatgcccaaactgttttaactgcacagatctggacgtggccctaggcagaccaaaatgc

SEQ ID NO: 412 - DNA, 80 bp, synthetic construct
  misc_feature 1..80: note = Synthetic: >NC_002207.1-cand-320-399
  source 1..80: mol_type = other DNA
atactccatgaagtcaaacctgctacatctggatgctttcctataatgcacgacagaacaaaaatcagacaactacctaa

SEQ ID NO: 413 - DNA, 80 bp, synthetic construct
  misc_feature 1..80: note = Synthetic: >NC_002207.1-cand-400-479
  source 1..80: mol_type = other DNA
tcttctcagaggatatgaaaacatcaggttatcaaccagtaatgttatcaatacagagacggcaccaggaggaccctaca

SEQ ID NO: 414 - DNA, 80 bp, synthetic construct
  misc_feature 1..80: note = Synthetic: >NC_002207.1-cand-490-569
  source 1..80: mol_type = other DNA
ctcaggatcttgccctaacgttgctaatgggaacggcttcttcaacacaatggcttgggttatcccaaaagacaacaaca

SEQ ID NO: 415 - DNA, 80 bp, synthetic construct
  misc_feature 1..80: note = Synthetic: >NC_002207.1-cand-540-619
  source 1..80: mol_type = other DNA
tggcttgggttatcccaaaagacaacaacaagacagcaataaatccagtaacagtagaagtaccatacatttgttcagaa

SEQ ID NO: 416 - DNA, 80 bp, synthetic construct
  misc_feature 1..80: note = Synthetic: >NC_002207.1-cand-660-739
  source 1..80: mol_type = other DNA
acaaaacccaaatggaaagactctatggagactcaaatcctcaaaagttcacctcatctgccaatggagtaaccacacat

SEQ ID NO: 417 - DNA, 80 bp, synthetic construct
  misc_feature 1..80: note = Synthetic: >NC_002208.1-cand-180-259
  source 1..80: mol_type = other DNA
acaaacgaacccgaaatccatctccagaaaggacaaccacaagcagtgaaaccgatatcggaaggaaaatccaaaagaaa

SEQ ID NO: 418 - DNA, 80 bp, synthetic construct
  misc_feature 1..80: note = Synthetic: >NC_002208.1-cand-250-329
  source 1..80: mol_type = other DNA
ccaaaagaaacaaaccccaacagagataaagaagagcgtctacaaaatggtggtaaaactgggtgaattctacaaccaga

SEQ ID NO: 419 - DNA, 80 bp, synthetic construct
  misc_feature 1..80: note = Synthetic: >NC_002208.1-cand-330-409
  source 1..80: mol_type = other DNA
tgatggtcaaagctggacttaatgatgacatggaaaggaatctaattcaaaatgcacaagctgtggagagaatcctattg

SEQ ID NO: 420 - DNA, 80 bp, synthetic construct
  misc_feature 1..80: note = Synthetic: >NC_002208.1-cand-410-489
  source 1..80: mol_type = other DNA
gctgcaactgatgacaagaaaactgaataccaaaagaaaaggaatgccagagatgtcaaagaagggaaggaagaaataga

SEQ ID NO: 421 - DNA, 80 bp, synthetic construct
  misc_feature 1..80: note = Synthetic: >NC_002208.1-cand-490-569
  source 1..80: mol_type = other DNA
ccacaacaagacaggaggcaccttttataagatggtaagagatgataaaaccatctacttcagccctataaaaattacct

SEQ ID NO: 422 - DNA, 80 bp, synthetic construct
  misc_feature 1..80: note = Synthetic: >NC_002208.1-cand-620-699
  source 1..80: mol_type = other DNA
ggtttcagtggactaaatcacattatgattggacattcacagatgaacgatgtctgtttccaaagatcaaagggactgaa

SEQ ID NO: 423 - DNA, 80 bp, synthetic construct
  misc_feature 1..80: note = Synthetic: >NC_002208.1-cand-660-739
  source 1..80: mol_type = other DNA
agatgaacgatgtctgtttccaaagatcaaagggactgaaaagggttggacttgacccttcattaatcagtacttttgcc

SEQ ID NO: 424 - DNA, 80 bp, synthetic construct
  misc_feature 1..80: note = Synthetic: >NC_002208.1-cand-750-829
  source 1..80: mol_type = other DNA
tacccagaagatcaggtacaactggtgttgcaatcaaaggaggtggaactttagtggatgaagccatccgatttatagga

SEQ ID NO: 425 - DNA, 80 bp, synthetic construct
  misc_feature 1..80: note = Synthetic: >NC_002208.1-cand-840-919
  source 1..80: mol_type = other DNA
cagacagagggctactgagagacatcaaggccaagacggcctatgaaaagattcttctgaatctgaaaaacaagtgctct

SEQ ID NO: 426 - DNA, 80 bp, synthetic construct
  misc_feature 1..80: note = Synthetic: >NC_002208.1-cand-930-1009
  source 1..80: mol_type = other DNA
aaaaggctctagttgatcaagtgatcggaagtaggaacccagggattgcagacatagaagacctaactctgcttgccaga

SEQ ID NO: 427 - DNA, 80 bp, synthetic construct
  misc_feature 1..80: note = Synthetic: >NC_002208.1-cand-1020-1099
  source 1..80: mol_type = other DNA
ttgtcagaccctctgtagcgagcaaagtggtgcttcccataagcatttatgctaaaatacctcaactaggattcaatacc

SEQ ID NO: 428 - DNA, 80 bp, synthetic construct
  misc_feature 1..80: note = Synthetic: >NC_002208.1-cand-1100-1179
  source 1..80: mol_type = other DNA
gaagaatactctatggttgggtatgaagccatggctctttataatatggcaacacctgtttccatattaagaatgggaga

SEQ ID NO: 429 - DNA, 80 bp, synthetic construct
  misc_feature 1..80: note = Synthetic: >NC_002208.1-cand-1180-1259
  source 1..80: mol_type = other DNA
tgacgcaaaagataaatctcaactattcttcatgtcgtgcttcggagctgcctatgaagatctaagagtgttatctgcac

SEQ ID NO: 430 - DNA, 80 bp, synthetic construct
  misc_feature 1..80: note = Synthetic: >NC_002208.1-cand-1260-1339
  source 1..80: mol_type = other DNA
taacgggcaccgaatttaagcctagatcagcactaaaatgcaagggtttccatgtcccggctaaggagcaagtagaagga

SEQ ID NO: 431 - DNA, 80 bp, synthetic construct
  misc_feature 1..80: note = Synthetic: >NC_002208.1-cand-1360-1439
  source 1..80: mol_type = other DNA
catcaagcttcagttctgggccccaatgaccagatctggagggaatgaagtaagtggagaaggagggtctggtcaaataa

SEQ ID NO: 432 - DNA, 80 bp, synthetic construct
  misc_feature 1..80: note = Synthetic: >NC_002208.1-cand-1450-1529
  source 1..80: mol_type = other DNA
tgtgtttgcagtagaaagacctattgctctaagcaagcaagctgtaagaagaatgctgtcaatgaacgttgaaggacgtg

SEQ ID NO: 433 - DNA, 80 bp, synthetic construct
  misc_feature 1..80: note = Synthetic: >NC_002210.1-cand-770-849
  source 1..80: mol_type = other DNA
tcgaaccacttcagattctttcaatttgttctttcattttatcagctctccatttcatggcttggacaatagggcatttg

SEQ ID NO: 434 - DNA, 80 bp, synthetic construct
  misc_feature 1..80: note = Synthetic: >NC_002210.1-cand-870-949
  source 1..80: mol_type = other DNA
aaacttgaaaatacaaataaggaatccaaataaggaggcaataaacagagaggtgtcaattctgagacacaattaccaaa

SEQ ID NO: 435 - DNA, 80 bp, synthetic construct
  misc_feature 1..80: note = Synthetic: >NC_002210.1-cand-950-1029
  source 1..80: mol_type = other DNA
aggaaatccaagccaaagaaacaatgaagaaaatactctctgacaacatggaagtattgggtgaccacatagtagttgaa

SEQ ID NO: 436 - DNA, 80 bp, synthetic construct
  misc_feature 1..80: note = Synthetic: >NC_002210.1-cand-1010-1089
  source 1..80: mol_type = other DNA
gtgaccacatagtagttgaagggctttcaactgatgagataataaaaatgggtgaaacagttttggaggtggaagaattg

SEQ ID NO: 437 - DNA, 80 bp, synthetic construct
  misc_feature 1..80: note = Synthetic: >NC_002210.1-cand-1100-1179
  source 1..80: mol_type = other DNA
aattttcactgtatttcttactatgcatttaagcaaattgtaatcaatgtcagtgaataaaactggaaaaagtgcgttgt

SEQ ID NO: 438 - DNA, 80 bp, synthetic construct
  misc_feature 1..80: note = Synthetic: >NC_002211.1-cand-0-79
  source 1..80: mol_type = other DNA
gaagcagaggatttatttagtcactggcaaacggaaagatggcggacaacatgaccacaacacaaattgaggtgggtccg

SEQ ID NO: 439 - DNA, 80 bp, synthetic construct
  misc_feature 1..80: note = Synthetic: >NC_002211.1-cand-90-169
  source 1..80: mol_type = other DNA
atgccactataaactttgaagcaggaattctggagtgctatgaaaggttttcatggcaaagagcccttgactatcctggt

SEQ ID NO: 440 - DNA, 80 bp, synthetic construct
  misc_feature 1..80: note = Synthetic: >NC_002211.1-cand-170-249
  source 1..80: mol_type = other DNA
caagaccgcctacacagactaaaacgaaaattagaatcaagaataaagactcacaacaagagtgagcctgagaataaaag

SEQ ID NO: 441 - DNA, 80 bp, synthetic construct
  misc_feature 1..80: note = Synthetic: >NC_002211.1-cand-280-359
  source 1..80: mol_type = other DNA
ggtaaaaatgatgaaagtgcttctgtttatggatccctctgctggaattgaagggtttgagccatactgtgtgaaaaatc

SEQ ID NO: 442 - DNA, 80 bp, synthetic construct
  misc_feature 1..80: note = Synthetic: >NC_002211.1-cand-350-429
  source 1..80: mol_type = other DNA
gtgaaaaatccctcaactagcaaatgtccaaattacgattggaccgattaccctccaaccccaggaaagtaccttgatga

SEQ ID NO: 443 - DNA, 80 bp, synthetic construct
  misc_feature 1..80: note = Synthetic: >NC_002211.1-cand-440-519
  source 1..80: mol_type = other DNA
gagccggaaaatgtcgatcacccaattgaggtagtattaagggacatgaacaataaagatgcacgacaaaagataaagga

SEQ ID NO: 444 - DNA, 80 bp, synthetic construct
  misc_feature 1..80: note = Synthetic: >NC_002211.1-cand-550-629
  source 1..80: mol_type = other DNA
ccgtttgacaataaaaagggatatacgtaatgtgttgtccttgagagtgttggtgaacggaaccttcctcaagcacccta

SEQ ID NO: 445 - DNA, 80 bp, synthetic construct
  misc_feature 1..80: note = Synthetic: >NC_002211.1-cand-620-699
  source 1..80: mol_type = other DNA
aagcaccctaatggagacaagtccttatcaactcttcatagattgaatgcatatgaccagaatggagggcttgttgctaa

SEQ ID NO: 446 - DNA, 80 bp, synthetic construct
  misc_feature 1..80: note = Synthetic: >NC_002211.1-cand-690-769
  source 1..80: mol_type = other DNA
ttgttgctaaacttgttgctactgatgatcggacagtggaggatgaaaaagatggccatcggatcctcaactcactcttc

SEQ ID NO: 447 - DNA, 80 bp, synthetic construct
  misc_feature 1..80: note = Synthetic: >NC_002211.1-cand-780-859
  source 1..80: mol_type = other DNA
atgaaggacattcaaagccaattcgagcagctgaaactgcggtgggagtcttatcccaatttggtcaagagcaccgatta

SEQ ID NO: 448 - DNA, 80 bp, synthetic construct
  misc_feature 1..80: note = Synthetic: >NC_002211.1-cand-870-949
  source 1..80: mol_type = other DNA
agggagacaattagactggccacggaagaactttatctcttgagtaaaagaattgatgatagtatattgttccacaaaac

SEQ ID NO: 449 - DNA, 80 bp, synthetic construct
  misc_feature 1..80: note = Synthetic: >NC_002728.1-cand-14630-14709
  source 1..80: mol_type = other DNA
tcacagcaaggactatactgaggaactcaccgaacccaatgctaaaaggtttatttcatgacaaatcttttgatgaagat

SEQ ID NO: 450 - DNA, 80 bp, synthetic construct
  misc_feature 1..80: note = Synthetic: >NC_002728.1-cand-14710-14789
  source 1..80: mol_type = other DNA
cttgaactagctagcttcttaatggacaggagggttatattacctagagccgctcatgagatactggataattcattgac

SEQ ID NO: 451 - DNA, 80 bp, synthetic construct
  misc_feature 1..80: note = Synthetic: >NC_002728.1-cand-14780-14859
  source 1..80: mol_type = other DNA
attcattgacaggtgccagagaggaaattgctggtttattagatacaactaaaggcttgatcagatcagggctaagaaag

SEQ ID NO: 452 - DNA, 80 bp, synthetic construct
  misc_feature 1..80: note = Synthetic: >NC_002728.1-cand-14860-14939
  source 1..80: mol_type = other DNA
agtggacttcagccaaagttagtttctagattatctcatcatgattataatcaatttttaatactgaacaaacttctatc

SEQ ID NO: 453 - DNA, 80 bp, synthetic construct
  misc_feature 1..80: note = Synthetic: >NC_002728.1-cand-14940-15019
  source 1..80: mol_type = other DNA
aaacagaagacaaaatgacttgatatcatcaaatacttgctcagttgacttggcacgagcattgagatctcacatgtgga

SEQ ID NO: 454 - DNA, 80 bp, synthetic construct
  misc_feature 1..80: note = Synthetic: >NC_002728.1-cand-15020-15099
  source 1..80: mol_type = other DNA
gggaattagcgttaggtagagtaatatacggtcttgaggtaccagatgcacttgaggctatggtgggaaggtatataaca

SEQ ID NO: 455 - DNA, 80 bp, synthetic construct
  misc_feature 1..80: note = Synthetic: >NC_002728.1-cand-15090-15169
  source 1..80: mol_type = other DNA
gtatataacagggagcttagagtgccaaatttgtgagcagggaaacacgatgtatgggtggttctttgtacctagggatt

SEQ ID NO: 456 - DNA, 80 bp, synthetic construct
  misc_feature 1..80: note = Synthetic: >NC_002728.1-cand-15170-15249
  source 1..80: mol_type = other DNA
cccaattggatcaggtagatagagagcactcatcaataagagtaccttatgtaggatcaagtacggatgaaagatcggat

SEQ ID NO: 457 - DNA, 80 bp, synthetic construct
  misc_feature 1..80: note = Synthetic: >NC_002728.1-cand-15250-15329
  source 1..80: mol_type = other DNA
atcaaactagggaatgtcaaaagaccaactaaggccttgcgttctgctatcagaattgcgacagtatatacttgggccta

SEQ ID NO: 458 - DNA, 80 bp, synthetic construct
  misc_feature 1..80: note = Synthetic: >NC_002728.1-cand-15340-15419
  source 1..80: mol_type = other DNA
gaagagtgttggtatgaagcttggtacctagcgtctcagagggtaaacatagacttagatgtattgaaagctataacccc

SEQ ID NO: 459 - DNA, 80 bp, synthetic construct
  misc_feature 1..80: note = Synthetic: >NC_002728.1-cand-15410-15489
  source 1..80: mol_type = other DNA
ctataaccccagtttccacttcaaacaatttatcccatagattgagagataaatccacacaatttaagtttgcagggagt

SEQ ID NO: 460 - DNA, 80 bp, synthetic construct
  misc_feature 1..80: note = Synthetic: >NC_002728.1-cand-15490-15569
  source 1..80: mol_type = other DNA
gtactcaacagagtttctagatatgttaacataagcaatgacaatctagatttcagaattgagggagaaaaggtagatac

SEQ ID NO: 461 - DNA, 80 bp, synthetic construct
  misc_feature 1..80: note = Synthetic: >NC_002728.1-cand-15570-15649
  source 1..80: mol_type = other DNA
gaatcttatttatcaacaagcaatgctattagggttatcggtattggaaggtaaattcagattgagattagaaactgatg

SEQ ID NO: 462 - DNA, 80 bp, synthetic construct
  misc_feature 1..80: note = Synthetic: >NC_002728.1-cand-15650-15729
  source 1..80: mol_type = other DNA
attacaacgggatatatcacttacacgtaaaggataattgttgtgtcaaagaagtggctgatgtaggccaagtagacgct

SEQ ID NO: 463 - DNA, 80 bp, synthetic construct
  misc_feature 1..80: note = Synthetic: >NC_002728.1-cand-15730-15809
  source 1..80: mol_type = other DNA
gagttgcctatcccagaatatactgaagtggataacaatcatcttatatatgatccagaccccgtttcagaaatagattg

SEQ ID NO: 464 - DNA, 80 bp, synthetic construct
  misc_feature 1..80: note = Synthetic: >NC_002728.1-cand-15810-15889
  source 1..80: mol_type = other DNA
cagccgtctttctaatcaggagtccaaatcaagagaattagactttcctttatggtcaactgaggaacttcatgatgtcc

SEQ ID NO: 465 - DNA, 80 bp, synthetic construct
  misc_feature 1..80: note = Synthetic: >NC_003310.1-cand-810-889
  source 1..80: mol_type = other DNA
tctgaatcgttcgattaacccaactcatccattttcagatgaatagagttatcgattcagacacatgctttgagttttgt

SEQ ID NO: 466 - DNA, 80 bp, synthetic construct
  misc_feature 1..80: note = Synthetic: >NC_003310.1-cand-890-969
  source 1..80: mol_type = other DNA
tgaatcgatgagtgaagtatcatcggttgcaccttcagatgccgatccgtcgacatacttgaatccatccttgacttcaa

SEQ ID NO: 467 - DNA, 80 bp, synthetic construct
  misc_feature 1..80: note = Synthetic: >NC_003310.1-cand-970-1049
  source 1..80: mol_type = other DNA
gttcagatgattcctcacacatgtctccgatacgtacgctaaactctaggttcttaacacattttgtatcaacgatcgtt

SEQ ID NO: 468 - DNA, 80 bp, synthetic construct
  misc_feature 1..80: note = Synthetic: >NC_003310.1-cand-1050-1129
  source 1..80: mol_type = other DNA
gaaccgatgatatctttgtaactcactttcttatgtgagatgttagacccaagtactggatgggtcttgatgtcgctgtc

SEQ ID NO: 469 - DNA, 80 bp, synthetic construct
  misc_feature 1..80: note = Synthetic: >NC_003310.1-cand-1130-1209
  source 1..80: mol_type = other DNA
tttctcttcttcgctacatctgatgtcgatagacatctcacagtctttgatcatagccagagcttcttcacgcgtgatcg

SEQ ID NO: 470 - DNA, 80 bp, synthetic construct
  misc_feature 1..80: note = Synthetic: >NC_003310.1-cand-1220-1299
  source 1..80: mol_type = other DNA
cttaccttgtcctggtgacacgctggacaatctagtattcacagtgtttccatcagaggattcggagatggatgaaatct

SEQ ID NO: 471 - DNA, 80 bp, synthetic construct
  misc_feature 1..80: note = Synthetic: >NC_003310.1-cand-1300-1379
  source 1..80: mol_type = other DNA
ttgggcatttggtgaatccaaagttcatgttaagacccgcgccgacgatagtgtaataagtggtgggatctccttttaca

SEQ ID NO: 472 - DNA, 80 bp, synthetic construct
  misc_feature 1..80: note = Synthetic: >NC_003310.1-cand-1380-1459
  source 1..80: mol_type = other DNA
acttcttcggatacctcatcatcttcggtctctgtaacttccgttacggattgacaaatcttatcattggtcggtgtttg

SEQ ID NO: 473 - DNA, 80 bp, synthetic construct
  misc_feature 1..80: note = Synthetic: >NC_003310.1-cand-1540-1619
  source 1..80: mol_type = other DNA
gttgaagactagtaggcatagcagctgccactaggcacatgcatgccaggacaatatattgtttcatgattgctattgat

SEQ ID NO: 474 - DNA, 80 bp, synthetic construct
  misc_feature 1..80: note = Synthetic: >NC_003310.1-cand-1700-1779
  source 1..80: mol_type = other DNA
attgtatttattatttatgggtaaaaaaaaacttactataagtgggtgggattctgggaattagtgatcagtttatgtat

SEQ ID NO: 475 - DNA, 80 bp, synthetic construct
  misc_feature 1..80: note = Synthetic: >NC_003310.1-cand-1780-1859
  source 1..80: mol_type = other DNA
atcgcaactagcgggcatatggctattgacatcgagaacattacccatatgataagagattgtatccgtttcgtagtctt

SEQ ID NO: 476 - DNA, 80 bp, synthetic construct
  misc_feature 1..80: note = Synthetic: >NC_003310.1-cand-1860-1939
  source 1..80: mol_type = other DNA
gagtattggtattactatatagtatgtagatgtcgacgctagatagacagtcgcccactagagttaccgtctctgaatgc

SEQ ID NO: 477 - DNA, 80 bp, synthetic construct
  misc_feature 1..80: note = Synthetic: >NC_003310.1-cand-1940-2019
  source 1..80: mol_type = other DNA
ggcatgatagtatcattctttgttttcgttaactgtttggaagatgaatctttgttgttacatttaatctcgaaattcag

SEQ ID NO: 478 - DNA, 80 bp, synthetic construct
  misc_feature 1..80: note = Synthetic: >NC_003310.1-cand-2020-2099
  source 1..80: mol_type = other DNA
agtacatatctttgaagtattctgatatctattttctcctgtaaagaatcctgaagttgctacattattaaggacagaga

SEQ ID NO: 479 - DNA, 80 bp, synthetic construct
  misc_feature 1..80: note = Synthetic: >NC_003310.1-cand-2100-2179
  source 1..80: mol_type = other DNA
agtattctgcacgaaagacgggatcacaatctttatgattcatggtaatagttagttccgacgttgagatggattcgctg

SEQ ID NO: 480 - DNA, 80 bp, synthetic construct
  misc_feature 1..80: note = Synthetic: >NC_003310.1-cand-2200-2279
  source 1..80: mol_type = other DNA
agtacacgatgtgtcgttgactggatacaggttaatttccacatcgatatagttaaatgtattgctggttacgggttcgc

SEQ ID NO: 481 - DNA, 80 bp, synthetic construct
  misc_feature 1..80: note = Synthetic: >NC_003310.1-cand-5440-5519
  source 1..80: mol_type = other DNA
ccttccaccagcatctagttgattgatatcttcaatatatgggatacaaagcttataaatttctaatactgtgggttcat

SEQ ID NO: 482 - DNA, 80 bp, synthetic construct
  misc_feature 1..80: note = Synthetic: >NC_003310.1-cand-5520-5599
  source 1..80: mol_type = other DNA
ctacaaggaatcccctagtatactgaattattttatatagatctaatttaacatcattttcatctgggataccacaattc

SEQ ID NO: 483 - DNA, 80 bp, synthetic construct
  misc_feature 1..80: note = Synthetic: >NC_003310.1-cand-5600-5679
  source 1..80: mol_type = other DNA
aaaataaactcaacaacactactttcctttttacatattcccctaaaataggcattcaagcattctattttatatattac

SEQ ID NO: 484 - DNA, 80 bp, synthetic construct
  misc_feature 1..80: note = Synthetic: >NC_003310.1-cand-5680-5759
  source 1..80: mol_type = other DNA
agccccatgatctaccataaaatcaacaatgtctatttctacatatgcattagatagatagtaaagtaagagatcttgta

SEQ ID NO: 485 - DNA, 80 bp, synthetic construct
  misc_feature 1..80: note = Synthetic: >NC_003310.1-cand-5760-5839
  source 1..80: mol_type = other DNA
cagaattacaattcttaataattatagagaaaatatcttccatataattctttgacactaatgcagatataatatcttta

SEQ ID NO: 486 - DNA, 80 bp, synthetic construct
  misc_feature 1..80: note = Synthetic: >NC_003310.1-cand-5840-5919
  source 1..80: mol_type = other DNA
tatgtaatatatgcaaacagtctatctactatatactgatcaatattatctctatgaatcctaaaataatcatacagaac

SEQ ID NO: 487 - DNA, 80 bp, synthetic construct
  misc_feature 1..80: note = Synthetic: >NC_003310.1-cand-5920-5999
  source 1..80: mol_type = other DNA
atctacaggatcacaaattggttcaaggagaaatctatcaaatattttcctgtcaacaactggttctagaacataacagt

SEQ ID NO: 488 - DNA, 80 bp, synthetic construct
  misc_feature 1..80: note = Synthetic: >NC_003310.1-cand-6000-6079
  source 1..80: mol_type = other DNA
caacacctaatccatgttttttatagtcatctaccaaagataatgaccaaagatcgaggtcgtcgtgaaactgctcatcg

SEQ ID NO: 489 - DNA, 80 bp, synthetic construct
  misc_feature 1..80: note = Synthetic: >NC_003310.1-cand-6080-6159
  source 1..80: mol_type = other DNA
acagccatgaaatctgccgactccatggcgcgaatcgcactgtcttattcgccattgattttcattttttataattatgt

SEQ ID NO: 490 - DNA, 80 bp, synthetic construct
  misc_feature 1..80: note = Synthetic: >NC_003310.1-cand-6160-6239
  source 1..80: mol_type = other DNA
acatgttttccttctattctcaagagtctacaaaaatatattttttttcgatatctaagtactaagtttttttactgttt

SEQ ID NO: 491 - DNA, 80 bp, synthetic construct
  misc_feature 1..80: note = Synthetic: >NC_003310.1-cand-6240-6319
  source 1..80: mol_type = other DNA
ttgttactgtcttccattcttctaactaaagatctgagataaattatacaatcttcgctatcgaaccatttttgtagtct

SEQ ID NO: 492 - DNA, 80 bp, synthetic construct
  misc_feature 1..80: note = Synthetic: >NC_003310.1-cand-6310-6389
  source 1..80: mol_type = other DNA
tttgtagtctaaagcctgaagtaattaaccaactgtttttattagtggcttttttcgatctatcctcgtcctcatcatcc

SEQ ID NO: 493 - DNA, 80 bp, synthetic construct
  misc_feature 1..80: note = Synthetic: >NC_003310.1-cand-6390-6469
  source 1..80: mol_type = other DNA
ttatattattatcattattatcatagtctattaaacacaaatcatctacgtttataacaacattctcattattaattagt

SEQ ID NO: 494 - DNA, 80 bp, synthetic construct
  misc_feature 1..80: note = Synthetic: >NC_003310.1-cand-6470-6549
  source 1..80: mol_type = other DNA
tctgtagtaatatctttaataatttggctatacatctgttcaatactatctattgatgatttcttttttaagacttaaac

SEQ ID NO: 495 - DNA, 80 bp, synthetic construct
  misc_feature 1..80: note = Synthetic: >NC_003310.1-cand-6550-6629
  source 1..80: mol_type = other DNA
tagttatggtaatgacgatgaaatcgagtagtaacttctaataaagacttgatatcattatcatatgtttgatcgtcata

SEQ ID NO: 496 - DNA, 80 bp, synthetic construct
  misc_feature 1..80: note = Synthetic: >NC_003310.1-cand-6620-6699
  source 1..80: mol_type = other DNA
gatcgtcatagttaatagtgtggctaaatggtactgttaataagtttatagacaatatcatagtattttctttccagaat

SEQ ID NO: 497 - DNA, 80 bp, synthetic construct
  misc_feature 1..80: note = Synthetic: >NC_003310.1-cand-10180-10259
  source 1..80: mol_type = other DNA
aatatatggcatagaacacgaagagaaaccggtgcgttagataattgtcctatatgccgtacccgttttagaaaaataac

SEQ ID NO: 498 - DNA, 80 bp, synthetic construct
  misc_feature 1..80: note = Synthetic: >NC_003310.1-cand-10260-10339
  source 1..80: mol_type = other DNA
aatgagcaagttctataagctagttaactaataaataaaaagtttaattatcgacgatatatgtcgttatttttctctca

SEQ ID NO: 499 - DNA, 80 bp, synthetic construct
  misc_feature 1..80: note = Synthetic: >NC_003310.1-cand-10340-10419
  source 1..80: mol_type = other DNA
tatgaaagattaatttgattctaatataatcttcagtattggatgaatctcaattcaaattaattccattagattagatt

SEQ ID NO: 500 - DNA, 80 bp, synthetic construct
  misc_feature 1..80: note = Synthetic: >NC_003310.1-cand-10420-10499
  source 1..80: mol_type = other DNA
agattagattagattagattagattagattagattagattagattagattagattagattagattagattagatcataaa

SEQ ID NO: 501 - DNA, 80 bp, synthetic construct
  misc_feature 1..80: note = Synthetic: >NC_003310.1-cand-10500-10579
  source 1..80: mol_type = other DNA
taaaaatagtagcacgcactacttcagccaaatattcttttttgaaacgccatctagcgtaatgagaacacaagtgaacc

SEQ ID NO: 502 - DNA, 80 bp, synthetic construct
  misc_feature 1..80: note = Synthetic: >NC_003310.1-cand-10740-10819
  source 1..80: mol_type = other DNA
atacatatagctaaacccaggcatacgttccacacatccggaacaatgaaattctccagaagatgttacaatggctagat

SEQ ID NO: 503 - DNA, 80 bp, synthetic construct
  misc_feature 1..80: note = Synthetic: >NC_003310.1-cand-10900-10979
  source 1..80: mol_type = other DNA
ttgccaaaatatcactataaaaaatttatttatcaattttaaaggtataaaaaaatacttattgttgctcgaatattttg

SEQ ID NO: 504 - DNA, 80 bp, synthetic construct
  misc_feature 1..80: note = Synthetic: >NC_003310.1-cand-10980-11059
  source 1..80: mol_type = other DNA
tatttgatggtatacggaagattagaaatgtaggtattatcatcaactgattctatgatggttttatgaattttattatg

SEQ ID NO: 505 - DNA, 80 bp, synthetic construct
  misc_feature 1..80: note = Synthetic: >NC_003310.1-cand-11060-11139
  source 1..80: mol_type = other DNA
cttcactattgcatcggaaataatatcatatgcttccacgtatattttattttgttttgactcataatacgcacgtattt

SEQ ID NO: 506 - DNA, 80 bp, synthetic construct
  misc_feature 1..80: note = Synthetic: >NC_003310.1-cand-11140-11219
  source 1..80: mol_type = other DNA
ctggattattggcatatcgatgaataattttagctccatgctcagtaaatattaatgagaacatagtgttgcctcctacc

SEQ ID NO: 507 - DNA, 80 bp, synthetic construct
  misc_feature 1..80: note = Synthetic: >NC_003310.1-cand-11220-11299
  source 1..80: mol_type = other DNA
attatttttttcatctcattcaattcttgattgcagagatctatataatcattatagcgttgacttatggactctggaat

SEQ ID NO: 508 - DNA, 80 bp, synthetic construct
  misc_feature 1..80: note = Synthetic: >NC_003310.1-cand-11300-11379
  source 1..80: mol_type = other DNA
cttagacgatgtacagtcatctataatcatggtatatttaatacattgttttatagcataggcattatctacgatattag

SEQ ID NO: 509 - DNA, 80 bp, synthetic construct
  misc_feature 1..80: note = Synthetic: >NC_003310.1-cand-11380-11459
  source 1..80: mol_type = other DNA
atacttcactcaatgaatcaatcacacaatctaatgtaggtttatgacataatagcattttcagcagttcaatgtttcta

SEQ ID NO: 510 - DNA, 80 bp, synthetic construct
  misc_feature 1..80: note = Synthetic: >NC_003310.1-cand-11460-11539
  source 1..80: mol_type = other DNA
gattcgttgatggcaatggctatacatgtatatccgttatttgatctaatgttgacatctgaaccggattctagcagtaa

SEQ ID NO: 511 - DNA, 80 bp, synthetic construct
  misc_feature 1..80: note = Synthetic: >NC_003310.1-cand-11540-11619
  source 1..80: mol_type = other DNA
agatactagagattgtttattatatctaacagccttgtgaagaagtgtttctcctcgtttgtcaatcatgttaatgtctt

SEQ ID NO: 512 - DNA, 80 bp, synthetic construct
  misc_feature 1..80: note = Synthetic: >NC_003310.1-cand-11620-11699
  source 1..80: mol_type = other DNA
taagataaggtaggcaaatgtttatagtactaagaattgggcaagtataagacatgtcacaaagaccctttttgtatgta

SEQ ID NO: 513 - DNA, 80 bp, synthetic construct
  misc_feature 1..80: note = Synthetic: >NC_003310.1-cand-122080-122159
  source 1..80: mol_type = other DNA
tctatttccagatgatgattcaccggccactattatcgaacgagtacaacctcatactactattattgacgatacgccac

SEQ ID NO: 514 - DNA, 80 bp, synthetic construct
  misc_feature 1..80: note = Synthetic: >NC_003310.1-cand-122150-122229
  source 1..80: mol_type = other DNA
gatacgccacctcctacttttcgtagagagttattgatatcggaacaacgtcaacaacgagaaaaaagatttaatattac

SEQ ID NO: 515 - DNA, 80 bp, synthetic construct
  misc_feature 1..80: note = Synthetic: >NC_003310.1-cand-122230-122309
  source 1..80: mol_type = other DNA
agtatcaaaaaattctgaagcaataatggaatctagatctatgataacttctatgccaacacaaacaccatccttgggag

SEQ ID NO: 516 - DNA, 80 bp, synthetic construct
  misc_feature 1..80: note = Synthetic: >NC_003310.1-cand-122690-122769
  source 1..80: mol_type = other DNA
accgatatcacttcagaaattatcgatgtggagatcggagatgactgcgatgctgtagcatcaaaactaggaatcggtaa

SEQ ID NO: 517 - DNA, 80 bp, synthetic construct
  misc_feature 1..80: note = Synthetic: >NC_003310.1-cand-123170-123249
  source 1..80: mol_type = other DNA
atgtagaagacgaggattttgattttggtttacatgtaatacattttgaactctttgattttgtatcacatgcgccggca

SEQ ID NO: 518 - DNA, 80 bp, synthetic construct
  misc_feature 1..80: note = Synthetic: >NC_003310.1-cand-123410-123489
  source 1..80: mol_type = other DNA
tttagaagctaaaaatatttttatttatgcagaagatttaactagattatacaatgaactaatatgatccttttctagat

SEQ ID NO: 519 - DNA, 80 bp, synthetic construct
  misc_feature 1..80: note = Synthetic: >NC_003310.1-cand-123490-123569
  source 1..80: mol_type = other DNA
tatttacgaacttggtatttcttgtttctggaggaggagaatttaaattcggacttggattcggattttgtgggttcttg

SEQ ID NO: 520 - DNA, 80 bp, synthetic construct
  misc_feature 1..80: note = Synthetic: >NC_003310.1-cand-123570-123649
  source 1..80: mol_type = other DNA
atcttattatacagcgtgtataggatggcgacggtaactgctacacaaataccgatcaacagaagaataccaatcattta

SEQ ID NO: 521 - DNA, 80 bp, synthetic construct
  misc_feature 1..80: note = Synthetic: >NC_003310.1-cand-123650-123729
  source 1..80: mol_type = other DNA
ttgacaataacttcactatgatcaagtatgtaataatcatcttttcactaagtaagtagtaataatgattcaacaatgac

SEQ ID NO: 522 - DNA, 80 bp, synthetic construct
  misc_feature 1..80: note = Synthetic: >NC_003310.1-cand-123720-123799
  source 1..80: mol_type = other DNA
caacaatgacaagatatatggacgataataatttagttcatggaaatatcgctatgattggtgtgaatgactccgctaac

SEQ ID NO: 523 - DNA, 80 bp, synthetic construct
  misc_feature 1..80: note = Synthetic: >NC_003310.1-cand-123810-123889
  source 1..80: mol_type = other DNA
gcacagtgctttccccacatagaataaattagcattccgactgtgataataataccaagtataaacgccataatactcaa

SEQ ID NO: 524 - DNA, 80 bp, synthetic construct
  misc_feature 1..80: note = Synthetic: >NC_003310.1-cand-124130-124209
  source 1..80: mol_type = other DNA
atatggtaaaattaaatagtagtacacagcatgttataactaacagcagcaacggctcgtaattacttatcatttactag

SEQ ID NO: 525 - DNA, 80 bp, synthetic construct
  misc_feature 1..80: note = Synthetic: >NC_003310.1-cand-124210-124289
  source 1..80: mol_type = other DNA
acgaaaaggtggtgggatattttcttgctcaaataatacgaatatatcacccatccattttatacgatgtttatatactc

SEQ ID NO: 526 - DNA, 80 bp, synthetic construct
  misc_feature 1..80: note = Synthetic: >NC_003310.1-cand-124370-124449
  source 1..80: mol_type = other DNA
aacgtgaatgatctattatctggcataatgatgaccctacctgatgaatctgacaatgtactgggccatgtagaataaat

SEQ ID NO: 527 - DNA, 80 bp, synthetic construct
  misc_feature 1..80: note = Synthetic: >NC_003310.1-cand-124450-124529
  source 1..80: mol_type = other DNA
tatcaacgaattatcgtctacgaacatttatatcatttgttttaattttaggacgtgaataaatagatataaaatagaaa

SEQ ID NO: 528 - DNA, 80 bp, synthetic construct
  misc_feature 1..80: note = Synthetic: >NC_003310.1-cand-124530-124609
  source 1..80: mol_type = other DNA
ataacagatattacaaccagtgttatggacgcacccaaccatgtaggcagttttattttatcgtttactacaggttctcc

SEQ ID NO: 529 - DNA, 80 bp, synthetic construct
  misc_feature 1..80: note = Synthetic: >NC_003310.1-cand-136030-136109
  source 1..80: mol_type = other DNA
tctctaacgtgtcgtcgttcttcctcaagttctctgtgtactacagaaagcgtgtccctatcttgttgatatttagcaat

SEQ ID NO: 530 - DNA, 80 bp, synthetic construct
  misc_feature 1..80: note = Synthetic: >NC_003310.1-cand-136180-136259
  source 1..80: mol_type = other DNA
ttgtatttgtcacattccttgatatccatacgaagtctggacagttcccattcgacattacgacgtttatcgatttcagc

SEQ ID NO: 531 - DNA, 80 bp, synthetic construct
  misc_feature 1..80: note = Synthetic: >NC_003310.1-cand-136260-136339
  source 1..80: mol_type = other DNA
tcggagatcgtcgtcgcgttgttttagccacatacgactgagttcaagttctcgttgacaagatccatctacttttccat

SEQ ID NO: 532 - DNA, 80 bp, synthetic construct
  misc_feature 1..80: note = Synthetic: >NC_003310.1-cand-136420-136499
  source 1..80: mol_type = other DNA
gtcttcttatcaatttctgatgaatctgaaccatcatctgtcccattttgttgcatatccctgagttctttgatctctgt

SEQ ID NO: 533 - DNA, 80 bp, synthetic construct
  misc_feature 1..80: note = Synthetic: >NC_003310.1-cand-136580-136659
  source 1..80: mol_type = other DNA
cttcattcaattcagtgagttttctcttggcttcttccaagtctgttttaaactctccatcatttccgcattcttcctcg

SEQ ID NO: 534 - DNA, 80 bp, synthetic construct
  misc_feature 1..80: note = Synthetic: >NC_003310.1-cand-136720-136799
  source 1..80: mol_type = other DNA
accgttcttgtatttgtgggaacataattaggatcttctaatggattgtatggcttgatagcatcatctttatcattatt

SEQ ID NO: 535 - DNA, 80 bp, synthetic construct
  misc_feature 1..80: note = Synthetic: >NC_003310.1-cand-136900-136979
  source 1..80: mol_type = other DNA
ttgtcgtacgcgggcacttcctcatccatcaagtatttataatcgggttctgtttcagaatattcttttctaagagacgc

SEQ ID NO: 536 - DNA, 80 bp, synthetic construct
  misc_feature 1..80: note = Synthetic: >NC_003310.1-cand-137140-137219
  source 1..80: mol_type = other DNA
gatttagtattaaacagatccttgacctttttagtaaatgcatatgtatattttagatctccagatttcataatatgatc

SEQ ID NO: 537 - DNA, 80 bp, synthetic construct
  misc_feature 1..80: note = Synthetic: >NC_003310.1-cand-137220-137299
  source 1..80: mol_type = other DNA
gcatgccttaaatgtcaatgcttccatgatatagtctggaacactaatgggtgacgaaaaagatacagcaccatatgcta

SEQ ID NO: 538 - DNA, 80 bp, synthetic construct
  misc_feature 1..80: note = Synthetic: >NC_003310.1-cand-137300-137379
  source 1..80: mol_type = other DNA
cgttgataaatagatctgaaccactaagtagataatgattaatgttaaggaagaggaaatattcagtatatagatatgcc

SEQ ID NO: 539 - DNA, 80 bp, synthetic construct
  misc_feature 1..80: note = Synthetic: >NC_003310.1-cand-137380-137459
  source 1..80: mol_type = other DNA
ttagcatcatatcttgtactaaacacgctaaacagtttattgatgtgatcaatttccaacagaacaattagagcggcagg

SEQ ID NO: 540 - DNA, 80 bp, synthetic construct
  misc_feature 1..80: note = Synthetic: >NC_003310.1-cand-137530-137609
  source 1..80: mol_type = other DNA
agaagagcgaatatctcgtctgacttaatgagatgtagttcagcagcataagtcataactgtaaatagaacatactttcc

SEQ ID NO: 541 - DNA, 80 bp, synthetic construct
  misc_feature 1..80: note = Synthetic: >NC_003310.1-cand-137610-137689
  source 1..80: mol_type = other DNA
tgtagtgttgattctagactccacatcaacaccattattaaaaatagttttatatacatctttaatctgctctccgttaa

SEQ ID NO: 542 - DNA, 80 bp, synthetic construct
  misc_feature 1..80: note = Synthetic: >NC_003310.1-cand-137770-137849
  source 1..80: mol_type = other DNA
cgaattacatttcttgtttttcttgtgagacctgattcagaactcaactcatcattccatagtttttctacctcagtggc

SEQ ID NO: 543 - DNA, 80 bp, synthetic construct
  misc_feature 1..80: note = Synthetic: >NC_003310.1-cand-137850-137929
  source 1..80: mol_type = other DNA
gaaatctttggagtgtttggtacattttttaataaggttcgtgacctccatttattataaaaaatttttattcaaaactt

SEQ ID NO: 544 - DNA, 80 bp, synthetic construct
  misc_feature 1..80: note = Synthetic: >NC_003310.1-cand-138010-138089
  source 1..80: mol_type = other DNA
ggtaatggccatgggaacagtaatgtttgcatatttatctttcttgctagtattactgtatattgtcccaatgtttcaat

SEQ ID NO: 545 - DNA, 80 bp, synthetic construct
  misc_feature 1..80: note = Synthetic: >NC_003310.1-cand-145650-145729
  source 1..80: mol_type = other DNA
aaaatattctaacatttcccattaatcatgctgtaatcatatccccactgagtaaatgtgtcgtagttagcaagggccct

SEQ ID NO: 546 - DNA, 80 bp, synthetic construct
  misc_feature 1..80: note = Synthetic: >NC_003310.1-cand-145730-145809
  source 1..80: mol_type = other DNA
acaaccacactggttgttaaagcggatatacccagcaaacgattggtaacatcgtttacaaacgacatactgtatgtaaa

SEQ ID NO: 547 - DNA, 80 bp, synthetic construct
  misc_feature 1..80: note = Synthetic: >NC_003310.1-cand-145810-145889
  source 1..80: mol_type = other DNA
caatctatcactgattaattatttaccgttgtctgtattcattattagacgagtcactgactatttggatagacacatat

SEQ ID NO: 548 - DNA, 80 bp, synthetic construct
  misc_feature 1..80: note = Synthetic: >NC_003310.1-cand-145970-146049
  source 1..80: mol_type = other DNA
ataggtatgtcttctgccaagtacataaattcgagcatcgagcaagatattttgatccatgtttgtaacctcgagcatcc

SEQ ID NO: 549 - DNA, 80 bp, synthetic construct
  misc_feature 1..80: note = Synthetic: >NC_003310.1-cand-146030-146109
  source 1..80: mol_type = other DNA
gtttgtaacctcgagcatccattcgactcagtctacaaaaaaatgcagtcgtacaattctctacctatcaaggaacaaat

SEQ ID NO: 550 - DNA, 80 bp, synthetic construct
  misc_feature 1..80: note = Synthetic: >NC_003310.1-cand-146110-146189
  source 1..80: mol_type = other DNA
attgtatggtagaattgataatataaatatgagcattagtatttcggtggattaatagatttctctagtatgggatcatt

SEQ ID NO: 551 - DNA, 80 bp, synthetic construct
  misc_feature 1..80: note = Synthetic: >NC_003310.1-cand-146190-146269
  source 1..80: mol_type = other DNA
aatcatctctaaatacatcataaaaaagctattatcaaatactgtactgaatggattcattcttttctctttttatgaaa

SEQ ID NO: 552 - DNA, 80 bp, synthetic construct
  misc_feature 1..80: note = Synthetic: >NC_003310.1-cand-146270-146349
  source 1..80: mol_type = other DNA
ctctgttgtatatctacggataaaactagaagcaaaaaatctgataggaagaataatgattatatggaggaacacgatta

SEQ ID NO: 553 - DNA, 80 bp, synthetic construct
  misc_feature 1..80: note = Synthetic: >NC_003310.1-cand-146510-146589
  source 1..80: mol_type = other DNA
agagttccatcaacacattcctttaaactcaatcccaaacccaaaaccgttaaaatgtatccagccaattgataatagat

SEQ ID NO: 554 - DNA, 80 bp, synthetic construct
  misc_feature 1..80: note = Synthetic: >NC_003310.1-cand-146590-146669
  source 1..80: mol_type = other DNA
aatgaggtgtacagcacatgataatttacacagtaaccaaaatgaaaacactttagtaattataagaaatatagacggta

SEQ ID NO: 555 - DNA, 80 bp, synthetic construct
  misc_feature 1..80: note = Synthetic: >NC_003310.1-cand-146830-146909
  source 1..80: mol_type = other DNA
gaggaataataagaacaaagtaattcccgtaaagataaacatcaacattgtttggtaatcattaaaccaattagtatgac

SEQ ID NO: 556 - DNA, 80 bp, synthetic construct
  misc_feature 1..80: note = Synthetic: >NC_003310.1-cand-146910-146989
  source 1..80: mol_type = other DNA
gttgaactaatttcacagtagattttattccagtattatccccgcatgtatacgtacctggtaagatatctttatattcc

SEQ ID NO: 557 - DNA, 80 bp, synthetic construct
  misc_feature 1..80: note = Synthetic: >NC_003310.1-cand-146990-147069
  source 1..80: mol_type = other DNA
ataatcaatgagacatcactatccgataacgaatgaagtctagcactagtatgccatttacttaatatggtcgtcttgga

SEQ ID NO: 558 - DNA, 80 bp, synthetic construct
  misc_feature 1..80: note = Synthetic: >NC_003310.1-cand-147070-147149
  source 1..80: mol_type = other DNA
agttttattataagttaaaatatcatgattgtccaatttccatctaatatactttgtcggattatctataatacatggaa

SEQ ID NO: 559 - DNA, 80 bp, synthetic construct
  misc_feature 1..80: note = Synthetic: >NC_003310.1-cand-147150-147229
  source 1..80: mol_type = other DNA
taatgatggtatcattacatgctgtatactctatagtctttgtagatgttataaccacaaaagtacagaggtatatcaac

SEQ ID NO: 560 - DNA, 80 bp, synthetic construct
  misc_feature 1..80: note = Synthetic: >NC_003310.1-cand-147230-147309
  source 1..80: mol_type = other DNA
aatattctaactcttaacatttttatttatttaaaatgatacctttgttatttattttattcttattttgctaacggtat

SEQ ID NO: 561 - DNA, 80 bp, synthetic construct
  misc_feature 1..80: note = Synthetic: >NC_003310.1-cand-152960-153039
  source 1..80: mol_type = other DNA
ttgtcgcttatattgatgacatcgaattcccaatatcatctcatcagtgatgagtagctcaatcttgttatcgggatcca

SEQ ID NO: 562 - DNA, 80 bp, synthetic construct
  misc_feature 1..80: note = Synthetic: >NC_003310.1-cand-153040-153119
  source 1..80: mol_type = other DNA
atttctaaagatgtcattaaaccctcgatcgtgaatggatttatcatcatcgtttttatgttggacatgagcttagtccg

SEQ ID NO: 563 - DNA, 80 bp, synthetic construct
  misc_feature 1..80: note = Synthetic: >NC_003310.1-cand-153120-153199
  source 1..80: mol_type = other DNA
tttgtccacatctatatacgatgatttctgaattatttcatatatctctcgttaactccaggaacttgtcagggatctaa

SEQ ID NO: 564 - DNA, 80 bp, synthetic construct
  misc_feature 1..80: note = Synthetic: >NC_003310.1-cand-153200-153279
  source 1..80: mol_type = other DNA
ctttaatatgttctcgtctaagagatgaaaatctttggatggtggcatgtgacttttctctaaaggatgatgttgcccga

SEQ ID NO: 565 - DNA, 80 bp, synthetic construct
  misc_feature 1..80: note = Synthetic: >NC_003310.1-cand-153280-153359
  source 1..80: mol_type = other DNA
tcctctcttaaatgaatccatcttatccttggacaagatggacagtctattttccttagatggtttaatattttttaccc

SEQ ID NO: 566 - DNA, 80 bp, synthetic construct
  misc_feature 1..80: note = Synthetic: >NC_003310.1-cand-153360-153439
  source 1..80: mol_type = other DNA
atgatctataaaggtagacagacctaatcgtctcggatgaccatatattattttcagttttattatacgcataaattgta

SEQ ID NO: 567 - DNA, 80 bp, synthetic construct
  misc_feature 1..80: note = Synthetic: >NC_003310.1-cand-153480-153559
  source 1..80: mol_type = other DNA
aatcgtttttgaaggattggacaaatctggaaaaacaacacaatgtatgaacatcatggaatctataccggcaaacacga

SEQ ID NO: 568 - DNA, 80 bp, synthetic construct
  misc_feature 1..80: note = Synthetic: >NC_003310.1-cand-153530-153609
  source 1..80: mol_type = other DNA
acatcatggaatctataccggcaaacacgataaaatatcttaactttcctcagcgatccacagtcactggaaagatgata

SEQ ID NO: 569 - DNA, 80 bp, synthetic construct
  misc_feature 1..80: note = Synthetic: >NC_003310.1-cand-153690-153769
  source 1..80: mol_type = other DNA
atcttttatacaagaacaactagaacagggaattactttaatagttgacagatacgcgttctctggagtagcgtatgcca

SEQ ID NO: 570 - DNA, 80 bp, synthetic construct
  misc_feature 1..80: note = Synthetic: >NC_003310.1-cand-153930-154009
  source 1..80: mol_type = other DNA
atataaaaaaatgattgaagaaggagatattcattggcaaattatttcttctgaattcgaggaagatgtaaagaaggagt

SEQ ID NO: 571 - DNA, 80 bp, synthetic construct
  misc_feature 1..80: note = Synthetic: >NC_003310.1-cand-153980-154059
  source 1..80: mol_type = other DNA
ctgaattcgaggaagatgtaaagaaggagttgattaagaatatagttatagaggctatacacacggttactggaccagtg

SEQ ID NO: 572 - DNA, 80 bp, synthetic construct
  misc_feature 1..80: note = Synthetic: >NC_003310.1-cand-154090-154169
  source 1..80: mol_type = other DNA
acatttttataaatagatgttagtacagtgttataaatggatgaagcatattactctggcaacttggaatcagtactcgg

SEQ ID NO: 573 - DNA, 80 bp, synthetic construct
  misc_feature 1..80: note = Synthetic: >NC_003310.1-cand-154170-154249
  source 1..80: mol_type = other DNA
ggatacgtgtccgatatgcataccgaactcgcatcaatatctcaattagttgccaagatagaaactatagataatgatta

SEQ ID NO: 574 - DNA, 80 bp, synthetic construct
  misc_feature 1..80: note = Synthetic: >NC_003310.1-cand-154250-154329
  source 1..80: mol_type = other DNA
ttaaacaaggacattgtaaattttatcatatgtagatcaaacttggataatccatttatctctttcctagatactgcata

SEQ ID NO: 575 - DNA, 80 bp, synthetic construct
  misc_feature 1..80: note = Synthetic: >NC_003310.1-cand-154330-154409
  source 1..80: mol_type = other DNA
tactatcatagatcaagagatctatcagaacgagttgattaattcattagacgataatgaaattatcgattgtatagtta

SEQ ID NO: 576 - DNA, 80 bp, synthetic construct
  misc_feature 1..80: note = Synthetic: >NC_003310.1-cand-154410-154489
  source 1..80: mol_type = other DNA
acaagtttatgagcttttataaggataacctagaaaatatggtagatgctatcattactctaaaatattataattaataa

SEQ ID NO: 577 - DNA, 80 bp, synthetic construct
  misc_feature 1..80: note = Synthetic: >NC_003310.1-cand-185830-185909
  source 1..80: mol_type = other DNA
ttagtaacaaattaaatgatctgtacaatgaatacaagaagattatggaatatagcgacggatcattgccggcgtctata

SEQ ID NO: 578 - DNA, 80 bp, synthetic construct
  misc_feature 1..80: note = Synthetic: >NC_003310.1-cand-185910-185989
  source 1..80: mol_type = other DNA
aacagattagcaaaggcattgacttcagagggtagagaaatagcaagtgttaatatagatggtaatctgttagatatcgc

SEQ ID NO: 579 - DNA, 80 bp, synthetic construct
  misc_feature 1..80: note = Synthetic: >NC_003310.1-cand-185990-186069
  source 1..80: mol_type = other DNA
atatcaagcagataaggaaaagatggccgacatacagacaagaataaatgatattattagagatttgtttatacacactc

SEQ ID NO: 580 - DNA, 80 bp, synthetic construct
  misc_feature 1..80: note = Synthetic: >NC_003310.1-cand-186150-186229
  source 1..80: mol_type = other DNA
gttaaaaagtactattctattgataattatctatgcggtactttagatgattatatatacaccgttgtagaatataacaa

SEQ ID NO: 581 - DNA, 80 bp, synthetic construct
  misc_feature 1..80: note = Synthetic: >NC_003310.1-cand-186230-186309
  source 1..80: mol_type = other DNA
atcctatgtgttagtaaacgatacttatatgagctatgactatcttgaatcatcaggtgtagttgttctatcatgttatg

SEQ ID NO: 582 - DNA, 80 bp, synthetic construct
  misc_feature 1..80: note = Synthetic: >NC_003310.1-cand-186380-186459
  source 1..80: mol_type = other DNA
ggtagccgaagcattgaatgacatgtttaaggaatttgataaaaacgtaagtgctattataataaaagaagaagataatt

SEQ ID NO: 583 - DNA, 80 bp, synthetic construct
  misc_feature 1..80: note = Synthetic: >NC_003310.1-cand-186460-186539
  source 1..80: mol_type = other DNA
atctaaacagttcgcccgatatctaccatataatatatatcataggtggcactattctgctattgttagtcattatttta

SEQ ID NO: 584 - DNA, 80 bp, synthetic construct
  misc_feature 1..80: note = Synthetic: >NC_003310.1-cand-186540-186619
  source 1..80: mol_type = other DNA
atattggcaatttatatagcgcgcaataaatacagaaccaggaaatatgaaataatgaaatatgacaatatgagcattaa

SEQ ID NO: 585 - DNA, 80 bp, synthetic construct
  misc_feature 1..80: note = Synthetic: >NC_003310.1-cand-186620-186699
  source 1..80: mol_type = other DNA
atctgatcatcatgatagtcttgaaacagtgtctatggaaattattgataatcggtactaataaaatagtttaactcttt

SEQ ID NO: 586 - DNA, 80 bp, synthetic construct
  misc_feature 1..80: note = Synthetic: >NC_003310.1-cand-186700-186779
  source 1..80: mol_type = other DNA
tagaaccagtttggtactgtaatttcagttcattactcgttgagaatattgatgattttttttaaaatgagtatcggtag

SEQ ID NO: 587 - DNA, 80 bp, synthetic construct
  misc_feature 1..80: note = Synthetic: >NC_003310.1-cand-186780-186859
  source 1..80: mol_type = other DNA
ttacatattaccatatcatccattatataatcgatgatgcatgtattaaaatactttccgaataagtcttctaaatattg

SEQ ID NO: 588 - DNA, 80 bp, synthetic construct
  misc_feature 1..80: note = Synthetic: >NC_003310.1-cand-186860-186939
  source 1..80: mol_type = other DNA
tattaattatgaaaaactatgctatgtgagatgattcaaagatgtttaatgatacgatactagattttatctctagcgag

SEQ ID NO: 589 - DNA, 80 bp, synthetic construct
  misc_feature 1..80: note = Synthetic: >NC_003310.1-cand-186940-187019
  source 1..80: mol_type = other DNA
attgtttagaatcatttatcataactatgtttaataaattcatcaacgaatatcgataaagacctcttgtaattcgagta

SEQ ID NO: 590 - DNA, 80 bp, synthetic construct
  misc_feature 1..80: note = Synthetic: >NC_003310.1-cand-187020-187099
  source 1..80: mol_type = other DNA
taggaagcagtattaccatatcaacttccgagttaacaattactctaaaacatgaggattgtactcctgtctttattgga

SEQ ID NO: 591 - DNA, 80 bp, synthetic construct
  misc_feature 1..80: note = Synthetic: >NC_003310.1-cand-187100-187179
  source 1..80: mol_type = other DNA
gattactattcagtcgttgataaactagtaacctcaggtttctttacaaacgataaagtacaacatcaagacctcacaac

SEQ ID NO: 592 - DNA, 80 bp, synthetic construct
  misc_feature 1..80: note = Synthetic: >NC_003310.1-cand-187180-187259
  source 1..80: mol_type = other DNA
gcagtgcaagattaatctagaaatcaaatgtaattatggaggagaatctagacaactaacacccacggcgaagtatactt

SEQ ID NO: 593 - DNA, 80 bp, synthetic construct
  misc_feature 1..80: note = Synthetic: >NC_003310.1-cand-192410-192489
  source 1..80: mol_type = other DNA
taaaatgtggtaactctccattacattgctatacgatgaatacacgatttaatccatctgtattaaagatattgttacgc

SEQ ID NO: 594 - DNA, 80 bp, synthetic construct
  misc_feature 1..80: note = Synthetic: >NC_003310.1-cand-192490-192569
  source 1..80: mol_type = other DNA
cacggcatgcgtaactttgatagcaaggataaaaaaggacatattcctctacaccactatctgattcattcactatcaat

SEQ ID NO: 595 - DNA, 80 bp, synthetic construct
  misc_feature 1..80: note = Synthetic: >NC_003310.1-cand-192650-192729
  source 1..80: mol_type = other DNA
gatataaattcaatgggagcttaaactattacgttctgtacaaattattgactaaaggatctgaccctaattgcgtcgat

SEQ ID NO: 596 - DNA, 80 bp, synthetic construct
  misc_feature 1..80: note = Synthetic: >NC_003310.1-cand-192810-192889
  source 1..80: mol_type = other DNA
tcacactaagatgcgagctgagaagcgattcatctacgcgataatagatcatggagcaaacattaacgcggttacgaaaa

SEQ ID NO: 597 - DNA, 80 bp, synthetic construct
  misc_feature 1..80: note = Synthetic: >NC_003310.1-cand-193180-193259
  source 1..80: mol_type = other DNA
cggtatctactagatagattcgacattcagaaagacgaatactataatacaatgactcctcttcataccgccttccagaa

SEQ ID NO: 598 - DNA, 80 bp, synthetic construct
  misc_feature 1..80: note = Synthetic: >NC_003310.1-cand-193260-193339
  source 1..80: mol_type = other DNA
ttgcaataacaatgttgcctcatacctcgtatacatcggatacgacatcaaccttccgactaaagacgataagacagtat

SEQ ID NO: 599 - DNA, 80 bp, synthetic construct
  misc_feature 1..80: note = Synthetic: >NC_003310.1-cand-193340-193419
  source 1..80: mol_type = other DNA
tcgacttggtgtttgaaaacagaaacatcatatacaaggcggatgtcgttaatgacatcatccaccacagactgaaagta

SEQ ID NO: 600 - DNA, 80 bp, synthetic construct
  misc_feature 1..80: note = Synthetic: >NC_003310.1-cand-193420-193499
  source 1..80: mol_type = other DNA
tctctacctatgattaaatcgttgttctacaagatgtcggagttctctccctacgacgatcactacgtaaagaagataat

SEQ ID NO: 601 - DNA, 80 bp, synthetic construct
  misc_feature 1..80: note = Synthetic: >NC_003310.1-cand-193580-193659
  source 1..80: mol_type = other DNA
ttatgaaaaatatatcattcgataagatagattccatcatcgaaaaatgtagtcgtgacataagtctcctcaaagagatt

SEQ ID NO: 602 - DNA, 80 bp, synthetic construct
  misc_feature 1..80: note = Synthetic: >NC_003310.1-cand-193620-193699
  source 1..80: mol_type = other DNA
cgaaaaatgtagtcgtgacataagtctcctcaaagagattcgaatctcagacaccaacttgtatacggtattgagaacag

SEQ ID NO: 603 - DNA, 80 bp, synthetic construct
  misc_feature 1..80: note = Synthetic: >NC_003310.1-cand-193700-193779
  source 1..80: mol_type = other DNA
aagacatccggtatcacacctatctcgaagccatacattcagacaaacgcatttcatttcccatgtacgacgatctcata

SEQ ID NO: 604 - DNA, 80 bp, synthetic construct
  misc_feature 1..80: note = Synthetic: >NC_003310.1-cand-193780-193859
  source 1..80: mol_type = other DNA
gaacagtgtcatctatcgatggagcataaaagtaaactcgtcgacaaagcactcaataaattagagtctaccatcgatag

SEQ ID NO: 605 - DNA, 80 bp, synthetic construct
  misc_feature 1..80: note = Synthetic: >NC_003310.1-cand-193860-193939
  source 1..80: mol_type = other DNA
tcaatctagactatcgtatttgcctccggaaattatgcgcaatatcataaccaagctaagcgactaccatctaaacagta

SEQ ID NO: 606 - DNA, 80 bp, synthetic construct
  misc_feature 1..80: note = Synthetic: >NC_003310.1-cand-194010-194089
  source 1..80: mol_type = other DNA
gattggagaagtaggaaacaaacagtaacaagacgacgattactactattattaaatcatgaggtccgtattatactcgt

SEQ ID NO: 607 - DNA, 80 bp, synthetic construct
  misc_feature 1..80: note = Synthetic: >NC_003310.1-cand-194170-194249
  source 1..80: mol_type = other DNA
aacgaatacagaagccgtaatctatgttgtctatcgtgtcctccgggaacttacgcttccagattatgtgatagcaagac

SEQ ID NO: 608 - DNA, 80 bp, synthetic construct
  misc_feature 1..80: note = Synthetic: >NC_003310.1-cand-194250-194329
  source 1..80: mol_type = other DNA
taatacacaatgtacgccgtgtggttcggatacctttacatctcacaataatcatttacaggcttgtctaagttgtaacg

SEQ ID NO: 609 - DNA, 80 bp, synthetic construct
  misc_feature 1..80: note = Synthetic: >NC_003443.1-cand-3440-3519
  source 1..80: mol_type = other DNA
aatcatagtccaaaccccaaacacagcagcagacatgcctataatatcattaccagcagatccaacttcacccagtcaat

SEQ ID NO: 610 - DNA, 80 bp, synthetic construct
  misc_feature 1..80: note = Synthetic: >NC_003443.1-cand-3520-3599
  source 1..80: mol_type = other DNA
cccttactccgtttccaatacaacttgacaccaaagatggcaaggcagggaaactccttaaacagattcgaattaggtat

SEQ ID NO: 611 - DNA, 80 bp, synthetic construct
  misc_feature 1..80: note = Synthetic: >NC_003443.1-cand-3600-3679
  source 1..80: mol_type = other DNA
ctaaatgagcctaattctcgccatacaccaataactttcatcaatacgtatggatttgtttatgctcgagacacttcagg

SEQ ID NO: 612 - DNA, 80 bp, synthetic construct
  misc_feature 1..80: note = Synthetic: >NC_003443.1-cand-3680-3759
  source 1..80: mol_type = other DNA
gggcattcacagtgagatcagcagtgacctagctgcagggtccataacagcatgcatgatgaagctaggacctggtccaa

SEQ ID NO: 613 - DNA, 80 bp, synthetic construct
  misc_feature 1..80: note = Synthetic: >NC_003443.1-cand-3730-3809
  source 1..80: mol_type = other DNA
catgcatgatgaagctaggacctggtccaaatattcagaatgcaaatctagtgctaagatctctgaatgaattctacgta

SEQ ID NO: 614 - DNA, 80 bp, synthetic construct
  misc_feature 1..80: note = Synthetic: >NC_003443.1-cand-3810-3889
  source 1..80: mol_type = other DNA
aaagtcaagaagacatcaagccagagagaggaagcagtgtttgaattagttaacattccaactttattgagagaacatgc

SEQ ID NO: 615 - DNA, 80 bp, synthetic construct
  misc_feature 1..80: note = Synthetic: >NC_003443.1-cand-3890-3969
  source 1..80: mol_type = other DNA
tctttgcaaacgcaaaatgttagtatgctctgcagaaaaattcctcaagaacccgtcaaagctacaagctggatttgagt

SEQ ID NO: 616 - DNA, 80 bp, synthetic construct
  misc_feature 1..80: note = Synthetic: >NC_003443.1-cand-3970-4049
  source 1..80: mol_type = other DNA
atgtatacataccaacttttgtctccattacatactcaccacgaaatctgaattaccaagtggccagacctatccttaag

SEQ ID NO: 617 - DNA, 80 bp, synthetic construct
  misc_feature 1..80: note = Synthetic: >NC_003443.1-cand-4050-4129
  source 1..80: mol_type = other DNA
ttcagatcacgctttgtgtatagcattcatttggaattaatcctgagattgctatgcaaatctgactcccccttgatgaa

SEQ ID NO: 618 - DNA, 80 bp, synthetic construct
  misc_feature 1..80: note = Synthetic: >NC_003443.1-cand-4160-4239
  source 1..80: mol_type = other DNA
atgcctcgcatcagtctggatccatgtatgtaacattctgaaaaacaaaagcatcaagcaacaaggcagagaatcatatt

SEQ ID NO: 619 - DNA, 80 bp, synthetic construct
  misc_feature 1..80: note = Synthetic: >NC_003443.1-cand-4210-4289
  source 1..80: mol_type = other DNA
gcatcaagcaacaaggcagagaatcatatttcatagctaagtgcatgagcatgcagctgcaggtgtccattgcagatctt

SEQ ID NO: 620 - DNA, 80 bp, synthetic construct
  misc_feature 1..80: note = Synthetic: >NC_003443.1-cand-4300-4379
  source 1..80: mol_type = other DNA
caatcataatcaaatcattgggtcacatccccaagactgcacttccttttttcagcaaagatgggattgcctgtcatcca

SEQ ID NO: 621 - DNA, 80 bp, synthetic construct
  misc_feature 1..80: note = Synthetic: >NC_003443.1-cand-4370-4449
  source 1..80: mol_type = other DNA
ctgtcatccattacaagatgtttcccctaatctagcaaaatcactgtggtcagttggatgtgagatagaatctgccaagt

SEQ ID NO: 622 - DNA, 80 bp, synthetic construct
  misc_feature 1..80: note = Synthetic: >NC_003443.1-cand-4450-4529
  source 1..80: mol_type = other DNA
tgatacttcaagaatctgatcttaatgagctaatgggccaccaggaccttatcactgataagattgccattagatcaggt

SEQ ID NO: 623 - DNA, 80 bp, synthetic construct
  misc_feature 1..80: note = Synthetic: >NC_003443.1-cand-4530-4609
  source 1..80: mol_type = other DNA
caacggacatttgagaggtccaaattcagcccattcaaaaaatatgcatcaattccaaacttggaagccatcaactgaat

SEQ ID NO: 624 - DNA, 80 bp, synthetic construct
  misc_feature 1..80: note = Synthetic: >NC_003443.1-cand-4610-4689
  source 1..80: mol_type = other DNA
gctccagcatctgagaatagaaccacaatcaagtcatactactagtcactatacaataatcaacaattttagtcaactga

SEQ ID NO: 625 - DNA, 80 bp, synthetic construct
  misc_feature 1..80: note = Synthetic: >NC_003443.1-cand-8540-8619
  source 1..80: mol_type = other DNA
aagactccagattcaataataattgaaaggctctctatcttatgcaatagttatacgttttggctgtattagaatgttat

SEQ ID NO: 626 - DNA, 80 bp, synthetic construct
  misc_feature 1..80: note = Synthetic: >NC_003443.1-cand-8620-8699
  source 1..80: mol_type = other DNA
agattctgctgtttttcccatatgaagcaatccttcaacaccgacttaggttcaattttctcatcatttactgttgtaat

SEQ ID NO: 627 - DNA, 80 bp, synthetic construct
  misc_feature 1..80: note = Synthetic: >NC_003443.1-cand-8700-8779
  source 1..80: mol_type = other DNA
tcaatcttactaaagttattccgatatttaagaaaaaataacctttatataatgtaacaatactattaagattatgatat

SEQ ID NO: 628 - DNA, 80 bp, synthetic construct
  misc_feature 1..80: note = Synthetic: >NC_003443.1-cand-8780-8859
  source 1..80: mol_type = other DNA
aggccagaatggcggcctcttctgagatactccttcctgaagtccacttgaactcaccaatagtcaaacacaaactcata

SEQ ID NO: 629 - DNA, 80 bp, synthetic construct
  misc_feature 1..80: note = Synthetic: >NC_003443.1-cand-8860-8939
  source 1..80: mol_type = other DNA
tactacttattactagggcacttcccgcatgatcttgacatttctgaaataagcccccttcacaataatgattgggatca

SEQ ID NO: 630 - DNA, 80 bp, synthetic construct
  misc_feature 1..80: note = Synthetic: >NC_003443.1-cand-8940-9019
  source 1..80: mol_type = other DNA
aattgccagagaagaatccaatcttgctgaacgacttggagtagctaaatctgaattaattaaacgtgtgcccgcattta

SEQ ID NO: 631 - DNA, 80 bp, synthetic construct
  misc_feature 1..80: note = Synthetic: >NC_003443.1-cand-9020-9099
  source 1..80: mol_type = other DNA
gagcaactagatggcgtagtcatgcagccgtccttatatggccttcttgtataccatttcttgttaaattcctacctcat

SEQ ID NO: 632 - DNA, 80 bp, synthetic construct
  misc_feature 1..80: note = Synthetic: >NC_003443.1-cand-9100-9179
  source 1..80: mol_type = other DNA
tctaagcttcaaccagtagaacaatggtacaagttgatcaatgcttcatgtaatactatatctgactcaattgatagatg

SEQ ID NO: 633 - DNA, 80 bp, synthetic construct
  misc_feature 1..80: note = Synthetic: >NC_003443.1-cand-9180-9259
  source 1..80: mol_type = other DNA
tatggagaatatttctattaagcttactgggaaaaacaatctattctctcgatccagaggaactgcaggtgcaggtaaaa

SEQ ID NO: 634 - DNA, 80 bp, synthetic construct
  misc_feature 1..80: note = Synthetic: >NC_003443.1-cand-9260-9339
  source 1..80: mol_type = other DNA
acagtaaaatcaccctcaatgatatccaatctatttgggaatcaaacaagtggcaacctaatgtatctttatggcttaca

SEQ ID NO: 635 - DNA, 80 bp, synthetic construct
  misc_feature 1..80: note = Synthetic: >NC_003443.1-cand-9340-9419
  source 1..80: mol_type = other DNA
attaaataccaaatgcgacaacttataatgcatcaaagttctcgtcagccgactgatttagttcacattgttgacacacg

SEQ ID NO: 636 - DNA, 80 bp, synthetic construct
  misc_feature 1..80: note = Synthetic: >NC_003443.1-cand-9420-9499
  source 1..80: mol_type = other DNA
atctggtctaatagttatcacccctgaacttgttatttgttttgatcggttaaatagtgttttaatgtattttacatttg

SEQ ID NO: 637 - DNA, 80 bp, synthetic construct
  misc_feature 1..80: note = Synthetic: >NC_003443.1-cand-9500-9579
  source 1..80: mol_type = other DNA
agatgactttaatggtaagtgacatgtttgagggaaggatgaatgtcaccgctctctgcactattagtcattacttatct

SEQ ID NO: 638 - DNA, 80 bp, synthetic construct
  misc_feature 1..80: note = Synthetic: >NC_003443.1-cand-9580-9659
  source 1..80: mol_type = other DNA
ccactagggccaaggatagatagattgttttccattgtagatgaattagcacaactattaggtgacactgtatataaagt

SEQ ID NO: 639 - DNA, 80 bp, synthetic construct
  misc_feature 1..80: note = Synthetic: >NC_003443.1-cand-9660-9739
  source 1..80: mol_type = other DNA
tattgcatctcttgaatctttagtatatgggtgtctacaacttaaagatccagtagtggaattagcagggtcatttcatt

SEQ ID NO: 640 - DNA, 80 bp, synthetic construct
  misc_feature 1..80: note = Synthetic: >NC_003443.1-cand-9740-9819
  source 1..80: mol_type = other DNA
cctttattacacaagagattatagatatcctaattggttcaaaagcccttgataaggatgaatcaataactgttactaca

SEQ ID NO: 641 - DNA, 80 bp, synthetic construct
  misc_feature 1..80: note = Synthetic: >NC_004102.1-cand-3210-3289
  source 1..80: mol_type = other DNA
ctgggcgcacaacggcctgcgagatctggccgtggctgtggaaccagtcgtcttctcccgaatggagaccaagctcatca

SEQ ID NO: 642 - DNA, 80 bp, synthetic construct
  misc_feature 1..80: note = Synthetic: >NC_004102.1-cand-3290-3369
  source 1..80: mol_type = other DNA
cgtggggggcagataccgccgcgtgcggtgacatcatcaacggcttgcccgtctctgcccgtaggggccaggagatactg

SEQ ID NO: 643 - DNA, 80 bp, synthetic construct
  misc_feature 1..80: note = Synthetic: >NC_004102.1-cand-3400-3479
  source 1..80: mol_type = other DNA
gggtggaggttgctggcgcccatcacggcgtacgcccagcagacgagaggcctcctagggtgtataatcaccagcctgac

SEQ ID NO: 644 - DNA, 80 bp, synthetic construct
  misc_feature 1..80: note = Synthetic: >NC_004102.1-cand-3450-3529
  source 1..80: mol_type = other DNA
cctcctagggtgtataatcaccagcctgactggccgggacaaaaaccaagtggagggtgaggtccagatcgtgtcaactg

SEQ ID NO: 645 - DNA, 80 bp, synthetic construct
  misc_feature 1..80: note = Synthetic: >NC_004102.1-cand-3480-3559
  source 1..80: mol_type = other DNA
tggccgggacaaaaaccaagtggagggtgaggtccagatcgtgtcaactgctacccaaaccttcctggcaacgtgcatca

SEQ ID NO: 646 - DNA, 80 bp, synthetic construct
  misc_feature 1..80: note = Synthetic: >NC_004102.1-cand-3610-3689
  source 1..80: mol_type = other DNA
tcacccaagggtcctgtcatccagatgtataccaatgtggaccaagaccttgtgggctggcccgctcctcaaggttcccg

SEQ ID NO: 647 - DNA, 80 bp, synthetic construct
  misc_feature 1..80: note = Synthetic: >NC_004102.1-cand-3690-3769
  source 1..80: mol_type = other DNA
ctcattgacaccctgcacctgcggctcctcggacctttacctggtcacgaggcacgccgatgtcattcccgtgcgccggc

SEQ ID NO: 648 - DNA, 80 bp, synthetic construct
  misc_feature 1..80: note = Synthetic: >NC_004102.1-cand-3840-3919
  source 1..80: mol_type = other DNA
gctgttgtgccccgcgggacacgccgtgggcctattcagggccgcggtgtgcacccgtggagtggctaaggcggtggact

SEQ ID NO: 649 - DNA, 80 bp, synthetic construct
  misc_feature 1..80: note = Synthetic: >NC_004102.1-cand-3850-3929
  source 1..80: mol_type = other DNA
cccgcgggacacgccgtgggcctattcagggccgcggtgtgcacccgtggagtggctaaggcggtggactttatccctgt

SEQ ID NO: 650 - DNA, 80 bp, synthetic construct
  misc_feature 1..80: note = Synthetic: >NC_004102.1-cand-3930-4009
  source 1..80: mol_type = other DNA
ggagaacctagagacaaccatgagatccccggtgttcacggacaactcctctccaccagcagtgccccagagcttccagg

SEQ ID NO: 651 - DNA, 80 bp, synthetic construct
  misc_feature 1..80: note = Synthetic: >NC_004102.1-cand-4010-4089
  source 1..80: mol_type = other DNA
tggcccacctgcatgctcccaccggcagcggtaagagcaccaaggtcccggctgcgtacgcagcccagggctacaaggtg

SEQ ID NO: 652 - DNA, 80 bp, synthetic construct
  misc_feature 1..80: note = Synthetic: >NC_004102.1-cand-4070-4149
  source 1..80: mol_type = other DNA
cagcccagggctacaaggtgttggtgctcaacccctctgttgctgcaacgctgggctttggtgcttacatgtccaaggcc

SEQ ID NO: 653 - DNA, 80 bp, synthetic construct
  misc_feature 1..80: note = Synthetic: >NC_004102.1-cand-4180-4259
  source 1..80: mol_type = other DNA
gtgagaacaattaccactggcagccccatcacgtactccacctacggcaagttccttgccgacggcgggtgctcaggagg

SEQ ID NO: 654 - DNA, 80 bp, synthetic construct
  misc_feature 1..80: note = Synthetic: >NC_004102.1-cand-4250-4329
  source 1..80: mol_type = other DNA
gctcaggaggtgcttatgacataataatttgtgacgagtgccactccacggatgccacatccatcttgggcatcggcact

SEQ ID NO: 655 - DNA, 80 bp, synthetic construct
  misc_feature 1..80: note = Synthetic: >NC_004102.1-cand-4360-4439
  source 1..80: mol_type = other DNA
agactggttgtgctcgccactgctacccctccgggctccgtcactgtgtcccatcctaacatcgaggaggttgctctgtc

SEQ ID NO: 656 - DNA, 80 bp, synthetic construct
  misc_feature 1..80: note = Synthetic: >NC_004102.1-cand-4410-4489
  source 1..80: mol_type = other DNA
ccatcctaacatcgaggaggttgctctgtccaccaccggagagatccctttttacggcaaggctatccccctcgaggtga

SEQ ID NO: 657 - DNA, 80 bp, synthetic construct
  misc_feature 1..80: note = Synthetic: >NC_004102.1-cand-8300-8379
  source 1..80: mol_type = other DNA
cggaggaggcaatttaccaatgttgtgacctggacccccaagcccgcgtggccatcaagtccctcactgagaggctttat

SEQ ID NO: 658 - DNA, 80 bp, synthetic construct
  misc_feature 1..80: note = Synthetic: >NC_004102.1-cand-8410-8489
  source 1..80: mol_type = other DNA
gaaaactgcggctaccgcaggtgccgcgcgagcggcgtactgacaactagctgtggtaacaccctcacttgctacatcaa

SEQ ID NO: 659 - DNA, 80 bp, synthetic construct
  misc_feature 1..80: note = Synthetic: >NC_004102.1-cand-8490-8569
  source 1..80: mol_type = other DNA
ggcccgggcagcctgtcgagccgcagggctccaggactgcaccatgctcgtgtgtggcgacgacttagtcgttatctgtg

SEQ ID NO: 660 - DNA, 80 bp, synthetic construct
  misc_feature 1..80: note = Synthetic: >NC_004102.1-cand-8500-8579
  source 1..80: mol_type = other DNA
gcctgtcgagccgcagggctccaggactgcaccatgctcgtgtgtggcgacgacttagtcgttatctgtgaaagtgcggg

SEQ ID NO: 661 - DNA, 80 bp, synthetic construct
  misc_feature 1..80: note = Synthetic: >NC_004102.1-cand-8650-8729
  source 1..80: mol_type = other DNA
gaccccccacaaccagaatacgacttggagcttataacatcatgctcctccaacgtgtcagtcgcccacgacggcgctgg

SEQ ID NO: 662 - DNA, 80 bp, synthetic construct
  misc_feature 1..80: note = Synthetic: >NC_004102.1-cand-8730-8809
  source 1..80: mol_type = other DNA
aaagagggtctactaccttacccgtgaccctacaacccccctcgcgagagccgcgtgggagacagcaagacacactccag

SEQ ID NO: 663 - DNA, 80 bp, synthetic construct
  misc_feature 1..80: note = Synthetic: >NC_004102.1-cand-8810-8889
  source 1..80: mol_type = other DNA
tcaattcctggctaggcaacataatcatgtttgcccccacactgtgggcgaggatgatactgatgacccatttctttagc

SEQ ID NO: 664 - DNA, 80 bp, synthetic construct
  misc_feature 1..80: note = Synthetic: >NC_004102.1-cand-8890-8969
  source 1..80: mol_type = other DNA
gtcctcatagccagggatcagcttgaacaggctcttaactgtgagatctacggagcctgctactccatagaaccactgga

SEQ ID NO: 665 - DNA, 80 bp, synthetic construct
  misc_feature 1..80: note = Synthetic: >NC_004102.1-cand-8970-9049
  source 1..80: mol_type = other DNA
tctacctccaatcattcaaagactccatggcctcagcgcattttcactccacagttactctccaggtgaaatcaataggg

SEQ ID NO: 666 - DNA, 80 bp, synthetic construct
  misc_feature 1..80: note = Synthetic: >NC_004102.1-cand-9080-9159
  source 1..80: mol_type = other DNA
cgcccttgcgagcttggagacaccgggcccggagcgtccgcgctaggcttctgtccagaggaggcagggctgccatatgt

SEQ ID NO: 667 - DNA, 80 bp, synthetic construct
  misc_feature 1..80: note = Synthetic: >NC_004102.1-cand-9130-9209
  source 1..80: mol_type = other DNA
ctgtccagaggaggcagggctgccatatgtggcaagtacctcttcaactgggcagtaagaacaaagctcaaactcactcc

SEQ ID NO: 668 - DNA, 80 bp, synthetic construct
  misc_feature 1..80: note = Synthetic: >NC_004102.1-cand-9180-9259
  source 1..80: mol_type = other DNA
ggcagtaagaacaaagctcaaactcactccaatagcggccgctggccggctggacttgtccggttggttcacggctggct

SEQ ID NO: 669 - DNA, 80 bp, synthetic construct
  misc_feature 1..80: note = Synthetic: >NC_004102.1-cand-9270-9349
  source 1..80: mol_type = other DNA
agacatttatcacagcgtgtctcatgcccggccccgctggttctggttttgcctactcctgctcgctgcaggggtaggca

SEQ ID NO: 670 - DNA, 80 bp, synthetic construct
  misc_feature 1..80: note = Synthetic: >NC_004102.1-cand-9380-9459
  source 1..80: mol_type = other DNA
ggtaaacactccggcctcttaggccatttcctgttttttttttttttttttttttttttttttttttttttttttttttt

SEQ ID NO: 671 - DNA, 80 bp, synthetic construct
  misc_feature 1..80: note = Synthetic: >NC_004102.1-cand-9510-9589
  source 1..80: mol_type = other DNA
ttcttttttcctttcttttccttccttctttaatggtggctccatcttagccctagtcacggctagctgtgaaaggtccg

SEQ ID NO: 672 - DNA, 80 bp, synthetic construct
  misc_feature 1..80: note = Synthetic: >NC_004162.2-cand-20-99
  source 1..80: mol_type = other DNA
ctaccagtttcttactgctctactctgcaaagcaagagattaagaacccatcatggatcctgtgtacgtggacatagacg

SEQ ID NO: 673 - DNA, 80 bp, synthetic construct
  misc_feature 1..80: note = Synthetic: >NC_004162.2-cand-3900-3979
  source 1..80: mol_type = other DNA
ggacgcaagtttagatcatctagagcgttgaaaccaccatgtgtcaccagcaacactgagatgttttttctattcagcaa

SEQ ID NO: 674 - DNA, 80 bp, synthetic construct
  misc_feature 1..80: note = Synthetic: >NC_004162.2-cand-3980-4059
  source 1..80: mol_type = other DNA
ctttgacaatggcagaaggaatttcacaactcatgtcatgaacaatcaactgaatgcagcctttgtaggacaggccaccc

SEQ ID NO: 675 - DNA, 80 bp, synthetic construct
  misc_feature 1..80: note = Synthetic: >NC_004162.2-cand-4060-4139
  source 1..80: mol_type = other DNA
gagcaggatgtgcaccgtcgtaccgggtaaaacgcatggatatcgcgaagaacgatgaagagtgcgtagtcaacgccgcc

SEQ ID NO: 676 - DNA, 80 bp, synthetic construct
  misc_feature 1..80: note = Synthetic: >NC_004162.2-cand-4140-4219
  source 1..80: mol_type = other DNA
aaccctcgcgggttaccaggtgacggtgtttgcaaggcagtatacaaaaaatggccggagtcctttaagaacagtgcaac

SEQ ID NO: 677 - DNA, 80 bp, synthetic construct
  misc_feature 1..80: note = Synthetic: >NC_004162.2-cand-4220-4299
  source 1..80: mol_type = other DNA
accagtgggaaccgcaaaaacagtcatgtgcggtacgtatccagtaatccacgccgttggaccaaacttctctaattatt

SEQ ID NO: 678 - DNA, 80 bp, synthetic construct
  misc_feature 1..80: note = Synthetic: >NC_004162.2-cand-4320-4399
  source 1..80: mol_type = other DNA
gaattggcggctgcctatcgagaagtcgcaaaggaggtaactagactgggagtaaatagtgtagctatacctctcctctc

SEQ ID NO: 679 - DNA, 80 bp, synthetic construct
  misc_feature 1..80: note = Synthetic: >NC_004162.2-cand-4370-4449
  source 1..80: mol_type = other DNA
agtaaatagtgtagctatacctctcctctccacaggtgtatactcaggagggaaagacaggctgacccagtcactgaacc

SEQ ID NO: 680 - DNA, 80 bp, synthetic construct
  misc_feature 1..80: note = Synthetic: >NC_004162.2-cand-4450-4529
  source 1..80: mol_type = other DNA
acctctttacagccatggactcgacggatgcagacgtggtcatctactgccgcgacaaagaatgggagaagaaaatatct

SEQ ID NO: 681 - DNA, 80 bp, synthetic construct
  misc_feature 1..80: note = Synthetic: >NC_004162.2-cand-4530-4609
  source 1..80: mol_type = other DNA
gaggccatacagatgcggacccaagtggagctgctggatgagcacatctccatagactgcgatgttgttcgcgtgcaccc

SEQ ID NO: 682 - DNA, 80 bp, synthetic construct
  misc_feature 1..80: note = Synthetic: >NC_004162.2-cand-4610-4689
  source 1..80: mol_type = other DNA
tgacagcagcttggcaggcagaaaaggatacagcaccacggaaggcgcactgtactcatatctagaagggacccgttttc

SEQ ID NO: 683 - DNA, 80 bp, synthetic construct
  misc_feature 1..80: note = Synthetic: >NC_004162.2-cand-4690-4769
  source 1..80: mol_type = other DNA
accaaacggcagtggatatggcagagatatatactatgtggccaaagcaaacagaggccaacgagcaagtttgcctatat

SEQ ID NO: 684 - DNA, 80 bp, synthetic construct
  misc_feature 1..80: note = Synthetic: >NC_004162.2-cand-4780-4859
  source 1..80: mol_type = other DNA
aaagtattgaatcgatcaggcagaaatgcccggtggatgatgcagatgcatcatctcccccgaaaactgtcccgtgcctc

SEQ ID NO: 685 - DNA, 80 bp, synthetic construct
  misc_feature 1..80: note = Synthetic: >NC_004162.2-cand-4850-4929
  source 1..80: mol_type = other DNA
cccgtgcctctgccgttacgccatgacaccagaacgcgttacccgacttcgcatgaaccatgtcacaagcataattgtgt

SEQ ID NO: 686 - DNA, 80 bp, synthetic construct
  misc_feature 1..80: note = Synthetic: >NC_004162.2-cand-4930-5009
  source 1..80: mol_type = other DNA
gttcttcgtttccccttccaaagtacaaaatagaaggagtgcaaaaagtcaaatgctccaaggtaatgctatttgaccac

SEQ ID NO: 687 - DNA, 80 bp, synthetic construct
  misc_feature 1..80: note = Synthetic: >NC_004162.2-cand-5010-5089
  source 1..80: mol_type = other DNA
aacgtgccatcgcgcgtaagtccaagggaatacagaccttcccaggagtctgtacaggaagcgagtacgaccacgtcact

SEQ ID NO: 688 - DNA, 80 bp, synthetic construct
  misc_feature 1..80: note = Synthetic: >NC_004162.2-cand-5090-5169
  source 1..80: mol_type = other DNA
gacgcatagccaattcgatctaagcgttgacggcaagatactgcccgtcccgtcagacctggatgctgacgccccagccc

SEQ ID NO: 689 - DNA, 80 bp, synthetic construct
  misc_feature 1..80: note = Synthetic: >NC_004162.2-cand-10360-10439
  source 1..80: mol_type = other DNA
tcataccgcatccgcatcagctaagctccgcgtcctttaccaaggaaataacatcactgtaactgcctatgcaaacggcg

SEQ ID NO: 690 - DNA, 80 bp, synthetic construct
  misc_feature 1..80: note = Synthetic: >NC_004162.2-cand-10480-10559
  source 1..80: mol_type = other DNA
gccaatgtcttcagcctggacaccttttgacaacaaaatcgtggtgtacaaaggtgacgtttacaacatggactacccgc

SEQ ID NO: 691 - DNA, 80 bp, synthetic construct
  misc_feature 1..80: note = Synthetic: >NC_004162.2-cand-10520-10599
  source 1..80: mol_type = other DNA
gtggtgtacaaaggtgacgtttacaacatggactacccgccctttggcgcaggaagaccaggacaatttggcgatatcca

SEQ ID NO: 692 - DNA, 80 bp, synthetic construct
  misc_feature 1..80: note = Synthetic: >NC_004162.2-cand-10600-10679
  source 1..80: mol_type = other DNA
aagtcgcacgcctgagagcaaagacgtctatgctaacacacaactggtactgcagagaccggctgcgggtacggtacacg

SEQ ID NO: 693 - DNA, 80 bp, synthetic construct
  misc_feature 1..80: note = Synthetic: >NC_004162.2-cand-10650-10729
  source 1..80: mol_type = other DNA
tgcagagaccggctgcgggtacggtacacgtgccatactctcaggcaccatctggctttaagtattggttaaaagaacga

SEQ ID NO: 694 - DNA, 80 bp, synthetic construct
  misc_feature 1..80: note = Synthetic: >NC_004162.2-cand-10760-10839
  source 1..80: mol_type = other DNA
ggctgccaaatagcaacaaacccggtaagagcgatgaactgcgccgtagggaacatgcccatctccatcgacataccgga

SEQ ID NO: 695 - DNA, 80 bp, synthetic construct
  misc_feature 1..80: note = Synthetic: >NC_004162.2-cand-10840-10919
  source 1..80: mol_type = other DNA
tgcggccttcactagggtcgtcgacgcgccctctttaacggacatgtcatgcgaggtaccagcctgcacccattcctcag

SEQ ID NO: 696 - DNA, 80 bp, synthetic construct
  misc_feature 1..80: note = Synthetic: >NC_004162.2-cand-10930-11009
  source 1..80: mol_type = other DNA
cgtcgccattattaaatatgcagtcagcaagaaaggcaagtgtgcggtgcattcgatgaccaacgccgtcactatccggg

SEQ ID NO: 697 - DNA, 80 bp, synthetic construct
  misc_feature 1..80: note = Synthetic: >NC_004162.2-cand-11000-11079
  source 1..80: mol_type = other DNA
actatccgggaagctgagatagaagttgaagggaattctcagctgcaaatctctttctcgacggccttggccagcgccga

SEQ ID NO: 698 - DNA, 80 bp, synthetic construct
  misc_feature 1..80: note = Synthetic: >NC_004162.2-cand-11080-11159
  source 1..80: mol_type = other DNA
attccgcgtacaagtctgttctacacaagtacactgtgcagccgagtgccaccctccgaaggaccacatagtcaactacc

SEQ ID NO: 699 - DNA, 80 bp, synthetic construct
  misc_feature 1..80: note = Synthetic: >NC_004162.2-cand-11190-11269
  source 1..80: mol_type = other DNA
acatttccgctacggcgatgtcatgggtgcagaagatcacgggaggtgtgggactggttgtcgctgttgcagcactgatt

SEQ ID NO: 700 - DNA, 80 bp, synthetic construct
  misc_feature 1..80: note = Synthetic: >NC_004162.2-cand-11240-11319
  source 1..80: mol_type = other DNA
ggactggttgtcgctgttgcagcactgattctaatcgtggtgctatgcgtgtcgttcagcaggcactaacttgacgacta

SEQ ID NO: 701 - DNA, 80 bp, synthetic construct
  misc_feature 1..80: note = Synthetic: >NC_004162.2-cand-11320-11399
  source 1..80: mol_type = other DNA
agcatgaaggtatatgtgtcccctaagagacacaccgtatatagctaataatctgtagatcaaagggctatataacccct

SEQ ID NO: 702 - DNA, 80 bp, synthetic construct
  misc_feature 1..80: note = Synthetic: >NC_004162.2-cand-11400-11479
  source 1..80: mol_type = other DNA
gaatagtaacaaaatacaaaatcactaaaaattataaaaaaaaaaaaaaaaaaacagaaaaatatataaataggtatacg

SEQ ID NO: 703 - DNA, 80 bp, synthetic construct
  misc_feature 1..80: note = Synthetic: >NC_004162.2-cand-11480-11559
  source 1..80: mol_type = other DNA
tgtcccctaagagacacattgtatgtaggtgataagtatagatcaaagggccgaacaacccctgaatagtaacaaaatat

SEQ ID NO: 704 - DNA, 80 bp, synthetic construct
  misc_feature 1..80: note = Synthetic: >NC_004162.2-cand-11570-11649
  source 1..80: mol_type = other DNA
aaaaatcataaaatagaaaaaccataaacagaagtagttcaaagggctataaaaacccctgaatagtaacaaaacataaa

SEQ ID NO: 705 - DNA, 80 bp, synthetic construct
  misc_feature 1..80: note = Synthetic: >NC_004297.1-cand-2100-2179
  source 1..80: mol_type = other DNA
ccatttctaagttctagcggaacttgccaatattgaatgccattagaatttgtcaacaatttgattcccttgacatcaga

SEQ ID NO: 706 - DNA, 80 bp, synthetic construct
  misc_feature 1..80: note = Synthetic: >NC_004297.1-cand-2180-2259
  source 1..80: mol_type = other DNA
aatcagagactgaatggacttaatatacagattctctttatttggtccccgaacacatttgctacccaatgttctgcaca

SEQ ID NO: 707 - DNA, 80 bp, synthetic construct
  misc_feature 1..80: note = Synthetic: >NC_004297.1-cand-2260-2339
  source 1..80: mol_type = other DNA
atcctacaaagccagatgcaatggaactttggaatgcagatttgttgatagcttcagacagcaatttttgcgcacctcga

SEQ ID NO: 708 - DNA, 80 bp, synthetic construct
  misc_feature 1..80: note = Synthetic: >NC_004297.1-cand-2340-2419
  source 1..80: mol_type = other DNA
gtgaaagtggaagacaacttattttggattgttttgacaatggtaggaatcttctcatcatctaggttcacagcacctga

SEQ ID NO: 709 - DNA, 80 bp, synthetic construct
  misc_feature 1..80: note = Synthetic: >NC_004297.1-cand-2420-2499
  source 1..80: mol_type = other DNA
atatattatcttttgtctcaacaccattcttaaaggatgatgcgcagccaagtttagccaagaatactcaaggtcagact

SEQ ID NO: 710 - DNA, 80 bp, synthetic construct
  misc_feature 1..80: note = Synthetic: >NC_004297.1-cand-2510-2589
  source 1..80: mol_type = other DNA
ctcaacatccaacagctcacaaagatttcttagtgatgagaggtgctcactagacaaatagtttgttgtgaactcttcat

SEQ ID NO: 711 - DNA, 80 bp, synthetic construct
  misc_feature 1..80: note = Synthetic: >NC_004297.1-cand-2590-2669
  source 1..80: mol_type = other DNA
ggagttgcccagtcttcaacctattgtacagttttcttaacatagatctaatcttgctgcaagcattaggaatcaatccc

SEQ ID NO: 712 - DNA, 80 bp, synthetic construct
  misc_feature 1..80: note = Synthetic: >NC_004297.1-cand-2670-2749
  source 1..80: mol_type = other DNA
tctatttgcctcataatcctataactacggttgccatctacccagtctctaacatctgtctcgcaattcaataagaatgg

SEQ ID NO: 713 - DNA, 80 bp, synthetic construct
  misc_feature 1..80: note = Synthetic: >NC_004297.1-cand-2750-2829
  source 1..80: mol_type = other DNA
gtcaatagggtatcttgcatattgcaaaggatttaaggttcttttctgtattagattacataagtgaacagggacaccat

SEQ ID NO: 714 - DNA, 80 bp, synthetic construct
  misc_feature 1..80: note = Synthetic: >NC_004297.1-cand-2830-2909
  source 1..80: mol_type = other DNA
tcgcaaccgactgatcaatgattgtgtcaattgtttctgccagttggtgtggctctttacactttatattgtgaagagct

SEQ ID NO: 715 - DNA, 80 bp, synthetic construct
  misc_feature 1..80: note = Synthetic: >NC_004297.1-cand-2910-2989
  source 1..80: mol_type = other DNA
gctgcaacgaactttgtcaataatggcacttcatctccccaaacaaaaaatctagatttaaactctgcaacaaacctgcc

SEQ ID NO: 716 - DNA, 80 bp, synthetic construct
  misc_feature 1..80: note = Synthetic: >NC_004297.1-cand-2990-3069
  source 1..80: mol_type = other DNA
aatgacacttttagggctcacaaacttattgagttgatcactcatataatagtggaactctattagagtcctaaattctt

SEQ ID NO: 717 - DNA, 80 bp, synthetic construct
  misc_feature 1..80: note = Synthetic: >NC_004297.1-cand-3070-3149
  source 1..80: mol_type = other DNA
ctgggtctctttgcaaaagctctgtgagagattgatcaaagagagaaatctgatcatcactagaggtataagcatctatc

SEQ ID NO: 718 - DNA, 80 bp, synthetic construct
  misc_feature 1..80: note = Synthetic: >NC_004297.1-cand-3150-3229
  source 1..80: mol_type = other DNA
gtaccaccgcatatacaactgatagcataattaatgaacctctctgaaatgagggcataaaaatctgatgtgttgtgtaa

SEQ ID NO: 719 - DNA, 80 bp, synthetic construct
  misc_feature 1..80: note = Synthetic: >NC_004297.1-cand-3230-3309
  source 1..80: mol_type = other DNA
tattccttgacccatgtcaagtattgaactgatgtgagaaggcactacaccagcttggaaattagagtaaaagaaatctt

SEQ ID NO: 720 - DNA, 80 bp, synthetic construct
  misc_feature 1..80: note = Synthetic: >NC_004297.1-cand-3310-3389
  source 1..80: mol_type = other DNA
ctgttattgactgtttagttttcttccttaaccctagttgggctttaatgaaagacttcatcatggctgtcaccacatta

SEQ ID NO: 721 - DNA, 80 bp, synthetic construct
  misc_feature 1..80: note = Synthetic: >NC_004910.1-cand-2180-2259
  source 1..80: mol_type = other DNA
gagaaagctaatgtattgatagggcaaggagacgtagtgttggtaatgaaacggaaacgggactctagcatacttactga

SEQ ID NO: 722 - DNA, 80 bp, synthetic construct
  misc_feature 1..80: note = Synthetic: >NC_004911.1-cand-60-139
  source 1..80: mol_type = other DNA
gcaaaatgcaataagtaccacattcccttatactggagatcccccatatagccatggaacaggaacaggatacaccatgg

SEQ ID NO: 723 - DNA, 80 bp, synthetic construct
  misc_feature 1..80: note = Synthetic: >NC_004911.1-cand-220-299
  source 1..80: mol_type = other DNA
cctattgatggaccattacctgaagacaatgagccgagcgggtatgcacaaacagattgtgtattggaagcaatggcttt

SEQ ID NO: 724 - DNA, 80 bp, synthetic construct
  misc_feature 1..80: note = Synthetic: >NC_004911.1-cand-300-379
  source 1..80: mol_type = other DNA
ccttgaagaatcccacccaggactctttgaaaactcatgtcttgaaacgatggaagttgtccagcaaacgagagtggata

SEQ ID NO: 725 - DNA, 80 bp, synthetic construct
  misc_feature 1..80: note = Synthetic: >NC_004911.1-cand-390-469
  source 1..80: mol_type = other DNA
aggtcgccagacttatgactggacattgaatagaaaccagccggctgcaactgctttggccaacaccatagaagtattca

SEQ ID NO: 726 - DNA, 80 bp, synthetic construct
  misc_feature 1..80: note = Synthetic: >NC_004911.1-cand-470-549
  source 1..80: mol_type = other DNA
gatcgaacggtctaacagccaatgagtcaggaaggttaatagatttcctcaaggacgtaatggaatcaatggataaggaa

SEQ ID NO: 727 - DNA, 80 bp, synthetic construct
  misc_feature 1..80: note = Synthetic: >NC_004911.1-cand-550-629
  source 1..80: mol_type = other DNA
gaaatggaaataacaacacatttccagagaaagagaagagtgagggacaacatgaccaagaaaatggtcacacaaagaac

SEQ ID NO: 728 - DNA, 80 bp, synthetic construct
  misc_feature 1..80: note = Synthetic: >NC_004911.1-cand-630-709
  source 1..80: mol_type = other DNA
aatagggaagaagaagcaaaagctgacaaaaaagagctacctaataagagcactgacactgaacacaatgacaaaagatg

SEQ ID NO: 729 - DNA, 80 bp, synthetic construct
  misc_feature 1..80: note = Synthetic: >NC_004911.1-cand-720-799
  source 1..80: mol_type = other DNA
aaaattgaaaagacgagcgattgcaacacccggaatgcaaatcagaggattcgtgcactttgtcgaagcactagcaagga

SEQ ID NO: 730 - DNA, 80 bp, synthetic construct
  misc_feature 1..80: note = Synthetic: >NC_004911.1-cand-800-879
  source 1..80: mol_type = other DNA
gcatctgtgaaaaacttgagcaatctggactccccgttggagggaatgagaagaaggctaaattggcaaatgttgtgaga

SEQ ID NO: 731 - DNA, 80 bp, synthetic construct
  misc_feature 1..80: note = Synthetic: >NC_004911.1-cand-880-959
  source 1..80: mol_type = other DNA
aagatgatgactaactcacaagacacagagctctcctttacagttaccggagacaacaccaaatggaatgagaatcagaa

SEQ ID NO: 732 - DNA, 80 bp, synthetic construct
  misc_feature 1..80: note = Synthetic: >NC_004911.1-cand-960-1039
  source 1..80: mol_type = other DNA
tcctcgaatatttctagcaatgataacatacatcacaaggaaccaacctgaatggtttagaaatgtcttgagcattgccc

SEQ ID NO: 733 - DNA, 80 bp, synthetic construct
  misc_feature 1..80: note = Synthetic: >NC_004911.1-cand-1030-1109
  source 1..80: mol_type = other DNA
agcattgcccctataatgttctcaaataaaatggcgaggttaggaaaaggatacatgttcgagagtaagagcatgaagct

SEQ ID NO: 734 - DNA, 80 bp, synthetic construct
  misc_feature 1..80: note = Synthetic: >NC_004911.1-cand-1110-1189
  source 1..80: mol_type = other DNA
acggacacaaataccagcagaaatgcttgcaaacattgacttgaaatacttcaacgaatcgacgagaaagaaaattgaga

SEQ ID NO: 735 - DNA, 80 bp, synthetic construct
  misc_feature 1..80: note = Synthetic: >NC_004911.1-cand-1190-1269
  source 1..80: mol_type = other DNA
aaataagacctctactaatagagggcacagcctcattgagtccagggatgatgatgggcatgtttaatatgctaagtacg

SEQ ID NO: 736 - DNA, 80 bp, synthetic construct
  misc_feature 1..80: note = Synthetic: >NC_004911.1-cand-1370-1449
  source 1..80: mol_type = other DNA
tgaatgcaccaaatcatgagggaatacaagcaggagtggatagattctataggacttgcaagctagttggaatcaacatg

SEQ ID NO: 737 - DNA, 80 bp, synthetic construct
  misc_feature 1..80: note = Synthetic: >NC_005235.1-cand-3430-3509
  source 1..80: mol_type = other DNA
gtgtgaacacagaaatgtggaaaagtatgttcaatctgcatgaacacgtacttctcctaggttccataaagatatccccc

SEQ ID NO: 738 - DNA, 80 bp, synthetic construct
  misc_feature 1..80: note = Synthetic: >NC_005235.1-cand-3510-3589
  source 1..80: mol_type = other DNA
aagaagacaacactatcaccaactaatgcggaattcctctctacgttctttgaaagctgtgctgtgtcaataccctttat

SEQ ID NO: 739 - DNA, 80 bp, synthetic construct
  misc_feature 1..80: note = Synthetic: >NC_005235.1-cand-3590-3669
  source 1..80: mol_type = other DNA
caaaatattgttaggttctctatcagatttgcctggtttaggttactttgatgaccttgctgctgctcaaagtagatgtg

SEQ ID NO: 740 - DNA, 80 bp, synthetic construct
  misc_feature 1..80: note = Synthetic: >NC_005235.1-cand-3670-3749
  source 1..80: mol_type = other DNA
tcaaagcaatggaccttggtgcatcaccacaagttgcccaacttgctgttgcactatgcacaaataaggttgaaagatta

SEQ ID NO: 741 - DNA, 80 bp, synthetic construct
  misc_feature 1..80: note = Synthetic: >NC_005235.1-cand-3750-3829
  source 1..80: mol_type = other DNA
tatgggacagctgttggtatgataaaacatccatcaacatatcttcaagtcaagcatggtgatacacctattcctctagg

SEQ ID NO: 742 - DNA, 80 bp, synthetic construct
  misc_feature 1..80: note = Synthetic: >NC_005235.1-cand-3830-3909
  source 1..80: mol_type = other DNA
tggaagtggtgccatgtcaataatggagctagcaactgctggtattggtatgtctgataaaaatctcttaaaaagggcac

SEQ ID NO: 743 - DNA, 80 bp, synthetic construct
  misc_feature 1..80: note = Synthetic: >NC_005235.1-cand-3910-3989
  source 1..80: mol_type = other DNA
ttttaggctacatacataaaaggcaaaaaaatatggcatatattcttggcctttttaaattcttaatgaacttatcaaaa

SEQ ID NO: 744 - DNA, 80 bp, synthetic construct
  misc_feature 1..80: note = Synthetic: >NC_005235.1-cand-3990-4069
  source 1..80: mol_type = other DNA
gatacattccagcatgaaagattgggtgagttttcattcatagggaaagtgcaatggaaaatatttataccgaaatcaga

SEQ ID NO: 745 - DNA, 80 bp, synthetic construct
  misc_feature 1..80: note = Synthetic: >NC_005235.1-cand-4080-4159
  source 1..80: mol_type = other DNA
tttgacatgtacacaccaaaattcttaaagctatggagtgaacaacatgttacttatgattacattattccaaagggtag

SEQ ID NO: 746 - DNA, 80 bp, synthetic construct
  misc_feature 1..80: note = Synthetic: >NC_005235.1-cand-4160-4239
  source 1..80: mol_type = other DNA
agataatctattaatctatcttgttaggaaaataaatgatccaagcatagtcactgctatgacaatgcaatcaccactcc

SEQ ID NO: 747 - DNA, 80 bp, synthetic construct
  misc_feature 1..80: note = Synthetic: >NC_005235.1-cand-4240-4319
  source 1..80: mol_type = other DNA
agttaagattcagaatgcaagcaaagcaacacatgaaagtttgcaaattggatgatgactgggttacatttagggagatc

SEQ ID NO: 748 - DNA, 80 bp, synthetic construct
  misc_feature 1..80: note = Synthetic: >NC_005235.1-cand-4320-4399
  source 1..80: mol_type = other DNA
ttagctgcagcaaatagttttgcacaattgtatgaggtaactcaagaagatcttgatctttttcagacactaacaagttg

SEQ ID NO: 749 - DNA, 80 bp, synthetic construct
  misc_feature 1..80: note = Synthetic: >NC_005235.1-cand-4360-4439
  source 1..80: mol_type = other DNA
ctcaagaagatcttgatctttttcagacactaacaagttgtacattttcaaaggaatatgcatggaaagatttcttgaat

SEQ ID NO: 750 - DNA, 80 bp, synthetic construct
  misc_feature 1..80: note = Synthetic: >NC_005235.1-cand-4480-4559
  source 1..80: mol_type = other DNA
gggcaaaagtggccagaacattcactgtgagagaaaaagatcagatcattcaaaatagtatcccagctgtgattgggtat

SEQ ID NO: 751 - DNA, 80 bp, synthetic construct
  misc_feature 1..80: note = Synthetic: >NC_005235.1-cand-4560-4639
  source 1..80: mol_type = other DNA
aaatttgcagtaacagttgatgaaatgtcagatgttttggattctgcaaagttccctgactctctagctgtagatctgaa

SEQ ID NO: 752 - DNA, 80 bp, synthetic construct
  misc_feature 1..80: note = Synthetic: >NC_005235.1-cand-4660-4739
  source 1..80: mol_type = other DNA
atagggaacttgggttggatatctcacaggctgaagtaatgaagaaggttgcacctatgctatataagagctcaaagtca

SEQ ID NO: 753 - DNA, 80 bp, synthetic construct
  misc_feature 1..80: note = Synthetic: >NC_005300.2-cand-3300-3379
  source 1..80: mol_type = other DNA
aaatgttcagtcaacctacaaaccaactgtgtcaactgcaaacatagcactcagttggagctcagtggaacacagaggca

SEQ ID NO: 754 - DNA, 80 bp, synthetic construct
  misc_feature 1..80: note = Synthetic: >NC_005300.2-cand-3370-3449
  source 1..80: mol_type = other DNA
cacagaggcaataagatcttggtttcaggcagatcagaatcaattatgaagctggaagaaaggacaggaatcagctggga

SEQ ID NO: 755 - DNA, 80 bp, synthetic construct
  misc_feature 1..80: note = Synthetic: >NC_005300.2-cand-3450-3529
  source 1..80: mol_type = other DNA
tctcggtgtagaagatgcctctgaatctaaactgcttacagtatctgtcatggacttgtctcagatgtactctcctgtct

SEQ ID NO: 756 - DNA, 80 bp, synthetic construct
  misc_feature 1..80: note = Synthetic: >NC_005300.2-cand-3550-3629
  source 1..80: mol_type = other DNA
agacaggtgggagagtggcccaaagcaacttgcacaggtgactgcccagaaagatgtggctgcacatcatcaacctgttt

SEQ ID NO: 757 - DNA, 80 bp, synthetic construct
  misc_feature 1..80: note = Synthetic: >NC_005300.2-cand-3600-3679
  source 1..80: mol_type = other DNA
aagatgtggctgcacatcatcaacctgtttgcacaaagaatggcctcactcaagaaattggagatgcaatcccacttggt

SEQ ID NO: 758 - DNA, 80 bp, synthetic construct
  misc_feature 1..80: note = Synthetic: >NC_005300.2-cand-3690-3769
  source 1..80: mol_type = other DNA
agggactggctgcacctgttgtggattagatgtgaaagacctttttacagattatatgtttgtcaagtggaaagttgaat

SEQ ID NO: 759 - DNA, 80 bp, synthetic construct
  misc_feature 1..80: note = Synthetic: >NC_005300.2-cand-3770-3849
  source 1..80: mol_type = other DNA
acatcaagacagaggccatagtgtgtgtagaacttactagtcaggaaaggcagtgtagcttgattgaagcgggcacaagg

SEQ ID NO: 760 - DNA, 80 bp, synthetic construct
  misc_feature 1..80: note = Synthetic: >NC_005300.2-cand-3850-3929
  source 1..80: mol_type = other DNA
ttcaatttaggtcctgtgaccatcacactgtcagaaccaagaaacatccaacaaaaactccctcctgaaataatcacact

SEQ ID NO: 761 - DNA, 80 bp, synthetic construct
  misc_feature 1..80: note = Synthetic: >NC_005300.2-cand-3930-4009
  source 1..80: mol_type = other DNA
gcatcctaggatcgaagaaggtttttttgacctgatgcatgtgcaaaaggtgttatcggcaagcacagtgtgtaagttgc

SEQ ID NO: 762 - DNA, 80 bp, synthetic construct
  misc_feature 1..80: note = Synthetic: >NC_005300.2-cand-3990-4069
  source 1..80: mol_type = other DNA
aagcacagtgtgtaagttgcagagttgcacacatggtgtgccaggagacctacaggtctaccacatcggaaatttattaa

SEQ ID NO: 763 - DNA, 80 bp, synthetic construct
  misc_feature 1..80: note = Synthetic: >NC_005300.2-cand-4090-4169
  source 1..80: mol_type = other DNA
catctaattcataaaattgagccacacttcaacacctcctggatgtcctgggatggttgtgacctagactactactgcaa

SEQ ID NO: 764 - DNA, 80 bp, synthetic construct
  misc_feature 1..80: note = Synthetic: >NC_005300.2-cand-4210-4289
  source 1..80: mol_type = other DNA
caacacaatcatgcttcatttgtaaacttactcaacattgaaactgattacacaaagaacttccactttcactctaaaag

SEQ ID NO: 765 - DNA, 80 bp, synthetic construct
  misc_feature 1..80: note = Synthetic: >NC_005300.2-cand-4250-4329
  source 1..80: mol_type = other DNA
aaactgattacacaaagaacttccactttcactctaaaagggtcactgcacacggagatacaccacaactagatcttaag

SEQ ID NO: 766 - DNA, 80 bp, synthetic construct
  misc_feature 1..80: note = Synthetic: >NC_005300.2-cand-4330-4409
  source 1..80: mol_type = other DNA
gcaagaccaacctatggtgcaggcgagatcactgttctggtagaagttgctgacatggagttacatacaaagaagattga

SEQ ID NO: 767 - DNA, 80 bp, synthetic construct
  misc_feature 1..80: note = Synthetic: >NC_005300.2-cand-4410-4489
  source 1..80: mol_type = other DNA
aatatcaggcttaaaatttgcaagcttagcttgcacaggttgttatgcttgtagctctggcatctcatgcaaagttagaa

SEQ ID NO: 768 - DNA, 80 bp, synthetic construct
  misc_feature 1..80: note = Synthetic: >NC_005300.2-cand-4490-4569
  source 1..80: mol_type = other DNA
ttcatgtggatgaaccagatgaacttacagtacatgttaaaagtgatgatccagatgtggttgcagctagctcaagtctc

SEQ ID NO: 769 - DNA, 80 bp, synthetic construct
  misc_feature 1..80: note = Synthetic: >NC_006577.2-cand-11330-11409
  source 1..80: mol_type = other DNA
actctgtaccttgttttatgtaaattatttagttgtttataaggaaggttttagaggttttacttatgtctggctctcat

SEQ ID NO: 770 - DNA, 80 bp, synthetic construct
  misc_feature 1..80: note = Synthetic: >NC_006577.2-cand-11410-11489
  source 1..80: mol_type = other DNA
attttgttcctgctgtgaattttacttatgtttatgaagtattttatggttgtattttatgtgtttttgctatttttata

SEQ ID NO: 771 - DNA, 80 bp, synthetic construct
  misc_feature 1..80: note = Synthetic: >NC_006577.2-cand-11490-11569
  source 1..80: mol_type = other DNA
actatgcatagtattaatcatgacattttttctttgatgtttttggttggtagaatagttactttaatttctatgtggta

SEQ ID NO: 772 - DNA, 80 bp, synthetic construct
  misc_feature 1..80: note = Synthetic: >NC_006577.2-cand-11570-11649
  source 1..80: mol_type = other DNA
ttttgggtcgaatttagaagaggatgttttgttatttattacagcctttttaggtacttatacatggaccactattttgt

SEQ ID NO: 773 - DNA, 80 bp, synthetic construct
  misc_feature 1..80: note = Synthetic: >NC_006577.2-cand-11650-11729
  source 1..80: mol_type = other DNA
cattagctatagcaaaaattgttgctaattggttgtctgttaatatattttattttacagatgtaccttatattaaattg

SEQ ID NO: 774 - DNA, 80 bp, synthetic construct
  misc_feature 1..80: note = Synthetic: >NC_006577.2-cand-11690-11769
  source 1..80: mol_type = other DNA
taatatattttattttacagatgtaccttatattaaattgattctcttgagttacttatttatagggtatattttatctt

SEQ ID NO: 775 - DNA, 80 bp, synthetic construct
  misc_feature 1..80: note = Synthetic: >NC_006577.2-cand-11810-11889
  source 1..80: mol_type = other DNA
aatgcctatgggtgtttataattataaaatttctgttcaagaattgcgttatatgaatgctaatggcttacgtccacctc

SEQ ID NO: 776 - DNA, 80 bp, synthetic construct
  misc_feature 1..80: note = Synthetic: >NC_006577.2-cand-11890-11969
  source 1..80: mol_type = other DNA
gtaatagttttgaggctattttgttaaatttaaaactgcttggaataggtggcgtgccagttattgaagtctcccaaatt

SEQ ID NO: 777 - DNA, 80 bp, synthetic construct
  misc_feature 1..80: note = Synthetic: >NC_006577.2-cand-11970-12049
  source 1..80: mol_type = other DNA
caatcaaaattgactgatgtgaaatgtgctaatgttgttttgttaaattgtttacagcatttgcatgttgcttctaattc

SEQ ID NO: 778 - DNA, 80 bp, synthetic construct
  misc_feature 1..80: note = Synthetic: >NC_006577.2-cand-12050-12129
  source 1..80: mol_type = other DNA
taagttgtggcagtattgtagtgttttacataatgaaatactatctacttcagatttgagtgtagcttttgataagcttg

SEQ ID NO: 779 - DNA, 80 bp, synthetic construct
  misc_feature 1..80: note = Synthetic: >NC_006577.2-cand-12130-12209
  source 1..80: mol_type = other DNA
ctcaattattgattgttttattcgccaatcctgctgcagttgatactaagtgtcttgcaagtatagatgaagttagcgat

SEQ ID NO: 780 - DNA, 80 bp, synthetic construct
  misc_feature 1..80: note = Synthetic: >NC_006577.2-cand-12210-12289
  source 1..80: mol_type = other DNA
gattatgttcaagatagtaccgttttgcaggctttgcaaagtgagtttgtaaatatggctagttttgttgaatatgaagt

SEQ ID NO: 781 - DNA, 80 bp, synthetic construct
  misc_feature 1..80: note = Synthetic: >NC_006577.2-cand-12290-12369
  source 1..80: mol_type = other DNA
cgcaaagaaaaatttggctgatgctaaaaatagtggttctgttaatcaacaacagataaaacagttagaaaaagcatgta

SEQ ID NO: 782 - DNA, 80 bp, synthetic construct
  misc_feature 1..80: note = Synthetic: >NC_006577.2-cand-12370-12449
  source 1..80: mol_type = other DNA
atatagctaagtctgtgtatgaacgtgataaagctgtagctcgcaaacttgaacgtatggcagacctagcacttactaac

SEQ ID NO: 783 - DNA, 80 bp, synthetic construct
  misc_feature 1..80: note = Synthetic: >NC_006577.2-cand-12450-12529
  source 1..80: mol_type = other DNA
atgtataaagaggctcggattaatgataagaagagtaaagttgtttccgctttgcagacaatgctttttagcatggttcg

SEQ ID NO: 784 - DNA, 80 bp, synthetic construct
  misc_feature 1..80: note = Synthetic: >NC_006577.2-cand-12530-12609
  source 1..80: mol_type = other DNA
taaattggataatcaggctttaaattctattctggataatgctgttaaaggttgtgtacctttgagtgctattccagcat

SEQ ID NO: 785 - DNA, 80 bp, synthetic construct
  misc_feature 1..80: note = Synthetic: >NC_007358.1-cand-1540-1619
  source 1..80: mol_type = other DNA
ggagctgcccagctttggagtgtctgggattaatgaatcggctgacatgagcattggtgttacagtgataaagaacaata

SEQ ID NO: 786 - DNA, 80 bp, synthetic construct
  misc_feature 1..80: note = Synthetic: >NC_007358.1-cand-1610-1689
  source 1..80: mol_type = other DNA
aagaacaatatgatggacaacgaccttggaccagcaacagctcagatggctcttcagctattcattaaggactacagata

SEQ ID NO: 787 - DNA, 80 bp, synthetic construct
  misc_feature 1..80: note = Synthetic: >NC_007358.1-cand-1710-1789
  source 1..80: mol_type = other DNA
gggatacacaaatccaaacgaggagatcattcgagctgaagaagctgtgggagcagacccgctcaaaggcaggactgttg

SEQ ID NO: 788 - DNA, 80 bp, synthetic construct
  misc_feature 1..80: note = Synthetic: >NC_007358.1-cand-1770-1849
  source 1..80: mol_type = other DNA
gctcaaaggcaggactgttggtttcagatggaggaccaaacccatacaatatccggaatctccacattccggaggctggc

SEQ ID NO: 789 - DNA, 80 bp, synthetic construct
  misc_feature 1..80: note = Synthetic: >NC_007358.1-cand-1850-1929
  source 1..80: mol_type = other DNA
ttgaagtgggaattgatggatgaagactaccagggcagactgtgtaatcctctgaacccgtttgttagtcataaggaaat

SEQ ID NO: 790 - DNA, 80 bp, synthetic construct
  misc_feature 1..80: note = Synthetic: >NC_007358.1-cand-1920-1999
  source 1..80: mol_type = other DNA
ataaggaaattgagtctgtcaacaatgctgtggtaatgccagctcatggcccagccaagagcatggaatatgatgcagtt

SEQ ID NO: 791 - DNA, 80 bp, synthetic construct
  misc_feature 1..80: note = Synthetic: >NC_007358.1-cand-1980-2059
  source 1..80: mol_type = other DNA
gcatggaatatgatgcagttgcgactacacattcatggattcccaagaggaatcgttccattctcaacaccagccaaagg

SEQ ID NO: 792 - DNA, 80 bp, synthetic construct
  misc_feature 1..80: note = Synthetic: >NC_007359.1-cand-100-179
  source 1..80: mol_type = other DNA
tccgaaaatcgaaacgaacaaatttgccgcaatatgcacgcacttagaagtctgtttcatgtattcagatttccacttta

SEQ ID NO: 793 - DNA, 80 bp, synthetic construct
  misc_feature 1..80: note = Synthetic: >NC_007359.1-cand-190-269
  source 1..80: mol_type = other DNA
gggcgaatcaacaattatagaatctggcgatcccaatgcattattgaaacaccggtttgaaataatcgaagggagggacc

SEQ ID NO: 794 - DNA, 80 bp, synthetic construct
  misc_feature 1..80: note = Synthetic: >NC_007359.1-cand-230-309
  source 1..80: mol_type = other DNA
ttattgaaacaccggtttgaaataatcgaagggagggaccgaacaatggcctggacagtggtgaatagtatctgcaacac

SEQ ID NO: 795 - DNA, 80 bp, synthetic construct
  misc_feature 1..80: note = Synthetic: >NC_007359.1-cand-310-389
  source 1..80: mol_type = other DNA
cacaggagttgagaagcctaaatttctcccagatttgtatgactacaaggagaaccgatttattgaaattggagtgacac

SEQ ID NO: 796 - DNA, 80 bp, synthetic construct
  misc_feature 1..80: note = Synthetic: >NC_007359.1-cand-390-469
  source 1..80: mol_type = other DNA
ggagggaagttcacacatactatctagaaaaagccaacaagataaaatctgagaagacacacattcacatattctcattc

SEQ ID NO: 797 - DNA, 80 bp, synthetic construct
  misc_feature 1..80: note = Synthetic: >NC_007359.1-cand-480-559
  source 1..80: mol_type = other DNA
aaatggccaccaaagcggactacacccttgatgaagaaagcagggcccgaatcaaaaccaggctgttcactataaggcag

SEQ ID NO: 798 - DNA, 80 bp, synthetic construct
  misc_feature 1..80: note = Synthetic: >NC_007359.1-cand-580-659
  source 1..80: mol_type = other DNA
atgggattcctttcgtcagtccgagagaggcgaagagacagttgaagaaagatttgaaatcacagggactatgtgcaggc

SEQ ID NO: 799 - DNA, 80 bp, synthetic construct
  misc_feature 1..80: note = Synthetic: >NC_007359.1-cand-650-729
  source 1..80: mol_type = other DNA
atgtgcaggcttgccgaccaaagtctcccacctaatttctccagccttgaaaaatttagagcctatgtggatggattcga

SEQ ID NO: 800 - DNA, 80 bp, synthetic construct
  misc_feature 1..80: note = Synthetic: >NC_007359.1-cand-820-899
  source 1..80: mol_type = other DNA
tcttagattacctgatgggcctccctgctctcagcggtcgaagtttttgctgatggatgcccttaaattaagcatcgaag

SEQ ID NO: 801 - DNA, 80 bp, synthetic construct
  misc_feature 1..80: note = Synthetic: >NC_009825.1-cand-6890-6969
  source 1..80: mol_type = other DNA
ctttcgccccgtcttcttcaggccacgtgtaccgctccccatgactcccctggtactgatctcctcgaggctaacctctt

SEQ ID NO: 802 - DNA, 80 bp, synthetic construct
  misc_feature 1..80: note = Synthetic: >NC_009825.1-cand-6990-7069
  source 1..80: mol_type = other DNA
gggttgagacggacgagaaggtaataatactagactcttttgagtcatgtgtggctgagcaaaatgatgacagggaagtc

SEQ ID NO: 803 - DNA, 80 bp, synthetic construct
  misc_feature 1..80: note = Synthetic: >NC_009825.1-cand-7070-7149
  source 1..80: mol_type = other DNA
tcggttgccgcggaaatcctgcgtccgaccaagaagttccctccagcactaccgatctgggcccggccggactacaatcc

SEQ ID NO: 804 - DNA, 80 bp, synthetic construct
  misc_feature 1..80: note = Synthetic: >NC_009825.1-cand-7150-7229
  source 1..80: mol_type = other DNA
acctcttaccgagacgtggaagcagcaggactaccaagctccgaccgtccacggttgcgctctgcctccggcaaagcagc

SEQ ID NO: 805 - DNA, 80 bp, synthetic construct
  misc_feature 1..80: note = Synthetic: >NC_009825.1-cand-7230-7309
  source 1..80: mol_type = other DNA
cccctgttccctctcccaggaggaaacggacggtacagctcactgagtccgttgtttctaccgctttggcagagctggcc

SEQ ID NO: 806 - DNA, 80 bp, synthetic construct
  misc_feature 1..80: note = Synthetic: >NC_009825.1-cand-7310-7389
  source 1..80: mol_type = other DNA
gcaaagacctttggccagtcagagccgagctcagaccgtgatacagaccttaccaccccaactgagaccacagactcggg

SEQ ID NO: 807 - DNA, 80 bp, synthetic construct
  misc_feature 1..80: note = Synthetic: >NC_009825.1-cand-7370-7449
  source 1..80: mol_type = other DNA
actgagaccacagactcgggccccatcgtcgtggatgatgcatccgatgacggatcttattcgtcaatgcctccactaga

SEQ ID NO: 808 - DNA, 80 bp, synthetic construct
  misc_feature 1..80: note = Synthetic: >NC_009825.1-cand-7470-7549
  source 1..80: mol_type = other DNA
acttgacatcagactcttggtccactgttagcggatcggaggacgtcgtgtgctgttcgatgtcatactcgtggactggg

SEQ ID NO: 809 - DNA, 80 bp, synthetic construct
  misc_feature 1..80: note = Synthetic: >NC_009825.1-cand-7550-7629
  source 1..80: mol_type = other DNA
gcgcttgtaacaccttgcgcggctgaagaatcaaagctgccaattagccccctgagcaattcacttttgcgccatcacaa

SEQ ID NO: 810 - DNA, 80 bp, synthetic construct
  misc_feature 1..80: note = Synthetic: >NC_009825.1-cand-7630-7709
  source 1..80: mol_type = other DNA
tatggtgtatgccacgaccacccgttctgctgtgacacggcagaagaaggtgaccttcgaccgcctgcaggtggtggaca

SEQ ID NO: 811 - DNA, 80 bp, synthetic construct
  misc_feature 1..80: note = Synthetic: >NC_009825.1-cand-7710-7789
  source 1..80: mol_type = other DNA
gtacctacaatgaagtgcttaaggagataaaggcacgagcatccagagtgaagccacgcttgcttaccacagaggaagct

SEQ ID NO: 812 - DNA, 80 bp, synthetic construct
  misc_feature 1..80: note = Synthetic: >NC_009825.1-cand-7790-7869
  source 1..80: mol_type = other DNA
tgcgacctgacgcccccccactcagccagatcaaagttcggctacgggaaaaaggatgttcggagccattcccgcaaggc

SEQ ID NO: 813 - DNA, 80 bp, synthetic construct
  misc_feature 1..80: note = Synthetic: >NC_009825.1-cand-7870-7949
  source 1..80: mol_type = other DNA
cattaaccacatcagctccgtgtggaaggacttgctggacgacaacaataccccaattccaacaacaatcatggccaaaa

SEQ ID NO: 814 - DNA, 80 bp, synthetic construct
  misc_feature 1..80: note = Synthetic: >NC_009825.1-cand-7950-8029
  source 1..80: mol_type = other DNA
atgaggtcttcgctgtgaacccagcgaagggaggtcggaagcctgctcgcctgatcgtgtatccggatctcggatcccgg

SEQ ID NO: 815 - DNA, 80 bp, synthetic construct
  misc_feature 1..80: note = Synthetic: >NC_009825.1-cand-8030-8109
  source 1..80: mol_type = other DNA
gtttgcgagaagagagcgcttcacgacgtcatcaaaaaaactgccttagccgtgatgggagccgcttatggcttccaata

SEQ ID NO: 816 - DNA, 80 bp, synthetic construct
  misc_feature 1..80: note = Synthetic: >NC_009825.1-cand-8090-8169
  source 1..80: mol_type = other DNA
gccgcttatggcttccaatactccccagcgcagcgggtggaatttcttctgactgcttggaagtcgaagaacgacccaat

SEQ ID NO: 817 - DNA, 80 bp, synthetic construct
  misc_feature 1..80: note = Synthetic: >NC_009942.1-cand-2420-2499
  source 1..80: mol_type = other DNA
gcagttggaggagttctgctcttcctctccgtgaacgtgcacgctgacactgggtgtgccatagacatcagccggcaaga

SEQ ID NO: 818 - DNA, 80 bp, synthetic construct
  misc_feature 1..80: note = Synthetic: >NC_009942.1-cand-2500-2579
  source 1..80: mol_type = other DNA
gctgagatgtggaagtggagtgttcatacacaatgatgtggaggcttggatggaccggtacaagtattaccctgaaacgc

SEQ ID NO: 819 - DNA, 80 bp, synthetic construct
  misc_feature 1..80: note = Synthetic: >NC_009942.1-cand-2580-2659
  source 1..80: mol_type = other DNA
cacaaggcctagccaagatcattcagaaagctcataaggaaggagtgtgcggtctacgatcagtttccagactggagcat

SEQ ID NO: 820 - DNA, 80 bp, synthetic construct
  misc_feature 1..80: note = Synthetic: >NC_009942.1-cand-2660-2739
  source 1..80: mol_type = other DNA
caaatgtgggaagcagtgaaggacgagctgaacactcttttgaaggagaatggtgtggaccttagtgtcgtggttgagaa

SEQ ID NO: 821 - DNA, 80 bp, synthetic construct
  misc_feature 1..80: note = Synthetic: >NC_009942.1-cand-2740-2819
  source 1..80: mol_type = other DNA
acaggagggaatgtacaagtcagcacctaaacgcctcaccgccaccacggaaaaattggaaattggctggaaggcctggg

SEQ ID NO: 822 - DNA, 80 bp, synthetic construct
  misc_feature 1..80: note = Synthetic: >NC_009942.1-cand-2820-2899
  source 1..80: mol_type = other DNA
gaaagagtattttatttgcaccagaactcgccaacaacacctttgtggttgatggtccggagaccaaggaatgtccgact

SEQ ID NO: 823 - DNA, 80 bp, synthetic construct
  misc_feature 1..80: note = Synthetic: >NC_009942.1-cand-2900-2979
  source 1..80: mol_type = other DNA
cagaatcgcgcttggaatagcttagaagtggaggattttggatttggtctcaccagcactcggatgttcctgaaggtcag

SEQ ID NO: 824 - DNA, 80 bp, synthetic construct
  misc_feature 1..80: note = Synthetic: >NC_009942.1-cand-2980-3059
  source 1..80: mol_type = other DNA
agagagcaacacaactgaatgtgactcgaagatcattggaacggctgtcaagaacaacttggcgatccacagtgacctgt

SEQ ID NO: 825 - DNA, 80 bp, synthetic construct
  misc_feature 1..80: note = Synthetic: >NC_009942.1-cand-3060-3139
  source 1..80: mol_type = other DNA
cctattggattgaaagcaggctcaatgatacgtggaagcttgaaagggcagttctgggtgaagtcaaatcatgtacgtgg

SEQ ID NO: 826 - DNA, 80 bp, synthetic construct
  misc_feature 1..80: note = Synthetic: >NC_009942.1-cand-3160-3239
  source 1..80: mol_type = other DNA
gggcgatggaatccttgagagtgacttgataataccagtcacactggcgggaccacgaagcaatcacaatcggagacctg

SEQ ID NO: 827 - DNA, 80 bp, synthetic construct
  misc_feature 1..80: note = Synthetic: >NC_009942.1-cand-3220-3299
  source 1..80: mol_type = other DNA
caatcacaatcggagacctgggtacaagacacaaaaccagggcccatgggacgaaggccgggtagagattgacttcgatt

SEQ ID NO: 828 - DNA, 80 bp, synthetic construct
  misc_feature 1..80: note = Synthetic: >NC_009942.1-cand-3300-3379
  source 1..80: mol_type = other DNA
actgcccaggaactacggtcaccctgagtgagagctgcggacaccgtggacctgccactcgcaccaccacagagagcgga

SEQ ID NO: 829 - DNA, 80 bp, synthetic construct
  misc_feature 1..80: note = Synthetic: >NC_009942.1-cand-3380-3459
  source 1..80: mol_type = other DNA
aagttgataacagattggtgctgcaggagctgcaccttaccaccactgcgctaccaaactgacagcggctgttggtatgg

SEQ ID NO: 830 - DNA, 80 bp, synthetic construct
  misc_feature 1..80: note = Synthetic: >NC_009942.1-cand-3460-3539
  source 1..80: mol_type = other DNA
tatggagatcagaccacagagacatgatgaaaagaccctcgtgcagtcacaagtgaatgcttataatgctgatatgattg

SEQ ID NO: 831 - DNA, 80 bp, synthetic construct
  misc_feature 1..80: note = Synthetic: >NC_009942.1-cand-3580-3659
  source 1..80: mol_type = other DNA
ccaggaggtccttcgcaagaggtggacagccaagatcagcatgccagctatactgattgctctgctagtcctggtgtttg

SEQ ID NO: 832 - DNA, 80 bp, synthetic construct
  misc_feature 1..80: note = Synthetic: >NC_009942.1-cand-3710-3789
  source 1..80: mol_type = other DNA
gctttcgcagaatctaattcgggaggagacgtggtacacttggcgctcatggcgaccttcaagatacaaccagtgtttat

SEQ ID NO: 833 - DNA, 80 bp, synthetic construct
  misc_feature 1..80: note = Synthetic: >NC_015150.1-cand-1450-1529
  source 1..80: mol_type = other DNA
agaaaaaggcaagagtgcggagcatgtcctgtaaaaaaaacctgtccaacacccgctcccgttcccaaactccttgtcaa

SEQ ID NO: 834 - DNA, 80 bp, synthetic construct
  misc_feature 1..80: note = Synthetic: >NC_015150.1-cand-1560-1639
  source 1..80: mol_type = other DNA
aggcccagatgctataactcaaattgaggcctacctaaatccaagaatgggaaacaataaccctactgatgaattgtatg

SEQ ID NO: 835 - DNA, 80 bp, synthetic construct
  misc_feature 1..80: note = Synthetic: >NC_015150.1-cand-1640-1719
  source 1..80: mol_type = other DNA
gctacagtgcagatataaatgttgcctccagcaaggctagtgataaccctaatgctactaccctccctacttactcagtg

SEQ ID NO: 836 - DNA, 80 bp, synthetic construct
  misc_feature 1..80: note = Synthetic: >NC_015150.1-cand-1720-1799
  source 1..80: mol_type = other DNA
gctgtaattaagctacccatgctaaatgaagacatgacctgtgacacacttctaatgtgggaggctgtgtcagtaaaaac

SEQ ID NO: 837 - DNA, 80 bp, synthetic construct
  misc_feature 1..80: note = Synthetic: >NC_015150.1-cand-1850-1929
  source 1..80: mol_type = other DNA
atatctatggctcatcctcaggaactatcccagtgcagggtaccactctccacatgttttcagtgggtggagagcctctt

SEQ ID NO: 838 - DNA, 80 bp, synthetic construct
  misc_feature 1..80: note = Synthetic: >NC_015150.1-cand-1880-1959
  source 1..80: mol_type = other DNA
cagtgcagggtaccactctccacatgttttcagtgggtggagagcctcttgaacttcaaggcctagttgctagctctact

SEQ ID NO: 839 - DNA, 80 bp, synthetic construct
  misc_feature 1..80: note = Synthetic: >NC_015150.1-cand-1960-2039
  source 1..80: mol_type = other DNA
actacctatcctactgatatggtaactattaaaaatatgaaaccagtaaaccaggccttggatcctaatgctaaagcttt

SEQ ID NO: 840 - DNA, 80 bp, synthetic construct
  misc_feature 1..80: note = Synthetic: >NC_015150.1-cand-2040-2119
  source 1..80: mol_type = other DNA
gctagacaaagatggaaagtaccctgtagaagtttggagcccagacccctctaaaaatgagaatacaagatactatggga

SEQ ID NO: 841 - DNA, 80 bp, synthetic construct
  misc_feature 1..80: note = Synthetic: >NC_015150.1-cand-2120-2199
  source 1..80: mol_type = other DNA
gcttcactggaggagccacaaccccccctgttatgcagtttactaactctgtaaccacggtgctattggatgaaaatgga

SEQ ID NO: 842 - DNA, 80 bp, synthetic construct
  misc_feature 1..80: note = Synthetic: >NC_015150.1-cand-2220-2299
  source 1..80: mol_type = other DNA
ggacaagctgtttttgtctgctgttgatattgttggaattcacactaattattcagaatcccaaaactggagaggcctac

SEQ ID NO: 843 - DNA, 80 bp, synthetic construct
  misc_feature 1..80: note = Synthetic: >NC_015150.1-cand-2280-2359
  source 1..80: mol_type = other DNA
ccaaaactggagaggcctacctagatattttaatgtaactctaaggaaacgggttgttaaaaatccttatcctgtaagct

SEQ ID NO: 844 - DNA, 80 bp, synthetic construct
  misc_feature 1..80: note = Synthetic: >NC_015150.1-cand-2360-2439
  source 1..80: mol_type = other DNA
ctctccttaatagcttgttctctggtcttatgcctcaaattcagggacaacccatggaaggaacttcagggcaagtggaa

SEQ ID NO: 845 - DNA, 80 bp, synthetic construct
  misc_feature 1..80: note = Synthetic: >NC_015150.1-cand-2480-2559
  source 1..80: mol_type = other DNA
accctgatcttgatagatatgttgataaattttgtcagaatcaaactgtcccccctcgctcaaatgatcaatgaggctgg

SEQ ID NO: 846 - DNA, 80 bp, synthetic construct
  misc_feature 1..80: note = Synthetic: >NC_015150.1-cand-2520-2599
  source 1..80: mol_type = other DNA
tcaaactgtcccccctcgctcaaatgatcaatgaggctggttgcattgtaaagctttattgtattaacaaaaccatgaat

SEQ ID NO: 847 - DNA, 80 bp, synthetic construct
  misc_feature 1..80: note = Synthetic: >NC_015150.1-cand-2580-2659
  source 1..80: mol_type = other DNA
gtattaacaaaaccatgaataaatctgaagaagaaaagtacaaattgttatgcttgttcttcaataacaattccatgcag

SEQ ID NO: 848 - DNA, 80 bp, synthetic construct
  misc_feature 1..80: note = Synthetic: >NC_015150.1-cand-2680-2759
  source 1..80: mol_type = other DNA
tgttttgctggatatttccaaactgagtaatagatacatgtctctctaaaatctctttccattttacaacatattcctgg

SEQ ID NO: 849 - DNA, 80 bp, synthetic construct
  misc_feature 1..80: note = Synthetic: >NC_019843.3-cand-12170-12249
  source 1..80: mol_type = other DNA
ctttgcagaaggctgttaatatagctaaaaacgcctatgagaaggataaggcagtggcccgtaagttagaacgtatggct

SEQ ID NO: 850 - DNA, 80 bp, synthetic construct
  misc_feature 1..80: note = Synthetic: >NC_019843.3-cand-12250-12329
  source 1..80: mol_type = other DNA
gatcaggctatgacttctatgtataagcaagcacgtgctgaagacaagaaagcaaaaattgtcagtgctatgcaaactat

SEQ ID NO: 851 - DNA, 80 bp, synthetic construct
  misc_feature 1..80: note = Synthetic: >NC_019843.3-cand-12330-12409
  source 1..80: mol_type = other DNA
gttgtttggtatgattaagaagctcgacaacgatgttcttaatggtatcatttctaacgctaggaatggttgtatacctc

SEQ ID NO: 852 - DNA, 80 bp, synthetic construct
  misc_feature 1..80: note = Synthetic: >NC_019843.3-cand-12410-12489
  source 1..80: mol_type = other DNA
ttagtgtcatcccactgtgtgcttcaaataaacttcgcgttgtaattcctgacttcaccgtctggaatcaggtagtcaca

SEQ ID NO: 853 - DNA, 80 bp, synthetic construct
  misc_feature 1..80: note = Synthetic: >NC_019843.3-cand-12520-12599
  source 1..80: mol_type = other DNA
tgggacattacagttataaacaatgtggacaatgaaattgttaagtcttcagatgttgtagacagcaatgaaaatttaac

SEQ ID NO: 854 - DNA, 80 bp, synthetic construct
  misc_feature 1..80: note = Synthetic: >NC_019843.3-cand-12570-12649
  source 1..80: mol_type = other DNA
agatgttgtagacagcaatgaaaatttaacatggccacttgttttagaatgcactagggcatccacttctgccgttaagt

SEQ ID NO: 855 - DNA, 80 bp, synthetic construct
  misc_feature 1..80: note = Synthetic: >NC_019843.3-cand-12650-12729
  source 1..80: mol_type = other DNA
tgcaaaataatgagatcaaaccttcaggtctaaaaaccatggttgtgtctgcgggtcaagagcaaactaactgtaatact

SEQ ID NO: 856 - DNA, 80 bp, synthetic construct
  misc_feature 1..80: note = Synthetic: >NC_019843.3-cand-12730-12809
  source 1..80: mol_type = other DNA
agttccttagcttattacgaacctgtgcagggtcgtaaaatgctgatggctcttctttctgataatgcctatctcaaatg

SEQ ID NO: 857 - DNA, 80 bp, synthetic construct
  misc_feature 1..80: note = Synthetic: >NC_019843.3-cand-12810-12889
  source 1..80: mol_type = other DNA
ggcgcgtgttgaaggtaaggacggatttgtcagtgtagagctacaacctccttgcaaattcttgattgcgggaccaaaag

SEQ ID NO: 858 - DNA, 80 bp, synthetic construct
  misc_feature 1..80: note = Synthetic: >NC_019843.3-cand-12890-12969
  source 1..80: mol_type = other DNA
gacctgaaatccgatatctctattttgttaaaaatcttaacaaccttcatcgcgggcaagtgttagggcacattgctgcg

SEQ ID NO: 859 - DNA, 80 bp, synthetic construct
  misc_feature 1..80: note = Synthetic: >NC_019843.3-cand-12970-13049
  source 1..80: mol_type = other DNA
actgttagattgcaagctggttctaacaccgagtttgcctctaattcctcggtgttgtcacttgttaacttcaccgttga

SEQ ID NO: 860 - DNA, 80 bp, synthetic construct
  misc_feature 1..80: note = Synthetic: >NC_019843.3-cand-13050-13129
  source 1..80: mol_type = other DNA
tcctcaaaaagcttatctcgatttcgtcaatgcgggaggtgccccattgacaaattgtgttaagatgcttactcctaaaa

SEQ ID NO: 861 - DNA, 80 bp, synthetic construct
  misc_feature 1..80: note = Synthetic: >NC_019843.3-cand-13130-13209
  source 1..80: mol_type = other DNA
ctggtacaggtatagctatatctgttaaaccagagagtacagctgatcaagagacttatggtggagcttcagtgtgtctc

SEQ ID NO: 862 - DNA, 80 bp, synthetic construct
  misc_feature 1..80: note = Synthetic: >NC_019843.3-cand-13210-13289
  source 1..80: mol_type = other DNA
tattgccgtgcgcatatagaacatcctgatgtctctggtgtttgtaaatataagggtaagtttgtccaaatccctgctca

SEQ ID NO: 863 - DNA, 80 bp, synthetic construct
  misc_feature 1..80: note = Synthetic: >NC_019843.3-cand-13290-13369
  source 1..80: mol_type = other DNA
gtgtgtccgtgaccctgtgggattttgtttgtcaaataccccctgtaatgtctgtcaatattggattggatatgggtgca

SEQ ID NO: 864 - DNA, 80 bp, synthetic construct
  misc_feature 1..80: note = Synthetic: >NC_019843.3-cand-13350-13429
  source 1..80: mol_type = other DNA
ttggattggatatgggtgcaattgtgactcgcttaggcaagcagcactgccccaatctaaagattccaattttttaaacg

SEQ ID NO: 865 - DNA, 80 bp, synthetic construct
  misc_feature 1..80: note = Synthetic: >NC_019843.3-cand-18540-18619
  source 1..80: mol_type = other DNA
acgtttgtttgttgggctcatggctttgaattaacgtctgcatcatacttttgcaagataggtaaggaacagaagtgttg

SEQ ID NO: 866 - DNA, 80 bp, synthetic construct
  misc_feature 1..80: note = Synthetic: >NC_019843.3-cand-18620-18699
  source 1..80: mol_type = other DNA
catgtgcaatagacgcgctgcagcgtactcttcacctctgcaatcttatgcctgctggactcattcctgcggttatgatt

SEQ ID NO: 867 - DNA, 80 bp, synthetic construct
  misc_feature 1..80: note = Synthetic: >NC_019843.3-cand-18740-18819
  source 1..80: mol_type = other DNA
ttatgtaggcaatcttgctactaatcacgatcgttattgctctgtccatcaaggagctcatgtggcttctaatgatgcaa

SEQ ID NO: 868 - DNA, 80 bp, synthetic construct
  misc_feature 1..80: note = Synthetic: >NC_019843.3-cand-18780-18859
  source 1..80: mol_type = other DNA
tctgtccatcaaggagctcatgtggcttctaatgatgcaataatgactcgttgtttagctattcattcttgttttataga

SEQ ID NO: 869 - DNA, 80 bp, synthetic construct
  misc_feature 1..80: note = Synthetic: >NC_019843.3-cand-18860-18939
  source 1..80: mol_type = other DNA
acgtgtggattgggatatagagtatccttatatctcacatgaaaagaaattgaattcctgttgtagaatcgttgagcgca

SEQ ID NO: 870 - DNA, 80 bp, synthetic construct
  misc_feature 1..80: note = Synthetic: >NC_019843.3-cand-18940-19019
  source 1..80: mol_type = other DNA
acgtcgtacgtgctgctcttcttgccggttcatttgacaaagtctatgatattggcaatcctaaaggaattcctattgtt

SEQ ID NO: 871 - DNA, 80 bp, synthetic construct
  misc_feature 1..80: note = Synthetic: >NC_019843.3-cand-19010-19089
  source 1..80: mol_type = other DNA
tcctattgttgatgaccctgtggttgattggcattattttgatgcacagcccttgaccaggaaggtacaacagcttttct

SEQ ID NO: 872 - DNA, 80 bp, synthetic construct
  misc_feature 1..80: note = Synthetic: >NC_019843.3-cand-19090-19169
  source 1..80: mol_type = other DNA
atacagaggacatggcctcaagatttgctgatgggctctgcttattttggaactgtaatgtaccaaaatatcctaataat

SEQ ID NO: 873 - DNA, 80 bp, synthetic construct
  misc_feature 1..80: note = Synthetic: >NC_019843.3-cand-19170-19249
  source 1..80: mol_type = other DNA
gcaattgtatgcaggtttgacacacgtgtgcattctgagttcaatttgccaggttgtgatggcggtagtttgtatgttaa

SEQ ID NO: 874 - DNA, 80 bp, synthetic construct
  misc_feature 1..80: note = Synthetic: >NC_019843.3-cand-19250-19329
  source 1..80: mol_type = other DNA
caagcacgcttttcatacaccagcatatgatgtgagtgcattccgtgatctgaaacctttaccattcttttattattcta

SEQ ID NO: 875 - DNA, 80 bp, synthetic construct
  misc_feature 1..80: note = Synthetic: >NC_019843.3-cand-19330-19409
  source 1..80: mol_type = other DNA
ctacaccatgtgaagtgcatggtaatggtagtatgatagaggatattgattatgtacccctaaaatctgcagtctgtatt

SEQ ID NO: 876 - DNA, 80 bp, synthetic construct
  misc_feature 1..80: note = Synthetic: >NC_019843.3-cand-19430-19509
  source 1..80: mol_type = other DNA
cgctgtttgtaggaagcatgctacagagtacagagagtatatggaagcatataatcttgtctctgcatcaggtttccgcc

SEQ ID NO: 877 - DNA, 80 bp, synthetic construct
  misc_feature 1..80: note = Synthetic: >NC_019843.3-cand-19490-19569
  source 1..80: mol_type = other DNA
ctctgcatcaggtttccgcctttggtgttataagacctttgatatttataatctctggtctacttttacaaaagttcaag

SEQ ID NO: 878 - DNA, 80 bp, synthetic construct
  misc_feature 1..80: note = Synthetic: >NC_019843.3-cand-19570-19649
  source 1..80: mol_type = other DNA
gtttggaaaacattgcttttaatgttgttaaacaaggccattttattggtgttgagggtgaactacctgtagctgtagtc

SEQ ID NO: 879 - DNA, 80 bp, synthetic construct
  misc_feature 1..80: note = Synthetic: >NC_019843.3-cand-19650-19729
  source 1..80: mol_type = other DNA
aatgataagatcttcaccaagagtggcgttaatgacatttgtatgtttgagaataaaaccactttgcctactaatatagc

SEQ ID NO: 880 - DNA, 80 bp, synthetic construct
  misc_feature 1..80: note = Synthetic: >NC_019843.3-cand-19730-19809
  source 1..80: mol_type = other DNA
ttttgaactctatgctaagcgtgctgtacgctcgcatcccgatttcaaattgctacacaatttacaagcagacatttgct

SEQ ID NO: 881 - DNA, 80 bp, synthetic construct
  misc_feature 1..80: note = Synthetic: >NC_019843.3-cand-23620-23699
  source 1..80: mol_type = other DNA
gtagaggactgcaagttgcctcttggtcaatctctctgtgctcttcctgacacacctagtactctcacacctcgcagtgt

SEQ ID NO: 882 - DNA, 80 bp, synthetic construct
  misc_feature 1..80: note = Synthetic: >NC_019843.3-cand-23700-23779
  source 1..80: mol_type = other DNA
gcgctctgttccaggtgaaatgcgcttggcatccattgcttttaatcatcctattcaggttgatcaacttaatagtagtt

SEQ ID NO: 883 - DNA, 80 bp, synthetic construct
  misc_feature 1..80: note = Synthetic: >NC_019843.3-cand-23780-23859
  source 1..80: mol_type = other DNA
attttaaattaagtatacccactaatttttcctttggtgtgactcaggagtacattcagacaaccattcagaaagttact

SEQ ID NO: 884 - DNA, 80 bp, synthetic construct
  misc_feature 1..80: note = Synthetic: >NC_019843.3-cand-23860-23939
  source 1..80: mol_type = other DNA
gttgattgtaaacagtacgtttgcaatggtttccagaagtgtgagcaattactgcgcgagtatggccagttttgttccaa

SEQ ID NO: 885 - DNA, 80 bp, synthetic construct
  misc_feature 1..80: note = Synthetic: >NC_019843.3-cand-23940-24019
  source 1..80: mol_type = other DNA
aataaaccaggctctccatggtgccaatttacgccaggatgattctgtacgtaatttgtttgcgagcgtgaaaagctctc

SEQ ID NO: 886 - DNA, 80 bp, synthetic construct
  misc_feature 1..80: note = Synthetic: >NC_019843.3-cand-24020-24099
  source 1..80: mol_type = other DNA
aatcatctcctatcataccaggttttggaggtgactttaatttgacacttctagaacctgtttctatatctactggcagt

SEQ ID NO: 887 - DNA, 80 bp, synthetic construct
  misc_feature 1..80: note = Synthetic: >NC_019843.3-cand-24100-24179
  source 1..80: mol_type = other DNA
cgtagtgcacgtagtgctattgaggatttgctatttgacaaagtcactatagctgatcctggttatatgcaaggttacga

SEQ ID NO: 888 - DNA, 80 bp, synthetic construct
  misc_feature 1..80: note = Synthetic: >NC_019843.3-cand-24170-24249
  source 1..80: mol_type = other DNA
aaggttacgatgattgcatgcagcaaggtccagcatcagctcgtgatcttatttgtgctcaatatgtggctggttacaaa

SEQ ID NO: 889 - DNA, 80 bp, synthetic construct
  misc_feature 1..80: note = Synthetic: >NC_019843.3-cand-24250-24329
  source 1..80: mol_type = other DNA
gtattacctcctcttatggatgttaatatggaagccgcgtatacttcatctttgcttggcagcatagcaggtgttggctg

SEQ ID NO: 890 - DNA, 80 bp, synthetic construct
  misc_feature 1..80: note = Synthetic: >NC_019843.3-cand-24330-24409
  source 1..80: mol_type = other DNA
gactgctggcttatcctcctttgctgctattccatttgcacagagtatcttttataggttaaacggtgttggcattactc

SEQ ID NO: 891 - DNA, 80 bp, synthetic construct
  misc_feature 1..80: note = Synthetic: >NC_019843.3-cand-24410-24489
  source 1..80: mol_type = other DNA
aacaggttctttcagagaaccaaaagcttattgccaataagtttaatcaggctctgggagctatgcaaacaggcttcact

SEQ ID NO: 892 - DNA, 80 bp, synthetic construct
  misc_feature 1..80: note = Synthetic: >NC_019843.3-cand-24490-24569
  source 1..80: mol_type = other DNA
acaactaatgaagcttttcagaaggttcaggatgctgtgaacaacaatgcacaggctctatccaaattagctagcgagct

SEQ ID NO: 893 - DNA, 80 bp, synthetic construct
  misc_feature 1..80: note = Synthetic: >NC_019843.3-cand-24570-24649
  source 1..80: mol_type = other DNA
atctaatacttttggtgctatttccgcctctattggagacatcatacaacgtcttgatgttctcgaacaggacgcccaaa

SEQ ID NO: 894 - DNA, 80 bp, synthetic construct
  misc_feature 1..80: note = Synthetic: >NC_019843.3-cand-24650-24729
  source 1..80: mol_type = other DNA
tagacagacttattaatggccgtttgacaacactaaatgcttttgttgcacagcagcttgttcgttccgaatcagctgct

SEQ ID NO: 895 - DNA, 80 bp, synthetic construct
  misc_feature 1..80: note = Synthetic: >NC_019843.3-cand-24730-24809
  source 1..80: mol_type = other DNA
ctttccgctcaattggctaaagataaagtcaatgagtgtgtcaaggcacaatccaagcgttctggattttgcggtcaagg

SEQ ID NO: 896 - DNA, 80 bp, synthetic construct
  misc_feature 1..80: note = Synthetic: >NC_019843.3-cand-24810-24889
  source 1..80: mol_type = other DNA
cacacatatagtgtcctttgttgtaaatgcccctaatggcctttacttcatgcatgttggttattaccctagcaaccaca

SEQ ID NO: 897 - DNA, 80 bp, synthetic construct
  misc_feature 1..80: note = Synthetic: >NC_019843.3-cand-27460-27539
  source 1..80: mol_type = other DNA
gcgattcagttcctcttcacataatcgccccgagctcgcttatcgtttaagcagctctgcgctactatgggtcccgtgta

SEQ ID NO: 898 - DNA, 80 bp, synthetic construct
  misc_feature 1..80: note = Synthetic: >NC_019843.3-cand-27540-27619
  source 1..80: mol_type = other DNA
gaggctaatccattagtctctctttggacatatggaaaacgaactatgttaccctttgtccaagaacgaatagggttgtt

SEQ ID NO: 899 - DNA, 80 bp, synthetic construct
  misc_feature 1..80: note = Synthetic: >NC_019843.3-cand-27620-27699
  source 1..80: mol_type = other DNA
catagtaaactttttcatttttaccgtagtatgtgctataacactcttggtgtgtatggctttccttacggctactagat

SEQ ID NO: 900 - DNA, 80 bp, synthetic construct
  misc_feature 1..80: note = Synthetic: >NC_019843.3-cand-27700-27779
  source 1..80: mol_type = other DNA
tatgtgtgcaatgtatgacaggcttcaataccctgttagttcagcccgcattatacttgtataatactggacgttcagtc

SEQ ID NO: 901 - DNA, 80 bp, synthetic construct
  misc_feature 1..80: note = Synthetic: >NC_019843.3-cand-27780-27859
  source 1..80: mol_type = other DNA
tatgtaaaattccaggatagtaaaccccctctaccacctgacgagtgggtttaacgaactccttcataatgtctaatatg

SEQ ID NO: 902 - DNA, 80 bp, synthetic construct
  misc_feature 1..80: note = Synthetic: >NC_019843.3-cand-27860-27939
  source 1..80: mol_type = other DNA
acgcaactcactgaggcgcagattattgccattattaaagactggaactttgcatggtccctgatctttctcttaattac

SEQ ID NO: 903 - DNA, 80 bp, synthetic construct
  misc_feature 1..80: note = Synthetic: >NC_019843.3-cand-27940-28019
  source 1..80: mol_type = other DNA
tatcgtactacagtatggatacccatcccgtagtatgactgtctatgtctttaaaatgtttgttttatggctcctatggc

SEQ ID NO: 904 - DNA, 80 bp, synthetic construct
  misc_feature 1..80: note = Synthetic: >NC_019843.3-cand-28020-28099
  source 1..80: mol_type = other DNA
catcttccatggcgctatcaatatttagcgccgtttatccaattgatctagcttcccagataatctctggcattgtagca

SEQ ID NO: 905 - DNA, 80 bp, synthetic construct
  misc_feature 1..80: note = Synthetic: >NC_019843.3-cand-28100-28179
  source 1..80: mol_type = other DNA
gctgtttcagctatgatgtggatttcctactttgtgcagagtatccggctgtttatgagaactggatcatggtggtcatt

SEQ ID NO: 906 - DNA, 80 bp, synthetic construct
  misc_feature 1..80: note = Synthetic: >NC_019843.3-cand-28180-28259
  source 1..80: mol_type = other DNA
caatcctgagactaattgccttttgaacgttccatttggtggtacaactgtcgtacgtccactcgtagaggactctacca

SEQ ID NO: 907 - DNA, 80 bp, synthetic construct
  misc_feature 1..80: note = Synthetic: >NC_019843.3-cand-28270-28349
  source 1..80: mol_type = other DNA
tgttgtaaccaatggccacctcaaaatggctggcatgcatttcggtgcttgtgactacgacagacttcctaatgaagtca

SEQ ID NO: 908 - DNA, 80 bp, synthetic construct
  misc_feature 1..80: note = Synthetic: >NC_019843.3-cand-28360-28439
  source 1..80: mol_type = other DNA
acccaatgtgctgattgctttaaaaatggtgaagcggcaaagctacggaactaattccggcgttgccatttaccatagat

SEQ ID NO: 909 - DNA, 80 bp, synthetic construct
  misc_feature 1..80: note = Synthetic: >NC_019843.3-cand-28440-28519
  source 1..80: mol_type = other DNA
ataaggcaggtaattacaggagtccgcctattacggcggatattgaacttgcattgcttcgagcttaggctctttagtaa

SEQ ID NO: 910 - DNA, 80 bp, synthetic construct
  misc_feature 1..80: note = Synthetic: >NC_019843.3-cand-28520-28599
  source 1..80: mol_type = other DNA
gagtatcttaattgattttaacgaatctcaatttcattgttatggcatcccctgctgcacctcgtgctgtttcctttgcc

SEQ ID NO: 911 - DNA, 80 bp, synthetic construct
  misc_feature 1..80: note = Synthetic: >NC_019843.3-cand-28600-28679
  source 1..80: mol_type = other DNA
gataacaatgatataacaaatacaaacctatctcgaggtagaggacgtaatccaaaaccacgagctgcaccaaataacac

SEQ ID NO: 912 - DNA, 80 bp, synthetic construct
  misc_feature 1..80: note = Synthetic: >NC_019843.3-cand-28680-28759
  source 1..80: mol_type = other DNA
tgtctcttggtacactgggcttacccaacacgggaaagtccctcttacctttccacctgggcagggtgtacctcttaatg

SEQ ID NO: 913 - DNA, 80 bp, synthetic construct
  misc_feature 1..80: note = Synthetic: >NC_029646.1-cand-660-739
  source 1..80: mol_type = other DNA
tgcaggagaatgatccagaggacaactggtttcttcaggccctaccaagactggaataggaaaccccttcccaccatgga

SEQ ID NO: 914 - DNA, 80 bp, synthetic construct
  misc_feature 1..80: note = Synthetic: >NC_029646.1-cand-740-819
  source 1..80: mol_type = other DNA
tgactccaagttgaagaaggtagctaacatattcttgtgcgcgctatcttcgctattcactaggcccatcaaagacataa

SEQ ID NO: 915 - DNA, 80 bp, synthetic construct
  misc_feature 1..80: note = Synthetic: >NC_029646.1-cand-820-899
  source 1..80: mol_type = other DNA
taggaaagttgaggcctctcaacatccttaacatcttggcttcatgtgattggacttttgcaggcatagtggaatctttg

SEQ ID NO: 916 - DNA, 80 bp, synthetic construct
  misc_feature 1..80: note = Synthetic: >NC_029646.1-cand-900-979
  source 1..80: mol_type = other DNA
attctcttggcagagctctttggagttttctggacacccccagatgtgtctgcgatgatcgcccctttactaggtgacta

SEQ ID NO: 917 - DNA, 80 bp, synthetic construct
  misc_feature 1..80: note = Synthetic: >NC_029646.1-cand-1040-1119
  source 1..80: mol_type = other DNA
tggtttggtgctagggttcaccaaagagaagatcgggaaaatgttgtcatctgctgcatccaccttaagagcttgtaaag

SEQ ID NO: 918 - DNA, 80 bp, synthetic construct
  misc_feature 1..80: note = Synthetic: >NC_029646.1-cand-1060-1139
  source 1..80: mol_type = other DNA
ccaaagagaagatcgggaaaatgttgtcatctgctgcatccaccttaagagcttgtaaagaccttggtgcatacggactg

SEQ ID NO: 919 - DNA, 80 bp, synthetic construct
  misc_feature 1..80: note = Synthetic: >NC_029646.1-cand-1140-1219
  source 1..80: mol_type = other DNA
gaaatcttaaaattggtcatgaagtggttcttcccaaagagagaggaagcaaatgagctggctatggtgaggtccatcga

SEQ ID NO: 920 - DNA, 80 bp, synthetic construct
  misc_feature 1..80: note = Synthetic: >NC_029646.1-cand-1230-1309
  source 1..80: mol_type = other DNA
ttggacctcgaggcaattgaaaacaaccacatgactgccctcctcaaagacaaagacagcctggcaacctatatgagaac

SEQ ID NO: 921 - DNA, 80 bp, synthetic construct
  misc_feature 1..80: note = Synthetic: >NC_029646.1-cand-1310-1389
  source 1..80: mol_type = other DNA
tcttgacctcgaggaggagaaagccagaaagctttcgaccaagtctgcttcacctgatatcgtgggcacaatcaacgctc

SEQ ID NO: 922 - DNA, 80 bp, synthetic construct
  misc_feature 1..80: note = Synthetic: >NC_029646.1-cand-1390-1469
  source 1..80: mol_type = other DNA
tcctggcgagaatcgccgctgcacgctccctggtgcatcgggcgaaagaggagctctccagcagaccaagacctgttgtt

SEQ ID NO: 923 - DNA, 80 bp, synthetic construct
  misc_feature 1..80: note = Synthetic: >NC_029646.1-cand-1470-1549
  source 1..80: mol_type = other DNA
gtgatgatatcaggtaagccagggatagggaaaacccaccttgccagggaattggccaagaaaatcgcagcttctctcac

SEQ ID NO: 924 - DNA, 80 bp, synthetic construct
  misc_feature 1..80: note = Synthetic: >NC_029646.1-cand-1560-1639
  source 1..80: mol_type = other DNA
cgtgtgggtcttatcccgcgcaatggtgttgatcactgggacgcatataagggagaaagagtcgttctatgggacgacta

SEQ ID NO: 925 - DNA, 80 bp, synthetic construct
  misc_feature 1..80: note = Synthetic: >NC_029646.1-cand-1630-1709
  source 1..80: mol_type = other DNA
gggacgactatggaatgagtaaccccatccacgacgccctcaggttacaagaacttgctgacacctgccccctcacgcta

SEQ ID NO: 926 - DNA, 80 bp, synthetic construct
  misc_feature 1..80: note = Synthetic: >NC_029646.1-cand-1710-1789
  source 1..80: mol_type = other DNA
aattgtgataggattgagaataaaggaaaggtctttgacagtgatgccataatcatcaccactaacctggccaacccagc

SEQ ID NO: 927 - DNA, 80 bp, synthetic construct
  misc_feature 1..80: note = Synthetic: >NC_029646.1-cand-1790-1869
  source 1..80: mol_type = other DNA
accactggactatgtcaattttgaagcatgctcgaggcgtatcgacttcctcgtgtatgcagatgcccctgaagtcgaga

SEQ ID NO: 928 - DNA, 80 bp, synthetic construct
  misc_feature 1..80: note = Synthetic: >NC_029646.1-cand-1870-1949
  source 1..80: mol_type = other DNA
aggcgaaacgtgatttcccaggtcaacctgacatgtggaagaacgctttcagtcctgacttctcgcacataaaactgatg

SEQ ID NO: 929 - DNA, 80 bp, synthetic construct
  misc_feature 1..80: note = Synthetic: >NC_035889.1-cand-730-809
  source 1..80: mol_type = other DNA
gcacggagatctagaagagctgtgacgctcccctcccattccactaggaagctgcaaacgcggtcgcaaacctggttgga

SEQ ID NO: 930 - DNA, 80 bp, synthetic construct
  misc_feature 1..80: note = Synthetic: >NC_035889.1-cand-810-889
  source 1..80: mol_type = other DNA
atcaagagaatacacaaagcacttgattagagtcgaaaattggatattcaggaaccctggcttcgcgttagcagcagctg

SEQ ID NO: 931 - DNA, 80 bp, synthetic construct
  misc_feature 1..80: note = Synthetic: >NC_035889.1-cand-970-1049
  source 1..80: mol_type = other DNA
agcatcaggtgcataggagtcagcaatagggactttgtggaaggtatgtcaggtgggacttgggttgatgttgtcttgga

SEQ ID NO: 932 - DNA, 80 bp, synthetic construct
  misc_feature 1..80: note = Synthetic: >NC_035889.1-cand-1040-1119
  source 1..80: mol_type = other DNA
ttgtcttggaacatggaggttgtgtcaccgtaatggcacaggacaaaccgactgtcgacatagagctggttacaacaaca

SEQ ID NO: 933 - DNA, 80 bp, synthetic construct
  misc_feature 1..80: note = Synthetic: >NC_035889.1-cand-1120-1199
  source 1..80: mol_type = other DNA
gtcagcaacatggcggaggtaagatcctactgctatgaggcatcaatatcagacatggcttcggacagccgctgcccaac

SEQ ID NO: 934 - DNA, 80 bp, synthetic construct
  misc_feature 1..80: note = Synthetic: >NC_035889.1-cand-1190-1269
  source 1..80: mol_type = other DNA
gctgcccaacacaaggtgaagcctaccttgacaagcaatcagacactcaatatgtctgcaaaagaacgttagtggacaga

SEQ ID NO: 935 - DNA, 80 bp, synthetic construct
  misc_feature 1..80: note = Synthetic: >NC_035889.1-cand-1280-1359
  source 1..80: mol_type = other DNA
atggatgtggactttttggcaaagggagcctggtgacatgcgctaagtttgcatgctccaagaaaatgaccgggaagagc

SEQ ID NO: 936 - DNA, 80 bp, synthetic construct
  misc_feature 1..80: note = Synthetic: >NC_035889.1-cand-1360-1439
  source 1..80: mol_type = other DNA
atccagccagagaatctggagtaccggataatgctgtcagttcatggctcccagcacagtgggatgatcgttaatgacac

SEQ ID NO: 937 - DNA, 80 bp, synthetic construct
  misc_feature 1..80: note = Synthetic: >NC_035889.1-cand-1430-1509
  source 1..80: mol_type = other DNA
ttaatgacacaggacatgaaactgatgagaatagagcgaaggttgagataacgcccaattcaccaagagccgaagccacc

SEQ ID NO: 938 - DNA, 80 bp, synthetic construct
  misc_feature 1..80: note = Synthetic: >NC_035889.1-cand-1520-1599
  source 1..80: mol_type = other DNA
ttggaagcctaggacttgattgtgaaccgaggacaggccttgacttttcagatttgtattacttgactatgaataacaag

SEQ ID NO: 939 - DNA, 80 bp, synthetic construct
  misc_feature 1..80: note = Synthetic: >NC_035889.1-cand-1570-1649
  source 1..80: mol_type = other DNA
gatttgtattacttgactatgaataacaagcactggttggtccacaaggagtggttccacgacattccattaccttggca

SEQ ID NO: 940 - DNA, 80 bp, synthetic construct
  misc_feature 1..80: note = Synthetic: >NC_035889.1-cand-1680-1759
  source 1..80: mol_type = other DNA
gaacaacaaagaagcactggtagagttcaaggacgcacatgccaaaaggcaaactgtcgtggttctagggagtcaagaag

SEQ ID NO: 941 - DNA, 80 bp, synthetic construct
  misc_feature 1..80: note = Synthetic: >NC_035889.1-cand-1760-1839
  source 1..80: mol_type = other DNA
gagcagttcacacggcccttgctggagctctggaggctgagatggatggtgcaaagggaaggctgtcctctggccacttg

SEQ ID NO: 942 - DNA, 80 bp, synthetic construct
  misc_feature 1..80: note = Synthetic: >NC_035889.1-cand-1840-1919
  source 1..80: mol_type = other DNA
aaatgtcgcctgaaaatggataaacttagattgaagggcgtgtcatactccttgtgtaccgcagcgttcacattcaccaa

SEQ ID NO: 943 - DNA, 80 bp, synthetic construct
  misc_feature 1..80: note = Synthetic: >NC_035889.1-cand-1920-1999
  source 1..80: mol_type = other DNA
gatcccggctgaaacactgcacgggacagtcacagtggaggtacagtacgcagggacagatggaccttgcaaggttccag

SEQ ID NO: 944 - DNA, 80 bp, synthetic construct
  misc_feature 1..80: note = Synthetic: >NC_035889.1-cand-2000-2079
  source 1..80: mol_type = other DNA
ctcagatggcggtggacatgcaaactctgaccccagttgggaggttgataaccgctaaccccgtaatcactgaaagcact

SEQ ID NO: 945 - DNA, 80 bp, synthetic construct
  misc_feature 1..80: note = Synthetic: >NC_039218.1-cand-3930-4009
  source 1..80: mol_type = other DNA
caatggcggtctggagcatgatcaagggtcaacgggaccagaagggactttcctgggccacaccacttgcaggcctcctt

SEQ ID NO: 946 - DNA, 80 bp, synthetic construct
  misc_feature 1..80: note = Synthetic: >NC_039218.1-cand-4010-4089
  source 1..80: mol_type = other DNA
ggaggcgagggagtgggtcttagattgctggcgtttcgaaagcttgccgagcgaaggaacagacggtctttcagtgaacc

SEQ ID NO: 947 - DNA, 80 bp, synthetic construct
  misc_feature 1..80: note = Synthetic: >NC_039218.1-cand-4090-4169
  source 1..80: mol_type = other DNA
actgacggtggtgggagtcatgctcactgtggcaagtgggatggtgagacacacatcccaggaagcactgtgcgctcttg

SEQ ID NO: 948 - DNA, 80 bp, synthetic construct
  misc_feature 1..80: note = Synthetic: >NC_039218.1-cand-4180-4259
  source 1..80: mol_type = other DNA
ctttctcctcctcatgatggtactgggaacacggaagatgcagctcaccgcagagtggtgcggtgaagtggaatggaacc

SEQ ID NO: 949 - DNA, 80 bp, synthetic construct
  misc_feature 1..80: note = Synthetic: >NC_039218.1-cand-4230-4309
  source 1..80: mol_type = other DNA
cagagtggtgcggtgaagtggaatggaacccagacctagtgaacgagggaggagaggttaatctgaaagtgaggcaggac

SEQ ID NO: 950 - DNA, 80 bp, synthetic construct
  misc_feature 1..80: note = Synthetic: >NC_039218.1-cand-4330-4409
  source 1..80: mol_type = other DNA
cactgaggtggagaaggaagaacgtgcgatggcgttatggcttcttgcagggttggtggcttcagccttccactgggcag

SEQ ID NO: 951 - DNA, 80 bp, synthetic construct
  misc_feature 1..80: note = Synthetic: >NC_039218.1-cand-4380-4459
  source 1..80: mol_type = other DNA
ggttggtggcttcagccttccactgggcaggcattctaatagtattggctgtgtggacactttttgagatgctgggctcg

SEQ ID NO: 952 - DNA, 80 bp, synthetic construct
  misc_feature 1..80: note = Synthetic: >NC_039218.1-cand-4490-4569
  source 1..80: mol_type = other DNA
caggagacccggaccgaaaggaatcggccctttgagatcaaggatggagcctatcgcatctacagccctggcttgctttg

SEQ ID NO: 953 - DNA, 80 bp, synthetic construct
  misc_feature 1..80: note = Synthetic: >NC_039218.1-cand-4570-4649
  source 1..80: mol_type = other DNA
gggacaccgccaaattggagtggggtatggagccaagggagttctgcacaccatgtggcacgtcactaggggggcagccc

SEQ ID NO: 954 - DNA, 80 bp, synthetic construct
  misc_feature 1..80: note = Synthetic: >NC_039218.1-cand-4650-4729
  source 1..80: mol_type = other DNA
tggttgtggatgaggcaatctctggaccctattgggctgacgtcagggaagacgttgtgtgctatggtggagcatggagt

SEQ ID NO: 955 - DNA, 80 bp, synthetic construct
  misc_feature 1..80: note = Synthetic: >NC_039218.1-cand-4750-4829
  source 1..80: mol_type = other DNA
tgagaccgttcaggtgcacgcgtttccaccagggagaccccaagagacacaccagtgccagccgggtgaactcatcctgg

SEQ ID NO: 956 - DNA, 80 bp, synthetic construct
  misc_feature 1..80: note = Synthetic: >NC_039218.1-cand-4810-4889
  source 1..80: mol_type = other DNA
gccgggtgaactcatcctggagaatggcaggaaacttggagcagtccctattgacctgagcaaaggcacctcgggaagtc

SEQ ID NO: 957 - DNA, 80 bp, synthetic construct
  misc_feature 1..80: note = Synthetic: >NC_039218.1-cand-4890-4969
  source 1..80: mol_type = other DNA
ctatcattaacgcccagggagaggtggtgggtctttatgggaacggcctgaagaccaatgaagcctacgtcagcagcata

SEQ ID NO: 958 - DNA, 80 bp, synthetic construct
  misc_feature 1..80: note = Synthetic: >NC_039218.1-cand-4970-5049
  source 1..80: mol_type = other DNA
gcacaaggagaagccgagaaaagcagaccggaaatcccgttgagtgtgcaaggaacaggctggatgtcaaaaggtcaaat

SEQ ID NO: 959 - DNA, 80 bp, synthetic construct
  misc_feature 1..80: note = Synthetic: >NC_039218.1-cand-5080-5159
  source 1..80: mol_type = other DNA
gaagacacatcgagtcctcccggagcttgtgaggcagtgtgcagaccgagggatgaggactctagttcttgcccccaccc

SEQ ID NO: 960 - DNA, 80 bp, synthetic construct
  misc_feature 1..80: note = Synthetic: >NC_039218.1-cand-5130-5209
  source 1..80: mol_type = other DNA
ggatgaggactctagttcttgcccccacccgggtggtcctgaaggagatggagagagcgcttgctggcaagaaggtccga

SEQ ID NO: 961 - DNA, 80 bp, synthetic construct
  misc_feature 1..80: note = Synthetic: >NC_044853.1-cand-6220-6299
  source 1..80: mol_type = other DNA
agacctcgagcaatgccagagtgcttaatctcagtgaggtagatggttcacctttcattcccctcgaatcgccagcacca

SEQ ID NO: 962 - DNA, 80 bp, synthetic construct
  misc_feature 1..80: note = Synthetic: >NC_044853.1-cand-6320-6399
  source 1..80: mol_type = other DNA
gggctgcgactggcatgtgaattttactttccaggctcaggaccaggacccatctcaaagtgtgacctttgcaaccaatg

SEQ ID NO: 963 - DNA, 80 bp, synthetic construct
  misc_feature 1..80: note = Synthetic: >NC_044853.1-cand-6360-6439
  source 1..80: mol_type = other DNA
gaccaggacccatctcaaagtgtgacctttgcaaccaatgatgctagctttgttccatacctaggcagtatctctcccca

SEQ ID NO: 964 - DNA, 80 bp, synthetic construct
  misc_feature 1..80: note = Synthetic: >NC_044853.1-cand-6450-6529
  source 1..80: mol_type = other DNA
gattttcattcaggtgacatcataggtagccttggctggatttctgccccgtccgacagttcccaactcaatgtctggac

SEQ ID NO: 965 - DNA, 80 bp, synthetic construct
  misc_feature 1..80: note = Synthetic: >NC_044853.1-cand-6520-6599
  source 1..80: mol_type = other DNA
atgtctggacaataccgaagtacggttccagcctcccagatgtaacccaccttgcacctgctgtgtttcccccaggtttt

SEQ ID NO: 966 - DNA, 80 bp, synthetic construct
  misc_feature 1..80: note = Synthetic: >NC_044853.1-cand-6610-6689
  source 1..80: mol_type = other DNA
tcttgtacttctactccacttttccaggttctggccaaccagggcaactccaagtcccatgtctattacctcaagagttt

SEQ ID NO: 967 - DNA, 80 bp, synthetic construct
  misc_feature 1..80: note = Synthetic: >NC_044853.1-cand-6640-6719
  source 1..80: mol_type = other DNA
ctggccaaccagggcaactccaagtcccatgtctattacctcaagagtttatcactcacttttgcaatgaacaggccccc

SEQ ID NO: 968 - DNA, 80 bp, synthetic construct
  misc_feature 1..80: note = Synthetic: >NC_044853.1-cand-6780-6859
  source 1..80: mol_type = other DNA
gagttcaagctttaccccgatggattcatgacttgtgtccctaatagtgttagtagtggccctcaaaccctccccatcaa

SEQ ID NO: 969 - DNA, 80 bp, synthetic construct
  misc_feature 1..80: note = Synthetic: >NC_044853.1-cand-6840-6919
  source 1..80: mol_type = other DNA
cctcaaaccctccccatcaatggagtctttgtctttgtttcatgggtgtctagattctatcaacttaagcctgtgggaac

SEQ ID NO: 970 - DNA, 80 bp, synthetic construct
  misc_feature 1..80: note = Synthetic: >NC_044853.1-cand-6920-6999
  source 1..80: mol_type = other DNA
ggcctcagtggccagaaggcttggactacggcgcatataatggctcaagctgtcatcggagccattgccgcctctgccgc

SEQ ID NO: 971 - DNA, 80 bp, synthetic construct
  misc_feature 1..80: note = Synthetic: >NC_044853.1-cand-7020-7099
  source 1..80: mol_type = other DNA
gcatacaggctggcgctgaggccggcctccaggcccaacgataccaacaggacctacagttgcagcaaaattcttttaag

SEQ ID NO: 972 - DNA, 80 bp, synthetic construct
  misc_feature 1..80: note = Synthetic: >NC_044853.1-cand-7080-7159
  source 1..80: mol_type = other DNA
tgcagcaaaattcttttaagcatgatagggaaatgctaggttaccaggtccaggctagtaatgctcttctggctaagaat

SEQ ID NO: 973 - DNA, 80 bp, synthetic construct
  misc_feature 1..80: note = Synthetic: >NC_044853.1-cand-7200-7279
  source 1..80: mol_type = other DNA
ctagtgctgatgctgctcgggcagtagctggtgctcctgtcacccgtatagtggactggaatggcacacggattgcagcg

SEQ ID NO: 974 - DNA, 80 bp, synthetic construct
  misc_feature 1..80: note = Synthetic: >NC_044853.1-cand-7240-7319
  source 1..80: mol_type = other DNA
cacccgtatagtggactggaatggcacacggattgcagcgccaacttcaagtgccacaacattaagatctggtggtttca

SEQ ID NO: 975 - DNA, 80 bp, synthetic construct
  misc_feature 1..80: note = Synthetic: >NC_044853.1-cand-7320-7399
  source 1..80: mol_type = other DNA
tggccgtccctataccattatcttcaaaggctaagcaaccagtgatgtccggacaggataatccaaattatgctgcttct

SEQ ID NO: 976 - DNA, 80 bp, synthetic construct
  misc_feature 1..80: note = Synthetic: >NC_044853.1-cand-7400-7479
  source 1..80: mol_type = other DNA
tctatctctagaacagcctcatgggtgcaatctcagaattctataagatctgtctctcccttccacagtgatgctctaag

SEQ ID NO: 977 - DNA, 80 bp, synthetic construct
  misc_feature 1..80: note = Synthetic: >NC_001611.1-cand-181060-181139
  source 1..80: mol_type = other DNA
ataacaaggtctttgatatactaactgaccccattgatgactttagtaaatcatccgatctattgctgtgttatcttaga

SEQ ID NO: 978 - DNA, 80 bp, synthetic construct
  misc_feature 1..80: note = Synthetic: >NC_003310.1-cand-194090-194169
  source 1..80: mol_type = other DNA
atatattgtttctctcatgtataataataaacggaagagatttagcaccacatgcaccatccaatggaaaatgtaaagac

SEQ ID NO: 979 - DNA, 80 bp, synthetic construct
  misc_feature 1..80: note = Synthetic: >NC_003310.1-cand-194330-194409
  source 1..80: mol_type = other DNA
gaagatgtgatagtaatcaggtagagacgcgatcgtgtaacacgactcacaatagaatctgtgaatgctctccaggatat

SEQ ID NO: 980 - DNA, 80 bp, synthetic construct
  misc_feature 1..80: note = Synthetic: >NC_002023.1-cand-2150-2229
  source 1..80: mol_type = other DNA
atcaatgaactgagcaaccttgcgaaaggagagaaggctaatgtgctaattgggcaaggagacgtggtgttggtaatgaa

SEQ ID NO: 981 - DNA, 80 bp, synthetic construct
  misc_feature 1..80: note = Synthetic: >AdVE4-cand-5970-6049
  source 1..80: mol_type = other DNA
gctgttggggtaggtattccctctcaaaggcgggcatgacctccgcactcaggttgtcagtttctagaaacgaggaggat

SEQ ID NO: 982 - DNA, 80 bp, synthetic construct
  misc_feature 1..80: note = Synthetic: >MH539867.1-cand-1990-2069
  source 1..80: mol_type = other DNA
ttgtccaactccccttccctatcatttcaacaaaactacctcattataagtaaattcttgattgcttttcaaggtagcat

SEQ ID NO: 983 - DNA, 80 bp, synthetic construct
  misc_feature 1..80: note = Synthetic: >HCV.B4-cand-4290-4369
  source 1..80: mol_type = other DNA
tattgcagaaaatacgcacccctgtatgctgctgaggccaaaagagtgttctccctagaaaagaaaatgagcaattacat

SEQ ID NO: 984 - DNA, 80 bp, synthetic construct
  misc_feature 1..80: note = Synthetic: >EVA90-cand-6960-7039
  source 1..80: mol_type = other DNA
attgactgtgctgaacttgcaaaaacaggattggaatatggtttggtcatgacaccagctgataagtctacctgctttaa

SEQ ID NO: 985 - DNA, 80 bp, synthetic construct
  misc_feature 1..80: note = Synthetic: >NC_004905.2-cand-1460-1539
  source 1..80: mol_type = other DNA
gtgccttcctttgacatgagtaatgaaggatcttatttcttcggagacaatgcagaggaatatgacaattgaggaaaaat

SEQ ID NO: 986 - DNA, 80 bp, synthetic construct
  misc_feature 1..80: note = Synthetic: >NC_002022.1-cand-1570-1649
  source 1..80: mol_type = other DNA
ggtaaactttgtgagcatggagttttctctcactgacccaagacttgaaccacacaaatgggagaagtactgtgttcttg

SEQ ID NO: 987 - DNA, 80 bp, synthetic construct
  misc_feature 1..80: note = Synthetic: >EVB88-cand-3950-4029
  source 1..80: mol_type = other DNA
gtggtgagaaaccatgatgacctaataacagtcactgccaccctggccctcattggttgcacttcatccccatggcggtg

SEQ ID NO: 988 - DNA, 80 bp, synthetic construct
  misc_feature 1..80: note = Synthetic: >AdVE4-cand-15320-15399
  source 1..80: mol_type = other DNA
ccgtcagtgaaaacgttcctgctctcacagatcacgggaccctgccgctgcgcagcagtatccggggagtccagcgcgtg

SEQ ID NO: 989 - DNA, 80 bp, synthetic construct
  misc_feature 1..80: note = Synthetic: >AdVB7-cand-5030-5109
  source 1..80: mol_type = other DNA
ccagagctcggtgatgtgctctatggcatctcgatccagcagacctcctcgtttcgcgggttgggacggctcctggagta

SEQ ID NO: 990 - DNA, 80 bp, synthetic construct
  misc_feature 1..80: note = Synthetic: >HQ537689.1-cand-2670-2749
  source 1..80: mol_type = other DNA
tgaaaattggaaatcctttttctcaaggacgtggtgcaaattagatttaatagaggaagaggacaaggaaaaccatggag

SEQ ID NO: 991 - DNA, 80 bp, synthetic construct
  misc_feature 1..80: note = Synthetic: >NC_003310.1-cand-3820-3899
  source 1..80: mol_type = other DNA
ctttatgtattccatgatgggtgtacaatcaagattattacgtatcctcgtatcggctcctcgagataaaagagcataca

SEQ ID NO: 992 - DNA, 80 bp, synthetic construct
  misc_feature 1..80: note = Synthetic: >EVB73-cand-4320-4399
  source 1..80: mol_type = other DNA
tatgcacccctctatgcagcagaagcaaagagagtgttctcccttgagaagaagatgagcaattacatacagttcaagtc

SEQ ID NO: 993 - DNA, 80 bp, synthetic construct
  misc_feature 1..80: note = Synthetic: >NC_003310.1-cand-72590-72669
  source 1..80: mol_type = other DNA
aacacatttcaacaataatgagaatgttacattattttattgtgatgaacgagacgcagaattcgttatgtgtctagagg

SEQ ID NO: 994 - DNA, 80 bp, synthetic construct
  misc_feature 1..80: note = Synthetic: >AdVB7-cand-21720-21799
  source 1..80: mol_type = other DNA
aacacctgctacctttttgatccttttgggttctcggatgagcgactcaaacagatttaccagtttgagtacgaggggct

SEQ ID NO: 995 - DNA, 80 bp, synthetic construct
  misc_feature 1..80: note = Synthetic: >NC_001611.1-cand-91570-91649
  source 1..80: mol_type = other DNA
ataccaactatattacctcatcagttagctactctagattatctagtcagaactatcatagatgagaacagaagcgtgtt

SEQ ID NO: 996 - DNA, 80 bp, synthetic construct
  misc_feature 1..80: note = Synthetic: >NC_003310.1-cand-98020-98099
  source 1..80: mol_type = other DNA
gagaaacaaaaagtcacgcgatttactgggataagatttccaagttactgctgcagcatataactaaacacgttagtgtt

SEQ ID NO: 997 - DNA, 80 bp, synthetic construct
  misc_feature 1..80: note = Synthetic: >HCV.B3-cand-6830-6909
  source 1..80: mol_type = other DNA
aacactaatgttgaaggtgtacaaagggattgacctggaccaattcaggatgattgcatatggtgatgatgtgattgcat

SEQ ID NO: 998 - DNA, 80 bp, synthetic construct
  misc_feature 1..80: note = Synthetic: >AdVB3-cand-7420-7499
  source 1..80: mol_type = other DNA
tcgaggggtgcccctgacatgaggcagcttcttgagttcttcaaaagtgagatctgtagggtcagtgagagcatagtgtt

SEQ ID NO: 999 - DNA, 80 bp, synthetic construct
  misc_feature 1..80: note = Synthetic: >NC_003310.1-cand-78580-78659
  source 1..80: mol_type = other DNA
aacagaaaaaacaatgttcgttctgggaatagaaaccagattaaaacaaaattcattagaatatatgccacgtttataca

SEQ ID NO: 1000 - DNA, 80 bp, synthetic construct
  misc_feature 1..80: note = Synthetic: >NC_001611.1-cand-129920-129999
  source 1..80: mol_type = other DNA
aacagaatatcccaaaccatataatatatattcagggacactcaaactaaatgtccaggattctcctaaatacgtaaact

SEQ ID NO: 1001 - DNA, 80 bp, synthetic construct
  misc_feature 1..80: note = Synthetic: >NC_021550.1-cand-100-179
  source 1..80: mol_type = other DNA
aacagattagagaaaccatatcatcttcatcaccgcagaagatattaacgggaaccatgcttacattgggagcgttgtta

SEQ ID NO: 1002 - DNA, 80 bp, synthetic construct
  misc_feature 1..80: note = Synthetic: >AdVB7-cand-23320-23399
  source 1..80: mol_type = other DNA
aacagcaatagaagtagctcctttagctatagggtcattcttgtcgatcttctcaacacttctcttgccatccttctcaa

SEQ ID NO: 1003 - DNA, 80 bp, synthetic construct
  misc_feature 1..80: note = Synthetic: >NC_003310.1-cand-37950-38029
  source 1..80: mol_type = other DNA
aacagtatctgataatctatggggagacatccattgatattcaggggatgaatcattggcaacacccatttattgtacaa

SEQ ID NO: 1004 - DNA, 80 bp, synthetic construct
  misc_feature 1..80: note = Synthetic: >NC_003310.1-cand-94610-94689
  source 1..80: mol_type = other DNA
aacagttccatatgatgaactaataaaggaattgacgactctctcgcgtcatatatttatggcttctccagagaatgtaa

SEQ ID NO: 1005 - DNA, 80 bp, synthetic construct
  misc_feature 1..80: note = Synthetic: >AdVB7-cand-2210-2289
  source 1..80: mol_type = other DNA
gggagaggaatcctagtgggaataattcaagaaccgagttggctttaagtttaatgagccgcaggcgtcctgaaactgtt

SEQ ID NO: 1006 - DNA, 80 bp, synthetic construct
  misc_feature 1..80: note = Synthetic: >NC_001611.1-cand-41630-41709
  source 1..80: mol_type = other DNA
aattatgacttagttcttaatccattatttcacggaggggaacccatcaaagatatggaaatcatttttttaaaactgtt

SEQ ID NO: 1007 - DNA, 80 bp, synthetic construct
  misc_feature 1..80: note = Synthetic: >NC_003310.1-cand-136740-136819
  source 1..80: mol_type = other DNA
aacataattaggatcttctaatggattgtatggcttgatagcatcatctttatcattattaggtgggggatggacaacct

SEQ ID NO: 1008 - DNA, 80 bp, synthetic construct
  misc_feature 1..80: note = Synthetic: >NC_003310.1-cand-94930-95009
  source 1..80: mol_type = other DNA
agaactggaccgtatatctcattaagctaatagagcccgtaaatgcaatcagtgatagactagaagaaagtaagtatgtt

SEQ ID NO: 1009 - DNA, 80 bp, synthetic construct
  misc_feature 1..80: note = Synthetic: >NC_003310.1-cand-115670-115749
  source 1..80: mol_type = other DNA
acctttttctccaagactggaaccaacgtcataaaaatgtttaaatcaaaatccatatcaacatctgatgcgctaagacc

SEQ ID NO: 1010 - DNA, 80 bp, synthetic construct
  misc_feature 1..80: note = Synthetic: >NC_003310.1-cand-116300-116379
  source 1..80: mol_type = other DNA
ttggaaaatatatcatgtcgttaactataagaatatttttatcctcgtttacaaactgaataatatcagatatagttcgt

SEQ ID NO: 1011 - DNA, 80 bp, synthetic construct
  misc_feature 1..80: note = Synthetic: >AdVB7-cand-5590-5669
  source 1..80: mol_type = other DNA
ggtgacaaagaggctgtccgtgtccccgtagaccgactttatgggcctgtcctcgagcggagtgcctcggtcctcttcgt

SEQ ID NO: 1012 - DNA, 80 bp, synthetic construct
  misc_feature 1..80: note = Synthetic: >EVB75-cand-6860-6939
  source 1..80: mol_type = other DNA
actaatgttgaaggtgtacaaggggatagacctggaccaatttaggatgatagcatatggtgatgatgtcattgcgtcgt

SEQ ID NO: 1013 - DNA, 80 bp, synthetic construct
  misc_feature 1..80: note = Synthetic: >NC_001611.1-cand-104890-104969
  source 1..80: mol_type = other DNA
acgactttggtgtagaggattctgccaacccctgtgagaacttgttaaagaagtccatttaaggctttaaaattgaattg

SEQ ID NO: 1014 - DNA, 80 bp, synthetic construct
  misc_feature 1..80: note = Synthetic: >NC_003310.1-cand-178850-178929
  source 1..80: mol_type = other DNA
atacattatatacattatatacattatatacattatatacattatatacattatatacattatatatcgttatatatcgt

SEQ ID NO: 1015 - DNA, 80 bp, synthetic construct
  misc_feature 1..80: note = Synthetic: >NC_003310.1-cand-114530-114609
  source 1..80: mol_type = other DNA
acgatgaagcaaaatatgctacatgtaattatacaagagatagaggagggttcttgtcctatagtcatcgaaaagaacgg

SEQ ID NO: 1016 - DNA, 80 bp, synthetic construct
  misc_feature 1..80: note = Synthetic: >NC_003310.1-cand-56040-56119
  source 1..80: mol_type = other DNA
tcaaacatcctctatcgacggcttcttgtatttcctgttccgttaacatctcttcattaatgagcgtaaacagtaatcgt

SEQ ID NO: 1017 - DNA, 80 bp, synthetic construct
  misc_feature 1..80: note = Synthetic: >NC_001611.1-cand-4430-4509
  source 1..80: mol_type = other DNA
acgattagaaaacgatcgatactttggtttattggattcgtgtaatcatatattttgcataacatgtatcaatatatggc

SEQ ID NO: 1018 - DNA, 80 bp, synthetic construct
  misc_feature 1..80: note = Synthetic: >NC_001611.1-cand-36340-36419
  source 1..80: mol_type = other DNA
acgcaaactttttcacagagcgatagagtttttgataactcgtttttcttaagaaatataaaactactgtctccagagct

SEQ ID NO: 1019 - DNA, 80 bp, synthetic construct
  misc_feature 1..80: note = Synthetic: >NC_001611.1-cand-85500-85579
  source 1..80: mol_type = other DNA
acgcacctataaagacttttatgttgcctaaacaagatatagtaggtatggatctggaaaatctatatgccgtaactaag

SEQ ID NO: 1020 - DNA, 80 bp, synthetic construct
  misc_feature 1..80: note = Synthetic: >AdVB3-cand-13680-13759
  source 1..80: mol_type = other DNA
acgccagcgccacgacaggcagatgggtcttgtgtgggacgatgaggactctgccgatgatagcagcgtgttggacttgg

SEQ ID NO: 1021 - DNA, 80 bp, synthetic construct
  misc_feature 1..80: note = Synthetic: >NC_039476.1-cand-3400-3479
  source 1..80: mol_type = other DNA
acgctaaaggaatggacttgggaacaactcctggtgactgtggctgtccttacatctataaaaggggcaatgactatata

SEQ ID NO: 1022 - DNA, 80 bp, synthetic construct
  misc_feature 1..80: note = Synthetic: >NC_001611.1-cand-59340-59419
  source 1..80: mol_type = other DNA
acgctaataagtttaatttaacacttcccgaagatttgtttataatccctacaaatttggatattctatggcgtacaaag

SEQ ID NO: 1023 - DNA, 80 bp, synthetic construct
  misc_feature 1..80: note = Synthetic: >NC_001722.1-cand-10180-10259
  source 1..80: mol_type = other DNA
acgcttgcttgcttaaagacctcttcaataaagctgccagttagaagcaagttaagtgtgtgttcccatctctcctagtc

SEQ ID NO: 1024 - DNA, 80 bp, synthetic construct
  misc_feature 1..80: note = Synthetic: >NC_003310.1-cand-65760-65839
  source 1..80: mol_type = other DNA
tcacatatcacattaattgactttttggtccacttttccatacgtttatattcttttaatcctgcgttatccgtttccgt

SEQ ID NO: 1025 - DNA, 80 bp, synthetic construct
  misc_feature 1..80: note = Synthetic: >AdVB3-cand-19990-20069
  source 1..80: mol_type = other DNA
caatggacaatgtgaatccattcaaccaccaccgcaatgctggtctgcgctacaggtccatgcttctgggaaatggtcgt

SEQ ID NO: 1026 - DNA, 80 bp, synthetic construct
  misc_feature 1..80: note = Synthetic: >AdVB3-cand-20230-20309
  source 1..80: mol_type = other DNA
taagtttcaccagcatcaatctctatgccaccttcttccccatggctcacaacacagcttccacccttgaagccatgctg

SEQ ID NO: 1027 - DNA, 80 bp, synthetic construct
  misc_feature 1..80: note = Synthetic: >AdVB3-cand-20310-20389
  source 1..80: mol_type = other DNA
cgcaacgataccaatgatcagtcatttaacgactacctctctgcagctaacatgctttaccccattcctgccaatgcaac

SEQ ID NO: 1028 - DNA, 80 bp, synthetic construct
  misc_feature 1..80: note = Synthetic: >AdVB3-cand-20350-20429
  source 1..80: mol_type = other DNA
ctgcagctaacatgctttaccccattcctgccaatgcaaccaacattccaatttccatcccatctcgcaactgggcagcc

SEQ ID NO: 1029 - DNA, 80 bp, synthetic construct
  misc_feature 1..80: note = Synthetic: >AdVB3-cand-20470-20549
  source 1..80: mol_type = other DNA
ctccatctcttggatcagggttcgatccctacttcgtatattctggatctattccctacctggatggcaccttctacctt

SEQ ID NO: 1030 - DNA, 80 bp, synthetic construct
  misc_feature 1..80: note = Synthetic: >AdVB3-cand-20660-20739
  source 1..80: mol_type = other DNA
ggaaggatacaacgtggcacaatgcaacatgaccaaagactggttcctagttcagatgcttgccaactacaacattggct

SEQ ID NO: 1031 - DNA, 80 bp, synthetic construct
  misc_feature 1..80: note = Synthetic: >AdVB3-cand-20840-20919
  source 1..80: mol_type = other DNA
cactgactacaaagccgtcaccttaccataccaacacaacaactctggctttgtagggtaccttgcacctactatgagac

SEQ ID NO: 1032 - DNA, 80 bp, synthetic construct
  misc_feature 1..80: note = Synthetic: >AdVB3-cand-20940-21019
  source 1..80: mol_type = other DNA
aattatccatacccgctcatcggaactactgccgttaagagtgttacccagaaaaagttcctgtgcgacaggaccatgtg

SEQ ID NO: 1033 - DNA, 80 bp, synthetic construct
  misc_feature 1..80: note = Synthetic: >AdVB3-cand-21060-21139
  source 1..80: mol_type = other DNA
cttaccgacctgggacagaacatgctctatgccaactcagcccatgcgctggacatgacttttgaggtggatcccatgga

SEQ ID NO: 1034 - DNA, 80 bp, synthetic construct
  misc_feature 1..80: note = Synthetic: >AdVB3-cand-21330-21409
  source 1..80: mol_type = other DNA
agcgagcaagagctcaaagccatcgtccgagacctgggctgcggaccctatttcctgggaacctttgacaagcgtttccc

SEQ ID NO: 1035 - DNA, 80 bp, synthetic construct
  misc_feature 1..80: note = Synthetic: >AdVB3-cand-21480-21559
  source 1..80: mol_type = other DNA
cactggctggcttttggttggaacccgcgctacaacacctgctacctttttgatccttttgggttctcggatgagcggct

SEQ ID NO: 1036 - DNA, 80 bp, synthetic construct
  misc_feature 1..80: note = Synthetic: >AdVB3-cand-21590-21669
  source 1..80: mol_type = other DNA
gctcctgcgtcgcagtgcccttgctaccaaagaccgctgcatcaccctggaaaagtccacccaaagcgtgcagggtccgc

SEQ ID NO: 1037 - DNA, 80 bp, synthetic construct
  misc_feature 1..80: note = Synthetic: >AdVB3-cand-21780-21859
  source 1..80: mol_type = other DNA
aacagcatgctccaatcaccccaagtccagcccaccttgcgccgcaaccaggaggtgctataccgcttcctaaacaccca

SEQ ID NO: 1038 - DNA, 80 bp, synthetic construct
  misc_feature 1..80: note = Synthetic: >AdVB3-cand-21820-21899
  source 1..80: mol_type = other DNA
gccgcaaccaggaggtgctataccgcttcctaaacacccactcatcttactttcgttctcaccgcgcgcgcatcgaaagg

SEQ ID NO: 1039 - DNA, 80 bp, synthetic construct
  misc_feature 1..80: note = Synthetic: >AdVB3-cand-21980-22059
  source 1..80: mol_type = other DNA
ctgaggctctggttttgctcattcgtttcatcatttcacttagaagtcgaatgggttctggcgggagtcagagtgacccg

SEQ ID NO: 1040 - DNA, 80 bp, synthetic construct
  misc_feature 1..80: note = Synthetic: >AdVB3-cand-22030-22109
  source 1..80: mol_type = other DNA
atgggttctggcgggagtcagagtgacccgcgggcagggatacgttgcggaactgtaacctgttctgccacttgaactcg

SEQ ID NO: 1041 - DNA, 80 bp, synthetic construct
  misc_feature 1..80: note = Synthetic: >EVA76-cand-940-1019
  source 1..80: mol_type = other DNA
ccctgaaatccccatcagctgaggcatgtggttacagtgatagggtagcacaattgactgtagggaattccacaatcaca

SEQ ID NO: 1042 - DNA, 80 bp, synthetic construct
  misc_feature 1..80: note = Synthetic: >EVA76-cand-1020-1099
  source 1..80: mol_type = other DNA
acacaggaggcagcaaatatcactgtaggttatggagaatggccagagtactgtcctgacaccgatgccactgcagtgga

SEQ ID NO: 1043 - DNA, 80 bp, synthetic construct
  misc_feature 1..80: note = Synthetic: >EVA76-cand-1100-1179
  source 1..80: mol_type = other DNA
caaacccactcgacctgatgtatctgtcaataggttctacaccttaccagccaaactatggaccaaaacaggaactggct

SEQ ID NO: 1044 - DNA, 80 bp, synthetic construct
  misc_feature 1..80: note = Synthetic: >EVA76-cand-1180-1259
  source 1..80: mol_type = other DNA
caaagggatggtactggaaattccctgatgtgcttacagaaaagggagtatttgggcagaatgcacagttccatttctta

SEQ ID NO: 1045 - DNA, 80 bp, synthetic construct
  misc_feature 1..80: note = Synthetic: >EVA76-cand-1250-1329
  source 1..80: mol_type = other DNA
ccatttcttatacagatcaggattctgcatccacgtacagtgcaatgctagcaagttccaccaaggtacactgctagtgg

SEQ ID NO: 1046 - DNA, 80 bp, synthetic construct
  misc_feature 1..80: note = Synthetic: >EVA76-cand-1330-1409
  source 1..80: mol_type = other DNA
cttgcctcccagagtacgttaatgctcgtgcaagcactaatagcactaatgcaactgcaccacacccaccatatgccgca

SEQ ID NO: 1047 - DNA, 80 bp, synthetic construct
  misc_feature 1..80: note = Synthetic: >EVA76-cand-1410-1489
  source 1..80: mol_type = other DNA
acacaaccaggccccaacggtaaagaattggctttcccatatgtattggatgcaggaatacccattaatcagctattaat

SEQ ID NO: 1048 - DNA, 80 bp, synthetic construct
  misc_feature 1..80: note = Synthetic: >EVA76-cand-1490-1569
  source 1..80: mol_type = other DNA
tgcaccacaccaatggatcaatttgcgcacaaataactgcgccactatagttatgccatacattaatgcagtgccctatg

SEQ ID NO: 1049 - DNA, 80 bp, synthetic construct
  misc_feature 1..80: note = Synthetic: >EVA76-cand-1570-1649
  source 1..80: mol_type = other DNA
actctgccctcaaccattgcaattttggattatttgtgattccagtagcacccctcaattactctgacggtgcaacaact

SEQ ID NO: 1050 - DNA, 80 bp, synthetic construct
  misc_feature 1..80: note = Synthetic: >EVA76-cand-1650-1729
  source 1..80: mol_type = other DNA
gccatacccatcacagtcaccattgcccctctttactcagagtttggaggccttaggcaggctatcacacaaggactacc

SEQ ID NO: 1051 - DNA, 80 bp, synthetic construct
  misc_feature 1..80: note = Synthetic: >EVA76-cand-1730-1809
  source 1..80: mol_type = other DNA
agcagaactcaaaccaggcaccaaccaattcttgactactgataacggagtttcagcaccaatactacctggtttccacc

SEQ ID NO: 1052 - DNA, 80 bp, synthetic construct
  misc_feature 1..80: note = Synthetic: >EVA76-cand-1810-1889
  source 1..80: mol_type = other DNA
ccactccagcaatacacatccctggtgaggtacacaacctactagagattgcacaagttgaaagcatacttgaggttaac

SEQ ID NO: 1053 - DNA, 80 bp, synthetic construct
  misc_feature 1..80: note = Synthetic: >EVA76-cand-1890-1969
  source 1..80: mol_type = other DNA
aacataaccacattggaaacacctgatacactaatgcaaagattgctgatcccagtagaggctaaatcatcaccagacac

SEQ ID NO: 1054 - DNA, 80 bp, synthetic construct
  misc_feature 1..80: note = Synthetic: >EVA76-cand-1970-2049
  source 1..80: mol_type = other DNA
tttatgtgctagctttaaagttgatcctggtagagatggaccatggcaatccacactagtcgggcaaatttgcaaatact

SEQ ID NO: 1055 - DNA, 80 bp, synthetic construct
  misc_feature 1..80: note = Synthetic: >EVA76-cand-2050-2129
  source 1..80: mol_type = other DNA
acacacaatggtctggatctctggaagttacattcatgttcactggctcatttatggctactgggaagatgttaattgct

SEQ ID NO: 1056 - DNA, 80 bp, synthetic construct
  misc_feature 1..80: note = Synthetic: >EVA76-cand-2130-2209
  source 1..80: mol_type = other DNA
tacacaccaccaggaggcgcacagcccactacaagagaccttgctatgctgggcacacatgtaatctgggattttggtct

SEQ ID NO: 1057 - DNA, 80 bp, synthetic construct
  misc_feature 1..80: note = Synthetic: >EVB101-cand-3580-3659
  source 1..80: mol_type = other DNA
tggaggtgcaagaaagtgaatattatcccaggaggtaccagacacacgtgttactcgctgcaggattctctgaaccaggg

SEQ ID NO: 1058 - DNA, 80 bp, synthetic construct
  misc_feature 1..80: note = Synthetic: >EVB101-cand-3720-3799
  source 1..80: mol_type = other DNA
gaaggtgtggtcggttttgctgacgtccgtgatctcctatggttggaagatgacgcaatggagcagggtgtcaaggatta

SEQ ID NO: 1059 - DNA, 80 bp, synthetic construct
  misc_feature 1..80: note = Synthetic: >EVB101-cand-3790-3869
  source 1..80: mol_type = other DNA
tcaaggattacgtggaacagctagggaacgcgtttggaacgggcttcaccaaccaaatctgcgaacaggtaaacatcctt

SEQ ID NO: 1060 - DNA, 80 bp, synthetic construct
  misc_feature 1..80: note = Synthetic: >EVB101-cand-3870-3949
  source 1..80: mol_type = other DNA
aaggagtcccttgtaggtcaggactccatcctggaaaaatccctgaaggcactagttaaaatcatatcagccttggtaat

SEQ ID NO: 1061 - DNA, 80 bp, synthetic construct
  misc_feature 1..80: note = Synthetic: >EVB101-cand-3950-4029
  source 1..80: mol_type = other DNA
cgtggtcagaaaccacgaagacctcatcactgtgacagccacgctcgcccttattggctgcacatcctcaccatggaggt

SEQ ID NO: 1062 - DNA, 80 bp, synthetic construct
  misc_feature 1..80: note = Synthetic: >EVB101-cand-4030-4109
  source 1..80: mol_type = other DNA
ggcttaaacaaaaagtatcacaatactacggaatacccatggctgagcgccagaacaacggatggctcaagaaattcact

SEQ ID NO: 1063 - DNA, 80 bp, synthetic construct
  misc_feature 1..80: note = Synthetic: >EVB101-cand-4110-4189
  source 1..80: mol_type = other DNA
gagatgacaaatgcttgcaagggaatggagtggatcgccatcaagatccaaaagtttattgagtggctcaaaattaaaat

SEQ ID NO: 1064 - DNA, 80 bp, synthetic construct
  misc_feature 1..80: note = Synthetic: >EVB101-cand-4190-4269
  source 1..80: mol_type = other DNA
cctgccagaagtcaaagaaaaacatgaattccttaatagactgaagcaattgccactccttgaaagccagattgctacca

SEQ ID NO: 1065 - DNA, 80 bp, synthetic construct
  misc_feature 1..80: note = Synthetic: >EVB101-cand-4270-4349
  source 1..80: mol_type = other DNA
ttgaacaaagtgcgccatcacagagtgatcaagaacaacttttctccaatgtccagtacttcgctcactactgcagaaag

SEQ ID NO: 1066 - DNA, 80 bp, synthetic construct
  misc_feature 1..80: note = Synthetic: >EVB101-cand-4350-4429
  source 1..80: mol_type = other DNA
tatgcgccactgtacgccgctgaggcaaaaagggtgttctcattagagaagaaaatgagcaattacatacagttcaagtc

SEQ ID NO: 1067 - DNA, 80 bp, synthetic construct
  misc_feature 1..80: note = Synthetic: >EVB101-cand-4390-4469
  source 1..80: mol_type = other DNA
cattagagaagaaaatgagcaattacatacagttcaagtccaaatgccgtattgaacctgtatgtctactcctccacggt

SEQ ID NO: 1068 - DNA, 80 bp, synthetic construct
  misc_feature 1..80: note = Synthetic: >EVB101-cand-4510-4589
  source 1..80: mol_type = other DNA
ggagatcccttgcggagaaactcaacagctccgtgtattccttaccgccggatccagatcattttgacgggtataaacag

SEQ ID NO: 1069 - DNA, 80 bp, synthetic construct
  misc_feature 1..80: note = Synthetic: >EVB101-cand-4590-4669
  source 1..80: mol_type = other DNA
caagcagtagtgatcatggatgatctgtgtcagaatccagacgggaaggatgtgtccctgttttgtcagatggtatcaag

SEQ ID NO: 1070 - DNA, 80 bp, synthetic construct
  misc_feature 1..80: note = Synthetic: >EVB101-cand-4670-4749
  source 1..80: mol_type = other DNA
tgttgattttgtgccacctatggcagcactagaggagaaagggattcttttcacatccccatttgtgctagcgtcaacta

SEQ ID NO: 1071 - DNA, 80 bp, synthetic construct
  misc_feature 1..80: note = Synthetic: >EVB101-cand-4750-4829
  source 1..80: mol_type = other DNA
atgcgggatctattaacgcacccacagtgtcagacagcagggcgcttgctagaagattccactttgacatgaacattgaa

SEQ ID NO: 1072 - DNA, 80 bp, synthetic construct
  misc_feature 1..80: note = Synthetic: >EVB101-cand-4830-4909
  source 1..80: mol_type = other DNA
gttatctctatgtacagccagaatgggaaaatcaacatgcccatgtctgttaagacatgtgatgaggagtgttgtccaac

SEQ ID NO: 1073 - DNA, 80 bp, synthetic construct
  misc_feature 1..80: note = Synthetic: >EVB77-cand-3770-3849
  source 1..80: mol_type = other DNA
aggactatgtggagcagcttgggaacgcctttggctctggtttcacaaatcaaatttgtgagcaggttaaccttttaaag

SEQ ID NO: 1074 - DNA, 80 bp, synthetic construct
  misc_feature 1..80: note = Synthetic: >EVB77-cand-3850-3929
  source 1..80: mol_type = other DNA
gaatcgcttgtgggtcaagactccatcctagaaaaatccctgaaagctctagtgaaaataatatcagccttggtaattgt

SEQ ID NO: 1075 - DNA, 80 bp, synthetic construct
  misc_feature 1..80: note = Synthetic: >EVB77-cand-3930-4009
  source 1..80: mol_type = other DNA
ggtgaggaatcatgacgacttaattacagtgaccgccacgttggcccttatcggctgtacttcatctccgtggcggtggc

SEQ ID NO: 1076 - DNA, 80 bp, synthetic construct
  misc_feature 1..80: note = Synthetic: >EVB77-cand-4010-4089
  source 1..80: mol_type = other DNA
ttaaacagaaagtgtcacagtactatggaatacccatggctgagcgccaaagcaatgggtggcttaaaaagtttactgag

SEQ ID NO: 1077 - DNA, 80 bp, synthetic construct
  misc_feature 1..80: note = Synthetic: >EVB77-cand-4090-4169
  source 1..80: mol_type = other DNA
atgacgaacgcctgcaagggcatggaatggatagccatcaaaattcagaaatttattgagtggctaaaggtcaagatctt

SEQ ID NO: 1078 - DNA, 80 bp, synthetic construct
  misc_feature 1..80: note = Synthetic: >EVB77-cand-4170-4249
  source 1..80: mol_type = other DNA
gccagaggtcaaggaaaagcatgagttcttaaatagacttaagcagcttcccttactggaaagtcaaatcgccacaattg

SEQ ID NO: 1079 - DNA, 80 bp, synthetic construct
  misc_feature 1..80: note = Synthetic: >EVB77-cand-4250-4329
  source 1..80: mol_type = other DNA
aacagagtgcaccatcccagagtgaccaagagcaattattttccaatatccaatattttgctcactattgcagaaagtat

SEQ ID NO: 1080 - DNA, 80 bp, synthetic construct
  misc_feature 1..80: note = Synthetic: >EVB77-cand-4410-4489
  source 1..80: mol_type = other DNA
atgccgtattgaacctgtatgtttgctattgcatggaagtcctggagcaggcaaatcggtggcaacaaatttaatcggaa

SEQ ID NO: 1081 - DNA, 80 bp, synthetic construct
  misc_feature 1..80: note = Synthetic: >EVB77-cand-4490-4569
  source 1..80: mol_type = other DNA
ggtctctagcagagaaattgaacagctcagtgtactcattaccaccagacccagatcactttgatggttataaacaacaa

SEQ ID NO: 1082 - DNA, 80 bp, synthetic construct
  misc_feature 1..80: note = Synthetic: >EVB77-cand-4570-4649
  source 1..80: mol_type = other DNA
gctgttgtgatcatggatgacctgtgccagaatcctgacggaaaagacgtctccctattctgtcaaatggtctccagtgt

SEQ ID NO: 1083 - DNA, 80 bp, synthetic construct
  misc_feature 1..80: note = Synthetic: >EVB77-cand-4650-4729
  source 1..80: mol_type = other DNA
ggattttgtgccgcctatggctgctttggaggagaaaggtattctgtttacctctccatttgtcctggcatcaaccaatg

SEQ ID NO: 1084 - DNA, 80 bp, synthetic construct
  misc_feature 1..80: note = Synthetic: >EVB77-cand-4740-4819
  source 1..80: mol_type = other DNA
caacgctccaaccgtctcggacagtagggccctggcacggaggtttcactttgacatgaacattgaagtaatttccatgt

SEQ ID NO: 1085 - DNA, 80 bp, synthetic construct
  misc_feature 1..80: note = Synthetic: >EVB77-cand-4820-4899
  source 1..80: mol_type = other DNA
acagccagaatggcaagatcaacatgccaatgtcagtgaaaacatgtgatgaagagtgttgcccagttaacttcaagaaa

SEQ ID NO: 1086 - DNA, 80 bp, synthetic construct
  misc_feature 1..80: note = Synthetic: >EVB77-cand-4900-4979
  source 1..80: mol_type = other DNA
tgctgcccgttggtatgtggtaaagctatccaattcattgatagaaggactcaggtcagatactctctagatatgttggt

SEQ ID NO: 1087 - DNA, 80 bp, synthetic construct
  misc_feature 1..80: note = Synthetic: >EVB77-cand-4940-5019
  source 1..80: mol_type = other DNA
atagaaggactcaggtcagatactctctagatatgttggtgactgagatgtttagggaatataaccacagacacagcgtc

SEQ ID NO: 1088 - DNA, 80 bp, synthetic construct
  misc_feature 1..80: note = Synthetic: >EVB77-cand-5060-5139
  source 1..80: mol_type = other DNA
acagagaaatcaagatcagtgtgtcgccagagatacctccaccaccagccattgcagatctgcttaaatcagtggacagt

SEQ ID NO: 1089 - DNA, 80 bp, synthetic construct
  misc_feature 1..80: note = Synthetic: >EVB84-cand-6460-6539
  source 1..80: mol_type = other DNA
agcctccagtctcaatgattcagtggcaatgaggcaaacatttggtaacttgtacaagacattccatctaaatccaggca

SEQ ID NO: 1090 - DNA, 80 bp, synthetic construct
  misc_feature 1..80: note = Synthetic: >EVB84-cand-6540-6619
  source 1..80: mol_type = other DNA
tagtaacgggtagtgcagttgggtgtgatccagatatgttctggagcaaaatacctgtaatgcttgacggacacctcata

SEQ ID NO: 1091 - DNA, 80 bp, synthetic construct
  misc_feature 1..80: note = Synthetic: >EVB84-cand-6620-6699
  source 1..80: mol_type = other DNA
gcctttgattactcaggatatgatgccagtctcagcccagtgtggtttgcatgtctgaagctcctcctggagaaactggg

SEQ ID NO: 1092 - DNA, 80 bp, synthetic construct
  misc_feature 1..80: note = Synthetic: >EVB84-cand-6700-6779
  source 1..80: mol_type = other DNA
atacacacacaaggagacaaactatatagactacctatgcaactcccaccacttgtaccgagacaaacattacttcgtga

SEQ ID NO: 1093 - DNA, 80 bp, synthetic construct
  misc_feature 1..80: note = Synthetic: >EVB84-cand-6790-6869
  source 1..80: mol_type = other DNA
gccatcaggatgctcgggtactagcatattcaattcaatgatcaacaacatcataatcagaacactcatgctgaaggttt

SEQ ID NO: 1094 - DNA, 80 bp, synthetic construct
  misc_feature 1..80: note = Synthetic: >EVB84-cand-6830-6909
  source 1..80: mol_type = other DNA
atcaacaacatcataatcagaacactcatgctgaaggtttacaaaggcattgacttggaccagttcagaatgattgccta

SEQ ID NO: 1095 - DNA, 80 bp, synthetic construct
  misc_feature 1..80: note = Synthetic: >EVB84-cand-6940-7019
  source 1..80: mol_type = other DNA
gcccattgacgcttcattactagctgaagcagggaaggattatggcctgatcatgacaccagcagacaagggcgagtgtt

SEQ ID NO: 1096 - DNA, 80 bp, synthetic construct
  misc_feature 1..80: note = Synthetic: >EVB84-cand-7020-7099
  source 1..80: mol_type = other DNA
tcaatgaggtgacctggacaaatgtgactttcttgaaaaggtacttcagggcagatgaacagtatccattcctggttcac

SEQ ID NO: 1097 - DNA, 80 bp, synthetic construct
  misc_feature 1..80: note = Synthetic: >EVB84-cand-7100-7179
  source 1..80: mol_type = other DNA
cccgtcatgcccatgaaagatatccatgagtccattaggtggaccaaagatccaaagaacacccaggatcatgtgcgatc

SEQ ID NO: 1098 - DNA, 80 bp, synthetic construct
  misc_feature 1..80: note = Synthetic: >EVB84-cand-7210-7289
  source 1..80: mol_type = other DNA
gcacgaatatgaggagtttatccgcaagattaggagcgtgccagttgggcgctgtttgactctccctgcattttcaaccc

SEQ ID NO: 1099 - DNA, 80 bp, synthetic construct
  misc_feature 1..80: note = Synthetic: >EVB84-cand-7260-7339
  source 1..80: mol_type = other DNA
gctgtttgactctccctgcattttcaaccctgcgcaggaagtggttggactccttttgaaattagagaacaattagtata

SEQ ID NO: 1100 - DNA, 80 bp, synthetic construct
  misc_feature 1..80: note = Synthetic: >EVB84-cand-7310-7389
  source 1..80: mol_type = other DNA
tccttttgaaattagagaacaattagtataattaaaattggcttaaccctaccgcataaaccgaacttgataaaagtgcg

SEQ ID NO: 1101 - DNA, 80 bp, synthetic construct
  misc_feature 1..80: note = Synthetic: >EVB85-cand-80-159
  source 1..80: mol_type = other DNA
ttatataccccccccaagtgcaacttagaagcaagacatgaccggtcagcaggtgattcagtaaaccaactgagtcttga

SEQ ID NO: 1102 - DNA, 80 bp, synthetic construct
  misc_feature 1..80: note = Synthetic: >EVB85-cand-150-229
  source 1..80: mol_type = other DNA
tgagtcttgaccaagcacttctgtttccccggaccgagtatcaataggctgcttacgcggctgaaggagaaagtgttcgt

SEQ ID NO: 1103 - DNA, 80 bp, synthetic construct
  misc_feature 1..80: note = Synthetic: >EVB85-cand-230-309
  source 1..80: mol_type = other DNA
tacccggccaattacttcgagaagcctagtaccaccatggaggttgcgcggcgtttcgctccgcacacccccagtgtaga

SEQ ID NO: 1104 - DNA, 80 bp, synthetic construct
  misc_feature 1..80: note = Synthetic: >EVB85-cand-300-379
  source 1..80: mol_type = other DNA
ccagtgtagatcaggccgatgagccaccgcattccccacgggtgaccgtggcggtggctgcgttggcggcctgcccatgg

SEQ ID NO: 1105 - DNA, 80 bp, synthetic construct
  misc_feature 1..80: note = Synthetic: >EVB87-cand-1390-1469
  source 1..80: mol_type = other DNA
ggtgaggtgcctattgaattcaccaatcagccaacagtgggtgacaatgatgttcaacgagtcgtccacaatgcagctat

SEQ ID NO: 1106 - DNA, 80 bp, synthetic construct
  misc_feature 1..80: note = Synthetic: >EVB87-cand-1500-1579
  source 1..80: mol_type = other DNA
cccacaccaatggattaatttacgcactaataacagcgcaaccattgttattccctacataaatagtgtccccatggaca

SEQ ID NO: 1107 - DNA, 80 bp, synthetic construct
  misc_feature 1..80: note = Synthetic: >EVB87-cand-1580-1659
  source 1..80: mol_type = other DNA
atatgtatagacaccagaacttcaccctcatgattattccatttgtgccgttggacatgcaagcgggcgcatcgacaata

SEQ ID NO: 1108 - DNA, 80 bp, synthetic construct
  misc_feature 1..80: note = Synthetic: >EVB87-cand-1650-1729
  source 1..80: mol_type = other DNA
atcgacaatagtgcccataactgtgacagtggcacctatgtgtgctgagtataatgggttgcggttggcgtacaaccagg

SEQ ID NO: 1109 - DNA, 80 bp, synthetic construct
  misc_feature 1..80: note = Synthetic: >EVB87-cand-1740-1819
  source 1..80: mol_type = other DNA
actgtgcacacccggtagcaaccagtttctaacttcagatgactaccaatcgccctcggccatgcctcagtttgatgcta

SEQ ID NO: 1110 - DNA, 80 bp, synthetic construct
  misc_feature 1..80: note = Synthetic: >EVB87-cand-1830-1909
  source 1..80: mol_type = other DNA
gcacataccaggtgaggttaagaatttgatggaaatagcagaggtggactcagtggttcctgtaaacaacaccattaggg

SEQ ID NO: 1111 - DNA, 80 bp, synthetic construct
  misc_feature 1..80: note = Synthetic: >EVB87-cand-1910-1989
  source 1..80: mol_type = other DNA
cagttaattccattgaagcatatcaaattccagtttccacaggcgcacacgatagtaagaaagcaatctttagcttccaa

SEQ ID NO: 1112 - DNA, 80 bp, synthetic construct
  misc_feature 1..80: note = Synthetic: >EVB87-cand-1990-2069
  source 1..80: mol_type = other DNA
ttagaccctggcaatagcacagtaatgagtaaaacgatcttgggtgaaatattgaattactatgcacactggtcagggag

SEQ ID NO: 1113 - DNA, 80 bp, synthetic construct
  misc_feature 1..80: note = Synthetic: >EVB87-cand-2070-2149
  source 1..80: mol_type = other DNA
cattaaattcaccttcttgttttgtgggtctgccatggccacaggcaagattctgttggcgtattcaccacccggcgcct

SEQ ID NO: 1114 - DNA, 80 bp, synthetic construct
  misc_feature 1..80: note = Synthetic: >EVB87-cand-2150-2229
  source 1..80: mol_type = other DNA
cagtcccagcagataggaaacaagccatgctaggcacgcatgtgatatgggatgtgggcttacagtctagttgtgtgttg

SEQ ID NO: 1115 - DNA, 80 bp, synthetic construct
  misc_feature 1..80: note = Synthetic: >EVB87-cand-2230-2309
  source 1..80: mol_type = other DNA
tgtgtgccttggattagtcagacccattaccgttttgtgcatgatgatgtgtacactagcgcaggttacataactgcatg

SEQ ID NO: 1116 - DNA, 80 bp, synthetic construct
  misc_feature 1..80: note = Synthetic: >EVB87-cand-2310-2389
  source 1..80: mol_type = other DNA
gtaccaaacctcaatcgtagtaccacccagcactcccacaaacagcaagatactatgcttcacgtcagcgtgcaatgact

SEQ ID NO: 1117 - DNA, 80 bp, synthetic construct
  misc_feature 1..80: note = Synthetic: >EVB87-cand-2360-2439
  source 1..80: mol_type = other DNA
tactatgcttcacgtcagcgtgcaatgacttctccgttcgcatgttgcgagatacgccacatatcgagcagagagcgaga

SEQ ID NO: 1118 - DNA, 80 bp, synthetic construct
  misc_feature 1..80: note = Synthetic: >EVB87-cand-2470-2549
  source 1..80: mol_type = other DNA
acagttgctgacacaaaaccgagtggagcccggaacacagagcaagtgccagcccttacggcggctgaaacgggacacac

SEQ ID NO: 1119 - DNA, 80 bp, synthetic construct
  misc_feature 1..80: note = Synthetic: >EVB87-cand-2550-2629
  source 1..80: mol_type = other DNA
atcacaagttgagccaagtgacaccgttcagacgaggcatgtgtgtaattaccactcccggtccgagtctactgtagaaa

SEQ ID NO: 1120 - DNA, 80 bp, synthetic construct
  misc_feature 1..80: note = Synthetic: >EVB87-cand-2630-2709
  source 1..80: mol_type = other DNA
acttttttggtagggcagcttgcgtggagttcaagacgtaccgcatagggtcgagtgccgatctgactgacaagtacacg

SEQ ID NO: 1121 - DNA, 80 bp, synthetic construct
  misc_feature 1..80: note = Synthetic: >EVD70-cand-5830-5909
  source 1..80: mol_type = other DNA
gggtggtgaccaccactggtaaagtgattggcattcacgttggtggcaatggtgcgcaaggctttgctgccatgctattg

SEQ ID NO: 1122 - DNA, 80 bp, synthetic construct
  misc_feature 1..80: note = Synthetic: >EVD70-cand-5940-6019
  source 1..80: mol_type = other DNA
atagtatccattgagaaaagtggagtgtttatcaatgcgccagctaaaaccaaattagaacctagtgtcttccatgaagt

SEQ ID NO: 1123 - DNA, 80 bp, synthetic construct
  misc_feature 1..80: note = Synthetic: >EVD70-cand-6300-6379
  source 1..80: mol_type = other DNA
aaaagagacatcttcaacagacaaactagagatacaacagagatgaccaaaatgttggacaaatatggtgtggatttgcc

SEQ ID NO: 1124 - DNA, 80 bp, synthetic construct
  misc_feature 1..80: note = Synthetic: >EVD70-cand-7260-7339
  source 1..80: mol_type = other DNA
ttaccagtatattctagtttgaggcgcaagtggttagactcattctagataactctacttaggaacccaagaacccctcc

SEQ ID NO: 1125 - DNA, 80 bp, synthetic construct
  misc_feature 1..80: note = Synthetic: >FJ532244.1-cand-0-79
  source 1..80: mol_type = other DNA
agtagactccttgagaagctactactgcatatgctggaatgagcaacctccaagaagtgcaagaaggtatcacaatccat

SEQ ID NO: 1126 - DNA, 80 bp, synthetic construct
  misc_feature 1..80: note = Synthetic: >FJ532244.1-cand-90-169
  source 1..80: mol_type = other DNA
ttgtagctgctcgccaaaaacttaaggatgccgaaaaggcagtggaggtggacccagatgacgttaacaagagcacatta

SEQ ID NO: 1127 - DNA, 80 bp, synthetic construct
  misc_feature 1..80: note = Synthetic: >FJ532244.1-cand-180-259
  source 1..80: mol_type = other DNA
gggcagctgtgtctacattggagaacaaactcgcagagctcaagagacagctggcagatctggttgcagctcaaaagctg

SEQ ID NO: 1128 - DNA, 80 bp, synthetic construct
  misc_feature 1..80: note = Synthetic: >FJ532244.1-cand-350-429
  source 1..80: mol_type = other DNA
aactcgattgatcttgaagaacccagtggacaaacagcagattggaaggcaattggagcatacattttaggatttgtaat

SEQ ID NO: 1129 - DNA, 80 bp, synthetic construct
  misc_feature 1..80: note = Synthetic: >FJ532244.1-cand-430-509
  source 1..80: mol_type = other DNA
accaatcgtccttaaggccttatatatgctttcaacaagagggagacaaactgtcaaggaaaataaaggaacaagaatac

SEQ ID NO: 1130 - DNA, 80 bp, synthetic construct
  misc_feature 1..80: note = Synthetic: >FJ532244.1-cand-510-589
  source 1..80: mol_type = other DNA
ggttcaaggatgattcttctttcgaggaaataaatgggatcaggaagccaaaacatctatatgtttccatgccaacagca

SEQ ID NO: 1131 - DNA, 80 bp, synthetic construct
  misc_feature 1..80: note = Synthetic: >FJ532244.1-cand-590-669
  source 1..80: mol_type = other DNA
caatccacaatgaaggctgatgaaattacaccagggagattcaggacaattgcatgtggtttgtttcctgctcagattaa

SEQ ID NO: 1132 - DNA, 80 bp, synthetic construct
  misc_feature 1..80: note = Synthetic: >FJ532244.1-cand-670-749
  source 1..80: mol_type = other DNA
agctcgaaatatcataagtcctgtgatgggagtcattgggtttggattctttgtgaaggattggatggatcggattgaga

SEQ ID NO: 1133 - DNA, 80 bp, synthetic construct
  misc_feature 1..80: note = Synthetic: >FJ532244.1-cand-750-829
  source 1..80: mol_type = other DNA
atttccttgctgctgaatgcccattccttccgaaaccaaaagttcagtcagagtccttcatgggaacaaatagggcttac

SEQ ID NO: 1134 - DNA, 80 bp, synthetic construct
  misc_feature 1..80: note = Synthetic: >FJ532244.1-cand-830-909
  source 1..80: mol_type = other DNA
ttcatcaatcgacaaaagcaggtggatgagtcaaagatccctgatatagttgatctcattcaagcagcagagtcagagtc

SEQ ID NO: 1135 - DNA, 80 bp, synthetic construct
  misc_feature 1..80: note = Synthetic: >FJ532244.1-cand-920-999
  source 1..80: mol_type = other DNA
ttcaatgacattgctgttccacactctgtgtgggttttttcctgtgctccagatagatgtcctcctactgcactttatgt

SEQ ID NO: 1136 - DNA, 80 bp, synthetic construct
  misc_feature 1..80: note = Synthetic: >FJ532244.1-cand-1000-1079
  source 1..80: mol_type = other DNA
tgcagggattcctgaactcggagctttcttctcaattcttcaagacatgcgaaacacaatcatggcatcaaaatctgttg

SEQ ID NO: 1137 - DNA, 80 bp, synthetic construct
  misc_feature 1..80: note = Synthetic: >FJ608550.1-cand-500-579
  source 1..80: mol_type = other DNA
gtgattacatgcatgacaataaggagctgcatggcaaacttgctaactagtcggatacaaatcacatatgaaaagactca

SEQ ID NO: 1138 - DNA, 80 bp, synthetic construct
  misc_feature 1..80: note = Synthetic: >FJ608550.1-cand-580-659
  source 1..80: mol_type = other DNA
ttgtgttacaggtcagttagtggaaggacaatgttttaatccatcacactctttaactctgtcccaacctgcacatacat

SEQ ID NO: 1139 - DNA, 80 bp, synthetic construct
  misc_feature 1..80: note = Synthetic: >FJ608550.1-cand-660-739
  source 1..80: mol_type = other DNA
atgacgtagtaacactgtcagtaacatgtttctttactgcaaaaaaggctgaccagtacaagattgtaaaaacactagag

SEQ ID NO: 1140 - DNA, 80 bp, synthetic construct
  misc_feature 1..80: note = Synthetic: >FJ608550.1-cand-740-819
  source 1..80: mol_type = other DNA
ggaattatcagcaaaacaggttgtactgataatgccattcagggttattatgtctgttttctaggaactcactcagagcc

SEQ ID NO: 1141 - DNA, 80 bp, synthetic construct
  misc_feature 1..80: note = Synthetic: >FJ608550.1-cand-820-899
  source 1..80: mol_type = other DNA
cttgatagtccctaatctggaggatatacgctctgcagaagttgttagccgtatgattgtccatccgcgaggtgaggacc

SEQ ID NO: 1142 - DNA, 80 bp, synthetic construct
  misc_feature 1..80: note = Synthetic: >FJ608550.1-cand-900-979
  source 1..80: mol_type = other DNA
atgatccacttcagaatgcccaaggtgtattaagaattgtaggtccagtgacagctaaggttcctagtacaagttctgca

SEQ ID NO: 1143 - DNA, 80 bp, synthetic construct
  misc_feature 1..80: note = Synthetic: >FJ608550.1-cand-980-1059
  source 1..80: mol_type = other DNA
gataccctacagggtgtagcttttgctggtgtccctatgtacagttcattgtccactctggttagaaatgttgatcctga

SEQ ID NO: 1144 - DNA, 80 bp, synthetic construct
  misc_feature 1..80: note = Synthetic: >FJ608550.1-cand-1060-1139
  source 1..80: mol_type = other DNA
gtatgtattctcaccagggatcatcccagaatcaaatcaaagtaattgtgataagaaaacaatccccttaacatggactg

SEQ ID NO: 1145 - DNA, 80 bp, synthetic construct
  misc_feature 1..80: note = Synthetic: >FJ608550.1-cand-1140-1219
  source 1..80: mol_type = other DNA
ggtatttgccaatatcaggagaaatggaaaaagttacagggtgtactgtcttttgtactctggctggccctggagcaagc

SEQ ID NO: 1146 - DNA, 80 bp, synthetic construct
  misc_feature 1..80: note = Synthetic: >FJ608550.1-cand-1220-1299
  source 1..80: mol_type = other DNA
tgcgaggcttattcagaaaatggtatattcaatattagttcacctacatgtcttgtaaataaggtgcagaggtttcgtgg

SEQ ID NO: 1147 - DNA, 80 bp, synthetic construct
  misc_feature 1..80: note = Synthetic: >FJ608550.1-cand-1300-1379
  source 1..80: mol_type = other DNA
gtcagaacagaaggttaatttcatgtgtcagcgtgttgacaacaatgtggtagtatactgtaacgggcaaaagaaagtga

SEQ ID NO: 1148 - DNA, 80 bp, synthetic construct
  misc_feature 1..80: note = Synthetic: >FJ608550.1-cand-1380-1459
  source 1..80: mol_type = other DNA
tactaacaaagacattagttattgggcagtgtatctatacattcacaagtctattttctctgatgcctgatgttgctcat

SEQ ID NO: 1149 - DNA, 80 bp, synthetic construct
  misc_feature 1..80: note = Synthetic: >FJ608550.1-cand-1450-1529
  source 1..80: mol_type = other DNA
tgttgctcattcacttgcagttgaattatgtgtccctggattgcacgggtgggccacaattgcattgctgtcaacattct

SEQ ID NO: 1150 - DNA, 80 bp, synthetic construct
  misc_feature 1..80: note = Synthetic: >FJ608550.1-cand-1530-1609
  source 1..80: mol_type = other DNA
gttttggctggctcctcattccggcaattactttgatagtgcttaaaatcttaaaagtgatgacatattcatgttcacat

SEQ ID NO: 1151 - DNA, 80 bp, synthetic construct
  misc_feature 1..80: note = Synthetic: >FJ608550.1-cand-1610-1689
  source 1..80: mol_type = other DNA
tatactacagaatcaaaattcaagctgattctggagaaagttaaggttgaatatcagaaaacaatgggttcaatggtctg

SEQ ID NO: 1152 - DNA, 80 bp, synthetic construct
  misc_feature 1..80: note = Synthetic: >FJ608550.1-cand-1690-1769
  source 1..80: mol_type = other DNA
tgatatttgtcatcatgaatgtgaaacagcaaaagaacttgagtcacacaaacagagttgtgcagaagggcaatgccctt

SEQ ID NO: 1153 - DNA, 80 bp, synthetic construct
  misc_feature 1..80: note = Synthetic: >HCV.A14-cand-2490-2569
  source 1..80: mol_type = other DNA
aaaactgtatcctcactaacctcccctactcaaacccccacagctgccaacacaaatgtgagcaaccaccgaattggcct

SEQ ID NO: 1154 - DNA, 80 bp, synthetic construct
  misc_feature 1..80: note = Synthetic: >HCV.A14-cand-2580-2659
  source 1..80: mol_type = other DNA
ccagcattgcaagctgctgagactggtgcgacatccctagtgtccgatgagaacatgatagagactcgctgtgtggtgaa

SEQ ID NO: 1155 - DNA, 80 bp, synthetic construct
  misc_feature 1..80: note = Synthetic: >HCV.A14-cand-2640-2719
  source 1..80: mol_type = other DNA
gagactcgctgtgtggtgaacagccacagcacggaagagaccacagtagggcacttcttttcaagagctggattggtggg

SEQ ID NO: 1156 - DNA, 80 bp, synthetic construct
  misc_feature 1..80: note = Synthetic: >HCV.A14-cand-2750-2829
  source 1..80: mol_type = other DNA
caacacaggaggattcgcctcatgggacattgacgtgatgggatacgtccagatgagaaggaaacttgaactgttcacat

SEQ ID NO: 1157 - DNA, 80 bp, synthetic construct
  misc_feature 1..80: note = Synthetic: >HCV.A14-cand-2830-2909
  source 1..80: mol_type = other DNA
acgcccggttcgatgctgagtttaccttcatagcttccaccccagatggtgaggtgaaaccagtgttcttacaatacatg

SEQ ID NO: 1158 - DNA, 80 bp, synthetic construct
  misc_feature 1..80: note = Synthetic: >HCV.A14-cand-2910-2989
  source 1..80: mol_type = other DNA
tttgtcccccctggcgcaccaaaaccaacagggcgcaacacctatgaatggcaaactgctacaaatccctctgtgctagt

SEQ ID NO: 1159 - DNA, 80 bp, synthetic construct
  misc_feature 1..80: note = Synthetic: >HCV.A14-cand-2990-3069
  source 1..80: mol_type = other DNA
caagagcacagaccctccagcacaagtctctgtgccattcatgtcaccagccagtgcataccagtggttttatgatggtt

SEQ ID NO: 1160 - DNA, 80 bp, synthetic construct
  misc_feature 1..80: note = Synthetic: >HCV.A14-cand-3070-3149
  source 1..80: mol_type = other DNA
acccaacctttgggaaacacctacctgctgatgacttccagtatggtatgacaccaaataacatgatgggatcattctgt

SEQ ID NO: 1161 - DNA, 80 bp, synthetic construct
  misc_feature 1..80: note = Synthetic: >HCV.A14-cand-3170-3249
  source 1..80: mol_type = other DNA
agcgcccagtgtgcacctagtcatccgcatctacatgcgcatgaaacacgtgcgagtgtggatcccacgacctatgcgca

SEQ ID NO: 1162 - DNA, 80 bp, synthetic construct
  misc_feature 1..80: note = Synthetic: >HCV.A14-cand-3230-3309
  source 1..80: mol_type = other DNA
gatcccacgacctatgcgcagccaaccatatgttgcaaagaactaccccaattacaaaggatctgagatcaagtgcgcat

SEQ ID NO: 1163 - DNA, 80 bp, synthetic construct
  misc_feature 1..80: note = Synthetic: >HCV.A14-cand-3310-3389
  source 1..80: mol_type = other DNA
cgtctagccgtacgtcaatcaccactttgggcaagttcggacaacaatctggtgccatctacgtgggcaactatagagtg

SEQ ID NO: 1164 - DNA, 80 bp, synthetic construct
  misc_feature 1..80: note = Synthetic: >HCV.A14-cand-3390-3469
  source 1..80: mol_type = other DNA
gtgaacagacacctcgccactcacaatgactgggctaacctagtgtgggaagacagctcaagggacctcctcgtttcatc

SEQ ID NO: 1165 - DNA, 80 bp, synthetic construct
  misc_feature 1..80: note = Synthetic: >HCV.A14-cand-3470-3549
  source 1..80: mol_type = other DNA
cactacagctcaaggatgtgacaccatcgcccgatgcaactgccagactggagtatactactgtaactcccaaagaaaac

SEQ ID NO: 1166 - DNA, 80 bp, synthetic construct
  misc_feature 1..80: note = Synthetic: >HCV.A14-cand-3550-3629
  source 1..80: mol_type = other DNA
actacccagtcagcttctcaaaacccagcctgatctttgtggaagccagtgagtactacccagccagataccaatcacac

SEQ ID NO: 1167 - DNA, 80 bp, synthetic construct
  misc_feature 1..80: note = Synthetic: >HCV.A14-cand-3630-3709
  source 1..80: mol_type = other DNA
ctcatgctcgcagaaggacactctgaacccggagattgtggtggcattctcaggtgccaacacggtgttgttggcatagt

SEQ ID NO: 1168 - DNA, 80 bp, synthetic construct
  misc_feature 1..80: note = Synthetic: >HCV.A14-cand-3720-3799
  source 1..80: mol_type = other DNA
ggtaacggcctggtcggcttcgctgatgtcagggatctcctgtggctagatgaagaggctatggaacaaggtgtgtctga

SEQ ID NO: 1169 - DNA, 80 bp, synthetic construct
  misc_feature 1..80: note = Synthetic: >HCV.A20-cand-3610-3689
  source 1..80: mol_type = other DNA
cagtctcctttgttggacccactttccagtacatggaagcaaatgattactacccagccaggtaccaatcccacatgcta

SEQ ID NO: 1170 - DNA, 80 bp, synthetic construct
  misc_feature 1..80: note = Synthetic: >HCV.A20-cand-3690-3769
  source 1..80: mol_type = other DNA
attggccatgggtttgcatcaccaggagactgtggtggcatcctcagatgtcaacatggagtcataggaataatcacagc

SEQ ID NO: 1171 - DNA, 80 bp, synthetic construct
  misc_feature 1..80: note = Synthetic: >HCV.A20-cand-3770-3849
  source 1..80: mol_type = other DNA
aggaggagaaggtttggttgcattctcagacatcagagacctctatgcatatgaagaagaagccatggagcaaggcattt

SEQ ID NO: 1172 - DNA, 80 bp, synthetic construct
  misc_feature 1..80: note = Synthetic: >HCV.A20-cand-3880-3959
  source 1..80: mol_type = other DNA
ttggaagtggtttcactcaacaaattggagacaaaatatcagaactaaccagcatggtcaccagcactatcacagagaag

SEQ ID NO: 1173 - DNA, 80 bp, synthetic construct
  misc_feature 1..80: note = Synthetic: >HCV.A20-cand-3930-4009
  source 1..80: mol_type = other DNA
agcatggtcaccagcactatcacagagaagttactcaaaaatttaatcaaaatcatttcatccctagtgatcatcaccag

SEQ ID NO: 1174 - DNA, 80 bp, synthetic construct
  misc_feature 1..80: note = Synthetic: >HCV.A20-cand-3970-4049
  source 1..80: mol_type = other DNA
atttaatcaaaatcatttcatccctagtgatcatcaccagaaactatgaagacaccactacagtgctagcgaccctggca

SEQ ID NO: 1175 - DNA, 80 bp, synthetic construct
  misc_feature 1..80: note = Synthetic: >HCV.A20-cand-4090-4169
  source 1..80: mol_type = other DNA
agaaggcttgtgacatattggaaattccatatgtcatccgccaaggagatagctggctgaagaagttcacagaagcatgc

SEQ ID NO: 1176 - DNA, 80 bp, synthetic construct
  misc_feature 1..80: note = Synthetic: >HCV.A20-cand-4170-4249
  source 1..80: mol_type = other DNA
aatgcagccaagggtctggaatgggtgtccaacaaaatttccaagttcattgattggctgaaagagaaaattatcccaca

SEQ ID NO: 1177 - DNA, 80 bp, synthetic construct
  misc_feature 1..80: note = Synthetic: >HCV.A20-cand-4250-4329
  source 1..80: mol_type = other DNA
agcaagagacaaactggaatttgtgacaaaactcaaacaattagagatgctagaaaaccaaatatccacaatacaccagt

SEQ ID NO: 1178 - DNA, 80 bp, synthetic construct
  misc_feature 1..80: note = Synthetic: >HCV.A20-cand-4330-4409
  source 1..80: mol_type = other DNA
catgcccaagccaagaacaccaagaaatacttttcaacaatgtgagatggctatccattcaatcaaagaggtttgcacca

SEQ ID NO: 1179 - DNA, 80 bp, synthetic construct
  misc_feature 1..80: note = Synthetic: >HCV.A20-cand-4490-4569
  source 1..80: mol_type = other DNA
tattgaaccagtatgtctattagtgcatggtagtccaggaacaggaaaatcagttgcaaccaacctaattgctagagcca

SEQ ID NO: 1180 - DNA, 80 bp, synthetic construct
  misc_feature 1..80: note = Synthetic: >HCV.A20-cand-4570-4649
  source 1..80: mol_type = other DNA
tagctgagaaagaaaacacatccacctactcactaccaccagatccttctcactttgatggttacaaacaacaaggagtg

SEQ ID NO: 1181 - DNA, 80 bp, synthetic construct
  misc_feature 1..80: note = Synthetic: >HCV.A20-cand-4650-4729
  source 1..80: mol_type = other DNA
gtcatcatggatgacctaaaccagaacccagatggagctgacatgaaactgttctgccaaatggtttccacagtggagtt

SEQ ID NO: 1182 - DNA, 80 bp, synthetic construct
  misc_feature 1..80: note = Synthetic: >HCV.A20-cand-4730-4809
  source 1..80: mol_type = other DNA
catcccaccaatggcctcactagaagagaaaggcattctcttcacatccaactatgtgttggcttccaccaactccagta

SEQ ID NO: 1183 - DNA, 80 bp, synthetic construct
  misc_feature 1..80: note = Synthetic: >HCV.A20-cand-4810-4889
  source 1..80: mol_type = other DNA
gaataacaccacccacagtggcacacagtgatgccctggccaggagattcgcctttgacatggacatccaggtcatgggt

SEQ ID NO: 1184 - DNA, 80 bp, synthetic construct
  misc_feature 1..80: note = Synthetic: >HCV.A20-cand-4890-4969
  source 1..80: mol_type = other DNA
gagtattccagagatggaaaactgaacatggcaatggcaactgaaatgtgcaaaaactgccaccaaccagcaaacttcaa

SEQ ID NO: 1185 - DNA, 80 bp, synthetic construct
  misc_feature 1..80: note = Synthetic: >HCV.A21-cand-2320-2399
  source 1..80: mol_type = other DNA
cttcacagaaggcgggtttataacttgcttttatcaaactagaattgttgtgcctgcttcaacccctaccagtatgttca

SEQ ID NO: 1186 - DNA, 80 bp, synthetic construct
  misc_feature 1..80: note = Synthetic: >HCV.A21-cand-2400-2479
  source 1..80: mol_type = other DNA
tgttaggctttgtgagtgcatgtccagatttcagtgtcagactgcttagggacacttcccacattagtcaatcaaaacta

SEQ ID NO: 1187 - DNA, 80 bp, synthetic construct
  misc_feature 1..80: note = Synthetic: >HCV.A21-cand-2480-2559
  source 1..80: mol_type = other DNA
atagcacgcacacaaggcattgaagatctcattgattcagcaataaagaatgctctgagagtgtcccaaccatctacggc

SEQ ID NO: 1188 - DNA, 80 bp, synthetic construct
  misc_feature 1..80: note = Synthetic: >HCV.A21-cand-2560-2639
  source 1..80: mol_type = other DNA
tcaatcaactgaagcaaccagtggagcaaatagtcaggaagtgccagcactaactgctgtggaaacaggagcatctggtc

SEQ ID NO: 1189 - DNA, 80 bp, synthetic construct
  misc_feature 1..80: note = Synthetic: >HCV.A21-cand-2640-2719
  source 1..80: mol_type = other DNA
aggcaatccccagtgacgtgatggaaaccagacacgtgataaattacaaaaccaggtctgagtcatgtcttgagtcattc

SEQ ID NO: 1190 - DNA, 80 bp, synthetic construct
  misc_feature 1..80: note = Synthetic: >HCV.A21-cand-2720-2799
  source 1..80: mol_type = other DNA
tttgggagagctgcgtgtgtcacaatcctatctctgaccaactcttccaagagtggagaggagaagaaacatttcaacat

SEQ ID NO: 1191 - DNA, 80 bp, synthetic construct
  misc_feature 1..80: note = Synthetic: >HCV.A21-cand-2800-2879
  source 1..80: mol_type = other DNA
ttggaacatcacatacaccgacactgtgcagctacgcagaaaattggagtttttcacatattccagatttgaccttgaaa

SEQ ID NO: 1192 - DNA, 80 bp, synthetic construct
  misc_feature 1..80: note = Synthetic: >HCV.A21-cand-2880-2959
  source 1..80: mol_type = other DNA
tgacttttgtgttcacagagaactatcccagtacagctagtggagaagtgcgcaaccaggtataccagattatgtacatt

SEQ ID NO: 1193 - DNA, 80 bp, synthetic construct
  misc_feature 1..80: note = Synthetic: >HCV.A21-cand-2970-3049
  source 1..80: mol_type = other DNA
caccccgaccatcatcctgggatgattacacatggcaatcctcctccaacccttccatcttttacatgtatgggaacgca

SEQ ID NO: 1194 - DNA, 80 bp, synthetic construct
  misc_feature 1..80: note = Synthetic: >HCV.A21-cand-2990-3069
  source 1..80: mol_type = other DNA
gatgattacacatggcaatcctcctccaacccttccatcttttacatgtatgggaacgcaccaccacggatgtcaattcc

SEQ ID NO: 1195 - DNA, 80 bp, synthetic construct
  misc_feature 1..80: note = Synthetic: >HCV.A21-cand-3110-3189
  source 1..80: mol_type = other DNA
ggttttgcacgagtgccacttgagggtgagaatactgatgctggtgacacgttttatggattggtgtccataaatgattt

SEQ ID NO: 1196 - DNA, 80 bp, synthetic construct
  misc_feature 1..80: note = Synthetic: >HCV.A21-cand-3180-3259
  source 1..80: mol_type = other DNA
taaatgattttggagtcttagcagtcagagcagtaaaccgcagcaatccacatacaatacacacatccgtgagagtgtac

SEQ ID NO: 1197 - DNA, 80 bp, synthetic construct
  misc_feature 1..80: note = Synthetic: >HCV.A21-cand-3260-3339
  source 1..80: mol_type = other DNA
atgaaaccaaaacacattcggtgctggtgccccagaccccctcgcgcagtattatacagaggagaaggagtagacatgat

SEQ ID NO: 1198 - DNA, 80 bp, synthetic construct
  misc_feature 1..80: note = Synthetic: >HCV.A21-cand-3340-3419
  source 1..80: mol_type = other DNA
atccagtgcaattttacccctgactaaagtggactctattaccacctttggatttggccaccagaacaaggcagtgtatg

SEQ ID NO: 1199 - DNA, 80 bp, synthetic construct
  misc_feature 1..80: note = Synthetic: >HCV.A21-cand-3420-3499
  source 1..80: mol_type = other DNA
ttgccggttacaagatttgtaactaccacctagcaacccccagtgatcatttaaatgcaattagtgtgttgtgggatagg

SEQ ID NO: 1200 - DNA, 80 bp, synthetic construct
  misc_feature 1..80: note = Synthetic: >HCV.A21-cand-3480-3559
  source 1..80: mol_type = other DNA
ttagtgtgttgtgggatagggatttaatggtggtggagtctagagcccaaggaactgacaccatagccaggtgtagttgc

SEQ ID NO: 1201 - DNA, 80 bp, synthetic construct
  misc_feature 1..80: note = Synthetic: >HCV.A21-cand-4890-4969
  source 1..80: mol_type = other DNA
caatcaaaggcaaattgaacatggccacagccacccagttgtgcaaggattgtccaacacctgcaaattttaaaaagtgt

SEQ ID NO: 1202 - DNA, 80 bp, synthetic construct
  misc_feature 1..80: note = Synthetic: >HCV.A21-cand-4970-5049
  source 1..80: mol_type = other DNA
tgtcctcttgtctgtggtaaggctttgcagctaatggatagatataccagacagagattcactgtggatgaaatcaccac

SEQ ID NO: 1203 - DNA, 80 bp, synthetic construct
  misc_feature 1..80: note = Synthetic: >HCV.A21-cand-5050-5129
  source 1..80: mol_type = other DNA
attaattatgaatgagaaaaacaggagggccaacattggtaactgcatggaagccttgttccaagggccgctgaggtaca

SEQ ID NO: 1204 - DNA, 80 bp, synthetic construct
  misc_feature 1..80: note = Synthetic: >HCV.A21-cand-5130-5209
  source 1..80: mol_type = other DNA
aggatctgaaaattgatgtgaagacagtccccccccctgaatgcatcagtgatctactacaagcagtggattctcaagag

SEQ ID NO: 1205 - DNA, 80 bp, synthetic construct
  misc_feature 1..80: note = Synthetic: >HCV.A21-cand-5210-5289
  source 1..80: mol_type = other DNA
gttagagattactgtgaaaagaagggctggatagtcaacgttactagccagatacagttagaaagaaacatcaacagggc

SEQ ID NO: 1206 - DNA, 80 bp, synthetic construct
  misc_feature 1..80: note = Synthetic: >HCV.A21-cand-5290-5369
  source 1..80: mol_type = other DNA
catgactatactccaggctgtgaccacatttgcagcagtcgcaggagtagtgtatgtgatgtataaactctttgctggtc

SEQ ID NO: 1207 - DNA, 80 bp, synthetic construct
  misc_feature 1..80: note = Synthetic: >HCV.A21-cand-5370-5449
  source 1..80: mol_type = other DNA
aacagggcgcatacactggtttgccaagcaaaaagcccaatgtcccaacaatcagagttgccaaagtacagggaccaggg

SEQ ID NO: 1208 - DNA, 80 bp, synthetic construct
  misc_feature 1..80: note = Synthetic: >HCV.A21-cand-5440-5519
  source 1..80: mol_type = other DNA
gggaccagggtttgactatgcagtggcaatggctaaaagaaacatacttactgcaaccactaccaagggtgaattcacta

SEQ ID NO: 1209 - DNA, 80 bp, synthetic construct
  misc_feature 1..80: note = Synthetic: >HCV.A21-cand-5530-5609
  source 1..80: mol_type = other DNA
gcatgataatgtagcgatactaccaacccacgccgccccaggagaaactatcattattgatgggaaagaagtggagatcc

SEQ ID NO: 1210 - DNA, 80 bp, synthetic construct
  misc_feature 1..80: note = Synthetic: >HCV.A21-cand-5610-5689
  source 1..80: mol_type = other DNA
tagatgccagagccctagaagatcaagcgggaaccaatcttgagattactataatcactctaaaaagaaatgagaagttt

SEQ ID NO: 1211 - DNA, 80 bp, synthetic construct
  misc_feature 1..80: note = Synthetic: >HCV.A21-cand-5720-5799
  source 1..80: mol_type = other DNA
atcactgaaactaatgatggagtattgatcgtgaacactagtaagtaccccaacatgtatgtccctgttggtgctgtgac

SEQ ID NO: 1212 - DNA, 80 bp, synthetic construct
  misc_feature 1..80: note = Synthetic: >HCV.A21-cand-5890-5969
  source 1..80: mol_type = other DNA
catcacttgcactggtaaggtcattgggatgcatgttggtgggaacggttcacatgggtttgcagcagcccttaagcgat

SEQ ID NO: 1213 - DNA, 80 bp, synthetic construct
  misc_feature 1..80: note = Synthetic: >HCV.A21-cand-5940-6019
  source 1..80: mol_type = other DNA
cacatgggtttgcagcagcccttaagcgatcatacttcacccaaaatcaaggcgaaatccaatggatgaggtcatcaaaa

SEQ ID NO: 1214 - DNA, 80 bp, synthetic construct
  misc_feature 1..80: note = Synthetic: >HCV.A21-cand-6030-6109
  source 1..80: mol_type = other DNA
accctattataaatgccccatcaaagacaaagttagaacccagtgctttccactatgtcttcgaaggtgtcaaagaacca

SEQ ID NO: 1215 - DNA, 80 bp, synthetic construct
  misc_feature 1..80: note = Synthetic: >HCV.A21-cand-6100-6179
  source 1..80: mol_type = other DNA
caaagaaccagcagtactcaccaaaaatgaccctagactgaaaacagatttcgaagaagccatcttttcgaaatatgtgg

SEQ ID NO: 1216 - DNA, 80 bp, synthetic construct
  misc_feature 1..80: note = Synthetic: >HCV.A21-cand-6200-6279
  source 1..80: mol_type = other DNA
gacgaatacatgaaagaagcagtggatcactatgcaggacagctaatgtcattggacatcaacacagaacaaatgtgcct

SEQ ID NO: 1217 - DNA, 80 bp, synthetic construct
  misc_feature 1..80: note = Synthetic: >HCV.A8-cand-6440-6519
  source 1..80: mol_type = other DNA
aagtcccgcttgattgaagctagcagcttgaatgactcagtgtacctcaggatggcttttgggcacctttatgaaacttt

SEQ ID NO: 1218 - DNA, 80 bp, synthetic construct
  misc_feature 1..80: note = Synthetic: >HCV.A8-cand-6560-6639
  source 1..80: mol_type = other DNA
tgtaacccagatgtgttttggagcaagctaccaatcttgctccctggttccctcttcgcctttgactactcgggttatga

SEQ ID NO: 1219 - DNA, 80 bp, synthetic construct
  misc_feature 1..80: note = Synthetic: >HCV.A8-cand-6600-6679
  source 1..80: mol_type = other DNA
tccctggttccctcttcgcctttgactactcgggttatgatgctagcctcagcccagtctggttcagagcactggaacta

SEQ ID NO: 1220 - DNA, 80 bp, synthetic construct
  misc_feature 1..80: note = Synthetic: >HCV.A8-cand-6680-6759
  source 1..80: mol_type = other DNA
gtccttagagagataggctatagtgaggaggcagtctcactcattgagggaatcaaccatacacaccatgtgtaccgcaa

SEQ ID NO: 1221 - DNA, 80 bp, synthetic construct
  misc_feature 1..80: note = Synthetic: >HCV.A8-cand-6830-6909
  source 1..80: mol_type = other DNA
aataacatcatcattagagcactacttatcaaaacatttaagggcattgatttggatgaactcaatatggttgcctacgg

SEQ ID NO: 1222 - DNA, 80 bp, synthetic construct
  misc_feature 1..80: note = Synthetic: >HCV.A8-cand-6920-6999
  source 1..80: mol_type = other DNA
cttgctagttaccctttcccaattgactgcctggagctagcaaaaacaggcaaggagtatggtctaactatgactcctgc

SEQ ID NO: 1223 - DNA, 80 bp, synthetic construct
  misc_feature 1..80: note = Synthetic: >HCV.A8-cand-7040-7119
  source 1..80: mol_type = other DNA
gcaacctttctcaaaagaggcttcttgcctgatgagcaattcccattcttgattcaccctaccatgccaatgaaggagat

SEQ ID NO: 1224 - DNA, 80 bp, synthetic construct
  misc_feature 1..80: note = Synthetic: >HCV.A8-cand-7080-7159
  source 1..80: mol_type = other DNA
tcccattcttgattcaccctaccatgccaatgaaggagatccatgagtccattcgatggaccaaggatgcacgaaacact

SEQ ID NO: 1225 - DNA, 80 bp, synthetic construct
  misc_feature 1..80: note = Synthetic: >HCV.A8-cand-7220-7299
  source 1..80: mol_type = other DNA
aaatttgtgagcacaattagatctgtcccagtagggaaagcattggccattccaaactatgaaaacctgagacgcaattg

SEQ ID NO: 1226 - DNA, 80 bp, synthetic construct
  misc_feature 1..80: note = Synthetic: >HCV.A8-cand-7290-7369
  source 1..80: mol_type = other DNA
gacgcaattggctcgaattgttttagaggttaaacacacgactcaaccccaccagaaatctggtcgtgaaaatgactggt

SEQ ID NO: 1227 - DNA, 80 bp, synthetic construct
  misc_feature 1..80: note = Synthetic: >HCV.A9-cand-50-129
  source 1..80: mol_type = other DNA
actggtatcacggtacctttgtgcgcctgttttatacaccctccccgaatgtaacttagaagctttacctagatggtcaa

SEQ ID NO: 1228 - DNA, 80 bp, synthetic construct
  misc_feature 1..80: note = Synthetic: >HCV.A9-cand-130-209
  source 1..80: mol_type = other DNA
tagaaggtccagcacaccagttggattccgaccaagcacttctgttaccccggactgagtatcaataggccgttcgcacg

SEQ ID NO: 1229 - DNA, 80 bp, synthetic construct
  misc_feature 1..80: note = Synthetic: >HCV.A9-cand-380-459
  source 1..80: mol_type = other DNA
gggcaacccatgggacgcttcaatactgacatggtgcgaagagtctattgagctaattggtagtcctccggcccctgaat

SEQ ID NO: 1230 - DNA, 80 bp, synthetic construct
  misc_feature 1..80: note = Synthetic: >HCV.A9-cand-610-689
  source 1..80: mol_type = other DNA
accatatagctattggattggccatccagtgacaaacagagcgattatatatttgtttgttggttttgttccattaaact

SEQ ID NO: 1231 - DNA, 80 bp, synthetic construct
  misc_feature 1..80: note = Synthetic: >HCV.A9-cand-690-769
  source 1..80: mol_type = other DNA
ataaagttttaaacacacttaaatttgtcttactactcaactcagcaaaatgggagctcaagtatcgacacagaaaaccg

SEQ ID NO: 1232 - DNA, 80 bp, synthetic construct
  misc_feature 1..80: note = Synthetic: >HCV.A9-cand-770-849
  source 1..80: mol_type = other DNA
gagcccacgaaactgggctgaatgccagtggtaactctatcatccattacacaaacatcaactactacaaagatgctgcc

SEQ ID NO: 1233 - DNA, 80 bp, synthetic construct
  misc_feature 1..80: note = Synthetic: >HCV.A9-cand-2120-2199
  source 1..80: mol_type = other DNA
tgatagcgtattcgccaccaggcgcaaacccaccaaagacccgaaaggatgcaatgcttggaacgcatatcatatgggat

SEQ ID NO: 1234 - DNA, 80 bp, synthetic construct
  misc_feature 1..80: note = Synthetic: >HCV.A9-cand-2200-2279
  source 1..80: mol_type = other DNA
attggcctgcaatcaagttgcgttctgtgtgtcccatggattagtcaaacccattacaggttagtacaacaggatgagta

SEQ ID NO: 1235 - DNA, 80 bp, synthetic construct
  misc_feature 1..80: note = Synthetic: >HCV.A9-cand-2250-2329
  source 1..80: mol_type = other DNA
ccattacaggttagtacaacaggatgagtacaccagtgcaggttttgtaacatgttggtaccagactggtatgattgtcc

SEQ ID NO: 1236 - DNA, 80 bp, synthetic construct
  misc_feature 1..80: note = Synthetic: >HCV.A9-cand-2360-2439
  source 1..80: mol_type = other DNA
tgtgtttcgcttcggcttgcaacgacttttctgtgaggatgttaagagacactccattcatctcacaggacaacaaattg

SEQ ID NO: 1237 - DNA, 80 bp, synthetic construct
  misc_feature 1..80: note = Synthetic: >HCV.A9-cand-2430-2509
  source 1..80: mol_type = other DNA
caacaaattgcaaggagatgtggaggaagccgttgagagggcaatcgtacacgtggctgacacattacgcagtggaccta

SEQ ID NO: 1238 - DNA, 80 bp, synthetic construct
  misc_feature 1..80: note = Synthetic: >HCV.A9-cand-2510-2589
  source 1..80: mol_type = other DNA
gcaactcagaaagtatccctgcgctcacagcagttgagacaggacacacgtcacaagtgaccccgagtgacaccatgcag

SEQ ID NO: 1239 - DNA, 80 bp, synthetic construct
  misc_feature 1..80: note = Synthetic: >HCV.A9-cand-2590-2669
  source 1..80: mol_type = other DNA
actaggcacgtgaagaattaccatactcgttctgagtccaccgtggaaaactttcttggcagatcagcctgtgtttatat

SEQ ID NO: 1240 - DNA, 80 bp, synthetic construct
  misc_feature 1..80: note = Synthetic: >HCV.A9-cand-2670-2749
  source 1..80: mol_type = other DNA
ggaggaatacaagaccacagacaatgatgtcaacaagaaattcgtggcgtggccgatcaacactaaacaaatggtgcaaa

SEQ ID NO: 1241 - DNA, 80 bp, synthetic construct
  misc_feature 1..80: note = Synthetic: >HCV.A9-cand-2750-2829
  source 1..80: mol_type = other DNA
tgcgtaggaagctagagatgttcacctacctcaggtttgacatggaagtaaccttcgtgatcacaagtcggcaagatcct

SEQ ID NO: 1242 - DNA, 80 bp, synthetic construct
  misc_feature 1..80: note = Synthetic: >HCV.A9-cand-2830-2909
  source 1..80: mol_type = other DNA
ggaaccacactagcacaagacatgccagtgctgacgcaccagattatgtacgtgccacccggcggccccatcccagccaa

SEQ ID NO: 1243 - DNA, 80 bp, synthetic construct
  misc_feature 1..80: note = Synthetic: >HCV.A9-cand-2910-2989
  source 1..80: mol_type = other DNA
agttgacgactacgcttggcaaacctccactaatcccagcattttctggacagagggaaacgcaccagcacgcatgtcaa

SEQ ID NO: 1244 - DNA, 80 bp, synthetic construct
  misc_feature 1..80: note = Synthetic: >HCV.A9-cand-2990-3069
  source 1..80: mol_type = other DNA
tcccattcatcagtataggaaatgcatacagcaacttctatgacgggtggtcaaattttgatcagaagggttcatacggg

SEQ ID NO: 1245 - DNA, 80 bp, synthetic construct
  misc_feature 1..80: note = Synthetic: >HCV.A9-cand-3070-3149
  source 1..80: mol_type = other DNA
tataatacattaaacaatctaggtcacatatatgtgaggcacgtgagtggaagcagtccacaccccattacgagcactat

SEQ ID NO: 1246 - DNA, 80 bp, synthetic construct
  misc_feature 1..80: note = Synthetic: >HCV.A9-cand-3150-3229
  source 1..80: mol_type = other DNA
cagaatttatttcaagccaaagcatactagagcttgggtgccgcggccccctcgactgtgccaatacaagaaagcattta

SEQ ID NO: 1247 - DNA, 80 bp, synthetic construct
  misc_feature 1..80: note = Synthetic: >HCV.A9-cand-3220-3299
  source 1..80: mol_type = other DNA
aaagcatttagtgtggattttacaccaacacccatcacagacacccgaaaggacattaacactgtaaccaccatagagca

SEQ ID NO: 1248 - DNA, 80 bp, synthetic construct
  misc_feature 1..80: note = Synthetic: >HCV.A9-cand-3320-3399
  source 1..80: mol_type = other DNA
tggccgcactaaacacacatggtgcgtttggacatcagtcaggcgctgtgtatgtagggaactacagagtggtgaatagg

SEQ ID NO: 1249 - DNA, 80 bp, synthetic construct
  misc_feature 1..80: note = Synthetic: >HQ537675.1-cand-2860-2939
  source 1..80: mol_type = other DNA
tggtgccagcgttgtcagtatcaaaggccaaagccttacaagctattgaactacaaatgatgttggaaacattaaataac

SEQ ID NO: 1250 - DNA, 80 bp, synthetic construct
  misc_feature 1..80: note = Synthetic: >HQ537675.1-cand-2940-3019
  source 1..80: mol_type = other DNA
actgaatacaaaaatgaggactggacaatgcagcaaacaagtcttgaactgtatttaactgcacctacagggtgtttaaa

SEQ ID NO: 1251 - DNA, 80 bp, synthetic construct
  misc_feature 1..80: note = Synthetic: >HQ537675.1-cand-3020-3099
  source 1..80: mol_type = other DNA
aaaacatggatatactgtagaggtgcaatttgatggtgatgtacacaacaccatgcattatactaactggaaatttatat

SEQ ID NO: 1252 - DNA, 80 bp, synthetic construct
  misc_feature 1..80: note = Synthetic: >HQ537675.1-cand-3100-3179
  source 1..80: mol_type = other DNA
acctatgtatagatggccaatgtactgttgtggaagggcaagttaattgtaagggcatttattatgtacatgaaggacat

SEQ ID NO: 1253 - DNA, 80 bp, synthetic construct
  misc_feature 1..80: note = Synthetic: >HQ537675.1-cand-3180-3259
  source 1..80: mol_type = other DNA
ataacatattttgtaaattttacagaagaggcaaaaaaatatgggactggtaaaaaatgggaagtgcatgcgggtggtca

SEQ ID NO: 1254 - DNA, 80 bp, synthetic construct
  misc_feature 1..80: note = Synthetic: >HQ537675.1-cand-3260-3339
  source 1..80: mol_type = other DNA
ggtaattgtttttcctgaatctgtatttagcagtgacgaaatatcctttgctgggattgttacaaagctaccaacagcca

SEQ ID NO: 1255 - DNA, 80 bp, synthetic construct
  misc_feature 1..80: note = Synthetic: >HQ537675.1-cand-3340-3419
  source 1..80: mol_type = other DNA
acaacaccaccacatcgaattccaaaacctgcgccttgggcaccagtgaaggtgtgcggcgggcgacgacgtctactaag

SEQ ID NO: 1256 - DNA, 80 bp, synthetic construct
  misc_feature 1..80: note = Synthetic: >HQ537675.1-cand-3420-3499
  source 1..80: mol_type = other DNA
cgaccaagaacagagccagagcacagaaacacccaccaccccaacaagttgttgcgaggcgactccgtggacagtgtcaa

SEQ ID NO: 1257 - DNA, 80 bp, synthetic construct
  misc_feature 1..80: note = Synthetic: >HQ537675.1-cand-3510-3589
  source 1..80: mol_type = other DNA
atcagtgcagctgcatgcacaaaccaaacaagggctgtcagttgtcctgcaactacacctataatacacttaaaaggtga

SEQ ID NO: 1258 - DNA, 80 bp, synthetic construct
  misc_feature 1..80: note = Synthetic: >HQ537675.1-cand-3580-3659
  source 1..80: mol_type = other DNA
taaaaggtgatgcaaatatattaaaatgtttaagatataggctgtcaaaatataaacaattgtatgaacaagtgtcatct

SEQ ID NO: 1259 - DNA, 80 bp, synthetic construct
  misc_feature 1..80: note = Synthetic: >HQ537675.1-cand-3660-3739
  source 1..80: mol_type = other DNA
acatggcattggacatgtacagatggaaaacataaaaatgctattgtaaccttaacatatataagtacatcacaaagaga

SEQ ID NO: 1260 - DNA, 80 bp, synthetic construct
  misc_feature 1..80: note = Synthetic: >HQ537675.1-cand-3740-3819
  source 1..80: mol_type = other DNA
cgattttttaaatactgtaaaaatacctaacacagtatcagtgtcaacaggatatatgactatttagcctaatgattgaa

SEQ ID NO: 1261 - DNA, 80 bp, synthetic construct
  misc_feature 1..80: note = Synthetic: >HQ537675.1-cand-3820-3899
  source 1..80: mol_type = other DNA
ctaaatatttctacagtaagcattgtgctatgctttttgctttgcttttgtgtgctactatttgtgtgtcttgtcatacg

SEQ ID NO: 1262 - DNA, 80 bp, synthetic construct
  misc_feature 1..80: note = Synthetic: >HQ537675.1-cand-3900-3979
  source 1..80: mol_type = other DNA
tccacttgtgctgtctgtgtcggtatatgcaacactactattattaattgtaattttatgggttattgcaacctctccat

SEQ ID NO: 1263 - DNA, 80 bp, synthetic construct
  misc_feature 1..80: note = Synthetic: >HQ537675.1-cand-3980-4059
  source 1..80: mol_type = other DNA
tacgttgtttttgtatatatgttgtgtttatatatattccattatttgtaattcatacacatgcatctattttaagtcaa

SEQ ID NO: 1264 - DNA, 80 bp, synthetic construct
  misc_feature 1..80: note = Synthetic: >HQ537675.1-cand-4060-4139
  source 1..80: mol_type = other DNA
cagtaacttttttacttgtgtatactgttgtttgtattggtattggtattggtattggtattggtattggtattagtata

SEQ ID NO: 1265 - DNA, 80 bp, synthetic construct
  misc_feature 1..80: note = Synthetic: >KY225961.1-cand-1730-1809
  source 1..80: mol_type = other DNA
aaattaatgagtaacttactatcaattcctgaaacatgtatgattattgagccaccaaaattacgaagtcaagcatgtgc

SEQ ID NO: 1266 - DNA, 80 bp, synthetic construct
  misc_feature 1..80: note = Synthetic: >KY225961.1-cand-1810-1889
  source 1..80: mol_type = other DNA
cttatattggtttagaacagcaatgtcaaatataagtgatgtgcaagggacaacaccagaatggatagagagattaacag

SEQ ID NO: 1267 - DNA, 80 bp, synthetic construct
  misc_feature 1..80: note = Synthetic: >KY225961.1-cand-1890-1969
  source 1..80: mol_type = other DNA
tgttacagcatagctttaatgatgatatatttgatttaagtgaaatgatacaatgggcatatgataatgacattacagat

SEQ ID NO: 1268 - DNA, 80 bp, synthetic construct
  misc_feature 1..80: note = Synthetic: >KY225961.1-cand-1970-2049
  source 1..80: mol_type = other DNA
gatagtgacattgcatataaatatgcacagttagcagatgttaatagtaatgcagcagcatttttaagaagcaatgcaca

SEQ ID NO: 1269 - DNA, 80 bp, synthetic construct
  misc_feature 1..80: note = Synthetic: >KY225961.1-cand-2050-2129
  source 1..80: mol_type = other DNA
agcaaaaatagtaaaagactgtggcgttatgtgcagacattataaaagagcagaaaagcgtggtatgacaatgggacaat

SEQ ID NO: 1270 - DNA, 80 bp, synthetic construct
  misc_feature 1..80: note = Synthetic: >KY225961.1-cand-2130-2209
  source 1..80: mol_type = other DNA
ggatacaaagtaggtgtgaaaaaacaaatgatggaggtaattggagaccaatagtacaatttctaagatatcaaaatatt

SEQ ID NO: 1271 - DNA, 80 bp, synthetic construct
  misc_feature 1..80: note = Synthetic: >KY225961.1-cand-2210-2289
  source 1..80: mol_type = other DNA
gaatttacagcatttttagttgcatttaaacagtttttacaaggtgtaccaaaaaaaagttgtatgttactgtgtggccc

SEQ ID NO: 1272 - DNA, 80 bp, synthetic construct
  misc_feature 1..80: note = Synthetic: >KY225961.1-cand-2280-2359
  source 1..80: mol_type = other DNA
tgtgtggcccagcaaatacagggaaatcatattttggaatgagtttaatacattttttaaaaggatgcattatttcatat

SEQ ID NO: 1273 - DNA, 80 bp, synthetic construct
  misc_feature 1..80: note = Synthetic: >KY225961.1-cand-2360-2439
  source 1..80: mol_type = other DNA
gtaaattccaaaagtcatttttggttgcagccattatcagatgctaaactaggtatgatagatgatgtaacagccataag

SEQ ID NO: 1274 - DNA, 80 bp, synthetic construct
  misc_feature 1..80: note = Synthetic: >KY225961.1-cand-2440-2519
  source 1..80: mol_type = other DNA
ctggacatatatagatgattatatgagaaatgcattagatggtaacgacatttcaatagatgtaaaacacagggcattag

SEQ ID NO: 1275 - DNA, 80 bp, synthetic construct
  misc_feature 1..80: note = Synthetic: >KY225961.1-cand-2520-2599
  source 1..80: mol_type = other DNA
tacaattaaaatgtccaccattaataattacctcaaatacaaatgcaggcaaagattcacgatggccatatttgcacagt

SEQ ID NO: 1276 - DNA, 80 bp, synthetic construct
  misc_feature 1..80: note = Synthetic: >KY225961.1-cand-2600-2679
  source 1..80: mol_type = other DNA
agactaacagtatttgaatttaacaatccatttccatttgatgcaaatggtaatccagtgtatacaataaatgatgaaaa

SEQ ID NO: 1277 - DNA, 80 bp, synthetic construct
  misc_feature 1..80: note = Synthetic: >KY225961.1-cand-2760-2839
  source 1..80: mol_type = other DNA
tcagcacgtttaagtgcagtgcaggacagaatcctagacatatacgaagctgataaaaatgatttaacatcacaaattga

SEQ ID NO: 1278 - DNA, 80 bp, synthetic construct
  misc_feature 1..80: note = Synthetic: >KY225961.1-cand-2840-2919
  source 1..80: mol_type = other DNA
acattggaaactaatacgcatggagtgtgctataatgtatacagccagacaaatgggaatatcacatttgtgccaccagg

SEQ ID NO: 1279 - DNA, 80 bp, synthetic construct
  misc_feature 1..80: note = Synthetic: >KY225961.1-cand-2920-2999
  source 1..80: mol_type = other DNA
tggtgccttcattggtagcatcaaagactaaagcgtttcaagtaattgaactgcaaatggcattagagacattaaatgca

SEQ ID NO: 1280 - DNA, 80 bp, synthetic construct
  misc_feature 1..80: note = Synthetic: >KY225961.1-cand-3000-3079
  source 1..80: mol_type = other DNA
tcaccatataaaacagatgaatggacattgcaacaaacaagcttagaagtgtggttatcagagccacaaaaatgctttaa

SEQ ID NO: 1281 - DNA, 80 bp, synthetic construct
  misc_feature 1..80: note = Synthetic: >KY225961.1-cand-4400-4479
  source 1..80: mol_type = other DNA
ttggaggtttaggcattggtacagggtcaggtacaggtggcaggactggatatgtgccccttggtagtaccccaccgtct

SEQ ID NO: 1282 - DNA, 80 bp, synthetic construct
  misc_feature 1..80: note = Synthetic: >KY225961.1-cand-4440-4519
  source 1..80: mol_type = other DNA
caggactggatatgtgccccttggtagtaccccaccgtctgaggctatacctttacagcccatacgccccccagttaccg

SEQ ID NO: 1283 - DNA, 80 bp, synthetic construct
  misc_feature 1..80: note = Synthetic: >KY225961.1-cand-4520-4599
  source 1..80: mol_type = other DNA
ttgatactgtagggcctttagattcttctattgtatctttaatagaggaatctagttttatagacgccggtgcaccagcc

SEQ ID NO: 1284 - DNA, 80 bp, synthetic construct
  misc_feature 1..80: note = Synthetic: >KY225961.1-cand-4600-4679
  source 1..80: mol_type = other DNA
ccatcaattcccactccatctggctttgatattaccacctctgcagatactacacctgcaatacttaatgtttcctctat

SEQ ID NO: 1285 - DNA, 80 bp, synthetic construct
  misc_feature 1..80: note = Synthetic: >KY225961.1-cand-4670-4749
  source 1..80: mol_type = other DNA
tttcctctattggagaatcatctatacaaactgtttccacacatttaaatccctcctttactgagccatccgtactccgc

SEQ ID NO: 1286 - DNA, 80 bp, synthetic construct
  misc_feature 1..80: note = Synthetic: >KY225961.1-cand-4750-4829
  source 1..80: mol_type = other DNA
cctcctgcacctgcagaggcctctggacatttaatattttcgtctcctactgttagcacacatagttatgaaaacatacc

SEQ ID NO: 1287 - DNA, 80 bp, synthetic construct
  misc_feature 1..80: note = Synthetic: >KY225961.1-cand-4830-4909
  source 1..80: mol_type = other DNA
aatggatacctttgttatttctactgacagtggcaatgtcacgtctagcacacccattccagggtctcgccctgtggcac

SEQ ID NO: 1288 - DNA, 80 bp, synthetic construct
  misc_feature 1..80: note = Synthetic: >KY225961.1-cand-4910-4989
  source 1..80: mol_type = other DNA
gccttggtttatacagtcgcaacacccaacaggttaaggttgttgaccctgcttttttaacatctcctcatagacttgta

SEQ ID NO: 1289 - DNA, 80 bp, synthetic construct
  misc_feature 1..80: note = Synthetic: >KY225961.1-cand-4990-5069
  source 1..80: mol_type = other DNA
acatatgataatccagcatttgaaggctttaaccctgaggacacattgcagtttcaacatagtgacatatcgcctgctcc

SEQ ID NO: 1290 - DNA, 80 bp, synthetic construct
  misc_feature 1..80: note = Synthetic: >KY225961.1-cand-5040-5119
  source 1..80: mol_type = other DNA
gtttcaacatagtgacatatcgcctgctcctgatcctgattttctagatattgttgcattgcacagacctgcattaacct

SEQ ID NO: 1291 - DNA, 80 bp, synthetic construct
  misc_feature 1..80: note = Synthetic: >KY225961.1-cand-5200-5279
  source 1..80: mol_type = other DNA
aaagtacattactaccaagacttaagtcccatacagcctgtccaggaacaggtacaacagcaagaacaatttgaattaca

SEQ ID NO: 1292 - DNA, 80 bp, synthetic construct
  misc_feature 1..80: note = Synthetic: >KY225961.1-cand-5230-5309
  source 1..80: mol_type = other DNA
atacagcctgtccaggaacaggtacaacagcaagaacaatttgaattacaatctttaaatacttctgtttctccctatag

SEQ ID NO: 1293 - DNA, 80 bp, synthetic construct
  misc_feature 1..80: note = Synthetic: >KY225961.1-cand-5320-5399
  source 1..80: mol_type = other DNA
ggactttatgatatttatgctgacgatgctgatactatacatgattttcacagtcctatgcactcacatacctcctttgc

SEQ ID NO: 1294 - DNA, 80 bp, synthetic construct
  misc_feature 1..80: note = Synthetic: >KY225961.1-cand-5410-5489
  source 1..80: mol_type = other DNA
accagtaatgtgtccataccattaaatactggatttgacactcctcttgtgtcattggaacctggtccagacattacatc

SEQ ID NO: 1295 - DNA, 80 bp, synthetic construct
  misc_feature 1..80: note = Synthetic: >KY225961.1-cand-5490-5569
  source 1..80: mol_type = other DNA
ttctgtaacatctatgtctagtccatttattcctatatctccactaactccttttaataccataattgtggatggtgctg

SEQ ID NO: 1296 - DNA, 80 bp, synthetic construct
  misc_feature 1..80: note = Synthetic: >KY225961.1-cand-5570-5649
  source 1..80: mol_type = other DNA
attttatgttgcaccctagttattttattttgcgtcgcagacgtaaacgttttccatatttttttgcagatgtccgtgtg

SEQ ID NO: 1297 - DNA, 80 bp, synthetic construct
  misc_feature 1..80: note = Synthetic: >MH539866.1-cand-1460-1539
  source 1..80: mol_type = other DNA
cactctcttgctgttgaattgtgtgtcccaggtttacatggctgggctacaactgcattattaattactttttgttttgg

SEQ ID NO: 1298 - DNA, 80 bp, synthetic construct
  misc_feature 1..80: note = Synthetic: >MH539866.1-cand-1540-1619
  source 1..80: mol_type = other DNA
ctggttattaataccaacagttaccttaattatattacgggttttgcgactgcttactttctcatgctctcattactcta

SEQ ID NO: 1299 - DNA, 80 bp, synthetic construct
  misc_feature 1..80: note = Synthetic: >MH539866.1-cand-1620-1699
  source 1..80: mol_type = other DNA
cagagtcaaaatttaaggtaattttagaaagagttaaagttgaatatcagaaaacaatgggctcaatggtatgtgacata

SEQ ID NO: 1300 - DNA, 80 bp, synthetic construct
  misc_feature 1..80: note = Synthetic: >MH539866.1-cand-1700-1779
  source 1..80: mol_type = other DNA
tgtcatcatgagtgtgagacagcaaaagagcttgaaacacacaagaaaagctgtcctgaaggtcaatgtccatactgtat

SEQ ID NO: 1301 - DNA, 80 bp, synthetic construct
  misc_feature 1..80: note = Synthetic: >MH539866.1-cand-1780-1859
  source 1..80: mol_type = other DNA
gacaatgactgagtctacagaaagtgcacttcaggcccattttacaatatgtaagctcacaaatagatttcaagaaaact

SEQ ID NO: 1302 - DNA, 80 bp, synthetic construct
  misc_feature 1..80: note = Synthetic: >MH539866.1-cand-1830-1909
  source 1..80: mol_type = other DNA
gtaagctcacaaatagatttcaagaaaacttaaaaaaatcattaaagcgtccagaggtaaaacaaggctgttacaggaca

SEQ ID NO: 1303 - DNA, 80 bp, synthetic construct
  misc_feature 1..80: note = Synthetic: >MH539866.1-cand-1960-2039
  source 1..80: mol_type = other DNA
gatcctcctgacaactgaactgatcatatgggctgctagtgctgatacccctctaatggaatcaggttggtcagacacag

SEQ ID NO: 1304 - DNA, 80 bp, synthetic construct
  misc_feature 1..80: note = Synthetic: >MH539866.1-cand-2010-2089
  source 1..80: mol_type = other DNA
ctctaatggaatcaggttggtcagacacagctcatggtgtaggcataatccccatgaaaactgaccttgagctcgacttt

SEQ ID NO: 1305 - DNA, 80 bp, synthetic construct
  misc_feature 1..80: note = Synthetic: >MH539866.1-cand-2090-2169
  source 1..80: mol_type = other DNA
gcattggcctcatcctcctcatatagttatagaaggaaacttgtgaatcctgcaaatcaagaagaaactttacctttcca

SEQ ID NO: 1306 - DNA, 80 bp, synthetic construct
  misc_feature 1..80: note = Synthetic: >MH539866.1-cand-2180-2259
  source 1..80: mol_type = other DNA
gacaagcaagttgttcatgcagaaatacaaaacttaggacattggatggatggaacttttaacattaaaactgcctttca

SEQ ID NO: 1307 - DNA, 80 bp, synthetic construct
  misc_feature 1..80: note = Synthetic: >MH539866.1-cand-2260-2339
  source 1..80: mol_type = other DNA
ttgttatggagagtgtaaaaaatatgcttacccctggcaaactgcaagatgcttctttgagaaggattatcaatatgaaa

SEQ ID NO: 1308 - DNA, 80 bp, synthetic construct
  misc_feature 1..80: note = Synthetic: >MH539866.1-cand-2400-2479
  source 1..80: mol_type = other DNA
gggtatacttagacaagttaaggtctgttggtaaagcatataagattgtttcactcaagtatacaaggaaagtctgcata

SEQ ID NO: 1309 - DNA, 80 bp, synthetic construct
  misc_feature 1..80: note = Synthetic: >MH539866.1-cand-2430-2509
  source 1..80: mol_type = other DNA
gtaaagcatataagattgtttcactcaagtatacaaggaaagtctgcatacaattaggcacagagcagacttgtaaacac

SEQ ID NO: 1310 - DNA, 80 bp, synthetic construct
  misc_feature 1..80: note = Synthetic: >MH539866.1-cand-2500-2579
  source 1..80: mol_type = other DNA
ttgtaaacacatagatgtaaatgactgtcttgtgactccatctgtaaaggtttgtatgatcggcactgtatcaaagctgc

SEQ ID NO: 1311 - DNA, 80 bp, synthetic construct
  misc_feature 1..80: note = Synthetic: >MH539866.1-cand-2590-2669
  source 1..80: mol_type = other DNA
cacattattgtttttgggcccattggagcaaggcgggattattctcaaacagtggtgtacaacatcttgtgtttttgggg

SEQ ID NO: 1312 - DNA, 80 bp, synthetic construct
  misc_feature 1..80: note = Synthetic: >MH539866.1-cand-2680-2759
  source 1..80: mol_type = other DNA
tatcatgtctactacaactggaatgaaatgccctgagcacacaggatcctttagaaaggtctgtggatttgcaacaactc

SEQ ID NO: 1313 - DNA, 80 bp, synthetic construct
  misc_feature 1..80: note = Synthetic: >NC_000883.2-cand-2840-2919
  source 1..80: mol_type = other DNA
agacttatatagtcatcattttcaaagtcatggacagttatctgaccacccccatgccttatcatccagtagcagtcatg

SEQ ID NO: 1314 - DNA, 80 bp, synthetic construct
  misc_feature 1..80: note = Synthetic: >NC_000883.2-cand-2920-2999
  source 1..80: mol_type = other DNA
cagaacctagaggagaagatgcagtattatctagtgaagacttacacaagcctgggcaagttagcgtacaactacccggt

SEQ ID NO: 1315 - DNA, 80 bp, synthetic construct
  misc_feature 1..80: note = Synthetic: >NC_000883.2-cand-3000-3079
  source 1..80: mol_type = other DNA
actaactatgttgggcctggcaatgagctacaagctgggcccccgcaaagtgctgttgacagtgctgcaaggattcatga

SEQ ID NO: 1316 - DNA, 80 bp, synthetic construct
  misc_feature 1..80: note = Synthetic: >NC_000883.2-cand-3080-3159
  source 1..80: mol_type = other DNA
ctttaggtatagccaactggctaagttgggaataaatccatatactcattggactgtagcagatgaagagcttttaaaaa

SEQ ID NO: 1317 - DNA, 80 bp, synthetic construct
  misc_feature 1..80: note = Synthetic: >NC_000883.2-cand-3160-3239
  source 1..80: mol_type = other DNA
atataaaaaatgaaactgggtttcaagcacaagtagtaaaagactactttactttaaaaggtgcagctgcccctgtggcc

SEQ ID NO: 1318 - DNA, 80 bp, synthetic construct
  misc_feature 1..80: note = Synthetic: >NC_000883.2-cand-3240-3319
  source 1..80: mol_type = other DNA
cattttcaaggaagtttgccggaagttcccgcttacaacgcctcagaaaaatacccaagcatgacttcagttaattctgc

SEQ ID NO: 1319 - DNA, 80 bp, synthetic construct
  misc_feature 1..80: note = Synthetic: >NC_000883.2-cand-3390-3469
  source 1..80: mol_type = other DNA
tttagtgccaactctgtgacttgtacattttctagacagtttttaattccatatgacccagagcaccattataaggtgtt

SEQ ID NO: 1320 - DNA, 80 bp, synthetic construct
  misc_feature 1..80: note = Synthetic: >NC_000883.2-cand-3420-3499
  source 1..80: mol_type = other DNA
tctagacagtttttaattccatatgacccagagcaccattataaggtgttttctcccgcagcaagtagctgccacaatgc

SEQ ID NO: 1321 - DNA, 80 bp, synthetic construct
  misc_feature 1..80: note = Synthetic: >NC_000883.2-cand-3500-3579
  source 1..80: mol_type = other DNA
cagtggaaaggaggcaaaggtttgcaccattagtcccataatgggatactcaaccccatggagatatttagattttaatg

SEQ ID NO: 1322 - DNA, 80 bp, synthetic construct
  misc_feature 1..80: note = Synthetic: >NC_000883.2-cand-3580-3659
  source 1..80: mol_type = other DNA
ctttaaacttatttttttcacctttagagtttcagcacttaattgaaaattatggaagtatagctcctgatgctttaact

SEQ ID NO: 1323 - DNA, 80 bp, synthetic construct
  misc_feature 1..80: note = Synthetic: >NC_000883.2-cand-3630-3709
  source 1..80: mol_type = other DNA
tatggaagtatagctcctgatgctttaactgtaaccatatcagaaattgctgttaaggatgttacagacaaaactggagg

SEQ ID NO: 1324 - DNA, 80 bp, synthetic construct
  misc_feature 1..80: note = Synthetic: >NC_000883.2-cand-3740-3819
  source 1..80: mol_type = other DNA
gcgcctatgcatgttagtagaccatgaatacaagtacccatatgtgttagggcaaggtcaagatactttagccccagaac

SEQ ID NO: 1325 - DNA, 80 bp, synthetic construct
  misc_feature 1..80: note = Synthetic: >NC_000883.2-cand-3820-3899
  source 1..80: mol_type = other DNA
ttcctatttgggtatactttccccctcaatatgcttacttaacagtaggagatgttaacacacaaggaatttctggagac

SEQ ID NO: 1326 - DNA, 80 bp, synthetic construct
  misc_feature 1..80: note = Synthetic: >NC_000883.2-cand-3900-3979
  source 1..80: mol_type = other DNA
agcaaaaaattagcaagtgaagaatcagcattttatgttttggaacacagttcttttcagcttttaggtacaggaggtac

SEQ ID NO: 1327 - DNA, 80 bp, synthetic construct
  misc_feature 1..80: note = Synthetic: >NC_000883.2-cand-3980-4059
  source 1..80: mol_type = other DNA
agcaactatgtcttataagtttcctccagtgcccccagaaaatttagagggctgcagtcaacacttttatgagatgtaca

SEQ ID NO: 1328 - DNA, 80 bp, synthetic construct
  misc_feature 1..80: note = Synthetic: >NC_000883.2-cand-4090-4169
  source 1..80: mol_type = other DNA
ctgacacattaggaggtgacccaaaatttagatctttaacacatgaagaccatgcaattcagccccaaaacttcatgcca

SEQ ID NO: 1329 - DNA, 80 bp, synthetic construct
  misc_feature 1..80: note = Synthetic: >NC_001357.1-cand-2660-2739
  source 1..80: mol_type = other DNA
atatttagaaagtagaataacagtatttgaatttccaaatgcatttccatttgataaaaatggcaatccagtatatgaaa

SEQ ID NO: 1330 - DNA, 80 bp, synthetic construct
  misc_feature 1..80: note = Synthetic: >NC_001357.1-cand-2740-2819
  source 1..80: mol_type = other DNA
taaatgacaaaaattggaaatgtttttttgaaaggacatggtccagattagatttgcacgaggaagaggaagatgcagac

SEQ ID NO: 1331 - DNA, 80 bp, synthetic construct
  misc_feature 1..80: note = Synthetic: >NC_001357.1-cand-2820-2899
  source 1..80: mol_type = other DNA
accgaaggaaaccctttcggaacgtttaagttgcgtgcaggacaaaatcatagaccactatgaaaatgacagtaaagaca

SEQ ID NO: 1332 - DNA, 80 bp, synthetic construct
  misc_feature 1..80: note = Synthetic: >NC_001357.1-cand-2900-2979
  source 1..80: mol_type = other DNA
tagacagccaaatacagtattggcaactaatacgttgggaaaatgcaatattctttgcagcaagggaacatggcatacag

SEQ ID NO: 1333 - DNA, 80 bp, synthetic construct
  misc_feature 1..80: note = Synthetic: >NC_001357.1-cand-2980-3059
  source 1..80: mol_type = other DNA
acattaaaccaccaggtggtgccagcctataacatttcaaaaagtaaagcacataaagctattgaactgcaaatggccct

SEQ ID NO: 1334 - DNA, 80 bp, synthetic construct
  misc_feature 1..80: note = Synthetic: >NC_001357.1-cand-3060-3139
  source 1..80: mol_type = other DNA
acaaggccttgcacaaagtcgatacaaaaccgaggattggacactgcaagacacatgcgaggaactatggaatacagaac

SEQ ID NO: 1335 - DNA, 80 bp, synthetic construct
  misc_feature 1..80: note = Synthetic: >NC_001357.1-cand-3140-3219
  source 1..80: mol_type = other DNA
ctactcactgctttaaaaaaggtggccaaacagtacaagtatattttgatggcaacaaagacaattgtatgacctatgta

SEQ ID NO: 1336 - DNA, 80 bp, synthetic construct
  misc_feature 1..80: note = Synthetic: >NC_001357.1-cand-3210-3289
  source 1..80: mol_type = other DNA
gacctatgtagcatgggacagtgtgtattatatgactgatgcaggaacatgggacaaaaccgctacctgtgtaagtcaca

SEQ ID NO: 1337 - DNA, 80 bp, synthetic construct
  misc_feature 1..80: note = Synthetic: >NC_001357.1-cand-3300-3379
  source 1..80: mol_type = other DNA
ttatgtaaaggaagggtacaacacgttttatatagaatttaaaagtgaatgtgaaaaatatgggaacacaggtacgtggg

SEQ ID NO: 1338 - DNA, 80 bp, synthetic construct
  misc_feature 1..80: note = Synthetic: >NC_001357.1-cand-3460-3539
  source 1..80: mol_type = other DNA
cttgttaaacagctacagcacaccccctcaccgtattccagcaccgtgtccgtgggcaccgcaaagacctacggccagac

SEQ ID NO: 1339 - DNA, 80 bp, synthetic construct
  misc_feature 1..80: note = Synthetic: >NC_001357.1-cand-3540-3619
  source 1..80: mol_type = other DNA
gtcggctgctacacgacctggacactgtggactcgcggagaagcagcattgtggacctgtcaacccacttctcggtgcag

SEQ ID NO: 1340 - DNA, 80 bp, synthetic construct
  misc_feature 1..80: note = Synthetic: >NC_001357.1-cand-3620-3699
  source 1..80: mol_type = other DNA
ctacacctacaggcaacaacaaaagacggaaactctgtagtggtaacactacgcctataatacatttaaaaggtgacaga

SEQ ID NO: 1341 - DNA, 80 bp, synthetic construct
  misc_feature 1..80: note = Synthetic: >NC_001357.1-cand-3700-3779
  source 1..80: mol_type = other DNA
aacagtttaaaatgtttacggtacagattgcgaaaacatagcgaccactatagagatatatcatccacctggcattggac

SEQ ID NO: 1342 - DNA, 80 bp, synthetic construct
  misc_feature 1..80: note = Synthetic: >NC_001357.1-cand-3780-3859
  source 1..80: mol_type = other DNA
aggtgcaggcaatgaaaaaacaggaatactgactgtaacataccatagtgaaacacaaagaacaaaatttttaaatactg

SEQ ID NO: 1343 - DNA, 80 bp, synthetic construct
  misc_feature 1..80: note = Synthetic: >NC_001357.1-cand-3860-3939
  source 1..80: mol_type = other DNA
ttgcaattccagatagtgtacaaatattggtgggatacatgacaatgtaatacatatgctgtagtaccaatatgttatca

SEQ ID NO: 1344 - DNA, 80 bp, synthetic construct
  misc_feature 1..80: note = Synthetic: >NC_001357.1-cand-3940-4019
  source 1..80: mol_type = other DNA
cttatttttttattttgcttttgtgtatgcatgtatgtgtgctgccatgtcccgcttttgccatctgtctgtatgtgtgc

SEQ ID NO: 1345 - DNA, 80 bp, synthetic construct
  misc_feature 1..80: note = Synthetic: >NC_001545.2-cand-1280-1359
  source 1..80: mol_type = other DNA
tttgagcgtggccggctggctggacaccatttgggacgccattaagcggttcctcggtagcgtgcccctcgccgagcgca

SEQ ID NO: 1346 - DNA, 80 bp, synthetic construct
  misc_feature 1..80: note = Synthetic: >NC_001545.2-cand-1360-1439
  source 1..80: mol_type = other DNA
tggaggagtgggaacaggacgccgcggtcgccgccttcgaccgcggccccctcgaggacggcgggcgccacttggacacc

SEQ ID NO: 1347 - DNA, 80 bp, synthetic construct
  misc_feature 1..80: note = Synthetic: >NC_001545.2-cand-1440-1519
  source 1..80: mol_type = other DNA
gtgcaacccccaaaatcgccgccccgccctgagatcgccgcgacctggatcgtccacgcagccagcgaagaccgccattg

SEQ ID NO: 1348 - DNA, 80 bp, synthetic construct
  misc_feature 1..80: note = Synthetic: >NC_001545.2-cand-1520-1599
  source 1..80: mol_type = other DNA
cgcgtgcgctccccgctgcgacgtcccgcgcgaacgtccttccgcgcccgccggccagccggatgacgaggcgctcatcc

SEQ ID NO: 1349 - DNA, 80 bp, synthetic construct
  misc_feature 1..80: note = Synthetic: >NC_001545.2-cand-1600-1679
  source 1..80: mol_type = other DNA
cgccgtggctgttcgccgagcgccgtgccctccgctgccgcgagtgggatttcgaggctctccgcgcgcgcgccgatacg

SEQ ID NO: 1350 - DNA, 80 bp, synthetic construct
  misc_feature 1..80: note = Synthetic: >NC_001545.2-cand-1680-1759
  source 1..80: mol_type = other DNA
gcggccgcgcccgccccgccggctccacgccccgcgcggtaccccaccgtgctctaccgccaccccgcccaccacggccc

SEQ ID NO: 1351 - DNA, 80 bp, synthetic construct
  misc_feature 1..80: note = Synthetic: >NC_001545.2-cand-1750-1829
  source 1..80: mol_type = other DNA
accacggcccgtggctcacccttgacgagccgggcgaggctgacgcggccctggtcttatgcgacccacttggccagccg

SEQ ID NO: 1352 - DNA, 80 bp, synthetic construct
  misc_feature 1..80: note = Synthetic: >NC_001545.2-cand-1840-1919
  source 1..80: mol_type = other DNA
ctgaacgccacttcgccgccggcgcgcatatgtgcgcgcaggcgcgggggctccaggcttttgtccgtgtcgtgcctcca

SEQ ID NO: 1353 - DNA, 80 bp, synthetic construct
  misc_feature 1..80: note = Synthetic: >NC_001545.2-cand-1950-2029
  source 1..80: mol_type = other DNA
agagcgtgggcgaagttcttccgcggctgcgcctgggcgcagcgcttgctcggcgagccagcagttatgcacctcccata

SEQ ID NO: 1354 - DNA, 80 bp, synthetic construct
  misc_feature 1..80: note = Synthetic: >NC_001545.2-cand-2000-2079
  source 1..80: mol_type = other DNA
cggcgagccagcagttatgcacctcccatacaccgatggcgacgtgccacagctgatcgcactggctttgcgcacgctgg

SEQ ID NO: 1355 - DNA, 80 bp, synthetic construct
  misc_feature 1..80: note = Synthetic: >NC_001545.2-cand-2130-2209
  source 1..80: mol_type = other DNA
gcagcgttcgacgcaaacgcggtcaccgccgccgtgcgcgctggcccccgccagtccgcggccgcgtcaccgccacccgg

SEQ ID NO: 1356 - DNA, 80 bp, synthetic construct
  misc_feature 1..80: note = Synthetic: >NC_001545.2-cand-2160-2239
  source 1..80: mol_type = other DNA
gccgtgcgcgctggcccccgccagtccgcggccgcgtcaccgccacccggcgaccccccgccgccgcgccgcgcacggcg

SEQ ID NO: 1357 - DNA, 80 bp, synthetic construct
  misc_feature 1..80: note = Synthetic: >NC_001545.2-cand-2240-2319
  source 1..80: mol_type = other DNA
atcgcaacggcactcggacgctcgcggcactccgccccccgcgcctgcgcgcgacccgccgccgcccgcccccagcccgc

SEQ ID NO: 1358 - DNA, 80 bp, synthetic construct
  misc_feature 1..80: note = Synthetic: >NC_001545.2-cand-2280-2359
  source 1..80: mol_type = other DNA
gcgcctgcgcgcgacccgccgccgcccgcccccagcccgcccgcgccaccccgcgctggtgacccggtccctcccattcc

SEQ ID NO: 1359 - DNA, 80 bp, synthetic construct
  misc_feature 1..80: note = Synthetic: >NC_001545.2-cand-2400-2479
  source 1..80: mol_type = other DNA
gtcgcctgcgagccgagcggcccccccacgtcaaccagggcagacccagacagcgacatcgttgaaagttacgcccgcgc

SEQ ID NO: 1360 - DNA, 80 bp, synthetic construct
  misc_feature 1..80: note = Synthetic: >NC_001545.2-cand-2480-2559
  source 1..80: mol_type = other DNA
cgccggacccgtgcacctccgagtccgcgacatcatggacccaccgcccggctgcaaggtcgtggtcaacgccgccaacg

SEQ ID NO: 1361 - DNA, 80 bp, synthetic construct
  misc_feature 1..80: note = Synthetic: >NC_001545.2-cand-7680-7759
  source 1..80: mol_type = other DNA
gtggagcacgaccgaccgccgcccgcgaccccgacgcctctcaccaccgcggcgaactccacgaccgccgccacccccgc

SEQ ID NO: 1362 - DNA, 80 bp, synthetic construct
  misc_feature 1..80: note = Synthetic: >NC_001545.2-cand-7760-7839
  source 1..80: mol_type = other DNA
cactgcgccggccccctgccacgccggcctcaatgacagctgcggcggcttcttgtctgggtgcgggccgatgcgcctgc

SEQ ID NO: 1363 - DNA, 80 bp, synthetic construct
  misc_feature 1..80: note = Synthetic: >NC_001545.2-cand-7840-7919
  source 1..80: mol_type = other DNA
gccacggcgctgacacccggtgcggtcggttgatctgcgggctgtccaccaccgcccagtacccgcctacccggtttggc

SEQ ID NO: 1364 - DNA, 80 bp, synthetic construct
  misc_feature 1..80: note = Synthetic: >NC_001545.2-cand-7940-8019
  source 1..80: mol_type = other DNA
tcccccctgggaactggtcgtccttaccgcccgccccgaagacggctggacttgccgcggcgtgcccgcccatccaggcg

SEQ ID NO: 1365 - DNA, 80 bp, synthetic construct
  misc_feature 1..80: note = Synthetic: >NC_001545.2-cand-8000-8079
  source 1..80: mol_type = other DNA
cgtgcccgcccatccaggcgcccgctgccccgaactggtgagccccatgggacgcgcgacttgctccccagcctcggccc

SEQ ID NO: 1366 - DNA, 80 bp, synthetic construct
  misc_feature 1..80: note = Synthetic: >NC_001545.2-cand-8080-8159
  source 1..80: mol_type = other DNA
tctggctcgccacagcgaacgcgctgtctcttgatcacgccctcgcggccttcgtcctgctggtcccgtgggtcctgata

SEQ ID NO: 1367 - DNA, 80 bp, synthetic construct
  misc_feature 1..80: note = Synthetic: >NC_001545.2-cand-8150-8229
  source 1..80: mol_type = other DNA
ggtcctgatatttatggtgtgccgccgcgcctgtcgccgccgcggcgccgccgccgccctcaccgcggtcgtcctgcagg

SEQ ID NO: 1368 - DNA, 80 bp, synthetic construct
  misc_feature 1..80: note = Synthetic: >NC_001545.2-cand-8290-8369
  source 1..80: mol_type = other DNA
gcgccactcaagcacctgtccccgtgcgcctcgctggcgtccgttttgagtccaagattgtggacggcggctgctttgcc

SEQ ID NO: 1369 - DNA, 80 bp, synthetic construct
  misc_feature 1..80: note = Synthetic: >NC_001545.2-cand-8320-8399
  source 1..80: mol_type = other DNA
tcgctggcgtccgttttgagtccaagattgtggacggcggctgctttgccccatgggacctcgaggccactggagcctgc

SEQ ID NO: 1370 - DNA, 80 bp, synthetic construct
  misc_feature 1..80: note = Synthetic: >NC_001545.2-cand-8440-8519
  source 1..80: mol_type = other DNA
gggcctgggtacccgcagccccttgcgcgcgcatctggaatggcacacagcgcgcgtgcaccttctgggctgtcaacgcc

SEQ ID NO: 1371 - DNA, 80 bp, synthetic construct
  misc_feature 1..80: note = Synthetic: >NC_001545.2-cand-8480-8559
  source 1..80: mol_type = other DNA
tggcacacagcgcgcgtgcaccttctgggctgtcaacgcctactcctctggcgggtacgcgcagctggcctcttacttca

SEQ ID NO: 1372 - DNA, 80 bp, synthetic construct
  misc_feature 1..80: note = Synthetic: >NC_001545.2-cand-8560-8639
  source 1..80: mol_type = other DNA
accctggcggcagctactacaagcagtaccaccctaccgcgtgcgaggttgaacctgccttcggacacagcgacgcggcc

SEQ ID NO: 1373 - DNA, 80 bp, synthetic construct
  misc_feature 1..80: note = Synthetic: >NC_001545.2-cand-8650-8729
  source 1..80: mol_type = other DNA
tccccaccgacaccgtgatgagcgtgttcgcccttgctagctacgtccagcaccctcacaagaccgtccgggtcaagttc

SEQ ID NO: 1374 - DNA, 80 bp, synthetic construct
  misc_feature 1..80: note = Synthetic: >NC_001545.2-cand-8720-8799
  source 1..80: mol_type = other DNA
ggtcaagttccatacagagaccaggaccgtctggcaactctccgttgccggcgtgtcgtgcaacgtcaccactgaacacc

SEQ ID NO: 1375 - DNA, 80 bp, synthetic construct
  misc_feature 1..80: note = Synthetic: >NC_001545.2-cand-8770-8849
  source 1..80: mol_type = other DNA
gcgtgtcgtgcaacgtcaccactgaacacccgttctgcaacacgccgcacggacaactcgaggtccaggtcccgcccgac

SEQ ID NO: 1376 - DNA, 80 bp, synthetic construct
  misc_feature 1..80: note = Synthetic: >NC_001545.2-cand-8910-8989
  source 1..80: mol_type = other DNA
ctcgggagcccgaattgccacggccccgattgggcctccccggtttgccaacgccattcccctgactgctcgcggcttgt

SEQ ID NO: 1377 - DNA, 80 bp, synthetic construct
  misc_feature 1..80: note = Synthetic: >NC_001611.1-cand-116320-116399
  source 1..80: mol_type = other DNA
gctatgttgattctattaagagtaacggctgcccccattcttaataatcgtcagtatttaaactgttaaatgttggtata

SEQ ID NO: 1378 - DNA, 80 bp, synthetic construct
  misc_feature 1..80: note = Synthetic: >NC_001611.1-cand-116400-116479
  source 1..80: mol_type = other DNA
tcaacatctaccttatttcccgcagtataaggtttgttgcaggtatactgttcaggaatggttacatttatacttcttct

SEQ ID NO: 1379 - DNA, 80 bp, synthetic construct
  misc_feature 1..80: note = Synthetic: >NC_001611.1-cand-116800-116879
  source 1..80: mol_type = other DNA
tatttttgaagattcccaaataatcattcattcctccataatcgttttgcatcatacctccatctttaggcataaacgat

SEQ ID NO: 1380 - DNA, 80 bp, synthetic construct
  misc_feature 1..80: note = Synthetic: >NC_001611.1-cand-117080-117159
  source 1..80: mol_type = other DNA
tcgtagaagttgaaccgggatcattatttaagtttttgatacctaagggattttactcctctccttccgtaaagacgagt

SEQ ID NO: 1381 - DNA, 80 bp, synthetic construct
  misc_feature 1..80: note = Synthetic: >NC_001611.1-cand-117680-117759
  source 1..80: mol_type = other DNA
attttttaactgctacacctagaccatctaacagaatttattgtaacagtattattaatattgccaagttatccgatcta

SEQ ID NO: 1382 - DNA, 80 bp, synthetic construct
  misc_feature 1..80: note = Synthetic: >NC_001611.1-cand-117760-117839
  source 1..80: mol_type = other DNA
aaaaaaactatctatgctgtagatagtttttttgagccatattccacagataatattagacatatgataaaacgactaga

SEQ ID NO: 1383 - DNA, 80 bp, synthetic construct
  misc_feature 1..80: note = Synthetic: >NC_001611.1-cand-117840-117919
  source 1..80: mol_type = other DNA
tggaccatctaataaatatcatatatatactgaaaagttattatctgtagacgagcctagaaatcaacttattcttaata

SEQ ID NO: 1384 - DNA, 80 bp, synthetic construct
  misc_feature 1..80: note = Synthetic: >NC_001611.1-cand-118000-118079
  source 1..80: mol_type = other DNA
tacaaacgattattagatcttttcggaccagaggttgtatttataggagacgctcaaaatagacgtactccagatatggt

SEQ ID NO: 1385 - DNA, 80 bp, synthetic construct
  misc_feature 1..80: note = Synthetic: >NC_001611.1-cand-118080-118159
  source 1..80: mol_type = other DNA
taaatcaatcaaggaactaaatagatttatattcgtatccaccttattttattccggtactggtttagatattcctagtt

SEQ ID NO: 1386 - DNA, 80 bp, synthetic construct
  misc_feature 1..80: note = Synthetic: >NC_001611.1-cand-118320-118399
  source 1..80: mol_type = other DNA
acgaattattagtctgtctgtagataaactaggatttaaacaagaaagttatcggaaacatcaagaatccgatcccactt

SEQ ID NO: 1387 - DNA, 80 bp, synthetic construct
  misc_feature 1..80: note = Synthetic: >NC_001611.1-cand-118400-118479
  source 1..80: mol_type = other DNA
ctgtatgtacagcatcctccagagaagaacgtgtattaaatagaatatttaactcgcaaaatcgttaagaagtttaagcg

SEQ ID NO: 1388 - DNA, 80 bp, synthetic construct
  misc_feature 1..80: note = Synthetic: >NC_001611.1-cand-118480-118559
  source 1..80: mol_type = other DNA
acgatccacatgctgtacaggccagtgtattacccctcatagtattaatataatccaatgatacttttgtgatgtcggaa

SEQ ID NO: 1389 - DNA, 80 bp, synthetic construct
  misc_feature 1..80: note = Synthetic: >NC_001611.1-cand-118560-118639
  source 1..80: mol_type = other DNA
atcttaaccaatttagactgacagacagaacacgtcatgcaatcatcctcatcgataactgtagtcttaggcttcttttt

SEQ ID NO: 1390 - DNA, 80 bp, synthetic construct
  misc_feature 1..80: note = Synthetic: >NC_001611.1-cand-118640-118719
  source 1..80: mol_type = other DNA
gcgactcttcattccggaacgcgcattggtgctatccatttaggtagtaaaaaataagtcagaatatgccctatagcacg

SEQ ID NO: 1391 - DNA, 80 bp, synthetic construct
  misc_feature 1..80: note = Synthetic: >NC_001611.1-cand-118720-118799
  source 1..80: mol_type = other DNA
atcgtgtaaaacctggtatatcgtctctatctttatcacagtatagtgtatcgacatctttattattattgacctcgttt

SEQ ID NO: 1392 - DNA, 80 bp, synthetic construct
  misc_feature 1..80: note = Synthetic: >NC_001611.1-cand-118800-118879
  source 1..80: mol_type = other DNA
atctcggaacatggaatgggaacatttttgttatcaacggccacctttgccttaattccagatgttgtaaaattataact

SEQ ID NO: 1393 - DNA, 80 bp, synthetic construct
  misc_feature 1..80: note = Synthetic: >NC_001611.1-cand-129040-129119
  source 1..80: mol_type = other DNA
ttacgaattacatttcttgtttttcttgagagacatgattcagaactcaactcatcgttccatagtttttctacctcagt

SEQ ID NO: 1394 - DNA, 80 bp, synthetic construct
  misc_feature 1..80: note = Synthetic: >NC_001611.1-cand-129120-129199
  source 1..80: mol_type = other DNA
ggcgaaatctttggagtgcttggtacatttttcaataaggttcgtgacctccatttattataaaaaattttattcaaaac

SEQ ID NO: 1395 - DNA, 80 bp, synthetic construct
  misc_feature 1..80: note = Synthetic: >NC_001611.1-cand-129280-129359
  source 1..80: mol_type = other DNA
tgggtaatagccatgggaacagtaatgattgcatatttatctttcttgctagtattactgcatattgtcccaatgtttcg

SEQ ID NO: 1396 - DNA, 80 bp, synthetic construct
  misc_feature 1..80: note = Synthetic: >NC_001611.1-cand-129440-129519
  source 1..80: mol_type = other DNA
taatatatgattatcaagtcttatacgatccgcgtcttttttgacaggatcaggttcttctacatgaagaagtttcggcc

SEQ ID NO: 1397 - DNA, 80 bp, synthetic construct
  misc_feature 1..80: note = Synthetic: >NC_001611.1-cand-129600-129679
  source 1..80: mol_type = other DNA
tcgtctacatcatcatctttgatatttattttgctatcttgatgatgtcctgtatcagttgcattttcaacactcgactg

SEQ ID NO: 1398 - DNA, 80 bp, synthetic construct
  misc_feature 1..80: note = Synthetic: >NC_001611.1-cand-129680-129759
  source 1..80: mol_type = other DNA
aatattagcacattcattgtctattattaccatatttctaaacccaaaatgtatgtgttgaacatcagtactattgttga

SEQ ID NO: 1399 - DNA, 80 bp, synthetic construct
  misc_feature 1..80: note = Synthetic: >NC_001611.1-cand-129760-129839
  source 1..80: mol_type = other DNA
tgagtcttatagcatgaattcgcttatcgttatcgggtttagtttctgtaaccttaacaattccttttttattaaactct

SEQ ID NO: 1400 - DNA, 80 bp, synthetic construct
  misc_feature 1..80: note = Synthetic: >NC_001611.1-cand-129840-129919
  source 1..80: mol_type = other DNA
acataatcataaccatttctattgtttgttttaatataaacgagtatagcatcattgctaaatttttcaatagtatcgaa

SEQ ID NO: 1401 - DNA, 80 bp, synthetic construct
  misc_feature 1..80: note = Synthetic: >NC_001611.1-cand-130090-130169
  source 1..80: mol_type = other DNA
aaccgacattaccatcatatatttcgtgatatacatgtgatccgtttacgttaaaccataaatacatgggtgaccctata

SEQ ID NO: 1402 - DNA, 80 bp, synthetic construct
  misc_feature 1..80: note = Synthetic: >NC_001611.1-cand-130250-130329
  source 1..80: mol_type = other DNA
attaataagatttttattattgctcgttatttcagaatcgtatatataaggagtaccattgtgattcttaccagatatta

SEQ ID NO: 1403 - DNA, 80 bp, synthetic construct
  misc_feature 1..80: note = Synthetic: >NC_001611.1-cand-130650-130729
  source 1..80: mol_type = other DNA
cttgcaacattaacatcttgaaccattggtacaattccgttccataaatttataatgttcaccatttatataactcattt

SEQ ID NO: 1404 - DNA, 80 bp, synthetic construct
  misc_feature 1..80: note = Synthetic: >NC_001611.1-cand-131050-131129
  source 1..80: mol_type = other DNA
tgctggaattgcaagatcatcatctccagggaaaagagttccgtccatttaaagtacagattttaaaaactgacactcta

SEQ ID NO: 1405 - DNA, 80 bp, synthetic construct
  misc_feature 1..80: note = Synthetic: >NC_001611.1-cand-131130-131209
  source 1..80: mol_type = other DNA
cgttatttatatttggtgcaacacatggattataaatatcgatgttaataacatcagaaaatgtaaagtctatacattgc

SEQ ID NO: 1406 - DNA, 80 bp, synthetic construct
  misc_feature 1..80: note = Synthetic: >NC_001611.1-cand-131370-131449
  source 1..80: mol_type = other DNA
tatctaatgctggtgtaccacctatagattttgaatattcgaatgctgcatgagtagcattaaattccttaatattgcca

SEQ ID NO: 1407 - DNA, 80 bp, synthetic construct
  misc_feature 1..80: note = Synthetic: >NC_001611.1-cand-131450-131529
  source 1..80: mol_type = other DNA
taattctcatatattgagtaaccctggataaaaagtaaacacactgcagccgtcgctaccacaataaaaaaaattgatag

SEQ ID NO: 1408 - DNA, 80 bp, synthetic construct
  misc_feature 1..80: note = Synthetic: >NC_001611.1-cand-131610-131689
  source 1..80: mol_type = other DNA
ctacttttgttatatcgaaccgatgatatgattctaacctagaattacatccgaaaaagttgactatgttcattgtcatt

SEQ ID NO: 1409 - DNA, 80 bp, synthetic construct
  misc_feature 1..80: note = Synthetic: >NC_001699.1-cand-2820-2899
  source 1..80: mol_type = other DNA
agtagaaaatgtatacatgcttatttctaaatccagcctttctttccactgcacaatcctctcatgaatggcagctgcaa

SEQ ID NO: 1410 - DNA, 80 bp, synthetic construct
  misc_feature 1..80: note = Synthetic: >NC_001699.1-cand-2900-2979
  source 1..80: mol_type = other DNA
agtcagcaactggcctaaaccagattaaaagcaaaagcaaagtcataccactttgcaaaatccttttttctagcaaatac

SEQ ID NO: 1411 - DNA, 80 bp, synthetic construct
  misc_feature 1..80: note = Synthetic: >NC_001699.1-cand-2980-3059
  source 1..80: mol_type = other DNA
tcagagcagcttagtgattttctcaggtaggcctttggtctaaaatctatctgccttacaaatctggcctgtaaagttct

SEQ ID NO: 1412 - DNA, 80 bp, synthetic construct
  misc_feature 1..80: note = Synthetic: >NC_001699.1-cand-3060-3139
  source 1..80: mol_type = other DNA
aggcactgaatattcattcatggttacaattccaggtggaaacacctgtgttcttttgttttggtgttttctctctaaat

SEQ ID NO: 1413 - DNA, 80 bp, synthetic construct
  misc_feature 1..80: note = Synthetic: >NC_001699.1-cand-3140-3219
  source 1..80: mol_type = other DNA
taacttttacacttccatctaagtaatctcttaagcaatcaaggttgcttatgccatgccctgaaggtaaatcccttgac

SEQ ID NO: 1414 - DNA, 80 bp, synthetic construct
  misc_feature 1..80: note = Synthetic: >NC_001699.1-cand-3220-3299
  source 1..80: mol_type = other DNA
tctgcaccagtgccttttacatcctcaaatacaaccataaactgatctatacccactcctaattcaaagtttaatctttc

SEQ ID NO: 1415 - DNA, 80 bp, synthetic construct
  misc_feature 1..80: note = Synthetic: >NC_001699.1-cand-3300-3379
  source 1..80: mol_type = other DNA
taatggcatattaacatttaatgactttcccccacagagatcaagtaaagctgcagctaaagtagttttgccactgtcta

SEQ ID NO: 1416 - DNA, 80 bp, synthetic construct
  misc_feature 1..80: note = Synthetic: >NC_001699.1-cand-3380-3459
  source 1..80: mol_type = other DNA
ttggccccttgaatagccagtaccttttttttggaatgtttaatacaatgcattttagaaagtcataaataacagtgtcc

SEQ ID NO: 1417 - DNA, 80 bp, synthetic construct
  misc_feature 1..80: note = Synthetic: >NC_001699.1-cand-3460-3539
  source 1..80: mol_type = other DNA
atttgaggcagcaagcaatgaatccaggccaccccagccatatattgctctaaaacagcattgccatgtgccccaaaaat

SEQ ID NO: 1418 - DNA, 80 bp, synthetic construct
  misc_feature 1..80: note = Synthetic: >NC_001699.1-cand-3540-3619
  source 1..80: mol_type = other DNA
taagtccattttatcaagcaagaaattaaacctttcaactaacatttcttctctggtcatgtggatgctgtcaacccttt

SEQ ID NO: 1419 - DNA, 80 bp, synthetic construct
  misc_feature 1..80: note = Synthetic: >NC_001699.1-cand-3620-3699
  source 1..80: mol_type = other DNA
gtttggctgctacagtatcaacagcctgctggcaaatgcttttttgatttttgctatctgcaaaaatttgggcattataa

SEQ ID NO: 1420 - DNA, 80 bp, synthetic construct
  misc_feature 1..80: note = Synthetic: >NC_001699.1-cand-3700-3779
  source 1..80: mol_type = other DNA
tagtgtttttcatgatggttaaagtgatttggctgatcctttttttcacattttttgcattgctgtgggttttcctgaaa

SEQ ID NO: 1421 - DNA, 80 bp, synthetic construct
  misc_feature 1..80: note = Synthetic: >NC_001699.1-cand-3760-3839
  source 1..80: mol_type = other DNA
tgctgtgggttttcctgaaagtctaagtacatgcccataagcaaaaaaacatcctcacacttggtttccaaggcatactg

SEQ ID NO: 1422 - DNA, 80 bp, synthetic construct
  misc_feature 1..80: note = Synthetic: >NC_001699.1-cand-3840-3919
  source 1..80: mol_type = other DNA
tgtaactaatttccatgaaacctgcttagtttcttctggttcttctgggttaaagtcatgctccttaaggcccccctgaa

SEQ ID NO: 1423 - DNA, 80 bp, synthetic construct
  misc_feature 1..80: note = Synthetic: >NC_001699.1-cand-3920-3999
  source 1..80: mol_type = other DNA
tactttcttccactactgcatatggctgtctacacagggcactataaaacaagtattccttattcacacctttacaaatt

SEQ ID NO: 1424 - DNA, 80 bp, synthetic construct
  misc_feature 1..80: note = Synthetic: >NC_001699.1-cand-4000-4079
  source 1..80: mol_type = other DNA
aaaaaactaaaggtacatagtttttgacagtagttattaattgctgacactctatgtctatgtggtgttaagaaaaacaa

SEQ ID NO: 1425 - DNA, 80 bp, synthetic construct
  misc_feature 1..80: note = Synthetic: >NC_001906.3-cand-10710-10789
  source 1..80: mol_type = other DNA
ttcagagagttgattgaccaaaagagcaataaatattatattataattatatcagtcaaattgtaaacatccttcttata

SEQ ID NO: 1426 - DNA, 80 bp, synthetic construct
  misc_feature 1..80: note = Synthetic: >NC_001906.3-cand-10790-10869
  source 1..80: mol_type = other DNA
atatactcaaaaaattaaaaattcccccaagaaaatactaaatgtaatcaaactcaataaaccctgaaatattgatagtt

SEQ ID NO: 1427 - DNA, 80 bp, synthetic construct
  misc_feature 1..80: note = Synthetic: >NC_001906.3-cand-10870-10949
  source 1..80: mol_type = other DNA
tacagagatcatatgactctttgtataattctttatagaactcctaaatatcaaagagcgataaacttgctaccctgtac

SEQ ID NO: 1428 - DNA, 80 bp, synthetic construct
  misc_feature 1..80: note = Synthetic: >NC_001906.3-cand-10950-11029
  source 1..80: mol_type = other DNA
acttaaagcagatactgtgattaactctgtaagtttatcagataatcctattagtgacatactgagggttattcttgtat

SEQ ID NO: 1429 - DNA, 80 bp, synthetic construct
  misc_feature 1..80: note = Synthetic: >NC_001906.3-cand-11030-11109
  source 1..80: mol_type = other DNA
aattcttctgaagatgtgattacagataatctttcaatctagtcaagtaagcctgatttcctaattataatctccctctt

SEQ ID NO: 1430 - DNA, 80 bp, synthetic construct
  misc_feature 1..80: note = Synthetic: >NC_001906.3-cand-11110-11189
  source 1..80: mol_type = other DNA
aggagaaggagaacgtatcaatgttcactatatactaagtcttttattttaaatttttcttattgtcttcagatgagcct

SEQ ID NO: 1431 - DNA, 80 bp, synthetic construct
  misc_feature 1..80: note = Synthetic: >NC_001906.3-cand-11190-11269
  source 1..80: mol_type = other DNA
tattacttcatctcatcagattataaattttctaataaattaagaaaaacttaggacccaagtcctttaaacgtgcatga

SEQ ID NO: 1432 - DNA, 80 bp, synthetic construct
  misc_feature 1..80: note = Synthetic: >NC_001906.3-cand-11270-11349
  source 1..80: mol_type = other DNA
ttgagatagtcagaaattggagctaatttgaatactagtgagtaaattaggagtagtagtattgaaccacctcatatctt

SEQ ID NO: 1433 - DNA, 80 bp, synthetic construct
  misc_feature 1..80: note = Synthetic: >NC_001906.3-cand-11350-11429
  source 1..80: mol_type = other DNA
atttcttctgaactgcattaaaatttgtacccaggatataacaacatggctcatgaattatctatctctgatatcatcta

SEQ ID NO: 1434 - DNA, 80 bp, synthetic construct
  misc_feature 1..80: note = Synthetic: >NC_001906.3-cand-11430-11509
  source 1..80: mol_type = other DNA
tcctgaatgtcaccttgacagtcctatagtatcagggaaattgatttcagctatagaatatgcgcagttgagacataacc

SEQ ID NO: 1435 - DNA, 80 bp, synthetic construct
  misc_feature 1..80: note = Synthetic: >NC_001906.3-cand-11520-11599
  source 1..80: mol_type = other DNA
ggacaagagattaactgaaaatatcaaaattaacttacagggcaaaagaagaagtgtgtatatatccagacaatctagac

SEQ ID NO: 1436 - DNA, 80 bp, synthetic construct
  misc_feature 1..80: note = Synthetic: >NC_001906.3-cand-11590-11669
  source 1..80: mol_type = other DNA
caatctagacttggaaattacattagagacaatataaagaatttgaaggaatttctacatgtatcatatcccgagtgcaa

SEQ ID NO: 1437 - DNA, 80 bp, synthetic construct
  misc_feature 1..80: note = Synthetic: >NC_001906.3-cand-11670-11749
  source 1..80: mol_type = other DNA
taaatctttattctctctcaagtctcctggaatgacaagtaagttgagtaatatcatgaagaaatcatttaaagcataca

SEQ ID NO: 1438 - DNA, 80 bp, synthetic construct
  misc_feature 1..80: note = Synthetic: >NC_001906.3-cand-11750-11829
  source 1..80: mol_type = other DNA
atatcgtgagcagaaaaatcatagagatgttacaaaacatcaccaggaatctcataactcaggaccaaaaggatgaagtt

SEQ ID NO: 1439 - DNA, 80 bp, synthetic construct
  misc_feature 1..80: note = Synthetic: >NC_001906.3-cand-11830-11909
  source 1..80: mol_type = other DNA
ttaggtatttatgagcaggacagactcagtaacatagggaaatacatgagtcaatcgcaatggtatgagtgttttctctt

SEQ ID NO: 1440 - DNA, 80 bp, synthetic construct
  misc_feature 1..80: note = Synthetic: >NC_001906.3-cand-11910-11989
  source 1..80: mol_type = other DNA
ctggttcacaatcaagacagagatgagagctgttatcaagaactcacagaaacctaagtttagatctgactcttgtatta

SEQ ID NO: 1441 - DNA, 80 bp, synthetic construct
  misc_feature 1..80: note = Synthetic: >NC_001906.3-cand-15810-15889
  source 1..80: mol_type = other DNA
aaagcaagagtctaaggcgagagaattagactttcctctttggtccaccgaagaactccatgatgtgttagctaagactg

SEQ ID NO: 1442 - DNA, 80 bp, synthetic construct
  misc_feature 1..80: note = Synthetic: >NC_001906.3-cand-15890-15969
  source 1..80: mol_type = other DNA
tggctcaaacagttctcgagatcataactaaagccgataaagatgtcctcaagcaacacttagctatagactcagatgac

SEQ ID NO: 1443 - DNA, 80 bp, synthetic construct
  misc_feature 1..80: note = Synthetic: >NC_001906.3-cand-15980-16059
  source 1..80: mol_type = other DNA
gtcttataacagagtttttaatggtggatcctgagctttttgccctttatttaggtcaatcaatttcagtcaagtgggca

SEQ ID NO: 1444 - DNA, 80 bp, synthetic construct
  misc_feature 1..80: note = Synthetic: >NC_001906.3-cand-16060-16139
  source 1..80: mol_type = other DNA
tttgaaatccatcatagacgcccacatggacgacatacaatggtagatttgttgtctgatctcatatccaatacatcgaa

SEQ ID NO: 1445 - DNA, 80 bp, synthetic construct
  misc_feature 1..80: note = Synthetic: >NC_001906.3-cand-16140-16219
  source 1..80: mol_type = other DNA
acatacatacaaagtcttgtctaatgcactgtcacatcccagagtgttcaagaggtttgtgaattgcggcttgcttcttc

SEQ ID NO: 1446 - DNA, 80 bp, synthetic construct
  misc_feature 1..80: note = Synthetic: >NC_001906.3-cand-16220-16299
  source 1..80: mol_type = other DNA
ccactcagggtccttatcttcaccaacaagattttgagaaattatctcagaacctcttaatcacatcttatatgaattat

SEQ ID NO: 1447 - DNA, 80 bp, synthetic construct
  misc_feature 1..80: note = Synthetic: >NC_001906.3-cand-16300-16379
  source 1..80: mol_type = other DNA
cttatgaattggtgtgacttcaaaaaattcccttttttgatagctgaacaagatgaagcagtcgtagaattaagggaaga

SEQ ID NO: 1448 - DNA, 80 bp, synthetic construct
  misc_feature 1..80: note = Synthetic: >NC_001906.3-cand-16380-16459
  source 1..80: mol_type = other DNA
tataataacatcaaaacacctgtgtatgataattgatctgtacgcaaatcaccataagccaccttggataattgatctca

SEQ ID NO: 1449 - DNA, 80 bp, synthetic construct
  misc_feature 1..80: note = Synthetic: >NC_001906.3-cand-16460-16539
  source 1..80: mol_type = other DNA
acccacaagagaagatatgtgttcttagggactttatatctaagtgccgtcatactgatgtgtcatctaggtcttggaat

SEQ ID NO: 1450 - DNA, 80 bp, synthetic construct
  misc_feature 1..80: note = Synthetic: >NC_001906.3-cand-16540-16619
  source 1..80: mol_type = other DNA
atcactgatctggattttatggttttttatgcttcgttgacttatctaagaagaggaataatcaagcagctcagaattag

SEQ ID NO: 1451 - DNA, 80 bp, synthetic construct
  misc_feature 1..80: note = Synthetic: >NC_001906.3-cand-16620-16699
  source 1..80: mol_type = other DNA
gcaagtgacagaagtaatcgacaccactacaatgctaagagataatattttagtagaaaacccgcctattaaaactggag

SEQ ID NO: 1452 - DNA, 80 bp, synthetic construct
  misc_feature 1..80: note = Synthetic: >NC_001906.3-cand-16700-16779
  source 1..80: mol_type = other DNA
tactagatattagaggttgcataatatataatctagaagaaatcttatcaatgaatactaagtccacgtcaagaaaggtg

SEQ ID NO: 1453 - DNA, 80 bp, synthetic construct
  misc_feature 1..80: note = Synthetic: >NC_001906.3-cand-16780-16859
  source 1..80: mol_type = other DNA
ttcaatttgggttcaaagttgtcagttgaaaaccacaaatatagaaggataggattaaattcgtcttcttgctacaaggc

SEQ ID NO: 1454 - DNA, 80 bp, synthetic construct
  misc_feature 1..80: note = Synthetic: >NC_001906.3-cand-16860-16939
  source 1..80: mol_type = other DNA
attaaatctgtcaccgttgattcaacgctacctgcccgcaggttcacaacgattatttgtaggtgaagggtcaggaagta

SEQ ID NO: 1455 - DNA, 80 bp, synthetic construct
  misc_feature 1..80: note = Synthetic: >NC_001906.3-cand-16940-17019
  source 1..80: mol_type = other DNA
tgatgctattatatcaacagactttaggatgttcgatatccttttacaactccggtattgatggtgattatataccaggg

SEQ ID NO: 1456 - DNA, 80 bp, synthetic construct
  misc_feature 1..80: note = Synthetic: >NC_001906.3-cand-17020-17099
  source 1..80: mol_type = other DNA
cagagagaattgagattattcccttccgaatattcaatagctgaagacgatccgtcacaatctgataagctaaaaggtct

SEQ ID NO: 1457 - DNA, 80 bp, synthetic construct
  misc_feature 1..80: note = Synthetic: >NC_002031.1-cand-9650-9729
  source 1..80: mol_type = other DNA
catcgatgacaggttcggcctggccctgtcccatctcaacgccatgtccaaggttagaaaggacatatctgaatggcagc

SEQ ID NO: 1458 - DNA, 80 bp, synthetic construct
  misc_feature 1..80: note = Synthetic: >NC_002031.1-cand-9730-9809
  source 1..80: mol_type = other DNA
catcaaaagggtggaatgattgggagaatgtgcccttctgttcccaccacttccatgaactacagctgaaggatggcagg

SEQ ID NO: 1459 - DNA, 80 bp, synthetic construct
  misc_feature 1..80: note = Synthetic: >NC_002031.1-cand-9810-9889
  source 1..80: mol_type = other DNA
aggattgtggtgccttgccgagaacaggacgagctcattgggagaggaagggtgtctccaggaaacggctggatgatcaa

SEQ ID NO: 1460 - DNA, 80 bp, synthetic construct
  misc_feature 1..80: note = Synthetic: >NC_002031.1-cand-9890-9969
  source 1..80: mol_type = other DNA
ggaaacagcttgcctcagcaaagcctatgccaacatgtggtcactgatgtattttcacaaaagggacatgaggctactgt

SEQ ID NO: 1461 - DNA, 80 bp, synthetic construct
  misc_feature 1..80: note = Synthetic: >NC_002031.1-cand-9960-10039
  source 1..80: mol_type = other DNA
aggctactgtcattggctgtttcctcagctgttcccacctcatgggttccacaaggacgcacaacatggtcgattcatgg

SEQ ID NO: 1462 - DNA, 80 bp, synthetic construct
  misc_feature 1..80: note = Synthetic: >NC_002031.1-cand-10050-10129
  source 1..80: mol_type = other DNA
tggatgaccacggaagacatgcttgaggtgtggaacagagtatggataaccaacaacccacacatgcaggacaagacaat

SEQ ID NO: 1463 - DNA, 80 bp, synthetic construct
  misc_feature 1..80: note = Synthetic: >NC_002031.1-cand-10130-10209
  source 1..80: mol_type = other DNA
ggtgaaaaaatggagagatgtcccttatctaaccaagagacaagacaagctgtgcggatcactgattggaatgaccaata

SEQ ID NO: 1464 - DNA, 80 bp, synthetic construct
  misc_feature 1..80: note = Synthetic: >NC_002031.1-cand-10210-10289
  source 1..80: mol_type = other DNA
gggccacctgggcctcccacatccatttagtcatccatcgtatccgaacgctgattggacaggagaaatacactgactac

SEQ ID NO: 1465 - DNA, 80 bp, synthetic construct
  misc_feature 1..80: note = Synthetic: >NC_002031.1-cand-10290-10369
  source 1..80: mol_type = other DNA
ctaacagtcatggacaggtattctgtggatgctgacctgcaactgggtgagcttatctgaaacaccatctaacaggaata

SEQ ID NO: 1466 - DNA, 80 bp, synthetic construct
  misc_feature 1..80: note = Synthetic: >NC_002031.1-cand-10370-10449
  source 1..80: mol_type = other DNA
accgggatacaaaccacgggtggagaaccggactccccacaacctgaaaccgggatataaaccacggctggagaaccggg

SEQ ID NO: 1467 - DNA, 80 bp, synthetic construct
  misc_feature 1..80: note = Synthetic: >NC_002031.1-cand-10450-10529
  source 1..80: mol_type = other DNA
ctccgcacttaaaatgaaacagaaaccgggataaaaactacggatggagaaccggactccacacattgagacagaagaag

SEQ ID NO: 1468 - DNA, 80 bp, synthetic construct
  misc_feature 1..80: note = Synthetic: >NC_002031.1-cand-10530-10609
  source 1..80: mol_type = other DNA
ttgtcagcccagaaccccacacgagttttgccactgctaagctgtgaggcagtgcaggctgggacagccgacctccaggt

SEQ ID NO: 1469 - DNA, 80 bp, synthetic construct
  misc_feature 1..80: note = Synthetic: >NC_002031.1-cand-10610-10689
  source 1..80: mol_type = other DNA
tgcgaaaaacctggtttctgggacctcccaccccagagtaaaaagaacggagcctccgctaccaccctcccacgtggtgg

SEQ ID NO: 1470 - DNA, 80 bp, synthetic construct
  misc_feature 1..80: note = Synthetic: >NC_002031.1-cand-10700-10779
  source 1..80: mol_type = other DNA
gggtctagaggttagaggagaccctccagggaacaaatagtgggaccatattgacgccagggaaagaccggagtggttct

SEQ ID NO: 1471 - DNA, 80 bp, synthetic construct
  misc_feature 1..80: note = Synthetic: >NC_002031.1-cand-10770-10849
  source 1..80: mol_type = other DNA
gagtggttctctgcttttcctccagaggtctgtgagcacagtttgctcaagaataagcagacctttggatgacaaacaca

SEQ ID NO: 1472 - DNA, 80 bp, synthetic construct
  misc_feature 1..80: note = Synthetic: >NC_002058.3-cand-10-89
  source 1..80: mol_type = other DNA
gggttgtacccaccccagaggcccacgtggcggctagtactccggtattgcggtacccttgtacgcctgttttatactcc

SEQ ID NO: 1473 - DNA, 80 bp, synthetic construct
  misc_feature 1..80: note = Synthetic: >NC_002058.3-cand-1690-1769
  source 1..80: mol_type = other DNA
tcaccttgaccatagcccctatgtgctgtgagttcaatggattaagaaacatcaccctgccacgcttacagggcctgccg

SEQ ID NO: 1474 - DNA, 80 bp, synthetic construct
  misc_feature 1..80: note = Synthetic: >NC_002058.3-cand-1770-1849
  source 1..80: mol_type = other DNA
gtcatgaacacccctggtagcaatcaatatcttactgcagacaacttccagtcaccgtgtgcgctgcctgaatttgatgt

SEQ ID NO: 1475 - DNA, 80 bp, synthetic construct
  misc_feature 1..80: note = Synthetic: >NC_002058.3-cand-1850-1929
  source 1..80: mol_type = other DNA
gaccccacctattgacatacccggtgaagtaaagaacatgatggaattggcagaaatcgacaccatgattccctttgact

SEQ ID NO: 1476 - DNA, 80 bp, synthetic construct
  misc_feature 1..80: note = Synthetic: >NC_002058.3-cand-1930-2009
  source 1..80: mol_type = other DNA
taagtgccacaaaaaagaacaccatggaaatgtatagggttcggttaagtgacaaaccacatacagacgatcccatactc

SEQ ID NO: 1477 - DNA, 80 bp, synthetic construct
  misc_feature 1..80: note = Synthetic: >NC_002058.3-cand-2010-2089
  source 1..80: mol_type = other DNA
tgcctgtcactctctccagcttcagatcctaggttgtcacatactatgcttggagaaatcctaaattactacacacactg

SEQ ID NO: 1478 - DNA, 80 bp, synthetic construct
  misc_feature 1..80: note = Synthetic: >NC_002058.3-cand-2090-2169
  source 1..80: mol_type = other DNA
ggcaggatccctgaagttcacgtttctgttctgtggattcatgatggcaactggcaaactgttggtgtcatacgcgcctc

SEQ ID NO: 1479 - DNA, 80 bp, synthetic construct
  misc_feature 1..80: note = Synthetic: >NC_002058.3-cand-2170-2249
  source 1..80: mol_type = other DNA
ctggagccgacccaccaaagaagcgtaaggaggcgatgttgggaacacatgtgatctgggacataggactgcagtcctca

SEQ ID NO: 1480 - DNA, 80 bp, synthetic construct
  misc_feature 1..80: note = Synthetic: >NC_002058.3-cand-2250-2329
  source 1..80: mol_type = other DNA
tgtactatggtagtgccatggattagcaacaccacgtatcggcaaaccatagatgatagtttcaccgaaggcggatacat

SEQ ID NO: 1481 - DNA, 80 bp, synthetic construct
  misc_feature 1..80: note = Synthetic: >NC_002058.3-cand-2330-2409
  source 1..80: mol_type = other DNA
cagcgtcttctaccaaactagaatagtcgtccctctttcgacacccagagagatggacatccttggttttgtgtcagcgt

SEQ ID NO: 1482 - DNA, 80 bp, synthetic construct
  misc_feature 1..80: note = Synthetic: >NC_002058.3-cand-2390-2469
  source 1..80: mol_type = other DNA
ccttggttttgtgtcagcgtgtaatgacttcagcgtgcgcttgttgcgagataccacacatatagagcaaaaagcgctag

SEQ ID NO: 1483 - DNA, 80 bp, synthetic construct
  misc_feature 1..80: note = Synthetic: >NC_002058.3-cand-2530-2609
  source 1..80: mol_type = other DNA
gggcggcaacatctagagacgctctcccaaacactgaagccagtggaccaacacactccaaggaaattccggcactcacc

SEQ ID NO: 1484 - DNA, 80 bp, synthetic construct
  misc_feature 1..80: note = Synthetic: >NC_002058.3-cand-2540-2619
  source 1..80: mol_type = other DNA
atctagagacgctctcccaaacactgaagccagtggaccaacacactccaaggaaattccggcactcaccgcagtggaaa

SEQ ID NO: 1485 - DNA, 80 bp, synthetic construct
  misc_feature 1..80: note = Synthetic: >NC_002058.3-cand-2640-2719
  source 1..80: mol_type = other DNA
gtcccttctgatacagtgcaaaccagacatgttgtacaacataggtcaaggtcagagtctagcatagagtctttcttcgc

SEQ ID NO: 1486 - DNA, 80 bp, synthetic construct
  misc_feature 1..80: note = Synthetic: >NC_002058.3-cand-2730-2809
  source 1..80: mol_type = other DNA
tgcgtgaccattatgaccgtggataacccagcttccaccacgaataaggataagctatttgcagtgtggaagatcactta

SEQ ID NO: 1487 - DNA, 80 bp, synthetic construct
  misc_feature 1..80: note = Synthetic: >NC_002058.3-cand-2810-2889
  source 1..80: mol_type = other DNA
taaagatactgtccagttacggaggaaattggagttcttcacctattctagatttgatatggaacttacctttgtggtta

SEQ ID NO: 1488 - DNA, 80 bp, synthetic construct
  misc_feature 1..80: note = Synthetic: >NC_002058.3-cand-2890-2969
  source 1..80: mol_type = other DNA
ctgcaaatttcactgagactaacaatgggcatgccttaaatcaagtgtaccaaattatgtacgtaccaccaggcgctcca

SEQ ID NO: 1489 - DNA, 80 bp, synthetic construct
  misc_feature 1..80: note = Synthetic: >NC_003310.1-cand-16420-16499
  source 1..80: mol_type = other DNA
atacccatactgaattgatgaacgaataccgacggtgtgtgttaatagtaatttacttttcatctttacatacttggtaa

SEQ ID NO: 1490 - DNA, 80 bp, synthetic construct
  misc_feature 1..80: note = Synthetic: >NC_003310.1-cand-16660-16739
  source 1..80: mol_type = other DNA
ctatcatcatctattggataacgtctctgtattctacgatagagtgctattttaagatgtgacagatccgtgtcatcaaa

SEQ ID NO: 1491 - DNA, 80 bp, synthetic construct
  misc_feature 1..80: note = Synthetic: >NC_003310.1-cand-16810-16889
  source 1..80: mol_type = other DNA
tccacgacaatagacagcaatcccatggttccataaacagtgagtttatctttctttgaagtgatattttgtagagatct

SEQ ID NO: 1492 - DNA, 80 bp, synthetic construct
  misc_feature 1..80: note = Synthetic: >NC_003310.1-cand-16890-16969
  source 1..80: mol_type = other DNA
tataaaactgtcgaatgacatcgtatttatatctttagctaaatcatatatgttaccatcataatatctaacagcatcta

SEQ ID NO: 1493 - DNA, 80 bp, synthetic construct
  misc_feature 1..80: note = Synthetic: >NC_003310.1-cand-16970-17049
  source 1..80: mol_type = other DNA
tcttaaacgtttccatcgctgtaaagacgtttccgatagatggtctcgtttcatcagtcatactgagccaacaaatgtaa

SEQ ID NO: 1494 - DNA, 80 bp, synthetic construct
  misc_feature 1..80: note = Synthetic: >NC_003310.1-cand-17210-17289
  source 1..80: mol_type = other DNA
acgagtacactctataaaaacgagaatgacataactaatcataactagttatcaaagaatgtctaggacgcgtaattttt

SEQ ID NO: 1495 - DNA, 80 bp, synthetic construct
  misc_feature 1..80: note = Synthetic: >NC_003310.1-cand-17370-17449
  source 1..80: mol_type = other DNA
aatttaaatcgaataacgaacataactttagtaaagtcgtctatattaactcttttattttctagccatcgtaataccat

SEQ ID NO: 1496 - DNA, 80 bp, synthetic construct
  misc_feature 1..80: note = Synthetic: >NC_003310.1-cand-17450-17529
  source 1..80: mol_type = other DNA
gtttaagatagtatattctctagttactacgatctcatcgttgtctagaatatcgcatactgaatctacatccaatttta

SEQ ID NO: 1497 - DNA, 80 bp, synthetic construct
  misc_feature 1..80: note = Synthetic: >NC_003310.1-cand-17610-17689
  source 1..80: mol_type = other DNA
ttataaaacgaatatatagtactccaattatctttaccgatatatttgcatacataatccattctctcaatcactacatc

SEQ ID NO: 1498 - DNA, 80 bp, synthetic construct
  misc_feature 1..80: note = Synthetic: >NC_003310.1-cand-17690-17769
  source 1..80: mol_type = other DNA
tttaagagtttggttgttaagatatttggctaaactatataattctattagatcatcaacagaatcagtatatatttttc

SEQ ID NO: 1499 - DNA, 80 bp, synthetic construct
  misc_feature 1..80: note = Synthetic: >NC_003310.1-cand-17770-17849
  source 1..80: mol_type = other DNA
tagatccaaagatgaactctttggcatcctctataatattatcagaaaagatattttcgtgttttagtttatcaagatct

SEQ ID NO: 1500 - DNA, 80 bp, synthetic construct
  misc_feature 1..80: note = Synthetic: >NC_003310.1-cand-17850-17929
  source 1..80: mol_type = other DNA
aacctgttcatatccatgattaacgacgtcatataaccacataaaataaaaatccattttcatttttagcacaatactat

SEQ ID NO: 1501 - DNA, 80 bp, synthetic construct
  misc_feature 1..80: note = Synthetic: >NC_003310.1-cand-17930-18009
  source 1..80: mol_type = other DNA
tcataattgatattgatgtaatattttgttactttgaacgtaaagacagtacacgggtccgtatctccaacaagcacgta

SEQ ID NO: 1502 - DNA, 80 bp, synthetic construct
  misc_feature 1..80: note = Synthetic: >NC_003310.1-cand-18090-18169
  source 1..80: mol_type = other DNA
tccatgtattattactttccaacttatcattatcccaggctatgtttcgcccatcatcgttgtacagagtgaataattct

SEQ ID NO: 1503 - DNA, 80 bp, synthetic construct
  misc_feature 1..80: note = Synthetic: >NC_003310.1-cand-18170-18249
  source 1..80: mol_type = other DNA
tttgtattcggtagttcaaatatatgatccatgcatatatcgacaaagctattgtagatgtgatttttcctaaatctaat

SEQ ID NO: 1504 - DNA, 80 bp, synthetic construct
  misc_feature 1..80: note = Synthetic: >NC_003310.1-cand-18250-18329
  source 1..80: mol_type = other DNA
ataaaactcgtttactagcaaacattttcctgatttatcgaccaagacacacatggtttctaaatctatcaagtggtggg

SEQ ID NO: 1505 - DNA, 80 bp, synthetic construct
  misc_feature 1..80: note = Synthetic: >NC_003310.1-cand-109180-109259
  source 1..80: mol_type = other DNA
gcatgaacttcggttactgtcgccgttggttggtttatttgacctattactctcctaggtttctctataaatgatggttt

SEQ ID NO: 1506 - DNA, 80 bp, synthetic construct
  misc_feature 1..80: note = Synthetic: >NC_003310.1-cand-109270-109349
  source 1..80: mol_type = other DNA
ttcttaaccatatatccaataaagctcaattcaggaacataaacaaattctttgttgaacgtttcaaagtcgaacgaaga

SEQ ID NO: 1507 - DNA, 80 bp, synthetic construct
  misc_feature 1..80: note = Synthetic: >NC_003310.1-cand-109350-109429
  source 1..80: mol_type = other DNA
gtcacgaataacgatatcggatactggattgaaggtcaccgttaccgtaatttttgaatcggatagtttaagactactga

SEQ ID NO: 1508 - DNA, 80 bp, synthetic construct
  misc_feature 1..80: note = Synthetic: >NC_003310.1-cand-109430-109509
  source 1..80: mol_type = other DNA
atgtatcttccacatcaaacggagttttaatataaacgtatactgtagatggttctttaatagtgtcattaggagttaga

SEQ ID NO: 1509 - DNA, 80 bp, synthetic construct
  misc_feature 1..80: note = Synthetic: >NC_003310.1-cand-109510-109589
  source 1..80: mol_type = other DNA
ccaatagaaatatcattaagttcactagaatatccagaatgtttcaaagcaattgtattattgatacaattattatataa

SEQ ID NO: 1510 - DNA, 80 bp, synthetic construct
  misc_feature 1..80: note = Synthetic: >NC_003310.1-cand-109590-109669
  source 1..80: mol_type = other DNA
ttcttcgccatcaatttcccaaataacaccgttacacgaagagacagatacatgattaatacatttatatccaacatatg

SEQ ID NO: 1511 - DNA, 80 bp, synthetic construct
  misc_feature 1..80: note = Synthetic: >NC_003310.1-cand-109670-109749
  source 1..80: mol_type = other DNA
gtacgtaaccgaatcttcccatacctttaacttctggaagttccaaactcagaaccaaatgattaagcgcagtaatatac

SEQ ID NO: 1512 - DNA, 80 bp, synthetic construct
  misc_feature 1..80: note = Synthetic: >NC_003310.1-cand-109750-109829
  source 1..80: mol_type = other DNA
tgatccctaatttcgaagctagcgatagcctgattgtcgggcccatcgtttgtcataactccggatagagaaatatattg

SEQ ID NO: 1513 - DNA, 80 bp, synthetic construct
  misc_feature 1..80: note = Synthetic: >NC_003310.1-cand-109830-109909
  source 1..80: mol_type = other DNA
cggcatatataaagttggaatttgactatcaactgcgaagacattagaccgtttaataaagtcatccccaccgatcaaag

SEQ ID NO: 1514 - DNA, 80 bp, synthetic construct
  misc_feature 1..80: note = Synthetic: >NC_003310.1-cand-109910-109989
  source 1..80: mol_type = other DNA
aattaatgatagtattattcattttctatttaaaatggaaaaaagcttacaataaactccgtagagaaatatctataatt

SEQ ID NO: 1515 - DNA, 80 bp, synthetic construct
  misc_feature 1..80: note = Synthetic: >NC_003310.1-cand-109990-110069
  source 1..80: mol_type = other DNA
tgtgagttttccttaaagtaacagcttccgtaaacaccgtctttatctcttaataagtttattgtatttatgaccttttc

SEQ ID NO: 1516 - DNA, 80 bp, synthetic construct
  misc_feature 1..80: note = Synthetic: >NC_003310.1-cand-110070-110149
  source 1..80: mol_type = other DNA
cttatcttcatagaatactaaaggcaataaagaaatttttggttcttctctaagagctacgtgagacttaaccatagacg

SEQ ID NO: 1517 - DNA, 80 bp, synthetic construct
  misc_feature 1..80: note = Synthetic: >NC_003310.1-cand-110540-110619
  source 1..80: mol_type = other DNA
ttcccatactaattggttactattatttttcgtataatttctaacagtttgaggttttagatttttagttacagaagtga

SEQ ID NO: 1518 - DNA, 80 bp, synthetic construct
  misc_feature 1..80: note = Synthetic: >NC_003310.1-cand-110780-110859
  source 1..80: mol_type = other DNA
gactaacttataatcctttttatttattctctcgttagccttaagaaaactagatacaaaatttgcatctacatcatccg

SEQ ID NO: 1519 - DNA, 80 bp, synthetic construct
  misc_feature 1..80: note = Synthetic: >NC_003310.1-cand-111180-111259
  source 1..80: mol_type = other DNA
gtaatatttttagtttttttggttgtgaataaagtatcgccctaataatattggtaccgtcttccgacaatatagtagtt

SEQ ID NO: 1520 - DNA, 80 bp, synthetic construct
  misc_feature 1..80: note = Synthetic: >NC_003310.1-cand-111260-111339
  source 1..80: mol_type = other DNA
aaattatccgagcatgtagaagaacaccgcttaggcggattcagtacaatgttatatttttcgtaccaactcatttaaat

SEQ ID NO: 1521 - DNA, 80 bp, synthetic construct
  misc_feature 1..80: note = Synthetic: >NC_003443.1-cand-13670-13749
  source 1..80: mol_type = other DNA
actatacttttccaaaaattaaagggatgccaccagaagaaaagtgtttagtcttaactgaatatctagcaatgtgttat

SEQ ID NO: 1522 - DNA, 80 bp, synthetic construct
  misc_feature 1..80: note = Synthetic: >NC_003443.1-cand-13750-13829
  source 1..80: mol_type = other DNA
caaaatactcatcacttagatccagatcttcaaaagtatttatataatctaactaatccaaaattgactgcatttcccag

SEQ ID NO: 1523 - DNA, 80 bp, synthetic construct
  misc_feature 1..80: note = Synthetic: >NC_003443.1-cand-13820-13899
  source 1..80: mol_type = other DNA
catttcccagtaacaacttctacttaactagaaaaatccttaatcaaattagagaatcagacgaaggacaatatattatc

SEQ ID NO: 1524 - DNA, 80 bp, synthetic construct
  misc_feature 1..80: note = Synthetic: >NC_003443.1-cand-13900-13979
  source 1..80: mol_type = other DNA
acctcatattatgaatccttcgaacaattagaaacagatataattcttcactctactttaactgctccttatgataattc

SEQ ID NO: 1525 - DNA, 80 bp, synthetic construct
  misc_feature 1..80: note = Synthetic: >NC_003443.1-cand-13980-14059
  source 1..80: mol_type = other DNA
agaaaactctaacaaagttcgatttatccctttcgacatctttccacatccagaatctctcgagaaatatcctcttccag

SEQ ID NO: 1526 - DNA, 80 bp, synthetic construct
  misc_feature 1..80: note = Synthetic: >NC_003443.1-cand-14060-14139
  source 1..80: mol_type = other DNA
ttgatcatgactctcaatctgcaatttcaacactaattccaggccctccttctcatcatgtattacgaccactaggagtg

SEQ ID NO: 1527 - DNA, 80 bp, synthetic construct
  misc_feature 1..80: note = Synthetic: >NC_003443.1-cand-14140-14219
  source 1..80: mol_type = other DNA
tcatccacagcttggtataaagggataagttattgtagatacctagaaacacaaaagatacagactggtgatcatcttta

SEQ ID NO: 1528 - DNA, 80 bp, synthetic construct
  misc_feature 1..80: note = Synthetic: >NC_003443.1-cand-14220-14299
  source 1..80: mol_type = other DNA
tttagccgaaggaagcggtgcttcaatgtcacttctagaactcttatttccaggagatactgtctattataatagtcttt

SEQ ID NO: 1529 - DNA, 80 bp, synthetic construct
  misc_feature 1..80: note = Synthetic: >NC_003443.1-cand-14300-14379
  source 1..80: mol_type = other DNA
ttagtagtggagagaatcctccacagagaaactatgcccctcttccaactcaatttgtacagagtgttccatataaattg

SEQ ID NO: 1530 - DNA, 80 bp, synthetic construct
  misc_feature 1..80: note = Synthetic: >NC_003443.1-cand-14380-14459
  source 1..80: mol_type = other DNA
tggcaagctgatcttgctgatgatagcaatttgataaaagattttgtcccattatggaatggaaacggtgcagttacaga

SEQ ID NO: 1531 - DNA, 80 bp, synthetic construct
  misc_feature 1..80: note = Synthetic: >NC_003443.1-cand-14470-14549
  source 1..80: mol_type = other DNA
aaggatgcagttgcattcataatacataaagtaggagcagagaaagcatcccttgtccatatagatctcgaatcaactgc

SEQ ID NO: 1532 - DNA, 80 bp, synthetic construct
  misc_feature 1..80: note = Synthetic: >NC_003443.1-cand-14540-14619
  source 1..80: mol_type = other DNA
aatcaactgctaatataaatcagcaaactctgtccagatcccagattcattcattaattatagcaactactgttcttaag

SEQ ID NO: 1533 - DNA, 80 bp, synthetic construct
  misc_feature 1..80: note = Synthetic: >NC_003443.1-cand-14630-14709
  source 1..80: mol_type = other DNA
tattaatttataaaacatcatggcttccgttttctaggtttagtcaactagcaggtctactttggtgcttctttgaccgg

SEQ ID NO: 1534 - DNA, 80 bp, synthetic construct
  misc_feature 1..80: note = Synthetic: >NC_003443.1-cand-14710-14789
  source 1..80: mol_type = other DNA
atccatctaatacgtagtagctattctgatcctcacagtcatgaggtttatcttgtatgtagacttgccgcagattttag

SEQ ID NO: 1535 - DNA, 80 bp, synthetic construct
  misc_feature 1..80: note = Synthetic: >NC_003443.1-cand-14790-14869
  source 1..80: mol_type = other DNA
aactatcggtttcagtgcagctctagtaactgctactactcttcacaatgacggattcacaacaatacatcctgatgttg

SEQ ID NO: 1536 - DNA, 80 bp, synthetic construct
  misc_feature 1..80: note = Synthetic: >NC_003443.1-cand-14870-14949
  source 1..80: mol_type = other DNA
tttgtagttattggcaacaccatcttgaaaatgttgggagagtcggaaaagtaattgatgagatacttgatggtttagcc

SEQ ID NO: 1537 - DNA, 80 bp, synthetic construct
  misc_feature 1..80: note = Synthetic: >NC_004102.1-cand-1930-2009
  source 1..80: mol_type = other DNA
aatgatacggatgtcttcgtccttaacaacaccaggccaccgctgggcaattggttcggttgtacctggatgaactcaac

SEQ ID NO: 1538 - DNA, 80 bp, synthetic construct
  misc_feature 1..80: note = Synthetic: >NC_004102.1-cand-1970-2049
  source 1..80: mol_type = other DNA
cgctgggcaattggttcggttgtacctggatgaactcaactggattcaccaaagtgtgcggagcgcccccttgtgtcatc

SEQ ID NO: 1539 - DNA, 80 bp, synthetic construct
  misc_feature 1..80: note = Synthetic: >NC_004102.1-cand-2090-2169
  source 1..80: mol_type = other DNA
gtttccgcaagcatccggaagccacatactctcggtgcggctccggtccctggattacacccaggtgcatggtcgactac

SEQ ID NO: 1540 - DNA, 80 bp, synthetic construct
  misc_feature 1..80: note = Synthetic: >NC_004102.1-cand-2160-2239
  source 1..80: mol_type = other DNA
ggtcgactacccgtataggctttggcactatccttgtaccatcaattacaccatattcaaagtcaggatgtacgtgggag

SEQ ID NO: 1541 - DNA, 80 bp, synthetic construct
  misc_feature 1..80: note = Synthetic: >NC_004102.1-cand-2280-2359
  source 1..80: mol_type = other DNA
gggcgaacgctgtgatctggaagacagggacaggtccgagctcagcccattgctgctgtccaccacacagtggcaggtcc

SEQ ID NO: 1542 - DNA, 80 bp, synthetic construct
  misc_feature 1..80: note = Synthetic: >NC_004102.1-cand-2330-2409
  source 1..80: mol_type = other DNA
tgctgctgtccaccacacagtggcaggtccttccgtgttctttcacgaccctgccagccttgtccaccggcctcatccac

SEQ ID NO: 1543 - DNA, 80 bp, synthetic construct
  misc_feature 1..80: note = Synthetic: >NC_004102.1-cand-2450-2529
  source 1..80: mol_type = other DNA
tagggtcaagcatcgcgtcctgggccattaagtgggagtacgtcgttctcctgttcctcctgcttgcagacgcgcgcgtc

SEQ ID NO: 1544 - DNA, 80 bp, synthetic construct
  misc_feature 1..80: note = Synthetic: >NC_004102.1-cand-2490-2569
  source 1..80: mol_type = other DNA
cgtcgttctcctgttcctcctgcttgcagacgcgcgcgtctgctcctgcttgtggatgatgttactcatatcccaagcgg

SEQ ID NO: 1545 - DNA, 80 bp, synthetic construct
  misc_feature 1..80: note = Synthetic: >NC_004102.1-cand-2570-2649
  source 1..80: mol_type = other DNA
aggcggctttggagaacctcgtaatactcaatgcagcatccctggccgggacgcacggtcttgtgtccttcctcgtgttc

SEQ ID NO: 1546 - DNA, 80 bp, synthetic construct
  misc_feature 1..80: note = Synthetic: >NC_004102.1-cand-2650-2729
  source 1..80: mol_type = other DNA
ttctgctttgcgtggtatctgaagggtaggtgggtgcccggagcggtctacgccttctacgggatgtggcctctcctcct

SEQ ID NO: 1547 - DNA, 80 bp, synthetic construct
  misc_feature 1..80: note = Synthetic: >NC_004102.1-cand-2730-2809
  source 1..80: mol_type = other DNA
gctcctgctggcgttgcctcagcgggcatacgcactggacacggaggtggccgcgtcgtgtggcggcgttgttcttgtcg

SEQ ID NO: 1548 - DNA, 80 bp, synthetic construct
  misc_feature 1..80: note = Synthetic: >NC_004102.1-cand-2810-2889
  source 1..80: mol_type = other DNA
ggttaatggcgctgactctgtcgccatattacaagcgctacatcagctggtgcatgtggtggcttcagtattttctgacc

SEQ ID NO: 1549 - DNA, 80 bp, synthetic construct
  misc_feature 1..80: note = Synthetic: >NC_004102.1-cand-2850-2929
  source 1..80: mol_type = other DNA
catcagctggtgcatgtggtggcttcagtattttctgaccagagtagaagcgcaactgcacgtgtgggttccccccctca

SEQ ID NO: 1550 - DNA, 80 bp, synthetic construct
  misc_feature 1..80: note = Synthetic: >NC_004102.1-cand-2970-3049
  source 1..80: mol_type = other DNA
tgttgtacacccgactctggtatttgacatcaccaaactactcctggccatcttcggacccctttggattcttcaagcca

SEQ ID NO: 1551 - DNA, 80 bp, synthetic construct
  misc_feature 1..80: note = Synthetic: >NC_004102.1-cand-3050-3129
  source 1..80: mol_type = other DNA
gtttgcttaaagtcccctacttcgtgcgcgttcaaggccttctccggatctgcgcgctagcgcggaagatagccggaggt

SEQ ID NO: 1552 - DNA, 80 bp, synthetic construct
  misc_feature 1..80: note = Synthetic: >NC_004102.1-cand-3170-3249
  source 1..80: mol_type = other DNA
ctggcacctatgtgtataaccatctcacccctcttcgagactgggcgcacaacggcctgcgagatctggccgtggctgtg

SEQ ID NO: 1553 - DNA, 80 bp, synthetic construct
  misc_feature 1..80: note = Synthetic: >NC_005079.1-cand-3510-3589
  source 1..80: mol_type = other DNA
gaccccattttgagtgatcataagaacatgacaaatcaccattattcactgccatcttcatgtcacaaatggcccgttca

SEQ ID NO: 1554 - DNA, 80 bp, synthetic construct
  misc_feature 1..80: note = Synthetic: >NC_005079.1-cand-3590-3669
  source 1..80: mol_type = other DNA
aattctttttcagagttcagacaggtgtacttcatagaattccctacagcttcagaaaaatcctccaccaatcttgtcat

SEQ ID NO: 1555 - DNA, 80 bp, synthetic construct
  misc_feature 1..80: note = Synthetic: >NC_005079.1-cand-3670-3749
  source 1..80: mol_type = other DNA
cagttttgtgttgaggtctcctacatagagctctctgtttgaacccacctgttccttataacttagaccaaatttaaggt

SEQ ID NO: 1556 - DNA, 80 bp, synthetic construct
  misc_feature 1..80: note = Synthetic: >NC_005079.1-cand-3750-3829
  source 1..80: mol_type = other DNA
ttcctgagttggaactaatgcttgtgaactcagtgggcgaatcttcagaataaaaacacagattccttaatgcggcattg

SEQ ID NO: 1557 - DNA, 80 bp, synthetic construct
  misc_feature 1..80: note = Synthetic: >NC_005079.1-cand-3830-3909
  source 1..80: mol_type = other DNA
gtgaagtaacttttatccaacttgtctgcaatcgcctctgagttgctttctcttatactaagtctaacctcgtctttgag

SEQ ID NO: 1558 - DNA, 80 bp, synthetic construct
  misc_feature 1..80: note = Synthetic: >NC_005079.1-cand-3910-3989
  source 1..80: mol_type = other DNA
tcttaatgtctcatcggtgaaacccagtctagatctgcttttgtgctcataacttcctagtttttgatcaaagtgacctt

SEQ ID NO: 1559 - DNA, 80 bp, synthetic construct
  misc_feature 1..80: note = Synthetic: >NC_005079.1-cand-3990-4069
  source 1..80: mol_type = other DNA
gtatcaagaggtatttaaaacacataaaatactcttcgtccacataacttgatgtggtcagatttttcagcagcaacccc

SEQ ID NO: 1560 - DNA, 80 bp, synthetic construct
  misc_feature 1..80: note = Synthetic: >NC_005079.1-cand-4070-4149
  source 1..80: mol_type = other DNA
aagggacagacatcaagtactccctcaaggaagaagttgcatttttctgacgatttgtaaactgcgtcacacaactcctt

SEQ ID NO: 1561 - DNA, 80 bp, synthetic construct
  misc_feature 1..80: note = Synthetic: >NC_005079.1-cand-4150-4229
  source 1..80: mol_type = other DNA
gtacacttcaggaggaagaacatctgggtcaaaatccttgacttcgtgtaacgatacttcagctctaatctctttcatca

SEQ ID NO: 1562 - DNA, 80 bp, synthetic construct
  misc_feature 1..80: note = Synthetic: >NC_005079.1-cand-4230-4309
  source 1..80: mol_type = other DNA
ccccaaaaggtgaccacaaattgtccaaaggattattcccattttttactgaattatcagctcggccgagatttttagtt

SEQ ID NO: 1563 - DNA, 80 bp, synthetic construct
  misc_feature 1..80: note = Synthetic: >NC_005079.1-cand-4310-4389
  source 1..80: mol_type = other DNA
cttgtgttcacactgttgtcagccatcttggctaaggcaacttgtacatcatgtttaatttcgttgaatgattcaacctg

SEQ ID NO: 1564 - DNA, 80 bp, synthetic construct
  misc_feature 1..80: note = Synthetic: >NC_005079.1-cand-4390-4469
  source 1..80: mol_type = other DNA
ttcttctgttaacgcctcgtacattaaagacaattcttcttgagtactcttagctttcggccctgcactcaccaaacctg

SEQ ID NO: 1565 - DNA, 80 bp, synthetic construct
  misc_feature 1..80: note = Synthetic: >NC_005079.1-cand-4470-4549
  source 1..80: mol_type = other DNA
tcagattttttagaatcaaatagtcagttgaatctggatctagattgtaccttcctttggttttaaacctctctgccata

SEQ ID NO: 1566 - DNA, 80 bp, synthetic construct
  misc_feature 1..80: note = Synthetic: >NC_005079.1-cand-4550-4629
  source 1..80: mol_type = other DNA
gaggaaacacatgctgacactagtttttccttgtcataggtggagaggatgttgcctaactcatctagttttggtataac

SEQ ID NO: 1567 - DNA, 80 bp, synthetic construct
  misc_feature 1..80: note = Synthetic: >NC_005079.1-cand-4630-4709
  source 1..80: mol_type = other DNA
aacactcttgttacttgataagtccaaagcagtacttgttatattaggtctaaagggattatttttaagctccccagaaa

SEQ ID NO: 1568 - DNA, 80 bp, synthetic construct
  misc_feature 1..80: note = Synthetic: >NC_005079.1-cand-4710-4789
  source 1..80: mol_type = other DNA
cctttaactttcccctattaaacaaagacacacaataatttaagagttctttacacacacctggtgtctgcacatcctca

SEQ ID NO: 1569 - DNA, 80 bp, synthetic construct
  misc_feature 1..80: note = Synthetic: >NC_005080.1-cand-240-319
  source 1..80: mol_type = other DNA
tcactacctttgtttaaggtgccatcagggtatgttaaggaattcagatctctgcaatatctgctggaagcccctgccca

SEQ ID NO: 1570 - DNA, 80 bp, synthetic construct
  misc_feature 1..80: note = Synthetic: >NC_005080.1-cand-310-389
  source 1..80: mol_type = other DNA
cccctgcccaccacaatcacagtaccggtggagccaacagcaccaccaccataggcagactgcacagggtcagacccgac

SEQ ID NO: 1571 - DNA, 80 bp, synthetic construct
  misc_feature 1..80: note = Synthetic: >NC_005080.1-cand-440-519
  source 1..80: mol_type = other DNA
tgcgccattagtcaatgtctttgatctcgactttgtgcttcagtggcctgcatgtcacccctttcaatctgaactgccct

SEQ ID NO: 1572 - DNA, 80 bp, synthetic construct
  misc_feature 1..80: note = Synthetic: >NC_005080.1-cand-530-609
  source 1..80: mol_type = other DNA
atatcagcaggtcatttaaagatctgctgaatgccaccttgaaatttgagaattccaaccagtcaccaaatttatcaagt

SEQ ID NO: 1573 - DNA, 80 bp, synthetic construct
  misc_feature 1..80: note = Synthetic: >NC_005080.1-cand-580-659
  source 1..80: mol_type = other DNA
aattccaaccagtcaccaaatttatcaagtgaacggatcaactgctctttgtgtagatcataaacgaggacaaagtcctc

SEQ ID NO: 1574 - DNA, 80 bp, synthetic construct
  misc_feature 1..80: note = Synthetic: >NC_005080.1-cand-660-739
  source 1..80: mol_type = other DNA
ttgctgaaataatattgtttgtgatgttgtttttagataaggccatagttggcttaataaggtttccacactatcaatgt

SEQ ID NO: 1575 - DNA, 80 bp, synthetic construct
  misc_feature 1..80: note = Synthetic: >NC_005080.1-cand-740-819
  source 1..80: mol_type = other DNA
cctctagtgctccaattgccttgactatgacatccccagacaactcaactctatatgttgacaacctttcattacctctg

SEQ ID NO: 1576 - DNA, 80 bp, synthetic construct
  misc_feature 1..80: note = Synthetic: >NC_005080.1-cand-820-899
  source 1..80: mol_type = other DNA
taaaagataccctctttcaagacaagaggttctcctgggttatctggcccaatgaggtcatatgcatacttgttacttag

SEQ ID NO: 1577 - DNA, 80 bp, synthetic construct
  misc_feature 1..80: note = Synthetic: >NC_005080.1-cand-900-979
  source 1..80: mol_type = other DNA
ttcagaataaaagtcaccaaagttgaacttaacatggctcagaatattgtcatcatttgtcgcagcgtagcctgcatcaa

SEQ ID NO: 1578 - DNA, 80 bp, synthetic construct
  misc_feature 1..80: note = Synthetic: >NC_005080.1-cand-980-1059
  source 1..80: mol_type = other DNA
taaacaagccagctaggtcaaagctctcatggcctgtgaacaatggtaggctagcgataaccagtgcaccatccaacaat

SEQ ID NO: 1579 - DNA, 80 bp, synthetic construct
  misc_feature 1..80: note = Synthetic: >NC_005080.1-cand-1040-1119
  source 1..80: mol_type = other DNA
ccagtgcaccatccaacaatgagtggcttccctcagacccagaaacacattgactcattgcatccacattcagctctaat

SEQ ID NO: 1580 - DNA, 80 bp, synthetic construct
  misc_feature 1..80: note = Synthetic: >NC_005080.1-cand-1140-1219
  source 1..80: mol_type = other DNA
cactcctagtgaactgacaatggtgtaactgtacaccatctttcttctaagtttaaattttgtcgaaactcgtgtgtgtt

SEQ ID NO: 1581 - DNA, 80 bp, synthetic construct
  misc_feature 1..80: note = Synthetic: >NC_005080.1-cand-1220-1299
  source 1..80: mol_type = other DNA
ctacttgaatgatcaattttagtttcacagcttcttggcaagcaacattgcgcaacacagtgtgcaggtccatcatgtct

SEQ ID NO: 1582 - DNA, 80 bp, synthetic construct
  misc_feature 1..80: note = Synthetic: >NC_005080.1-cand-1300-1379
  source 1..80: mol_type = other DNA
tcctgaggcaacaaggagatgttgtcaacagagacaccctcaaggaaaaccttgatattatcaaagctagaaactacata

SEQ ID NO: 1583 - DNA, 80 bp, synthetic construct
  misc_feature 1..80: note = Synthetic: >NC_005080.1-cand-1380-1459
  source 1..80: mol_type = other DNA
acccattgcaatgtcttcaacaaacattgctcttgatactttattattcctaattgacaaggtaaaatctgtgagttcag

SEQ ID NO: 1584 - DNA, 80 bp, synthetic construct
  misc_feature 1..80: note = Synthetic: >NC_005080.1-cand-1460-1539
  source 1..80: mol_type = other DNA
ctagatctacttgactgtcatcttctagatctagaacttcattgaaccaaaagaaggatttgagacacgatgttgacatg

SEQ ID NO: 1585 - DNA, 80 bp, synthetic construct
  misc_feature 1..80: note = Synthetic: >NC_005080.1-cand-6690-6769
  source 1..80: mol_type = other DNA
taggtcggactttaggtttaagagctttgacatgtcactcttccattttctctcaaactcatcaggattgaccctaacaa

SEQ ID NO: 1586 - DNA, 80 bp, synthetic construct
  misc_feature 1..80: note = Synthetic: >NC_005080.1-cand-6770-6849
  source 1..80: mol_type = other DNA
aggtttccaataggatgagtgttttccctgtgagtttgaaaccatccggaatgacttttggaagggtgggacatagtatg

SEQ ID NO: 1587 - DNA, 80 bp, synthetic construct
  misc_feature 1..80: note = Synthetic: >NC_005080.1-cand-6860-6939
  source 1..80: mol_type = other DNA
acaggatcacatcaacaaacttctgatctgaattgatctgacaggcgtgtgcctcacaggactcaagctctactaaactt

SEQ ID NO: 1588 - DNA, 80 bp, synthetic construct
  misc_feature 1..80: note = Synthetic: >NC_005080.1-cand-6980-7059
  source 1..80: mol_type = other DNA
gatgttgagataaaaagatgtccctttggtatgctagctcctgtctttctggaaaatgctttctaataaggctttttatt

SEQ ID NO: 1589 - DNA, 80 bp, synthetic construct
  misc_feature 1..80: note = Synthetic: >NC_005080.1-cand-7020-7099
  source 1..80: mol_type = other DNA
ctgtctttctggaaaatgctttctaataaggctttttatttcatttactgattcctccatgctcaagtgccgcctaggat

SEQ ID NO: 1590 - DNA, 80 bp, synthetic construct
  misc_feature 1..80: note = Synthetic: >NC_005081.1-cand-0-79
  source 1..80: mol_type = other DNA
acagtggatcctaggcgattttggttacgctataattgtaactgttttctgtttggacaacatcaaaaacatccattgca

SEQ ID NO: 1591 - DNA, 80 bp, synthetic construct
  misc_feature 1..80: note = Synthetic: >NC_005081.1-cand-90-169
  source 1..80: mol_type = other DNA
gttcattagcttcatgcaagaaataccaacctttttgcaggaggctctgaacattgctcttgttgcagtcagtctcattg

SEQ ID NO: 1592 - DNA, 80 bp, synthetic construct
  misc_feature 1..80: note = Synthetic: >NC_005081.1-cand-170-249
  source 1..80: mol_type = other DNA
ccatcattaagggtatagtgaacttgtacaaaagtggtttattccaattctttgtattcctagcgcttgcaggaagatcc

SEQ ID NO: 1593 - DNA, 80 bp, synthetic construct
  misc_feature 1..80: note = Synthetic: >NC_005081.1-cand-250-329
  source 1..80: mol_type = other DNA
tgcacagaagaagctttcaaaatcggactgcacactgagttccagactgtgtccttctcaatggtgggtctcttttccaa

SEQ ID NO: 1594 - DNA, 80 bp, synthetic construct
  misc_feature 1..80: note = Synthetic: >NC_005081.1-cand-310-389
  source 1..80: mol_type = other DNA
atggtgggtctcttttccaacaatccacatgacctacctttgttgtgtaccttaaacaagagccatctttacattaaggg

SEQ ID NO: 1595 - DNA, 80 bp, synthetic construct
  misc_feature 1..80: note = Synthetic: >NC_005081.1-cand-410-489
  source 1..80: mol_type = other DNA
tcagctttgatgatattgcagtattgttgccacagtatgatgttataatacaacatccagcagatatgagctggtgttcc

SEQ ID NO: 1596 - DNA, 80 bp, synthetic construct
  misc_feature 1..80: note = Synthetic: >NC_005081.1-cand-490-569
  source 1..80: mol_type = other DNA
aaaagtgatgatcaaatttggttgtctcagtggttcatgaatgctgtgggacatgattggcatctagacccaccatttct

SEQ ID NO: 1597 - DNA, 80 bp, synthetic construct
  misc_feature 1..80: note = Synthetic: >NC_005081.1-cand-570-649
  source 1..80: mol_type = other DNA
gtgtaggaaccgtacaaagacagaaggcttcatctttcaagtcaacacctccaagactggtgttaatgaaaattatgcta

SEQ ID NO: 1598 - DNA, 80 bp, synthetic construct
  misc_feature 1..80: note = Synthetic: >NC_005081.1-cand-650-729
  source 1..80: mol_type = other DNA
agaagtttaagactggcatgcatcatttatatagagaatatcctgactcttgcccgaatggcaaactgtgcttaatgaag

SEQ ID NO: 1599 - DNA, 80 bp, synthetic construct
  misc_feature 1..80: note = Synthetic: >NC_005081.1-cand-730-809
  source 1..80: mol_type = other DNA
gcacaacctaccagttggcctctccaatgtccactcgaccacgttaacacattacacttccttacaagaggtaaaaacat

SEQ ID NO: 1600 - DNA, 80 bp, synthetic construct
  misc_feature 1..80: note = Synthetic: >NC_005081.1-cand-800-879
  source 1..80: mol_type = other DNA
gtaaaaacattcaacttccaaggaggtccttgaaagcattcttctcctggtctttgacagactcatccggcaaggatacc

SEQ ID NO: 1601 - DNA, 80 bp, synthetic construct
  misc_feature 1..80: note = Synthetic: >NC_005223.1-cand-160-239
  source 1..80: mol_type = other DNA
aaggccttgttgtaggttcagtagaactaccacctgtcccaatacagcaaattgaatccttaaaattagagagttcttgt

SEQ ID NO: 1602 - DNA, 80 bp, synthetic construct
  misc_feature 1..80: note = Synthetic: >NC_005223.1-cand-240-319
  source 1..80: mol_type = other DNA
aattttgatttgcacaccagtacagcagggcaacagtcatttacaaaatggacatgggagacaaaaggtgatcttgcaga

SEQ ID NO: 1603 - DNA, 80 bp, synthetic construct
  misc_feature 1..80: note = Synthetic: >NC_005223.1-cand-320-399
  source 1..80: mol_type = other DNA
aaatacacaagcatcatcaacaagttttcagacaaaaagtagtgaggtcaatttaagaggtctgtgcttgatccctaccc

SEQ ID NO: 1604 - DNA, 80 bp, synthetic construct
  misc_feature 1..80: note = Synthetic: >NC_005223.1-cand-400-479
  source 1..80: mol_type = other DNA
tagtggttgaaacagcagcaaggatgcggaagacaatagcatgttatgacttgtcatgtaatcaaacagtatgtcagcct

SEQ ID NO: 1605 - DNA, 80 bp, synthetic construct
  misc_feature 1..80: note = Synthetic: >NC_005223.1-cand-470-549
  source 1..80: mol_type = other DNA
atgtcagcctactgtttatttaatgggacctattcaaacatgcttaacaaccaaaagttgtcttctgggtttaggagatc

SEQ ID NO: 1606 - DNA, 80 bp, synthetic construct
  misc_feature 1..80: note = Synthetic: >NC_005223.1-cand-550-629
  source 1..80: mol_type = other DNA
aacgaatccaggtaaattatgagagaacatactgtgtttcagggcagcttgttgaaggtgtctgcttcaacccaatacac

SEQ ID NO: 1607 - DNA, 80 bp, synthetic construct
  misc_feature 1..80: note = Synthetic: >NC_005223.1-cand-630-709
  source 1..80: mol_type = other DNA
acaatggccctctctcagccaagccatacttatgatatagtgaccataatggttcgctgttttttggtcataaaaaaggt

SEQ ID NO: 1608 - DNA, 80 bp, synthetic construct
  misc_feature 1..80: note = Synthetic: >NC_005223.1-cand-710-789
  source 1..80: mol_type = other DNA
gacatctggcgacagtatgaagattgaaaaaaactttgaaactcttgttcagaagactgggtgtacggccaatggttttc

SEQ ID NO: 1609 - DNA, 80 bp, synthetic construct
  misc_feature 1..80: note = Synthetic: >NC_005223.1-cand-790-869
  source 1..80: mol_type = other DNA
aaggatattacatctgtcttattgggagtagctcagagccattgtatgttcccacgctggatgattatcggtcagctgag

SEQ ID NO: 1610 - DNA, 80 bp, synthetic construct
  misc_feature 1..80: note = Synthetic: >NC_005223.1-cand-870-949
  source 1..80: mol_type = other DNA
gttctgtcacgaatggcttttgcaccacatggcgaagatcatgacatagaaaaaaatgcagtgagtgccttacgcattgc

SEQ ID NO: 1611 - DNA, 80 bp, synthetic construct
  misc_feature 1..80: note = Synthetic: >NC_005223.1-cand-960-1039
  source 1..80: mol_type = other DNA
acaggtaaagcaccatccactgaatcatcagatacagtacaaggtattgcattttcaggcagcccactctatacatctac

SEQ ID NO: 1612 - DNA, 80 bp, synthetic construct
  misc_feature 1..80: note = Synthetic: >NC_005223.1-cand-1050-1129
  source 1..80: mol_type = other DNA
acagcaaaggatgatcctgtatatgtctgggccccaggaattattatggagggaaaccactctgtctgtgaaaaaaagac

SEQ ID NO: 1613 - DNA, 80 bp, synthetic construct
  misc_feature 1..80: note = Synthetic: >NC_005223.1-cand-1090-1169
  source 1..80: mol_type = other DNA
ttattatggagggaaaccactctgtctgtgaaaaaaagacactgccgttaacatggacagggttcatcccattacctggg

SEQ ID NO: 1614 - DNA, 80 bp, synthetic construct
  misc_feature 1..80: note = Synthetic: >NC_005223.1-cand-1210-1289
  source 1..80: mol_type = other DNA
tagcaggaccaggtgcagactgtgaagcatattctgagacaggtattttcaatataagctcacctacttgcctgataaac

SEQ ID NO: 1615 - DNA, 80 bp, synthetic construct
  misc_feature 1..80: note = Synthetic: >NC_005223.1-cand-1290-1369
  source 1..80: mol_type = other DNA
cgtgttcaaagattccgtggtgctgaacagcaaataaaatttgtttgtcaaagagtagacatggatatcactgtatattg

SEQ ID NO: 1616 - DNA, 80 bp, synthetic construct
  misc_feature 1..80: note = Synthetic: >NC_005223.1-cand-1380-1459
  source 1..80: mol_type = other DNA
aaaaaagtcatccttactaaaaccttagttattggacagtgcatttatacttttacaagtatcttttccatgattccagg

SEQ ID NO: 1617 - DNA, 80 bp, synthetic construct
  misc_feature 1..80: note = Synthetic: >NC_005224.1-cand-410-489
  source 1..80: mol_type = other DNA
tatgtgatagggttcacacttcctatcatccttaaagctttatacatgctctcaacgcgtgggagacagactgtaaagga

SEQ ID NO: 1618 - DNA, 80 bp, synthetic construct
  misc_feature 1..80: note = Synthetic: >NC_005224.1-cand-510-589
  source 1..80: mol_type = other DNA
ggtttaaggatgatacatcatttgaagacatcaatggcataaggagaccaaagcatttatatgtttctatgcctactgcc

SEQ ID NO: 1619 - DNA, 80 bp, synthetic construct
  misc_feature 1..80: note = Synthetic: >NC_005224.1-cand-590-669
  source 1..80: mol_type = other DNA
cagtcaactatgaaagcagaagaactcacacctggcagatttcgcacaatagtatgtggtctttttcccactcagatcca

SEQ ID NO: 1620 - DNA, 80 bp, synthetic construct
  misc_feature 1..80: note = Synthetic: >NC_005224.1-cand-700-779
  source 1..80: mol_type = other DNA
ggtcattggtttttcattctttgtgaaggattggtctgagagaatcagagagttcatggaaaaagagtgcccattcataa

SEQ ID NO: 1621 - DNA, 80 bp, synthetic construct
  misc_feature 1..80: note = Synthetic: >NC_005224.1-cand-760-839
  source 1..80: mol_type = other DNA
aaaagagtgcccattcataaagcctgaagtaaaaccaggcacaccagcacaggagattgagatgttaaaaagaaataaga

SEQ ID NO: 1622 - DNA, 80 bp, synthetic construct
  misc_feature 1..80: note = Synthetic: >NC_005224.1-cand-840-919
  source 1..80: mol_type = other DNA
tctactttatgcagcgccaggatgtgcttgacaaaaatcatgtggcagacattgacaagttaattgactatgcagcctct

SEQ ID NO: 1623 - DNA, 80 bp, synthetic construct
  misc_feature 1..80: note = Synthetic: >NC_005224.1-cand-930-1009
  source 1..80: mol_type = other DNA
catcacctgacaacattgattcgcctaatgcaccatgggtctttgcatgtgcaccagaccgatgcccaccaacatgtatc

SEQ ID NO: 1624 - DNA, 80 bp, synthetic construct
  misc_feature 1..80: note = Synthetic: >NC_005224.1-cand-1040-1119
  source 1..80: mol_type = other DNA
tttttttcaatattgcaggacatgagaaacacaataatggcatctaagactgttggcacagcagaagagaaattaaagaa

SEQ ID NO: 1625 - DNA, 80 bp, synthetic construct
  misc_feature 1..80: note = Synthetic: >NC_005224.1-cand-1090-1169
  source 1..80: mol_type = other DNA
tgttggcacagcagaagagaaattaaagaaaaagtcttccttttaccaatcttacctgcgtcgaactcaatcaatgggaa

SEQ ID NO: 1626 - DNA, 80 bp, synthetic construct
  misc_feature 1..80: note = Synthetic: >NC_005224.1-cand-1130-1209
  source 1..80: mol_type = other DNA
ttttaccaatcttacctgcgtcgaactcaatcaatgggaattcagcttgatcaaagaattatcctcttgtttatgttgga

SEQ ID NO: 1627 - DNA, 80 bp, synthetic construct
  misc_feature 1..80: note = Synthetic: >NC_005224.1-cand-1260-1339
  source 1..80: mol_type = other DNA
cagagctcagaggtcttgcacaggcactgatagatcaaaaggtcaaggaaatatcgaaccaggaaccactaaagatataa

SEQ ID NO: 1628 - DNA, 80 bp, synthetic construct
  misc_feature 1..80: note = Synthetic: >NC_005224.1-cand-1350-1429
  source 1..80: mol_type = other DNA
acatatgcactgattatagatgtagtgagttgttaacatgtagacatattatatattcagggatcatatgtgctagttgt

SEQ ID NO: 1629 - DNA, 80 bp, synthetic construct
  misc_feature 1..80: note = Synthetic: >NC_005224.1-cand-1420-1499
  source 1..80: mol_type = other DNA
tgctagttgtttactaatcaaattatacgggtttatagttgcagttatcagggtcattaattaacaaactaatcagggtt

SEQ ID NO: 1630 - DNA, 80 bp, synthetic construct
  misc_feature 1..80: note = Synthetic: >NC_005224.1-cand-1510-1589
  source 1..80: mol_type = other DNA
tgtagcattataagtacatatcaactaataacaatcaatacagggatcactaatggcagttatgaatatattaagacatt

SEQ ID NO: 1631 - DNA, 80 bp, synthetic construct
  misc_feature 1..80: note = Synthetic: >NC_005224.1-cand-1600-1679
  source 1..80: mol_type = other DNA
cattatctaattagcattatgtaggttaaggttgtattttattatttaatgggcccaaacatgtgaaactgagctgtcct

SEQ ID NO: 1632 - DNA, 80 bp, synthetic construct
  misc_feature 1..80: note = Synthetic: >NC_005224.1-cand-1650-1729
  source 1..80: mol_type = other DNA
gggcccaaacatgtgaaactgagctgtcctttttccttttcatcactttttttctcaaaacttattcatttctacctcag

SEQ ID NO: 1633 - DNA, 80 bp, synthetic construct
  misc_feature 1..80: note = Synthetic: >NC_005225.1-cand-5050-5129
  source 1..80: mol_type = other DNA
gcctattgacccagaaattcagtgtttaggtcttctggtatatgatcttaaagggcaaaagggtttattgcaaatacaag

SEQ ID NO: 1634 - DNA, 80 bp, synthetic construct
  misc_feature 1..80: note = Synthetic: >NC_005225.1-cand-5130-5209
  source 1..80: mol_type = other DNA
ccaatagacgagcatattcaggaaagcaatatgatgcatattgtgtgcaaacttacaatgaggaaacaaaactttatgaa

SEQ ID NO: 1635 - DNA, 80 bp, synthetic construct
  misc_feature 1..80: note = Synthetic: >NC_005225.1-cand-5210-5289
  source 1..80: mol_type = other DNA
ggagatttaagggtaacttttaattttggtatagactgtgcacgtcttgaaattttttgggataaaaaagagtatatttt

SEQ ID NO: 1636 - DNA, 80 bp, synthetic construct
  misc_feature 1..80: note = Synthetic: >NC_005225.1-cand-5290-5369
  source 1..80: mol_type = other DNA
agaaacatctataactcaacggaatgttttgaaaatcttgatggaagaagtaactaaagagttgttgcgctgcggtatga

SEQ ID NO: 1637 - DNA, 80 bp, synthetic construct
  misc_feature 1..80: note = Synthetic: >NC_005225.1-cand-5360-5439
  source 1..80: mol_type = other DNA
tgcggtatgagatttaaaacagaacaagttaattcatcaagaagtgttgtgttgtttaagacagagagtggctttgagtg

SEQ ID NO: 1638 - DNA, 80 bp, synthetic construct
  misc_feature 1..80: note = Synthetic: >NC_005225.1-cand-5460-5539
  source 1..80: mol_type = other DNA
gtatagtttataggaattgtactctccgaacaggccttagggtaagacacccgacaaataaagcattctcaattacaatt

SEQ ID NO: 1639 - DNA, 80 bp, synthetic construct
  misc_feature 1..80: note = Synthetic: >NC_005225.1-cand-5540-5619
  source 1..80: mol_type = other DNA
caggctaatggctttagggctatggcacagcttgatgaagaaaatcctagatttcttcttgcacatgcttatcataattt

SEQ ID NO: 1640 - DNA, 80 bp, synthetic construct
  misc_feature 1..80: note = Synthetic: >NC_005225.1-cand-5620-5699
  source 1..80: mol_type = other DNA
aaaggatgtgagatatcaggcattacaggcagtaggaaatgtgtggtttaaaatgacacagcataagttgtttataaacc

SEQ ID NO: 1641 - DNA, 80 bp, synthetic construct
  misc_feature 1..80: note = Synthetic: >NC_005225.1-cand-5700-5779
  source 1..80: mol_type = other DNA
cgatcatatcagctggattactagaaaattttatgaaagggttgcctgcagcaattcccccagcagcttattctcttatt

SEQ ID NO: 1642 - DNA, 80 bp, synthetic construct
  misc_feature 1..80: note = Synthetic: >NC_005225.1-cand-5810-5889
  source 1..80: mol_type = other DNA
tttatgtttaatgaactattagctttgataaatccacaaaatgttttgaacttggatgggattgaggagacatctgaagg

SEQ ID NO: 1643 - DNA, 80 bp, synthetic construct
  misc_feature 1..80: note = Synthetic: >NC_005225.1-cand-5890-5969
  source 1..80: mol_type = other DNA
ttttacaacagtgagcacaatctctagcacacagtggtcagaagaagtaagtttgacactagatgatagtgatgatgatg

SEQ ID NO: 1644 - DNA, 80 bp, synthetic construct
  misc_feature 1..80: note = Synthetic: >NC_005225.1-cand-5970-6049
  source 1..80: mol_type = other DNA
atgatgcttcaaacctagattatactattgaccttgatgatatagattttgaaacaattgatctaaaggaggatattgag

SEQ ID NO: 1645 - DNA, 80 bp, synthetic construct
  misc_feature 1..80: note = Synthetic: >NC_005225.1-cand-6040-6119
  source 1..80: mol_type = other DNA
ggatattgagcattttttacaagatgaatctgcttatactggagatctgttaattcagactgaggaaacagaagtaagaa

SEQ ID NO: 1646 - DNA, 80 bp, synthetic construct
  misc_feature 1..80: note = Synthetic: >NC_005225.1-cand-6140-6219
  source 1..80: mol_type = other DNA
attcttgagcctgtaaagctgataaaaagttgggtttctaaaggtttgtctattgataaaatatacaatcctgtaaatat

SEQ ID NO: 1647 - DNA, 80 bp, synthetic construct
  misc_feature 1..80: note = Synthetic: >NC_005225.1-cand-6220-6299
  source 1..80: mol_type = other DNA
tatcctaatgactcggtatatgtctaaacattataatttccaggcaaagcagttatctctaatggatccatatgatctga

SEQ ID NO: 1648 - DNA, 80 bp, synthetic construct
  misc_feature 1..80: note = Synthetic: >NC_005225.1-cand-6330-6409
  source 1..80: mol_type = other DNA
gagagtgtgtcaaggatcgatttattgaacttgatcaagaagctcaacgaaaagttactgaagagagagtactgcctgag

SEQ ID NO: 1649 - DNA, 80 bp, synthetic construct
  misc_feature 1..80: note = Synthetic: >NC_005831.2-cand-6100-6179
  source 1..80: mol_type = other DNA
aacgtacaggtgttattttgacacgtagttttaagtataacattagatctgctttgtttgttataaagcagaagtggtgt

SEQ ID NO: 1650 - DNA, 80 bp, synthetic construct
  misc_feature 1..80: note = Synthetic: >NC_005831.2-cand-6180-6259
  source 1..80: mol_type = other DNA
gttattgttactttgtttaagttcttattattattatatgctatttatgcacttgtttttatgattgtgcaatttagtcc

SEQ ID NO: 1651 - DNA, 80 bp, synthetic construct
  misc_feature 1..80: note = Synthetic: >NC_005831.2-cand-6260-6339
  source 1..80: mol_type = other DNA
ttttaatagtcttttatgtggtgacattgtaagtggttatgaaaaatccacttttaataaggatatttattgtggtaatt

SEQ ID NO: 1652 - DNA, 80 bp, synthetic construct
  misc_feature 1..80: note = Synthetic: >NC_005831.2-cand-6340-6419
  source 1..80: mol_type = other DNA
ctatggtttgtaagatgtgtttgttcagttatcaagagtttaatgatttggatcatactagtcttgtttggaagcacatt

SEQ ID NO: 1653 - DNA, 80 bp, synthetic construct
  misc_feature 1..80: note = Synthetic: >NC_005831.2-cand-6420-6499
  source 1..80: mol_type = other DNA
cgtgatcctatattaatcagtttacaaccatttgttatacttgttattttgttaatttttggtaatatgtatttgcgttt

SEQ ID NO: 1654 - DNA, 80 bp, synthetic construct
  misc_feature 1..80: note = Synthetic: >NC_005831.2-cand-6500-6579
  source 1..80: mol_type = other DNA
tggacttttatattttgttgcacaatttattagtacttttggttctttcttaggctttcatcagaaacagtggtttttac

SEQ ID NO: 1655 - DNA, 80 bp, synthetic construct
  misc_feature 1..80: note = Synthetic: >NC_005831.2-cand-6580-6659
  source 1..80: mol_type = other DNA
attttgtgccgtttgatgttttatgtaatgagtttttagctacatttattgtctgcaaaatcgttttatttgttagacat

SEQ ID NO: 1656 - DNA, 80 bp, synthetic construct
  misc_feature 1..80: note = Synthetic: >NC_005831.2-cand-6660-6739
  source 1..80: mol_type = other DNA
attattgttggctgtaataatgctgactgtgtagcttgttctaaaagtgctagacttaaacgtgtaccacttcaaactat

SEQ ID NO: 1657 - DNA, 80 bp, synthetic construct
  misc_feature 1..80: note = Synthetic: >NC_005831.2-cand-6740-6819
  source 1..80: mol_type = other DNA
tattaatggtatgcataaatcattctatgttaatgctaatggtggtacttgtttctgtaataaacataacttcttttgtg

SEQ ID NO: 1658 - DNA, 80 bp, synthetic construct
  misc_feature 1..80: note = Synthetic: >NC_005831.2-cand-6820-6899
  source 1..80: mol_type = other DNA
ttaattgtgattcttttgggcctggtaatacttttattaatggtgatattgcaagagagcttggtaatgttgttaaaaca

SEQ ID NO: 1659 - DNA, 80 bp, synthetic construct
  misc_feature 1..80: note = Synthetic: >NC_005831.2-cand-6900-6979
  source 1..80: mol_type = other DNA
gctgttcaacccacagctcctgcatatgttattattgataaggtagattttgttaatggattttatcgtctttatagtgg

SEQ ID NO: 1660 - DNA, 80 bp, synthetic construct
  misc_feature 1..80: note = Synthetic: >NC_005831.2-cand-6980-7059
  source 1..80: mol_type = other DNA
tgacactttttggcggtatgactttgacattactgaatctaagtatagttgtaaagaggttctgaagaattgtaatgttt

SEQ ID NO: 1661 - DNA, 80 bp, synthetic construct
  misc_feature 1..80: note = Synthetic: >NC_005831.2-cand-7060-7139
  source 1..80: mol_type = other DNA
tagaaaattttattgtttacaataatagtggtagtaacattacacagattaaaaatgcttgtgtttatttttctcaattg

SEQ ID NO: 1662 - DNA, 80 bp, synthetic construct
  misc_feature 1..80: note = Synthetic: >NC_005831.2-cand-7140-7219
  source 1..80: mol_type = other DNA
ttgtgtgaacctataaagttggtaaattcagagttgttgtcaactttatctgttgattttaatggtgttttgcataaggc

SEQ ID NO: 1663 - DNA, 80 bp, synthetic construct
  misc_feature 1..80: note = Synthetic: >NC_005831.2-cand-7220-7299
  source 1..80: mol_type = other DNA
atatgttgatgttttgtgtaatagtttttttaaggagttaactgctaacatgtccatggctgaatgtaaagctacacttg

SEQ ID NO: 1664 - DNA, 80 bp, synthetic construct
  misc_feature 1..80: note = Synthetic: >NC_005831.2-cand-7300-7379
  source 1..80: mol_type = other DNA
gtttgactgtttctgatgatgattttgtttcagctgttgccaatgcacataggtatgacgttttgctttcagatttgtca

SEQ ID NO: 1665 - DNA, 80 bp, synthetic construct
  misc_feature 1..80: note = Synthetic: >NC_006213.1-cand-23410-23489
  source 1..80: mol_type = other DNA
taggtatgataatgttagcagtgtctggcctctctacccctatggcagatgtcccactgctgctgatattaatatccctg

SEQ ID NO: 1666 - DNA, 80 bp, synthetic construct
  misc_feature 1..80: note = Synthetic: >NC_006213.1-cand-23490-23569
  source 1..80: mol_type = other DNA
atttacccatttgtgtgtatgatccgctaccagttattttgcttggcattcttttgggcgttgcgattgtaattattgta

SEQ ID NO: 1667 - DNA, 80 bp, synthetic construct
  misc_feature 1..80: note = Synthetic: >NC_006213.1-cand-23570-23649
  source 1..80: mol_type = other DNA
gttttgttgttatattttatggtggataatgttactaggctgcatgatgcttagaccataatctaaacatgtttttgata

SEQ ID NO: 1668 - DNA, 80 bp, synthetic construct
  misc_feature 1..80: note = Synthetic: >NC_006213.1-cand-23650-23729
  source 1..80: mol_type = other DNA
cttttaatttccttaccaacggcttttgctgttataggagatttaaagtgtacttcagataatattaatgataaagacac

SEQ ID NO: 1669 - DNA, 80 bp, synthetic construct
  misc_feature 1..80: note = Synthetic: >NC_006213.1-cand-23730-23809
  source 1..80: mol_type = other DNA
cggtcctcctcctataagtactgatactgttgatgttactaatggtttgggtacttattatgttttagatcgtgtgtatt

SEQ ID NO: 1670 - DNA, 80 bp, synthetic construct
  misc_feature 1..80: note = Synthetic: >NC_006213.1-cand-23810-23889
  source 1..80: mol_type = other DNA
taaatactacgttgtttcttaatggttattaccctacttcaggttccacatatcgtaatatggcactgaagggaagtgta

SEQ ID NO: 1671 - DNA, 80 bp, synthetic construct
  misc_feature 1..80: note = Synthetic: >NC_006213.1-cand-23890-23969
  source 1..80: mol_type = other DNA
ctattgagcagactatggtttaaaccaccatttctttctgattttattaatggtatttttgctaaggtcaaaaataccaa

SEQ ID NO: 1672 - DNA, 80 bp, synthetic construct
  misc_feature 1..80: note = Synthetic: >NC_006213.1-cand-23970-24049
  source 1..80: mol_type = other DNA
ggttattaaagatcgtgtaatgtatagtgagttccctgctataactataggtagtacttttgtaaatacatcctatagtg

SEQ ID NO: 1673 - DNA, 80 bp, synthetic construct
  misc_feature 1..80: note = Synthetic: >NC_006213.1-cand-24050-24129
  source 1..80: mol_type = other DNA
tggtagtacaaccacgtacaatcaattcaacacaggatggtgataataaattacaaggtcttttagaggtctctgtttgc

SEQ ID NO: 1674 - DNA, 80 bp, synthetic construct
  misc_feature 1..80: note = Synthetic: >NC_006213.1-cand-24130-24209
  source 1..80: mol_type = other DNA
cagtataatatgtgcgagtacccacaaacgatttgtcatcctaacctgggtaatcatcgcaaagaactatggcatttgga

SEQ ID NO: 1675 - DNA, 80 bp, synthetic construct
  misc_feature 1..80: note = Synthetic: >NC_006213.1-cand-24210-24289
  source 1..80: mol_type = other DNA
tacaggtgttgtttcctgtttatataagcgtaatttcacatatgatgtgaatgctgattatttgtattttcatttttatc

SEQ ID NO: 1676 - DNA, 80 bp, synthetic construct
  misc_feature 1..80: note = Synthetic: >NC_006213.1-cand-24290-24369
  source 1..80: mol_type = other DNA
aagaaggtggtactttttatgcatattttacagacactggtgttgttactaagtttttgtttaatgtttatttaggcatg

SEQ ID NO: 1677 - DNA, 80 bp, synthetic construct
  misc_feature 1..80: note = Synthetic: >NC_006213.1-cand-24370-24449
  source 1..80: mol_type = other DNA
gcgctttcacactattatgtcatgcctctgacttgtaatagtaagcttactttagaatattgggttacacctctcacttc

SEQ ID NO: 1678 - DNA, 80 bp, synthetic construct
  misc_feature 1..80: note = Synthetic: >NC_006213.1-cand-24450-24529
  source 1..80: mol_type = other DNA
tagacaatatttactcgctttcaatcaagatggtattatttttaatgctgttgattgtatgagtgattttatgagtgaga

SEQ ID NO: 1679 - DNA, 80 bp, synthetic construct
  misc_feature 1..80: note = Synthetic: >NC_006213.1-cand-24530-24609
  source 1..80: mol_type = other DNA
ttaagtgtaaaacacaatctatagcaccacctactggtgtttatgaattaaacggttacactgttcagccaatcgcagat

SEQ ID NO: 1680 - DNA, 80 bp, synthetic construct
  misc_feature 1..80: note = Synthetic: >NC_006213.1-cand-24610-24689
  source 1..80: mol_type = other DNA
gtttaccgacgtaaacctaatcttcccaattgcaatatagaagcttggcttaatgataagtcggtgccctctccattaaa

SEQ ID NO: 1681 - DNA, 80 bp, synthetic construct
  misc_feature 1..80: note = Synthetic: >NC_007376.1-cand-1250-1329
  source 1..80: mol_type = other DNA
ttcaacaaggcatgcgagctgaccgattcaatctggatagagctcgatgagattggagaagacgtggctccaattgaaca

SEQ ID NO: 1682 - DNA, 80 bp, synthetic construct
  misc_feature 1..80: note = Synthetic: >NC_007376.1-cand-1320-1399
  source 1..80: mol_type = other DNA
caattgaacacattgcaagcatgagaaggaattacttcacagcagaggtgtcccattgcagagccacagaatatataatg

SEQ ID NO: 1683 - DNA, 80 bp, synthetic construct
  misc_feature 1..80: note = Synthetic: >NC_007376.1-cand-1410-1489
  source 1..80: mol_type = other DNA
acattaatactgccttgcttaatgcatcctgtgcagcaatggacgatttccaactaattcccatgataagcaagtgtaga

SEQ ID NO: 1684 - DNA, 80 bp, synthetic construct
  misc_feature 1..80: note = Synthetic: >NC_007376.1-cand-1490-1569
  source 1..80: mol_type = other DNA
actaaagagggaaggcgaaagaccaatttatatggtttcatcataaaaggaagatctcacttaaggaatgacaccgacgt

SEQ ID NO: 1685 - DNA, 80 bp, synthetic construct
  misc_feature 1..80: note = Synthetic: >NC_007376.1-cand-1650-1729
  source 1..80: mol_type = other DNA
agataggagatatgctactaagaagtgccataggccagatgtcaaggcctatgttcttgtatgtgaggacaaatggaaca

SEQ ID NO: 1686 - DNA, 80 bp, synthetic construct
  misc_feature 1..80: note = Synthetic: >NC_007376.1-cand-1750-1829
  source 1..80: mol_type = other DNA
gggaatggagatgaggccttgcctccttcagtcactacaacaaatcgagagtatggttgaagccgagtcctctgtcaaag

SEQ ID NO: 1687 - DNA, 80 bp, synthetic construct
  misc_feature 1..80: note = Synthetic: >NC_007376.1-cand-1800-1879
  source 1..80: mol_type = other DNA
gtatggttgaagccgagtcctctgtcaaagagaaagacatgaccaaagagttttttgagaataaatcagaaacatggccc

SEQ ID NO: 1688 - DNA, 80 bp, synthetic construct
  misc_feature 1..80: note = Synthetic: >NC_007376.1-cand-1890-1969
  source 1..80: mol_type = other DNA
cccccaaaggagtggaagaaggttccattgggaaggtctgcaggactttattagccaagtcggtattcaatagcctgtat

SEQ ID NO: 1689 - DNA, 80 bp, synthetic construct
  misc_feature 1..80: note = Synthetic: >NC_007376.1-cand-1970-2049
  source 1..80: mol_type = other DNA
gcatccccacaattagaaggattttcagctgaatcaagaaaactgcttcttgtcgttcaggctcttagggacaatcttga

SEQ ID NO: 1690 - DNA, 80 bp, synthetic construct
  misc_feature 1..80: note = Synthetic: >NC_007376.1-cand-2080-2159
  source 1..80: mol_type = other DNA
tgaagcaattgaggagtgcctgattaatgatccctgggttttgcttaatgcgtcttggttcaactccttcctaacacatg

SEQ ID NO: 1691 - DNA, 80 bp, synthetic construct
  misc_feature 1..80: note = Synthetic: >NC_007377.1-cand-200-279
  source 1..80: mol_type = other DNA
gggatttgtattcacgctcaccgtgccaagtgagcgaggactgcagcgtagacgctttgtccaaaatgccctcaatggga

SEQ ID NO: 1692 - DNA, 80 bp, synthetic construct
  misc_feature 1..80: note = Synthetic: >NC_007377.1-cand-300-379
  source 1..80: mol_type = other DNA
gacagagcagttaaactgtatagaaagcttaagagggagataacattccatggggccaaagaagtagcgctcagttattc

SEQ ID NO: 1693 - DNA, 80 bp, synthetic construct
  misc_feature 1..80: note = Synthetic: >NC_007377.1-cand-430-509
  source 1..80: mol_type = other DNA
ctgtgaccactgaagtggcctttgccgtggtatgtgcaacctgtgaacagattgctgactcccagcataggtctcacagg

SEQ ID NO: 1694 - DNA, 80 bp, synthetic construct
  misc_feature 1..80: note = Synthetic: >NC_007377.1-cand-480-559
  source 1..80: mol_type = other DNA
attgctgactcccagcataggtctcacaggcaaatggtgacaacaaccaatccactaataagacatgagaacagaatggt

SEQ ID NO: 1695 - DNA, 80 bp, synthetic construct
  misc_feature 1..80: note = Synthetic: >NC_007377.1-cand-660-739
  source 1..80: mol_type = other DNA
caggcaatgagagccattgggactcctcctagctccagtgctggtctaaaagatgatcttcttgaaaatttgcaggccta

SEQ ID NO: 1696 - DNA, 80 bp, synthetic construct
  misc_feature 1..80: note = Synthetic: >NC_009238.1-cand-4620-4699
  source 1..80: mol_type = other DNA
cccactgcttcataatatatgcttcatagtaatcaccatatatagcaccaactaatctaaacttattgcagcacaaatct

SEQ ID NO: 1697 - DNA, 80 bp, synthetic construct
  misc_feature 1..80: note = Synthetic: >NC_009238.1-cand-4700-4779
  source 1..80: mol_type = other DNA
ttgcagtatacctgagaagattgccatatattatcttcttcttcatttaaatcatgtacactgctaactgagtcttgcag

SEQ ID NO: 1698 - DNA, 80 bp, synthetic construct
  misc_feature 1..80: note = Synthetic: >NC_009238.1-cand-4780-4859
  source 1..80: mol_type = other DNA
ttttaaatataaagaattaagaagcttcatgctttcctcatttcctcctttatctggatgatattctttgcactttacta

SEQ ID NO: 1699 - DNA, 80 bp, synthetic construct
  misc_feature 1..80: note = Synthetic: >NC_009238.1-cand-4860-4939
  source 1..80: mol_type = other DNA
agtattgtcttctcattaatggtaaattgccccagcaactcatgtccaaacataaaagttgcattagctgctttgcctct

SEQ ID NO: 1700 - DNA, 80 bp, synthetic construct
  misc_feature 1..80: note = Synthetic: >NC_009238.1-cand-4940-5019
  source 1..80: mol_type = other DNA
tctctagataaagttttatccattttgcctctctaggcctctcaaatgcctctgcaggccctctccttcttctagaaaaa

SEQ ID NO: 1701 - DNA, 80 bp, synthetic construct
  misc_feature 1..80: note = Synthetic: >NC_009823.1-cand-20-99
  source 1..80: mol_type = other DNA
tccgccatgaatcactcccctgtgaggaactactgtcttcacgcagaaagcgtctagccatggcgttagtatgagtgtcg

SEQ ID NO: 1702 - DNA, 80 bp, synthetic construct
  misc_feature 1..80: note = Synthetic: >NC_009823.1-cand-330-409
  source 1..80: mol_type = other DNA
tgcaccatgagcacaaatcctaaacctcaaagaaaaaccaaaagaaacaccaaccgtcgcccacaagacgttaagtttcc

SEQ ID NO: 1703 - DNA, 80 bp, synthetic construct
  misc_feature 1..80: note = Synthetic: >NC_009823.1-cand-370-449
  source 1..80: mol_type = other DNA
aaagaaacaccaaccgtcgcccacaagacgttaagtttccgggcggcggccagatcgttggcggagtatacttgttgccg

SEQ ID NO: 1704 - DNA, 80 bp, synthetic construct
  misc_feature 1..80: note = Synthetic: >NC_009823.1-cand-480-559
  source 1..80: mol_type = other DNA
acaaggaagacttcggagcggtcccagccacgtggaaggcgccagcccatccctaaagatcggcgctccactggcaaatc

SEQ ID NO: 1705 - DNA, 80 bp, synthetic construct
  misc_feature 1..80: note = Synthetic: >NC_009823.1-cand-570-649
  source 1..80: mol_type = other DNA
ccaggatacccctggcccctatacgggaatgagggactcggctgggcaggatggctcctgtccccccgaggttcccgtcc

SEQ ID NO: 1706 - DNA, 80 bp, synthetic construct
  misc_feature 1..80: note = Synthetic: >NC_009823.1-cand-660-739
  source 1..80: mol_type = other DNA
cccaatgacccccggcataggtcgcgcaacgtgggtaaggtcatcgataccctaacgtgcggctttgccgacctcatggg

SEQ ID NO: 1707 - DNA, 80 bp, synthetic construct
  misc_feature 1..80: note = Synthetic: >NC_009823.1-cand-820-899
  source 1..80: mol_type = other DNA
ttaattttgcaacagggaacttacccggttgctccttttctatcttcttgctggccctgctgtcctgcatcaccaccccg

SEQ ID NO: 1708 - DNA, 80 bp, synthetic construct
  misc_feature 1..80: note = Synthetic: >NC_009823.1-cand-890-969
  source 1..80: mol_type = other DNA
caccaccccggtctccgctgccgaagtgaagaacatcagtaccggctacatggtgactaacgactgcaccaatgacagca

SEQ ID NO: 1709 - DNA, 80 bp, synthetic construct
  misc_feature 1..80: note = Synthetic: >NC_009823.1-cand-950-1029
  source 1..80: mol_type = other DNA
cgactgcaccaatgacagcattacctggcagctccaggctgctgtcctccacgtccccgggtgcgtcccgtgcgagaaag

SEQ ID NO: 1710 - DNA, 80 bp, synthetic construct
  misc_feature 1..80: note = Synthetic: >NC_009823.1-cand-1050-1129
  source 1..80: mol_type = other DNA
tggataccggtctcaccgaatgtggccgtgcagcggcccggcgccctcacgcagggcttgcggacgcacatcgacatggt

SEQ ID NO: 1711 - DNA, 80 bp, synthetic construct
  misc_feature 1..80: note = Synthetic: >NC_010562.1-cand-900-979
  source 1..80: mol_type = other DNA
tgttttggcaacactgctcttgcaaagtgtaacttaaatcatgactctgagttctgtgacatgttgaaactgtttgaatt

SEQ ID NO: 1712 - DNA, 80 bp, synthetic construct
  misc_feature 1..80: note = Synthetic: >NC_010562.1-cand-990-1069
  source 1..80: mol_type = other DNA
gcaattgagtcattgaatgacaacacaaagaacaaagtcaatctattaacacattccattaatgctttaatttctgacaa

SEQ ID NO: 1713 - DNA, 80 bp, synthetic construct
  misc_feature 1..80: note = Synthetic: >NC_010562.1-cand-1070-1149
  source 1..80: mol_type = other DNA
tcttttgatgaagaatagattaaaagagttattggacactccctactgcaactacacaaaattctggtatgtcaaccaca

SEQ ID NO: 1714 - DNA, 80 bp, synthetic construct
  misc_feature 1..80: note = Synthetic: >NC_010562.1-cand-1150-1229
  source 1..80: mol_type = other DNA
ccatcacaggagagcattcacttccacgctgttggatggttaaaaacaacagctacctcaatgaaagtgaatttagaaat

SEQ ID NO: 1715 - DNA, 80 bp, synthetic construct
  misc_feature 1..80: note = Synthetic: >NC_010562.1-cand-1230-1309
  source 1..80: mol_type = other DNA
gattggattcttgagagtgaccacttgttgtccgaaatgttgaacaaagagtattttgacagacaagggaaaaccccaat

SEQ ID NO: 1716 - DNA, 80 bp, synthetic construct
  misc_feature 1..80: note = Synthetic: >NC_010562.1-cand-1310-1389
  source 1..80: mol_type = other DNA
aacacttgttgacatctgcttttggagcacactgttcttcacaacaacattgtttctccatctagtaggcttcccaactc

SEQ ID NO: 1717 - DNA, 80 bp, synthetic construct
  misc_feature 1..80: note = Synthetic: >NC_010562.1-cand-1390-1469
  source 1..80: mol_type = other DNA
acagacacattcagggagaaccttgcccactgcctcacaagctcaacagcaatggtggatgcaggtgtggcagatatcca

SEQ ID NO: 1718 - DNA, 80 bp, synthetic construct
  misc_feature 1..80: note = Synthetic: >NC_010562.1-cand-1470-1549
  source 1..80: mol_type = other DNA
gaactcaagaaaccaacaacctggcacaggaaacactgaacttgagtggctcccaacccaccgtcccgggcatagcccgg

SEQ ID NO: 1719 - DNA, 80 bp, synthetic construct
  misc_feature 1..80: note = Synthetic: >NC_010562.1-cand-1550-1629
  source 1..80: mol_type = other DNA
gacggtgcggcctcccagtccgcggcaaatgccgcggactgggagggcatgggcctatatggcgaatgccggcttcattg

SEQ ID NO: 1720 - DNA, 80 bp, synthetic construct
  misc_feature 1..80: note = Synthetic: >NC_010562.1-cand-1630-1709
  source 1..80: mol_type = other DNA
taaacagcagcacttctggtagaagactctgcagtttgatctgtggtggctgcccatctatcaccgactggaacatcaga

SEQ ID NO: 1721 - DNA, 80 bp, synthetic construct
  misc_feature 1..80: note = Synthetic: >NC_010562.1-cand-1750-1829
  source 1..80: mol_type = other DNA
ggtctttgtcttttttcttttttggcaccacaaccccattgtgcttcttacagaggtggccgaaatcagaccagacctgc

SEQ ID NO: 1722 - DNA, 80 bp, synthetic construct
  misc_feature 1..80: note = Synthetic: >NC_010562.1-cand-1810-1889
  source 1..80: mol_type = other DNA
cgaaatcagaccagacctgctcctcatagtttctggcttgatcagaacttagtttcacatccacgaccttgagatctttg

SEQ ID NO: 1723 - DNA, 80 bp, synthetic construct
  misc_feature 1..80: note = Synthetic: >NC_010562.1-cand-1900-1979
  source 1..80: mol_type = other DNA
tgtctaaaagtcttttgatgtcatcagagccttgggcggttaggaccatgtcttgtggtaacaaccctatgatgtagcta

SEQ ID NO: 1724 - DNA, 80 bp, synthetic construct
  misc_feature 1..80: note = Synthetic: >NC_010562.1-cand-1990-2069
  source 1..80: mol_type = other DNA
gttgggccgattccaagtcctttagtagcattccatgtgaatgtctacttccattcttgaatcctttctcatcatgaggt

SEQ ID NO: 1725 - DNA, 80 bp, synthetic construct
  misc_feature 1..80: note = Synthetic: >NC_010562.1-cand-2070-2149
  source 1..80: mol_type = other DNA
tttctgtaacagagtatgtaattacctgattccggttgatataatgctagctcaacagggtcattgctggttccttcaat

SEQ ID NO: 1726 - DNA, 80 bp, synthetic construct
  misc_feature 1..80: note = Synthetic: >NC_010562.1-cand-2150-2229
  source 1..80: mol_type = other DNA
gtcaatccatgttgtgtgggaaggattaattttgctcatcgcctctctaacaactgactcttggatctctgtcagatgag

SEQ ID NO: 1727 - DNA, 80 bp, synthetic construct
  misc_feature 1..80: note = Synthetic: >NC_010563.1-cand-160-239
  source 1..80: mol_type = other DNA
agaaccaagtctgtatgggagacacaactgcagatgctgttggtttgcagacacaaacctagtcaattgttccaaccact

SEQ ID NO: 1728 - DNA, 80 bp, synthetic construct
  misc_feature 1..80: note = Synthetic: >NC_010563.1-cand-240-319
  source 1..80: mol_type = other DNA
acctttgccttaaatgtctgaacacaatgttaagaagatccaatctctgtgacatatgcggtgaagaacttcccacaaca

SEQ ID NO: 1729 - DNA, 80 bp, synthetic construct
  misc_feature 1..80: note = Synthetic: >NC_010563.1-cand-300-379
  source 1..80: mol_type = other DNA
gtgaagaacttcccacaacaatcattgttccagtggaaccatcagcaccactgcccggacaataaggcatcctcgaatgc

SEQ ID NO: 1730 - DNA, 80 bp, synthetic construct
  misc_feature 1..80: note = Synthetic: >NC_010563.1-cand-430-509
  source 1..80: mol_type = other DNA
gtggagcttactcgatctcctgaatacattggtctcttctgaagggccgacaggtgatgcctttcaaccttaggttacct

SEQ ID NO: 1731 - DNA, 80 bp, synthetic construct
  misc_feature 1..80: note = Synthetic: >NC_010563.1-cand-490-569
  source 1..80: mol_type = other DNA
ctttcaaccttaggttacctaggttgtcactgacaaccaaatcctgtaggtgcttactataagctacactgaaactagta

SEQ ID NO: 1732 - DNA, 80 bp, synthetic construct
  misc_feature 1..80: note = Synthetic: >NC_010563.1-cand-570-649
  source 1..80: mol_type = other DNA
aactctatccaactatccatttggcatagagactttaacaaagcagttctatgcaaatcataaatcatctcaaagtctgc

SEQ ID NO: 1733 - DNA, 80 bp, synthetic construct
  misc_feature 1..80: note = Synthetic: >NC_010563.1-cand-660-739
  source 1..80: mol_type = other DNA
tcaattgttttctttatggatttcaaatatggccagagattgcatagcaagttttcaatttctctgtctgtctccagtgc

SEQ ID NO: 1734 - DNA, 80 bp, synthetic construct
  misc_feature 1..80: note = Synthetic: >NC_010563.1-cand-740-819
  source 1..80: mol_type = other DNA
tccaagagctttcacaatggtatcaccaaaaatctccaccctcatgtatgatagcttctgattatcagccatgaaggcac

SEQ ID NO: 1735 - DNA, 80 bp, synthetic construct
  misc_feature 1..80: note = Synthetic: >NC_010563.1-cand-840-919
  source 1..80: mol_type = other DNA
ttttcctgttcttccggcccaactagaacgtaagagtatttgtccctcagttcatccaaaaagtttgagaagtccatgat

SEQ ID NO: 1736 - DNA, 80 bp, synthetic construct
  misc_feature 1..80: note = Synthetic: >NC_010563.1-cand-900-979
  source 1..80: mol_type = other DNA
aagtttgagaagtccatgatcacgcattctaacaatttaaaatcattggatgttgccaactcatgttctattaaaacttt

SEQ ID NO: 1737 - DNA, 80 bp, synthetic construct
  misc_feature 1..80: note = Synthetic: >NC_010563.1-cand-980-1059
  source 1..80: mol_type = other DNA
tgctaaattcacactctttgatccattaaagagaggcagtgtaggtatcattgagacaccatctagaaaaaggtggttgt

SEQ ID NO: 1738 - DNA, 80 bp, synthetic construct
  misc_feature 1..80: note = Synthetic: >NC_010563.1-cand-1060-1139
  source 1..80: mol_type = other DNA
ttccggcaccagaggcatacaaactcaaagattgtactggaatttttacctcttctcttaaatgttcactcagatttatt

SEQ ID NO: 1739 - DNA, 80 bp, synthetic construct
  misc_feature 1..80: note = Synthetic: >NC_010563.1-cand-1140-1219
  source 1..80: mol_type = other DNA
aaaagcagaatcctaaaagtgtacacaacttttcttgaaatgtcaaactttgttgatctcctctgatgaacgatctgaat

SEQ ID NO: 1740 - DNA, 80 bp, synthetic construct
  misc_feature 1..80: note = Synthetic: >NC_010563.1-cand-1220-1299
  source 1..80: mol_type = other DNA
gtttaaccccactttaacaaagtcttctccaagatccctgaaaaaatcagacaaatcctgcctcttaaactgtagtgctg

SEQ ID NO: 1741 - DNA, 80 bp, synthetic construct
  misc_feature 1..80: note = Synthetic: >NC_010563.1-cand-1300-1379
  source 1..80: mol_type = other DNA
ccaaatcttgacaagaatcaagggattctaagctgactacttcgtctaataaagttgaacaaacatagcccattgtcatg

SEQ ID NO: 1742 - DNA, 80 bp, synthetic construct
  misc_feature 1..80: note = Synthetic: >NC_010563.1-cand-1380-1459
  source 1..80: mol_type = other DNA
tcatccaaagtcatggccctctcaagattgtatgtcttaatagagagtgtgaagtctgtgagttcccccaattctatttg

SEQ ID NO: 1743 - DNA, 80 bp, synthetic construct
  misc_feature 1..80: note = Synthetic: >NC_014361.1-cand-3940-4019
  source 1..80: mol_type = other DNA
tttttatacaaatattcagctttttcattagttgtatatatcagaaaagatgataaagttttattactatagacagcatt

SEQ ID NO: 1744 - DNA, 80 bp, synthetic construct
  misc_feature 1..80: note = Synthetic: >NC_014361.1-cand-4010-4089
  source 1..80: mol_type = other DNA
agacagcattagaaagaaaaggccgcaacatatcaggaaaatcattagggacagagtcatacttagatttttttggcttt

SEQ ID NO: 1745 - DNA, 80 bp, synthetic construct
  misc_feature 1..80: note = Synthetic: >NC_014361.1-cand-4100-4179
  source 1..80: mol_type = other DNA
cagagaaggagctctgggtgcagccgggggagtcctctggtggggcagctcttcttcttcttgaattctcctcgctaaat

SEQ ID NO: 1746 - DNA, 80 bp, synthetic construct
  misc_feature 1..80: note = Synthetic: >NC_014361.1-cand-4210-4289
  source 1..80: mol_type = other DNA
gatctagattcatcagagggaatggtggattcatggcagaagagatctgggtcctgcatggtgtcaaacaagttgtccca

SEQ ID NO: 1747 - DNA, 80 bp, synthetic construct
  misc_feature 1..80: note = Synthetic: >NC_014361.1-cand-4240-4319
  source 1..80: mol_type = other DNA
tcatggcagaagagatctgggtcctgcatggtgtcaaacaagttgtcccattcttgattgaagctttcccaccagctggc

SEQ ID NO: 1748 - DNA, 80 bp, synthetic construct
  misc_feature 1..80: note = Synthetic: >NC_014361.1-cand-4340-4419
  source 1..80: mol_type = other DNA
gaggtatatctcttccatcctgggttggaacatcatgctaaaaggaaaaactaaattaatataggtacataacacctgca

SEQ ID NO: 1749 - DNA, 80 bp, synthetic construct
  misc_feature 1..80: note = Synthetic: >NC_014361.1-cand-4420-4499
  source 1..80: mol_type = other DNA
gtttccccaccttttacttaccccagttaaagccttgattaactctcagatagagattcaccaggtgaaagtcaacttct

SEQ ID NO: 1750 - DNA, 80 bp, synthetic construct
  misc_feature 1..80: note = Synthetic: >NC_014361.1-cand-4500-4579
  source 1..80: mol_type = other DNA
cctactatgcaactccaagcccaaagggaatccaagcaatataagtcttctccaaaccatgcacagtagcatttgtaaca

SEQ ID NO: 1751 - DNA, 80 bp, synthetic construct
  misc_feature 1..80: note = Synthetic: >NC_014361.1-cand-4580-4659
  source 1..80: mol_type = other DNA
aaagcattctccccaaactacacacttcttctggtgcatttgcttataaacatgatgttgaaggcctattttgcaggtta

SEQ ID NO: 1752 - DNA, 80 bp, synthetic construct
  misc_feature 1..80: note = Synthetic: >NC_014361.1-cand-4660-4739
  source 1..80: mol_type = other DNA
agcatttacactcttttaaagctttttctgcacactgaggccaatgtttaattacattctcatcatatttttttttccca

SEQ ID NO: 1753 - DNA, 80 bp, synthetic construct
  misc_feature 1..80: note = Synthetic: >NC_014361.1-cand-4740-4819
  source 1..80: mol_type = other DNA
aaatattccttcaaagatattaaatttgcctcccaataccatgagcctacctggctactgaagctagttggaaactcttg

SEQ ID NO: 1754 - DNA, 80 bp, synthetic construct
  misc_feature 1..80: note = Synthetic: >NC_014361.1-cand-4820-4899
  source 1..80: mol_type = other DNA
tcttgcattataaattccttcttgcagtttttgccataattgatttaatcttgacattttttctggatctcctcctttat

SEQ ID NO: 1755 - DNA, 80 bp, synthetic construct
  misc_feature 1..80: note = Synthetic: >NC_014361.1-cand-4900-4979
  source 1..80: mol_type = other DNA
ctggatggtatttcaagctcatttttttatgattaattttcattagtgcaaaattcccatagcaatgccttgggatttgc

SEQ ID NO: 1756 - DNA, 80 bp, synthetic construct
  misc_feature 1..80: note = Synthetic: >NC_014361.1-cand-4980-5059
  source 1..80: mol_type = other DNA
aataaatccataagttcaagactttcttctctacttaaaaacttatccattttgctgaatgcaccagaagacaggtaagg

SEQ ID NO: 1757 - DNA, 80 bp, synthetic construct
  misc_feature 1..80: note = Synthetic: >NC_014361.1-cand-5060-5139
  source 1..80: mol_type = other DNA
ggagaaatgaagaaatgaagatgggagctttttggagcccttttaaagcctctgtgtgcctcaattaattttcatcagat

SEQ ID NO: 1758 - DNA, 80 bp, synthetic construct
  misc_feature 1..80: note = Synthetic: >NC_014361.1-cand-5140-5219
  source 1..80: mol_type = other DNA
ttggcttacataaaagggaggaagtgccaagcctcaagaggcctccggaggcctctccctctatgtctgtgtcaagaggg

SEQ ID NO: 1759 - DNA, 80 bp, synthetic construct
  misc_feature 1..80: note = Synthetic: >NC_014397.1-cand-880-959
  source 1..80: mol_type = other DNA
gagattttcaaaaaacgctgaagagtgttccttggcagtagagagagccttaaatcagtatagagcagaagacaacctta

SEQ ID NO: 1760 - DNA, 80 bp, synthetic construct
  misc_feature 1..80: note = Synthetic: >NC_014397.1-cand-960-1039
  source 1..80: mol_type = other DNA
gggacctcaatgaccacaagtcaactattcagctgcctccctggctgtcctatcatgatgtcgatggcaaagatctgtgc

SEQ ID NO: 1761 - DNA, 80 bp, synthetic construct
  misc_feature 1..80: note = Synthetic: >NC_014397.1-cand-1070-1149
  source 1..80: mol_type = other DNA
catcccatgtgcaacttgtggagggaagtggtcacctctgcaaacctagaggagattgagaggatgcacgatgatgcagc

SEQ ID NO: 1762 - DNA, 80 bp, synthetic construct
  misc_feature 1..80: note = Synthetic: >NC_014397.1-cand-1120-1199
  source 1..80: mol_type = other DNA
ggagattgagaggatgcacgatgatgcagcagcagaacttgagtttgccctttcgggagtaaaggacaggccagatgaga

SEQ ID NO: 1763 - DNA, 80 bp, synthetic construct
  misc_feature 1..80: note = Synthetic: >NC_014397.1-cand-1200-1279
  source 1..80: mol_type = other DNA
gaaacagataccatagagtccacctaaatatgggctcagatgatagtgtctacatagctgctttaggagttaatggaaag

SEQ ID NO: 1764 - DNA, 80 bp, synthetic construct
  misc_feature 1..80: note = Synthetic: >NC_014397.1-cand-1280-1359
  source 1..80: mol_type = other DNA
aagcataaagcagacactttagtgcaacaaatgagagacaggagtaaacagcctttctccccagaccacgatgtggatca

SEQ ID NO: 1765 - DNA, 80 bp, synthetic construct
  misc_feature 1..80: note = Synthetic: >NC_014397.1-cand-1360-1439
  source 1..80: mol_type = other DNA
catatctgaatttctctctgcatgctctagtgacttgtgggcaacagatgaggacctgtacagccctctctcttgtgata

SEQ ID NO: 1766 - DNA, 80 bp, synthetic construct
  misc_feature 1..80: note = Synthetic: >NC_014397.1-cand-1410-1489
  source 1..80: mol_type = other DNA
aggacctgtacagccctctctcttgtgataaagagcttagattggcagcccagaggattcatcagccatccttgtcagaa

SEQ ID NO: 1767 - DNA, 80 bp, synthetic construct
  misc_feature 1..80: note = Synthetic: >NC_014397.1-cand-1520-1599
  source 1..80: mol_type = other DNA
tacaaattcatgggaagtaggataggttcatggtgccaaatggtcagcttgataggagctgagctatcagcttctgttaa

SEQ ID NO: 1768 - DNA, 80 bp, synthetic construct
  misc_feature 1..80: note = Synthetic: >NC_014397.1-cand-1600-1679
  source 1..80: mol_type = other DNA
acaacatgtcaagcctaactactttgtgattaaacgactactaggttctgggattttcttgctaatcaagcccacttcca

SEQ ID NO: 1769 - DNA, 80 bp, synthetic construct
  misc_feature 1..80: note = Synthetic: >NC_014397.1-cand-1680-1759
  source 1..80: mol_type = other DNA
gcaaaagccatatatttgtgtcttttgcaattaagcgctcttgctgggcctttgatctctccacttccagggttttcaag

SEQ ID NO: 1770 - DNA, 80 bp, synthetic construct
  misc_feature 1..80: note = Synthetic: >NC_014397.1-cand-1780-1859
  source 1..80: mol_type = other DNA
tctgttagttactgactttgtttcttataagctaagcaagcttaccaacctctgcaagtgcgtttcattaatggagtcct

SEQ ID NO: 1771 - DNA, 80 bp, synthetic construct
  misc_feature 1..80: note = Synthetic: >NC_014397.1-cand-1840-1919
  source 1..80: mol_type = other DNA
cgtttcattaatggagtcctccttctcattctgggcagaagcatttggaattccaagctggaactttgttggtgacttgt

SEQ ID NO: 1772 - DNA, 80 bp, synthetic construct
  misc_feature 1..80: note = Synthetic: >NC_014397.1-cand-1920-1999
  source 1..80: mol_type = other DNA
tcaggtcttcagactctgcagcaatggatgcctcatacatgggcaaactttctttattaacccttttggaagacaaagca

SEQ ID NO: 1773 - DNA, 80 bp, synthetic construct
  misc_feature 1..80: note = Synthetic: >NC_014397.1-cand-2000-2079
  source 1..80: mol_type = other DNA
gcaactgaagagttacagactattgcaagatatataatcatggagggctttgtctcgcccccagaaatcccaaaacctca

SEQ ID NO: 1774 - DNA, 80 bp, synthetic construct
  misc_feature 1..80: note = Synthetic: >NC_014397.1-cand-2080-2159
  source 1..80: mol_type = other DNA
caagatgacctctaagtttcctaaggttctcaggtcagagctgcaggtttacttattaaactgcttatgcagaactatcc

SEQ ID NO: 1775 - DNA, 80 bp, synthetic construct
  misc_feature 1..80: note = Synthetic: >NC_021543.1-cand-1070-1149
  source 1..80: mol_type = other DNA
atgaattacataccagcatttgctgaaattcgcaacaaaccaggaaaagtaaactatgcatatttgaatggtggatttgc

SEQ ID NO: 1776 - DNA, 80 bp, synthetic construct
  misc_feature 1..80: note = Synthetic: >NC_021543.1-cand-1150-1229
  source 1..80: mol_type = other DNA
tcaagtggacgcttctggttatactggaatggctattatattaaatttcgtatgcactggagagaaattttacgcgtcag

SEQ ID NO: 1777 - DNA, 80 bp, synthetic construct
  misc_feature 1..80: note = Synthetic: >NC_021543.1-cand-1230-1309
  source 1..80: mol_type = other DNA
ataataatacgagagtcgacgacaaaatcacacctttcatttcatatataggtgactattacactttgtctggtggagac

SEQ ID NO: 1778 - DNA, 80 bp, synthetic construct
  misc_feature 1..80: note = Synthetic: >NC_021543.1-cand-1310-1389
  source 1..80: mol_type = other DNA
ttttacagacaaggttgttgtgctggatttgctgctggttacgatgatgtatctccagaacatgatataactgtaagcta

SEQ ID NO: 1779 - DNA, 80 bp, synthetic construct
  misc_feature 1..80: note = Synthetic: >NC_021543.1-cand-1350-1429
  source 1..80: mol_type = other DNA
acgatgatgtatctccagaacatgatataactgtaagctacaccgtaatgaaaccttctgatccagattttgtaaccggg

SEQ ID NO: 1780 - DNA, 80 bp, synthetic construct
  misc_feature 1..80: note = Synthetic: >NC_021543.1-cand-1470-1549
  source 1..80: mol_type = other DNA
tgtctattaggaatctacaagatcaaataaattcaattatagctgaaatgaacattcaacaagtgtcgtcggcggttttt

SEQ ID NO: 1781 - DNA, 80 bp, synthetic construct
  misc_feature 1..80: note = Synthetic: >NC_021543.1-cand-1550-1629
  source 1..80: mol_type = other DNA
acggctataaccaatttaggtgagttacctggattgttttcaaatattacaaaagtgtttagcaaaacgaaggaagcatt

SEQ ID NO: 1782 - DNA, 80 bp, synthetic construct
  misc_feature 1..80: note = Synthetic: >NC_021543.1-cand-1640-1719
  source 1..80: mol_type = other DNA
gaatctagaaaaaaaacttcgccaatgccgatagcagccacttctataattgataaaactactgttgacgtgccaaattt

SEQ ID NO: 1783 - DNA, 80 bp, synthetic construct
  misc_feature 1..80: note = Synthetic: >NC_021543.1-cand-1720-1799
  source 1..80: mol_type = other DNA
gactatagttaataaaatgccagaagaatatgaattagggatcatttataattcaatgagaacgaaaaaattaattgaac

SEQ ID NO: 1784 - DNA, 80 bp, synthetic construct
  misc_feature 1..80: note = Synthetic: >NC_021543.1-cand-1810-1889
  source 1..80: mol_type = other DNA
tgatttcagtacgtttacaatagctactgaagtcaaacttccatacatatcaaaagctaccaacttttcagatcaattta

SEQ ID NO: 1785 - DNA, 80 bp, synthetic construct
  misc_feature 1..80: note = Synthetic: >NC_021543.1-cand-1890-1969
  source 1..80: mol_type = other DNA
tgacaagtataaactctagaggaataactatagggaaatcagatataattcaatatgacccaatgcataatattttttct

SEQ ID NO: 1786 - DNA, 80 bp, synthetic construct
  misc_feature 1..80: note = Synthetic: >NC_021543.1-cand-1970-2049
  source 1..80: mol_type = other DNA
gcgatgaatagaaaaaacgcacatatcatcaattataaaattgacccggatttagcgcacgaagtcctctcacagatgtc

SEQ ID NO: 1787 - DNA, 80 bp, synthetic construct
  misc_feature 1..80: note = Synthetic: >NC_021543.1-cand-2050-2129
  source 1..80: mol_type = other DNA
aacgaattcaacgcgatcattattttcgctaaacgtacgtaaacaactgcatgtaaataactcatttgacacaccgacct

SEQ ID NO: 1788 - DNA, 80 bp, synthetic construct
  misc_feature 1..80: note = Synthetic: >NC_021543.1-cand-2130-2209
  source 1..80: mol_type = other DNA
atggtcagttagttgagagaatattagatgatggtcaacttttggacatactaggaaaattaaatccaaattctgtcgag

SEQ ID NO: 1789 - DNA, 80 bp, synthetic construct
  misc_feature 1..80: note = Synthetic: >NC_021543.1-cand-2210-2289
  source 1..80: mol_type = other DNA
gaactgtttggcgaatttctacatcgaatacagcatcaactacgtgagtattgatagtagtacgcttatgttgcaaatac

SEQ ID NO: 1790 - DNA, 80 bp, synthetic construct
  misc_feature 1..80: note = Synthetic: >NC_021544.1-cand-120-199
  source 1..80: mol_type = other DNA
gcgtattaaatgattacaacgcactggcttctcgagtaaacgggaaaacgtatgcactgctgaatcagatagctgtttac

SEQ ID NO: 1791 - DNA, 80 bp, synthetic construct
  misc_feature 1..80: note = Synthetic: >NC_027026.1-cand-410-489
  source 1..80: mol_type = other DNA
cccttttggaccagctcaacacactggtcccccgtgacatcagtgaggctgaaagacgccgtcgagaattctttgagagg

SEQ ID NO: 1792 - DNA, 80 bp, synthetic construct
  misc_feature 1..80: note = Synthetic: >NC_027026.1-cand-490-569
  source 1..80: mol_type = other DNA
cagactgctgctgccttcgctgaactcccaaatgatgacacatttaccgaacaagattggaagtcctattggtatgcaat

SEQ ID NO: 1793 - DNA, 80 bp, synthetic construct
  misc_feature 1..80: note = Synthetic: >NC_027026.1-cand-570-649
  source 1..80: mol_type = other DNA
gtggcggcgagttgtgggtggttgcaaatcatactaccatggtctgccccgttggagctctttcaagacacggctctcgc

SEQ ID NO: 1794 - DNA, 80 bp, synthetic construct
  misc_feature 1..80: note = Synthetic: >NC_027026.1-cand-650-729
  source 1..80: mol_type = other DNA
gtgccacagagcccctccgccaggtgttagcagttgctgcacagacctttgatcaatgtgtacaaactgaccctcgcatc

SEQ ID NO: 1795 - DNA, 80 bp, synthetic construct
  misc_feature 1..80: note = Synthetic: >NC_027026.1-cand-730-809
  source 1..80: mol_type = other DNA
ttggctatgaattgtgtgactgccttgaaacccactgttttaaccatgatataccagcaacatcacaacacacccagtgg

SEQ ID NO: 1796 - DNA, 80 bp, synthetic construct
  misc_feature 1..80: note = Synthetic: >NC_027026.1-cand-810-889
  source 1..80: mol_type = other DNA
gtggcttgcaacccttacggccctctgggaggttttccaaccttccctccctgcattaggcactttaggtactggtgttg

SEQ ID NO: 1797 - DNA, 80 bp, synthetic construct
  misc_feature 1..80: note = Synthetic: >NC_027026.1-cand-910-989
  source 1..80: mol_type = other DNA
gtcaacaccttgtcacggttcttccagaaactttgtgcttacatttctgaaacatttcttcccgaatctccaacaacccc

SEQ ID NO: 1798 - DNA, 80 bp, synthetic construct
  misc_feature 1..80: note = Synthetic: >NC_027026.1-cand-970-1049
  source 1..80: mol_type = other DNA
cccgaatctccaacaaccccaggctgggttgccattgtggctggtgttctgctgttacttttgaaactctcctgcatccc

SEQ ID NO: 1799 - DNA, 80 bp, synthetic construct
  misc_feature 1..80: note = Synthetic: >NC_027026.1-cand-1050-1129
  source 1..80: mol_type = other DNA
caaagtgttttcccactggagcacgcttctcaagttggccagtggtatcacaacagtcattggagcaacacgagccgtgg

SEQ ID NO: 1800 - DNA, 80 bp, synthetic construct
  misc_feature 1..80: note = Synthetic: >NC_027026.1-cand-1150-1229
  source 1..80: mol_type = other DNA
cgcgacgcgcgccattcttccatgtgtaaacagttccttagccgtgtgtctgcactgttggagctccactactcaaagac

SEQ ID NO: 1801 - DNA, 80 bp, synthetic construct
  misc_feature 1..80: note = Synthetic: >NC_027026.1-cand-1210-1289
  source 1..80: mol_type = other DNA
gagctccactactcaaagactgtcacaggtgttgcagagaacacagagctcctcaagtgtttcgaccagctcattgatga

SEQ ID NO: 1802 - DNA, 80 bp, synthetic construct
  misc_feature 1..80: note = Synthetic: >NC_027026.1-cand-1290-1369
  source 1..80: mol_type = other DNA
aggagaagaattggtctctgaaataggaggtggttctttagccgcaataatacgcagtggtgttgacacactccagaggg

SEQ ID NO: 1803 - DNA, 80 bp, synthetic construct
  misc_feature 1..80: note = Synthetic: >NC_027026.1-cand-1370-1449
  source 1..80: mol_type = other DNA
tttccacagaaatcaaagccacaatccaactggacaacccgcgtccagtgcccgtatgtgtgatattctccggacctcca

SEQ ID NO: 1804 - DNA, 80 bp, synthetic construct
  misc_feature 1..80: note = Synthetic: >NC_027026.1-cand-1450-1529
  source 1..80: mol_type = other DNA
ggtattggaaaaacctctttagcataccacatggccaagggcattggtctcacctccaacttttctttggcaaacgatca

SEQ ID NO: 1805 - DNA, 80 bp, synthetic construct
  misc_feature 1..80: note = Synthetic: >NC_027026.1-cand-1530-1609
  source 1..80: mol_type = other DNA
tcatgatggatatacaggtaaccctgtagctatatgggatgaatatgatactgacaaggatggcaaatttgtggagcaga

SEQ ID NO: 1806 - DNA, 80 bp, synthetic construct
  misc_feature 1..80: note = Synthetic: >NC_027026.1-cand-1610-1689
  source 1..80: mol_type = other DNA
tgatatccctggtcaacacacagccttgtgtcctcaattgtgaccgaccagaaaataagggcaagctttttacatccaag

SEQ ID NO: 1807 - DNA, 80 bp, synthetic construct
  misc_feature 1..80: note = Synthetic: >NC_027026.1-cand-6870-6949
  source 1..80: mol_type = other DNA
tggcccacatgggaattctggacgggcccagatagcatggtcatgagctggttggtaggcactttgcaatctcttggtgg

SEQ ID NO: 1808 - DNA, 80 bp, synthetic construct
  misc_feature 1..80: note = Synthetic: >NC_027026.1-cand-6950-7029
  source 1..80: mol_type = other DNA
gctcactgacgttgcgtccaccatttctggcatggtttatcaacatagacatcttgaccaactgaaaagacagaatgatc

SEQ ID NO: 1809 - DNA, 80 bp, synthetic construct
  misc_feature 1..80: note = Synthetic: >NC_027026.1-cand-7030-7109
  source 1..80: mol_type = other DNA
tacaagaacagtggatggcccgcaatgaacaactgcagcgagatgcaatgcaattaactcaggatttggcagtcaatgcc

SEQ ID NO: 1810 - DNA, 80 bp, synthetic construct
  misc_feature 1..80: note = Synthetic: >NC_027026.1-cand-7110-7189
  source 1..80: mol_type = other DNA
ccagcgatgagagtgcaggccgctctcaatgctgggtttgatgtggttagtgcgcgccagcttgccggttcaactgagcg

SEQ ID NO: 1811 - DNA, 80 bp, synthetic construct
  misc_feature 1..80: note = Synthetic: >NC_027026.1-cand-7170-7249
  source 1..80: mol_type = other DNA
cttgccggttcaactgagcgaaggatcaacggctatttggatcagccaattcgcactattgatcaggcaatggcagtgca

SEQ ID NO: 1812 - DNA, 80 bp, synthetic construct
  misc_feature 1..80: note = Synthetic: >NC_027026.1-cand-7270-7349
  source 1..80: mol_type = other DNA
cgttgtcgaacgcccttgccacttaccaaaaaggcactcaatttggactcaaacaacccaaaggatttaagagcccaatt

SEQ ID NO: 1813 - DNA, 80 bp, synthetic construct
  misc_feature 1..80: note = Synthetic: >NC_027026.1-cand-7350-7429
  source 1..80: mol_type = other DNA
gctgctgaacaatctcgtggtccaaccattacacttggccctcccccaccatctactaatctataaatcaatcttttata

SEQ ID NO: 1814 - DNA, 80 bp, synthetic construct
  misc_feature 1..80: note = Synthetic: >NC_027026.1-cand-7430-7509
  source 1..80: mol_type = other DNA
aatttgtgcaaatttctttttcttcctcatggtcgcacacgcgttcgggtgcgttgcagtcaattaagcgattgacgcca

SEQ ID NO: 1815 - DNA, 80 bp, synthetic construct
  misc_feature 1..80: note = Synthetic: >NC_029646.1-cand-0-79
  source 1..80: mol_type = other DNA
atgaagatggcgtctaacgacgcttccgctgccgctgctgctaacagcaacaacgacaccgcaaaatcttcaagtgacgg

SEQ ID NO: 1816 - DNA, 80 bp, synthetic construct
  misc_feature 1..80: note = Synthetic: >NC_029646.1-cand-40-119
  source 1..80: mol_type = other DNA
ctaacagcaacaacgacaccgcaaaatcttcaagtgacggaatgctttctagtatggctgtcacatttaaacgagccctc

SEQ ID NO: 1817 - DNA, 80 bp, synthetic construct
  misc_feature 1..80: note = Synthetic: >NC_029646.1-cand-140-219
  source 1..80: mol_type = other DNA
tcccccgagggaaataccacaaagacccccacgaccacccaccccagaactggtcaaaaagatccctcctcctccaccca

SEQ ID NO: 1818 - DNA, 80 bp, synthetic construct
  misc_feature 1..80: note = Synthetic: >NC_029646.1-cand-240-319
  source 1..80: mol_type = other DNA
gtttcttacagcgtcaaagatggcgtttccggcttgcctgagcttaccactgtcaggcagccgggtgaaaccaacacggc

SEQ ID NO: 1819 - DNA, 80 bp, synthetic construct
  misc_feature 1..80: note = Synthetic: >NC_029646.1-cand-320-399
  source 1..80: mol_type = other DNA
gttcagtgttcccccactcaatcaaagggagaatagggacgccaaggagccactaactggaacaatcctggaaatgtggg

SEQ ID NO: 1820 - DNA, 80 bp, synthetic construct
  misc_feature 1..80: note = Synthetic: >NC_029646.1-cand-410-489
  source 1..80: mol_type = other DNA
ctaccattacggcctgtatgtggaacgaggtcttgtacttggtgtgcacaaaccaccggctgccatcagcctcgccaagg

SEQ ID NO: 1821 - DNA, 80 bp, synthetic construct
  misc_feature 1..80: note = Synthetic: >NC_029646.1-cand-490-569
  source 1..80: mol_type = other DNA
ttgaactaacaccactctctctgttttggagaccagtgtatacaccacagtatctcatctctccggacactctcaggaga

SEQ ID NO: 1822 - DNA, 80 bp, synthetic construct
  misc_feature 1..80: note = Synthetic: >NC_029646.1-cand-580-659
  source 1..80: mol_type = other DNA
agtcgtttccctacacagcctttgataacaactgctatgccttctgttgttgggtcctggacctaaacgactcgtggttg

SEQ ID NO: 1823 - DNA, 80 bp, synthetic construct
  misc_feature 1..80: note = Synthetic: >NC_034563.1-cand-1610-1689
  source 1..80: mol_type = other DNA
caaagatgaatttgagaagacaaagggttcaatggtttgtgaggtctgtaagtacgaatgtgaaacatcaaaagaactga

SEQ ID NO: 1824 - DNA, 80 bp, synthetic construct
  misc_feature 1..80: note = Synthetic: >NC_034563.1-cand-1690-1769
  source 1..80: mol_type = other DNA
aagcgcataatctttcctgtccacaggctgaatgcccttattgttttacacattgtgaacctactgaagcaacctttcaa

SEQ ID NO: 1825 - DNA, 80 bp, synthetic construct
  misc_feature 1..80: note = Synthetic: >NC_034563.1-cand-1770-1849
  source 1..80: mol_type = other DNA
gcacactataaaatatgtcaagcaactcatagatttagagaggatttaaaaaagacaatcacaccacaaacaatcggccc

SEQ ID NO: 1826 - DNA, 80 bp, synthetic construct
  misc_feature 1..80: note = Synthetic: >NC_034563.1-cand-1850-1929
  source 1..80: mol_type = other DNA
tgggtgttaccgaacactcaatttgttcaggtataaaagtcgctgttatattctaaccatgtggctatttcttctgatag

SEQ ID NO: 1827 - DNA, 80 bp, synthetic construct
  misc_feature 1..80: note = Synthetic: >NC_034563.1-cand-1930-2009
  source 1..80: mol_type = other DNA
tagagtctgtaatgtgggctgcaagtgcagtagaaatcccattagtcccactctggacagacaatgcacatggtattggt

SEQ ID NO: 1828 - DNA, 80 bp, synthetic construct
  misc_feature 1..80: note = Synthetic: >NC_034563.1-cand-2020-2099
  source 1..80: mol_type = other DNA
tgcacactgatttagaactggatttttccctcccatcaagctcaaaatacacatacaagaggaagcttaccaatccaata

SEQ ID NO: 1829 - DNA, 80 bp, synthetic construct
  misc_feature 1..80: note = Synthetic: >NC_034563.1-cand-2100-2179
  source 1..80: mol_type = other DNA
aatgtcgaacagggagttcaggtacatattgagattgaagaacagggaataggtgctgatgttcacaatttgggtcattg

SEQ ID NO: 1830 - DNA, 80 bp, synthetic construct
  misc_feature 1..80: note = Synthetic: >NC_034563.1-cand-2180-2259
  source 1..80: mol_type = other DNA
gtttgatgcccgattgaaccttaaaacctcattccattgttatggagcttgttcaaagtaccaatatccttggcatacag

SEQ ID NO: 1831 - DNA, 80 bp, synthetic construct
  misc_feature 1..80: note = Synthetic: >NC_034563.1-cand-2250-2329
  source 1..80: mol_type = other DNA
tggcatacagccaagtgccactttgaaaaagattatgaatatgaaaatagttgggcttgtaaccctgcagactgcccggg

SEQ ID NO: 1832 - DNA, 80 bp, synthetic construct
  misc_feature 1..80: note = Synthetic: >NC_034563.1-cand-2350-2429
  source 1..80: mol_type = other DNA
cttgtggcctatacctcgatcagatgaaacctattggaacagcatataagctagtggcaatcagatatagtagaaaagta

SEQ ID NO: 1833 - DNA, 80 bp, synthetic construct
  misc_feature 1..80: note = Synthetic: >NC_034563.1-cand-2450-2529
  source 1..80: mol_type = other DNA
gaatctatgtaaaacaattgatatgaatgattgcttcgttacaaggcatgtcaaagtctgtattattgggactgtgtcta

SEQ ID NO: 1834 - DNA, 80 bp, synthetic construct
  misc_feature 1..80: note = Synthetic: >NC_034563.1-cand-2510-2589
  source 1..80: mol_type = other DNA
tattattgggactgtgtctaaattcatccagggagacacactattatttctgggtccattggagggaggtggtttgattt

SEQ ID NO: 1835 - DNA, 80 bp, synthetic construct
  misc_feature 1..80: note = Synthetic: >NC_034563.1-cand-2590-2669
  source 1..80: mol_type = other DNA
tcaaacactggtgcacatccacatgtcagtttggtgatccaggtgacattatgagtccaaaagataaaccctttttatgt

SEQ ID NO: 1836 - DNA, 80 bp, synthetic construct
  misc_feature 1..80: note = Synthetic: >NC_034563.1-cand-2670-2749
  source 1..80: mol_type = other DNA
cctgaatttccaggtcagtttagaaaaaaatgcaattttgccacaacacctgtgtgtgaatacagtggaaatcaaatttc

SEQ ID NO: 1837 - DNA, 80 bp, synthetic construct
  misc_feature 1..80: note = Synthetic: >NC_034563.1-cand-2710-2789
  source 1..80: mol_type = other DNA
ccacaacacctgtgtgtgaatacagtggaaatcaaatttctggttataaaaaaatgatggcaactattgattcattccag

SEQ ID NO: 1838 - DNA, 80 bp, synthetic construct
  misc_feature 1..80: note = Synthetic: >NC_034563.1-cand-2800-2879
  source 1..80: mol_type = other DNA
ccagcagtatacattttacagatgaacggattgaatggaaggatccagatggaatgcttcgtgaccatataaatatagtt

SEQ ID NO: 1839 - DNA, 80 bp, synthetic construct
  misc_feature 1..80: note = Synthetic: >NC_039218.1-cand-6500-6579
  source 1..80: mol_type = other DNA
gttgctgttttaggagtggccactcttggcatactctggtgctttgtggcaagaacttcggtcagccgcatgttcctggg

SEQ ID NO: 1840 - DNA, 80 bp, synthetic construct
  misc_feature 1..80: note = Synthetic: >NC_039218.1-cand-6590-6669
  source 1..80: mol_type = other DNA
ctctttgctgccctctttctgctgtggattggtggagtggactatggacacatggcagggatagccctgatattttacac

SEQ ID NO: 1841 - DNA, 80 bp, synthetic construct
  misc_feature 1..80: note = Synthetic: >NC_039218.1-cand-6660-6739
  source 1..80: mol_type = other DNA
tattttacaccctcctcactgtgctgcagccagagccgggaaaacagcgaagtagcgatgacaacagactggcatacttc

SEQ ID NO: 1842 - DNA, 80 bp, synthetic construct
  misc_feature 1..80: note = Synthetic: >NC_039218.1-cand-6750-6829
  source 1..80: mol_type = other DNA
tttttagtttggctggactcgtgacggccaacgaaatgggcatgttggacaagacaaaggctgaccttgcagggctggtg

SEQ ID NO: 1843 - DNA, 80 bp, synthetic construct
  misc_feature 1..80: note = Synthetic: >NC_039218.1-cand-6820-6899
  source 1..80: mol_type = other DNA
agggctggtgtggcgcggagagcagaggcatccagcctgggaggagtggacaaatgtggacatccaaccagcacgatctt

SEQ ID NO: 1844 - DNA, 80 bp, synthetic construct
  misc_feature 1..80: note = Synthetic: >NC_039218.1-cand-6910-6989
  source 1..80: mol_type = other DNA
tgtgctgatcgtctctctgttcactccctacatgctgcaccagcttcagacaaaaatacaacaactggtgaacagttcag

SEQ ID NO: 1845 - DNA, 80 bp, synthetic construct
  misc_feature 1..80: note = Synthetic: >NC_039218.1-cand-6940-7019
  source 1..80: mol_type = other DNA
catgctgcaccagcttcagacaaaaatacaacaactggtgaacagttcagtggcaagtggtgctcaggctatgagagatc

SEQ ID NO: 1846 - DNA, 80 bp, synthetic construct
  misc_feature 1..80: note = Synthetic: >NC_039218.1-cand-7120-7199
  source 1..80: mol_type = other DNA
ggctttggctgctttccacttggccatcgtcgcctcgggattggaagcagagctgacgcagagggcgcacagggtattct

SEQ ID NO: 1847 - DNA, 80 bp, synthetic construct
  misc_feature 1..80: note = Synthetic: >NC_039218.1-cand-7150-7229
  source 1..80: mol_type = other DNA
cgcctcgggattggaagcagagctgacgcagagggcgcacagggtattcttctcggcaatggttaaaaacccaatggtgg

SEQ ID NO: 1848 - DNA, 80 bp, synthetic construct
  misc_feature 1..80: note = Synthetic: >NC_039218.1-cand-7230-7309
  source 1..80: mol_type = other DNA
atggagacgtcatcaatcccttccccgatggagagacaaagccagcgctatacgagagaaggatgagtttaatcctggcc

SEQ ID NO: 1849 - DNA, 80 bp, synthetic construct
  misc_feature 1..80: note = Synthetic: >NC_039218.1-cand-7290-7369
  source 1..80: mol_type = other DNA
ggatgagtttaatcctggccattgccttgtgcatgggttcagtggtcctcaaccgaaccgcggcctcaatgaccgaggct

SEQ ID NO: 1850 - DNA, 80 bp, synthetic construct
  misc_feature 1..80: note = Synthetic: >NC_039218.1-cand-7390-7469
  source 1..80: mol_type = other DNA
gctgggtcagctggtccatcccgagactgagacactctggacaatgccaatggcgtgtggtatggcggggctcgtgcggg

SEQ ID NO: 1851 - DNA, 80 bp, synthetic construct
  misc_feature 1..80: note = Synthetic: >NC_039218.1-cand-7480-7559
  source 1..80: mol_type = other DNA
gggcctgttgcccatgggacaccgactgtggcttaggacaactggaacacgcagaggaggtgccgagggagagactcttg

SEQ ID NO: 1852 - DNA, 80 bp, synthetic construct
  misc_feature 1..80: note = Synthetic: >NC_039218.1-cand-7560-7639
  source 1..80: mol_type = other DNA
gggacatctggaagaggcggctgaatggttgctctagggaggagttttttcagtaccggcgaagtggagtcatggagacg

SEQ ID NO: 1853 - DNA, 80 bp, synthetic construct
  misc_feature 1..80: note = Synthetic: >NC_039218.1-cand-7630-7709
  source 1..80: mol_type = other DNA
catggagacggaacgtgacaaggctcgagagcttctgaagagaggtgagacaaacatgggactggctgtctctcgaggga

SEQ ID NO: 1854 - DNA, 80 bp, synthetic construct
  misc_feature 1..80: note = Synthetic: >NC_039218.1-cand-7740-7819
  source 1..80: mol_type = other DNA
gctatgcgaccttgaaaggtgaggttgttgatctcggctgtggcagaggcgggtggtcatactacgctgcttccaggcca

SEQ ID NO: 1855 - DNA, 80 bp, synthetic construct
  misc_feature 1..80: note = Synthetic: >NC_044853.1-cand-3410-3489
  source 1..80: mol_type = other DNA
ccaattgataccattgccatccaccgcgcaggtgaattcacgcagcttagattctccaggaaagtgcgacctgacttaac

SEQ ID NO: 1856 - DNA, 80 bp, synthetic construct
  misc_feature 1..80: note = Synthetic: >NC_044853.1-cand-3490-3569
  source 1..80: mol_type = other DNA
cgggatggtcttagaagagggttgccctgaaggagttgtctgttccatcttaataaaaagagactccggtgagctccttc

SEQ ID NO: 1857 - DNA, 80 bp, synthetic construct
  misc_feature 1..80: note = Synthetic: >NC_044853.1-cand-3570-3649
  source 1..80: mol_type = other DNA
cccttgctgttcgtatgggtgctatagcatcaatgaagattcaagggcgactggttcatggccaatcagggatgttacta

SEQ ID NO: 1858 - DNA, 80 bp, synthetic construct
  misc_feature 1..80: note = Synthetic: >NC_044853.1-cand-3650-3729
  source 1..80: mol_type = other DNA
actggagccaatgccaaagggatggatctaggaaccctgcccggagattgcggtgccccatacgtctacaaaaggaacaa

SEQ ID NO: 1859 - DNA, 80 bp, synthetic construct
  misc_feature 1..80: note = Synthetic: >NC_044853.1-cand-3660-3739
  source 1..80: mol_type = other DNA
atgccaaagggatggatctaggaaccctgcccggagattgcggtgccccatacgtctacaaaaggaacaatgactgggtt

SEQ ID NO: 1860 - DNA, 80 bp, synthetic construct
  misc_feature 1..80: note = Synthetic: >NC_044853.1-cand-3810-3889
  source 1..80: mol_type = other DNA
gagagactactctagagggtggtgataaagggcattatgctggccatgagatagtcaagcacagcaacgggcctgctcta

SEQ ID NO: 1861 - DNA, 80 bp, synthetic construct
  misc_feature 1..80: note = Synthetic: >NC_044853.1-cand-3860-3939
  source 1..80: mol_type = other DNA
atagtcaagcacagcaacgggcctgctctatccagcaagactaagttttggagatcgacaactgaaccactcccacctgg

SEQ ID NO: 1862 - DNA, 80 bp, synthetic construct
  misc_feature 1..80: note = Synthetic: >NC_044853.1-cand-3970-4049
  source 1..80: mol_type = other DNA
cgaccctagggtaaagggcggcccttcactccaacaagtcctacgggatcaactcaaaccattcgctgagccccgtggac

SEQ ID NO: 1863 - DNA, 80 bp, synthetic construct
  misc_feature 1..80: note = Synthetic: >NC_044853.1-cand-4050-4129
  source 1..80: mol_type = other DNA
gcatgcctgagcctggtttgctggaagcggccgttgagactgttacatcaatgttagaacagactatggacacgccggtc

SEQ ID NO: 1864 - DNA, 80 bp, synthetic construct
  misc_feature 1..80: note = Synthetic: >NC_044853.1-cand-4130-4209
  source 1..80: mol_type = other DNA
ccatggacatatgctgatgcttgccagtcactagacaaaactactagttcaggacatccatatcacaagaggaagaatga

SEQ ID NO: 1865 - DNA, 80 bp, synthetic construct
  misc_feature 1..80: note = Synthetic: >NC_044853.1-cand-4150-4229
  source 1..80: mol_type = other DNA
ttgccagtcactagacaaaactactagttcaggacatccatatcacaagaggaagaatgatgattggaatggcaccacct

SEQ ID NO: 1866 - DNA, 80 bp, synthetic construct
  misc_feature 1..80: note = Synthetic: >NC_044853.1-cand-4290-4369
  source 1..80: mol_type = other DNA
ccatgaagccactctacacggcagcattgaaggatgagctagttaagcctgagaaggtctatcagaagattaagaagcga

SEQ ID NO: 1867 - DNA, 80 bp, synthetic construct
  misc_feature 1..80: note = Synthetic: >NC_044853.1-cand-4380-4459
  source 1..80: mol_type = other DNA
gtgctgacttatccacagtgattagggcggcgagagcttttggccccttttgtgatgccataaaatcccatgtcatcaag

SEQ ID NO: 1868 - DNA, 80 bp, synthetic construct
  misc_feature 1..80: note = Synthetic: >NC_044853.1-cand-4450-4529
  source 1..80: mol_type = other DNA
tgtcatcaagctccctattaaggttggcatgaactctattgaggatggccccctgatttatgctgagcattcaagatata

SEQ ID NO: 1869 - DNA, 80 bp, synthetic construct
  misc_feature 1..80: note = Synthetic: >NC_044853.1-cand-4530-4609
  source 1..80: mol_type = other DNA
aaaaccactttgatgctgactattcggcctgggattccactcaaaatagacaaatcatgactgagtccttctctataatg

SEQ ID NO: 1870 - DNA, 80 bp, synthetic construct
  misc_feature 1..80: note = Synthetic: >NC_044853.1-cand-4610-4689
  source 1..80: mol_type = other DNA
tgccggctcaccgcatcacccgagttggcgtccgtagtggctaaggacctcctcgctccttccgaaatggatgtgggtga

SEQ ID NO: 1871 - DNA, 80 bp, synthetic construct
  misc_feature 1..80: note = Synthetic: >NC_044856.1-cand-1540-1619
  source 1..80: mol_type = other DNA
aggagaaggcccgaaaactctcagtccgcagtgctgacccgcacatagtgacttctgttaacaacttgatatcacgcatt

SEQ ID NO: 1872 - DNA, 80 bp, synthetic construct
  misc_feature 1..80: note = Synthetic: >NC_044856.1-cand-1620-1699
  source 1..80: mol_type = other DNA
tcaatggcaaggtcagcgctagctaaggcccaagctgagatgacttctcgcccccgaccagtggttataatgatgtgtgg

SEQ ID NO: 1873 - DNA, 80 bp, synthetic construct
  misc_feature 1..80: note = Synthetic: >NC_044856.1-cand-1690-1769
  source 1..80: mol_type = other DNA
tgatgtgtggaccccctggcattgggaagacaaaggccgccgagcatctagcaggccgcctagctgccgagattaggcct

SEQ ID NO: 1874 - DNA, 80 bp, synthetic construct
  misc_feature 1..80: note = Synthetic: >NC_044856.1-cand-1780-1859
  source 1..80: mol_type = other DNA
ttggccttgtacctagagaatccatagaccactgggatggataccatggcgaggatgtcctgctctgggatgactatggt

SEQ ID NO: 1875 - DNA, 80 bp, synthetic construct
  misc_feature 1..80: note = Synthetic: >NC_044856.1-cand-1860-1939
  source 1..80: mol_type = other DNA
atgtcaaagataacagaagattgcaacaaattgcaggctatagctgacaccgccccgttgtcactcaactgtgataggat

SEQ ID NO: 1876 - DNA, 80 bp, synthetic construct
  misc_feature 1..80: note = Synthetic: >NC_044856.1-cand-1940-2019
  source 1..80: mol_type = other DNA
agaaaacaagggtatgcagttctcatctgatgcaatcattattaccaccaatgcccctggcccggccccagttgactttg

SEQ ID NO: 1877 - DNA, 80 bp, synthetic construct
  misc_feature 1..80: note = Synthetic: >NC_044856.1-cand-2020-2099
  source 1..80: mol_type = other DNA
ttaatttgggtcccgtgtgtaggcgagtggactttttagtctattgctctgcccctgagattgaacagatgcgaagaacc

SEQ ID NO: 1878 - DNA, 80 bp, synthetic construct
  misc_feature 1..80: note = Synthetic: >NC_044856.1-cand-2110-2189
  source 1..80: mol_type = other DNA
atgccagcgccatcaaggacttgtacaagagggattacacccacctaaaaatggaactagccccacagggcggctttgac

SEQ ID NO: 1879 - DNA, 80 bp, synthetic construct
  misc_feature 1..80: note = Synthetic: >NC_044856.1-cand-2190-2269
  source 1..80: mol_type = other DNA
aatcagggcaatacaccatttgggaaaggtgttatgaagcccacgaccctcaacagactgttaatccaggctacagcact

SEQ ID NO: 1880 - DNA, 80 bp, synthetic construct
  misc_feature 1..80: note = Synthetic: >NC_044856.1-cand-2220-2299
  source 1..80: mol_type = other DNA
gttatgaagcccacgaccctcaacagactgttaatccaggctacagcactagccatggagcggcaggatgagtttcagct

SEQ ID NO: 1881 - DNA, 80 bp, synthetic construct
  misc_feature 1..80: note = Synthetic: >NC_044856.1-cand-2380-2459
  source 1..80: mol_type = other DNA
taagcatggccacactaggtaaaaggttaaggactgttaagaccatggaagggctacgcaatgcactggtgggttacaaa

SEQ ID NO: 1882 - DNA, 80 bp, synthetic construct
  misc_feature 1..80: note = Synthetic: >NC_044856.1-cand-2430-2509
  source 1..80: mol_type = other DNA
gggctacgcaatgcactggtgggttacaaaatagaggagtgtgacataatttggaataccagagcatattcaatcaagag

SEQ ID NO: 1883 - DNA, 80 bp, synthetic construct
  misc_feature 1..80: note = Synthetic: >NC_044856.1-cand-2510-2589
  source 1..80: mol_type = other DNA
tgacgggaacactgtcacgatcaaggagaaacaggccccaacctcaccccaacaccaagctatctgtacggccaccctcg

SEQ ID NO: 1884 - DNA, 80 bp, synthetic construct
  misc_feature 1..80: note = Synthetic: >NC_044856.1-cand-2590-2669
  source 1..80: mol_type = other DNA
ccctttccaggctgcgggctgctagggcccttgcatatgcctcctgcttacaaagtgcagtgctgtcaatactccaagtg

SEQ ID NO: 1885 - DNA, 80 bp, synthetic construct
  misc_feature 1..80: note = Synthetic: >NC_044856.1-cand-2670-2749
  source 1..80: mol_type = other DNA
gcaggttccgctgtggtggtaagcagggctgtgaaacgcatgtttggcacacgcactgaccaacctgtactggaaggcaa

SEQ ID NO: 1886 - DNA, 80 bp, synthetic construct
  misc_feature 1..80: note = Synthetic: >NC_044856.1-cand-2750-2829
  source 1..80: mol_type = other DNA
gcacaaggagcatagttgcagggtgcatcgagcagaagctgctggacacggtcctattggccatgatggagtcatcgagc

SEQ ID NO: 1887 - DNA, 80 bp, synthetic construct
  misc_feature 1..80: note = Synthetic: >U31794.1-cand-3180-3259
  source 1..80: mol_type = other DNA
gattacagaggcatatattatatgcatgatggccacaaaacatattacacagactttgaacaggaggccaaaaaatatgg

SEQ ID NO: 1888 - DNA, 80 bp, synthetic construct
  misc_feature 1..80: note = Synthetic: >U31794.1-cand-3250-3329
  source 1..80: mol_type = other DNA
aaaaatatgggtgtacaaacatatgggaagtacatatggaaaccgagagtatttactgtcctgactctgtgtctagtacc

SEQ ID NO: 1889 - DNA, 80 bp, synthetic construct
  misc_feature 1..80: note = Synthetic: >U31794.1-cand-3330-3409
  source 1..80: mol_type = other DNA
tgtagatacaacgtaccccctgttgagactgttaacgaatacaacaaccacaggaccaccaccaccgcctccacctttgt

SEQ ID NO: 1890 - DNA, 80 bp, synthetic construct
  misc_feature 1..80: note = Synthetic: >U31794.1-cand-3410-3489
  source 1..80: mol_type = other DNA
gggcgcccaagacgccgcggtatcccacagaccaggaaaacgacccagagcaagtgaatcagaacctgactcctccagag

SEQ ID NO: 1891 - DNA, 80 bp, synthetic construct
  misc_feature 1..80: note = Synthetic: >U31794.1-cand-3490-3569
  source 1..80: mol_type = other DNA
agtcctacgcacactgtgtcacaacagacacagacatcagtaacaacgccaacagtagaagtccacgtatcaacacacaa

SEQ ID NO: 1892 - DNA, 80 bp, synthetic construct
  misc_feature 1..80: note = Synthetic: >U31794.1-cand-3570-3649
  source 1..80: mol_type = other DNA
agccactgtggtgataaaactacgcctgtaatccatttaaaaggtgaagctaatagattaaagtgttgtagatacagatt

SEQ ID NO: 1893 - DNA, 80 bp, synthetic construct
  misc_feature 1..80: note = Synthetic: >U31794.1-cand-3650-3729
  source 1..80: mol_type = other DNA
tcaaaaatataaaacattatttacagatgtaacaacaacatatcattggacaagtacagataataaagacagtagtatta

SEQ ID NO: 1894 - DNA, 80 bp, synthetic construct
  misc_feature 1..80: note = Synthetic: >U31794.1-cand-3730-3809
  source 1..80: mol_type = other DNA
ttacaatattatataaagatgaaacacaacgggacacctttttaaatgttgtaaaaataccacctagtgtacaggttatt

SEQ ID NO: 1895 - DNA, 80 bp, synthetic construct
  misc_feature 1..80: note = Synthetic: >U31794.1-cand-3810-3889
  source 1..80: mol_type = other DNA
ttgggacaaatgagttgtccataaagtgttgtatatattgtatatacatatgtgttattgtaacactggtacaggtgaag

SEQ ID NO: 1896 - DNA, 80 bp, synthetic construct
  misc_feature 1..80: note = Synthetic: >U31794.1-cand-3890-3969
  source 1..80: mol_type = other DNA
tgtaattgccatacattgctgctaagcatatatattgcacccattaattgtatttggtatattatgtgttattgtaacac

SEQ ID NO: 1897 - DNA, 80 bp, synthetic construct
  misc_feature 1..80: note = Synthetic: >U31794.1-cand-3970-4049
  source 1..80: mol_type = other DNA
tgggaaaggtaacgtgtaatcgccatatattgcaaccattgatttttgtgtaatttgtgtgtttgcgctttgcttttgtg

SEQ ID NO: 1898 - DNA, 80 bp, synthetic construct
  misc_feature 1..80: note = Synthetic: >U31794.1-cand-4050-4129
  source 1..80: mol_type = other DNA
tttgtctgtgtgtgtgccattttgtcccgcttttgctatctgcatctttatttacaagttgtcttatactaattatttta

SEQ ID NO: 1899 - DNA, 80 bp, synthetic construct
  misc_feature 1..80: note = Synthetic: >U31794.1-cand-4130-4209
  source 1..80: mol_type = other DNA
ttttggtttgttgtggctacatcattttttgatacttttatactgtttttactatttttttatatacctacactgtgtat

SEQ ID NO: 1900 - DNA, 80 bp, synthetic construct
  misc_feature 1..80: note = Synthetic: >U31794.1-cand-4210-4289
  source 1..80: mol_type = other DNA
atattgccatgctttgtggttaataaaccatttgtaacagtagtaatttttgctactatggttgcccaccgtgccacacg

SEQ ID NO: 1901 - DNA, 80 bp, synthetic construct
  misc_feature 1..80: note = Synthetic: >U31794.1-cand-4290-4369
  source 1..80: mol_type = other DNA
acgcaaacgcgcatctgccacacaattatataaaacatgcaaattatctggtacatgtcctgaggatgttattaataagg

SEQ ID NO: 1902 - DNA, 80 bp, synthetic construct
  misc_feature 1..80: note = Synthetic: >U31794.1-cand-4320-4399
  source 1..80: mol_type = other DNA
taaaacatgcaaattatctggtacatgtcctgaggatgttattaataaggtggagcaaaaaacatgggctgataggattt

SEQ ID NO: 1903 - DNA, 80 bp, synthetic construct
  misc_feature 1..80: note = Synthetic: >NC_003310.1-cand-82900-82979
  source 1..80: mol_type = other DNA
atattaaaatagctaacgctagtaatccaatcggaagccatttgatatctataatagggtatctaatttcctgattcaga

SEQ ID NO: 1904 - DNA, 80 bp, synthetic construct
  misc_feature 1..80: note = Synthetic: >EVD70-cand-3160-3239
  source 1..80: mol_type = other DNA
atattaaggcctgggcacctagggcgcctcgcaccatgccctataccaacatcctcaacaacaattatgtaggtcagtca

SEQ ID NO: 1905 - DNA, 80 bp, synthetic construct
  misc_feature 1..80: note = Synthetic: >U31794.1-cand-600-679
  source 1..80: mol_type = other DNA
atattagaacttgcaccgcaaacggaaattgacctacaatgcaatgagcaattggacagctcagaggatgaggatgagga

SEQ ID NO: 1906 - DNA, 80 bp, synthetic construct
  misc_feature 1..80: note = Synthetic: >AdVB7-cand-2530-2609
  source 1..80: mol_type = other DNA
gataaagcagcttttagatgttgtatgatgggtatgtggccaggggttgtcggcatggaagcagtaacacttatgaatat

SEQ ID NO: 1907 - DNA, 80 bp, synthetic construct
  misc_feature 1..80: note = Synthetic: >NC_001611.1-cand-145930-146009
  source 1..80: mol_type = other DNA
gtagcaaagaaattaatagaaacgtcggcgaggaaatttatgaagatgtagcattccaacaaaaggtattacaagaatat

SEQ ID NO: 1908 - DNA, 80 bp, synthetic construct
  misc_feature 1..80: note = Synthetic: >AdVB3-cand-2370-2449
  source 1..80: mol_type = other DNA
gttggttggaacctgaggatgattgggaggtggccattaggaattatgctaagatatctctgaggcctgataaacaatat

SEQ ID NO: 1909 - DNA, 80 bp, synthetic construct
  misc_feature 1..80: note = Synthetic: >NC_003310.1-cand-82160-82239
  source 1..80: mol_type = other DNA
gtatactgcaataaaacatttcctactactaaagcaaagatactatttctacaacaatctatatttcgtttcttaaatat

SEQ ID NO: 1910 - DNA, 80 bp, synthetic construct
  misc_feature 1..80: note = Synthetic: >NC_003310.1-cand-42860-42939
  source 1..80: mol_type = other DNA
atatttacattctttttgctgtttcgaaactttatcaatacacgttaatacaaacccaggaaggagatattgaaactgag

SEQ ID NO: 1911 - DNA, 80 bp, synthetic construct
  misc_feature 1..80: note = Synthetic: >NC_003310.1-cand-92870-92949
  source 1..80: mol_type = other DNA
ccacagattccaattatcagttggcggtttttatgttaatggaaactatgttttttattagatttggtaaaatgaaatat

SEQ ID NO: 1912 - DNA, 80 bp, synthetic construct
  misc_feature 1..80: note = Synthetic: >NC_003310.1-cand-77750-77829
  source 1..80: mol_type = other DNA
attggactacttacatggacacattctttagaacttctccgatgattattgctaccacggatatacaaaactgaaaatat

SEQ ID NO: 1913 - DNA, 80 bp, synthetic construct
  misc_feature 1..80: note = Synthetic: >NC_003310.1-cand-75290-75369
  source 1..80: mol_type = other DNA
atatttttcagagttcagcgaagaagtgtctataaatgtagactcgacggatgagttaatgtatatttttgccgccttgg

SEQ ID NO: 1914 - DNA, 80 bp, synthetic construct
  misc_feature 1..80: note = Synthetic: >NC_001611.1-cand-102110-102189
  source 1..80: mol_type = other DNA
atatttttcgtaccaactcatttaaatatcataatctaaaatagttctgtaatatgtctagcgctaatatattgatcata

SEQ ID NO: 1915 - DNA, 80 bp, synthetic construct
  misc_feature 1..80: note = Synthetic: >NC_003310.1-cand-53740-53819
  source 1..80: mol_type = other DNA
gcataaaactttattatccaatagattaactatttcagacgtcaatcgtttaaagtaaacttcgtaaaatattctttgat

SEQ ID NO: 1916 - DNA, 80 bp, synthetic construct
  misc_feature 1..80: note = Synthetic: >HCV.B4-cand-4450-4529
  source 1..80: mol_type = other DNA
ccaacctaatcgggcgatcactagcagaaaaactcaacagctcagtgtactccctaccaccagacccagaccactttgat

SEQ ID NO: 1917 - DNA, 80 bp, synthetic construct
  misc_feature 1..80: note = Synthetic: >NC_003310.1-cand-19840-19919
  source 1..80: mol_type = other DNA
ttggagtctcatctttagtaaacatatcataatattcgatattacgagttgacatatcgaacaaattccaagtatttgat

SEQ ID NO: 1918 - DNA, 80 bp, synthetic construct
  misc_feature 1..80: note = Synthetic: >NC_003310.1-cand-122370-122449
  source 1..80: mol_type = other DNA
atcaacgatctaatacaaaatcatctgataatttagataattttaccagaatactatttggtaagactccgtataaatca

SEQ ID NO: 1919 - DNA, 80 bp, synthetic construct
  misc_feature 1..80: note = Synthetic: >EVB75-cand-4980-5059
  source 1..80: mol_type = other DNA
atgctcgtgactgagatgtttagagaatacaaccacaggcacagtgtgggtgccacccttgaggccctctttcaaggtcc

SEQ ID NO: 1920 - DNA, 80 bp, synthetic construct
  misc_feature 1..80: note = Synthetic: >NC_001611.1-cand-105050-105129
  source 1..80: mol_type = other DNA
tgaagaggaagaagatggagagtcactagaaactagtgatatagatcccaaatcttcttataagattgtagaatcagcat

SEQ ID NO: 1921 - DNA, 80 bp, synthetic construct
  misc_feature 1..80: note = Synthetic: >EVD70-cand-2840-2919
  source 1..80: mol_type = other DNA
tctaactctacaagcgatgtatgtaccaactggtgcacgaaaacccagcagtcaagactcatttgagtggcaatcagcat

SEQ ID NO: 1922 - DNA, 80 bp, synthetic construct
  misc_feature 1..80: note = Synthetic: >AdVB7-cand-34720-34799
  source 1..80: mol_type = other DNA
tgaattagtctgcaaaataaaagaaacaagcgtcatatcatagtagcctgtcgaacaggtggaaaaatcagtctttccat

SEQ ID NO: 1923 - DNA, 80 bp, synthetic construct
  misc_feature 1..80: note = Synthetic: >AdVB3-cand-6150-6229
  source 1..80: mol_type = other DNA
tggtttggttcttttccttgtccgcgcgctccttggcggcgatgttaagctggacgtactcgcgcgccacacatttccat

SEQ ID NO: 1924 - DNA, 80 bp, synthetic construct
  misc_feature 1..80: note = Synthetic: >NC_007372.1-cand-530-609
  source 1..80: mol_type = other DNA
atggaatcaatggataaagaggaaatggagataacaacacactttcaaagaaaaaggagagtaagagacaacatgaccaa

SEQ ID NO: 1925 - DNA, 80 bp, synthetic construct
  misc_feature 1..80: note = Synthetic: >NC_001611.1-cand-45220-45299
  source 1..80: mol_type = other DNA
ccgtacacgctacgaaaacgaaatctgtaatctataggcaacgatgttttcacaatcggattaatatctctatcgtccat

SEQ ID NO: 1926 - DNA, 80 bp, synthetic construct
  misc_feature 1..80: note = Synthetic: >NC_001611.1-cand-83980-84059
  source 1..80: mol_type = other DNA
ggtattagaatcaaggatctccgaacgtatggagtcaattatacgtttttatataatttttggacaaatgtaaagtccat

SEQ ID NO: 1927 - DNA, 80 bp, synthetic construct
  misc_feature 1..80: note = Synthetic: >NC_001611.1-cand-108050-108129
  source 1..80: mol_type = other DNA
atggagagatttaactgttcatcgtttagaataaaatgattaccggtcatattaataaagtgttcatcgtatctagataa

SEQ ID NO: 1928 - DNA, 80 bp, synthetic construct
  misc_feature 1..80: note = Synthetic: >NC_003310.1-cand-41280-41359
  source 1..80: mol_type = other DNA
gtattattctgaatagtgaaaaccttcacagatagatcattttgaacacacaacgcatctagacttctggcggttgccat

SEQ ID NO: 1929 - DNA, 80 bp, synthetic construct
  misc_feature 1..80: note = Synthetic: >NC_003310.1-cand-146750-146829
  source 1..80: mol_type = other DNA
atggcaataacgcaaccaaacacttgtaaaattcctaaattagtagaaaatacaactgatatcgatgtataagcgatttc

SEQ ID NO: 1930 - DNA, 80 bp, synthetic construct
  misc_feature 1..80: note = Synthetic: >NC_003310.1-cand-33820-33899
  source 1..80: mol_type = other DNA
tagtttttttcattactatctttaacataagtatcgatcaaaagactatacatttccgaatgaatgttttcaatggccat

SEQ ID NO: 1931 - DNA, 80 bp, synthetic construct
  misc_feature 1..80: note = Synthetic: >AdVB7-cand-33210-33289
  source 1..80: mol_type = other DNA
taccatggacaacgttggttaatcatgcaacccaatataaccttccgaaaccacactgccaacaccgctcccccagccat

SEQ ID NO: 1932 - DNA, 80 bp, synthetic construct
  misc_feature 1..80: note = Synthetic: >AdVB7-cand-21480-21559
  source 1..80: mol_type = other DNA
tcttgcttcttgcaagcagcagctgcagtcatgtcatgcgggtccggaaacggctccagcgagcaagagctcaaagccat

SEQ ID NO: 1933 - DNA, 80 bp, synthetic construct
  misc_feature 1..80: note = Synthetic: >AdVB7-cand-4470-4549
  source 1..80: mol_type = other DNA
atggggccgtgggcagcggcacgggcgaacacgttccgggggtctgaaacatcatagttatgctcctgagtcaggtcatc

SEQ ID NO: 1934 - DNA, 80 bp, synthetic construct
  misc_feature 1..80: note = Synthetic: >AdVB3-cand-21660-21739
  source 1..80: mol_type = other DNA
cagggtccgcgctcagccgcctgtggacttttttgctgtatgttccttcatgcctttgtgcactggcccgaccgccccat

SEQ ID NO: 1935 - DNA, 80 bp, synthetic construct
  misc_feature 1..80: note = Synthetic: >AF028022.1-cand-1290-1369
  source 1..80: mol_type = other DNA
aagttcagaggttcagagcagaagatcaactttatctgccaacgagttgatcaggatgtcgttgtatattgtaatggcca

SEQ ID NO: 1936 - DNA, 80 bp, synthetic construct
  misc_feature 1..80: note = Synthetic: >AF028022.1-cand-1370-1449
  source 1..80: mol_type = other DNA
gaagaaggtgatcttgacaaaaaccttagtaattgggcagtgcatatacacctttactagcctgttctcattgatgcctg

SEQ ID NO: 1937 - DNA, 80 bp, synthetic construct
  misc_feature 1..80: note = Synthetic: >AF028022.1-cand-1450-1529
  source 1..80: mol_type = other DNA
atgttgctcattctctagcagtagagctgtgtgttccaggattgcatgggtgggcaactgtaatgcttttgtccaccttt

SEQ ID NO: 1938 - DNA, 80 bp, synthetic construct
  misc_feature 1..80: note = Synthetic: >AF028022.1-cand-1540-1619
  source 1..80: mol_type = other DNA
ggatcctgataccagcaatcacattggtggttttgaaggttctaaaagtagcaacattctcatgctcacattatactaat

SEQ ID NO: 1939 - DNA, 80 bp, synthetic construct
  misc_feature 1..80: note = Synthetic: >AF028022.1-cand-1620-1699
  source 1..80: mol_type = other DNA
gagtctaaatttaaattcatactggaaaaagtcaaggttgagtatcaaaaaacaatgggctcaatggtctgtgacatatg

SEQ ID NO: 1940 - DNA, 80 bp, synthetic construct
  misc_feature 1..80: note = Synthetic: >AF028022.1-cand-1700-1779
  source 1..80: mol_type = other DNA
ccaccatgagtgtgagacagccaaagaattggaatctcataagcaaagttgcataaatggtcaatgtccatattgtatga

SEQ ID NO: 1941 - DNA, 80 bp, synthetic construct
  misc_feature 1..80: note = Synthetic: >AF028022.1-cand-1780-1859
  source 1..80: mol_type = other DNA
ctatgactgaggcaacagaaagtgcgctacaagctcattttgctatttgtaagcttacagggagattccaggaagcctta

SEQ ID NO: 1942 - DNA, 80 bp, synthetic construct
  misc_feature 1..80: note = Synthetic: >AF028022.1-cand-1860-1939
  source 1..80: mol_type = other DNA
aaaaaatcattgaagaaaccagaagtcagaaagggctgttaccgtactctaggagtttttagatacaagagcaggtgcta

SEQ ID NO: 1943 - DNA, 80 bp, synthetic construct
  misc_feature 1..80: note = Synthetic: >AF028022.1-cand-1940-2019
  source 1..80: mol_type = other DNA
tgttggcttagtttggtgtgtgttattgacatgtgagctcattgtatgggctgctagtgcagagacccccttgctagaat

SEQ ID NO: 1944 - DNA, 80 bp, synthetic construct
  misc_feature 1..80: note = Synthetic: >AF028022.1-cand-2050-2129
  source 1..80: mol_type = other DNA
gggaggttccaatgaaaacagatttagagttagacttttccctaccatcatcatcatcttacagttataggcggaaactt

SEQ ID NO: 1945 - DNA, 80 bp, synthetic construct
  misc_feature 1..80: note = Synthetic: >AF028022.1-cand-2110-2189
  source 1..80: mol_type = other DNA
acagttataggcggaaacttaccaatcctgccaataaagaagaatcaatccccttccactttcagatggaaaagcaagta

SEQ ID NO: 1946 - DNA, 80 bp, synthetic construct
  misc_feature 1..80: note = Synthetic: >AF028022.1-cand-2190-2269
  source 1..80: mol_type = other DNA
atacatgcagaaatccaaaacttgggtcattggatggatgcaacatttaatataaaaacagcatttcactgctatggagc

SEQ ID NO: 1947 - DNA, 80 bp, synthetic construct
  misc_feature 1..80: note = Synthetic: >AF028022.1-cand-2260-2339
  source 1..80: mol_type = other DNA
gctatggagcctgtcaaaaatattcatatccatggcagactgcaaagtgtttctttgaaaaagattatcaatatgagaca

SEQ ID NO: 1948 - DNA, 80 bp, synthetic construct
  misc_feature 1..80: note = Synthetic: >AF028022.1-cand-2370-2449
  source 1..80: mol_type = other DNA
ggagtaggtacaggctgtacagcatgtggtgtttatcttgataaactaaagtctgtagggaaggcatacaaaatcatttc

SEQ ID NO: 1949 - DNA, 80 bp, synthetic construct
  misc_feature 1..80: note = Synthetic: >AF028022.1-cand-2460-2539
  source 1..80: mol_type = other DNA
actagaaaagtgtgtattcaattgggtacagaacagacatgtaaacatattgatgcaaatgattgcctggtgaccccttc

SEQ ID NO: 1950 - DNA, 80 bp, synthetic construct
  misc_feature 1..80: note = Synthetic: >AF028022.1-cand-2540-2619
  source 1..80: mol_type = other DNA
tgttaaagtatgcattgtgggaacggtttctaaacttcagccttctgacactttgctgtttctcgggccgttagagcaag

SEQ ID NO: 1951 - DNA, 80 bp, synthetic construct
  misc_feature 1..80: note = Synthetic: >AdVE4-cand-24210-24289
  source 1..80: mol_type = other DNA
ttcgcctacccggcgctgaatcttccccccaaagtcatgagcacggttatggaccaggtgcttattaagcgcgcgtcgcc

SEQ ID NO: 1952 - DNA, 80 bp, synthetic construct
  misc_feature 1..80: note = Synthetic: >AdVE4-cand-24290-24369
  source 1..80: mol_type = other DNA
catctccaaggagatgcaagaccccgagagctccgaggagggcaagcccgtggtcagcgacgagcagctggcgcggtggc

SEQ ID NO: 1953 - DNA, 80 bp, synthetic construct
  misc_feature 1..80: note = Synthetic: >AdVE4-cand-24370-24449
  source 1..80: mol_type = other DNA
tgggtccccaagctagtccccagagcttggaagagcggcgcaagctcataatggccgtggtcctggtgaccgcggagctg

SEQ ID NO: 1954 - DNA, 80 bp, synthetic construct
  misc_feature 1..80: note = Synthetic: >AdVE4-cand-24450-24529
  source 1..80: mol_type = other DNA
gagtgtctgcgccgcttcttcgccgacgcagaaactttgcgcaaggtcgaggagaacctgcactacatcttcaggcacgg

SEQ ID NO: 1955 - DNA, 80 bp, synthetic construct
  misc_feature 1..80: note = Synthetic: >AdVE4-cand-24530-24609
  source 1..80: mol_type = other DNA
gtttgtacgccaggcctgcaagatctccaacgtggagctgaccaacctggtctcctacatgggcatcttgcacgagaacc

SEQ ID NO: 1956 - DNA, 80 bp, synthetic construct
  misc_feature 1..80: note = Synthetic: >AdVE4-cand-24650-24729
  source 1..80: mol_type = other DNA
ggcccgccgcgactacattcgcgactgcgtctacctctacctttgccacacctggcagacggccatgggcgtgtggcaac

SEQ ID NO: 1957 - DNA, 80 bp, synthetic construct
  misc_feature 1..80: note = Synthetic: >AdVE4-cand-24700-24779
  source 1..80: mol_type = other DNA
cctggcagacggccatgggcgtgtggcaacagtgtctggaggagcaaaacctgaaagagctctgcaagctcttgcaaaag

SEQ ID NO: 1958 - DNA, 80 bp, synthetic construct
  misc_feature 1..80: note = Synthetic: >AdVE4-cand-24780-24859
  source 1..80: mol_type = other DNA
aacctcaaggccctgtggaccgggttcgacgagcgcaccaccgcctcggacctggccaacctcattttccccgagcgcct

SEQ ID NO: 1959 - DNA, 80 bp, synthetic construct
  misc_feature 1..80: note = Synthetic: >AdVE4-cand-24860-24939
  source 1..80: mol_type = other DNA
caggctgacactgcgcaacggtttgcccgactttatgagtcaaagcatgttgcaaaactttcgctcttttattctggaac

SEQ ID NO: 1960 - DNA, 80 bp, synthetic construct
  misc_feature 1..80: note = Synthetic: >AdVE4-cand-24940-25019
  source 1..80: mol_type = other DNA
gctccgggatcctgcccgccacctgctccgcactgccctcggactttgtgccgctgaccttccgcgagtgccccccgccg

SEQ ID NO: 1961 - DNA, 80 bp, synthetic construct
  misc_feature 1..80: note = Synthetic: >AdVE4-cand-25020-25099
  source 1..80: mol_type = other DNA
ctgtggagccactgctacctgctgcgcttggccaactacctggcctaccactcggacgtgatccaggacgttagcggcga

SEQ ID NO: 1962 - DNA, 80 bp, synthetic construct
  misc_feature 1..80: note = Synthetic: >AdVE4-cand-25100-25179
  source 1..80: mol_type = other DNA
gggtctgctggaatgccactgccgctgcaacctatgcacgccgcaccgctccctggtctgcaacccccagctgttaagcg

SEQ ID NO: 1963 - DNA, 80 bp, synthetic construct
  misc_feature 1..80: note = Synthetic: >AdVE4-cand-25160-25239
  source 1..80: mol_type = other DNA
caacccccagctgttaagcgagacccaaatcatcggcacctttgagttgcaagggcccggcgatgagggctctgccgcca

SEQ ID NO: 1964 - DNA, 80 bp, synthetic construct
  misc_feature 1..80: note = Synthetic: >AdVE4-cand-25270-25349
  source 1..80: mol_type = other DNA
ggacctcggcctacttgcgcaagtttgtgccccaggactaccatccctttgagatcaggttctacgaggaccaatcccag

SEQ ID NO: 1965 - DNA, 80 bp, synthetic construct
  misc_feature 1..80: note = Synthetic: >AdVE4-cand-25310-25389
  source 1..80: mol_type = other DNA
ccatccctttgagatcaggttctacgaggaccaatcccagccgcccaaggccgagctgacagcctgcgtcatcacccagg

SEQ ID NO: 1966 - DNA, 80 bp, synthetic construct
  misc_feature 1..80: note = Synthetic: >AdVE4-cand-25460-25539
  source 1..80: mol_type = other DNA
gggtctaccttgatccccagaccggtgaggagctcaatcccggcttcccccaggatgcccagaggaagcagcaagaagct

SEQ ID NO: 1967 - DNA, 80 bp, synthetic construct
  misc_feature 1..80: note = Synthetic: >EF397003.1-cand-420-499
  source 1..80: mol_type = other DNA
tgggttaaaatatgtggaggaattgcttgcacaagaggtgaggcgtggaaacttgacccaacaatacagaatagttttca

SEQ ID NO: 1968 - DNA, 80 bp, synthetic construct
  misc_feature 1..80: note = Synthetic: >EF397003.1-cand-500-579
  source 1..80: mol_type = other DNA
atgtagttgcagtaaagacagatggttctaatatatcaactcaatggccgagtcgtaggaatgaaggagttgtccagcat

SEQ ID NO: 1969 - DNA, 80 bp, synthetic construct
  misc_feature 1..80: note = Synthetic: >EF397003.1-cand-580-659
  source 1..80: mol_type = other DNA
atgaggcttgtacaagcagatataaattatgttagggagcatctaataaaagttgaggagagaggatcactagaggcaat

SEQ ID NO: 1970 - DNA, 80 bp, synthetic construct
  misc_feature 1..80: note = Synthetic: >EF397003.1-cand-660-739
  source 1..80: mol_type = other DNA
gttcaatctaaaatttcatatttcagggccaaaattgaggtattttagtataccagattaccgcccacagcctttatgta

SEQ ID NO: 1971 - DNA, 80 bp, synthetic construct
  misc_feature 1..80: note = Synthetic: >EF397003.1-cand-740-819
  source 1..80: mol_type = other DNA
atcctgggattgacagtcttcttgagtattgcaagtcatggctgacacaagagcacaaatttgtatttaaggaggtgact

SEQ ID NO: 1972 - DNA, 80 bp, synthetic construct
  misc_feature 1..80: note = Synthetic: >EF397003.1-cand-820-899
  source 1..80: mol_type = other DNA
gggaataatgtatccactgccttcacacaaaatgagctgctccatatgtctagatatagtgaatcaaggaaacctcgtaa

SEQ ID NO: 1973 - DNA, 80 bp, synthetic construct
  misc_feature 1..80: note = Synthetic: >EF397003.1-cand-900-979
  source 1..80: mol_type = other DNA
ttttcttttagtgcaattaacagttcagggtacttacttgccctccacaatcagctctgaccaatgtgatacaagacttg

SEQ ID NO: 1974 - DNA, 80 bp, synthetic construct
  misc_feature 1..80: note = Synthetic: >EF397003.1-cand-980-1059
  source 1..80: mol_type = other DNA
gctgtatcgaaataactaagaatacacctgagacccctgtacaagctgttgctctagatatagcttataagtatttaagc

SEQ ID NO: 1975 - DNA, 80 bp, synthetic construct
  misc_feature 1..80: note = Synthetic: >EF397003.1-cand-1060-1139
  source 1..80: mol_type = other DNA
ttgacaagagaggaggttataaattattataatcctaaagtacatttcacaccaactcagaatgtgaaagaaccagggac

SEQ ID NO: 1976 - DNA, 80 bp, synthetic construct
  misc_feature 1..80: note = Synthetic: >EF397003.1-cand-1140-1219
  source 1..80: mol_type = other DNA
acttaagatagggctgtcacagctgaatccactgtctaaagctgtgttagacaatgttgggaaacataaatcagagaagg

SEQ ID NO: 1977 - DNA, 80 bp, synthetic construct
  misc_feature 1..80: note = Synthetic: >EF397003.1-cand-1230-1309
  source 1..80: mol_type = other DNA
ggatattattgatagtgtaaatattgctagccaagtccagctcaatgagtgttcaaaaataattgagaatatactttcaa

SEQ ID NO: 1978 - DNA, 80 bp, synthetic construct
  misc_feature 1..80: note = Synthetic: >EF397003.1-cand-1250-1329
  source 1..80: mol_type = other DNA
atattgctagccaagtccagctcaatgagtgttcaaaaataattgagaatatactttcaaacttggaagtaaatataggg

SEQ ID NO: 1979 - DNA, 80 bp, synthetic construct
  misc_feature 1..80: note = Synthetic: >EF397003.1-cand-1390-1469
  source 1..80: mol_type = other DNA
ggaaagttttatgataatgaattaggtagattcatgctcacaattttaagaaaaacagcagcatggcatattggtcactt

SEQ ID NO: 1980 - DNA, 80 bp, synthetic construct
  misc_feature 1..80: note = Synthetic: >EF397003.1-cand-1470-1549
  source 1..80: mol_type = other DNA
attgcgggatgtaacagagagtcttattgctcattccggtcttaaaagatctaaatattggtctgtacatgcatacgacc

SEQ ID NO: 1981 - DNA, 80 bp, synthetic construct
  misc_feature 1..80: note = Synthetic: >EF397003.1-cand-1550-1629
  source 1..80: mol_type = other DNA
acgggaatgttatattgtttatactcccttcaaaatcacttgaagtggttgggtcatatattcgattttttacggtcttc

SEQ ID NO: 1982 - DNA, 80 bp, synthetic construct
  misc_feature 1..80: note = Synthetic: >EF397003.1-cand-1630-1709
  source 1..80: mol_type = other DNA
aaggatggtatcggtcttatagattatgacaacctagattcaaaagcagagatagatggtattgtctggtgttactctaa

SEQ ID NO: 1983 - DNA, 80 bp, synthetic construct
  misc_feature 1..80: note = Synthetic: >EVA90-cand-5560-5639
  source 1..80: mol_type = other DNA
agattttggatgctgttgaattggtagatgaacaacaggtaaatcttgagctcacactaatcacccttgataccaatgaa

SEQ ID NO: 1984 - DNA, 80 bp, synthetic construct
  misc_feature 1..80: note = Synthetic: >EVA90-cand-5630-5709
  source 1..80: mol_type = other DNA
taccaatgaaaaattcagagacatcacaaaattcatccctgagcaaattgaaggaactgctgatgccaccctcgtcatca

SEQ ID NO: 1985 - DNA, 80 bp, synthetic construct
  misc_feature 1..80: note = Synthetic: >EVA90-cand-5710-5789
  source 1..80: mol_type = other DNA
acacagaagccatgccatcaatgtttgtaccagttggtgatgttcaacagtatggtttccttaatctcagtggtaaacca

SEQ ID NO: 1986 - DNA, 80 bp, synthetic construct
  misc_feature 1..80: note = Synthetic: >EVA90-cand-5890-5969
  source 1..80: mol_type = other DNA
acggccgtcaaggcttctgtgctgcactcaaacgcagctattttgcctccgagcaaggagagattcaatggatgagaccc

SEQ ID NO: 1987 - DNA, 80 bp, synthetic construct
  misc_feature 1..80: note = Synthetic: >EVA90-cand-5930-6009
  source 1..80: mol_type = other DNA
ttttgcctccgagcaaggagagattcaatggatgagacccaataaggagacaggtaatttcaacatcaatggtccaacta

SEQ ID NO: 1988 - DNA, 80 bp, synthetic construct
  misc_feature 1..80: note = Synthetic: >EVA90-cand-6090-6169
  source 1..80: mol_type = other DNA
agacttgaggttgactttgaaactgctctcttctccaaatacatagggaacaaaatccacgaaccagatgaatacatgat

SEQ ID NO: 1989 - DNA, 80 bp, synthetic construct
  misc_feature 1..80: note = Synthetic: >EVA90-cand-6250-6329
  source 1..80: mol_type = other DNA
atggaacagaattcctagaaggaattgatttggcaacaagtgcagggtacccctacaatgcactgggcattaagaaaaga

SEQ ID NO: 1990 - DNA, 80 bp, synthetic construct
  misc_feature 1..80: note = Synthetic: >EVA90-cand-6330-6409
  source 1..80: mol_type = other DNA
gacattctaaacccccaaactagagatgtgaccaaaatgaaaatgtacttggacaaatacggtattgacctcccttactc

SEQ ID NO: 1991 - DNA, 80 bp, synthetic construct
  misc_feature 1..80: note = Synthetic: >EVA90-cand-6410-6489
  source 1..80: mol_type = other DNA
tacttatattaaggatgagcttagagctaaagataaaatcaagaaaggaaaatccagattgattgaagctagtagcatta

SEQ ID NO: 1992 - DNA, 80 bp, synthetic construct
  misc_feature 1..80: note = Synthetic: >EVA90-cand-6570-6649
  source 1..80: mol_type = other DNA
gcagttggttgtaacccagacactttctggagtaagatccctataatgctccctggttccctctttgcttttgattatac

SEQ ID NO: 1993 - DNA, 80 bp, synthetic construct
  misc_feature 1..80: note = Synthetic: >EVA90-cand-6750-6829
  source 1..80: mol_type = other DNA
atcaatcactcccatcacatttacagaaatcaaacatactgtgtaatgggtgggatgccatctggatgctctggtactag

SEQ ID NO: 1994 - DNA, 80 bp, synthetic construct
  misc_feature 1..80: note = Synthetic: >EVA90-cand-6800-6879
  source 1..80: mol_type = other DNA
tgggatgccatctggatgctctggtactagcattttcaattccatgattaacaatattataatcaggactcttctaatca

SEQ ID NO: 1995 - DNA, 80 bp, synthetic construct
  misc_feature 1..80: note = Synthetic: >EVA90-cand-6880-6959
  source 1..80: mol_type = other DNA
ggacatttaaaggaattgatctagatgagttaaacatgattgcatatggagatgatgttcttgctagctaccccttccct

SEQ ID NO: 1996 - DNA, 80 bp, synthetic construct
  misc_feature 1..80: note = Synthetic: >EVA90-cand-7030-7109
  source 1..80: mol_type = other DNA
cctgctttaatgaagtgaattgggagaatgcaacattccttaagagaggattcaaaccagatgagcaatacccattcctc

SEQ ID NO: 1997 - DNA, 80 bp, synthetic construct
  misc_feature 1..80: note = Synthetic: >EVA90-cand-7180-7259
  source 1..80: mol_type = other DNA
aagaccacgtgcggtcactgtgcctcctagcatggcataatggtagggaaacctatgaggaatttgttgacaaaattaga

SEQ ID NO: 1998 - DNA, 80 bp, synthetic construct
  misc_feature 1..80: note = Synthetic: >EVA90-cand-7300-7379
  source 1..80: mol_type = other DNA
ataacttgagaagaaattggcttgaactgttttaaataataatttgaaatgatgttaattggcaacacctttggtgtacc

SEQ ID NO: 1999 - DNA, 80 bp, synthetic construct
  misc_feature 1..80: note = Synthetic: >EVB73-cand-6560-6639
  source 1..80: mol_type = other DNA
acccagacctcttctggagtaaaataccagtgatgctagatgggcatctcatagcatttgattactctggatatgatgct

SEQ ID NO: 2000 - DNA, 80 bp, synthetic construct
  misc_feature 1..80: note = Synthetic: >EVB73-cand-6610-6689
  source 1..80: mol_type = other DNA
atagcatttgattactctggatatgatgctagcttaagccctgtatggtttgcatgcctgaaaatgctgcttgagaaact

SEQ ID NO: 2001 - DNA, 80 bp, synthetic construct
  misc_feature 1..80: note = Synthetic: >EVB73-cand-6690-6769
  source 1..80: mol_type = other DNA
tgggtacacacaaaaggagacaaactacattgactacctatgtaactcccaccacctgtacagagataaacactactttg

SEQ ID NO: 2002 - DNA, 80 bp, synthetic construct
  misc_feature 1..80: note = Synthetic: >EVB73-cand-6770-6849
  source 1..80: mol_type = other DNA
tacgcggtggcatgccctcaggatgctctggcaccagcatctttaactcaatgatcaataacatcataatcagaacacta

SEQ ID NO: 2003 - DNA, 80 bp, synthetic construct
  misc_feature 1..80: note = Synthetic: >EVB73-cand-6850-6929
  source 1..80: mol_type = other DNA
atgctgaaggtgtacaagggcattgacttggatcaatttaggatgatcgcatatggtgatgatgtaatcgcatcataccc

SEQ ID NO: 2004 - DNA, 80 bp, synthetic construct
  misc_feature 1..80: note = Synthetic: >EVB73-cand-6930-7009
  source 1..80: mol_type = other DNA
atggcccatagacgcctccttgctcgctgaggctggtaaggaatatggactgattatgacaccagcagataagggagagt

SEQ ID NO: 2005 - DNA, 80 bp, synthetic construct
  misc_feature 1..80: note = Synthetic: >EVB73-cand-7010-7089
  source 1..80: mol_type = other DNA
gctttaacgaagtcacttggaccaacgtcacctttctaaagaggtattttagagcagatgaacaataccccttcctggtc

SEQ ID NO: 2006 - DNA, 80 bp, synthetic construct
  misc_feature 1..80: note = Synthetic: >EVB73-cand-7090-7169
  source 1..80: mol_type = other DNA
caccctgtcatgcctatgaaggatatacatgagtccatcagatggaccaaagatccaaagaacactcaagatcatgtgcg

SEQ ID NO: 2007 - DNA, 80 bp, synthetic construct
  misc_feature 1..80: note = Synthetic: >EVB73-cand-7170-7249
  source 1..80: mol_type = other DNA
ctcgttgtgcctattggcttggcacaacggagagcacgaatatgaggagttcatccgaaaaattagaagcgtcccagttg

SEQ ID NO: 2008 - DNA, 80 bp, synthetic construct
  misc_feature 1..80: note = Synthetic: >EVB73-cand-7250-7329
  source 1..80: mol_type = other DNA
gacgctgcttaaccctacctgcgttttcaaccctgcgcaggaaatggttggactctttctaaattagagacaatttaaaa

SEQ ID NO: 2009 - DNA, 80 bp, synthetic construct
  misc_feature 1..80: note = Synthetic: >EVB73-cand-7300-7379
  source 1..80: mol_type = other DNA
gactctttctaaattagagacaatttaaaataatttaaattggcttaaccctaccgcaccaaccgaactagacaacggta

SEQ ID NO: 2010 - DNA, 80 bp, synthetic construct
  misc_feature 1..80: note = Synthetic: >EVB74-cand-60-139
  source 1..80: mol_type = other DNA
ctgttttatccacccctcccagatgtaacttagaagttgatcaaagaaaaggtcagtaggatgcccagtacaccaactgg

SEQ ID NO: 2011 - DNA, 80 bp, synthetic construct
  misc_feature 1..80: note = Synthetic: >EVB74-cand-140-219
  source 1..80: mol_type = other DNA
gttttgaccaagcacttctgttaccccggaccgagtatcaataggccactcacgtggctgaaggagaaaacgttcgttat

SEQ ID NO: 2012 - DNA, 80 bp, synthetic construct
  misc_feature 1..80: note = Synthetic: >EVB74-cand-280-359
  source 1..80: mol_type = other DNA
cacaaccccagtgtagatcaggccgatgagtcaccgcattccccacgggcgaccgtggcggtggctgcgctggcggcctg

SEQ ID NO: 2013 - DNA, 80 bp, synthetic construct
  misc_feature 1..80: note = Synthetic: >EVB74-cand-620-699
  source 1..80: mol_type = other DNA
cccggtttgcaacagagcacttgtatttctgtttgttgggttcgtaccacttgactttaatagttacagaactttactct

SEQ ID NO: 2014 - DNA, 80 bp, synthetic construct
  misc_feature 1..80: note = Synthetic: >EVB74-cand-730-809
  source 1..80: mol_type = other DNA
ggcacaggtttcaacacagaaaactggtgcgcatgagacaggtctgaatgcaagcaatggcgctagcatacactacacca

SEQ ID NO: 2015 - DNA, 80 bp, synthetic construct
  misc_feature 1..80: note = Synthetic: >EVB81-cand-2450-2529
  source 1..80: mol_type = other DNA
cgaaaaagttaacaacacagtcgctgatacttcacccagcacatccagaaacacagagcaggtgcccgctctcacagcag

SEQ ID NO: 2016 - DNA, 80 bp, synthetic construct
  misc_feature 1..80: note = Synthetic: >EVB81-cand-2540-2619
  source 1..80: mol_type = other DNA
gcatacttcgcaagtggaccccagtgacacggtgcagactcgacacgtacaaaacttccactcacgaaccgagtccacct

SEQ ID NO: 2017 - DNA, 80 bp, synthetic construct
  misc_feature 1..80: note = Synthetic: >EVB81-cand-2590-2669
  source 1..80: mol_type = other DNA
aaaacttccactcacgaaccgagtccaccttggaaaatttctttgggagggcagcttgcgtagaattcaagacctacaag

SEQ ID NO: 2018 - DNA, 80 bp, synthetic construct
  misc_feature 1..80: note = Synthetic: >EVB81-cand-2670-2749
  source 1..80: mol_type = other DNA
attggctcacaggcagacttgggtgatagatacacggaatggacaatatcggtcagagatatggcccagataagacgcaa

SEQ ID NO: 2019 - DNA, 80 bp, synthetic construct
  misc_feature 1..80: note = Synthetic: >EVB81-cand-2750-2829
  source 1..80: mol_type = other DNA
atttgaaatgttcacgtacttaaggtttgatatagagatgaccatagttataaccagctgccaagtgcccgggaccatca

SEQ ID NO: 2020 - DNA, 80 bp, synthetic construct
  misc_feature 1..80: note = Synthetic: >EVB81-cand-2830-2909
  source 1..80: mol_type = other DNA
gcagtcaagatatgccagtactgacccaccaaattatgtacgtcccaccaggtggtccagtgcccacaagcgtaggaagc

SEQ ID NO: 2021 - DNA, 80 bp, synthetic construct
  misc_feature 1..80: note = Synthetic: >EVB81-cand-2910-2989
  source 1..80: mol_type = other DNA
ttcgcttggcaaacttccacaaacccgagcttgttctggactgagggaaacgcccctgctcgcatgtctatcccatttat

SEQ ID NO: 2022 - DNA, 80 bp, synthetic construct
  misc_feature 1..80: note = Synthetic: >EVB81-cand-2990-3069
  source 1..80: mol_type = other DNA
tagtgttggcaacgcgtatagttcattttatgatgggtggtcgcacttctcgcaaactggcgtatacggtttcaatactc

SEQ ID NO: 2023 - DNA, 80 bp, synthetic construct
  misc_feature 1..80: note = Synthetic: >EVB81-cand-3070-3149
  source 1..80: mol_type = other DNA
taaatgatatgggcaggcttttcatcagacatgtcaatgagcaaagcccgtacactatggagagtaccgcccgcatttac

SEQ ID NO: 2024 - DNA, 80 bp, synthetic construct
  misc_feature 1..80: note = Synthetic: >EVB81-cand-3150-3229
  source 1..80: mol_type = other DNA
atcaaacccaagcatgtgacagcgtgggttccaaggccaccaagattatgcccatacatcaataaggcaaatgtcaactt

SEQ ID NO: 2025 - DNA, 80 bp, synthetic construct
  misc_feature 1..80: note = Synthetic: >EVB81-cand-3190-3269
  source 1..80: mol_type = other DNA
caagattatgcccatacatcaataaggcaaatgtcaacttcaaaccacacccagtggccgactcaaggcctaccatcaac

SEQ ID NO: 2026 - DNA, 80 bp, synthetic construct
  misc_feature 1..80: note = Synthetic: >EVB81-cand-3250-3329
  source 1..80: mol_type = other DNA
actcaaggcctaccatcaacgatgtacccaccgcagaacatccacccctgtccacctttggcgcatttggccagcagtct

SEQ ID NO: 2027 - DNA, 80 bp, synthetic construct
  misc_feature 1..80: note = Synthetic: >EVB81-cand-3350-3429
  source 1..80: mol_type = other DNA
ctacagagtgattaatagacatctggctacacacactgattggcagaactgtgtgtgggagagttacaatagagatttgc

SEQ ID NO: 2028 - DNA, 80 bp, synthetic construct
  misc_feature 1..80: note = Synthetic: >EVB81-cand-3430-3509
  source 1..80: mol_type = other DNA
tagtgagtacaaccacggctcacggttgtgacaccatagcaaggtgccagtgcacgacaggagtatacttctgccagtcc

SEQ ID NO: 2029 - DNA, 80 bp, synthetic construct
  misc_feature 1..80: note = Synthetic: >EVB81-cand-3510-3589
  source 1..80: mol_type = other DNA
agaaacaaacattacccaattagctttgaaggtccgggcctggtggaagtccaggaaagtgaatactatccaaaaagata

SEQ ID NO: 2030 - DNA, 80 bp, synthetic construct
  misc_feature 1..80: note = Synthetic: >EVB81-cand-3590-3669
  source 1..80: mol_type = other DNA
ccaatcccatgtgctacttgccgcaggtttctcagaaccaggtgactgtggaggtatcctgaggtgtgagcacggtgtca

SEQ ID NO: 2031 - DNA, 80 bp, synthetic construct
  misc_feature 1..80: note = Synthetic: >HCV.A1-cand-2030-2109
  source 1..80: mol_type = other DNA
gagattctgaattactatacacactggtcaggttccatcaaattcacttttctattttgtggaagtgccatggcaaccgg

SEQ ID NO: 2032 - DNA, 80 bp, synthetic construct
  misc_feature 1..80: note = Synthetic: >HCV.A1-cand-2110-2189
  source 1..80: mol_type = other DNA
gaaattgttgttgagttacagtccaccaggtgctaaaccccctaccaccagaaaagaagccatgttgggcactcacataa

SEQ ID NO: 2033 - DNA, 80 bp, synthetic construct
  misc_feature 1..80: note = Synthetic: >HCV.A1-cand-2190-2269
  source 1..80: mol_type = other DNA
tatgggatgttggtttacagtctagtgccactatggtggctccatggatttctaatgtaaactacaggagatgtgtgaag

SEQ ID NO: 2034 - DNA, 80 bp, synthetic construct
  misc_feature 1..80: note = Synthetic: >HCV.A1-cand-2290-2369
  source 1..80: mol_type = other DNA
gtacatttgctgcttctatcaaacagctattgtagtgcccagtggaaccccagtgaccatgagcatgctgtgctttgtta

SEQ ID NO: 2035 - DNA, 80 bp, synthetic construct
  misc_feature 1..80: note = Synthetic: >HCV.A1-cand-2350-2429
  source 1..80: mol_type = other DNA
gagcatgctgtgctttgttagcgcatgcaatgacttcactgcaagattgcttaaggattcccctcacgtaattcagaaca

SEQ ID NO: 2036 - DNA, 80 bp, synthetic construct
  misc_feature 1..80: note = Synthetic: >HCV.A1-cand-2440-2519
  source 1..80: mol_type = other DNA
acaaggattgggcgattctattgaggctgccattgacagcatcacacaaaatgcactaaccactgtacaaaatacaacac

SEQ ID NO: 2037 - DNA, 80 bp, synthetic construct
  misc_feature 1..80: note = Synthetic: >HCV.A1-cand-2520-2599
  source 1..80: mol_type = other DNA
aatcaggacctactcattcaaaagaagttccagcattaacagcagtggaaacaggtgctactagtcaagtagaaccaggt

SEQ ID NO: 2038 - DNA, 80 bp, synthetic construct
  misc_feature 1..80: note = Synthetic: >HCV.A1-cand-2600-2679
  source 1..80: mol_type = other DNA
gacttgattgaaaccagacatgttataaacatgagacaaagatctgaagcatctatcgaatctttctttggccgatccgc

SEQ ID NO: 2039 - DNA, 80 bp, synthetic construct
  misc_feature 1..80: note = Synthetic: >HCV.A1-cand-2680-2759
  source 1..80: mol_type = other DNA
atgtgttgcgatacttggtttgtcaaacgccaaaccaactgacacaaacaccaaacaattgttcaaaacatggagaatat

SEQ ID NO: 2040 - DNA, 80 bp, synthetic construct
  misc_feature 1..80: note = Synthetic: >HCV.A1-cand-2760-2839
  source 1..80: mol_type = other DNA
catatttagaaactcaccaactcagaagaaaacttgagttctttacgtactcaaggtttgatttggaaatgaccatagta

SEQ ID NO: 2041 - DNA, 80 bp, synthetic construct
  misc_feature 1..80: note = Synthetic: >HCV.A1-cand-2840-2919
  source 1..80: mol_type = other DNA
attacagagagggttttcaatgcagtcaatgtcccattgcgcaattatgtgtaccaaataatgtacgttcccccaggtgc

SEQ ID NO: 2042 - DNA, 80 bp, synthetic construct
  misc_feature 1..80: note = Synthetic: >HCV.A1-cand-2920-2999
  source 1..80: mol_type = other DNA
tccagaaccacaatcatgggatgattacacgtggcaatcttctaccaacccatcaatattctacaccactggaaatgctc

SEQ ID NO: 2043 - DNA, 80 bp, synthetic construct
  misc_feature 1..80: note = Synthetic: >HCV.A1-cand-3000-3079
  source 1..80: mol_type = other DNA
ctcccagagtgtcaattccatttgttggaatagggtctgcatattcacacttttatgatggtttctcacagattcctctt

SEQ ID NO: 2044 - DNA, 80 bp, synthetic construct
  misc_feature 1..80: note = Synthetic: >HCV.A1-cand-3080-3159
  source 1..80: mol_type = other DNA
gactcaatcagtgctggagcaagtaataagtatggttacacttcaatcaatgactttggtaccctggcaattagaatagt

SEQ ID NO: 2045 - DNA, 80 bp, synthetic construct
  misc_feature 1..80: note = Synthetic: >HCV.A1-cand-3160-3239
  source 1..80: mol_type = other DNA
aaatgaatatgacccagtgcaagtggatgcaaaggcccgagtgtatattaaacccaaacatgttcgcatgtggtgcccca

SEQ ID NO: 2046 - DNA, 80 bp, synthetic construct
  misc_feature 1..80: note = Synthetic: >HCV.A1-cand-3240-3319
  source 1..80: mol_type = other DNA
gaccaccacgggccatgccttacaagaatagcacagtggatttcgacccatcagcaactgtaatgacccaagtcgcagac

SEQ ID NO: 2047 - DNA, 80 bp, synthetic construct
  misc_feature 1..80: note = Synthetic: >HCV.A11-cand-6320-6399
  source 1..80: mol_type = other DNA
gaagctttggacctcagtactagtgcaggctacccttatgttgccatgggaaagaaaaagagggacattctaaataaaca

SEQ ID NO: 2048 - DNA, 80 bp, synthetic construct
  misc_feature 1..80: note = Synthetic: >HCV.A11-cand-6400-6479
  source 1..80: mol_type = other DNA
aaccagggataccaaggagatgcagagattactcgacacctatggaattaatctacctctagttacttatgtaaaagatg

SEQ ID NO: 2049 - DNA, 80 bp, synthetic construct
  misc_feature 1..80: note = Synthetic: >HCV.A11-cand-6480-6559
  source 1..80: mol_type = other DNA
aactcaggtctaagacaaaagtggaacaaggtaaatctaggctaattgaagcatccagtctcaatgattcagttgcaatg

SEQ ID NO: 2050 - DNA, 80 bp, synthetic construct
  misc_feature 1..80: note = Synthetic: >HCV.A11-cand-6560-6639
  source 1..80: mol_type = other DNA
agaatggcctttggtaacttgtatgcagcattccacaaaaacccaggtgtggtgacaggatcagcagttgggtgcgaccc

SEQ ID NO: 2051 - DNA, 80 bp, synthetic construct
  misc_feature 1..80: note = Synthetic: >HCV.A11-cand-6640-6719
  source 1..80: mol_type = other DNA
agacctgttctggagtaagataccagtgctaatggaagaaaaactctttgctttcgattacacgggatatgatgcatcac

SEQ ID NO: 2052 - DNA, 80 bp, synthetic construct
  misc_feature 1..80: note = Synthetic: >HCV.A11-cand-6720-6799
  source 1..80: mol_type = other DNA
tcagtcccgcttggttcgaagctctgaaaatggttttggagaaaattggatttggagatagggtagattacattgactac

SEQ ID NO: 2053 - DNA, 80 bp, synthetic construct
  misc_feature 1..80: note = Synthetic: >HCV.A11-cand-6800-6879
  source 1..80: mol_type = other DNA
ttgaatcactcacaccacctatacaaaaacaaaacttattgtgtcaagggtggtatgccatctggctgctctggcacttc

SEQ ID NO: 2054 - DNA, 80 bp, synthetic construct
  misc_feature 1..80: note = Synthetic: >HCV.A11-cand-6880-6959
  source 1..80: mol_type = other DNA
aatcttcaactcaatgatcaacaatttgattatcaggacgctcttactgaaaacctacaagggcatagatttagatcacc

SEQ ID NO: 2055 - DNA, 80 bp, synthetic construct
  misc_feature 1..80: note = Synthetic: >HCV.A11-cand-7040-7119
  source 1..80: mol_type = other DNA
aaagactatggactaaccatgactccagcagacaagtcagctacattcgaaacagtcacatgggagaacgtaacattctt

SEQ ID NO: 2056 - DNA, 80 bp, synthetic construct
  misc_feature 1..80: note = Synthetic: >HCV.A11-cand-7130-7209
  source 1..80: mol_type = other DNA
ttcagagcagatgaaaagtacccatttctgatacatccagtgatgccaatgaaagaaattcatgaatcaattagatggac

SEQ ID NO: 2057 - DNA, 80 bp, synthetic construct
  misc_feature 1..80: note = Synthetic: >HCV.A11-cand-7210-7289
  source 1..80: mol_type = other DNA
taaagatcccagaaacacccaggatcatgtgcgctcattatgcctattggcttggcacaatggcgaagaagaatataaca

SEQ ID NO: 2058 - DNA, 80 bp, synthetic construct
  misc_feature 1..80: note = Synthetic: >HCV.A11-cand-7350-7429
  source 1..80: mol_type = other DNA
ctacattgtaccgccgttggcttgactcattctagtaaccctacctcagtcgaattggattgggtgatactgatgtaggg

SEQ ID NO: 2059 - DNA, 80 bp, synthetic construct
  misc_feature 1..80: note = Synthetic: >HCV.A12-cand-0-79
  source 1..80: mol_type = other DNA
aacagcctgtgggttgtacccacttcacagggcccactgggcgtcagcactctggtaccccggtacctttgtgcgcctgt

SEQ ID NO: 2060 - DNA, 80 bp, synthetic construct
  misc_feature 1..80: note = Synthetic: >HCV.A12-cand-80-159
  source 1..80: mol_type = other DNA
tttatatccccccccccccattgaaacttagaaggctaatgcacctcgatcaatagcgggcgtggcgcaccagccacgtc

SEQ ID NO: 2061 - DNA, 80 bp, synthetic construct
  misc_feature 1..80: note = Synthetic: >HCV.A12-cand-160-239
  source 1..80: mol_type = other DNA
atgatcaagcacttctgtttccccggaccgagtatcaatagactgctaacgcggttgagggagaaaacgtccgttacccg

SEQ ID NO: 2062 - DNA, 80 bp, synthetic construct
  misc_feature 1..80: note = Synthetic: >HCV.A12-cand-240-319
  source 1..80: mol_type = other DNA
gccaactgcttcgagaaatccagtaacatcatgaaaattgcagagtgtttcgctcagcacttccccagtgtagatcaggt

SEQ ID NO: 2063 - DNA, 80 bp, synthetic construct
  misc_feature 1..80: note = Synthetic: >HCV.A3-cand-5020-5099
  source 1..80: mol_type = other DNA
gaaacaccatagaagcactctttcaaggacctctcaagttcaggcctataagaattagccttgaagagaagccagcgcca

SEQ ID NO: 2064 - DNA, 80 bp, synthetic construct
  misc_feature 1..80: note = Synthetic: >HCV.A3-cand-5080-5159
  source 1..80: mol_type = other DNA
ttgaagagaagccagcgccagacgccattagtgacttgctcgctagtgttgatagtgaagaggtccggcagtactgtaga

SEQ ID NO: 2065 - DNA, 80 bp, synthetic construct
  misc_feature 1..80: note = Synthetic: >HCV.A3-cand-5180-5259
  source 1..80: mol_type = other DNA
agaaacaccaactaatgtggagcgacaccttaatagagcagtcttagtgatgcaatccattgctaccgtggttacagttg

SEQ ID NO: 2066 - DNA, 80 bp, synthetic construct
  misc_feature 1..80: note = Synthetic: >HCV.A3-cand-5230-5309
  source 1..80: mol_type = other DNA
tgcaatccattgctaccgtggttacagttgtatcccttgtttacgtcatctacaagttgtttgctggctttcaaggtgct

SEQ ID NO: 2067 - DNA, 80 bp, synthetic construct
  misc_feature 1..80: note = Synthetic: >HCV.A3-cand-5340-5419
  source 1..80: mol_type = other DNA
aagcctgtgttaagaacagccacagttcaaggacctagtttggactttgctttgtctctcttgaggcgcaacatcaggca

SEQ ID NO: 2068 - DNA, 80 bp, synthetic construct
  misc_feature 1..80: note = Synthetic: >HCV.A3-cand-5420-5499
  source 1..80: mol_type = other DNA
ggtgcagactgaccagggacacttcaccatgcttggtgtacgagaccgtctagccattctgccacgccactcacaaccag

SEQ ID NO: 2069 - DNA, 80 bp, synthetic construct
  misc_feature 1..80: note = Synthetic: >HCV.A3-cand-5500-5579
  source 1..80: mol_type = other DNA
ggaaaactatctgggtagagcacaaattgaccaacgtgctagacgcagttgaattggtggatgagcagggtgtcaactta

SEQ ID NO: 2070 - DNA, 80 bp, synthetic construct
  misc_feature 1..80: note = Synthetic: >HCV.A3-cand-5570-5649
  source 1..80: mol_type = other DNA
tgtcaacttagagctcactctggtgactttggacaccaacgaaaaatttagggatatcaccaagttcatcccagagacaa

SEQ ID NO: 2071 - DNA, 80 bp, synthetic construct
  misc_feature 1..80: note = Synthetic: >HCV.A3-cand-5660-5739
  source 1..80: mol_type = other DNA
gagcgatgcaaccctagttatcaatactgagcacatgccctcaatgtttgtaccagtaggtgacgttgtacaatatgggt

SEQ ID NO: 2072 - DNA, 80 bp, synthetic construct
  misc_feature 1..80: note = Synthetic: >HCV.A3-cand-5730-5809
  source 1..80: mol_type = other DNA
caatatgggttcttgaatctcagtggtaaacctactcatagaaccatgatgtataatttccctacgaaagcaggacagtg

SEQ ID NO: 2073 - DNA, 80 bp, synthetic construct
  misc_feature 1..80: note = Synthetic: >HCV.A3-cand-5820-5899
  source 1..80: mol_type = other DNA
gtcacttcagtcggtaaggtcatcggaatccacattggcggaaatgggcgccagggcttttgtgccggcttgaagagaag

SEQ ID NO: 2074 - DNA, 80 bp, synthetic construct
  misc_feature 1..80: note = Synthetic: >HCV.A3-cand-5900-5979
  source 1..80: mol_type = other DNA
ttactttgccagtgaacaaggagagatccagtgggtgaaacctaacaaagaaactggaaggttgaacatcaatggtccaa

SEQ ID NO: 2075 - DNA, 80 bp, synthetic construct
  misc_feature 1..80: note = Synthetic: >HCV.A3-cand-5980-6059
  source 1..80: mol_type = other DNA
cccggactaaactagaacccagtgtgttccatgatgtgttcgaaggcaacaaggaaccggcagttttaaccagcaaagac

SEQ ID NO: 2076 - DNA, 80 bp, synthetic construct
  misc_feature 1..80: note = Synthetic: >HCV.A3-cand-6060-6139
  source 1..80: mol_type = other DNA
cctaggctagaggttgattttgaacaagctttgttctctaagtatgtgggcaacactctgcatgatcctgatgaatacgt

SEQ ID NO: 2077 - DNA, 80 bp, synthetic construct
  misc_feature 1..80: note = Synthetic: >HCV.A3-cand-6140-6219
  source 1..80: mol_type = other DNA
gacacaagctgccctccactatgcaaatcagctgaaacaattagatattaatactaataagatgagcatggaggaagcgt

SEQ ID NO: 2078 - DNA, 80 bp, synthetic construct
  misc_feature 1..80: note = Synthetic: >HCV.A3-cand-6220-6299
  source 1..80: mol_type = other DNA
gttatggaacagaatacttagaagctatagacctgcacactagtgctggatacccttatagtgccctgggcattaagaaa

SEQ ID NO: 2079 - DNA, 80 bp, synthetic construct
  misc_feature 1..80: note = Synthetic: >HCV.A4-cand-640-719
  source 1..80: mol_type = other DNA
tattggattggccatccagtgtctaacagagcaattgtatacttatttgttggattcgttccactatcatatacatccat

SEQ ID NO: 2080 - DNA, 80 bp, synthetic construct
  misc_feature 1..80: note = Synthetic: >HCV.A4-cand-720-799
  source 1..80: mol_type = other DNA
taacaccttatactatattataagattgaacacaagaaaatgggagcacaagtgtccacacagcgatctgggtctcatga

SEQ ID NO: 2081 - DNA, 80 bp, synthetic construct
  misc_feature 1..80: note = Synthetic: >HCV.A4-cand-800-879
  source 1..80: mol_type = other DNA
gaccagcaccgtagcaagggaaggctcaacaataaatttcactaatattaattattacaaggactcttatgcagcctctg

SEQ ID NO: 2082 - DNA, 80 bp, synthetic construct
  misc_feature 1..80: note = Synthetic: >HCV.A4-cand-880-959
  source 1..80: mol_type = other DNA
gtagcaagcaggattattcacaagacccttcaaagttcacccaaccagtcatggacgtgctaaaggaaatggcccccccg

SEQ ID NO: 2083 - DNA, 80 bp, synthetic construct
  misc_feature 1..80: note = Synthetic: >HCV.A4-cand-960-1039
  source 1..80: mol_type = other DNA
ctgcaatctccatcagctgaggcatgtgggtatagtgatagggttgcccaattaactgtaggaaactctactataacaac

SEQ ID NO: 2084 - DNA, 80 bp, synthetic construct
  misc_feature 1..80: note = Synthetic: >HCV.A4-cand-1040-1119
  source 1..80: mol_type = other DNA
acaagaagctgcaaatatagtagtgggttatggcgagtggccaaattactgtcctgacacagatgccactgcagtagata

SEQ ID NO: 2085 - DNA, 80 bp, synthetic construct
  misc_feature 1..80: note = Synthetic: >HCV.A4-cand-1120-1199
  source 1..80: mol_type = other DNA
aacccaccagacctgatgtttccgtgaataggttttacacattatctactaagtcttggacccaaaactcgaaaggctgg

SEQ ID NO: 2086 - DNA, 80 bp, synthetic construct
  misc_feature 1..80: note = Synthetic: >HCV.A4-cand-1200-1279
  source 1..80: mol_type = other DNA
tactggaaatttcctgatgtccttaacgatgttggagtttttggccagaatgcacagtaccactatctgtacagatcagg

SEQ ID NO: 2087 - DNA, 80 bp, synthetic construct
  misc_feature 1..80: note = Synthetic: >HCV.A4-cand-1280-1359
  source 1..80: mol_type = other DNA
attttgtgttcacgtgcaatgtaatgccagtaaatttcatcagggagcactcttagtcgccatggtccccgaatttgtca

SEQ ID NO: 2088 - DNA, 80 bp, synthetic construct
  misc_feature 1..80: note = Synthetic: >HCV.A4-cand-1360-1439
  source 1..80: mol_type = other DNA
tcgcttctaagagtgaacgttcaaaacccaatgaccccgcacaatatccggctttttcagtgactaatccaggaaagaat

SEQ ID NO: 2089 - DNA, 80 bp, synthetic construct
  misc_feature 1..80: note = Synthetic: >HCV.A4-cand-1460-1539
  source 1..80: mol_type = other DNA
atatgttttggatgcagggataccattgagccaagcattgatcttcccacatcaatggatcaaccttaggaccaacaatt

SEQ ID NO: 2090 - DNA, 80 bp, synthetic construct
  misc_feature 1..80: note = Synthetic: >HCV.A4-cand-1540-1619
  source 1..80: mol_type = other DNA
gtgctactattattatgccttacattaacgcggtcccttttgattcagccataaaccataacaattgtgggctggtagtg

SEQ ID NO: 2091 - DNA, 80 bp, synthetic construct
  misc_feature 1..80: note = Synthetic: >HCV.A4-cand-1630-1709
  source 1..80: mol_type = other DNA
cacccctcaagtatagtgccggcgccaccactgagatcccaatcactatcacaatagcccccttaaattcagaattcagc

SEQ ID NO: 2092 - DNA, 80 bp, synthetic construct
  misc_feature 1..80: note = Synthetic: >HCV.A4-cand-1720-1799
  source 1..80: mol_type = other DNA
aagccgtgaagcaaggtatccctgttgagatgaaacccggaaccaaccagtttttgaccacagatgatggagtgtctgcg

SEQ ID NO: 2093 - DNA, 80 bp, synthetic construct
  misc_feature 1..80: note = Synthetic: >HCV.A4-cand-1760-1839
  source 1..80: mol_type = other DNA
aaccaaccagtttttgaccacagatgatggagtgtctgcgcccatactacctggatttgaccctactccagtaatacaca

SEQ ID NO: 2094 - DNA, 80 bp, synthetic construct
  misc_feature 1..80: note = Synthetic: >HCV.A4-cand-1880-1959
  source 1..80: mol_type = other DNA
ggaaactatacttgaagtgaataatgtgactgatgtgcaaggtgtaagccggttgctcataccagtaaaagctcaggaga

SEQ ID NO: 2095 - DNA, 80 bp, synthetic construct
  misc_feature 1..80: note = Synthetic: >HCV.A6-cand-3230-3309
  source 1..80: mol_type = other DNA
agcttatatggtcaagaattacccgacatacagccaaacaataactaacactgcaactgaccgtgcaagcataaccacca

SEQ ID NO: 2096 - DNA, 80 bp, synthetic construct
  misc_feature 1..80: note = Synthetic: >HCV.A6-cand-3380-3459
  source 1..80: mol_type = other DNA
tatctatgtaggtaactttagagtggtaaaccgacatctcgccactcataatgattgggcaaatttagtatgggaaagta

SEQ ID NO: 2097 - DNA, 80 bp, synthetic construct
  misc_feature 1..80: note = Synthetic: >HCV.A6-cand-3390-3469
  source 1..80: mol_type = other DNA
ggtaactttagagtggtaaaccgacatctcgccactcataatgattgggcaaatttagtatgggaaagtagctcacgaga

SEQ ID NO: 2098 - DNA, 80 bp, synthetic construct
  misc_feature 1..80: note = Synthetic: >HCV.A6-cand-3470-3549
  source 1..80: mol_type = other DNA
tcttctggtgtcctccaccactgctcaaggatgtgataccattgcccgatgtgactgtcaaacaggagtgtattactgca

SEQ ID NO: 2099 - DNA, 80 bp, synthetic construct
  misc_feature 1..80: note = Synthetic: >HCV.A6-cand-3540-3619
  source 1..80: mol_type = other DNA
tattactgcaactctagaaggaaacactacccggttagtttttctaagcctagcctcgtcttcgtggaagctagtgagta

SEQ ID NO: 2100 - DNA, 80 bp, synthetic construct
  misc_feature 1..80: note = Synthetic: >HCV.A6-cand-3590-3669
  source 1..80: mol_type = other DNA
tagcctcgtcttcgtggaagctagtgagtattaccctgccaggtatcagtcgcacctcatgcttgcgaagggacattctg

SEQ ID NO: 2101 - DNA, 80 bp, synthetic construct
  misc_feature 1..80: note = Synthetic: >HCV.A6-cand-3700-3779
  source 1..80: mol_type = other DNA
gccaacatggcgtgattggtatcgtgtccactggtggtaatggacttgtcggatttgcagatgtcagagatcttttgtgg

SEQ ID NO: 2102 - DNA, 80 bp, synthetic construct
  misc_feature 1..80: note = Synthetic: >HCV.A6-cand-3780-3859
  source 1..80: mol_type = other DNA
ctggatgaagaagccatggaacagggtgtgtcagattacatcaaagggctcggtgacgcattcggaactggttttactga

SEQ ID NO: 2103 - DNA, 80 bp, synthetic construct
  misc_feature 1..80: note = Synthetic: >HCV.A6-cand-3830-3909
  source 1..80: mol_type = other DNA
cggtgacgcattcggaactggttttactgatgcagtgtctagggaagtggaagctcttaagaactaccttataggatctg

SEQ ID NO: 2104 - DNA, 80 bp, synthetic construct
  misc_feature 1..80: note = Synthetic: >HCV.A6-cand-3940-4019
  source 1..80: mol_type = other DNA
tgattaaattgatctcagcactagtcatagtgatcagaagtgattatgacatggtaaccctcacagcaaccttggcactc

SEQ ID NO: 2105 - DNA, 80 bp, synthetic construct
  misc_feature 1..80: note = Synthetic: >HCV.A6-cand-4030-4109
  source 1..80: mol_type = other DNA
atggcagtccctgggcgtggatcaaggctaagacagcatccatcttaggcatccctatcgcccagaagcagagtgcatca

SEQ ID NO: 2106 - DNA, 80 bp, synthetic construct
  misc_feature 1..80: note = Synthetic: >HCV.A6-cand-4110-4189
  source 1..80: mol_type = other DNA
tggctcaagaagtttaacgacatggccaatgctgccaagggatttgagtggatttccaataagattagtaaatttattga

SEQ ID NO: 2107 - DNA, 80 bp, synthetic construct
  misc_feature 1..80: note = Synthetic: >HCV.A6-cand-4190-4269
  source 1..80: mol_type = other DNA
ttggctcaaggagaaaattataccagcagctagagagaaggtcgagtttttgaacaacctaaaacaactgccattgttgg

SEQ ID NO: 2108 - DNA, 80 bp, synthetic construct
  misc_feature 1..80: note = Synthetic: >HCV.A6-cand-4270-4349
  source 1..80: mol_type = other DNA
agaaccaaatctcaaacctggagcagtccgccgcttcacaagaagaccttgaggcaatgtttgggaatgtatcgtatctc

SEQ ID NO: 2109 - DNA, 80 bp, synthetic construct
  misc_feature 1..80: note = Synthetic: >HCV.A6-cand-4350-4429
  source 1..80: mol_type = other DNA
gctcacttctgccgtaaataccaaccactttatgctacagaagccaaaagagtttatgctttggaaaagaggatgaacaa

SEQ ID NO: 2110 - DNA, 80 bp, synthetic construct
  misc_feature 1..80: note = Synthetic: >HCV.A6-cand-4510-4589
  source 1..80: mol_type = other DNA
tggcaaccggtataattgcccgagcaatagctgacaaataccactctagtgtgtactcacttccgccagatccagatcac

SEQ ID NO: 2111 - DNA, 80 bp, synthetic construct
  misc_feature 1..80: note = Synthetic: >HQ537729.1-cand-2720-2799
  source 1..80: mol_type = other DNA
gctttcccagcgtttaagtgtgtgtcaggacaaaatactagaacattacgagactgatagcacatgtttgtctgatcaca

SEQ ID NO: 2112 - DNA, 80 bp, synthetic construct
  misc_feature 1..80: note = Synthetic: >HQ537729.1-cand-2800-2879
  source 1..80: mol_type = other DNA
tacagtattggaaactgattcgtcttgaatgtgcagtattttataaagcaagagaaatgggaattaaaactcttaaccac

SEQ ID NO: 2113 - DNA, 80 bp, synthetic construct
  misc_feature 1..80: note = Synthetic: >HQ537729.1-cand-2880-2959
  source 1..80: mol_type = other DNA
caagtggttccaacgcaggccatttcaaaagccaaagcaatgcaagcaattgaactgcaattaatgttagagacattaaa

SEQ ID NO: 2114 - DNA, 80 bp, synthetic construct
  misc_feature 1..80: note = Synthetic: >HQ537729.1-cand-2960-3039
  source 1..80: mol_type = other DNA
tacaactgagtatagaacagaaacatggacactgcaagaaacaagtattgaattatatacaacagttccacaaggatgtt

SEQ ID NO: 2115 - DNA, 80 bp, synthetic construct
  misc_feature 1..80: note = Synthetic: >HQ537729.1-cand-3060-3139
  source 1..80: mol_type = other DNA
gtggaagtacaatttgatggtgataaacaaaatactatgcattatactaattggacacatatatatttattagaggacag

SEQ ID NO: 2116 - DNA, 80 bp, synthetic construct
  misc_feature 1..80: note = Synthetic: >HQ537729.1-cand-3130-3209
  source 1..80: mol_type = other DNA
tagaggacagtacatgtactgttgtaaagggactggtaaattataaaggtatttattatgtgcatcagggtgtagaaaca

SEQ ID NO: 2117 - DNA, 80 bp, synthetic construct
  misc_feature 1..80: note = Synthetic: >HQ537729.1-cand-3210-3289
  source 1..80: mol_type = other DNA
tattatgttaattttagggaagaggctaaaaagtatggaaaaaaaaatatatgggaagtgcatgtgggtggtcaggtaat

SEQ ID NO: 2118 - DNA, 80 bp, synthetic construct
  misc_feature 1..80: note = Synthetic: >HQ537729.1-cand-3290-3369
  source 1..80: mol_type = other DNA
tgtttgtcctgaatctgtatttagcagcacagaactatccactgctgaaattgctacacagctacacgcctacaacacca

SEQ ID NO: 2119 - DNA, 80 bp, synthetic construct
  misc_feature 1..80: note = Synthetic: >HQ537729.1-cand-3360-3439
  source 1..80: mol_type = other DNA
tacaacaccaccgagacccataccaaagcctgctccgtgggcaccacagaaacccagaagacaaatcacaaacgacctcg

SEQ ID NO: 2120 - DNA, 80 bp, synthetic construct
  misc_feature 1..80: note = Synthetic: >HQ537729.1-cand-3520-3599
  source 1..80: mol_type = other DNA
ctacatctgactgcacaaacaaagaccggtgtggtagttgtagtacaactacacctatagtacatttaaaaggtgatgca

SEQ ID NO: 2121 - DNA, 80 bp, synthetic construct
  misc_feature 1..80: note = Synthetic: >HQ537729.1-cand-3530-3609
  source 1..80: mol_type = other DNA
ctgcacaaacaaagaccggtgtggtagttgtagtacaactacacctatagtacatttaaaaggtgatgcaaatacattaa

SEQ ID NO: 2122 - DNA, 80 bp, synthetic construct
  misc_feature 1..80: note = Synthetic: >HQ537729.1-cand-3610-3689
  source 1..80: mol_type = other DNA
agtgtttaagatatagattgggtaaatataaagcattgtatcaagatgcttcatctacatggcgatggacatgtacaaac

SEQ ID NO: 2123 - DNA, 80 bp, synthetic construct
  misc_feature 1..80: note = Synthetic: >HQ537729.1-cand-3690-3769
  source 1..80: mol_type = other DNA
aataaaaaacaaatagcaattgtaacattaacttacacaacagaatatcaaagggataaatttttaactacagtaaaaat

SEQ ID NO: 2124 - DNA, 80 bp, synthetic construct
  misc_feature 1..80: note = Synthetic: >HQ537729.1-cand-3770-3849
  source 1..80: mol_type = other DNA
acctaacacagttacagtgtctaaaggatatatgtctatatgatagaccttacagcttccagtactgtgttgctgtgctt

SEQ ID NO: 2125 - DNA, 80 bp, synthetic construct
  misc_feature 1..80: note = Synthetic: >HQ537729.1-cand-3850-3929
  source 1..80: mol_type = other DNA
tttgttgtgcttttgtgtgcttttgtgcttgtgtctgcttgtacgttcgctattgctatctgtgtcattatactcagcat

SEQ ID NO: 2126 - DNA, 80 bp, synthetic construct
  misc_feature 1..80: note = Synthetic: >HQ537729.1-cand-3940-4019
  source 1..80: mol_type = other DNA
ggttttaatactgtgggttactgtagcaacaccactacgttgcttttgttgttttctttgctttttgtatatacctatgg

SEQ ID NO: 2127 - DNA, 80 bp, synthetic construct
  misc_feature 1..80: note = Synthetic: >KC470236.1-cand-6280-6359
  source 1..80: mol_type = other DNA
accaaaagtgaggtgcctttagatatttgtcaatccatttgtaaatatcctgattatttgcaaatgtctgcagatgtgta

SEQ ID NO: 2128 - DNA, 80 bp, synthetic construct
  misc_feature 1..80: note = Synthetic: >KC470236.1-cand-6400-6479
  source 1..80: mol_type = other DNA
tttgcaagacatttttggaatcgtggtggtatggtgggtgacgccattcctgcccaattgtatattaagggcacagatat

SEQ ID NO: 2129 - DNA, 80 bp, synthetic construct
  misc_feature 1..80: note = Synthetic: >KC470236.1-cand-6480-6559
  source 1..80: mol_type = other DNA
acgtgcaaaccccggtagttctgtatactgcccctctcccagcggttccatggtaacctctgattcccagttatttaata

SEQ ID NO: 2130 - DNA, 80 bp, synthetic construct
  misc_feature 1..80: note = Synthetic: >KC470236.1-cand-6560-6639
  source 1..80: mol_type = other DNA
agccttattggctacataaggcccagggccacaacaatggtatatgttggcataatcaattatttcttactgtagtggac

SEQ ID NO: 2131 - DNA, 80 bp, synthetic construct
  misc_feature 1..80: note = Synthetic: >KC470236.1-cand-6640-6719
  source 1..80: mol_type = other DNA
actacccgtagtaccaactttacattatctacctctatagagtcttccataccttctacatatgatccttctacgtttaa

SEQ ID NO: 2132 - DNA, 80 bp, synthetic construct
  misc_feature 1..80: note = Synthetic: >KC470236.1-cand-6720-6799
  source 1..80: mol_type = other DNA
ggaatataccaggcacgtggaggagtatgatttacaatttatatttcaactgtgtactgtcacattaacaactgatgtta

SEQ ID NO: 2133 - DNA, 80 bp, synthetic construct
  misc_feature 1..80: note = Synthetic: >KC470236.1-cand-6800-6879
  source 1..80: mol_type = other DNA
tgtcttatattcacactatgaattcctctatattggacaattggaattttgctgtagctcctccaccatctgccagtttg

SEQ ID NO: 2134 - DNA, 80 bp, synthetic construct
  misc_feature 1..80: note = Synthetic: >KC470236.1-cand-6880-6959
  source 1..80: mol_type = other DNA
gtagacacttacagatacttacagtctgcagccattacatgtcaaaaggatgctccagcacctgaaaagaaagatccata

SEQ ID NO: 2135 - DNA, 80 bp, synthetic construct
  misc_feature 1..80: note = Synthetic: >KC470236.1-cand-6960-7039
  source 1..80: mol_type = other DNA
tgacggtctaaagttttggaatgttgacttaagggaaaagtttagtttggaacttgatcaattccctttgggacgtaaat

SEQ ID NO: 2136 - DNA, 80 bp, synthetic construct
  misc_feature 1..80: note = Synthetic: >KC470236.1-cand-7040-7119
  source 1..80: mol_type = other DNA
ttttgttgcaggccagggtccgcaggcgccctactataggtccccgaaagcggcctgctgcatccacttcctcgtcctca

SEQ ID NO: 2137 - DNA, 80 bp, synthetic construct
  misc_feature 1..80: note = Synthetic: >KC470236.1-cand-7120-7199
  source 1..80: mol_type = other DNA
gctactaaacacaaacgtaaacgtgtgtctaaataatgcatgtgtatgccttgttatgtgtgtgtatgttgtttgtttcc

SEQ ID NO: 2138 - DNA, 80 bp, synthetic construct
  misc_feature 1..80: note = Synthetic: >KC470236.1-cand-7200-7279
  source 1..80: mol_type = other DNA
ttatgtgttgagtgtatatgtgtatgtttgtaggtatatgttgtttgtttccttatgtgttgagtgtatatgtgtatgtt

SEQ ID NO: 2139 - DNA, 80 bp, synthetic construct
  misc_feature 1..80: note = Synthetic: >KC470236.1-cand-7280-7359
  source 1..80: mol_type = other DNA
tgtaggtatgtgtgtatatgtttttgttaataaagtatgtatgacagtttcatgtgtgattgcacaccctgtgactaaca

SEQ ID NO: 2140 - DNA, 80 bp, synthetic construct
  misc_feature 1..80: note = Synthetic: >KC470236.1-cand-7360-7439
  source 1..80: mol_type = other DNA
gtgtatttgttttacatataataggtctgcaacatttcatacataatctatatgccctaccctaaggtgtgtttactacc

SEQ ID NO: 2141 - DNA, 80 bp, synthetic construct
  misc_feature 1..80: note = Synthetic: >KC470236.1-cand-7440-7519
  source 1..80: mol_type = other DNA
taatatgtaatttttacattgttgtatgcgtttctacattttatacttcgccattttgtggcgaccgaagtcggtcgtgg

SEQ ID NO: 2142 - DNA, 80 bp, synthetic construct
  misc_feature 1..80: note = Synthetic: >KC470236.1-cand-7520-7599
  source 1..80: mol_type = other DNA
gttgagcattttttttaaactagtggaaaccacctttctcagcaaaaacatgtctttaccttaggttcaccctgcatagt

SEQ ID NO: 2143 - DNA, 80 bp, synthetic construct
  misc_feature 1..80: note = Synthetic: >KC470281.1-cand-980-1059
  source 1..80: mol_type = other DNA
tacagatatttgtatacaggcagagcgtgagacagcacaggtactgttaaatatgcaacaggcccaaagggatgcacaaa

SEQ ID NO: 2144 - DNA, 80 bp, synthetic construct
  misc_feature 1..80: note = Synthetic: >KC470281.1-cand-1060-1139
  source 1..80: mol_type = other DNA
cagtgcgtgccctaaaacgaaagtatacagacagtatagaaagcagccctttagcaaagtcgccattacaggaactatca

SEQ ID NO: 2145 - DNA, 80 bp, synthetic construct
  misc_feature 1..80: note = Synthetic: >KC470281.1-cand-1140-1219
  source 1..80: mol_type = other DNA
ataaatgtaagcagtacacaggcaagacaaccggcgtatacagtgccggacagcggctatggcaatatggaagtggaaac

SEQ ID NO: 2146 - DNA, 80 bp, synthetic construct
  misc_feature 1..80: note = Synthetic: >KC470281.1-cand-1170-1249
  source 1..80: mol_type = other DNA
ccggcgtatacagtgccggacagcggctatggcaatatggaagtggaaactcactcggaggtaactgtagcaacgaatac

SEQ ID NO: 2147 - DNA, 80 bp, synthetic construct
  misc_feature 1..80: note = Synthetic: >KC470281.1-cand-1300-1379
  source 1..80: mol_type = other DNA
aggactgtagtagtgtagacagtgctatagatagtgaaaaccaggatcctaaatcacctactactcaactaaaagtatta

SEQ ID NO: 2148 - DNA, 80 bp, synthetic construct
  misc_feature 1..80: note = Synthetic: >KC470281.1-cand-1380-1459
  source 1..80: mol_type = other DNA
ttacaatgtaataataaaaaagctgcaatgttaacagaatttaaaaaagtatatggattgtcctttaatgacctagtacg

SEQ ID NO: 2149 - DNA, 80 bp, synthetic construct
  misc_feature 1..80: note = Synthetic: >KC470281.1-cand-1460-1539
  source 1..80: mol_type = other DNA
tacatttaaaagtgataagaccacatgtacggactgggtagcagcaatatttggagtaaatccaaccattgccgaagggt

SEQ ID NO: 2150 - DNA, 80 bp, synthetic construct
  misc_feature 1..80: note = Synthetic: >KC470281.1-cand-1540-1619
  source 1..80: mol_type = other DNA
ttaaaacactaattaaacaatatgcattatatacccatatacaatgtttagatacaaaaaacggaatattaatattaatg

SEQ ID NO: 2151 - DNA, 80 bp, synthetic construct
  misc_feature 1..80: note = Synthetic: >KC470281.1-cand-1620-1699
  source 1..80: mol_type = other DNA
ttaataagatataaatgtgggaaaaatagaataacagtaggaaaaggattaagtacattgttgcatgttccagacagctg

SEQ ID NO: 2152 - DNA, 80 bp, synthetic construct
  misc_feature 1..80: note = Synthetic: >KC470281.1-cand-1700-1779
  source 1..80: mol_type = other DNA
tatgcttttgcagccaccaaaattgcgtagccctgttgcagcattgtattggtatagaacaggaatatctaatattagtg

SEQ ID NO: 2153 - DNA, 80 bp, synthetic construct
  misc_feature 1..80: note = Synthetic: >KC470281.1-cand-1780-1859
  source 1..80: mol_type = other DNA
aggtgtgtggagacacgccagaatggataaaaagattaactataatacaacatggaatagatgatagtgtatttgatcta

SEQ ID NO: 2154 - DNA, 80 bp, synthetic construct
  misc_feature 1..80: note = Synthetic: >KC470281.1-cand-1860-1939
  source 1..80: mol_type = other DNA
tcagacatggtacaatgggcatttgataatgagttaacagatgaaagtgatatagcattttcatatgctatgttggcaga

SEQ ID NO: 2155 - DNA, 80 bp, synthetic construct
  misc_feature 1..80: note = Synthetic: >KC470281.1-cand-1940-2019
  source 1..80: mol_type = other DNA
ttgtaatagtaatgctgcagcgtttttaaaaagcaactgccaagcaaaatatgtaaaagattgtgcaacaatgtgtagac

SEQ ID NO: 2156 - DNA, 80 bp, synthetic construct
  misc_feature 1..80: note = Synthetic: >KC470281.1-cand-2020-2099
  source 1..80: mol_type = other DNA
attacaaacgggcacaaaaacgacaaatgtcaatgccgcaatggattaaatttagatgcagtaaatgtgatgaaggtggt

SEQ ID NO: 2157 - DNA, 80 bp, synthetic construct
  misc_feature 1..80: note = Synthetic: >KC470281.1-cand-2140-2219
  source 1..80: mol_type = other DNA
tagaattcataacattcttatgtgcattaaaagattttttaaaaggcacgccaaaacgtaattgtatagttatacatggg

SEQ ID NO: 2158 - DNA, 80 bp, synthetic construct
  misc_feature 1..80: note = Synthetic: >KC470281.1-cand-2180-2259
  source 1..80: mol_type = other DNA
aaaaggcacgccaaaacgtaattgtatagttatacatgggccaccaaatactggcaagtcatatttttgcatgagtctta

SEQ ID NO: 2159 - DNA, 80 bp, synthetic construct
  misc_feature 1..80: note = Synthetic: >NC_001434.1-cand-2930-3009
  source 1..80: mol_type = other DNA
ggatccggcaagtcccgctctattacccaagccgacgtggacgttgtcgtggtcccgacccgtgagttgcgtaatgcctg

SEQ ID NO: 2160 - DNA, 80 bp, synthetic construct
  misc_feature 1..80: note = Synthetic: >NC_001434.1-cand-2980-3059
  source 1..80: mol_type = other DNA
ggtcccgacccgtgagttgcgtaatgcctggcgccgccgcggcttcgctgctttcaccccgcacactgccgccagagtca

SEQ ID NO: 2161 - DNA, 80 bp, synthetic construct
  misc_feature 1..80: note = Synthetic: >NC_001434.1-cand-3090-3169
  source 1..80: mol_type = other DNA
ccccgtcccttccccctcacttgctgctgctccacatgcagcgggccgccaccgtccaccttcttggtgacccgaatcag

SEQ ID NO: 2162 - DNA, 80 bp, synthetic construct
  misc_feature 1..80: note = Synthetic: >NC_001434.1-cand-3170-3249
  source 1..80: mol_type = other DNA
atcccagccatcgactttgagcacgccgggctcgttcccgccatcaggcccgatttggcccccacctcctggtggcatgt

SEQ ID NO: 2163 - DNA, 80 bp, synthetic construct
  misc_feature 1..80: note = Synthetic: >NC_001434.1-cand-3250-3329
  source 1..80: mol_type = other DNA
gacccatcgctgccctgcggatgtatgtgagctgatccgtggcgcataccctatgattcagaccactagtcgggtcctcc

SEQ ID NO: 2164 - DNA, 80 bp, synthetic construct
  misc_feature 1..80: note = Synthetic: >NC_001434.1-cand-3350-3429
  source 1..80: mol_type = other DNA
cctgctgttgggcagaaactagtgttcacccaggcagctaaggccgccaaccccggttcagtgacggtccatgaggcaca

SEQ ID NO: 2165 - DNA, 80 bp, synthetic construct
  misc_feature 1..80: note = Synthetic: >NC_001434.1-cand-3410-3489
  source 1..80: mol_type = other DNA
gtgacggtccatgaggcacagggcgctacctacacagagactaccattattgccacggcagatgctcgaggcctcattca

SEQ ID NO: 2166 - DNA, 80 bp, synthetic construct
  misc_feature 1..80: note = Synthetic: >NC_001434.1-cand-3490-3569
  source 1..80: mol_type = other DNA
gtcgtcccgagctcatgccattgttgccttgacgcgccacactgagaagtgcgtcatcattgacgcaccaggcctgcttc

SEQ ID NO: 2167 - DNA, 80 bp, synthetic construct
  misc_feature 1..80: note = Synthetic: >NC_001434.1-cand-3570-3649
  source 1..80: mol_type = other DNA
gcgaggtgggcatctccgatgcaatcgttaataactttttccttgctggtggcgaaattggccaccagcgcccatctgtt

SEQ ID NO: 2168 - DNA, 80 bp, synthetic construct
  misc_feature 1..80: note = Synthetic: >NC_001434.1-cand-3650-3729
  source 1..80: mol_type = other DNA
atccctcgcggcaatcctgacgccaatgttgacaccttggctgccttcccgccgtcttgccagattagcgccttccatca

SEQ ID NO: 2169 - DNA, 80 bp, synthetic construct
  misc_feature 1..80: note = Synthetic: >NC_001434.1-cand-3730-3809
  source 1..80: mol_type = other DNA
gttggctgaggagcttggccacagacctgcccctgtcgcggctgttctaccgccctgccctgagcttgaacagggccttc

SEQ ID NO: 2170 - DNA, 80 bp, synthetic construct
  misc_feature 1..80: note = Synthetic: >NC_001434.1-cand-3810-3889
  source 1..80: mol_type = other DNA
tctacctgccccaagaactcaccacctgtgatagtgtcgtaacatttgaattaacagatattgtgcactgtcgtatggcc

SEQ ID NO: 2171 - DNA, 80 bp, synthetic construct
  misc_feature 1..80: note = Synthetic: >NC_001434.1-cand-3890-3969
  source 1..80: mol_type = other DNA
gccccgagccagcgcaaggccgtgctgtccacgcttgtgggccattacggccgccgcacaaagctctacaatgcctccca

SEQ ID NO: 2172 - DNA, 80 bp, synthetic construct
  misc_feature 1..80: note = Synthetic: >NC_001434.1-cand-3970-4049
  source 1..80: mol_type = other DNA
ctctgatgttcgcgactctctcgcccgttttatcccggccattggccacgtacaggttacaacctgtgaattgtacgagc

SEQ ID NO: 2173 - DNA, 80 bp, synthetic construct
  misc_feature 1..80: note = Synthetic: >NC_001434.1-cand-4050-4129
  source 1..80: mol_type = other DNA
tagtggaggccatggtcgagaagggccaggacggctccgccgtccttgagctcgacctttgtaaccgcgacgtgtccagg

SEQ ID NO: 2174 - DNA, 80 bp, synthetic construct
  misc_feature 1..80: note = Synthetic: >NC_001434.1-cand-4090-4169
  source 1..80: mol_type = other DNA
cgtccttgagctcgacctttgtaaccgcgacgtgtccaggatcaccttcttccagaaagattgtaataaattcaccacgg

SEQ ID NO: 2175 - DNA, 80 bp, synthetic construct
  misc_feature 1..80: note = Synthetic: >NC_001434.1-cand-6750-6829
  source 1..80: mol_type = other DNA
ctctccttttgggaggcaggtactactaaagccgggtacccttataattataacaccactgctagtgaccaactgctcgt

SEQ ID NO: 2176 - DNA, 80 bp, synthetic construct
  misc_feature 1..80: note = Synthetic: >NC_001434.1-cand-6830-6909
  source 1..80: mol_type = other DNA
tgagaatgccgctgggcatcgggttgctatttccacttacaccactagcctgggtgctggccccgtctctatttccgcgg

SEQ ID NO: 2177 - DNA, 80 bp, synthetic construct
  misc_feature 1..80: note = Synthetic: >NC_001434.1-cand-6910-6989
  source 1..80: mol_type = other DNA
ttgctgttttagccccccactctgcgctagcattgcttgaggataccatggactaccctgcccgcgcccatactttcgat

SEQ ID NO: 2178 - DNA, 80 bp, synthetic construct
  misc_feature 1..80: note = Synthetic: >NC_001434.1-cand-6990-7069
  source 1..80: mol_type = other DNA
gacttctgcccggagtgccgcccccttggcctccagggctgtgcttttcagtctactgtcgctgagcttcagcgccttaa

SEQ ID NO: 2179 - DNA, 80 bp, synthetic construct
  misc_feature 1..80: note = Synthetic: >NC_001434.1-cand-7070-7149
  source 1..80: mol_type = other DNA
gatgaaggtgggtaaaactcgggagttatagtttatttgcttgtgccccccttctttctgttgcttatttctcatttctg

SEQ ID NO: 2180 - DNA, 80 bp, synthetic construct
  misc_feature 1..80: note = Synthetic: >NC_001437.1-cand-0-79
  source 1..80: mol_type = other DNA
gtttatctgtgtgaacttcttggcttagtatcgttgagaagaatcgagagattagtgcagtttaaacagttttttagaac

SEQ ID NO: 2181 - DNA, 80 bp, synthetic construct
  misc_feature 1..80: note = Synthetic: >NC_001437.1-cand-70-149
  source 1..80: mol_type = other DNA
tttttagaacggaagataaccatgactaaaaaaccaggagggcccggtaaaaaccgggctatcaatatgctgaaacgcgg

SEQ ID NO: 2182 - DNA, 80 bp, synthetic construct
  misc_feature 1..80: note = Synthetic: >NC_001437.1-cand-150-229
  source 1..80: mol_type = other DNA
cctaccccgcgtattcccactagtgggagtgaagagggtagtaatgagcttgttggacggcagagggccagtacgtttcg

SEQ ID NO: 2183 - DNA, 80 bp, synthetic construct
  misc_feature 1..80: note = Synthetic: >NC_001437.1-cand-230-309
  source 1..80: mol_type = other DNA
tgctggctcttatcacgttcttcaagtttacagcattagccccgaccaaggcgcttttaggccgatggaaagcagtggaa

SEQ ID NO: 2184 - DNA, 80 bp, synthetic construct
  misc_feature 1..80: note = Synthetic: >NC_001437.1-cand-300-379
  source 1..80: mol_type = other DNA
agcagtggaaaagagtgtggcaatgaaacatcttactagtttcaaacgagaacttggaacactcattgacgccgtgaaca

SEQ ID NO: 2185 - DNA, 80 bp, synthetic construct
  misc_feature 1..80: note = Synthetic: >NC_001437.1-cand-390-469
  source 1..80: mol_type = other DNA
aaaacaaaacaaaagaggaggaaatgaaggctcaatcatgtggctcgcaagcttggcagttgtcatagcttacgcaggag

SEQ ID NO: 2186 - DNA, 80 bp, synthetic construct
  misc_feature 1..80: note = Synthetic: >NC_001437.1-cand-500-579
  source 1..80: mol_type = other DNA
ttttgatgaccatcaacaacacggacattgcagacgttatcgtgattcccacctcaaaaggagagaacagatgctgggtc

SEQ ID NO: 2187 - DNA, 80 bp, synthetic construct
  misc_feature 1..80: note = Synthetic: >NC_001437.1-cand-550-629
  source 1..80: mol_type = other DNA
acctcaaaaggagagaacagatgctgggtccgggcaatagacgtcggctacatgtgtgaggacactatcacgtacgaatg

SEQ ID NO: 2188 - DNA, 80 bp, synthetic construct
  misc_feature 1..80: note = Synthetic: >NC_001437.1-cand-630-709
  source 1..80: mol_type = other DNA
tcctaagctcaccatgggcaatgatccagaggatgtggattgctggtgtgacaaccaagaagtctacgtccaatatggac

SEQ ID NO: 2189 - DNA, 80 bp, synthetic construct
  misc_feature 1..80: note = Synthetic: >NC_001437.1-cand-690-769
  source 1..80: mol_type = other DNA
agtctacgtccaatatggacggtgcacgcggaccaggcattccaagcgaagcaggagatccgtgtcggtccaaacacatg

SEQ ID NO: 2190 - DNA, 80 bp, synthetic construct
  misc_feature 1..80: note = Synthetic: >NC_001437.1-cand-800-879
  source 1..80: mol_type = other DNA
cttggctggattcaacgaaagccacacggtatctcatgaaaactgagaactggatcataaggaatcctggctatgctttc

SEQ ID NO: 2191 - DNA, 80 bp, synthetic construct
  misc_feature 1..80: note = Synthetic: >NC_001437.1-cand-3480-3559
  source 1..80: mol_type = other DNA
acctgtcaggcatgatgaaacaacactcgttagatcacaggttgatgctttcaatggtgaaatggttgacccttttcagc

SEQ ID NO: 2192 - DNA, 80 bp, synthetic construct
  misc_feature 1..80: note = Synthetic: >NC_001437.1-cand-3560-3639
  source 1..80: mol_type = other DNA
tgggccttctggtgatgtttctggccacccaggaggtccttcgcaagaggtggacggccagattgaccattcctgcggtt

SEQ ID NO: 2193 - DNA, 80 bp, synthetic construct
  misc_feature 1..80: note = Synthetic: >NC_001437.1-cand-3670-3749
  source 1..80: mol_type = other DNA
ggcatcacttacactgatttggcgaggtatgtggtgctagtcgctgccgctttcgcagaggccaacagtggaggagacgt

SEQ ID NO: 2194 - DNA, 80 bp, synthetic construct
  misc_feature 1..80: note = Synthetic: >NC_001437.1-cand-3720-3799
  source 1..80: mol_type = other DNA
tttcgcagaggccaacagtggaggagacgtcctgcatcttgctttgattgccgtttttaagatccaaccagcgtttctag

SEQ ID NO: 2195 - DNA, 80 bp, synthetic construct
  misc_feature 1..80: note = Synthetic: >NC_001437.1-cand-3770-3849
  source 1..80: mol_type = other DNA
ccgtttttaagatccaaccagcgtttctagtgatgaacatgcttagcacgagatggacgaaccaagaaaacgtggtcctg

SEQ ID NO: 2196 - DNA, 80 bp, synthetic construct
  misc_feature 1..80: note = Synthetic: >NC_001437.1-cand-3880-3959
  source 1..80: mol_type = other DNA
tcagtagatctgcaaataggagtccacggaatcctgaatgccgccgctatagcatggatgattgtccgagcgatcacctt

SEQ ID NO: 2197 - DNA, 80 bp, synthetic construct
  misc_feature 1..80: note = Synthetic: >NC_001437.1-cand-3960-4039
  source 1..80: mol_type = other DNA
ccccacaacctcctccgtcaccatgccagtcttagcgcttctaaccccgggaatgagggctctatacctagacacttaca

SEQ ID NO: 2198 - DNA, 80 bp, synthetic construct
  misc_feature 1..80: note = Synthetic: >NC_001437.1-cand-4040-4119
  source 1..80: mol_type = other DNA
gaatcatcctcctcgtcatagggatttgctccctgctgcaagagaggaaaaagaccatggcaaaaaagaaaggagctgta

SEQ ID NO: 2199 - DNA, 80 bp, synthetic construct
  misc_feature 1..80: note = Synthetic: >NC_001437.1-cand-4120-4199
  source 1..80: mol_type = other DNA
ctcttgggcttagcgctcacatccactggatggttctcgcccaccactatagctgccggactaatggtctgcaacccaaa

SEQ ID NO: 2200 - DNA, 80 bp, synthetic construct
  misc_feature 1..80: note = Synthetic: >NC_001437.1-cand-4200-4279
  source 1..80: mol_type = other DNA
caagaagagagggtggccagccactgagtttttgtcggcagttggattgatgtttgccatcgtaggtggcttggccgagt

SEQ ID NO: 2201 - DNA, 80 bp, synthetic construct
  misc_feature 1..80: note = Synthetic: >NC_001437.1-cand-4280-4359
  source 1..80: mol_type = other DNA
tggatattgaatccatgtcaatacccttcatgctggcaggtctcatggcagtgtcctacgtggtgtcaggaaaagcaaca

SEQ ID NO: 2202 - DNA, 80 bp, synthetic construct
  misc_feature 1..80: note = Synthetic: >NC_001437.1-cand-4360-4439
  source 1..80: mol_type = other DNA
gatatgtggcttgaacgggccgccgacatcagctgggagatggatgctgcaatcacaggaagtagtcggaggctggatgt

SEQ ID NO: 2203 - DNA, 80 bp, synthetic construct
  misc_feature 1..80: note = Synthetic: >NC_001437.1-cand-4440-4519
  source 1..80: mol_type = other DNA
gaaactggatgatgacggagattttcacttgattgatgatcccggtgttccatggaaggtctgggtcctgcgcatgtctt

SEQ ID NO: 2204 - DNA, 80 bp, synthetic construct
  misc_feature 1..80: note = Synthetic: >NC_001437.1-cand-4520-4599
  source 1..80: mol_type = other DNA
gtattggcttagccgccctcacgccttgggccatcgttcccgccgctttcggttattggctcactttaaaaacaacaaaa

SEQ ID NO: 2205 - DNA, 80 bp, synthetic construct
  misc_feature 1..80: note = Synthetic: >NC_001437.1-cand-4610-4689
  source 1..80: mol_type = other DNA
tgttttgggacacgccatccccaaaaccttgctcaaaaggagacactactacaggagtctaccgaattatggctagaggg

SEQ ID NO: 2206 - DNA, 80 bp, synthetic construct
  misc_feature 1..80: note = Synthetic: >NC_001437.1-cand-4680-4759
  source 1..80: mol_type = other DNA
ggctagagggattcttggcacttaccaggccggcgtcggagtcatgtacgagaatgttttccacacactatggcacacaa

SEQ ID NO: 2207 - DNA, 80 bp, synthetic construct
  misc_feature 1..80: note = Synthetic: >NC_001437.1-cand-7310-7389
  source 1..80: mol_type = other DNA
gggctgcccagagaaggacagcggctggaataatgaagaatgccgttgttgacggaatggtcgccactgatgtgcctgaa

SEQ ID NO: 2208 - DNA, 80 bp, synthetic construct
  misc_feature 1..80: note = Synthetic: >NC_001437.1-cand-7360-7439
  source 1..80: mol_type = other DNA
gacggaatggtcgccactgatgtgcctgaactggaaaggaccacccctctgatgcaaaagaaagtcggacaggtgctcct

SEQ ID NO: 2209 - DNA, 80 bp, synthetic construct
  misc_feature 1..80: note = Synthetic: >NC_001437.1-cand-7510-7589
  source 1..80: mol_type = other DNA
gtgacggcggctacgctcactttgtgggacaatggagccagtgccgtctggaattccaccacagccacgggactctgcca

SEQ ID NO: 2210 - DNA, 80 bp, synthetic construct
  misc_feature 1..80: note = Synthetic: >NC_001437.1-cand-7550-7629
  source 1..80: mol_type = other DNA
gtgccgtctggaattccaccacagccacgggactctgccatgttatgcgaggtagctacctggctggaggttccattgct

SEQ ID NO: 2211 - DNA, 80 bp, synthetic construct
  misc_feature 1..80: note = Synthetic: >NC_001437.1-cand-7590-7669
  source 1..80: mol_type = other DNA
tgttatgcgaggtagctacctggctggaggttccattgcttggactctcatcaagaacgcggataagccctccttgaaaa

SEQ ID NO: 2212 - DNA, 80 bp, synthetic construct
  misc_feature 1..80: note = Synthetic: >NC_001437.1-cand-7710-7789
  source 1..80: mol_type = other DNA
ggaaaaactaaacgctatgagcagagaagagttttttaaataccgaagagaggccataatcgaggtggaccgcactgaag

SEQ ID NO: 2213 - DNA, 80 bp, synthetic construct
  misc_feature 1..80: note = Synthetic: >NC_001437.1-cand-7790-7869
  source 1..80: mol_type = other DNA
cacgcagggctagacgtgaaaacaacatagtgggaggacatccggtttcgcgaggctcagcaaaactccgttggctcgtg

SEQ ID NO: 2214 - DNA, 80 bp, synthetic construct
  misc_feature 1..80: note = Synthetic: >NC_001437.1-cand-7870-7949
  source 1..80: mol_type = other DNA
gagaaaggatttgtctcgccaataggaaaagtcattgatctagggtgtgggcgtggaggatggagctactacgcagcaac

SEQ ID NO: 2215 - DNA, 80 bp, synthetic construct
  misc_feature 1..80: note = Synthetic: >NC_001437.1-cand-7910-7989
  source 1..80: mol_type = other DNA
tagggtgtgggcgtggaggatggagctactacgcagcaaccctgaagaaggtccaggaagtcagaggatacacgaaaggt

SEQ ID NO: 2216 - DNA, 80 bp, synthetic construct
  misc_feature 1..80: note = Synthetic: >NC_001437.1-cand-8030-8109
  source 1..80: mol_type = other DNA
gccggaatctggtctccttgaaaagtggagtggacgtgttttacaaaccttcagaacccagtgacaccctgttctgtgac

SEQ ID NO: 2217 - DNA, 80 bp, synthetic construct
  misc_feature 1..80: note = Synthetic: >NC_001437.1-cand-8120-8199
  source 1..80: mol_type = other DNA
cctctccaagtccagaagtagaagaacaacgcacactacgcgtcctagagatgacatctgactggttgcaccgaggacct

SEQ ID NO: 2218 - DNA, 80 bp, synthetic construct
  misc_feature 1..80: note = Synthetic: >NC_001437.1-cand-8190-8269
  source 1..80: mol_type = other DNA
ccgaggacctagagagttctgcataaaagttctctgcccttacatgcccaaggttatagaaaaaatggaagttctgcagc

SEQ ID NO: 2219 - DNA, 80 bp, synthetic construct
  misc_feature 1..80: note = Synthetic: >NC_001437.1-cand-8270-8349
  source 1..80: mol_type = other DNA
gccgcttcggaggtgggctagtgcgtctccccctgtcccggaactccaatcacgagatgtattgggttagtggagccgct

SEQ ID NO: 2220 - DNA, 80 bp, synthetic construct
  misc_feature 1..80: note = Synthetic: >NC_001437.1-cand-8310-8389
  source 1..80: mol_type = other DNA
gaactccaatcacgagatgtattgggttagtggagccgctggcaatgtggtgcacgctgtgaacatgaccagccaggtac

SEQ ID NO: 2221 - DNA, 80 bp, synthetic construct
  misc_feature 1..80: note = Synthetic: >NC_001437.1-cand-8430-8509
  source 1..80: mol_type = other DNA
gtatgaggaagatgtcaacctagggagcggaacaagagccgtgggaaagggagaagtccatagcaatcaggagaaaatca

SEQ ID NO: 2222 - DNA, 80 bp, synthetic construct
  misc_feature 1..80: note = Synthetic: >NC_001437.1-cand-8510-8589
  source 1..80: mol_type = other DNA
agaagagaatccagaagctcaaagaagaattcgccacaacgtggcacaaagaccctgagcatccataccgcacttggaca

SEQ ID NO: 2223 - DNA, 80 bp, synthetic construct
  misc_feature 1..80: note = Synthetic: >NC_001449.1-cand-170-249
  source 1..80: mol_type = other DNA
cgcatctggcttcaaaactgatcgaaacggaggtggacccatccgacacgatccttgacattggaagtgcgcccgcccgc

SEQ ID NO: 2224 - DNA, 80 bp, synthetic construct
  misc_feature 1..80: note = Synthetic: >NC_001449.1-cand-250-329
  source 1..80: mol_type = other DNA
agaatgtattctaagcataagtatcattgcatctgtccgatgagatgtgcggaagatccggacagattgtacaagtatgc

SEQ ID NO: 2225 - DNA, 80 bp, synthetic construct
  misc_feature 1..80: note = Synthetic: >NC_001449.1-cand-330-409
  source 1..80: mol_type = other DNA
aactaagctgaagaaaaattgcaaggaaataactgacaaggaattggacaagaaaatgaaggagctcgccgccgtcatga

SEQ ID NO: 2226 - DNA, 80 bp, synthetic construct
  misc_feature 1..80: note = Synthetic: >NC_001449.1-cand-390-469
  source 1..80: mol_type = other DNA
ggagctcgccgccgtcatgagcgaccctgacctggaaactgagactatgtgcctccacgacgatgagtcatgtcgctacg

SEQ ID NO: 2227 - DNA, 80 bp, synthetic construct
  misc_feature 1..80: note = Synthetic: >NC_001449.1-cand-490-569
  source 1..80: mol_type = other DNA
caggatgtatacgcagttgacggaccgacaagtctctatcaccaagccaacaagggagttagagtcgcctactggatagg

SEQ ID NO: 2228 - DNA, 80 bp, synthetic construct
  misc_feature 1..80: note = Synthetic: >NC_001449.1-cand-570-649
  source 1..80: mol_type = other DNA
ctttgacaccaccccttttatgtttaagaacttggctggagcatatccatcatactctaccaactgggccgacgaaaccg

SEQ ID NO: 2229 - DNA, 80 bp, synthetic construct
  misc_feature 1..80: note = Synthetic: >NC_001449.1-cand-650-729
  source 1..80: mol_type = other DNA
tgttaacggctcgtaacataggcctatgcagctccgacgtcatggagcggtcacgtagagggatgtccattcttaggaag

SEQ ID NO: 2230 - DNA, 80 bp, synthetic construct
  misc_feature 1..80: note = Synthetic: >NC_001449.1-cand-730-809
  source 1..80: mol_type = other DNA
aagtatttgaaaccatccaataatgtcctattctctgttggctcgaccatctaccacgagaagagggacttactgaggag

SEQ ID NO: 2231 - DNA, 80 bp, synthetic construct
  misc_feature 1..80: note = Synthetic: >NC_001449.1-cand-810-889
  source 1..80: mol_type = other DNA
ctggcacctgccgtctgtatttcacttacgtggcaagcaaaattacacatgtcggtgtgagactatagttagttgcgacg

SEQ ID NO: 2232 - DNA, 80 bp, synthetic construct
  misc_feature 1..80: note = Synthetic: >NC_001449.1-cand-890-969
  source 1..80: mol_type = other DNA
ggtacgtcgttaaaagaatagctatcagtccaggcctgtatgggaagccttcaggctatgctgctacgatgcaccgcgag

SEQ ID NO: 2233 - DNA, 80 bp, synthetic construct
  misc_feature 1..80: note = Synthetic: >NC_001449.1-cand-1010-1089
  source 1..80: mol_type = other DNA
agagggtctcttttcccgtgtgcacgtatgtgccagctacattgtgtgaccaaatgactggcatactggcaacagatgtc

SEQ ID NO: 2234 - DNA, 80 bp, synthetic construct
  misc_feature 1..80: note = Synthetic: >NC_001449.1-cand-1050-1129
  source 1..80: mol_type = other DNA
attgtgtgaccaaatgactggcatactggcaacagatgtcagtgcggacgacgcgcaaaaactgctggttgggctcaacc

SEQ ID NO: 2235 - DNA, 80 bp, synthetic construct
  misc_feature 1..80: note = Synthetic: >NC_001449.1-cand-1130-1209
  source 1..80: mol_type = other DNA
agcgcatagtcgtcaacggtcgcacccaaagaaacaccaataccatgaagaattatcttttgcccgtagtggcccaggca

SEQ ID NO: 2236 - DNA, 80 bp, synthetic construct
  misc_feature 1..80: note = Synthetic: >NC_001449.1-cand-1210-1289
  source 1..80: mol_type = other DNA
tttgctaggtgggcaaaggaatataaggaagatcaagaagatgagaggccactaggactacgagatagacagttagtcat

SEQ ID NO: 2237 - DNA, 80 bp, synthetic construct
  misc_feature 1..80: note = Synthetic: >NC_001449.1-cand-1300-1379
  source 1..80: mol_type = other DNA
tgggcttttagaaggcacaagataacatctatttataagcgcccagatacccaaaccatcatcaaagtgaacagcgattt

SEQ ID NO: 2238 - DNA, 80 bp, synthetic construct
  misc_feature 1..80: note = Synthetic: >NC_001449.1-cand-1380-1459
  source 1..80: mol_type = other DNA
ccactcattcgtgctgcccaggataggcagtaacacactggagatcgggctgagaacgagaatcaggaaaatgctagaag

SEQ ID NO: 2239 - DNA, 80 bp, synthetic construct
  misc_feature 1..80: note = Synthetic: >NC_001449.1-cand-3970-4049
  source 1..80: mol_type = other DNA
ctttcatctaccttgaccaacatctatacaggttccagactccacgaagccggatgcgcaccctcatatcatgtggtgcg

SEQ ID NO: 2240 - DNA, 80 bp, synthetic construct
  misc_feature 1..80: note = Synthetic: >NC_001449.1-cand-4130-4209
  source 1..80: mol_type = other DNA
gagcgctgtataagaaattcccggaaagcttcgatttacagccgatcgaagtaggaaaagcgcgactggtcaaaggtgca

SEQ ID NO: 2241 - DNA, 80 bp, synthetic construct
  misc_feature 1..80: note = Synthetic: >NC_001449.1-cand-4190-4269
  source 1..80: mol_type = other DNA
cgcgactggtcaaaggtgcagctaaacatatcattcatgccgtaggaccaaacttcaacaaagtttcggaagttgaaggg

SEQ ID NO: 2242 - DNA, 80 bp, synthetic construct
  misc_feature 1..80: note = Synthetic: >NC_001449.1-cand-4280-4359
  source 1..80: mol_type = other DNA
tggcagaggcttatgagtccatcgctaaaattgtcaacgataacaattacaagtcagtagcgattccactgttgtccacc

SEQ ID NO: 2243 - DNA, 80 bp, synthetic construct
  misc_feature 1..80: note = Synthetic: >NC_001449.1-cand-4360-4439
  source 1..80: mol_type = other DNA
ggcatcttttccgggaacaaagatcgactaacccaatcattgaaccatttgctgacagctttagacaccactgatgcaga

SEQ ID NO: 2244 - DNA, 80 bp, synthetic construct
  misc_feature 1..80: note = Synthetic: >NC_001449.1-cand-4440-4519
  source 1..80: mol_type = other DNA
tgtagccatatactgcagggacaagaaatgggaaatgactctcaaggaagcagtggctaggagagaagcagtggaggaga

SEQ ID NO: 2245 - DNA, 80 bp, synthetic construct
  misc_feature 1..80: note = Synthetic: >NC_001449.1-cand-4520-4599
  source 1..80: mol_type = other DNA
tatgcatatcagacgactcttcggtgacagaaccggatgcagagctggtgagggtacatccgaagagttctttggctgga

SEQ ID NO: 2246 - DNA, 80 bp, synthetic construct
  misc_feature 1..80: note = Synthetic: >NC_001449.1-cand-4600-4679
  source 1..80: mol_type = other DNA
aggaagggctacagcacaagtgatggcaagactttctcatatttggaagggaccaaatttcaccaggcggccaaggatat

SEQ ID NO: 2247 - DNA, 80 bp, synthetic construct
  misc_feature 1..80: note = Synthetic: >NC_001449.1-cand-4680-4759
  source 1..80: mol_type = other DNA
agcagaaattaatgccatgtggccagttgcaacggaggccaatgagcaagtatgcatgtatatcctcggtgaaagcatga

SEQ ID NO: 2248 - DNA, 80 bp, synthetic construct
  misc_feature 1..80: note = Synthetic: >NC_001449.1-cand-4760-4839
  source 1..80: mol_type = other DNA
gcagcattaggtcgaaatgccccgtcgaggagtcggaagcctccacaccacctagcacgctgccttgcttgtgcatccat

SEQ ID NO: 2249 - DNA, 80 bp, synthetic construct
  misc_feature 1..80: note = Synthetic: >NC_001449.1-cand-4840-4919
  source 1..80: mol_type = other DNA
gctatgactccagaaagagtacaacgcctaaaagcctcacgtccagaacaaattactgtgtgctcatcctttccattgcc

SEQ ID NO: 2250 - DNA, 80 bp, synthetic construct
  misc_feature 1..80: note = Synthetic: >NC_001449.1-cand-4920-4999
  source 1..80: mol_type = other DNA
gaagtatagaatcactggtgtgcagaagatccagtgctcccagcctatactgttctcaccgaaggtgcctgcgtacattc

SEQ ID NO: 2251 - DNA, 80 bp, synthetic construct
  misc_feature 1..80: note = Synthetic: >NC_001449.1-cand-4990-5069
  source 1..80: mol_type = other DNA
gcgtacattcatccacggaagtacctcgtggaaacaccaccggtagaagagactccggagtcgccggcagagaaccaatc

SEQ ID NO: 2252 - DNA, 80 bp, synthetic construct
  misc_feature 1..80: note = Synthetic: >NC_001449.1-cand-5080-5159
  source 1..80: mol_type = other DNA
acacctgaacaaccagcacttgtaaacgtggatgcaaccaggactagaatgcctgaaccgatcatcattgaagaggaaga

SEQ ID NO: 2253 - DNA, 80 bp, synthetic construct
  misc_feature 1..80: note = Synthetic: >NC_001449.1-cand-5160-5239
  source 1..80: mol_type = other DNA
agaggatagtataagtttgctgtcagacggcccgacccaccaggtgctgcaagtcgaggcagacattcacgggtcgcctt

SEQ ID NO: 2254 - DNA, 80 bp, synthetic construct
  misc_feature 1..80: note = Synthetic: >NC_001449.1-cand-5240-5319
  source 1..80: mol_type = other DNA
ctgtatccagctcatcctggtccattcctcatgcatccgactttgatgtggacagcttatccatccttgacaccctggat

SEQ ID NO: 2255 - DNA, 80 bp, synthetic construct
  misc_feature 1..80: note = Synthetic: >NC_001449.1-cand-7870-7949
  source 1..80: mol_type = other DNA
agaagaagcccaacaagaaaccaggcaagagacagcgcatggtcatgaaattggaatctgacaagacattcccaattatg

SEQ ID NO: 2256 - DNA, 80 bp, synthetic construct
  misc_feature 1..80: note = Synthetic: >NC_001449.1-cand-7950-8029
  source 1..80: mol_type = other DNA
ctggaagggaagattaacggctacgcttgcgtggtcggagggaagttattcaggccgatgcacgtggaaggcaagatcga

SEQ ID NO: 2257 - DNA, 80 bp, synthetic construct
  misc_feature 1..80: note = Synthetic: >NC_001449.1-cand-8030-8109
  source 1..80: mol_type = other DNA
caacgacgttctggccgcacttaagacgaagaaagcatccaaatatgatcttgagtatgcagatgtgccacagaacatgc

SEQ ID NO: 2258 - DNA, 80 bp, synthetic construct
  misc_feature 1..80: note = Synthetic: >NC_001449.1-cand-8110-8189
  source 1..80: mol_type = other DNA
gggccgatacattcaagtacacccatgagaagccccaaggctattacagctggcatcatggagcagtccaatatgaaaat

SEQ ID NO: 2259 - DNA, 80 bp, synthetic construct
  misc_feature 1..80: note = Synthetic: >NC_001449.1-cand-8220-8299
  source 1..80: mol_type = other DNA
gccaagggagacagcggaagacccattctggataatcagggacgggtggtcgctattgtgctgggaggtgtgaatgaagg

SEQ ID NO: 2260 - DNA, 80 bp, synthetic construct
  misc_feature 1..80: note = Synthetic: >NC_001449.1-cand-8260-8339
  source 1..80: mol_type = other DNA
gacgggtggtcgctattgtgctgggaggtgtgaatgaaggatctaggacagccctttcagtcgtcatgtggaacgagaag

SEQ ID NO: 2261 - DNA, 80 bp, synthetic construct
  misc_feature 1..80: note = Synthetic: >NC_001449.1-cand-8340-8419
  source 1..80: mol_type = other DNA
ggagtaactgtgaagtatactccggagaactgcgagcaatggtcactagtgaccactatgtgcctgctcgccaatgtgac

SEQ ID NO: 2262 - DNA, 80 bp, synthetic construct
  misc_feature 1..80: note = Synthetic: >NC_001449.1-cand-8420-8499
  source 1..80: mol_type = other DNA
gttcccatgtgccgaaccaccaatttgctacgacagaaaaccagcagagactttggccatgctcagcgttaacgttgaca

SEQ ID NO: 2263 - DNA, 80 bp, synthetic construct
  misc_feature 1..80: note = Synthetic: >NC_001449.1-cand-8500-8579
  source 1..80: mol_type = other DNA
acccgggctacgatgagctgctggaagcagctgttaagtgccccggaagaaaaaggagatctaccgaggagctgtttaag

SEQ ID NO: 2264 - DNA, 80 bp, synthetic construct
  misc_feature 1..80: note = Synthetic: >NC_001449.1-cand-8580-8659
  source 1..80: mol_type = other DNA
gagtataagctaacgcgcccttacatggccagatgcatcagatgtgccgttgggagctgccatagtccaatagcaattga

SEQ ID NO: 2265 - DNA, 80 bp, synthetic construct
  misc_feature 1..80: note = Synthetic: >NC_001449.1-cand-8660-8739
  source 1..80: mol_type = other DNA
ggcagtgaagagcgacgggcacgacggctatgttagacttcagacttcctcgcagtatggcctggattcctctggcaact

SEQ ID NO: 2266 - DNA, 80 bp, synthetic construct
  misc_feature 1..80: note = Synthetic: >NC_001449.1-cand-8740-8819
  source 1..80: mol_type = other DNA
taaagggaaggactatgcggtatgatatgcacgggaccattgaagagataccactacatcaagtgtcactccacacatct

SEQ ID NO: 2267 - DNA, 80 bp, synthetic construct
  misc_feature 1..80: note = Synthetic: >NC_001449.1-cand-8800-8879
  source 1..80: mol_type = other DNA
aagtgtcactccacacatctcgcccgtgtcacattgtggatgggcatggttattttctgcttgctaggtgcccggcaggg

SEQ ID NO: 2268 - DNA, 80 bp, synthetic construct
  misc_feature 1..80: note = Synthetic: >NC_001449.1-cand-8900-8979
  source 1..80: mol_type = other DNA
taagaaaggttcagtcacacactcctgctcagtgccgtatgaagtgaaatttaatcctgtaggcagagaactctacactc

SEQ ID NO: 2269 - DNA, 80 bp, synthetic construct
  misc_feature 1..80: note = Synthetic: >NC_001449.1-cand-8980-9059
  source 1..80: mol_type = other DNA
atccaccagaacacggagcagagcaagcgtgccaagtctacgcgcacgatgcacagaacagaggagcttatgtcgagatg

SEQ ID NO: 2270 - DNA, 80 bp, synthetic construct
  misc_feature 1..80: note = Synthetic: >NC_001449.1-cand-9060-9139
  source 1..80: mol_type = other DNA
cacctcccgggctcagaagtggacagcagtttgatttccttgagcggcagttcagtcaccgtgacacctcctgtcgggac

SEQ ID NO: 2271 - DNA, 80 bp, synthetic construct
  misc_feature 1..80: note = Synthetic: >NC_001472.1-cand-500-579
  source 1..80: mol_type = other DNA
ggcagtgtgtcgtaacgggcaactctgcagcggaaccgactactttgggtgtccgtgtttcattttattcctatactggc

SEQ ID NO: 2272 - DNA, 80 bp, synthetic construct
  misc_feature 1..80: note = Synthetic: >NC_001472.1-cand-550-629
  source 1..80: mol_type = other DNA
gtccgtgtttcattttattcctatactggctgcttatggtgacaattgacaggttgttaccatatagttattggattggc

SEQ ID NO: 2273 - DNA, 80 bp, synthetic construct
  misc_feature 1..80: note = Synthetic: >NC_001472.1-cand-630-709
  source 1..80: mol_type = other DNA
catccggtgactaacagagcaattatatatctctttgttgggtttataccacttagcttgaaagaggttaaaacactaca

SEQ ID NO: 2274 - DNA, 80 bp, synthetic construct
  misc_feature 1..80: note = Synthetic: >NC_001472.1-cand-750-829
  source 1..80: mol_type = other DNA
tatcaacacaaaagactggagcacatgagaccgggctgaatgcaagcgggaattccatcatccattacacaaacataaac

SEQ ID NO: 2275 - DNA, 80 bp, synthetic construct
  misc_feature 1..80: note = Synthetic: >NC_001472.1-cand-790-869
  source 1..80: mol_type = other DNA
tgcaagcgggaattccatcatccattacacaaacataaactactataaagatgctgcatccaactcagccaacagacagg

SEQ ID NO: 2276 - DNA, 80 bp, synthetic construct
  misc_feature 1..80: note = Synthetic: >NC_001472.1-cand-870-949
  source 1..80: mol_type = other DNA
atttcactcaagacccaggtaaatttactgagccagtgaaggacattatgatcaaatcgatgccagcattgaactccccc

SEQ ID NO: 2277 - DNA, 80 bp, synthetic construct
  misc_feature 1..80: note = Synthetic: >NC_001472.1-cand-950-1029
  source 1..80: mol_type = other DNA
tctgccgaagagtgtggttatagtgacagggttcgatcaataaccctcgggaactccactatcacaacacaggagtgtgc

SEQ ID NO: 2278 - DNA, 80 bp, synthetic construct
  misc_feature 1..80: note = Synthetic: >NC_001472.1-cand-1030-1109
  source 1..80: mol_type = other DNA
taatgttgtggttgggtatggtgtgtggccagaatatttgaaggacaatgaagccacaggcgaggaccaaccaacacaac

SEQ ID NO: 2279 - DNA, 80 bp, synthetic construct
  misc_feature 1..80: note = Synthetic: >NC_001472.1-cand-1110-1189
  source 1..80: mol_type = other DNA
ccgacgtggccacatgtcggttctacactttagagtccgtgcagtggatgaagaattcagcaggttggtggtggaagtta

SEQ ID NO: 2280 - DNA, 80 bp, synthetic construct
  misc_feature 1..80: note = Synthetic: >NC_001472.1-cand-1220-1299
  source 1..80: mol_type = other DNA
ggacaaaatatgcagtaccactacttagggagaacaggctacaccatccacgtgcagtgcaacgcatctaagtttcatca

SEQ ID NO: 2281 - DNA, 80 bp, synthetic construct
  misc_feature 1..80: note = Synthetic: >NC_001472.1-cand-1270-1349
  source 1..80: mol_type = other DNA
cgtgcagtgcaacgcatctaagtttcatcagggctgtctactagtggtgtgtgtgccggaagcggaaatgggatgctcaa

SEQ ID NO: 2282 - DNA, 80 bp, synthetic construct
  misc_feature 1..80: note = Synthetic: >NC_001472.1-cand-1340-1419
  source 1..80: mol_type = other DNA
ggatgctcaaatctaaacaacaccccaaagtttgctgaactttccggaggagataatgctagaatgttcactgacaccga

SEQ ID NO: 2283 - DNA, 80 bp, synthetic construct
  misc_feature 1..80: note = Synthetic: >NC_001472.1-cand-1430-1509
  source 1..80: mol_type = other DNA
tccaacgataagaaagtacaaacagcagtgtggaatgcaggtatgggtgttggtgttggcaacctgactatattcccaca

SEQ ID NO: 2284 - DNA, 80 bp, synthetic construct
  misc_feature 1..80: note = Synthetic: >NC_001472.1-cand-1510-1589
  source 1..80: mol_type = other DNA
ccagtggatcaacctgaggacaaacaatagtgctaccattgtaatgccttacatcaacagcgttcccatggacaacatgt

SEQ ID NO: 2285 - DNA, 80 bp, synthetic construct
  misc_feature 1..80: note = Synthetic: >NC_001472.1-cand-1590-1669
  source 1..80: mol_type = other DNA
atagacacaacaacttgacactgatgataatcccattcgtcccgctcaactatagtgagggatcatcaccttacgtacca

SEQ ID NO: 2286 - DNA, 80 bp, synthetic construct
  misc_feature 1..80: note = Synthetic: >NC_001472.1-cand-1670-1749
  source 1..80: mol_type = other DNA
atcacagtcacaattgcgccaatgtgcgcagaatacaatggccttagactggctagtagccagggtttgcccgtcatgac

SEQ ID NO: 2287 - DNA, 80 bp, synthetic construct
  misc_feature 1..80: note = Synthetic: >NC_001472.1-cand-4300-4379
  source 1..80: mol_type = other DNA
acccctgtatgcggccgaagcaaaaagggtgttctcccttgagaagaaaatgagtaactacatacagttcaagtccaaat

SEQ ID NO: 2288 - DNA, 80 bp, synthetic construct
  misc_feature 1..80: note = Synthetic: >NC_001472.1-cand-4380-4459
  source 1..80: mol_type = other DNA
gccgtattgaacctgtatgcttgctcttgcacgggagtcctggtgcagggaagtcagttgccactaacctgattgggcgc

SEQ ID NO: 2289 - DNA, 80 bp, synthetic construct
  misc_feature 1..80: note = Synthetic: >NC_001472.1-cand-4460-4539
  source 1..80: mol_type = other DNA
tcactcgcggagaagcttaatagctctgtgtactctctaccaccagacccagaccattttgacggttacaaacaacaggc

SEQ ID NO: 2290 - DNA, 80 bp, synthetic construct
  misc_feature 1..80: note = Synthetic: >NC_001472.1-cand-4540-4619
  source 1..80: mol_type = other DNA
cgttgtgatcatggatgatttatgccagaacccagatggtaaggatgtttctttgttttgtcaaatggtctccagtgtgg

SEQ ID NO: 2291 - DNA, 80 bp, synthetic construct
  misc_feature 1..80: note = Synthetic: >NC_001472.1-cand-4620-4699
  source 1..80: mol_type = other DNA
actttgtaccgccaatggcagcgctagaagagaaaggcattttgttcacctctccctttgtcctggcttcaaccaacgcc

SEQ ID NO: 2292 - DNA, 80 bp, synthetic construct
  misc_feature 1..80: note = Synthetic: >NC_001472.1-cand-4700-4779
  source 1..80: mol_type = other DNA
ggctctattaatgctccaacagtttcagacagtagggcactggctaggaggtttcactttgatatgaacatcgaggtcat

SEQ ID NO: 2293 - DNA, 80 bp, synthetic construct
  misc_feature 1..80: note = Synthetic: >NC_001472.1-cand-4860-4939
  source 1..80: mol_type = other DNA
ttaagaaatgctgccccttagtgtgtggaaaggctatccagtttatagatagaaggacacaagtcagatactcccttgac

SEQ ID NO: 2294 - DNA, 80 bp, synthetic construct
  misc_feature 1..80: note = Synthetic: >NC_001472.1-cand-4910-4989
  source 1..80: mol_type = other DNA
agaaggacacaagtcagatactcccttgacatgctggtaactgagatgttcagagaatataaccatagacatagtgttgg

SEQ ID NO: 2295 - DNA, 80 bp, synthetic construct
  misc_feature 1..80: note = Synthetic: >NC_001472.1-cand-5020-5099
  source 1..80: mol_type = other DNA
gccaatatatagagagattaagatcagtattgcgccagagacgccaccaccacctgccattgcagatctactcaaatcag

SEQ ID NO: 2296 - DNA, 80 bp, synthetic construct
  misc_feature 1..80: note = Synthetic: >NC_001472.1-cand-5100-5179
  source 1..80: mol_type = other DNA
tagacagtgaggctgtgagggagtactgcaaagaaaaaggatggctggttccagagatcaactccaccctgcagattgaa

SEQ ID NO: 2297 - DNA, 80 bp, synthetic construct
  misc_feature 1..80: note = Synthetic: >NC_001472.1-cand-5180-5259
  source 1..80: mol_type = other DNA
aagcacgtcagtagggcctttatctgtttgcaagcattgactacttttgtctcagtagcaggaatcatctacataatata

SEQ ID NO: 2298 - DNA, 80 bp, synthetic construct
  misc_feature 1..80: note = Synthetic: >NC_001472.1-cand-5250-5329
  source 1..80: mol_type = other DNA
acataatatataaactcttcgcaggctttcaaggagcatacacgggaatgcccaatcagaagcccaaggtacccactctc

SEQ ID NO: 2299 - DNA, 80 bp, synthetic construct
  misc_feature 1..80: note = Synthetic: >NC_001472.1-cand-5330-5409
  source 1..80: mol_type = other DNA
cgtcaagcaaaagtacaaggacctgtatttgagtttgccgtagccatgatgaagaggaattcgagcacagtgaaaactga

SEQ ID NO: 2300 - DNA, 80 bp, synthetic construct
  misc_feature 1..80: note = Synthetic: >NC_001472.1-cand-5410-5489
  source 1..80: mol_type = other DNA
atacggtgagttcactatgctgggtatctatgataggtgggctgttttgccacgtcatgccaaacctgggccaaccatct

SEQ ID NO: 2301 - DNA, 80 bp, synthetic construct
  misc_feature 1..80: note = Synthetic: >NC_001472.1-cand-5490-5569
  source 1..80: mol_type = other DNA
taatgaatgatcaagaaattggtgtgctagacgccaaggagttagtggacaaggacggtacaaacttggaactgacacta

SEQ ID NO: 2302 - DNA, 80 bp, synthetic construct
  misc_feature 1..80: note = Synthetic: >NC_001472.1-cand-5610-5689
  source 1..80: mol_type = other DNA
gcttcttagccaaggaagaggtggaggttaatgaggctgtgctagcaattaacaccagcaagttccctaacatgtatatc

SEQ ID NO: 2303 - DNA, 80 bp, synthetic construct
  misc_feature 1..80: note = Synthetic: >NC_001472.1-cand-6980-7059
  source 1..80: mol_type = other DNA
gattgcttcaatgaagtcacctgggctaatgtcacatttctaaagaggtattttagagcagatgaacagtaccccttttt

SEQ ID NO: 2304 - DNA, 80 bp, synthetic construct
  misc_feature 1..80: note = Synthetic: >NC_001472.1-cand-7050-7129
  source 1..80: mol_type = other DNA
acccctttttagtgcaccccgtcatgcctatgaaagacatacatgaatcaatcagatggaccaaggacccaaagaacacc

SEQ ID NO: 2305 - DNA, 80 bp, synthetic construct
  misc_feature 1..80: note = Synthetic: >NC_001472.1-cand-7090-7169
  source 1..80: mol_type = other DNA
acatgaatcaatcagatggaccaaggacccaaagaacacccaagatcatgtgcgctcgttgtgcttattggcctggcaca

SEQ ID NO: 2306 - DNA, 80 bp, synthetic construct
  misc_feature 1..80: note = Synthetic: >NC_001472.1-cand-7210-7289
  source 1..80: mol_type = other DNA
aagcgtcccagttggagcttgcttgactctacctgcgttttcaactctacgcaggaagtggttggactctttttaaatta

SEQ ID NO: 2307 - DNA, 80 bp, synthetic construct
  misc_feature 1..80: note = Synthetic: >NC_001472.1-cand-7280-7359
  source 1..80: mol_type = other DNA
ttttaaattagagacaatttgaactaattttaattggcttaaccctaccgcactaaccgaactagataacggtgcagtgg

SEQ ID NO: 2308 - DNA, 80 bp, synthetic construct
  misc_feature 1..80: note = Synthetic: >NC_001474.2-cand-0-79
  source 1..80: mol_type = other DNA
gttagtctacgtggaccgacaaagacagattctttgagggagctaagctcaacgtagttctaacagttttttaattagag

SEQ ID NO: 2309 - DNA, 80 bp, synthetic construct
  misc_feature 1..80: note = Synthetic: >NC_001474.2-cand-80-159
  source 1..80: mol_type = other DNA
agcagatctctgatgaataaccaacggaaaaaggcgaaaaacacgcctttcaatatgctgaaacgcgagagaaaccgcgt

SEQ ID NO: 2310 - DNA, 80 bp, synthetic construct
  misc_feature 1..80: note = Synthetic: >NC_001474.2-cand-160-239
  source 1..80: mol_type = other DNA
gtcgactgtgcaacagctgacaaagagattctcacttggaatgctgcagggacgaggaccattaaaactgttcatggccc

SEQ ID NO: 2311 - DNA, 80 bp, synthetic construct
  misc_feature 1..80: note = Synthetic: >NC_001474.2-cand-220-299
  source 1..80: mol_type = other DNA
attaaaactgttcatggccctggtggcgttccttcgtttcctaacaatcccaccaacagcagggatattgaagagatggg

SEQ ID NO: 2312 - DNA, 80 bp, synthetic construct
  misc_feature 1..80: note = Synthetic: >NC_001474.2-cand-320-399
  source 1..80: mol_type = other DNA
gctattaatgttttgagagggttcaggaaagagattggaaggatgctgaacatcttgaataggagacgcagatctgcagg

SEQ ID NO: 2313 - DNA, 80 bp, synthetic construct
  misc_feature 1..80: note = Synthetic: >NC_001474.2-cand-400-479
  source 1..80: mol_type = other DNA
catgatcattatgctgattccaacagtgatggcgttccatttaaccacacgtaacggagaaccacacatgatcgtcagca

SEQ ID NO: 2314 - DNA, 80 bp, synthetic construct
  misc_feature 1..80: note = Synthetic: >NC_001474.2-cand-480-559
  source 1..80: mol_type = other DNA
gacaagagaaagggaaaagtcttctgtttaaaacagaggatggcgtgaacatgtgtaccctcatggccatggaccttggt

SEQ ID NO: 2315 - DNA, 80 bp, synthetic construct
  misc_feature 1..80: note = Synthetic: >NC_001474.2-cand-560-639
  source 1..80: mol_type = other DNA
gaattgtgtgaagacacaatcacgtacaagtgtccccttctcaggcagaatgagccagaagacatagactgttggtgcaa

SEQ ID NO: 2316 - DNA, 80 bp, synthetic construct
  misc_feature 1..80: note = Synthetic: >NC_001474.2-cand-640-719
  source 1..80: mol_type = other DNA
ctctacgtccacgtgggtaacttatgggacgtgtaccaccatgggagaacatagaagagaaaaaagatcagtggcactcg

SEQ ID NO: 2317 - DNA, 80 bp, synthetic construct
  misc_feature 1..80: note = Synthetic: >NC_001474.2-cand-690-769
  source 1..80: mol_type = other DNA
atagaagagaaaaaagatcagtggcactcgttccacatgtgggaatgggactggagacacgaactgaaacatggatgtca

SEQ ID NO: 2318 - DNA, 80 bp, synthetic construct
  misc_feature 1..80: note = Synthetic: >NC_001474.2-cand-800-879
  source 1..80: mol_type = other DNA
attgaaacttggatcttgagacatccaggcttcaccatgatggcagcaatcctggcatacaccataggaacgacacattt

SEQ ID NO: 2319 - DNA, 80 bp, synthetic construct
  misc_feature 1..80: note = Synthetic: >NC_001474.2-cand-3420-3499
  source 1..80: mol_type = other DNA
tcagaccattgaaggagaaagaagagaatttggtcaactccttggtcacagctggacatgggcaggtcgacaacttttca

SEQ ID NO: 2320 - DNA, 80 bp, synthetic construct
  misc_feature 1..80: note = Synthetic: >NC_001474.2-cand-3500-3579
  source 1..80: mol_type = other DNA
ctaggagtcttgggaatggcattgttcctggaggaaatgcttaggacccgagtaggaacgaaacatgcaatactactagt

SEQ ID NO: 2321 - DNA, 80 bp, synthetic construct
  misc_feature 1..80: note = Synthetic: >NC_001474.2-cand-3580-3659
  source 1..80: mol_type = other DNA
tgcagtttcttttgtgacattgatcacagggaacatgtcctttagagacctgggaagagtgatggttatggtaggcgcca

SEQ ID NO: 2322 - DNA, 80 bp, synthetic construct
  misc_feature 1..80: note = Synthetic: >NC_001474.2-cand-3660-3739
  source 1..80: mol_type = other DNA
ctatgacggatgacataggtatgggcgtgacttatcttgccctactagcagccttcaaagtcagaccaacttttgcagct

SEQ ID NO: 2323 - DNA, 80 bp, synthetic construct
  misc_feature 1..80: note = Synthetic: >NC_001474.2-cand-3740-3819
  source 1..80: mol_type = other DNA
ggactactcttgagaaagctgacctccaaggaattgatgatgactactataggaattgtactcctctcccagagcaccat

SEQ ID NO: 2324 - DNA, 80 bp, synthetic construct
  misc_feature 1..80: note = Synthetic: >NC_001474.2-cand-3820-3899
  source 1..80: mol_type = other DNA
accagagaccattcttgagttgactgatgcgttagccttaggcatgatggtcctcaaaatggtgagaaatatggaaaagt

SEQ ID NO: 2325 - DNA, 80 bp, synthetic construct
  misc_feature 1..80: note = Synthetic: >NC_001474.2-cand-3900-3979
  source 1..80: mol_type = other DNA
atcaattggcagtgactatcatggctatcttgtgcgtcccaaacgcagtgatattacaaaacgcatggaaagtgagttgc

SEQ ID NO: 2326 - DNA, 80 bp, synthetic construct
  misc_feature 1..80: note = Synthetic: >NC_001474.2-cand-3980-4059
  source 1..80: mol_type = other DNA
acaatattggcagtggtgtccgtttccccactgctcttaacatcctcacagcaaaaaacagattggataccattagcatt

SEQ ID NO: 2327 - DNA, 80 bp, synthetic construct
  misc_feature 1..80: note = Synthetic: >NC_001474.2-cand-4060-4139
  source 1..80: mol_type = other DNA
gacgatcaaaggtctcaatccaacagctatttttctaacaaccctctcaagaaccagcaagaaaaggagctggccattaa

SEQ ID NO: 2328 - DNA, 80 bp, synthetic construct
  misc_feature 1..80: note = Synthetic: >NC_001474.2-cand-4140-4219
  source 1..80: mol_type = other DNA
atgaggctatcatggcagtcgggatggtgagcattttagccagttctctcctaaaaaatgatattcccatgacaggacca

SEQ ID NO: 2329 - DNA, 80 bp, synthetic construct
  misc_feature 1..80: note = Synthetic: >NC_001474.2-cand-4220-4299
  source 1..80: mol_type = other DNA
ttagtggctggagggctcctcactgtgtgctacgtgctcactggacgatcggccgatttggaactggagagagcagccga

SEQ ID NO: 2330 - DNA, 80 bp, synthetic construct
  misc_feature 1..80: note = Synthetic: >NC_001474.2-cand-4300-4379
  source 1..80: mol_type = other DNA
tgtcaaatgggaagaccaggcagagatatcaggaagcagtccaatcctgtcaataacaatatcagaagatggtagcatgt

SEQ ID NO: 2331 - DNA, 80 bp, synthetic construct
  misc_feature 1..80: note = Synthetic: >NC_001474.2-cand-4380-4459
  source 1..80: mol_type = other DNA
cgataaaaaatgaagaggaagaacaaacactgaccatactcattagaacaggattgctggtgatctcaggactttttcct

SEQ ID NO: 2332 - DNA, 80 bp, synthetic construct
  misc_feature 1..80: note = Synthetic: >NC_001474.2-cand-4460-4539
  source 1..80: mol_type = other DNA
gtatcaataccaatcacggcagcagcatggtacctgtgggaagtgaagaaacaacgggccggagtattgtgggatgttcc

SEQ ID NO: 2333 - DNA, 80 bp, synthetic construct
  misc_feature 1..80: note = Synthetic: >NC_001474.2-cand-4540-4619
  source 1..80: mol_type = other DNA
ttcacccccacccatgggaaaggctgaactggaagatggagcctatagaattaagcaaaaagggattcttggatattccc

SEQ ID NO: 2334 - DNA, 80 bp, synthetic construct
  misc_feature 1..80: note = Synthetic: >NC_001474.2-cand-4620-4699
  source 1..80: mol_type = other DNA
agatcggagccggagtttacaaagaaggaacattccatacaatgtggcatgtcacacgtggcgctgttctaatgcataaa

SEQ ID NO: 2335 - DNA, 80 bp, synthetic construct
  misc_feature 1..80: note = Synthetic: >NC_001474.2-cand-7300-7379
  source 1..80: mol_type = other DNA
tgatccaaagtttgaaaagcagttgggacaagtaatgctcctagtcctctgcgtgactcaagtattgatgatgaggacta

SEQ ID NO: 2336 - DNA, 80 bp, synthetic construct
  misc_feature 1..80: note = Synthetic: >NC_001474.2-cand-7380-7459
  source 1..80: mol_type = other DNA
catgggctctgtgtgaggctttaaccttagctaccgggcccatctccacattgtgggaaggaaatccagggaggttttgg

SEQ ID NO: 2337 - DNA, 80 bp, synthetic construct
  misc_feature 1..80: note = Synthetic: >NC_001474.2-cand-7460-7539
  source 1..80: mol_type = other DNA
aacactaccattgcggtgtcaatggctaacatttttagagggagttacttggccggagctggacttctcttttctattat

SEQ ID NO: 2338 - DNA, 80 bp, synthetic construct
  misc_feature 1..80: note = Synthetic: >NC_001474.2-cand-7570-7649
  source 1..80: mol_type = other DNA
tggcaacataggagagacgcttggagagaaatggaaaagccgattgaacgcattgggaaaaagtgaattccagatctaca

SEQ ID NO: 2339 - DNA, 80 bp, synthetic construct
  misc_feature 1..80: note = Synthetic: >NC_001474.2-cand-7610-7689
  source 1..80: mol_type = other DNA
cgattgaacgcattgggaaaaagtgaattccagatctacaagaaaagtggaatccaggaagtggatagaaccttagcaaa

SEQ ID NO: 2340 - DNA, 80 bp, synthetic construct
  misc_feature 1..80: note = Synthetic: >NC_001474.2-cand-7690-7769
  source 1..80: mol_type = other DNA
agaaggcattaaaagaggagaaacggaccatcacgctgtgtcgcgaggctcagcaaaactgagatggttcgttgagagaa

SEQ ID NO: 2341 - DNA, 80 bp, synthetic construct
  misc_feature 1..80: note = Synthetic: >NC_001474.2-cand-7770-7849
  source 1..80: mol_type = other DNA
acatggtcacaccagaagggaaagtagtggacctcggttgtggcagaggaggctggtcatactattgtggaggactaaag

SEQ ID NO: 2342 - DNA, 80 bp, synthetic construct
  misc_feature 1..80: note = Synthetic: >NC_001474.2-cand-7850-7929
  source 1..80: mol_type = other DNA
aatgtaagagaagtcaaaggcctaacaaaaggaggaccaggacacgaagaacccatccccatgtcaacatatgggtggaa

SEQ ID NO: 2343 - DNA, 80 bp, synthetic construct
  misc_feature 1..80: note = Synthetic: >NC_001474.2-cand-7920-7999
  source 1..80: mol_type = other DNA
atgggtggaatctagtgcgtcttcaaagtggagttgacgttttcttcatcccgccagaaaagtgtgacacattattgtgt

SEQ ID NO: 2344 - DNA, 80 bp, synthetic construct
  misc_feature 1..80: note = Synthetic: >NC_001474.2-cand-8010-8089
  source 1..80: mol_type = other DNA
agtcatcaccaaatcccacagtggaagcaggacgaacactcagagtccttaacttagtagaaaattggttgaacaacaac

SEQ ID NO: 2345 - DNA, 80 bp, synthetic construct
  misc_feature 1..80: note = Synthetic: >NC_001474.2-cand-8090-8169
  source 1..80: mol_type = other DNA
actcaattttgcataaaggttctcaacccatatatgccctcagtcatagaaaaaatggaagcactacaaaggaaatatgg

SEQ ID NO: 2346 - DNA, 80 bp, synthetic construct
  misc_feature 1..80: note = Synthetic: >NC_001474.2-cand-8170-8249
  source 1..80: mol_type = other DNA
aggagccttagtgaggaatccactctcacgaaactccacacatgagatgtactgggtatccaatgcttccgggaacatag

SEQ ID NO: 2347 - DNA, 80 bp, synthetic construct
  misc_feature 1..80: note = Synthetic: >NC_001474.2-cand-8250-8329
  source 1..80: mol_type = other DNA
tgtcatcagtgaacatgatttcaaggatgttgatcaacagatttacaatgagatacaagaaagccacttacgagccggat

SEQ ID NO: 2348 - DNA, 80 bp, synthetic construct
  misc_feature 1..80: note = Synthetic: >NC_001474.2-cand-8330-8409
  source 1..80: mol_type = other DNA
gttgacctcggaagcggaacccgtaacatcgggattgaaagtgagataccaaacctagatataattgggaaaagaataga

SEQ ID NO: 2349 - DNA, 80 bp, synthetic construct
  misc_feature 1..80: note = Synthetic: >NC_001474.2-cand-8410-8489
  source 1..80: mol_type = other DNA
aaaaataaagcaagagcatgaaacatcatggcactatgaccaagaccacccatacaaaacgtgggcataccatggtagct

SEQ ID NO: 2350 - DNA, 80 bp, synthetic construct
  misc_feature 1..80: note = Synthetic: >NC_001474.2-cand-8490-8569
  source 1..80: mol_type = other DNA
atgaaacaaaacagactggatcagcatcatccatggtcaacggagtggtcaggctgctgacaaaaccttgggacgtcgtc

SEQ ID NO: 2351 - DNA, 80 bp, synthetic construct
  misc_feature 1..80: note = Synthetic: >NC_001475.2-cand-560-639
  source 1..80: mol_type = other DNA
gatgtgtgatgacacggtcacttacaaatgcccccacattaccgaagtggaacctgaagacattgactgctggtgcaacc

SEQ ID NO: 2352 - DNA, 80 bp, synthetic construct
  misc_feature 1..80: note = Synthetic: >NC_001475.2-cand-640-719
  source 1..80: mol_type = other DNA
ttacatcaacatgggtgacttatggaacgtgcaatcaagctggagagcatagacgcgacaagagatcagtggcgttagct

SEQ ID NO: 2353 - DNA, 80 bp, synthetic construct
  misc_feature 1..80: note = Synthetic: >NC_001475.2-cand-720-799
  source 1..80: mol_type = other DNA
ccccatgtcggcatgggactggacacacgcacccaaacctggatgtcggctgaaggagcttggagacaagtcgagaaggt

SEQ ID NO: 2354 - DNA, 80 bp, synthetic construct
  misc_feature 1..80: note = Synthetic: >NC_001475.2-cand-800-879
  source 1..80: mol_type = other DNA
agagacatgggcccttaggcacccagggttcaccatactagccctatttctcgcccattacataggcacttccctgaccc

SEQ ID NO: 2355 - DNA, 80 bp, synthetic construct
  misc_feature 1..80: note = Synthetic: >NC_001475.2-cand-880-959
  source 1..80: mol_type = other DNA
agaaggtggttattttcatattattaatgctggtcaccccatccatgacaatgagatgtgtgggagtaggaaacagagat

SEQ ID NO: 2356 - DNA, 80 bp, synthetic construct
  misc_feature 1..80: note = Synthetic: >NC_001475.2-cand-930-1009
  source 1..80: mol_type = other DNA
atgagatgtgtgggagtaggaaacagagattttgtggaagggctatcaggagctacgtgggttgacgtggtgctcgagca

SEQ ID NO: 2357 - DNA, 80 bp, synthetic construct
  misc_feature 1..80: note = Synthetic: >NC_001475.2-cand-1030-1109
  source 1..80: mol_type = other DNA
tggctaagaacaagcccacgctggatatagagcttcagaagaccgaggccacccaactggcgaccctaaggaagctatgc

SEQ ID NO: 2358 - DNA, 80 bp, synthetic construct
  misc_feature 1..80: note = Synthetic: >NC_001475.2-cand-1120-1199
  source 1..80: mol_type = other DNA
aaattaccaacataacaactgactcaagatgtcctacccaaggggaagcggttttgcctgaggagcaggaccagaactac

SEQ ID NO: 2359 - DNA, 80 bp, synthetic construct
  misc_feature 1..80: note = Synthetic: >NC_001475.2-cand-1240-1319
  source 1..80: mol_type = other DNA
gttgtggtttgtttggcaaaggaagcttggtaacatgtgcgaaatttcaatgcctggaaccaatagagggaaaagtggtg

SEQ ID NO: 2360 - DNA, 80 bp, synthetic construct
  misc_feature 1..80: note = Synthetic: >NC_001475.2-cand-1280-1359
  source 1..80: mol_type = other DNA
gaaatttcaatgcctggaaccaatagagggaaaagtggtgcaatatgagaacctcaaatacaccgtcatcattacagtgc

SEQ ID NO: 2361 - DNA, 80 bp, synthetic construct
  misc_feature 1..80: note = Synthetic: >NC_001475.2-cand-1360-1439
  source 1..80: mol_type = other DNA
acacaggagaccaacaccaggtgggaaatgaaacgcaaggagtcacggctgagataacacctcaggcatcaaccactgaa

SEQ ID NO: 2362 - DNA, 80 bp, synthetic construct
  misc_feature 1..80: note = Synthetic: >NC_001475.2-cand-1440-1519
  source 1..80: mol_type = other DNA
gccatcttgcctgaatatggaacccttgggctagaatgctcaccacggacaggtttggatttcaatgaaatgatcttact

SEQ ID NO: 2363 - DNA, 80 bp, synthetic construct
  misc_feature 1..80: note = Synthetic: >NC_001475.2-cand-1520-1599
  source 1..80: mol_type = other DNA
aacaatgaagaacaaagcatggatggtacatagacaatggttctttgacctacctctaccatgggcatcaggagctacaa

SEQ ID NO: 2364 - DNA, 80 bp, synthetic construct
  misc_feature 1..80: note = Synthetic: >NC_001475.2-cand-1600-1679
  source 1..80: mol_type = other DNA
cagaaacaccaacctggaacaggaaggagcttcttgtgacattcaaaaacgcacatgcgaaaaaacaagaagtagttgtc

SEQ ID NO: 2365 - DNA, 80 bp, synthetic construct
  misc_feature 1..80: note = Synthetic: >NC_001475.2-cand-1680-1759
  source 1..80: mol_type = other DNA
cttggatcgcaagagggagcaatgcataccgcactgacaggagctacagaaatccaaaactcaggaggcacaagcatttt

SEQ ID NO: 2366 - DNA, 80 bp, synthetic construct
  misc_feature 1..80: note = Synthetic: >NC_001475.2-cand-1810-1889
  source 1..80: mol_type = other DNA
ggatgagctatgcaatgtgcacgaatacctttgtgttgaagaaagaagtctcagaaacgcagcacgggacaatactcatt

SEQ ID NO: 2367 - DNA, 80 bp, synthetic construct
  misc_feature 1..80: note = Synthetic: >NC_001475.2-cand-4390-4469
  source 1..80: mol_type = other DNA
ctgagaacatcctaacagtgcttttaaaaacagcattactaatagtatcaggcatttttccatactccatacccgcaaca

SEQ ID NO: 2368 - DNA, 80 bp, synthetic construct
  misc_feature 1..80: note = Synthetic: >NC_001475.2-cand-4470-4549
  source 1..80: mol_type = other DNA
ttgttggtctggcacacttggcaaaaacaaacccaaagatccggcgttttatgggacgtacccagccccccagagacaca

SEQ ID NO: 2369 - DNA, 80 bp, synthetic construct
  misc_feature 1..80: note = Synthetic: >NC_001475.2-cand-4490-4569
  source 1..80: mol_type = other DNA
gcaaaaacaaacccaaagatccggcgttttatgggacgtacccagccccccagagacacagaaagcagaactggaagaag

SEQ ID NO: 2370 - DNA, 80 bp, synthetic construct
  misc_feature 1..80: note = Synthetic: >NC_001475.2-cand-4680-4759
  source 1..80: mol_type = other DNA
ttgacacataatgggaaaagactggaaccaaactgggctagtgtgaaaaaagatctgatttcatatggaggaggatggag

SEQ ID NO: 2371 - DNA, 80 bp, synthetic construct
  misc_feature 1..80: note = Synthetic: >NC_001475.2-cand-4700-4779
  source 1..80: mol_type = other DNA
actggaaccaaactgggctagtgtgaaaaaagatctgatttcatatggaggaggatggagactgagcgcacaatggcaaa

SEQ ID NO: 2372 - DNA, 80 bp, synthetic construct
  misc_feature 1..80: note = Synthetic: >NC_001475.2-cand-4790-4869
  source 1..80: mol_type = other DNA
ggtgcaggttattgccgtagagccagggaagaacccaaagaactttcaaaccacgccaggcactttccagactactacag

SEQ ID NO: 2373 - DNA, 80 bp, synthetic construct
  misc_feature 1..80: note = Synthetic: >NC_001475.2-cand-4870-4949
  source 1..80: mol_type = other DNA
gggaaataggagcaattgcactggatttcaagcctggaacttcaggatctcctatcataaatagagagggaaaggtagtg

SEQ ID NO: 2374 - DNA, 80 bp, synthetic construct
  misc_feature 1..80: note = Synthetic: >NC_001475.2-cand-4950-5029
  source 1..80: mol_type = other DNA
ggactgtatggcaatggagtggttacaaagaatggtggctatgtcagcggaatagcgcaaacaaatgcagaaccagatgg

SEQ ID NO: 2375 - DNA, 80 bp, synthetic construct
  misc_feature 1..80: note = Synthetic: >NC_001475.2-cand-5030-5109
  source 1..80: mol_type = other DNA
accgacaccagagttggaagaagagatgttcaaaaagcgaaacctgaccataatggatcttcatcctgggtcaggaaaga

SEQ ID NO: 2376 - DNA, 80 bp, synthetic construct
  misc_feature 1..80: note = Synthetic: >NC_001475.2-cand-5110-5189
  source 1..80: mol_type = other DNA
cacggaaataccttccagctattgtcagagaggcaatcaagagacgtttaagaaccttaattttggcaccgacaagggtg

SEQ ID NO: 2377 - DNA, 80 bp, synthetic construct
  misc_feature 1..80: note = Synthetic: >NC_001475.2-cand-5190-5269
  source 1..80: mol_type = other DNA
gttgcagctgagatggaagaagcattgaaagggctcccaataaggtaccaaacaacagcaacaaaatctgaacacacagg

SEQ ID NO: 2378 - DNA, 80 bp, synthetic construct
  misc_feature 1..80: note = Synthetic: >NC_001475.2-cand-5270-5349
  source 1..80: mol_type = other DNA
aagagagattgttgatctaatgtgccacgcaacgttcacaatgcgtttgctgtcaccagttagggttccaaattacaact

SEQ ID NO: 2379 - DNA, 80 bp, synthetic construct
  misc_feature 1..80: note = Synthetic: >NC_001475.2-cand-5340-5419
  source 1..80: mol_type = other DNA
aattacaacttgataataatggatgaggcccatttcacagacccagccagtatagcggctagagggtacatatcaactcg

SEQ ID NO: 2380 - DNA, 80 bp, synthetic construct
  misc_feature 1..80: note = Synthetic: >NC_001475.2-cand-5420-5499
  source 1..80: mol_type = other DNA
tgttggaatgggagaggcagccgcaatcttcatgacagcaacaccccctggaacagctgatgcctttcctcagagcaacg

SEQ ID NO: 2381 - DNA, 80 bp, synthetic construct
  misc_feature 1..80: note = Synthetic: >NC_001475.2-cand-5500-5579
  source 1..80: mol_type = other DNA
ctccaattcaagatgaagaaagggacataccagaacgctcatggaattcaggcaatgaatggattaccgacttcgctggg

SEQ ID NO: 2382 - DNA, 80 bp, synthetic construct
  misc_feature 1..80: note = Synthetic: >NC_001475.2-cand-5580-5659
  source 1..80: mol_type = other DNA
aaaacggtgtggtttgtccctagcattaaagccggaaatgacatagcaaactgcttgcgaaaaaacgggaaaaaagtcat

SEQ ID NO: 2383 - DNA, 80 bp, synthetic construct
  misc_feature 1..80: note = Synthetic: >NC_001475.2-cand-8250-8329
  source 1..80: mol_type = other DNA
gtcaacatggtgtctagattgctactgaacaggttcacgatgacacacaggagacccaccatagagaaagatgtggattt

SEQ ID NO: 2384 - DNA, 80 bp, synthetic construct
  misc_feature 1..80: note = Synthetic: >NC_001475.2-cand-8310-8389
  source 1..80: mol_type = other DNA
atagagaaagatgtggatttaggagcaggaactcgacatgttaatgcggaaccagaaacacccaacatggatgtcattgg

SEQ ID NO: 2385 - DNA, 80 bp, synthetic construct
  misc_feature 1..80: note = Synthetic: >NC_001475.2-cand-8410-8489
  source 1..80: mol_type = other DNA
aggaggagcataattcaacatggcactatgatgacgaaaacccctacaaaacgtgggcttaccatggatcctatgaagtc

SEQ ID NO: 2386 - DNA, 80 bp, synthetic construct
  misc_feature 1..80: note = Synthetic: >NC_001475.2-cand-8490-8569
  source 1..80: mol_type = other DNA
aaagccacaggctcagcctcctccatgataaatggagtcgtgaaactcctcaccaaaccatgggatgtggtgcccatggt

SEQ ID NO: 2387 - DNA, 80 bp, synthetic construct
  misc_feature 1..80: note = Synthetic: >NC_001475.2-cand-8570-8649
  source 1..80: mol_type = other DNA
gacacagatggcaatgacagacacaactccatttggccagcagagagtctttaaagagaaagtggacaccaggacgccca

SEQ ID NO: 2388 - DNA, 80 bp, synthetic construct
  misc_feature 1..80: note = Synthetic: >NC_001475.2-cand-8650-8729
  source 1..80: mol_type = other DNA
ggcccatgccagggacaagaaaggctatggagatcacagcggagtggctctggagaaccctgggaaggaacaaaagaccc

SEQ ID NO: 2389 - DNA, 80 bp, synthetic construct
  misc_feature 1..80: note = Synthetic: >NC_001475.2-cand-8730-8809
  source 1..80: mol_type = other DNA
agattatgcacaagggaagagtttacaaaaaaggtcagaactaacgcagccatgggcgccgttttcacagaggagaacca

SEQ ID NO: 2390 - DNA, 80 bp, synthetic construct
  misc_feature 1..80: note = Synthetic: >NC_001475.2-cand-8810-8889
  source 1..80: mol_type = other DNA
atgggacagtgcgaaagctgctgttgaggatgaagaattttggaaacttgtggacagagaacgtgaactccacaaattgg

SEQ ID NO: 2391 - DNA, 80 bp, synthetic construct
  misc_feature 1..80: note = Synthetic: >NC_001475.2-cand-8890-8969
  source 1..80: mol_type = other DNA
gcaaatgtggaagctgcgtttataacatgatgggcaagagagagaaaaaacttggagagtttggcaaagcaaaaggcagt

SEQ ID NO: 2392 - DNA, 80 bp, synthetic construct
  misc_feature 1..80: note = Synthetic: >NC_001475.2-cand-8970-9049
  source 1..80: mol_type = other DNA
agagctatatggtacatgtggttgggagccaggtaccttgagttcgaagcccttggattcttaaatgaagaccactggtt

SEQ ID NO: 2393 - DNA, 80 bp, synthetic construct
  misc_feature 1..80: note = Synthetic: >NC_001475.2-cand-9050-9129
  source 1..80: mol_type = other DNA
ctcgcgtgaaaactcttacagtggagtagaaggagaaggactgcacaagctaggctacatattaagggacatttccaaga

SEQ ID NO: 2394 - DNA, 80 bp, synthetic construct
  misc_feature 1..80: note = Synthetic: >NC_001475.2-cand-9140-9219
  source 1..80: mol_type = other DNA
agccatgtatgctgatgacacagctggttgggacacaagaataacagaagatgacctgcacaatgaggaaaagatcatac

SEQ ID NO: 2395 - DNA, 80 bp, synthetic construct
  misc_feature 1..80: note = Synthetic: >NC_001475.2-cand-9220-9299
  source 1..80: mol_type = other DNA
agcaaatggaccctgaacacaggcagttagcgaacgctatattcaagctcacataccaaaacaaagtggtcaaagttcaa

SEQ ID NO: 2396 - DNA, 80 bp, synthetic construct
  misc_feature 1..80: note = Synthetic: >NC_001475.2-cand-9360-9439
  source 1..80: mol_type = other DNA
ggacaactgggaacttatggcctgaatacattcaccaacatggaagcccagttagtcagacaaatggaaggagaaggtgt

SEQ ID NO: 2397 - DNA, 80 bp, synthetic construct
  misc_feature 1..80: note = Synthetic: >NC_001475.2-cand-9400-9479
  source 1..80: mol_type = other DNA
tggaagcccagttagtcagacaaatggaaggagaaggtgtgctgacaaaggcagacctcgagaaccctcatctgctagag

SEQ ID NO: 2398 - DNA, 80 bp, synthetic construct
  misc_feature 1..80: note = Synthetic: >NC_001475.2-cand-9460-9539
  source 1..80: mol_type = other DNA
agaaccctcatctgctagagaagaaaatcacacaatggttggaaaccaaaggagtggagaggttaaaaagaatggccatt

SEQ ID NO: 2399 - DNA, 80 bp, synthetic construct
  misc_feature 1..80: note = Synthetic: >NC_001477.1-cand-1510-1589
  source 1..80: mol_type = other DNA
atgagatggtgttgttgacaatgaaaaaaaaatcatggctcgtccacaaacaatggtttctagacttaccactgccttgg

SEQ ID NO: 2400 - DNA, 80 bp, synthetic construct
  misc_feature 1..80: note = Synthetic: >NC_001477.1-cand-1610-1689
  source 1..80: mol_type = other DNA
ccaagagacttggaatagacaagacttgctggtcacatttaagacagctcatgcaaaaaagcaggaagtagtcgtactag

SEQ ID NO: 2401 - DNA, 80 bp, synthetic construct
  misc_feature 1..80: note = Synthetic: >NC_001477.1-cand-1690-1769
  source 1..80: mol_type = other DNA
gatcacaagaaggagcaatgcacactgcgttgactggagcgacagaaatccaaacgtctggaacgacaacaatttttgca

SEQ ID NO: 2402 - DNA, 80 bp, synthetic construct
  misc_feature 1..80: note = Synthetic: >NC_001477.1-cand-1770-1849
  source 1..80: mol_type = other DNA
ggacacctgaaatgcagattaaaaatggataaactgattttaaaagggatgtcatatgtaatgtgcacagggtcattcaa

SEQ ID NO: 2403 - DNA, 80 bp, synthetic construct
  misc_feature 1..80: note = Synthetic: >NC_001477.1-cand-1850-1929
  source 1..80: mol_type = other DNA
gttagagaaggaagtggctgagacccagcatggaactgttctagtgcaggttaaatacgaaggaacagatgcaccatgca

SEQ ID NO: 2404 - DNA, 80 bp, synthetic construct
  misc_feature 1..80: note = Synthetic: >NC_001477.1-cand-1930-2009
  source 1..80: mol_type = other DNA
agatccccttctcgtcccaagatgagaagggagtaacccagaatgggagattgataacagccaaccccatagtcactgac

SEQ ID NO: 2405 - DNA, 80 bp, synthetic construct
  misc_feature 1..80: note = Synthetic: >NC_001477.1-cand-2010-2089
  source 1..80: mol_type = other DNA
aaagaaaaaccagtcaacattgaagcggagccaccttttggtgagagctacattgtggtaggagcaggtgaaaaagcttt

SEQ ID NO: 2406 - DNA, 80 bp, synthetic construct
  misc_feature 1..80: note = Synthetic: >NC_001477.1-cand-2080-2159
  source 1..80: mol_type = other DNA
aaaaagctttgaaactaagctggttcaagaagggaagcagtatagggaaaatgtttgaagcaactgcccgtggagcacga

SEQ ID NO: 2407 - DNA, 80 bp, synthetic construct
  misc_feature 1..80: note = Synthetic: >NC_001477.1-cand-2130-2209
  source 1..80: mol_type = other DNA
atgtttgaagcaactgcccgtggagcacgaaggatggccatcctgggagacactgcatgggacttcggttctataggagg

SEQ ID NO: 2408 - DNA, 80 bp, synthetic construct
  misc_feature 1..80: note = Synthetic: >NC_001477.1-cand-2240-2319
  source 1..80: mol_type = other DNA
ccagatttttgggactgcgtatggagttttgttcagcggtgtttcttggaccatgaagataggaatagggattctgctga

SEQ ID NO: 2409 - DNA, 80 bp, synthetic construct
  misc_feature 1..80: note = Synthetic: >NC_001477.1-cand-2320-2399
  source 1..80: mol_type = other DNA
catggctaggattaaactcaaggagcacgtccctttcaatgacgtgtatcgcagttggcatggtcacactgtacctagga

SEQ ID NO: 2410 - DNA, 80 bp, synthetic construct
  misc_feature 1..80: note = Synthetic: >NC_001477.1-cand-2400-2479
  source 1..80: mol_type = other DNA
gtcatggttcaggcggactcgggatgtgtaatcaactggaaaggcagagaactcaaatgtggaagcggcatttttgtcac

SEQ ID NO: 2411 - DNA, 80 bp, synthetic construct
  misc_feature 1..80: note = Synthetic: >NC_001477.1-cand-2480-2559
  source 1..80: mol_type = other DNA
caatgaagtccacacctggacagagcaatataaattccaggccgactcccctaagagactatcagcggccattgggaagg

SEQ ID NO: 2412 - DNA, 80 bp, synthetic construct
  misc_feature 1..80: note = Synthetic: >NC_001477.1-cand-2560-2639
  source 1..80: mol_type = other DNA
catgggaggagggtgtgtgtggaattcgatcagccactcgtctcgagaacatcatgtggaagcaaatatcaaatgaatta

SEQ ID NO: 2413 - DNA, 80 bp, synthetic construct
  misc_feature 1..80: note = Synthetic: >NC_001477.1-cand-2640-2719
  source 1..80: mol_type = other DNA
aaccacatcttacttgaaaatgacatgaaatttacagtggtcgtaggagacgttagtggaatcttggcccaaggaaagaa

SEQ ID NO: 2414 - DNA, 80 bp, synthetic construct
  misc_feature 1..80: note = Synthetic: >NC_001477.1-cand-2690-2769
  source 1..80: mol_type = other DNA
cgttagtggaatcttggcccaaggaaagaaaatgattaggccacaacccatggaacacaaatactcgtggaaaagctggg

SEQ ID NO: 2415 - DNA, 80 bp, synthetic construct
  misc_feature 1..80: note = Synthetic: >NC_001477.1-cand-5330-5409
  source 1..80: mol_type = other DNA
tcctgtgagagttcccaattataatatgattatcatggatgaagcacattttaccgatccagccagcatagcagccagag

SEQ ID NO: 2416 - DNA, 80 bp, synthetic construct
  misc_feature 1..80: note = Synthetic: >NC_001477.1-cand-5410-5489
  source 1..80: mol_type = other DNA
ggtatatctcaacccgagtgggtatgggtgaagcagctgcgattttcatgacagccactccccccggatcggtggaggcc

SEQ ID NO: 2417 - DNA, 80 bp, synthetic construct
  misc_feature 1..80: note = Synthetic: >NC_001477.1-cand-5490-5569
  source 1..80: mol_type = other DNA
tttccacagagcaatgcagttatccaagatgaggaaagagacattcctgaaagatcatggaactcaggctatgactggat

SEQ ID NO: 2418 - DNA, 80 bp, synthetic construct
  misc_feature 1..80: note = Synthetic: >NC_001477.1-cand-5570-5649
  source 1..80: mol_type = other DNA
cactgatttcccaggtaaaacagtctggtttgttccaagcatcaaatcaggaaatgacattgccaactgtttaagaaaga

SEQ ID NO: 2419 - DNA, 80 bp, synthetic construct
  misc_feature 1..80: note = Synthetic: >NC_001477.1-cand-5650-5729
  source 1..80: mol_type = other DNA
atgggaaacgggtggtccaattgagcagaaaaacttttgacactgagtaccagaaaacaaaaaataacgactgggactat

SEQ ID NO: 2420 - DNA, 80 bp, synthetic construct
  misc_feature 1..80: note = Synthetic: >NC_001477.1-cand-5730-5809
  source 1..80: mol_type = other DNA
gttgtcacaacagacatatccgaaatgggagcaaacttccgagccgacagggtaatagacccgaggcggtgcctgaaacc

SEQ ID NO: 2421 - DNA, 80 bp, synthetic construct
  misc_feature 1..80: note = Synthetic: >NC_001477.1-cand-5810-5889
  source 1..80: mol_type = other DNA
ggtaatactaaaagatggcccagagcgtgtcattctagccggaccgatgccagtgactgtggctagcgccgcccagagga

SEQ ID NO: 2422 - DNA, 80 bp, synthetic construct
  misc_feature 1..80: note = Synthetic: >NC_001477.1-cand-5890-5969
  source 1..80: mol_type = other DNA
gaggaagaattggaaggaaccaaaataaggaaggcgatcagtatatttacatgggacagcctctaaacaatgatgaggac

SEQ ID NO: 2423 - DNA, 80 bp, synthetic construct
  misc_feature 1..80: note = Synthetic: >NC_001477.1-cand-5970-6049
  source 1..80: mol_type = other DNA
cacgcccattggacagaagcaaaaatgctccttgacaacataaacacaccagaagggattatcccagccctctttgagcc

SEQ ID NO: 2424 - DNA, 80 bp, synthetic construct
  misc_feature 1..80: note = Synthetic: >NC_001477.1-cand-6000-6079
  source 1..80: mol_type = other DNA
cttgacaacataaacacaccagaagggattatcccagccctctttgagccggagagagaaaagagtgcagcaatagacgg

SEQ ID NO: 2425 - DNA, 80 bp, synthetic construct
  misc_feature 1..80: note = Synthetic: >NC_001477.1-cand-6130-6209
  source 1..80: mol_type = other DNA
gaagaggagatctacctgtctggctatcctacaaagttgcctcagaaggcttccagtactccgacagaaggtggtgcttt

SEQ ID NO: 2426 - DNA, 80 bp, synthetic construct
  misc_feature 1..80: note = Synthetic: >NC_001477.1-cand-6220-6299
  source 1..80: mol_type = other DNA
ggaacaaccaggtgttggaggagaacatggacgtggagatctggacaaaagaaggagaaagaaagaaactacgaccccgc

SEQ ID NO: 2427 - DNA, 80 bp, synthetic construct
  misc_feature 1..80: note = Synthetic: >NC_001477.1-cand-6290-6369
  source 1..80: mol_type = other DNA
acgaccccgctggctggatgccagaacatactctgacccactggctctgcgcgaattcaaagagttcgcagcaggaagaa

SEQ ID NO: 2428 - DNA, 80 bp, synthetic construct
  misc_feature 1..80: note = Synthetic: >NC_001477.1-cand-6370-6449
  source 1..80: mol_type = other DNA
gaagcgtctcaggtgacctaatattagaaatagggaaacttccacaacatttaacgcaaagggcccagaacgccttggac

SEQ ID NO: 2429 - DNA, 80 bp, synthetic construct
  misc_feature 1..80: note = Synthetic: >NC_001477.1-cand-6450-6529
  source 1..80: mol_type = other DNA
aatctggttatgttgcacaactctgaacaaggaggaaaagcctatagacacgccatggaagaactaccagacaccataga

SEQ ID NO: 2430 - DNA, 80 bp, synthetic construct
  misc_feature 1..80: note = Synthetic: >NC_001477.1-cand-6520-6599
  source 1..80: mol_type = other DNA
acaccatagaaacgttaatgctcctagctttgatagctgtgctgactggtggagtgacgttgttcttcctatcaggaagg

SEQ ID NO: 2431 - DNA, 80 bp, synthetic construct
  misc_feature 1..80: note = Synthetic: >NC_001526.4-cand-3950-4029
  source 1..80: mol_type = other DNA
gaaattcctatggatacatttattgttagcacaaaccctaacacagtaactagtagcacacccataccagggtctcgccc

SEQ ID NO: 2432 - DNA, 80 bp, synthetic construct
  misc_feature 1..80: note = Synthetic: >NC_001526.4-cand-4030-4109
  source 1..80: mol_type = other DNA
agtggcacgcctaggattatatagtcgcacaacacaacaggttaaagttgtagaccctgcttttgtaaccactcccacta

SEQ ID NO: 2433 - DNA, 80 bp, synthetic construct
  misc_feature 1..80: note = Synthetic: >NC_001526.4-cand-4110-4189
  source 1..80: mol_type = other DNA
aacttattacatatgataatcctgcatatgaaggtatagatgtggataatacattatatttttctagtaatgataatagt

SEQ ID NO: 2434 - DNA, 80 bp, synthetic construct
  misc_feature 1..80: note = Synthetic: >NC_001526.4-cand-4190-4269
  source 1..80: mol_type = other DNA
attaatatagctccagatcctgactttttggatatagttgctttacataggccagcattaacctctaggcgtactggcat

SEQ ID NO: 2435 - DNA, 80 bp, synthetic construct
  misc_feature 1..80: note = Synthetic: >NC_001526.4-cand-4270-4349
  source 1..80: mol_type = other DNA
taggtacagtagaattggtaataaacaaacactacgtactcgtagtggaaaatctataggtgctaaggtacattattatt

SEQ ID NO: 2436 - DNA, 80 bp, synthetic construct
  misc_feature 1..80: note = Synthetic: >NC_001526.4-cand-4350-4429
  source 1..80: mol_type = other DNA
atgatttaagtactattgatcctgcagaagaaatagaattacaaactataacaccttctacatatactaccacttcacat

SEQ ID NO: 2437 - DNA, 80 bp, synthetic construct
  misc_feature 1..80: note = Synthetic: >NC_001526.4-cand-4430-4509
  source 1..80: mol_type = other DNA
gcagcctcacctacttctattaataatggattatatgatatttatgcagatgactttattacagatacttctacaacccc

SEQ ID NO: 2438 - DNA, 80 bp, synthetic construct
  misc_feature 1..80: note = Synthetic: >NC_001526.4-cand-4510-4589
  source 1..80: mol_type = other DNA
ggtaccatctgtaccctctacatctttatcaggttatattcctgcaaatacaacaattccttttggtggtgcatacaata

SEQ ID NO: 2439 - DNA, 80 bp, synthetic construct
  misc_feature 1..80: note = Synthetic: >NC_001526.4-cand-4590-4669
  source 1..80: mol_type = other DNA
ttcctttagtatcaggtcctgatatacccattaatataactgaccaagctccttcattaattcctatagttccagggtct

SEQ ID NO: 2440 - DNA, 80 bp, synthetic construct
  misc_feature 1..80: note = Synthetic: >NC_001526.4-cand-4670-4749
  source 1..80: mol_type = other DNA
ccacaatatacaattattgctgatgcaggtgacttttatttacatcctagttattacatgttacgaaaacgacgtaaacg

SEQ ID NO: 2441 - DNA, 80 bp, synthetic construct
  misc_feature 1..80: note = Synthetic: >NC_001526.4-cand-4750-4829
  source 1..80: mol_type = other DNA
tttaccatattttttttcagatgtctctttggctgcctagtgaggccactgtctacttgcctcctgtcccagtatctaag

SEQ ID NO: 2442 - DNA, 80 bp, synthetic construct
  misc_feature 1..80: note = Synthetic: >NC_001526.4-cand-4830-4909
  source 1..80: mol_type = other DNA
gttgtaagcacggatgaatatgttgcacgcacaaacatatattatcatgcaggaacatccagactacttgcagttggaca

SEQ ID NO: 2443 - DNA, 80 bp, synthetic construct
  misc_feature 1..80: note = Synthetic: >NC_001526.4-cand-4910-4989
  source 1..80: mol_type = other DNA
tccctattttcctattaaaaaacctaacaataacaaaatattagttcctaaagtatcaggattacaatacagggtattta

SEQ ID NO: 2444 - DNA, 80 bp, synthetic construct
  misc_feature 1..80: note = Synthetic: >NC_001526.4-cand-4990-5069
  source 1..80: mol_type = other DNA
gaatacatttacctgaccccaataagtttggttttcctgacacctcattttataatccagatacacagcggctggtttgg

SEQ ID NO: 2445 - DNA, 80 bp, synthetic construct
  misc_feature 1..80: note = Synthetic: >NC_001526.4-cand-5070-5149
  source 1..80: mol_type = other DNA
gcctgtgtaggtgttgaggtaggtcgtggtcagccattaggtgtgggcattagtggccatcctttattaaataaattgga

SEQ ID NO: 2446 - DNA, 80 bp, synthetic construct
  misc_feature 1..80: note = Synthetic: >NC_001526.4-cand-5150-5229
  source 1..80: mol_type = other DNA
tgacacagaaaatgctagtgcttatgcagcaaatgcaggtgtggataatagagaatgtatatctatggattacaaacaaa

SEQ ID NO: 2447 - DNA, 80 bp, synthetic construct
  misc_feature 1..80: note = Synthetic: >NC_001611.1-cand-143310-143389
  source 1..80: mol_type = other DNA
gtcgtttatatcacattgtatatagtttataactttaaccttcgatacgagaggttgtggatcttctacgacattgataa

SEQ ID NO: 2448 - DNA, 80 bp, synthetic construct
  misc_feature 1..80: note = Synthetic: >NC_001611.1-cand-143390-143469
  source 1..80: mol_type = other DNA
ctctgatttcttgaacatcatctgcgctaattaaaagttttactatatacctgcctagaaattcggcaccaccagtaacc

SEQ ID NO: 2449 - DNA, 80 bp, synthetic construct
  misc_feature 1..80: note = Synthetic: >NC_001611.1-cand-143470-143549
  source 1..80: mol_type = other DNA
gcgtacacggtcattgctgctgtcactcataaatatcggactacttattctattttacaaataatggctgtttgtataat

SEQ ID NO: 2450 - DNA, 80 bp, synthetic construct
  misc_feature 1..80: note = Synthetic: >NC_001611.1-cand-143670-143749
  source 1..80: mol_type = other DNA
ggatattagtcgaggatgtaattccataggcagtccagaaatatttatcggtaacatctttgtaaacagatatggtgtag

SEQ ID NO: 2451 - DNA, 80 bp, synthetic construct
  misc_feature 1..80: note = Synthetic: >NC_001611.1-cand-144010-144089
  source 1..80: mol_type = other DNA
tactgtcgaatttgatagggacaaagtagttgacacgtttatttcgtataatagacataatgactccatagagataagag

SEQ ID NO: 2452 - DNA, 80 bp, synthetic construct
  misc_feature 1..80: note = Synthetic: >NC_001611.1-cand-144170-144249
  source 1..80: mol_type = other DNA
tttaaactaattttagcagaatatataagacacagaaatactgtatccggcaatatttattcggcattgatgacactaga

SEQ ID NO: 2453 - DNA, 80 bp, synthetic construct
  misc_feature 1..80: note = Synthetic: >NC_001611.1-cand-144250-144329
  source 1..80: mol_type = other DNA
tgatttggttattaaacagtatggcgacattgatctattatttaatgagaaacttaaagtggactccgattcgggattat

SEQ ID NO: 2454 - DNA, 80 bp, synthetic construct
  misc_feature 1..80: note = Synthetic: >NC_001611.1-cand-144490-144569
  source 1..80: mol_type = other DNA
atctagaccacgatacaatctatgtaagtatttacgaggacacactgagagcatagaggatgaatttgattattttgaag

SEQ ID NO: 2455 - DNA, 80 bp, synthetic construct
  misc_feature 1..80: note = Synthetic: >NC_001611.1-cand-144570-144649
  source 1..80: mol_type = other DNA
acgatgattcgtcgacatgttctgtcgtaaccgacagggaaacggatgtataattttttatagtgtgcaggatatgataa

SEQ ID NO: 2456 - DNA, 80 bp, synthetic construct
  misc_feature 1..80: note = Synthetic: >NC_001611.1-cand-144650-144729
  source 1..80: mol_type = other DNA
aaatataattgttgtatccattcccattctaatcacattatatgattctgtaaaaaattatactgtaacacaatgaagta

SEQ ID NO: 2457 - DNA, 80 bp, synthetic construct
  misc_feature 1..80: note = Synthetic: >NC_001611.1-cand-144810-144889
  source 1..80: mol_type = other DNA
cccgcatactttaacaaatcactgaaaattggagttaggtattgacatctcagaatcagttgccgttctggaacattaaa

SEQ ID NO: 2458 - DNA, 80 bp, synthetic construct
  misc_feature 1..80: note = Synthetic: >NC_001611.1-cand-144890-144969
  source 1..80: mol_type = other DNA
tgtattttttatgatatattccaacgcatttatgtgggtatacaacaagtcattactaatagagtattccaagagtttta

SEQ ID NO: 2459 - DNA, 80 bp, synthetic construct
  misc_feature 1..80: note = Synthetic: >NC_001611.1-cand-144970-145049
  source 1..80: mol_type = other DNA
attggctagtatttaacaagagaagagatttcaacagactgtttatgaactcgaatgccgccttattgtcgcttatattg

SEQ ID NO: 2460 - DNA, 80 bp, synthetic construct
  misc_feature 1..80: note = Synthetic: >NC_001611.1-cand-145050-145129
  source 1..80: mol_type = other DNA
atgatgtcgaattctcccaatatcatcactgatgagtagctcatcttgttatcaggatccaagctttctaaagacgtcat

SEQ ID NO: 2461 - DNA, 80 bp, synthetic construct
  misc_feature 1..80: note = Synthetic: >NC_001611.1-cand-145130-145209
  source 1..80: mol_type = other DNA
taaaccctcgatcatgaatggatttatcatcatcgtttttatgttggacataagcttagtccgtttgtccacatctatag

SEQ ID NO: 2462 - DNA, 80 bp, synthetic construct
  misc_feature 1..80: note = Synthetic: >NC_001611.1-cand-145210-145289
  source 1..80: mol_type = other DNA
acgatgatttctgaattattgcatatatctctctctttaactccaggaacttgtcaggatggtccactttaacatgttct

SEQ ID NO: 2463 - DNA, 80 bp, synthetic construct
  misc_feature 1..80: note = Synthetic: >NC_001611.1-cand-149230-149309
  source 1..80: mol_type = other DNA
tgcttaatggatcatcgtgtgatatgaacagacattgtattatgatgaatttaccagatataggagaattcggttccagt

SEQ ID NO: 2464 - DNA, 80 bp, synthetic construct
  misc_feature 1..80: note = Synthetic: >NC_001611.1-cand-149320-149399
  source 1..80: mol_type = other DNA
aatatgaacctgacatgattaagattgctctttcagtggctggtaatttaataagaaatcaagactacattcccgggaga

SEQ ID NO: 2465 - DNA, 80 bp, synthetic construct
  misc_feature 1..80: note = Synthetic: >NC_001611.1-cand-149390-149469
  source 1..80: mol_type = other DNA
tcccgggagacgcggctatagctactacgtttacggtatagcctctagataattttttaagcacaaaataaaaaacataa

SEQ ID NO: 2466 - DNA, 80 bp, synthetic construct
  misc_feature 1..80: note = Synthetic: >NC_001611.1-cand-149470-149549
  source 1..80: mol_type = other DNA
ttttaaactagtctatttcatactattttgtgtgatcaccatggacataaagatagatattagtatttttggtgataaat

SEQ ID NO: 2467 - DNA, 80 bp, synthetic construct
  misc_feature 1..80: note = Synthetic: >NC_001611.1-cand-149630-149709
  source 1..80: mol_type = other DNA
tcaaacctaattatcttgagcacgataacttattagatagagatgagatgtctactattctagaggaatattttatgtac

SEQ ID NO: 2468 - DNA, 80 bp, synthetic construct
  misc_feature 1..80: note = Synthetic: >NC_001611.1-cand-149710-149789
  source 1..80: mol_type = other DNA
agaggtctattaggcctcagaataaaatatggacgactttttaacgaaattagaaaattcgacaatgatgcggaagaaca

SEQ ID NO: 2469 - DNA, 80 bp, synthetic construct
  misc_feature 1..80: note = Synthetic: >NC_001611.1-cand-149790-149869
  source 1..80: mol_type = other DNA
attcggtactatagaagaactcaaacagaaacttagattaaatgctgaagagggagccgataactttatagattatataa

SEQ ID NO: 2470 - DNA, 80 bp, synthetic construct
  misc_feature 1..80: note = Synthetic: >NC_001611.1-cand-149870-149949
  source 1..80: mol_type = other DNA
aggtacaaacaggatatctatgataggattgtgtgcgtgtgtggtagatgtttggagaaaggagaaactgttttctagat

SEQ ID NO: 2471 - DNA, 80 bp, synthetic construct
  misc_feature 1..80: note = Synthetic: >NC_001611.1-cand-149950-150029
  source 1..80: mol_type = other DNA
ggaaatattgtttacgagctattaaactgtttattgatgatcccatacttgataagataaaatctatactgcagaataga

SEQ ID NO: 2472 - DNA, 80 bp, synthetic construct
  misc_feature 1..80: note = Synthetic: >NC_001611.1-cand-150030-150109
  source 1..80: mol_type = other DNA
ctagtgtatgtggaaatgttatagaaaattaaaagttaatgagagcaaaatataatgttgtattctaatcccatatttat

SEQ ID NO: 2473 - DNA, 80 bp, synthetic construct
  misc_feature 1..80: note = Synthetic: >NC_001611.1-cand-150110-150189
  source 1..80: mol_type = other DNA
tattttcacggagatataggtgtagttttgcagtgaccgtcctgataatattatctatatgatgggtggatatgatcagt

SEQ ID NO: 2474 - DNA, 80 bp, synthetic construct
  misc_feature 1..80: note = Synthetic: >NC_001611.1-cand-150190-150269
  source 1..80: mol_type = other DNA
acccgtatagaagttcaaaggttatagtgtacaatacatgtacaaattcttggatatatgatataccagagctaaaatat

SEQ ID NO: 2475 - DNA, 80 bp, synthetic construct
  misc_feature 1..80: note = Synthetic: >NC_001611.1-cand-150270-150349
  source 1..80: mol_type = other DNA
cctcgttctaattgtggaggagttgctgatgatgaatacatttattgcataggcgatcaggattcatcgttgatatctag

SEQ ID NO: 2476 - DNA, 80 bp, synthetic construct
  misc_feature 1..80: note = Synthetic: >NC_001611.1-cand-150350-150429
  source 1..80: mol_type = other DNA
tattgatagatggaagccatcaaaaccatattgataaacgtatgctaaaatgcgagagacaaaatgtgatattggtgtag

SEQ ID NO: 2477 - DNA, 80 bp, synthetic construct
  misc_feature 1..80: note = Synthetic: >NC_001611.1-cand-150430-150509
  source 1..80: mol_type = other DNA
cgatgttaaacggattaatatatgtcataggcggagttgttaaaggtgacacatgtaccgacacacttgagagtttatca

SEQ ID NO: 2478 - DNA, 80 bp, synthetic construct
  misc_feature 1..80: note = Synthetic: >NC_001611.1-cand-150510-150589
  source 1..80: mol_type = other DNA
gaagatggatggatgatgcatcaacgtcttccaataaatgtccaatatgtcgacgattgttcataccggcaaaatttata

SEQ ID NO: 2479 - DNA, 80 bp, synthetic construct
  misc_feature 1..80: note = Synthetic: >NC_001611.1-cand-153300-153379
  source 1..80: mol_type = other DNA
acataaaggatacgttgtatcgagacgtggagatctagaaacacttggatattgtatgattagatggttgggaggtatct

SEQ ID NO: 2480 - DNA, 80 bp, synthetic construct
  misc_feature 1..80: note = Synthetic: >NC_001611.1-cand-153380-153459
  source 1..80: mol_type = other DNA
tgccatggactaagatagctgaaacaaagaattgcgcattagtaagtgctacaaaacagaaatatgtgaacaatactacg

SEQ ID NO: 2481 - DNA, 80 bp, synthetic construct
  misc_feature 1..80: note = Synthetic: >NC_001611.1-cand-153460-153539
  source 1..80: mol_type = other DNA
actttgttaatgaccagtttgcaatatgcgcctagagaattgctgcaatatattaccatggtaaactctttgacatattt

SEQ ID NO: 2482 - DNA, 80 bp, synthetic construct
  misc_feature 1..80: note = Synthetic: >NC_001611.1-cand-153540-153619
  source 1..80: mol_type = other DNA
tgaggaacccaattacgataagtttcggcacatattaatgcagggtgcatattattaagtgtgaggttttggtttgatgt

SEQ ID NO: 2483 - DNA, 80 bp, synthetic construct
  misc_feature 1..80: note = Synthetic: >NC_001611.1-cand-153640-153719
  source 1..80: mol_type = other DNA
ttaaaaaataacttaatttattattgatctcgtgtgtacaaccgaaatcatggcgatttttacacacacgtcttggcggg

SEQ ID NO: 2484 - DNA, 80 bp, synthetic construct
  misc_feature 1..80: note = Synthetic: >NC_001611.1-cand-153720-153799
  source 1..80: mol_type = other DNA
tacgacgagaatctttatacctttcctggaatatcattaactgttgccaatgatgttaggaaatattctgttgtgtcagt

SEQ ID NO: 2485 - DNA, 80 bp, synthetic construct
  misc_feature 1..80: note = Synthetic: >NC_001611.1-cand-153810-153889
  source 1..80: mol_type = other DNA
aagtatgacattgtaaaagaaatatatgtggtgttacagttaggtgaacaagagatatattggagcattgctgcatatgt

SEQ ID NO: 2486 - DNA, 80 bp, synthetic construct
  misc_feature 1..80: note = Synthetic: >NC_001611.1-cand-153970-154049
  source 1..80: mol_type = other DNA
tacaaaactactatgctctaagcggaatcgggtacaaaagtctagacttgtgtttggaaggagtagggattcatcatcac

SEQ ID NO: 2487 - DNA, 80 bp, synthetic construct
  misc_feature 1..80: note = Synthetic: >NC_001611.1-cand-154050-154129
  source 1..80: mol_type = other DNA
gtacttgaaacaggaaacgctgtatatggaaaagttcaacatgattattctactatcaaagagaaggccaaagaaatgag

SEQ ID NO: 2488 - DNA, 80 bp, synthetic construct
  misc_feature 1..80: note = Synthetic: >NC_001611.1-cand-154130-154209
  source 1..80: mol_type = other DNA
tgcacttagtccaggacctataattgattaccacgtctggataggagattgtattggtaaagttactgctgtagacgtac

SEQ ID NO: 2489 - DNA, 80 bp, synthetic construct
  misc_feature 1..80: note = Synthetic: >NC_001611.1-cand-154210-154289
  source 1..80: mol_type = other DNA
atggaaaggaaattatgagaatgtgattcaaaaagggtgcggtactacagataccaaatctggtaaaagttaaacttggg

SEQ ID NO: 2490 - DNA, 80 bp, synthetic construct
  misc_feature 1..80: note = Synthetic: >NC_001611.1-cand-154290-154369
  source 1..80: mol_type = other DNA
gataatgatacagaaaatctttccactaccatatcagctctcctgaattccggcggcggtaccatcaaggtaacctctta

SEQ ID NO: 2491 - DNA, 80 bp, synthetic construct
  misc_feature 1..80: note = Synthetic: >NC_001611.1-cand-154370-154449
  source 1..80: mol_type = other DNA
ggaagatcgcgttaatcatgtactcataaaacgattggaatctatacgccatatgtggtctgtctatgatcgttttaata

SEQ ID NO: 2492 - DNA, 80 bp, synthetic construct
  misc_feature 1..80: note = Synthetic: >NC_001611.1-cand-154450-154529
  source 1..80: mol_type = other DNA
ttgtgaatggtaaagaatgctgttatatacatcttcattcatctaatcagaatcttatgcctagtactgtaaaaaccaat

SEQ ID NO: 2493 - DNA, 80 bp, synthetic construct
  misc_feature 1..80: note = Synthetic: >NC_001611.1-cand-154530-154609
  source 1..80: mol_type = other DNA
ttgtatatgtgatctatgacatcatgcatccaaatggatctcataactgctctagattatcttagtgaacttaaggaatc

SEQ ID NO: 2494 - DNA, 80 bp, synthetic construct
  misc_feature 1..80: note = Synthetic: >NC_001611.1-cand-154610-154689
  source 1..80: mol_type = other DNA
aagtggataaagtcccaaaccagaattgcccaaattcgattacccagatggagtgcaagacaatggatcaattgagagat

SEQ ID NO: 2495 - DNA, 80 bp, synthetic construct
  misc_feature 1..80: note = Synthetic: >NC_001612.1-cand-1510-1589
  source 1..80: mol_type = other DNA
aaccaacaactgtgcgaccatcatagtaccatacatgaatactgtaccattcgattcggccctaaaccattgcaactttg

SEQ ID NO: 2496 - DNA, 80 bp, synthetic construct
  misc_feature 1..80: note = Synthetic: >NC_001612.1-cand-1590-1669
  source 1..80: mol_type = other DNA
gcttaattgtagtgcccgtagtaccactcgactttaacgctggagctacatcagaaataccaataactgtcaccatcgca

SEQ ID NO: 2497 - DNA, 80 bp, synthetic construct
  misc_feature 1..80: note = Synthetic: >NC_001612.1-cand-1720-1799
  source 1..80: mol_type = other DNA
acctaccgagttgaagcccggtactaatcagtttctcactactgatgatggtgtctcagctcccattttgcccggattcc

SEQ ID NO: 2498 - DNA, 80 bp, synthetic construct
  misc_feature 1..80: note = Synthetic: >NC_001612.1-cand-1760-1839
  source 1..80: mol_type = other DNA
actgatgatggtgtctcagctcccattttgcccggattccaccctactccagccatacacatacctggtgaagtgcgcaa

SEQ ID NO: 2499 - DNA, 80 bp, synthetic construct
  misc_feature 1..80: note = Synthetic: >NC_001612.1-cand-1840-1919
  source 1..80: mol_type = other DNA
tctgttggagatttgcagggtagagaccatattggaggtgaacaatctacagagtaatgagacaacccccatgcaacgac

SEQ ID NO: 2500 - DNA, 80 bp, synthetic construct
  misc_feature 1..80: note = Synthetic: >NC_001612.1-cand-1960-2039
  source 1..80: mol_type = other DNA
gtgtgctgtttttagggccgaccctggtaggaatggaccgtggcagtcgactattttaggacagttgtgtaggtactata

SEQ ID NO: 2501 - DNA, 80 bp, synthetic construct
  misc_feature 1..80: note = Synthetic: >NC_001612.1-cand-2000-2079
  source 1..80: mol_type = other DNA
tggcagtcgactattttaggacagttgtgtaggtactatactcaatggtctggatctctggaagtcactttcatgtttgc

SEQ ID NO: 2502 - DNA, 80 bp, synthetic construct
  misc_feature 1..80: note = Synthetic: >NC_001612.1-cand-2050-2129
  source 1..80: mol_type = other DNA
tggatctctggaagtcactttcatgtttgctggatcgttcatggcaacaggaaagatgctaatcgcatacacacctccgg

SEQ ID NO: 2503 - DNA, 80 bp, synthetic construct
  misc_feature 1..80: note = Synthetic: >NC_001612.1-cand-2160-2239
  source 1..80: mol_type = other DNA
caatgctgggaacccatgtgatatgggattttggcctccaatcctcagtcacgctagttataccatggataagcaacaca

SEQ ID NO: 2504 - DNA, 80 bp, synthetic construct
  misc_feature 1..80: note = Synthetic: >NC_001612.1-cand-2240-2319
  source 1..80: mol_type = other DNA
cactatagggcgcacgccaaggacggttattttgattattacaccactggcacgatcactatatggtatcagacaaatta

SEQ ID NO: 2505 - DNA, 80 bp, synthetic construct
  misc_feature 1..80: note = Synthetic: >NC_001612.1-cand-2310-2389
  source 1..80: mol_type = other DNA
agacaaattatgtcgtacctattggagcccccacaacagcctatattgtggccctcgcagccgctcaggacaactttacc

SEQ ID NO: 2506 - DNA, 80 bp, synthetic construct
  misc_feature 1..80: note = Synthetic: >NC_001612.1-cand-2390-2469
  source 1..80: mol_type = other DNA
atgaaactgtgcaaagacactgaggatattgagcaatctgcaaacatccagggtgatggaattgcagacatgattgacca

SEQ ID NO: 2507 - DNA, 80 bp, synthetic construct
  misc_feature 1..80: note = Synthetic: >NC_001612.1-cand-2470-2549
  source 1..80: mol_type = other DNA
ggctgtcacttcccgagttggtcgtgcgctgacatccttacaggtagaacctaccgccgccaacaccaatgctagtgagc

SEQ ID NO: 2508 - DNA, 80 bp, synthetic construct
  misc_feature 1..80: note = Synthetic: >NC_001612.1-cand-2550-2629
  source 1..80: mol_type = other DNA
acagattgggcaccgggctcgtccccgccttgcaggctgcagagaccggcgcctcttctaatgcacaggatgagaatctt

SEQ ID NO: 2509 - DNA, 80 bp, synthetic construct
  misc_feature 1..80: note = Synthetic: >NC_001612.1-cand-2630-2709
  source 1..80: mol_type = other DNA
atagaaacccggtgtgtgttgaaccatcactccactcaagagaccacgattggcaactttttcagtcgagcaggactagt

SEQ ID NO: 2510 - DNA, 80 bp, synthetic construct
  misc_feature 1..80: note = Synthetic: >NC_001612.1-cand-2710-2789
  source 1..80: mol_type = other DNA
gagtattattaccatgcccaccacaggtacccaaaacaccgatgggtatgtgaactgggatattgacttgatgggttatg

SEQ ID NO: 2511 - DNA, 80 bp, synthetic construct
  misc_feature 1..80: note = Synthetic: >NC_001943.1-cand-2160-2239
  source 1..80: mol_type = other DNA
cgagaactcttagagaaaggtcttgatcgtgagacattccttgatctcatagaccgcattattggtgagaggtctggcta

SEQ ID NO: 2512 - DNA, 80 bp, synthetic construct
  misc_feature 1..80: note = Synthetic: >NC_001943.1-cand-2210-2289
  source 1..80: mol_type = other DNA
agaccgcattattggtgagaggtctggctaccctgactatgatgatgaagattactatgatgaagatgatgatggctggg

SEQ ID NO: 2513 - DNA, 80 bp, synthetic construct
  misc_feature 1..80: note = Synthetic: >NC_001943.1-cand-2320-2399
  source 1..80: mol_type = other DNA
atactgaagtaattaactttgaccaagcaaaaccaattcctgccccgagaacaaccaagcaaaaaatttgccccgaacca

SEQ ID NO: 2514 - DNA, 80 bp, synthetic construct
  misc_feature 1..80: note = Synthetic: >NC_001943.1-cand-2400-2479
  source 1..80: mol_type = other DNA
gaagtcgaatcacaaccacttgatttgtcccaaaagaaagaaaaacaatcagaatatgaacaacaagtggtgaagtctac

SEQ ID NO: 2515 - DNA, 80 bp, synthetic construct
  misc_feature 1..80: note = Synthetic: >NC_001943.1-cand-2480-2559
  source 1..80: mol_type = other DNA
caagcctcaacaattagaacatgaacaacaagtggtgaagcctatcaagcctcagaagagtgagcctcaaccatactcac

SEQ ID NO: 2516 - DNA, 80 bp, synthetic construct
  misc_feature 1..80: note = Synthetic: >NC_001943.1-cand-2560-2639
  source 1..80: mol_type = other DNA
aaacttacggcaaggcaccaatctgggaatcttacgattttgactgggatgaggatgatgccaagtttattctgccagcg

SEQ ID NO: 2517 - DNA, 80 bp, synthetic construct
  misc_feature 1..80: note = Synthetic: >NC_001943.1-cand-2640-2719
  source 1..80: mol_type = other DNA
ccacaccggttgactaaggcagatgaaatagtccttggatccaaaatcgtcaagcttagaacgattattgaaacagccat

SEQ ID NO: 2518 - DNA, 80 bp, synthetic construct
  misc_feature 1..80: note = Synthetic: >NC_001943.1-cand-2720-2799
  source 1..80: mol_type = other DNA
aaagactcagaattatagtgcattacctgaagcagtatttgagctcgacaaagcagcttatgaagcaggtttggaaggtt

SEQ ID NO: 2519 - DNA, 80 bp, synthetic construct
  misc_feature 1..80: note = Synthetic: >NC_001943.1-cand-2780-2859
  source 1..80: mol_type = other DNA
tgaagcaggtttggaaggttttctccaaagggttaaatcgaaaaacaaggccccaaaaaactacaaagggccccagaaga

SEQ ID NO: 2520 - DNA, 80 bp, synthetic construct
  misc_feature 1..80: note = Synthetic: >NC_001943.1-cand-2880-2959
  source 1..80: mol_type = other DNA
actcattagatgcatggaaattgttgctagagcctccgcgggagcgaaggtgcgtgcctgcgaattttccactattaggc

SEQ ID NO: 2521 - DNA, 80 bp, synthetic construct
  misc_feature 1..80: note = Synthetic: >NC_001943.1-cand-2960-3039
  source 1..80: mol_type = other DNA
catttaccaattaatagacccatctttgatgataagaaacccagggacgatctccttggcctacttccagaaccaacctg

SEQ ID NO: 2522 - DNA, 80 bp, synthetic construct
  misc_feature 1..80: note = Synthetic: >NC_001943.1-cand-3080-3159
  source 1..80: mol_type = other DNA
caagcttttatcaaatcttttgataaatttttttatgcagaaccaattgactttttctcagaatatccacagttgtgtgc

SEQ ID NO: 2523 - DNA, 80 bp, synthetic construct
  misc_feature 1..80: note = Synthetic: >NC_001943.1-cand-3120-3199
  source 1..80: mol_type = other DNA
aaccaattgactttttctcagaatatccacagttgtgtgctttcgctgattgggcaacttatcgcgagtttcggtatcta

SEQ ID NO: 2524 - DNA, 80 bp, synthetic construct
  misc_feature 1..80: note = Synthetic: >NC_001943.1-cand-3200-3279
  source 1..80: mol_type = other DNA
gaggatactagagtgatacacataactgcaactgagaaaaacactgattcaacacctgcttatcctaaaatgaattattt

SEQ ID NO: 2525 - DNA, 80 bp, synthetic construct
  misc_feature 1..80: note = Synthetic: >NC_001943.1-cand-3290-3369
  source 1..80: mol_type = other DNA
gaaaattacctggaagcacatgggtgggcaccatatattagagaattcactagggtctacaaaggagacaaacctgaagt

SEQ ID NO: 2526 - DNA, 80 bp, synthetic construct
  misc_feature 1..80: note = Synthetic: >NC_001943.1-cand-3380-3459
  source 1..80: mol_type = other DNA
ctatttcttaagaaagagatcattaaggaggaaaaaattaggaattctgatatccggcagatagtgtgtgccgaccccat

SEQ ID NO: 2527 - DNA, 80 bp, synthetic construct
  misc_feature 1..80: note = Synthetic: >NC_001943.1-cand-5970-6049
  source 1..80: mol_type = other DNA
gttacaagcctgttcctagtaaaagtgacaactggttttcaggtgaacaactacctgagttacttttacagggcgtctgc

SEQ ID NO: 2528 - DNA, 80 bp, synthetic construct
  misc_feature 1..80: note = Synthetic: >NC_001943.1-cand-6070-6149
  source 1..80: mol_type = other DNA
acctgttggttagaggagacacatacacagcagggataagttttacccagggtggatggtatttgttgacaaatacatct

SEQ ID NO: 2529 - DNA, 80 bp, synthetic construct
  misc_feature 1..80: note = Synthetic: >NC_001943.1-cand-6160-6239
  source 1..80: mol_type = other DNA
gggctatgccacctggttgggtctggaataacgtggaacttaaaactaacacagcatatcacatggacaaaggcttggtc

SEQ ID NO: 2530 - DNA, 80 bp, synthetic construct
  misc_feature 1..80: note = Synthetic: >NC_001943.1-cand-6230-6309
  source 1..80: mol_type = other DNA
aggcttggtccatttaataatgcctttgcctgagtccacgcaaatgtgttatgagatgctgacatctataccacgctcca

SEQ ID NO: 2531 - DNA, 80 bp, synthetic construct
  misc_feature 1..80: note = Synthetic: >NC_001943.1-cand-6310-6389
  source 1..80: mol_type = other DNA
gggcatctggtcatggttatgagagtgacaacaccgaatacttggatgctccagactctgctgaccagtttaaagaagac

SEQ ID NO: 2532 - DNA, 80 bp, synthetic construct
  misc_feature 1..80: note = Synthetic: >NC_001943.1-cand-6390-6469
  source 1..80: mol_type = other DNA
atagagacagatacagacattgagagtacagaggacgaagacgaagcggacaggtttgacatcatagacacttctgatga

SEQ ID NO: 2533 - DNA, 80 bp, synthetic construct
  misc_feature 1..80: note = Synthetic: >NC_001943.1-cand-6470-6549
  source 1..80: mol_type = other DNA
agaagatgaaaatgagacagaccgtgtaaccctcctctcaactctcgtaaaccaaggaatgacaatgacgcgtgccacaa

SEQ ID NO: 2534 - DNA, 80 bp, synthetic construct
  misc_feature 1..80: note = Synthetic: >NC_001943.1-cand-6540-6619
  source 1..80: mol_type = other DNA
cgtgccacaaggatagcaaggcgcgcattccccacgctttccgataggatcaagcgtggagtatacatggacctgcttgt

SEQ ID NO: 2535 - DNA, 80 bp, synthetic construct
  misc_feature 1..80: note = Synthetic: >NC_001943.1-cand-6690-6769
  source 1..80: mol_type = other DNA
aatccctgcacatctggaagccgcggccacgccgagtaggaacgagggtacagcttccttcttttctgtctctgtttaga

SEQ ID NO: 2536 - DNA, 80 bp, synthetic construct
  misc_feature 1..80: note = Synthetic: >NC_001943.1-cand-6710-6789
  source 1..80: mol_type = other DNA
ccgcggccacgccgagtaggaacgagggtacagcttccttcttttctgtctctgtttagattattttaatcaccatttaa

SEQ ID NO: 2537 - DNA, 80 bp, synthetic construct
  misc_feature 1..80: note = Synthetic: >NC_001959.2-cand-0-79
  source 1..80: mol_type = other DNA
atgatgatggcgtcaaaagacgtcgttcctactgctgctagcagtgaaaatgctaacaacaatagtagtattaagtctcg

SEQ ID NO: 2538 - DNA, 80 bp, synthetic construct
  misc_feature 1..80: note = Synthetic: >NC_001959.2-cand-30-109
  source 1..80: mol_type = other DNA
actgctgctagcagtgaaaatgctaacaacaatagtagtattaagtctcgtctattggcgagactcaagggttcaggtgg

SEQ ID NO: 2539 - DNA, 80 bp, synthetic construct
  misc_feature 1..80: note = Synthetic: >NC_001959.2-cand-170-249
  source 1..80: mol_type = other DNA
tggacaggtcccagcgccaaaggccacatccgtcgatgtccctaaacaacagagggatagaccaccacggactgttgccg

SEQ ID NO: 2540 - DNA, 80 bp, synthetic construct
  misc_feature 1..80: note = Synthetic: >NC_001959.2-cand-250-329
  source 1..80: mol_type = other DNA
aagttcaacaaaatttgcgttggactgagagaccacaagaccagaatgttaagacgtgggatgagcttgaccacacaaca

SEQ ID NO: 2541 - DNA, 80 bp, synthetic construct
  misc_feature 1..80: note = Synthetic: >NC_001959.2-cand-330-409
  source 1..80: mol_type = other DNA
aaacaacagatacttgatgaacacgctgagtggtttgatgccggtggcttaggtccaagtacactacccactagtcatga

SEQ ID NO: 2542 - DNA, 80 bp, synthetic construct
  misc_feature 1..80: note = Synthetic: >NC_001959.2-cand-410-489
  source 1..80: mol_type = other DNA
acggtacacacatgagaatgatgaaggccaccaggtaaagtggtcggctagggaaggtgtagaccttggcatatccgggc

SEQ ID NO: 2543 - DNA, 80 bp, synthetic construct
  misc_feature 1..80: note = Synthetic: >NC_002022.1-cand-570-649
  source 1..80: mol_type = other DNA
gcagaggcctctgggattcctttcgtcagtccgagagaggagaagagacaattgaagaaaggtttgaaatcacaggaaca

SEQ ID NO: 2544 - DNA, 80 bp, synthetic construct
  misc_feature 1..80: note = Synthetic: >NC_002022.1-cand-650-729
  source 1..80: mol_type = other DNA
atgcgcaagcttgccgaccaaagtctcccgccgaacttctccagccttgaaaattttagagcctatgtggatggattcga

SEQ ID NO: 2545 - DNA, 80 bp, synthetic construct
  misc_feature 1..80: note = Synthetic: >NC_002022.1-cand-730-809
  source 1..80: mol_type = other DNA
accgaacggctacattgagggcaagctgtctcaaatgtccaaagaagtaaatgctagaattgaaccttttttgaaaacaa

SEQ ID NO: 2546 - DNA, 80 bp, synthetic construct
  misc_feature 1..80: note = Synthetic: >NC_002022.1-cand-820-899
  source 1..80: mol_type = other DNA
acttagacttccgaatgggcctccctgttctcagcggtccaaattcctgctgatggatgccttaaaattaagcattgagg

SEQ ID NO: 2547 - DNA, 80 bp, synthetic construct
  misc_feature 1..80: note = Synthetic: >NC_002022.1-cand-910-989
  source 1..80: mol_type = other DNA
tgaaggagagggaataccgctatatgatgcaatcaaatgcatgagaacattctttggatggaaggaacccaatgttgtta

SEQ ID NO: 2548 - DNA, 80 bp, synthetic construct
  misc_feature 1..80: note = Synthetic: >NC_002022.1-cand-990-1069
  source 1..80: mol_type = other DNA
aaccacacgaaaagggaataaatccaaattatcttctgtcatggaagcaagtactggcagaactgcaggacattgagaat

SEQ ID NO: 2549 - DNA, 80 bp, synthetic construct
  misc_feature 1..80: note = Synthetic: >NC_002022.1-cand-1150-1229
  source 1..80: mol_type = other DNA
aaaggtagactttgacgactgtaaagatgtaggtgatttgaagcaatatgatagtgatgaaccagaattgaggtcgcttg

SEQ ID NO: 2550 - DNA, 80 bp, synthetic construct
  misc_feature 1..80: note = Synthetic: >NC_002022.1-cand-1230-1309
  source 1..80: mol_type = other DNA
caagttggattcagaatgagttcaacaaggcatgcgaactgacagattcaagctggatagagcttgatgagattggagaa

SEQ ID NO: 2551 - DNA, 80 bp, synthetic construct
  misc_feature 1..80: note = Synthetic: >NC_002022.1-cand-1320-1399
  source 1..80: mol_type = other DNA
caattgaacacattgcaagcatgagaaggaattatttcacatcagaggtgtctcactgcagagccacagaatacataatg

SEQ ID NO: 2552 - DNA, 80 bp, synthetic construct
  misc_feature 1..80: note = Synthetic: >NC_002022.1-cand-1410-1489
  source 1..80: mol_type = other DNA
acatcaatactgccttacttaatgcatcttgtgcagcaatggatgatttccaattaattccaatgataagcaagtgtaga

SEQ ID NO: 2553 - DNA, 80 bp, synthetic construct
  misc_feature 1..80: note = Synthetic: >NC_002022.1-cand-1480-1559
  source 1..80: mol_type = other DNA
caagtgtagaactaaggagggaaggcgaaagaccaacttgtatggtttcatcataaaaggaagatcccacttaaggaatg

SEQ ID NO: 2554 - DNA, 80 bp, synthetic construct
  misc_feature 1..80: note = Synthetic: >NC_002022.1-cand-1650-1729
  source 1..80: mol_type = other DNA
agataggagatatgcttctaagaagtgccataggccaggtttcaaggcccatgttcttgtatgtgaggacaaatggaacc

SEQ ID NO: 2555 - DNA, 80 bp, synthetic construct
  misc_feature 1..80: note = Synthetic: >NC_002022.1-cand-1750-1829
  source 1..80: mol_type = other DNA
gggaatggagatgaggcgttgtctcctccagtcacttcaacaaattgagagtatgattgaagctgagtcctctgtcaaag

SEQ ID NO: 2556 - DNA, 80 bp, synthetic construct
  misc_feature 1..80: note = Synthetic: >NC_002022.1-cand-1810-1889
  source 1..80: mol_type = other DNA
agctgagtcctctgtcaaagagaaagacatgaccaaagagttctttgagaacaaatcagaaacatggcccattggagagt

SEQ ID NO: 2557 - DNA, 80 bp, synthetic construct
  misc_feature 1..80: note = Synthetic: >NC_002022.1-cand-1890-1969
  source 1..80: mol_type = other DNA
ctcccaaaggagtggaggaaagttccattgggaaggtctgcaggactttattagcaaagtcggtatttaacagcttgtat

SEQ ID NO: 2558 - DNA, 80 bp, synthetic construct
  misc_feature 1..80: note = Synthetic: >NC_002022.1-cand-1970-2049
  source 1..80: mol_type = other DNA
gcatctccacaactagaaggattttcagctgaatcaagaaaactgcttcttatcgttcaggctcttagggacaatctgga

SEQ ID NO: 2559 - DNA, 80 bp, synthetic construct
  misc_feature 1..80: note = Synthetic: >NC_003310.1-cand-30240-30319
  source 1..80: mol_type = other DNA
tatagtgtttaataaagatattaccagttgtggaagactgtacaaggaattgataaagttcgatgatgccgctatacggt

SEQ ID NO: 2560 - DNA, 80 bp, synthetic construct
  misc_feature 1..80: note = Synthetic: >NC_003310.1-cand-30370-30449
  source 1..80: mol_type = other DNA
gaccactacatcaatcttacagaagtccatgatcaggaaagtctattcgctaccataggaatatgtgctaaaatcgctga

SEQ ID NO: 2561 - DNA, 80 bp, synthetic construct
  misc_feature 1..80: note = Synthetic: >NC_003310.1-cand-30560-30639
  source 1..80: mol_type = other DNA
aattgaattgatgatataggtgtcttcataacgcattattacgttagcattctattatcctatcatgtatttgagagtct

SEQ ID NO: 2562 - DNA, 80 bp, synthetic construct
  misc_feature 1..80: note = Synthetic: >NC_003310.1-cand-30640-30719
  source 1..80: mol_type = other DNA
tatatgtagcaaacatgataactgcaatacccataatctttagatattcacgcgtgctatggatggcattatcccgcggt

SEQ ID NO: 2563 - DNA, 80 bp, synthetic construct
  misc_feature 1..80: note = Synthetic: >NC_003310.1-cand-30690-30769
  source 1..80: mol_type = other DNA
cgcgtgctatggatggcattatcccgcggtgtggaaatgtacgttatataatctacaaaataatcatcgcatatagtatg

SEQ ID NO: 2564 - DNA, 80 bp, synthetic construct
  misc_feature 1..80: note = Synthetic: >NC_003310.1-cand-30770-30849
  source 1..80: mol_type = other DNA
agatagtagagtaaacatttttatcgtttctactgggttcatacatcgtctacccaattcggtaatgaatgaaattgtcg

SEQ ID NO: 2565 - DNA, 80 bp, synthetic construct
  misc_feature 1..80: note = Synthetic: >NC_003310.1-cand-30850-30929
  source 1..80: mol_type = other DNA
ccaatcttacacccaaacccttgttgttcattagtatagtattaacttcattatttatgtcataaactgtaaatgattct

SEQ ID NO: 2566 - DNA, 80 bp, synthetic construct
  misc_feature 1..80: note = Synthetic: >NC_003310.1-cand-31170-31249
  source 1..80: mol_type = other DNA
agcggatatacatagtcgcgatcatcattatcactagcctcatcctctatatcatgtacatgtacataatctatgatatt

SEQ ID NO: 2567 - DNA, 80 bp, synthetic construct
  misc_feature 1..80: note = Synthetic: >NC_003310.1-cand-31330-31409
  source 1..80: mol_type = other DNA
actatctagagattgtacttcttcaagttctggataatatatacgttgatagattagctgagctattctatctccagtat

SEQ ID NO: 2568 - DNA, 80 bp, synthetic construct
  misc_feature 1..80: note = Synthetic: >NC_003310.1-cand-31570-31649
  source 1..80: mol_type = other DNA
atctgtcttaattaactgtcgttctccaggagggatagtataatcgtaagcgctatacaaatcatatccggcagcacccg

SEQ ID NO: 2569 - DNA, 80 bp, synthetic construct
  misc_feature 1..80: note = Synthetic: >NC_003310.1-cand-31730-31809
  source 1..80: mol_type = other DNA
aaaaatatcattttatttcaaaattatttaccatcccatcccatcccatcccatcccattccatatattccatgaataag

SEQ ID NO: 2570 - DNA, 80 bp, synthetic construct
  misc_feature 1..80: note = Synthetic: >NC_003310.1-cand-31810-31889
  source 1..80: mol_type = other DNA
tgcgattattgtacacttctatagtatctatatacgatccacgataaaatcctcctatcaatagcagtttattatccact

SEQ ID NO: 2571 - DNA, 80 bp, synthetic construct
  misc_feature 1..80: note = Synthetic: >NC_003310.1-cand-31890-31969
  source 1..80: mol_type = other DNA
atgatcaattctggattatccctcggataaataggatcatctatcagagtccatgtattactggattcacaataaaattc

SEQ ID NO: 2572 - DNA, 80 bp, synthetic construct
  misc_feature 1..80: note = Synthetic: >NC_003310.1-cand-31970-32049
  source 1..80: mol_type = other DNA
cgcatttctaccaaccaagaataaccttctaccaaacactaacgcacatgatttataatgaggataataagtggatggtc

SEQ ID NO: 2573 - DNA, 80 bp, synthetic construct
  misc_feature 1..80: note = Synthetic: >NC_003310.1-cand-32040-32119
  source 1..80: mol_type = other DNA
gtggatggtccaaactgccactgatcatgattgggtagcaaatattctgtagttgtatcagtttcagaatgtcctcccat

SEQ ID NO: 2574 - DNA, 80 bp, synthetic construct
  misc_feature 1..80: note = Synthetic: >NC_003310.1-cand-32120-32199
  source 1..80: mol_type = other DNA
tacgtatataacattgtttatggatgccactgctggattacatctaggtttcagaagactcggcatattaacccaagcag

SEQ ID NO: 2575 - DNA, 80 bp, synthetic construct
  misc_feature 1..80: note = Synthetic: >NC_003310.1-cand-38750-38829
  source 1..80: mol_type = other DNA
tcagctggtctaaaatttccatctctatctaatacagaatccaacttgatgtcagggactatgaccggtttaatgttata

SEQ ID NO: 2576 - DNA, 80 bp, synthetic construct
  misc_feature 1..80: note = Synthetic: >NC_003310.1-cand-38830-38909
  source 1..80: mol_type = other DNA
tgtaacattgagtaaatccttaagttcataatcatcgttgtcatcagttatgtacgatccaaacaatgtttctaccggca

SEQ ID NO: 2577 - DNA, 80 bp, synthetic construct
  misc_feature 1..80: note = Synthetic: >NC_003310.1-cand-38990-39069
  source 1..80: mol_type = other DNA
tccgaatcagtaactatgttcatttttttaggagtaggacgtctagccagtatggaagaggattttctagatactctctt

SEQ ID NO: 2578 - DNA, 80 bp, synthetic construct
  misc_feature 1..80: note = Synthetic: >NC_003310.1-cand-39070-39149
  source 1..80: mol_type = other DNA
caacatctttgatctcaatggaatgcaaaaccccatggtgtaacaaccaacgataaaaataatattgttttttcactttt

SEQ ID NO: 2579 - DNA, 80 bp, synthetic construct
  misc_feature 1..80: note = Synthetic: >NC_003310.1-cand-39150-39229
  source 1..80: mol_type = other DNA
tataattttaccatctgactcatggattcattaatatctttataagagctactaacgtataattctttataactgaactg

SEQ ID NO: 2580 - DNA, 80 bp, synthetic construct
  misc_feature 1..80: note = Synthetic: >NC_003310.1-cand-39230-39309
  source 1..80: mol_type = other DNA
agatatatacaccggatctatggtttccataattgagtaaatgaatgctcggcaataactaatggcaaatgtatagaaca

SEQ ID NO: 2581 - DNA, 80 bp, synthetic construct
  misc_feature 1..80: note = Synthetic: >NC_003310.1-cand-39310-39389
  source 1..80: mol_type = other DNA
acgaaattatactagagttgttaaagttaatattttctatgagttgttccaataaattatttgttgtgactgcgttcaag

SEQ ID NO: 2582 - DNA, 80 bp, synthetic construct
  misc_feature 1..80: note = Synthetic: >NC_003310.1-cand-39390-39469
  source 1..80: mol_type = other DNA
tcataaattatcttgatactatccagtaaacagtctttaagttctggaatattatcatcccattgtaaagcccctagttc

SEQ ID NO: 2583 - DNA, 80 bp, synthetic construct
  misc_feature 1..80: note = Synthetic: >NC_003310.1-cand-39550-39629
  source 1..80: mol_type = other DNA
catcgtgataaactacgggaatatggtcgttagtaggtaccgtgactttacacaacgcgatatataactttccttttgta

SEQ ID NO: 2584 - DNA, 80 bp, synthetic construct
  misc_feature 1..80: note = Synthetic: >NC_003310.1-cand-39790-39869
  source 1..80: mol_type = other DNA
gataatacatccccattccagtattctcggatactctattgatgacactagttaagaacatgtcttctattctagaaaac

SEQ ID NO: 2585 - DNA, 80 bp, synthetic construct
  misc_feature 1..80: note = Synthetic: >NC_003310.1-cand-39870-39949
  source 1..80: mol_type = other DNA
gaaaacatcctacatggactcattaaaacttctaacgctcctgattgtgtttcgaatgcctcgtacaaggatttcaagga

SEQ ID NO: 2586 - DNA, 80 bp, synthetic construct
  misc_feature 1..80: note = Synthetic: >NC_003310.1-cand-39950-40029
  source 1..80: mol_type = other DNA
tgccatagattctttgaccaacgatttagaattgcgtttagcatctgatttttttattaaatcaaatggtcggctctctg

SEQ ID NO: 2587 - DNA, 80 bp, synthetic construct
  misc_feature 1..80: note = Synthetic: >NC_003310.1-cand-40090-40169
  source 1..80: mol_type = other DNA
catccatccaaataaccctagcaccgtcggatgatattaatgtattattatagattttccatccacagttattgggccag

SEQ ID NO: 2588 - DNA, 80 bp, synthetic construct
  misc_feature 1..80: note = Synthetic: >NC_003310.1-cand-40240-40319
  source 1..80: mol_type = other DNA
tcataatatctttaatccaatctaagaaatctaaaattagatcttttacactattaaagttaacaaaggtattacccggg

SEQ ID NO: 2589 - DNA, 80 bp, synthetic construct
  misc_feature 1..80: note = Synthetic: >NC_003310.1-cand-40320-40399
  source 1..80: mol_type = other DNA
tacgtggatatcatatatggtattggtccattatcagtaatggctccataaactgatacggcgatggtttttatatgtgt

SEQ ID NO: 2590 - DNA, 80 bp, synthetic construct
  misc_feature 1..80: note = Synthetic: >NC_003310.1-cand-40400-40479
  source 1..80: mol_type = other DNA
ttgatctaatgaggacgaaattcgcgcccacaattcatctctagatatgtatttaatatcgaacggtaacacatcaatct

SEQ ID NO: 2591 - DNA, 80 bp, synthetic construct
  misc_feature 1..80: note = Synthetic: >NC_003310.1-cand-62800-62879
  source 1..80: mol_type = other DNA
ctcttattagagatttcagcttctggaataggataataattaatatctataattttattgagatttctgacaattacttt

SEQ ID NO: 2592 - DNA, 80 bp, synthetic construct
  misc_feature 1..80: note = Synthetic: >NC_003310.1-cand-62880-62959
  source 1..80: mol_type = other DNA
gaccacatccttcagtttgagaaaatcaaatcgcccatctattacaaacatgttcaatgcaacagatgccagattacaca

SEQ ID NO: 2593 - DNA, 80 bp, synthetic construct
  misc_feature 1..80: note = Synthetic: >NC_003310.1-cand-63120-63199
  source 1..80: mol_type = other DNA
gacgactcgagcctttattatagatttgtatctcctttctctttcgtatagagtatacaatcgttcgaactcgtctcccc

SEQ ID NO: 2594 - DNA, 80 bp, synthetic construct
  misc_feature 1..80: note = Synthetic: >NC_003310.1-cand-63520-63599
  source 1..80: mol_type = other DNA
cgaatattactaattgatagacctattccccctgccattttagagattaatgcgcatcgttttaacgtgtcatagatgcc

SEQ ID NO: 2595 - DNA, 80 bp, synthetic construct
  misc_feature 1..80: note = Synthetic: >NC_003310.1-cand-63600-63679
  source 1..80: mol_type = other DNA
ttctatgctatcatcgatcatgttaagtagaaaacagctagacatttggtgacgagtagttcccgcattaaataaggtag

SEQ ID NO: 2596 - DNA, 80 bp, synthetic construct
  misc_feature 1..80: note = Synthetic: >NC_003310.1-cand-64000-64079
  source 1..80: mol_type = other DNA
tcactaaatagtttttttgtttccttgtgtagatttgatatggctattctggcggctagaatggcataatccggatgttg

SEQ ID NO: 2597 - DNA, 80 bp, synthetic construct
  misc_feature 1..80: note = Synthetic: >NC_003310.1-cand-64080-64159
  source 1..80: mol_type = other DNA
tgtagtacaagtggctgctatttcggctgccagagtgtccaattctaccgttgttactccattatatattccttgaataa

SEQ ID NO: 2598 - DNA, 80 bp, synthetic construct
  misc_feature 1..80: note = Synthetic: >NC_003310.1-cand-64160-64239
  source 1..80: mol_type = other DNA
ccttcatagctattttaataggatctatatgatccgtgtttaagccatagcacaattttctaatacgagacgtgatttta

SEQ ID NO: 2599 - DNA, 80 bp, synthetic construct
  misc_feature 1..80: note = Synthetic: >NC_003310.1-cand-64480-64559
  source 1..80: mol_type = other DNA
ggtgccagaaattaccatcaaaagcattaatacagttatacagatcgcagttagaacggttatagcatccaccatttata

SEQ ID NO: 2600 - DNA, 80 bp, synthetic construct
  misc_feature 1..80: note = Synthetic: >NC_003310.1-cand-64560-64639
  source 1..80: mol_type = other DNA
tctaaaaattagatcaaagaatatgtgacaacgtcctagttgtatactgagaattgacgaaacaatgtttcttacatatt

SEQ ID NO: 2601 - DNA, 80 bp, synthetic construct
  misc_feature 1..80: note = Synthetic: >NC_003310.1-cand-64640-64719
  source 1..80: mol_type = other DNA
tttttcttattagtaaccgacttaatagtaggaactggaaaactagacttgattattctataagtatagatacccttcca

SEQ ID NO: 2602 - DNA, 80 bp, synthetic construct
  misc_feature 1..80: note = Synthetic: >NC_003310.1-cand-64800-64879
  source 1..80: mol_type = other DNA
ttagacgcttattattaatatgagtgatgaaatccacaccgcttctagatatcgcttttatttccacattagatggtaaa

SEQ ID NO: 2603 - DNA, 80 bp, synthetic construct
  misc_feature 1..80: note = Synthetic: >NC_003310.1-cand-64880-64959
  source 1..80: mol_type = other DNA
tccaatagtgaaactatctttttaggaatgtatggacttgcgtttagaggagtgaacgtcttcggagtagtaaaggatga

SEQ ID NO: 2604 - DNA, 80 bp, synthetic construct
  misc_feature 1..80: note = Synthetic: >NC_003310.1-cand-65040-65119
  source 1..80: mol_type = other DNA
ttctaatggatgatgttctacctatttcatccgataacatgttaatttccaacaccaacggttttaatatttcgatgata

SEQ ID NO: 2605 - DNA, 80 bp, synthetic construct
  misc_feature 1..80: note = Synthetic: >NC_003310.1-cand-65360-65439
  source 1..80: mol_type = other DNA
attaatgacgaattgaaaattatttttatcaccacgtgtgtttcaggatcatcgtcgacgccagtcaaccaaccgaatgg

SEQ ID NO: 2606 - DNA, 80 bp, synthetic construct
  misc_feature 1..80: note = Synthetic: >NC_003310.1-cand-65600-65679
  source 1..80: mol_type = other DNA
taaaagttgtccaagttaaaggatattatgcattcgtttaaagatatcacctcatctaacggagacaattttttggtagg

SEQ ID NO: 2607 - DNA, 80 bp, synthetic construct
  misc_feature 1..80: note = Synthetic: >NC_003466.1-cand-790-869
  source 1..80: mol_type = other DNA
ggtcgcctcagaagccttcatgtctaccaataagatgtattttctgaacagacagagacaagtcaatgaatctaaggttc

SEQ ID NO: 2608 - DNA, 80 bp, synthetic construct
  misc_feature 1..80: note = Synthetic: >NC_003466.1-cand-870-949
  source 1..80: mol_type = other DNA
aagatattatcgatttgatagaccatgctgagaccgagtctgctaccttgtttacagagattgcaacaccccattcagtc

SEQ ID NO: 2609 - DNA, 80 bp, synthetic construct
  misc_feature 1..80: note = Synthetic: >NC_003466.1-cand-920-999
  source 1..80: mol_type = other DNA
tttacagagattgcaacaccccattcagtctgggtgtttgcatgtgcacctgaccggtgccctccaactgcattgtatgt

SEQ ID NO: 2610 - DNA, 80 bp, synthetic construct
  misc_feature 1..80: note = Synthetic: >NC_003466.1-cand-1040-1119
  source 1..80: mol_type = other DNA
caggacatgcgtaataccatcatggcatctaaatctgtagggactgcagaagagaagctaaagaaaaaatctgccttcta

SEQ ID NO: 2611 - DNA, 80 bp, synthetic construct
  misc_feature 1..80: note = Synthetic: >NC_003466.1-cand-1120-1199
  source 1..80: mol_type = other DNA
ccaatcatacctaagaaggacacaatctatgggaatccaactggaccagaagatcataatcctttacatgctatcatggg

SEQ ID NO: 2612 - DNA, 80 bp, synthetic construct
  misc_feature 1..80: note = Synthetic: >NC_003466.1-cand-1200-1279
  source 1..80: mol_type = other DNA
gtaaagaagctgtgaatcacttccatcttggtgatgatatggaccctgaactcaggcagctagcacaatctctgatcgat

SEQ ID NO: 2613 - DNA, 80 bp, synthetic construct
  misc_feature 1..80: note = Synthetic: >NC_003466.1-cand-1280-1359
  source 1..80: mol_type = other DNA
actaaggtgaaggagatctccaaccaagagccacttaagttgtaggtgcttaatgaaatcatgattgaagaaagactttc

SEQ ID NO: 2614 - DNA, 80 bp, synthetic construct
  misc_feature 1..80: note = Synthetic: >NC_003466.1-cand-1360-1439
  source 1..80: mol_type = other DNA
cgggcttgtgccacatattaatcatctcaggacctatccttaatgtgattaatagggttttattataagggcagttaatg

SEQ ID NO: 2615 - DNA, 80 bp, synthetic construct
  misc_feature 1..80: note = Synthetic: >NC_003466.1-cand-1450-1529
  source 1..80: mol_type = other DNA
ctaactatgggtaagggttcattaccatttttgcactagggttaaagggccactacattgtatttgcactaagggaaatg

SEQ ID NO: 2616 - DNA, 80 bp, synthetic construct
  misc_feature 1..80: note = Synthetic: >NC_003466.1-cand-1530-1609
  source 1..80: mol_type = other DNA
ggaggtgggttagtttgtatttagttgttaagttttttataatcatatgttaatgaggaattagctatatgatatcactg

SEQ ID NO: 2617 - DNA, 80 bp, synthetic construct
  misc_feature 1..80: note = Synthetic: >NC_003466.1-cand-1610-1689
  source 1..80: mol_type = other DNA
attgattggctatttttaggttaagtaattgtagttaaatagttgtgttaagttagtatgttaaggtttataggttaaga

SEQ ID NO: 2618 - DNA, 80 bp, synthetic construct
  misc_feature 1..80: note = Synthetic: >NC_003466.1-cand-1700-1779
  source 1..80: mol_type = other DNA
atcatattatgtcattagatgtaaatttcattcctggcttgcttctgctttcgcattgctaacctacaacaagactacct

SEQ ID NO: 2619 - DNA, 80 bp, synthetic construct
  misc_feature 1..80: note = Synthetic: >NC_003466.1-cand-1780-1859
  source 1..80: mol_type = other DNA
cacccactacccctcccctattctacctcaacacatactacctcacatttgatttttcttgattgcttttcaaggagcat

SEQ ID NO: 2620 - DNA, 80 bp, synthetic construct
  misc_feature 1..80: note = Synthetic: >NC_003467.2-cand-0-79
  source 1..80: mol_type = other DNA
agtagactccgcaagaagaagcaaaaaattaaagaagtgagtttaaaatggaagggtggtatctggttgttcttggagtc

SEQ ID NO: 2621 - DNA, 80 bp, synthetic construct
  misc_feature 1..80: note = Synthetic: >NC_003467.2-cand-90-169
  source 1..80: mol_type = other DNA
tgacactggcaatgcccaagaccatttatgagcttaaaatggaatgcccgcacactgtgggtctcggtcaaggttacatc

SEQ ID NO: 2622 - DNA, 80 bp, synthetic construct
  misc_feature 1..80: note = Synthetic: >NC_003467.2-cand-170-249
  source 1..80: mol_type = other DNA
attggctcaacagaactaggtttgatctcaattgaggctgcatctgatataaagctcgagagctcttgcaattttgatct

SEQ ID NO: 2623 - DNA, 80 bp, synthetic construct
  misc_feature 1..80: note = Synthetic: >NC_003468.2-cand-1800-1879
  source 1..80: mol_type = other DNA
tgaagaccaaggccattttccccttcaacatgcattaaggtcaatcttttctttccactttttactctgtgtgtcacaaa

SEQ ID NO: 2624 - DNA, 80 bp, synthetic construct
  misc_feature 1..80: note = Synthetic: >NC_003468.2-cand-1880-1959
  source 1..80: mol_type = other DNA
agatgaagctatgtgcaatatttgataaccttcgttatctgataccatcagtaacatctttgtactctgggtacgagttg

SEQ ID NO: 2625 - DNA, 80 bp, synthetic construct
  misc_feature 1..80: note = Synthetic: >NC_003468.2-cand-1960-2039
  source 1..80: mol_type = other DNA
ttaatagaaaaattctttgagagaccatttaagagttcactggatgtatacctttattctatcataaaatctctattaat

SEQ ID NO: 2626 - DNA, 80 bp, synthetic construct
  misc_feature 1..80: note = Synthetic: >NC_003468.2-cand-2040-2119
  source 1..80: mol_type = other DNA
tagtttggcacaaaataataaagttcgattttactcaagagttcgtttgttaggattgacagttgatcactccacggtcg

SEQ ID NO: 2627 - DNA, 80 bp, synthetic construct
  misc_feature 1..80: note = Synthetic: >NC_003468.2-cand-2120-2199
  source 1..80: mol_type = other DNA
gagcaagtggtgtttacccctctttaatgtcccgtgttgtttacaaacattacagaagtttaatctctgaagctacaact

SEQ ID NO: 2628 - DNA, 80 bp, synthetic construct
  misc_feature 1..80: note = Synthetic: >NC_003468.2-cand-2210-2289
  source 1..80: mol_type = other DNA
tatttgaaaagggtttgcatgggaatttaccagaagaggctaaaatacatcttgaaaccattgaatgggctcggaagttc

SEQ ID NO: 2629 - DNA, 80 bp, synthetic construct
  misc_feature 1..80: note = Synthetic: >NC_003468.2-cand-2290-2369
  source 1..80: mol_type = other DNA
caggagaaagaaaaacaatatggtgatattcttctaaaggaaggctatacaattgaatctgtaatcaatggagaagttga

SEQ ID NO: 2630 - DNA, 80 bp, synthetic construct
  misc_feature 1..80: note = Synthetic: >NC_003468.2-cand-2370-2449
  source 1..80: mol_type = other DNA
tgtagaacaacagcttttttgtcaggaggtctcagagctaagtgcacaagagctcaacaaatatttacaggcaaaatctc

SEQ ID NO: 2631 - DNA, 80 bp, synthetic construct
  misc_feature 1..80: note = Synthetic: >NC_003468.2-cand-2450-2529
  source 1..80: mol_type = other DNA
aagttttatgtgctaatatcatgaataaacactgggacaaaccatatttcagtcaaacacgcaatatcagtctcaaggga

SEQ ID NO: 2632 - DNA, 80 bp, synthetic construct
  misc_feature 1..80: note = Synthetic: >NC_003468.2-cand-2540-2619
  source 1..80: mol_type = other DNA
cattgcaagaggatggacatttagctgctagtgtgacactgattgaagcaattaggtttttaaatagatcacaaaccaat

SEQ ID NO: 2633 - DNA, 80 bp, synthetic construct
  misc_feature 1..80: note = Synthetic: >NC_003468.2-cand-2620-2699
  source 1..80: mol_type = other DNA
ccaaatgttattgatatgtatgagcagactaaacaatcaaaggcacaagctaggattgttaggaaataccagagaacaga

SEQ ID NO: 2634 - DNA, 80 bp, synthetic construct
  misc_feature 1..80: note = Synthetic: >NC_003468.2-cand-2700-2779
  source 1..80: mol_type = other DNA
agcagatagaggattttttatcacaacattaccaactagggtgcgattagaaataatagaagattatttcgatgcaattg

SEQ ID NO: 2635 - DNA, 80 bp, synthetic construct
  misc_feature 1..80: note = Synthetic: >NC_003468.2-cand-2820-2899
  source 1..80: mol_type = other DNA
taaaaaagttctaaatattcagaatgcactagagaaagcacttagatgggcatctggagtatcagaaattacaacaagca

SEQ ID NO: 2636 - DNA, 80 bp, synthetic construct
  misc_feature 1..80: note = Synthetic: >NC_003468.2-cand-2860-2939
  source 1..80: mol_type = other DNA
cttagatgggcatctggagtatcagaaattacaacaagcactggtaaaagcatcaagtttaagcggaaattaatgtatgt

SEQ ID NO: 2637 - DNA, 80 bp, synthetic construct
  misc_feature 1..80: note = Synthetic: >NC_003468.2-cand-2940-3019
  source 1..80: mol_type = other DNA
tagtgctgatgccacaaaatggtcaccaggagataattctgctaagtttaggagatttacacaagcaatatatgatggct

SEQ ID NO: 2638 - DNA, 80 bp, synthetic construct
  misc_feature 1..80: note = Synthetic: >NC_003468.2-cand-3020-3099
  source 1..80: mol_type = other DNA
tatcagacaacaaactgaaatgttgtgttgttgatgcattacgtaacatttatgagactgaattttttatgtccaggaaa

SEQ ID NO: 2639 - DNA, 80 bp, synthetic construct
  misc_feature 1..80: note = Synthetic: >NC_003468.2-cand-5680-5759
  source 1..80: mol_type = other DNA
cagcacaaactatttattaacccaattatatcatcagggcttttagaaaactttatgaaaggcttacctgctgccatacc

SEQ ID NO: 2640 - DNA, 80 bp, synthetic construct
  misc_feature 1..80: note = Synthetic: >NC_003468.2-cand-5760-5839
  source 1..80: mol_type = other DNA
tcctgctgcatattccctcataatgaacaaggctaagatttctgtggatttgtttatgttcaatgagctattagcactta

SEQ ID NO: 2641 - DNA, 80 bp, synthetic construct
  misc_feature 1..80: note = Synthetic: >NC_003468.2-cand-5840-5919
  source 1..80: mol_type = other DNA
taaataggaataatatcctcaaccttgatgggattgaagaaacatctgaaggttatagtactgtgacatcaatgtctagc

SEQ ID NO: 2642 - DNA, 80 bp, synthetic construct
  misc_feature 1..80: note = Synthetic: >NC_003468.2-cand-5920-5999
  source 1..80: mol_type = other DNA
aagcagtggtctgaagagatgagtttaatgtctgatgatgatattgatgatatggaggactttactatagcactggatga

SEQ ID NO: 2643 - DNA, 80 bp, synthetic construct
  misc_feature 1..80: note = Synthetic: >NC_003468.2-cand-6000-6079
  source 1..80: mol_type = other DNA
tattgactttgaacaaataaatttggaagaggatatacaacactttctgcaggatgaatcagcatatgttggtgatttat

SEQ ID NO: 2644 - DNA, 80 bp, synthetic construct
  misc_feature 1..80: note = Synthetic: >NC_003468.2-cand-6120-6199
  source 1..80: mol_type = other DNA
ggtgacaagagtattagagccagtcaagctattaaaaagctgggtttctaaaggccttgctatagacaaagtatacaatc

SEQ ID NO: 2645 - DNA, 80 bp, synthetic construct
  misc_feature 1..80: note = Synthetic: >NC_003468.2-cand-6160-6239
  source 1..80: mol_type = other DNA
tgggtttctaaaggccttgctatagacaaagtatacaatcctatcgggataatcttaatggcaagatacatgtcaaaaac

SEQ ID NO: 2646 - DNA, 80 bp, synthetic construct
  misc_feature 1..80: note = Synthetic: >NC_003468.2-cand-6240-6319
  source 1..80: mol_type = other DNA
atacaatttcagttcaacacctcttgcactattaaatccatatgacttgacagaacttgaaagtgttgtaaagggatggg

SEQ ID NO: 2647 - DNA, 80 bp, synthetic construct
  misc_feature 1..80: note = Synthetic: >NC_003468.2-cand-6320-6399
  source 1..80: mol_type = other DNA
gagaaactgtaaatgatcgattcaaagatttagatattgaggcacaaacagttgttaaagaaaagggtgtacagccagaa

SEQ ID NO: 2648 - DNA, 80 bp, synthetic construct
  misc_feature 1..80: note = Synthetic: >NC_003468.2-cand-6390-6469
  source 1..80: mol_type = other DNA
acagccagaagatgtactccctgattcattattctctttcaggcatgttgatgttttgctgcgaaggttgttcccgcgtg

SEQ ID NO: 2649 - DNA, 80 bp, synthetic construct
  misc_feature 1..80: note = Synthetic: >NC_003468.2-cand-6470-6549
  source 1..80: mol_type = other DNA
accctgtatcaacattctattagtggattttataccttattcatacagtatgtatattgtagtgttcttttcccggagca

SEQ ID NO: 2650 - DNA, 80 bp, synthetic construct
  misc_feature 1..80: note = Synthetic: >NC_003899.1-cand-10-89
  source 1..80: mol_type = other DNA
agaggcaaccaccctatttccacctatccaaaatggagaaagttcatgttgacttagacgcagacagcccattcgtcaag

SEQ ID NO: 2651 - DNA, 80 bp, synthetic construct
  misc_feature 1..80: note = Synthetic: >NC_003899.1-cand-90-169
  source 1..80: mol_type = other DNA
tcactgcaaagatgctttccacattttgagatagaagcaacgcaggtcactgacaatgaccatgctaatgctagggcgtt

SEQ ID NO: 2652 - DNA, 80 bp, synthetic construct
  misc_feature 1..80: note = Synthetic: >NC_003899.1-cand-170-249
  source 1..80: mol_type = other DNA
ttcgcacctagctactaagctcattgagggagaagtggatacagaccaggtgatcctggatattgggagcgcgcctgtaa

SEQ ID NO: 2653 - DNA, 80 bp, synthetic construct
  misc_feature 1..80: note = Synthetic: >NC_003899.1-cand-250-329
  source 1..80: mol_type = other DNA
ggcatacgcattccaaacataagtaccactgtatttgcccaatgaagagcgcagaagaccctgacagactctaccgctac

SEQ ID NO: 2654 - DNA, 80 bp, synthetic construct
  misc_feature 1..80: note = Synthetic: >NC_003899.1-cand-330-409
  source 1..80: mol_type = other DNA
gcagacaagcttagaaaaagtgatgtcactgacaaatgtattgcctctaaggccgcggacctgctaacagtaatgtcgac

SEQ ID NO: 2655 - DNA, 80 bp, synthetic construct
  misc_feature 1..80: note = Synthetic: >NC_003899.1-cand-4260-4339
  source 1..80: mol_type = other DNA
gaccagaaattgtctgaagtgtacatggacattgccagaattatcaacaacgagaggtttactaaagtctccattccgtt

SEQ ID NO: 2656 - DNA, 80 bp, synthetic construct
  misc_feature 1..80: note = Synthetic: >NC_003899.1-cand-4340-4419
  source 1..80: mol_type = other DNA
gttatctaccggcatttacgcaggtggtaaggacagggttatgcaatcgctgaaccatttatttacagccatggatacta

SEQ ID NO: 2657 - DNA, 80 bp, synthetic construct
  misc_feature 1..80: note = Synthetic: >NC_003899.1-cand-4420-4499
  source 1..80: mol_type = other DNA
ccgacgcagacatcactatttactgtctagataagcaatgggagtcaagaataaaggaagctatcactcggaaggaaagc

SEQ ID NO: 2658 - DNA, 80 bp, synthetic construct
  misc_feature 1..80: note = Synthetic: >NC_003899.1-cand-4500-4579
  source 1..80: mol_type = other DNA
gttgaagagcttactgaggatgacagaccagttgacattgaactggtacgggtacacccgttgagcagcttggcaggtag

SEQ ID NO: 2659 - DNA, 80 bp, synthetic construct
  misc_feature 1..80: note = Synthetic: >NC_003899.1-cand-4540-4619
  source 1..80: mol_type = other DNA
aactggtacgggtacacccgttgagcagcttggcaggtagacctggttattcaaccaccgagggcaaggtgtattcgtac

SEQ ID NO: 2660 - DNA, 80 bp, synthetic construct
  misc_feature 1..80: note = Synthetic: >NC_003899.1-cand-4660-4739
  source 1..80: mol_type = other DNA
ctgagattaacgctatgtggcctaacaagcaagaagcaaacgagcagatttgcttatacgtgttgggagagagtatgaac

SEQ ID NO: 2661 - DNA, 80 bp, synthetic construct
  misc_feature 1..80: note = Synthetic: >NC_003899.1-cand-4740-4819
  source 1..80: mol_type = other DNA
agcatccgctctaagtgtcctgttgaagagtcggaagcctcttccccccctcacaccatcccgtgtctgtgcaactatgc

SEQ ID NO: 2662 - DNA, 80 bp, synthetic construct
  misc_feature 1..80: note = Synthetic: >NC_003899.1-cand-4820-4899
  source 1..80: mol_type = other DNA
aatgactgcagagcgagtttacagattacgtatggcaaagaacgaacaattcgcagtttgttcgtcctttcagttaccga

SEQ ID NO: 2663 - DNA, 80 bp, synthetic construct
  misc_feature 1..80: note = Synthetic: >NC_003899.1-cand-4920-4999
  source 1..80: mol_type = other DNA
cagaaaattcaatgcagtaaacctgtgatattctccggcactgtacccccggccatacatccaagaaaattcgcatctgt

SEQ ID NO: 2664 - DNA, 80 bp, synthetic construct
  misc_feature 1..80: note = Synthetic: >NC_003899.1-cand-4980-5059
  source 1..80: mol_type = other DNA
ccaagaaaattcgcatctgtgacagtggaagacactccggtggtccaacctgaaagattggtgcctaggcgacctgcacc

SEQ ID NO: 2665 - DNA, 80 bp, synthetic construct
  misc_feature 1..80: note = Synthetic: >NC_003899.1-cand-5060-5139
  source 1..80: mol_type = other DNA
acctgtgcccgtacctgcaagaatccctagccctccatgtacatcgaccaacggatcgacgaccagtatacaatcactgg

SEQ ID NO: 2666 - DNA, 80 bp, synthetic construct
  misc_feature 1..80: note = Synthetic: >NC_003899.1-cand-5140-5219
  source 1..80: mol_type = other DNA
gggagtatcaaagcgcatctgcttctagcggagctgaaatctctgtagaccaggtttcgctatggagcatacccagcgct

SEQ ID NO: 2667 - DNA, 80 bp, synthetic construct
  misc_feature 1..80: note = Synthetic: >NC_003899.1-cand-5220-5299
  source 1..80: mol_type = other DNA
actgggttcgatgtgcgtacctcctcatcgttgagtctagagcagcctacctttccgacaatggttgtcgaagctgagat

SEQ ID NO: 2668 - DNA, 80 bp, synthetic construct
  misc_feature 1..80: note = Synthetic: >NC_003899.1-cand-5300-5379
  source 1..80: mol_type = other DNA
tcacgccagtcaaggatcactgtggagtatacccagtatcaccggatttgaaacccgtgttccgtcacctccaagtcagg

SEQ ID NO: 2669 - DNA, 80 bp, synthetic construct
  misc_feature 1..80: note = Synthetic: >NC_003899.1-cand-5380-5459
  source 1..80: mol_type = other DNA
atagtagaccatccaccccatctgcaagtgcttcacacacgttcgtggacttaatcacgtttgacagcgttgcagagatt

SEQ ID NO: 2670 - DNA, 80 bp, synthetic construct
  misc_feature 1..80: note = Synthetic: >NC_003899.1-cand-5460-5539
  source 1..80: mol_type = other DNA
ttggaggatttcagtcgttcgccgtttcaatttttgtctgaaatcaaacctattccagcacctcgtacccgagttaataa

SEQ ID NO: 2671 - DNA, 80 bp, synthetic construct
  misc_feature 1..80: note = Synthetic: >NC_003899.1-cand-9390-9469
  source 1..80: mol_type = other DNA
accctgattttacacctgtacccggaccacccgaccttgctgacgaccaggtcacttggaagtgatgcaaatccaactcg

SEQ ID NO: 2672 - DNA, 80 bp, synthetic construct
  misc_feature 1..80: note = Synthetic: >NC_003899.1-cand-9450-9529
  source 1..80: mol_type = other DNA
agtgatgcaaatccaactcgacaatggattgagcgaccaacaactgtcaatttcacagtcaccggagaagggttggagta

SEQ ID NO: 2673 - DNA, 80 bp, synthetic construct
  misc_feature 1..80: note = Synthetic: >NC_003899.1-cand-9550-9629
  source 1..80: mol_type = other DNA
caaaaagagtatgggctcaagagtcaggagaagggaatccacatggatggccgcacgaagtggtagtctattactacaac

SEQ ID NO: 2674 - DNA, 80 bp, synthetic construct
  misc_feature 1..80: note = Synthetic: >NC_003899.1-cand-9630-9709
  source 1..80: mol_type = other DNA
agatacccattaaccacaattatcgggttatgcacctgtgtggctatcatcatggtctcttgtgtcacatccgtgtggct

SEQ ID NO: 2675 - DNA, 80 bp, synthetic construct
  misc_feature 1..80: note = Synthetic: >NC_003899.1-cand-9710-9789
  source 1..80: mol_type = other DNA
cctttgcaggactcgcaatctttgcataaccccgtataaactagccccgaacgctcaagtcccaatactcctggcgttac

SEQ ID NO: 2676 - DNA, 80 bp, synthetic construct
  misc_feature 1..80: note = Synthetic: >NC_003899.1-cand-9790-9869
  source 1..80: mol_type = other DNA
tttgctgcattaagccgacgagggcagatgacaccttgcaagtgctgaattacctgtggaacaacaatcaaaactttttc

SEQ ID NO: 2677 - DNA, 80 bp, synthetic construct
  misc_feature 1..80: note = Synthetic: >NC_003899.1-cand-9860-9939
  source 1..80: mol_type = other DNA
aaactttttctggatgcagacgcttatcccacttgcagcgcttattgtatgcatgcgcatgctgcgctgcttattttgct

SEQ ID NO: 2678 - DNA, 80 bp, synthetic construct
  misc_feature 1..80: note = Synthetic: >NC_003899.1-cand-9940-10019
  source 1..80: mol_type = other DNA
gtgggccggcttttttacttgtctgcggcgccttgggcgccgcagcgtacgaacacacagcagtgatgccgaacaaggtg

SEQ ID NO: 2679 - DNA, 80 bp, synthetic construct
  misc_feature 1..80: note = Synthetic: >NC_003899.1-cand-10020-10099
  source 1..80: mol_type = other DNA
gggatcccgtacaaagctttagtcgaacgcccaggttatgcacccgttcacctacagatacagctggttaataccaggat

SEQ ID NO: 2680 - DNA, 80 bp, synthetic construct
  misc_feature 1..80: note = Synthetic: >NC_003899.1-cand-10100-10179
  source 1..80: mol_type = other DNA
aattccatcaactaacctggagtacatcacctgcaagtataagacaaaagtgccttctccagtagtgaaatgctgcggtg

SEQ ID NO: 2681 - DNA, 80 bp, synthetic construct
  misc_feature 1..80: note = Synthetic: >NC_003899.1-cand-10170-10249
  source 1..80: mol_type = other DNA
tgctgcggtgccactcaatgtacctccaaaccccatcctgactatcagtgtcaggtgtttacaggtgtttacccattcat

SEQ ID NO: 2682 - DNA, 80 bp, synthetic construct
  misc_feature 1..80: note = Synthetic: >NC_003899.1-cand-10260-10339
  source 1..80: mol_type = other DNA
gcctactgcttctgcgacactgaaaacacccagatgagcgaggcgtatgtagagcgctcggaagagtgctctattgacca

SEQ ID NO: 2683 - DNA, 80 bp, synthetic construct
  misc_feature 1..80: note = Synthetic: >NC_003899.1-cand-10340-10419
  source 1..80: mol_type = other DNA
cgcaaaagcttataaagtacacacaggcactgttcaggcaatggtgaacataacttatgggagcgtcagctggagatctg

SEQ ID NO: 2684 - DNA, 80 bp, synthetic construct
  misc_feature 1..80: note = Synthetic: >NC_003899.1-cand-10420-10499
  source 1..80: mol_type = other DNA
cagatgtttacgtcaatggtgaaactcccgcgaaaataggagatgccaaactcatcataggtccactgtcatctgcgtgg

SEQ ID NO: 2685 - DNA, 80 bp, synthetic construct
  misc_feature 1..80: note = Synthetic: >NC_003899.1-cand-10500-10579
  source 1..80: mol_type = other DNA
tccccattcgataacaaggtggtggttcatgggcatgaagtgtataattacgactttcctgagtacggcaccggcaaagc

SEQ ID NO: 2686 - DNA, 80 bp, synthetic construct
  misc_feature 1..80: note = Synthetic: >NC_003899.1-cand-10580-10659
  source 1..80: mol_type = other DNA
aggctcttttggagacctgcaatcacgcacatcaaccagcaacgatctgtacgcaaacaccaacttgaagctacaacgac

SEQ ID NO: 2687 - DNA, 80 bp, synthetic construct
  misc_feature 1..80: note = Synthetic: >NC_003908.1-cand-4170-4249
  source 1..80: mol_type = other DNA
ttgtgaagcacgaaccgctcatcatacatgctgtaggacccaatttttctaagatgccggaaccggagggcgaccttaag

SEQ ID NO: 2688 - DNA, 80 bp, synthetic construct
  misc_feature 1..80: note = Synthetic: >NC_003908.1-cand-4250-4329
  source 1..80: mol_type = other DNA
ctcgcagctgcctacatgagcatagcgtccatcgtcaacgctgagcggattacaaaaatatcagtaccgctactgtcaac

SEQ ID NO: 2689 - DNA, 80 bp, synthetic construct
  misc_feature 1..80: note = Synthetic: >NC_003908.1-cand-4330-4409
  source 1..80: mol_type = other DNA
cggcatctattctggtggcaaagatcgagtgatgcaatcattgcatcacctgttcactgctttcgacactacggatgccg

SEQ ID NO: 2690 - DNA, 80 bp, synthetic construct
  misc_feature 1..80: note = Synthetic: >NC_003908.1-cand-4410-4489
  source 1..80: mol_type = other DNA
atgtcaccatatattgcttggataaacaatgggagaccaggataatcgaggccattcaccgcaaagaaagcgtcgaaatt

SEQ ID NO: 2691 - DNA, 80 bp, synthetic construct
  misc_feature 1..80: note = Synthetic: >NC_003908.1-cand-4490-4569
  source 1..80: mol_type = other DNA
ctggatgatgacaagccagtagacattgacttggtcagggtccacccaaacagctctttggcaggcagaccaggttactc

SEQ ID NO: 2692 - DNA, 80 bp, synthetic construct
  misc_feature 1..80: note = Synthetic: >NC_003908.1-cand-4570-4649
  source 1..80: mol_type = other DNA
cgtcaatgagggcaagttgtattcatacctggaaggtacacgattccatcagaccgccaaggacattgccgaaatccatg

SEQ ID NO: 2693 - DNA, 80 bp, synthetic construct
  misc_feature 1..80: note = Synthetic: >NC_003908.1-cand-4620-4699
  source 1..80: mol_type = other DNA
agaccgccaaggacattgccgaaatccatgcaatgtggcccaacaaatctgaggctaatgagcagatttgcttgtacatc

SEQ ID NO: 2694 - DNA, 80 bp, synthetic construct
  misc_feature 1..80: note = Synthetic: >NC_003908.1-cand-4730-4809
  source 1..80: mol_type = other DNA
aaatgcccagtagaggagtcagaggcgtctgctccacctcacacacttccatgcctgtgtaattacgctatgacggctga

SEQ ID NO: 2695 - DNA, 80 bp, synthetic construct
  misc_feature 1..80: note = Synthetic: >NC_003908.1-cand-4810-4889
  source 1..80: mol_type = other DNA
gcgcgtatacaggttgcgctctgcgaagaaagaacagttcgccgtatgctcatcattcctgttgccgaagtacaggatca

SEQ ID NO: 2696 - DNA, 80 bp, synthetic construct
  misc_feature 1..80: note = Synthetic: >NC_003908.1-cand-4890-4969
  source 1..80: mol_type = other DNA
caggcgtgcagaagctacagtgcagcaaaccagtcctgttttcaggcgtcgtaccaccggctgtacaccccaggaagtac

SEQ ID NO: 2697 - DNA, 80 bp, synthetic construct
  misc_feature 1..80: note = Synthetic: >NC_003908.1-cand-4970-5049
  source 1..80: mol_type = other DNA
gcggaaataattctagaaacgccaccaccgccagcaacgacaaccgtaatatgtgaaccaactgtgccagaacgtatacc

SEQ ID NO: 2698 - DNA, 80 bp, synthetic construct
  misc_feature 1..80: note = Synthetic: >NC_003908.1-cand-5050-5129
  source 1..80: mol_type = other DNA
cagtccggtgatttctagagcaccaagtgcggaatcactgctatcgcttggcggcgtctcgttctctagctctgccacac

SEQ ID NO: 2699 - DNA, 80 bp, synthetic construct
  misc_feature 1..80: note = Synthetic: >NC_003908.1-cand-5130-5209
  source 1..80: mol_type = other DNA
gctcgtcaaccgcctggagcgactatgacaggcggtttgtggttacagctgatgtgcatcaagcgaacacgtctacgtgg

SEQ ID NO: 2700 - DNA, 80 bp, synthetic construct
  misc_feature 1..80: note = Synthetic: >NC_003908.1-cand-5210-5289
  source 1..80: mol_type = other DNA
agcatccctagtgctcctggcttggacgtccagctgccttctgacgtcactgattcccactggagtattccaagtgcatc

SEQ ID NO: 2701 - DNA, 80 bp, synthetic construct
  misc_feature 1..80: note = Synthetic: >NC_003908.1-cand-5290-5369
  source 1..80: mol_type = other DNA
aggctttgaagtgagaacaccatctgtacaggacctaactgcggagtgtgcgaagcctcgtggactggccgaaataatgc

SEQ ID NO: 2702 - DNA, 80 bp, synthetic construct
  misc_feature 1..80: note = Synthetic: >NC_003908.1-cand-5370-5449
  source 1..80: mol_type = other DNA
aagacttcaatactgctcctttccagtttctttcggactacagaccagtaccggcaccacggagacgccccatcccatca

SEQ ID NO: 2703 - DNA, 80 bp, synthetic construct
  misc_feature 1..80: note = Synthetic: >NC_005082.1-cand-1400-1479
  source 1..80: mol_type = other DNA
ttgctctattcaagttgtacttttttatcagtattgtaaagtcagtgagctcaccgacatcaatctgactttcatcttct

SEQ ID NO: 2704 - DNA, 80 bp, synthetic construct
  misc_feature 1..80: note = Synthetic: >NC_005082.1-cand-1480-1559
  source 1..80: mol_type = other DNA
agattcaaaacctcattaaaccagaagaaagactttagcacagatgttgtaataactaaaggattaatcatagatgaaaa

SEQ ID NO: 2705 - DNA, 80 bp, synthetic construct
  misc_feature 1..80: note = Synthetic: >NC_005082.1-cand-1560-1639
  source 1..80: mol_type = other DNA
gaccaactgtattttaaaattactgcaaatctgttgagggcttaaccctaattcctgatttacatattcaacttgtctta

SEQ ID NO: 2706 - DNA, 80 bp, synthetic construct
  misc_feature 1..80: note = Synthetic: >NC_005082.1-cand-1640-1719
  source 1..80: mol_type = other DNA
tatgtgcgacagcacactcactttgtttaacaatatatattgaattatcctttgccttcaacagatgagacacaattccc

SEQ ID NO: 2707 - DNA, 80 bp, synthetic construct
  misc_feature 1..80: note = Synthetic: >NC_005082.1-cand-1720-1799
  source 1..80: mol_type = other DNA
aaattttcattcatcatgtcaagagcaacacacacatctaagtacctcagtcttgtgaaatcagtagtgcgactaacctg

SEQ ID NO: 2708 - DNA, 80 bp, synthetic construct
  misc_feature 1..80: note = Synthetic: >NC_005082.1-cand-1800-1879
  source 1..80: mol_type = other DNA
taggtcattcatgaacggtactaagtgctcttcaaaaactttagggtaactcctccttactgattgcaatacatgaccta

SEQ ID NO: 2709 - DNA, 80 bp, synthetic construct
  misc_feature 1..80: note = Synthetic: >NC_005082.1-cand-1860-1939
  source 1..80: mol_type = other DNA
tgattgcaatacatgacctaatcctaattgatcttcaattaaacgggttcctctaggtttaacagcccaaaagagattgg

SEQ ID NO: 2710 - DNA, 80 bp, synthetic construct
  misc_feature 1..80: note = Synthetic: >NC_005082.1-cand-1960-2039
  source 1..80: mol_type = other DNA
acttttggaggttgtactgaagagaacacccattctcctaactcacaggcatttgttaacaccagagaaaaataatccca

SEQ ID NO: 2711 - DNA, 80 bp, synthetic construct
  misc_feature 1..80: note = Synthetic: >NC_005082.1-cand-2050-2129
  source 1..80: mol_type = other DNA
ctcgaaaattctggtattaaggtcaatgcatcagaacaaaaaatgatcccagggttttgtgcacatatctcacagggaca

SEQ ID NO: 2712 - DNA, 80 bp, synthetic construct
  misc_feature 1..80: note = Synthetic: >NC_005082.1-cand-2130-2209
  source 1..80: mol_type = other DNA
taccctctgcttatttaaaacctcacgaatgtacatgaaacctccactgccatctctaacacacttgctacccatactct

SEQ ID NO: 2713 - DNA, 80 bp, synthetic construct
  misc_feature 1..80: note = Synthetic: >NC_005082.1-cand-2210-2289
  source 1..80: mol_type = other DNA
tacaaaaaccgatgaaacctgaagcaacagatgattggaacgctgacttgttgattgattctgccagaattttcttgact

SEQ ID NO: 2714 - DNA, 80 bp, synthetic construct
  misc_feature 1..80: note = Synthetic: >NC_005082.1-cand-2290-2369
  source 1..80: mol_type = other DNA
ccttttgtaaaattttttgagagttttgactgtaacgtcttgataagagttggaatttgctctctttcaagcacccttct

SEQ ID NO: 2715 - DNA, 80 bp, synthetic construct
  misc_feature 1..80: note = Synthetic: >NC_005082.1-cand-2370-2449
  source 1..80: mol_type = other DNA
tgttgacataagttttgtcctcaacacaagccttaagtcaccatttgcagataaatttagccagcggtacttaaggacat

SEQ ID NO: 2716 - DNA, 80 bp, synthetic construct
  misc_feature 1..80: note = Synthetic: >NC_005082.1-cand-2450-2529
  source 1..80: mol_type = other DNA
ccttaatttcatctgattcacagcctgcataagacaaaaagcctttcaaagcatcatccccatctttccctattagctga

SEQ ID NO: 2717 - DNA, 80 bp, synthetic construct
  misc_feature 1..80: note = Synthetic: >NC_005082.1-cand-2530-2609
  source 1..80: mol_type = other DNA
actaagtattcctcaaaaacttgccctttctttatttttaacaaaaccttttttgcgcacttcctcacaaattccaattg

SEQ ID NO: 2718 - DNA, 80 bp, synthetic construct
  misc_feature 1..80: note = Synthetic: >NC_005082.1-cand-2610-2689
  source 1..80: mol_type = other DNA
ttcactcccttgtaggtagtgttcaatattcctttgtaatctgtaacctcttgagccatcagtccagtccttaacatctt

SEQ ID NO: 2719 - DNA, 80 bp, synthetic construct
  misc_feature 1..80: note = Synthetic: >NC_005222.1-cand-2850-2929
  source 1..80: mol_type = other DNA
gagaaggccttgagatgggcatcaggtgaaagctttatcgaacttagtaaccacaaatttattaggatgaagcgtaaact

SEQ ID NO: 2720 - DNA, 80 bp, synthetic construct
  misc_feature 1..80: note = Synthetic: >NC_005222.1-cand-2900-2979
  source 1..80: mol_type = other DNA
ccacaaatttattaggatgaagcgtaaactcatgtatgttagtgcagatgctacaaagtggtcaccaggagataattcag

SEQ ID NO: 2721 - DNA, 80 bp, synthetic construct
  misc_feature 1..80: note = Synthetic: >NC_005222.1-cand-2980-3059
  source 1..80: mol_type = other DNA
caaagttccgtaggttcacctccatgctacataacggacttcccaataataagctaaaaaactgtgtaattgatgcactt

SEQ ID NO: 2722 - DNA, 80 bp, synthetic construct
  misc_feature 1..80: note = Synthetic: >NC_005222.1-cand-3060-3139
  source 1..80: mol_type = other DNA
aaacaagtttataagacagatttttttatgtcaaggaaactaaggaattatattgacagcatggaaagccttgacccaca

SEQ ID NO: 2723 - DNA, 80 bp, synthetic construct
  misc_feature 1..80: note = Synthetic: >NC_005222.1-cand-3100-3179
  source 1..80: mol_type = other DNA
taaggaattatattgacagcatggaaagccttgacccacacatcaaacagtttttagattttttccctgatgggcaccat

SEQ ID NO: 2724 - DNA, 80 bp, synthetic construct
  misc_feature 1..80: note = Synthetic: >NC_005222.1-cand-3220-3299
  source 1..80: mol_type = other DNA
agtgttcttcacttttcggtgttgcaatgtcattactatttaaacaggtatggactaacttattccctgagcttgattgt

SEQ ID NO: 2725 - DNA, 80 bp, synthetic construct
  misc_feature 1..80: note = Synthetic: >NC_005222.1-cand-3300-3379
  source 1..80: mol_type = other DNA
ttctttgagtttgcacatcactctgatgatgcattattcatttatggatacttggaaccagtagatgatgggactgactg

SEQ ID NO: 2726 - DNA, 80 bp, synthetic construct
  misc_feature 1..80: note = Synthetic: >NC_005222.1-cand-3380-3459
  source 1..80: mol_type = other DNA
gtttttgtttgtctcacaacagattcaagcaggccatttgcactggtttagtgtaaatacagagatgtggaagagtatgt

SEQ ID NO: 2727 - DNA, 80 bp, synthetic construct
  misc_feature 1..80: note = Synthetic: >NC_005222.1-cand-3460-3539
  source 1..80: mol_type = other DNA
ttaatctacatgagcatatacttcttctaggctccatcaagatctcaccaaagaaaactacagtgtccccgacaaatgct

SEQ ID NO: 2728 - DNA, 80 bp, synthetic construct
  misc_feature 1..80: note = Synthetic: >NC_005222.1-cand-3520-3599
  source 1..80: mol_type = other DNA
cagtgtccccgacaaatgctgaatttttatcaacattttttgaaggttgtgctgtatcaataccatttgttaaaatactc

SEQ ID NO: 2729 - DNA, 80 bp, synthetic construct
  misc_feature 1..80: note = Synthetic: >NC_005222.1-cand-3600-3679
  source 1..80: mol_type = other DNA
ttaggttctctatcagacttaccaggattaggttattttgacgatttagcagccgcacaaagtaggtgtgttaaggctct

SEQ ID NO: 2730 - DNA, 80 bp, synthetic construct
  misc_feature 1..80: note = Synthetic: >NC_005222.1-cand-3680-3759
  source 1..80: mol_type = other DNA
ggaccttggagcatcacctcaggttgcacaactagctgtagcattgtgcaccagtaaagttgaaagattatatggtacag

SEQ ID NO: 2731 - DNA, 80 bp, synthetic construct
  misc_feature 1..80: note = Synthetic: >NC_005222.1-cand-3760-3839
  source 1..80: mol_type = other DNA
cgccaggcatggtaaaccaccctgcagcatacttgcaggttaagcatactgatacaccaattccattgggaggaaatggt

SEQ ID NO: 2732 - DNA, 80 bp, synthetic construct
  misc_feature 1..80: note = Synthetic: >NC_005222.1-cand-3840-3919
  source 1..80: mol_type = other DNA
gcaatgtcaataatggagttagcaacagctgggattgggatgtcagataaaaatctattaaagcgcgcacttctgggata

SEQ ID NO: 2733 - DNA, 80 bp, synthetic construct
  misc_feature 1..80: note = Synthetic: >NC_005222.1-cand-3920-3999
  source 1..80: mol_type = other DNA
ctcacacaagagacaaaaatcaatgctatatatattaggtctattcaagtttctgatgaagttatctgatgaaacatttc

SEQ ID NO: 2734 - DNA, 80 bp, synthetic construct
  misc_feature 1..80: note = Synthetic: >NC_005222.1-cand-4000-4079
  source 1..80: mol_type = other DNA
aacatgagaggttagggcaattttcttttatcgggaaagtacagtggaagatcttcactccaaaatctgaattcgagttt

SEQ ID NO: 2735 - DNA, 80 bp, synthetic construct
  misc_feature 1..80: note = Synthetic: >NC_005223.1-cand-2760-2839
  source 1..80: mol_type = other DNA
acaacacctgtatgtcagtttgatgggaatacaatttcaggttataaacggatggttgcaacaaaagattcatttcaatc

SEQ ID NO: 2736 - DNA, 80 bp, synthetic construct
  misc_feature 1..80: note = Synthetic: >NC_005223.1-cand-2840-2919
  source 1..80: mol_type = other DNA
atttaatgtaacagaaccacacatctctacaagtgcattggagtggattgacctagatagttcacttcgggatcacatca

SEQ ID NO: 2737 - DNA, 80 bp, synthetic construct
  misc_feature 1..80: note = Synthetic: >NC_005223.1-cand-2920-2999
  source 1..80: mol_type = other DNA
atgtgattgtaagccgtgatttgtcctttcaggatttaagtgaaacaccttgtcaagtggatttgacaacatcagctaca

SEQ ID NO: 2738 - DNA, 80 bp, synthetic construct
  misc_feature 1..80: note = Synthetic: >NC_005223.1-cand-3020-3099
  source 1..80: mol_type = other DNA
agttggttttaacctggtatgtactgttagtttaacagaatgctctgcatttttaacttcaattaaggcatgtcatgctg

SEQ ID NO: 2739 - DNA, 80 bp, synthetic construct
  misc_feature 1..80: note = Synthetic: >NC_005223.1-cand-3090-3169
  source 1..80: mol_type = other DNA
tgtcatgctgctatgtgttatggttctactacaacgaatttagttcgagggcagaatacaattcatgttgttggtaaagg

SEQ ID NO: 2740 - DNA, 80 bp, synthetic construct
  misc_feature 1..80: note = Synthetic: >NC_005223.1-cand-3170-3249
  source 1..80: mol_type = other DNA
tggacattctggttcaaagtttatgtgttgtcatgacacaaagtgctctagtacagggttagttgcagctgcaccacact

SEQ ID NO: 2741 - DNA, 80 bp, synthetic construct
  misc_feature 1..80: note = Synthetic: >NC_005223.1-cand-3260-3339
  source 1..80: mol_type = other DNA
gacagggtttaatcaagctgatagtgataagatctttgatgatggcgctccagagtgtggtatgtcttgctggtttaaaa

SEQ ID NO: 2742 - DNA, 80 bp, synthetic construct
  misc_feature 1..80: note = Synthetic: >NC_005223.1-cand-3340-3419
  source 1..80: mol_type = other DNA
aattaggagaatgggttcttggagtccttaatgggaattggatggttgtggctgtgttgatagcattacttatactatcc

SEQ ID NO: 2743 - DNA, 80 bp, synthetic construct
  misc_feature 1..80: note = Synthetic: >NC_005223.1-cand-3420-3499
  source 1..80: mol_type = other DNA
atcttcttatttgcattatgttgtccacgcaggcccagttataagaaagatcataaaccttaaataatagttactaatct

SEQ ID NO: 2744 - DNA, 80 bp, synthetic construct
  misc_feature 1..80: note = Synthetic: >NC_005223.1-cand-3510-3589
  source 1..80: mol_type = other DNA
ttcgatttactagtgcagtcaccatatgactacctatatgccattatttcatatcatgtatattatcttatatctaatca

SEQ ID NO: 2745 - DNA, 80 bp, synthetic construct
  misc_feature 1..80: note = Synthetic: >NC_005223.1-cand-3590-3669
  source 1..80: mol_type = other DNA
ttatatataaaaaaaactagcactttactaattacattacctcatactgattatgcctggacttttgttcttgcggagtc

SEQ ID NO: 2746 - DNA, 80 bp, synthetic construct
  misc_feature 1..80: note = Synthetic: >NC_005224.1-cand-0-79
  source 1..80: mol_type = other DNA
agtagactccttgaaaagctactacgagaaagtctggaatgagtgacttgacagatatccaagaggatataacccgccat

SEQ ID NO: 2747 - DNA, 80 bp, synthetic construct
  misc_feature 1..80: note = Synthetic: >NC_005224.1-cand-90-169
  source 1..80: mol_type = other DNA
ttattgttgccagacaaaaacttaaggatgcagagagagcagtggaagtggacccagatgacgttaataaaaacacactg

SEQ ID NO: 2748 - DNA, 80 bp, synthetic construct
  misc_feature 1..80: note = Synthetic: >NC_005224.1-cand-180-259
  source 1..80: mol_type = other DNA
aacaaacagtgtcagcactggaggacaaactcgcagactacaagagaaggatggcagatgctgtgtccaggaaaaaaatg

SEQ ID NO: 2749 - DNA, 80 bp, synthetic construct
  misc_feature 1..80: note = Synthetic: >NC_005224.1-cand-260-339
  source 1..80: mol_type = other DNA
gatactaaacctactgacccgactgggattgaacctgatgaccacctcaaggagagatcaagccttaggtatggaaatgt

SEQ ID NO: 2750 - DNA, 80 bp, synthetic construct
  misc_feature 1..80: note = Synthetic: >NC_005224.1-cand-350-429
  source 1..80: mol_type = other DNA
aatgcaattgacattgaagaaccaagtggccaaacagcagattggtatacaattggagtgtatgtgatagggttcacact

SEQ ID NO: 2751 - DNA, 80 bp, synthetic construct
  misc_feature 1..80: note = Synthetic: >NC_005225.1-cand-2460-2539
  source 1..80: mol_type = other DNA
gcaacattatgaacaaacactgggataaaccttattttagccaaaccagaaatataagtcttaaaggtatgtcaggtgca

SEQ ID NO: 2752 - DNA, 80 bp, synthetic construct
  misc_feature 1..80: note = Synthetic: >NC_005225.1-cand-2540-2619
  source 1..80: mol_type = other DNA
ttacaggaagatggtcatttagcagcaagtgtgacattaattgaagcaattcggttcttaaaccattcacaaaataatcc

SEQ ID NO: 2753 - DNA, 80 bp, synthetic construct
  misc_feature 1..80: note = Synthetic: >NC_005225.1-cand-2620-2699
  source 1..80: mol_type = other DNA
tacagtacttgaactttatgagcagacaaaaaaacaaagggcacaagcaagaattgttaggaaatatcaaagaactgagg

SEQ ID NO: 2754 - DNA, 80 bp, synthetic construct
  misc_feature 1..80: note = Synthetic: >NC_005225.1-cand-2700-2779
  source 1..80: mol_type = other DNA
ctgatagaggtttttttattaccacactacctactagagtaagattagaaattatagaagattattatgatgctattgcc

SEQ ID NO: 2755 - DNA, 80 bp, synthetic construct
  misc_feature 1..80: note = Synthetic: >NC_005225.1-cand-2820-2899
  source 1..80: mol_type = other DNA
ggaaaatacttaatattcagcaagcccttgaaaaggcacttcgatgggcctcaggtgaaagtgaaatacagtcttcacta

SEQ ID NO: 2756 - DNA, 80 bp, synthetic construct
  misc_feature 1..80: note = Synthetic: >NC_005225.1-cand-2860-2939
  source 1..80: mol_type = other DNA
tcgatgggcctcaggtgaaagtgaaatacagtcttcactaggtcattccataaaattgaaaagaaaattaatgtatgtta

SEQ ID NO: 2757 - DNA, 80 bp, synthetic construct
  misc_feature 1..80: note = Synthetic: >NC_005225.1-cand-2940-3019
  source 1..80: mol_type = other DNA
gtgcagatgcaactaagtggtcacctggtgataactctgctaaatttagacgatttactcaatctttatatgatggacta

SEQ ID NO: 2758 - DNA, 80 bp, synthetic construct
  misc_feature 1..80: note = Synthetic: >NC_005225.1-cand-3020-3099
  source 1..80: mol_type = other DNA
cgtgatgataaattaaaaaattgtgtagttgatgccttaagaaacatatatgagactgacttttttatatctagaaaatt

SEQ ID NO: 2759 - DNA, 80 bp, synthetic construct
  misc_feature 1..80: note = Synthetic: >NC_005225.1-cand-3100-3179
  source 1..80: mol_type = other DNA
acacagatatattgataatatgggtgaattatctgatgaagtgttagatttcttgtcattttttccgaataaagtatctg

SEQ ID NO: 2760 - DNA, 80 bp, synthetic construct
  misc_feature 1..80: note = Synthetic: >NC_005225.1-cand-3150-3229
  source 1..80: mol_type = other DNA
tcttgtcattttttccgaataaagtatctgcatctattaaaggcaattggttgcaaggcaatctaaacaagtgttcttca

SEQ ID NO: 2761 - DNA, 80 bp, synthetic construct
  misc_feature 1..80: note = Synthetic: >NC_005225.1-cand-3260-3339
  source 1..80: mol_type = other DNA
aaacgtgtgtgggctaaattgtacccagagttagaatgtttttttgaatttgcccatcattctgatgatgctttatttat

SEQ ID NO: 2762 - DNA, 80 bp, synthetic construct
  misc_feature 1..80: note = Synthetic: >NC_005225.1-cand-3340-3419
  source 1..80: mol_type = other DNA
ttatggttatctggagcctatagatgatggtactgagtggtttcaatatgtgacccaacaaattcaagcaggcaactttc

SEQ ID NO: 2763 - DNA, 80 bp, synthetic construct
  misc_feature 1..80: note = Synthetic: >NC_005225.1-cand-3420-3499
  source 1..80: mol_type = other DNA
attggcatgctgtgaatcaggagatgtggaaaagtatgtttaacctccatgaacacattttattgatgggttcaataaag

SEQ ID NO: 2764 - DNA, 80 bp, synthetic construct
  misc_feature 1..80: note = Synthetic: >NC_005225.1-cand-3510-3589
  source 1..80: mol_type = other DNA
aaaagacaacagtatcacctacaaatgctgaattcttgtctacattttttgaaggctgtgcagtctctattccctttata

SEQ ID NO: 2765 - DNA, 80 bp, synthetic construct
  misc_feature 1..80: note = Synthetic: >NC_005225.1-cand-3590-3669
  source 1..80: mol_type = other DNA
aaaatccttttaggttctctatcagatttacctggtttaggttactttgatgatcttgcagctgctcaaagcagatgtgt

SEQ ID NO: 2766 - DNA, 80 bp, synthetic construct
  misc_feature 1..80: note = Synthetic: >NC_005225.1-cand-3670-3749
  source 1..80: mol_type = other DNA
caaagcactagatatgggtgcatgtccacagcttgcacagttaggaatagtgctatgtacaagtaaagttgaaaggttat

SEQ ID NO: 2767 - DNA, 80 bp, synthetic construct
  misc_feature 1..80: note = Synthetic: >NC_005831.2-cand-11250-11329
  source 1..80: mol_type = other DNA
atatctgttcagaagaaaattaatagaatggctgaacaagctgctactcagatgtataaagaagcacgctctgttaatag

SEQ ID NO: 2768 - DNA, 80 bp, synthetic construct
  misc_feature 1..80: note = Synthetic: >NC_005831.2-cand-11330-11409
  source 1..80: mol_type = other DNA
aaaatctaaagttattagtgctatgcactctttactttttggaatgttaagacgtttggatatgtctagtgttgaaactg

SEQ ID NO: 2769 - DNA, 80 bp, synthetic construct
  misc_feature 1..80: note = Synthetic: >NC_005831.2-cand-11410-11489
  source 1..80: mol_type = other DNA
ttttgaatttagcacgtgatggtgttgtgccattgtcagttatacctgcaacttcagcttctaaactaactattgttagt

SEQ ID NO: 2770 - DNA, 80 bp, synthetic construct
  misc_feature 1..80: note = Synthetic: >NC_005831.2-cand-11490-11569
  source 1..80: mol_type = other DNA
ccagatcttgaatcttattctaagattgtttgtgatggttctgttcattatgctggagttgtttggacacttaatgatgt

SEQ ID NO: 2771 - DNA, 80 bp, synthetic construct
  misc_feature 1..80: note = Synthetic: >NC_005831.2-cand-11570-11649
  source 1..80: mol_type = other DNA
taaagacaatgatggtagacctgttcatgttaaagagattacaaaggaaaatgttgaaactttgacatggcctcttatcc

SEQ ID NO: 2772 - DNA, 80 bp, synthetic construct
  misc_feature 1..80: note = Synthetic: >NC_005831.2-cand-11650-11729
  source 1..80: mol_type = other DNA
ttaattgtgaacgtgttgttaaacttcaaaataatgaaattatgcctggtaaacttaagcaaaaacctatgaaagctgag

SEQ ID NO: 2773 - DNA, 80 bp, synthetic construct
  misc_feature 1..80: note = Synthetic: >NC_005831.2-cand-11730-11809
  source 1..80: mol_type = other DNA
ggtgatggtggtgttttaggtgatggtaatgccttgtataatactgagggtggtaaaacttttatgtacgcttatatttc

SEQ ID NO: 2774 - DNA, 80 bp, synthetic construct
  misc_feature 1..80: note = Synthetic: >NC_005831.2-cand-11810-11889
  source 1..80: mol_type = other DNA
taataaagctgaccttaaatttgttaagtgggagtatgagggtggttgcaacacaatcgagttagactctccttgtcgat

SEQ ID NO: 2775 - DNA, 80 bp, synthetic construct
  misc_feature 1..80: note = Synthetic: >NC_005831.2-cand-11890-11969
  source 1..80: mol_type = other DNA
ttatggtcgaaacacctaatggtcctcaagtgaagtatttgtattttgttaaaaatttaaataccttacgtagaggtgcc

SEQ ID NO: 2776 - DNA, 80 bp, synthetic construct
  misc_feature 1..80: note = Synthetic: >NC_005831.2-cand-11970-12049
  source 1..80: mol_type = other DNA
gttcttggttttataggtgccacaattcgtctacaagctggtaaacaaactgaattggctgttaattctggacttttaac

SEQ ID NO: 2777 - DNA, 80 bp, synthetic construct
  misc_feature 1..80: note = Synthetic: >NC_005831.2-cand-12050-12129
  source 1..80: mol_type = other DNA
tgcttgtgctttttctgttgatccagcaactacttacttggaagctgttaaacatggtgcaaaacctgtaagtaattgta

SEQ ID NO: 2778 - DNA, 80 bp, synthetic construct
  misc_feature 1..80: note = Synthetic: >NC_005831.2-cand-12140-12219
  source 1..80: mol_type = other DNA
atctaatggtgctggtaatggtcaagctataacaactagtgtagatgctaacaccaatcaagattcttatggtggagcgt

SEQ ID NO: 2779 - DNA, 80 bp, synthetic construct
  misc_feature 1..80: note = Synthetic: >NC_005831.2-cand-12220-12299
  source 1..80: mol_type = other DNA
ctatttgtttgtattgtcgggcccacgttcctcaccctagtatggatggttactgtaagtttaagggtaaatgtgttcag

SEQ ID NO: 2780 - DNA, 80 bp, synthetic construct
  misc_feature 1..80: note = Synthetic: >NC_005831.2-cand-12300-12379
  source 1..80: mol_type = other DNA
gttcctattggttgtttggatcctattaggttttgtttagaaaataatgtgtgtaatgtttgtggttgttggttgggaca

SEQ ID NO: 2781 - DNA, 80 bp, synthetic construct
  misc_feature 1..80: note = Synthetic: >NC_005831.2-cand-12360-12439
  source 1..80: mol_type = other DNA
tgtggttgttggttgggacacgggtgtgcttgtgaccgtacaactattcaaagtgttgacatttcttatttaaacgagca

SEQ ID NO: 2782 - DNA, 80 bp, synthetic construct
  misc_feature 1..80: note = Synthetic: >NC_005831.2-cand-12460-12539
  source 1..80: mol_type = other DNA
actagaaccctgcaatggcacggacatcgataagtgtgttcgtgcttttgacatttataataaaaatgtttcattcttgg

SEQ ID NO: 2783 - DNA, 80 bp, synthetic construct
  misc_feature 1..80: note = Synthetic: >NC_006213.1-cand-18320-18399
  source 1..80: mol_type = other DNA
tcctcctggtgaacaatttaagcacctcatccctttgatgacgagaggtcatcgctgggatgttgttagacctagaatag

SEQ ID NO: 2784 - DNA, 80 bp, synthetic construct
  misc_feature 1..80: note = Synthetic: >NC_006213.1-cand-18400-18479
  source 1..80: mol_type = other DNA
tacaaatgtttgcagatcatttaattgatctgtctgattgtgttgtgctagttacatgggcagccaactttgagctcact

SEQ ID NO: 2785 - DNA, 80 bp, synthetic construct
  misc_feature 1..80: note = Synthetic: >NC_006213.1-cand-18480-18559
  source 1..80: mol_type = other DNA
tgtctccgctactttgcaaaagtagggcgtgagatttcttgtaatgtatgcactaaacgtgccacagtttacaattctag

SEQ ID NO: 2786 - DNA, 80 bp, synthetic construct
  misc_feature 1..80: note = Synthetic: >NC_006213.1-cand-18560-18639
  source 1..80: mol_type = other DNA
aactggttactatggttgttggcgccatagtgttacatgtgattacttgtataatccacttattgttgatattcaacagt

SEQ ID NO: 2787 - DNA, 80 bp, synthetic construct
  misc_feature 1..80: note = Synthetic: >NC_006213.1-cand-18650-18729
  source 1..80: mol_type = other DNA
tggttctttatcaagtaatcatgatttatattgtagtgtccataaaggagcacatgttgcttcctctgatgctataatga

SEQ ID NO: 2788 - DNA, 80 bp, synthetic construct
  misc_feature 1..80: note = Synthetic: >NC_006213.1-cand-18720-18799
  source 1..80: mol_type = other DNA
gctataatgacacggtgtttggccgtttatgattgcttttgcaataatattaattggaatgtggagtatcccatcatttc

SEQ ID NO: 2789 - DNA, 80 bp, synthetic construct
  misc_feature 1..80: note = Synthetic: >NC_006213.1-cand-18800-18879
  source 1..80: mol_type = other DNA
aaatgagttaagtattaatacctcttgtagggtcttgcagcgtgtgattcttaaagctgccatgctctgcaacagatata

SEQ ID NO: 2790 - DNA, 80 bp, synthetic construct
  misc_feature 1..80: note = Synthetic: >NC_006213.1-cand-18880-18959
  source 1..80: mol_type = other DNA
ctttgtgttatgatattggcaacccaaaagcgattgcctgtgtcaaagattttgattttaagttctatgatgcccaacca

SEQ ID NO: 2791 - DNA, 80 bp, synthetic construct
  misc_feature 1..80: note = Synthetic: >NC_006213.1-cand-18950-19029
  source 1..80: mol_type = other DNA
tgcccaaccaattgttaagtctgttaagactcttttgtattcttttgaggcacataaggactcttttaaagacggtttgt

SEQ ID NO: 2792 - DNA, 80 bp, synthetic construct
  misc_feature 1..80: note = Synthetic: >NC_006213.1-cand-19030-19109
  source 1..80: mol_type = other DNA
gtatgttttggaactgtaatgtggataagtatccaccgaatgcagttgtatgtagatttgacactagagtgttgaataat

SEQ ID NO: 2793 - DNA, 80 bp, synthetic construct
  misc_feature 1..80: note = Synthetic: >NC_006213.1-cand-19110-19189
  source 1..80: mol_type = other DNA
ttaaatcttcctggctgtaatggaggtagtttgtatgttaataaacatgcattccacactaaaccctttgctagggcagc

SEQ ID NO: 2794 - DNA, 80 bp, synthetic construct
  misc_feature 1..80: note = Synthetic: >NC_006213.1-cand-19190-19269
  source 1..80: mol_type = other DNA
ctttgagcatttgaagcctatgccattcttctattattcagatacgccttgtgtgtatatggatggcatggatgctaagc

SEQ ID NO: 2795 - DNA, 80 bp, synthetic construct
  misc_feature 1..80: note = Synthetic: >NC_006213.1-cand-19270-19349
  source 1..80: mol_type = other DNA
aggttgattatgtacctttgaaatctgccacgtgcatcacaagatgcaatttaggtggtgcagtttgtttaaaacatgct

SEQ ID NO: 2796 - DNA, 80 bp, synthetic construct
  misc_feature 1..80: note = Synthetic: >NC_006213.1-cand-19350-19429
  source 1..80: mol_type = other DNA
gaagagtatcgtgagtacttagagtcttacaatacagctactacagcaggttttactttttgggtctataagacatttga

SEQ ID NO: 2797 - DNA, 80 bp, synthetic construct
  misc_feature 1..80: note = Synthetic: >NC_006213.1-cand-19430-19509
  source 1..80: mol_type = other DNA
tttttataatttgtggaatacgttcaccaagctacaaagcttggagaatgttgtatataatttagtcaagactggtcatt

SEQ ID NO: 2798 - DNA, 80 bp, synthetic construct
  misc_feature 1..80: note = Synthetic: >NC_006213.1-cand-19510-19589
  source 1..80: mol_type = other DNA
atacaggacaggctggtgaaatgccttgtgccattataaatgataaagttgtggctaagatcgataaggaggatgttgtc

SEQ ID NO: 2799 - DNA, 80 bp, synthetic construct
  misc_feature 1..80: note = Synthetic: >NC_007381.1-cand-270-349
  source 1..80: mol_type = other DNA
ctggaggacccatatacaagagagtagatggaaagtggatgagggaactcgtcctttatgacaaagaagaaataaggcga

SEQ ID NO: 2800 - DNA, 80 bp, synthetic construct
  misc_feature 1..80: note = Synthetic: >NC_007381.1-cand-360-439
  source 1..80: mol_type = other DNA
aagccaataatggtgatgatgcaacagctgggctgactcacatgatgatctggcattccaatttgaatgatacaacatac

SEQ ID NO: 2801 - DNA, 80 bp, synthetic construct
  misc_feature 1..80: note = Synthetic: >NC_007381.1-cand-450-529
  source 1..80: mol_type = other DNA
gagctcttgttcgcaccggaatggatcccaggatgtgctctttgatgcagggttcgactctccctaggaggtctggagct

SEQ ID NO: 2802 - DNA, 80 bp, synthetic construct
  misc_feature 1..80: note = Synthetic: >NC_007381.1-cand-950-1029
  source 1..80: mol_type = other DNA
aacgagaatccagcacacaagagtcagctggtgtggatggcatgcaattctgctgcatttgaagatctaagagtattaag

SEQ ID NO: 2803 - DNA, 80 bp, synthetic construct
  misc_feature 1..80: note = Synthetic: >NC_007381.1-cand-1070-1149
  source 1..80: mol_type = other DNA
tccactagaggagtacaaattgcttcaaatgaaaacatggatactatggaatcaagtactcttgaactaagaagcaggta

SEQ ID NO: 2804 - DNA, 80 bp, synthetic construct
  misc_feature 1..80: note = Synthetic: >NC_007381.1-cand-1200-1279
  source 1..80: mol_type = other DNA
ctgcaggtcaaatcagtgtacaacctgcattttctgtgcaaagaaacctcccatttgacaaaccaaccatcatggcagca

SEQ ID NO: 2805 - DNA, 80 bp, synthetic construct
  misc_feature 1..80: note = Synthetic: >NC_007381.1-cand-1290-1369
  source 1..80: mol_type = other DNA
atacagagggaagaacatcagacatgagggcagaaatcataaggatgatggaaggtgcaaaaccagaagaaatgtccttc

SEQ ID NO: 2806 - DNA, 80 bp, synthetic construct
  misc_feature 1..80: note = Synthetic: >NC_007382.1-cand-0-79
  source 1..80: mol_type = other DNA
atccaaatcaaaagataataacaattggctctgtctctctcaccattgcaacagtatgcttcctcatgcagattgccatc

SEQ ID NO: 2807 - DNA, 80 bp, synthetic construct
  misc_feature 1..80: note = Synthetic: >NC_007382.1-cand-90-169
  source 1..80: mol_type = other DNA
ctgtgacattgcattttaagcaacatgagtgcgactcccccgcgagcaaccaagtaatgccgtgtgaaccaataataata

SEQ ID NO: 2808 - DNA, 80 bp, synthetic construct
  misc_feature 1..80: note = Synthetic: >NC_007382.1-cand-180-259
  source 1..80: mol_type = other DNA
taacagagatagtgtatttgaataacaccaccatagagaaagagatctgccccgaagtagtggaatacagaaattggtca

SEQ ID NO: 2809 - DNA, 80 bp, synthetic construct
  misc_feature 1..80: note = Synthetic: >NC_007382.1-cand-250-329
  source 1..80: mol_type = other DNA
aaattggtcaaagccgcaatgtcaaattacaggatttgcacctttttctaaggacaattcaatccggctttctgctggtg

SEQ ID NO: 2810 - DNA, 80 bp, synthetic construct
  misc_feature 1..80: note = Synthetic: >NC_007382.1-cand-410-489
  source 1..80: mol_type = other DNA
acactagacaacaaacattcaaatgacacaatacatgatagaatccctcatcgaaccctattaatgaatgagttgggtgt

SEQ ID NO: 2811 - DNA, 80 bp, synthetic construct
  misc_feature 1..80: note = Synthetic: >NC_007382.1-cand-440-519
  source 1..80: mol_type = other DNA
atacatgatagaatccctcatcgaaccctattaatgaatgagttgggtgttccatttcatttaggaaccaggcaagtgtg

SEQ ID NO: 2812 - DNA, 80 bp, synthetic construct
  misc_feature 1..80: note = Synthetic: >NC_007382.1-cand-500-579
  source 1..80: mol_type = other DNA
ttaggaaccaggcaagtgtgtgtagcatggtccagctcaagttgtcacgatggaaaagcatggttgcatgtttgtgtcac

SEQ ID NO: 2813 - DNA, 80 bp, synthetic construct
  misc_feature 1..80: note = Synthetic: >NC_007382.1-cand-590-669
  source 1..80: mol_type = other DNA
aaaaatgcaactgctagcttcatttatgacgggaggcttatggacagtattggttcatggtctcaaaatatcctcaggac

SEQ ID NO: 2814 - DNA, 80 bp, synthetic construct
  misc_feature 1..80: note = Synthetic: >NC_007382.1-cand-680-759
  source 1..80: mol_type = other DNA
gaatgcgtttgtatcaatgggacttgcacagtagtaatgactgatggaagtgcttcaggaagagccgatactagaatact

SEQ ID NO: 2815 - DNA, 80 bp, synthetic construct
  misc_feature 1..80: note = Synthetic: >NC_007574.1-cand-1570-1649
  source 1..80: mol_type = other DNA
aaattcggatcatacttttctaccatcagattttacatgctcattaaacacaatcttgacttcatatagagggtatgctg

SEQ ID NO: 2816 - DNA, 80 bp, synthetic construct
  misc_feature 1..80: note = Synthetic: >NC_007574.1-cand-1650-1729
  source 1..80: mol_type = other DNA
gaatatttgggtatgcaataacaaaagatctgaagtccaatggaaacaatcatatatacatcattccaaatgcaagagat

SEQ ID NO: 2817 - DNA, 80 bp, synthetic construct
  misc_feature 1..80: note = Synthetic: >NC_007574.1-cand-1740-1819
  source 1..80: mol_type = other DNA
tcgatacttttgggtcacatttaggattatcaagatactcacattctaaaagattttcagaatcagcaacgactatgtca

SEQ ID NO: 2818 - DNA, 80 bp, synthetic construct
  misc_feature 1..80: note = Synthetic: >NC_007574.1-cand-1820-1899
  source 1..80: mol_type = other DNA
ggatatatatttagagatatggttagtggaaaagagaatatgcaggatacggataaagataattatgcatccggccatgt

SEQ ID NO: 2819 - DNA, 80 bp, synthetic construct
  misc_feature 1..80: note = Synthetic: >NC_007574.1-cand-1890-1969
  source 1..80: mol_type = other DNA
ccggccatgtttttaatgctatagcacattatagatttgattatacatatgatattgtaggatggcttagattgcataag

SEQ ID NO: 2820 - DNA, 80 bp, synthetic construct
  misc_feature 1..80: note = Synthetic: >NC_007574.1-cand-1980-2059
  source 1..80: mol_type = other DNA
ttaaagtcaaatcagatatatacaaagaacatacagatagtgaaatacggaatgcaattgaatcagcctatgtatattat

SEQ ID NO: 2821 - DNA, 80 bp, synthetic construct
  misc_feature 1..80: note = Synthetic: >NC_007574.1-cand-2070-2149
  source 1..80: mol_type = other DNA
gtgataaagttggtgagaaatattcaaagaaaatgatggagatttgggaagttcaagtgtgaggctaatcacctctacca

SEQ ID NO: 2822 - DNA, 80 bp, synthetic construct
  misc_feature 1..80: note = Synthetic: >NC_009238.1-cand-0-79
  source 1..80: mol_type = other DNA
tggcctcctgtaatatagaaaaaaagggcacagtgattgacagttgtgtatacaagcatgtgtggtatgtttagtgtgta

SEQ ID NO: 2823 - DNA, 80 bp, synthetic construct
  misc_feature 1..80: note = Synthetic: >NC_009238.1-cand-60-139
  source 1..80: mol_type = other DNA
tgtggtatgtttagtgtgtaagccaataaagttaaaggtcactactgtgggtggtgacacctgataccggcggaactagt

SEQ ID NO: 2824 - DNA, 80 bp, synthetic construct
  misc_feature 1..80: note = Synthetic: >NC_009238.1-cand-140-219
  source 1..80: mol_type = other DNA
tgctacgtgccacacaatagctttcactcttggcgtgaagccaacttcctgggccgtgagccagcttcctgcggccttgt

SEQ ID NO: 2825 - DNA, 80 bp, synthetic construct
  misc_feature 1..80: note = Synthetic: >NC_009238.1-cand-190-269
  source 1..80: mol_type = other DNA
gggccgtgagccagcttcctgcggccttgtgttttttaccaacacacctggtgaacttctactgtccttgacacaggtaa

SEQ ID NO: 2826 - DNA, 80 bp, synthetic construct
  misc_feature 1..80: note = Synthetic: >NC_009238.1-cand-360-439
  source 1..80: mol_type = other DNA
tgttggcgccatcgtctcgaacctggcctgcatacctttggatatagagggtcaccaatttttattttgtttttagatgg

SEQ ID NO: 2827 - DNA, 80 bp, synthetic construct
  misc_feature 1..80: note = Synthetic: >NC_009238.1-cand-380-459
  source 1..80: mol_type = other DNA
acctggcctgcatacctttggatatagagggtcaccaatttttattttgtttttagatgggaatatttcttgctgtacct

SEQ ID NO: 2828 - DNA, 80 bp, synthetic construct
  misc_feature 1..80: note = Synthetic: >NC_009238.1-cand-460-539
  source 1..80: mol_type = other DNA
gaaattatagcagcatctatagctggaggagcagaggccttgtcaattgctggttctggagctgccatagctactggtga

SEQ ID NO: 2829 - DNA, 80 bp, synthetic construct
  misc_feature 1..80: note = Synthetic: >NC_009238.1-cand-590-669
  source 1..80: mol_type = other DNA
aaacaataccaatatctgaagcagctactactgtgttaactaaagttcctgaacttgttcaagctacccaagctgtaaca

SEQ ID NO: 2830 - DNA, 80 bp, synthetic construct
  misc_feature 1..80: note = Synthetic: >NC_009238.1-cand-640-719
  source 1..80: mol_type = other DNA
gaacttgttcaagctacccaagctgtaacagcagctgtgcaaggaggtgcaggccttgtaggtggcatttatactgcctt

SEQ ID NO: 2831 - DNA, 80 bp, synthetic construct
  misc_feature 1..80: note = Synthetic: >NC_010563.1-cand-5300-5379
  source 1..80: mol_type = other DNA
cactatagtgtcttcagaaaaaacaggcaaaaagaatctctttggatcacaataaaaggatcctagctcacttaattcac

SEQ ID NO: 2832 - DNA, 80 bp, synthetic construct
  misc_feature 1..80: note = Synthetic: >NC_010563.1-cand-5380-5459
  source 1..80: mol_type = other DNA
cgttttcagagatataaagagaataacaccttgatctctcacccgtcttttgataaaataggtagcctgtgactctactt

SEQ ID NO: 2833 - DNA, 80 bp, synthetic construct
  misc_feature 1..80: note = Synthetic: >NC_010563.1-cand-5470-5549
  source 1..80: mol_type = other DNA
acctctgaacataacattccttgagcctgacatttccataatagcgagaatagtccttttcattaattaaaagtctagag

SEQ ID NO: 2834 - DNA, 80 bp, synthetic construct
  misc_feature 1..80: note = Synthetic: >NC_010563.1-cand-5540-5619
  source 1..80: mol_type = other DNA
aagtctagaggaaaaagatgttttcatggaattgatcagagagagtgaaacatgtgacaaagctttgagcatggctttga

SEQ ID NO: 2835 - DNA, 80 bp, synthetic construct
  misc_feature 1..80: note = Synthetic: >NC_010563.1-cand-5620-5699
  source 1..80: mol_type = other DNA
aactttggtcagagatattcaacgagttttgatggagacatcggctttcgttgtccttatggacagtataacgcattatg

SEQ ID NO: 2836 - DNA, 80 bp, synthetic construct
  misc_feature 1..80: note = Synthetic: >NC_010563.1-cand-5700-5779
  source 1..80: mol_type = other DNA
ggtctttcagaaactaaactctttgccaattggaagagcatgtcgaagtcaggttctttaatgtaagtcttgacctcttt

SEQ ID NO: 2837 - DNA, 80 bp, synthetic construct
  misc_feature 1..80: note = Synthetic: >NC_010563.1-cand-5780-5859
  source 1..80: mol_type = other DNA
ccacatttcttcatcataccttttcaaaactttcccacacacggacagccagtccttactattccctaatttatgtctta

SEQ ID NO: 2838 - DNA, 80 bp, synthetic construct
  misc_feature 1..80: note = Synthetic: >NC_010563.1-cand-5860-5939
  source 1..80: mol_type = other DNA
tcagcttcattgctgcaaggatatcaagagctctatcattgaccaggaccaccatttgaccaattataaaaccagcaccc

SEQ ID NO: 2839 - DNA, 80 bp, synthetic construct
  misc_feature 1..80: note = Synthetic: >NC_010563.1-cand-5940-6019
  source 1..80: mol_type = other DNA
ctgagagaatctaccactgagtcatcttgtatcatttcatccacaatgaaattcagcatgattaggtccaaaaacagcaa

SEQ ID NO: 2840 - DNA, 80 bp, synthetic construct
  misc_feature 1..80: note = Synthetic: >NC_010563.1-cand-6020-6099
  source 1..80: mol_type = other DNA
tgtatttctcctagtattgaagatttttgaacctttaatcttattgcaaattgataataaagaagaataggaaatgcaca

SEQ ID NO: 2841 - DNA, 80 bp, synthetic construct
  misc_feature 1..80: note = Synthetic: >NC_010563.1-cand-6100-6179
  source 1..80: mol_type = other DNA
ctggctgcttacctccaacctcatcatccttcatttcttcttttgaatgatctattgacagtttgttggaaagtgtgtaa

SEQ ID NO: 2842 - DNA, 80 bp, synthetic construct
  misc_feature 1..80: note = Synthetic: >NC_010563.1-cand-6180-6259
  source 1..80: mol_type = other DNA
cagagctccagaattttgcatgaacaaaacatgcaatttatagtatcactatcttgatgcagaccaattttcagaagatc

SEQ ID NO: 2843 - DNA, 80 bp, synthetic construct
  misc_feature 1..80: note = Synthetic: >NC_010563.1-cand-6260-6339
  source 1..80: mol_type = other DNA
agataataaattagacttattagttcttttaaatttccctaaacctttattaaaaatttcagtcttataccagagtttga

SEQ ID NO: 2844 - DNA, 80 bp, synthetic construct
  misc_feature 1..80: note = Synthetic: >NC_010563.1-cand-6340-6419
  source 1..80: mol_type = other DNA
ttttgatcagttcctcaattattttcgattctctcacatcatttcttatacccactaataacgatgtgtctagcaattga

SEQ ID NO: 2845 - DNA, 80 bp, synthetic construct
  misc_feature 1..80: note = Synthetic: >NC_010563.1-cand-6420-6499
  source 1..80: mol_type = other DNA
tcatatgatagcagccttctctttagaaactctaggttttcaaaccccatactttgattattggcttttgccaaactgtg

SEQ ID NO: 2846 - DNA, 80 bp, synthetic construct
  misc_feature 1..80: note = Synthetic: >NC_010563.1-cand-6500-6579
  source 1..80: mol_type = other DNA
tatcagcctttggtattcctgatcttcaatttctatttctgaagttgctttcacccctttcaagatttcaatcaatagcc

SEQ ID NO: 2847 - DNA, 80 bp, synthetic construct
  misc_feature 1..80: note = Synthetic: >NC_011506.2-cand-1860-1939
  source 1..80: mol_type = other DNA
aatgaaagaattaatgacgcagttgcaattataactgcggcaaatagattaaatttatatcaaaagaaaatgaaatcaat

SEQ ID NO: 2848 - DNA, 80 bp, synthetic construct
  misc_feature 1..80: note = Synthetic: >NC_011506.2-cand-1940-2019
  source 1..80: mol_type = other DNA
agttgaggactttctgaaaagattacagatatttgatgttgcgagagtaccagatgaccaaatgtatagattgagagata

SEQ ID NO: 2849 - DNA, 80 bp, synthetic construct
  misc_feature 1..80: note = Synthetic: >NC_011506.2-cand-2020-2099
  source 1..80: mol_type = other DNA
gattaagactattaccagttgaaataagaagattagatatttttaatttgatagcaatgaatatggaacagattgaacgt

SEQ ID NO: 2850 - DNA, 80 bp, synthetic construct
  misc_feature 1..80: note = Synthetic: >NC_011506.2-cand-2100-2179
  source 1..80: mol_type = other DNA
gcatcagataaaattgcacaaggagttataatagcataccgagatatgcagttagaacgagatgagatgtatggttacgt

SEQ ID NO: 2851 - DNA, 80 bp, synthetic construct
  misc_feature 1..80: note = Synthetic: >NC_011506.2-cand-2180-2259
  source 1..80: mol_type = other DNA
caatattgccagaaacttggacggatttcaacaaataaatcttgaagaattgatgagatcaggagattatgctcaaatta

SEQ ID NO: 2852 - DNA, 80 bp, synthetic construct
  misc_feature 1..80: note = Synthetic: >NC_011506.2-cand-2260-2339
  source 1..80: mol_type = other DNA
ctaacatgctacttaataatcaaccagtagctttagttggagcgctaccatttataacggattcatcagtgatttcgtta

SEQ ID NO: 2853 - DNA, 80 bp, synthetic construct
  misc_feature 1..80: note = Synthetic: >NC_011506.2-cand-2340-2419
  source 1..80: mol_type = other DNA
atagctaaactagatgcaaccgtttttgcacagattgtcaaacttagaaaggtcgacacgttaaaacccatcctatataa

SEQ ID NO: 2854 - DNA, 80 bp, synthetic construct
  misc_feature 1..80: note = Synthetic: >NC_011506.2-cand-2430-2509
  source 1..80: mol_type = other DNA
gattctaatgacttttatttggtggctaattatgattggattcctacatctactacaaaagtgtataaacaagttccaca

SEQ ID NO: 2855 - DNA, 80 bp, synthetic construct
  misc_feature 1..80: note = Synthetic: >NC_011506.2-cand-2520-2599
  source 1..80: mol_type = other DNA
tttagagcgtcaatgcatatgttaacgtctaacctaacatttaccgtatattcagatttgcttgcgttcgtttcagctga

SEQ ID NO: 2856 - DNA, 80 bp, synthetic construct
  misc_feature 1..80: note = Synthetic: >NC_011506.2-cand-2600-2679
  source 1..80: mol_type = other DNA
tactgttgaaccaattaatgctgttgcttttgataatatgcgcatcatgaacgaactgtaaacgccaaccccattgtgga

SEQ ID NO: 2857 - DNA, 80 bp, synthetic construct
  misc_feature 1..80: note = Synthetic: >NC_011507.2-cand-20-99
  source 1..80: mol_type = other DNA
aagtacaatctaatcttgtcagaatatctatcatttatatataattcacaatctgcagttcaaattccaatatattactc

SEQ ID NO: 2858 - DNA, 80 bp, synthetic construct
  misc_feature 1..80: note = Synthetic: >NC_011507.2-cand-80-159
  source 1..80: mol_type = other DNA
caaattccaatatattactcttccaacagtgaattagaaaatagatgtattgaatttcattccaagtgtttagagaactc

SEQ ID NO: 2859 - DNA, 80 bp, synthetic construct
  misc_feature 1..80: note = Synthetic: >NC_011507.2-cand-160-239
  source 1..80: mol_type = other DNA
aaagaatgggttatcgttaagaaagttgtttgttgaatataatgatgtcatagaaaatgccacattactgtcaatactat

SEQ ID NO: 2860 - DNA, 80 bp, synthetic construct
  misc_feature 1..80: note = Synthetic: >NC_011507.2-cand-240-319
  source 1..80: mol_type = other DNA
catattcttacgacaagtataacgctgttgaaagaaaattggtgaagtatgcgaaaggcaaaccattggaggcagactta

SEQ ID NO: 2861 - DNA, 80 bp, synthetic construct
  misc_feature 1..80: note = Synthetic: >NC_011507.2-cand-320-399
  source 1..80: mol_type = other DNA
acagtgaatgaattggattatgagaacaataaaataacatctgaattatttccaacagcggaggaatatacggactcact

SEQ ID NO: 2862 - DNA, 80 bp, synthetic construct
  misc_feature 1..80: note = Synthetic: >NC_011507.2-cand-390-469
  source 1..80: mol_type = other DNA
cggactcactaatggatccagcaattttaacttcgctatcatcaaatttaaatgcagtcatgttctggttggaaaaacat

SEQ ID NO: 2863 - DNA, 80 bp, synthetic construct
  misc_feature 1..80: note = Synthetic: >NC_012532.1-cand-9350-9429
  source 1..80: mol_type = other DNA
ggccgtgattaaatacacataccaaaacaaagtggtgaaggttctcagaccagctgaaggaggaaaaacagttatggaca

SEQ ID NO: 2864 - DNA, 80 bp, synthetic construct
  misc_feature 1..80: note = Synthetic: >NC_012532.1-cand-9430-9509
  source 1..80: mol_type = other DNA
tcatttcaagacaagaccagagagggagtggacaagttgtcacttatgctctcaacacattcaccaacttggtggtgcag

SEQ ID NO: 2865 - DNA, 80 bp, synthetic construct
  misc_feature 1..80: note = Synthetic: >NC_012532.1-cand-9510-9589
  source 1..80: mol_type = other DNA
cttatccggaacatggaagctgaggaagtgttagagatgcaagacttatggttgttgaggaagccagagaaagtgaccag

SEQ ID NO: 2866 - DNA, 80 bp, synthetic construct
  misc_feature 1..80: note = Synthetic: >NC_012532.1-cand-9590-9669
  source 1..80: mol_type = other DNA
atggttgcagagcaatggatgggatagactcaaacgaatggcggtcagtggagatgactgcgttgtgaagccaatcgatg

SEQ ID NO: 2867 - DNA, 80 bp, synthetic construct
  misc_feature 1..80: note = Synthetic: >NC_012532.1-cand-9750-9829
  source 1..80: mol_type = other DNA
ggatggagcaattgggaagaagtcccgttctgctcccaccacttcaacaagctgtacctcaaggatgggagatccattgt

SEQ ID NO: 2868 - DNA, 80 bp, synthetic construct
  misc_feature 1..80: note = Synthetic: >NC_012532.1-cand-9800-9879
  source 1..80: mol_type = other DNA
gctgtacctcaaggatgggagatccattgtggtcccttgccgccaccaagatgaactgattggccgagctcgcgtctcac

SEQ ID NO: 2869 - DNA, 80 bp, synthetic construct
  misc_feature 1..80: note = Synthetic: >NC_012532.1-cand-9910-9989
  source 1..80: mol_type = other DNA
cctgtcttgcaaaatcatatgcgcagatgtggcagctcctttatttccacagaagagaccttcgactgatggctaatgcc

SEQ ID NO: 2870 - DNA, 80 bp, synthetic construct
  misc_feature 1..80: note = Synthetic: >NC_012532.1-cand-9990-10069
  source 1..80: mol_type = other DNA
atttgctcggctgtgccagttgactgggtaccaactgggagaaccacctggtcaatccatggaaagggagaatggatgac

SEQ ID NO: 2871 - DNA, 80 bp, synthetic construct
  misc_feature 1..80: note = Synthetic: >NC_012532.1-cand-10070-10149
  source 1..80: mol_type = other DNA
cactgaggacatgctcatggtgtggaatagagtgtggattgaggagaacgaccatatggaggacaagactcctgtaacaa

SEQ ID NO: 2872 - DNA, 80 bp, synthetic construct
  misc_feature 1..80: note = Synthetic: >NC_012532.1-cand-10150-10229
  source 1..80: mol_type = other DNA
aatggacagacattccctatctaggaaaaagggaggacttatggtgtggatcccttatagggcacagaccccgcaccact

SEQ ID NO: 2873 - DNA, 80 bp, synthetic construct
  misc_feature 1..80: note = Synthetic: >NC_012532.1-cand-10300-10379
  source 1..80: mol_type = other DNA
actatctatccacccaagtccgctacttgggtgaggaagggtccacacccggagtgttgtaagcaccaattttagtgttg

SEQ ID NO: 2874 - DNA, 80 bp, synthetic construct
  misc_feature 1..80: note = Synthetic: >NC_012532.1-cand-10410-10489
  source 1..80: mol_type = other DNA
aaagctgtgcagcctgtaacccccccaggagaagctgggaaaccaagctcatagtcaggccgagaacgccatggcacgga

SEQ ID NO: 2875 - DNA, 80 bp, synthetic construct
  misc_feature 1..80: note = Synthetic: >NC_012532.1-cand-10520-10599
  source 1..80: mol_type = other DNA
ggacactgagtcaaaaaaccccacgcgcttggaagcgcaggatgggaaaagaaggtggcgaccttccccacccttcaatc

SEQ ID NO: 2876 - DNA, 80 bp, synthetic construct
  misc_feature 1..80: note = Synthetic: >NC_012532.1-cand-10620-10699
  source 1..80: mol_type = other DNA
agctgtgaatctccagcagagggactagtggttagaggagaccccccggaaaacgcaaaacagcatattgacgtgggaaa

SEQ ID NO: 2877 - DNA, 80 bp, synthetic construct
  misc_feature 1..80: note = Synthetic: >NC_012532.1-cand-10690-10769
  source 1..80: mol_type = other DNA
acgtgggaaagaccagagactccatgagtttccaccacgctggccgccaggcacagatcgccgaacttcggcggccggtg

SEQ ID NO: 2878 - DNA, 80 bp, synthetic construct
  misc_feature 1..80: note = Synthetic: >NC_012776.1-cand-10-89
  source 1..80: mol_type = other DNA
agattgttgccgttttccaagctatccctgagattctaaacgaggcaattaacattgtgataattgtgatcataatgttc

SEQ ID NO: 2879 - DNA, 80 bp, synthetic construct
  misc_feature 1..80: note = Synthetic: >NC_012777.1-cand-800-879
  source 1..80: mol_type = other DNA
gtctctttcagctctttcacatcaccatcaattaagacaaggcctaccggaacccagtctggcccaaggcgtgtataagc

SEQ ID NO: 2880 - DNA, 80 bp, synthetic construct
  misc_feature 1..80: note = Synthetic: >NC_012777.1-cand-880-959
  source 1..80: mol_type = other DNA
aagtgggtcatcaacagagaaggactccccaggaatcagttcaaccatgatggtatcctggtttgatggctcttcatgct

SEQ ID NO: 2881 - DNA, 80 bp, synthetic construct
  misc_feature 1..80: note = Synthetic: >NC_012777.1-cand-960-1039
  source 1..80: mol_type = other DNA
gatcaatcatctgtctctggacaaacactgtcatgtcttctttgctaaatgagaggctcctagcaatggccaagatattg

SEQ ID NO: 2882 - DNA, 80 bp, synthetic construct
  misc_feature 1..80: note = Synthetic: >NC_012777.1-cand-1040-1119
  source 1..80: mol_type = other DNA
gtcctcacaaactcgtccctcacagctccagaaaatccacactcaacacccaggacctccaccatcaggaagccctcaga

SEQ ID NO: 2883 - DNA, 80 bp, synthetic construct
  misc_feature 1..80: note = Synthetic: >NC_012777.1-cand-1120-1199
  source 1..80: mol_type = other DNA
cgcatcgctgacactgccgtgaattctgtgaatgatactaaatttgctgtcacaggctccgtttctatttcttttaataa

SEQ ID NO: 2884 - DNA, 80 bp, synthetic construct
  misc_feature 1..80: note = Synthetic: >NC_012777.1-cand-1200-1279
  source 1..80: mol_type = other DNA
aattgtgagtgattgttatgacgactctctcatcaagattaaaacagtctctccctgcatcagcagaagacactctagat

SEQ ID NO: 2885 - DNA, 80 bp, synthetic construct
  misc_feature 1..80: note = Synthetic: >NC_012777.1-cand-1280-1359
  source 1..80: mol_type = other DNA
attctttgatgagccgaagagatgtacgccttaaaatccttaaggtcaatccagctaaatccactacttagatcatccct

SEQ ID NO: 2886 - DNA, 80 bp, synthetic construct
  misc_feature 1..80: note = Synthetic: >NC_012777.1-cand-1360-1439
  source 1..80: mol_type = other DNA
gtacattggcctctcctggcctttgtggattgttttcagaacaaaattctcgaatgggcccaaagaaggtgcaccctcac

SEQ ID NO: 2887 - DNA, 80 bp, synthetic construct
  misc_feature 1..80: note = Synthetic: >NC_012777.1-cand-1440-1519
  source 1..80: mol_type = other DNA
cctttggcatcatggaggcatgtgggaaccatgtgaatgaacctaatgttctgctggacagcaacactggcctaatcaga

SEQ ID NO: 2888 - DNA, 80 bp, synthetic construct
  misc_feature 1..80: note = Synthetic: >NC_012777.1-cand-1520-1599
  source 1..80: mol_type = other DNA
gactcgaagaacaattgctttaagaaattgatacatgtatcagatgtactgatcacttttgaatcaatcatagtcgtgaa

SEQ ID NO: 2889 - DNA, 80 bp, synthetic construct
  misc_feature 1..80: note = Synthetic: >NC_012777.1-cand-1600-1679
  source 1..80: mol_type = other DNA
ttttctattatgactattcgagaggtctaaagtgagaactgtgtactgctcagacctcttccatttaacgacatgactga

SEQ ID NO: 2890 - DNA, 80 bp, synthetic construct
  misc_feature 1..80: note = Synthetic: >NC_012777.1-cand-1680-1759
  source 1..80: mol_type = other DNA
taagactgatagcttcacaagtgatgtcaagtgagacacatagatctagaaatctgatcttaggagcccaagaagacttt

SEQ ID NO: 2891 - DNA, 80 bp, synthetic construct
  misc_feature 1..80: note = Synthetic: >NC_012777.1-cand-1760-1839
  source 1..80: mol_type = other DNA
ctcaatgagttgtcgtccagaaacggaaggaggtgagtttcaaaaagcgatggatataatcgtcttacactctgtaaaat

SEQ ID NO: 2892 - DNA, 80 bp, synthetic construct
  misc_feature 1..80: note = Synthetic: >NC_012777.1-cand-1840-1919
  source 1..80: mol_type = other DNA
atgattgtaacccactttgtcttccaagacagcacttttgacagggaacacagcaacatagtcatggctagatctgccta

SEQ ID NO: 2893 - DNA, 80 bp, synthetic construct
  misc_feature 1..80: note = Synthetic: >NC_012777.1-cand-1920-1999
  source 1..80: mol_type = other DNA
aaaatgggcccctttgtggaggttcagggtcccctagtacccatgtccccaactctagacaattggacaatacaatgcat

SEQ ID NO: 2894 - DNA, 80 bp, synthetic construct
  misc_feature 1..80: note = Synthetic: >NC_012777.1-cand-2000-2079
  source 1..80: mol_type = other DNA
agataatctatcaaaattggtcttatcattggtcttaaccattcgcactctggaggccagtcagactgaattgagccgtc

SEQ ID NO: 2895 - DNA, 80 bp, synthetic construct
  misc_feature 1..80: note = Synthetic: >NC_014361.1-cand-70-149
  source 1..80: mol_type = other DNA
tacttagagtgttgacataaataggtcattgtttgcttaagaccgttatcctgaggaagctcgtgcgccacctatcattt

SEQ ID NO: 2896 - DNA, 80 bp, synthetic construct
  misc_feature 1..80: note = Synthetic: >NC_014361.1-cand-190-269
  source 1..80: mol_type = other DNA
ttgtcatactgccacaaacacaggaaggcagccaagagacaagaggaagccagccaaatcccgtgattgtttttgtatat

SEQ ID NO: 2897 - DNA, 80 bp, synthetic construct
  misc_feature 1..80: note = Synthetic: >NC_014361.1-cand-230-309
  source 1..80: mol_type = other DNA
aagaggaagccagccaaatcccgtgattgtttttgtatattcttaagatagcacttgtctaactgctctcatcctgtccg

SEQ ID NO: 2898 - DNA, 80 bp, synthetic construct
  misc_feature 1..80: note = Synthetic: >NC_014361.1-cand-310-389
  source 1..80: mol_type = other DNA
tccggtctccataacaacacatcctcccgctctgtgttctcacgcggcaaattcaaattctaatggtaagtttttcttat

SEQ ID NO: 2899 - DNA, 80 bp, synthetic construct
  misc_feature 1..80: note = Synthetic: >NC_014361.1-cand-390-469
  source 1..80: mol_type = other DNA
ttttcaggtaaaatgggaggagtaatcagcttattctttgatattattgaaatatcaacagaattaagtgctgctacagg

SEQ ID NO: 2900 - DNA, 80 bp, synthetic construct
  misc_feature 1..80: note = Synthetic: >NC_014361.1-cand-470-549
  source 1..80: mol_type = other DNA
atttgctgtggatgctgtgttagcaggagaagcagcagctgctgttgaagttgaagtaatgggcctaatgacagttgaag

SEQ ID NO: 2901 - DNA, 80 bp, synthetic construct
  misc_feature 1..80: note = Synthetic: >NC_014361.1-cand-590-669
  source 1..80: mol_type = other DNA
tatggaaaattttagcctaatgcatgctttacctgggatgctgtcagaagcagtaggcattggtaccctttttcaaacta

SEQ ID NO: 2902 - DNA, 80 bp, synthetic construct
  misc_feature 1..80: note = Synthetic: >NC_014361.1-cand-630-709
  source 1..80: mol_type = other DNA
ctgtcagaagcagtaggcattggtaccctttttcaaactatttcaggtgcaagtggactggtagcagctgggattcgcta

SEQ ID NO: 2903 - DNA, 80 bp, synthetic construct
  misc_feature 1..80: note = Synthetic: >NC_014361.1-cand-710-789
  source 1..80: mol_type = other DNA
cggatatgccagagaagtgtcaatagtaaacagaaatatctcccaaatggctttgcaagtttggagaccttgggactatt

SEQ ID NO: 2904 - DNA, 80 bp, synthetic construct
  misc_feature 1..80: note = Synthetic: >NC_014361.1-cand-810-889
  source 1..80: mol_type = other DNA
gtacaaacatttgcccactacttaaatgttcttgatcattgggcaagcagcctgatccatactgtgagcagatatgtatg

SEQ ID NO: 2905 - DNA, 80 bp, synthetic construct
  misc_feature 1..80: note = Synthetic: >NC_014361.1-cand-870-949
  source 1..80: mol_type = other DNA
actgtgagcagatatgtatgggatgctattttgcatgaagggagacatcaaattggccatgccagtagagaattgatgat

SEQ ID NO: 2906 - DNA, 80 bp, synthetic construct
  misc_feature 1..80: note = Synthetic: >NC_014361.1-cand-960-1039
  source 1..80: mol_type = other DNA
aatcatttccaagatctcatggctagattgatagaaaatagcagatgggtgctgactacaggccctagcaatatctattc

SEQ ID NO: 2907 - DNA, 80 bp, synthetic construct
  misc_feature 1..80: note = Synthetic: >NC_014361.1-cand-1040-1119
  source 1..80: mol_type = other DNA
acatcttgaatcatattacagagatttgccagggattagtcctccacaagccagagatctgtacagaagacttcaggaaa

SEQ ID NO: 2908 - DNA, 80 bp, synthetic construct
  misc_feature 1..80: note = Synthetic: >NC_014361.1-cand-1120-1199
  source 1..80: mol_type = other DNA
aaatacctgacagatatcaacttgaggctgccacagatgaatctgctgaggtaattgaaacctactcagctccaggagga

SEQ ID NO: 2909 - DNA, 80 bp, synthetic construct
  misc_feature 1..80: note = Synthetic: >NC_014361.1-cand-1200-1279
  source 1..80: mol_type = other DNA
gcacatcaaagagtctgccctgactggatgttgcctctggtactgggattgtatggtgatataacccccacttttggtta

SEQ ID NO: 2910 - DNA, 80 bp, synthetic construct
  misc_feature 1..80: note = Synthetic: >NC_014361.1-cand-1280-1359
  source 1..80: mol_type = other DNA
ctatttgagagaagaggaaagagaagatggcccccaaaagaaaaggagaaggatgcgctagaaagtgccccacaaaaaca

SEQ ID NO: 2911 - DNA, 80 bp, synthetic construct
  misc_feature 1..80: note = Synthetic: >NC_021928.1-cand-2790-2869
  source 1..80: mol_type = other DNA
actcaaaatacaattcagcaaacaaagaatgacactcaacaaatcaaaggttcacttgccacaattgagggcctaatcac

SEQ ID NO: 2912 - DNA, 80 bp, synthetic construct
  misc_feature 1..80: note = Synthetic: >NC_021928.1-cand-2870-2949
  source 1..80: mol_type = other DNA
gacaatgaaaataatggatcctggagtcccatcaaaagtaagtctcaggagtttaaacaaagaatcagaacaagttccta

SEQ ID NO: 2913 - DNA, 80 bp, synthetic construct
  misc_feature 1..80: note = Synthetic: >NC_021928.1-cand-2950-3029
  source 1..80: mol_type = other DNA
taattgttactggtaacggagacgtctcaaaatttgttgatcaagacaatacaattacacttgactcattagcaagaccc

SEQ ID NO: 2914 - DNA, 80 bp, synthetic construct
  misc_feature 1..80: note = Synthetic: >NC_021928.1-cand-3030-3109
  source 1..80: mol_type = other DNA
atattatctggaaccaaacaaaaaaccgatgagagacgagcaggtgttcgtatagatgcacttaaaataacagtctcaga

SEQ ID NO: 2915 - DNA, 80 bp, synthetic construct
  misc_feature 1..80: note = Synthetic: >NC_021928.1-cand-3110-3189
  source 1..80: mol_type = other DNA
aatgattcgggatctatttggagactgtgataagagcaaaaagcttcttgaatcaataaatatggcaactacagagcaag

SEQ ID NO: 2916 - DNA, 80 bp, synthetic construct
  misc_feature 1..80: note = Synthetic: >NC_021928.1-cand-3190-3269
  source 1..80: mol_type = other DNA
acatcaatctgatcaaaaccaatgcccttagaagtatcacctaaattatgagagtcataggtcatagggacaatcgcgat

SEQ ID NO: 2917 - DNA, 80 bp, synthetic construct
  misc_feature 1..80: note = Synthetic: >NC_021928.1-cand-3270-3349
  source 1..80: mol_type = other DNA
tcagatccactcaacacaccaatccttcaatcccacatccaaaagaaacaactggaccacactctcaagaatcaaaacca

SEQ ID NO: 2918 - DNA, 80 bp, synthetic construct
  misc_feature 1..80: note = Synthetic: >NC_021928.1-cand-3350-3429
  source 1..80: mol_type = other DNA
aatcgaatgacaacaacattaatcgtcatcaaacaacacacagagcaccatgaccgcacatacacccaacccccaacagg

SEQ ID NO: 2919 - DNA, 80 bp, synthetic construct
  misc_feature 1..80: note = Synthetic: >NC_021928.1-cand-3410-3489
  source 1..80: mol_type = other DNA
tacacccaacccccaacaggcacaacccaccagctcataggttatttccgtgacaatataaataatttaagaaaaaacag

SEQ ID NO: 2920 - DNA, 80 bp, synthetic construct
  misc_feature 1..80: note = Synthetic: >NC_021928.1-cand-3510-3589
  source 1..80: mol_type = other DNA
ccaaccgatcataaccatggctcctacccaatccaaagtcagaatccacaatctggccgaagctcacgagaagacactaa

SEQ ID NO: 2921 - DNA, 80 bp, synthetic construct
  misc_feature 1..80: note = Synthetic: >NC_021928.1-cand-3590-3669
  source 1..80: mol_type = other DNA
gagctttcccaatagaagttgaacaaaacccagaagggaaaaaattattagtaaaacagattagaataagaacattagga

SEQ ID NO: 2922 - DNA, 80 bp, synthetic construct
  misc_feature 1..80: note = Synthetic: >NC_021928.1-cand-3670-3749
  source 1..80: mol_type = other DNA
catgcagatcattcaaatgattcaatttgctttctgaatacctatgggtttattaaagaagcagtcagccagacagaatt

SEQ ID NO: 2923 - DNA, 80 bp, synthetic construct
  misc_feature 1..80: note = Synthetic: >NC_021928.1-cand-3750-3829
  source 1..80: mol_type = other DNA
catgagagcaggacagaaatcagagagcaaaaacactctaactgcttgtatgttaccctttgggcctggtcctaacattg

SEQ ID NO: 2924 - DNA, 80 bp, synthetic construct
  misc_feature 1..80: note = Synthetic: >NC_021928.1-cand-3830-3909
  source 1..80: mol_type = other DNA
ggtccccccaaaagatgttagaatatgctgaagacattaaaatccatgtgagaaagacagcaggttgcaaagagcagatt

SEQ ID NO: 2925 - DNA, 80 bp, synthetic construct
  misc_feature 1..80: note = Synthetic: >NC_021928.1-cand-3950-4029
  source 1..80: mol_type = other DNA
ttcaattccctcgggatcgatatgcatgtgttccatccgataaatatataaaatcaccagggaagttagtcgcaggaccc

SEQ ID NO: 2926 - DNA, 80 bp, synthetic construct
  misc_feature 1..80: note = Synthetic: >NC_021928.1-cand-4000-4079
  source 1..80: mol_type = other DNA
aaatcaccagggaagttagtcgcaggacccaattattgctacataattacttttctttcactgacattctgtcccagcag

SEQ ID NO: 2927 - DNA, 80 bp, synthetic construct
  misc_feature 1..80: note = Synthetic: >NC_021928.1-cand-10500-10579
  source 1..80: mol_type = other DNA
aagaatcattggacaaatatcacgaatcttttcttattaataaagtatcaaatgagattattaatttgtcaaatgaaaaa

SEQ ID NO: 2928 - DNA, 80 bp, synthetic construct
  misc_feature 1..80: note = Synthetic: >NC_021928.1-cand-10580-10659
  source 1..80: mol_type = other DNA
atctcaaactggccttcttgaagtcaagttggaagacagatcaggcctaattattattactccagaattagtatgcattt

SEQ ID NO: 2929 - DNA, 80 bp, synthetic construct
  misc_feature 1..80: note = Synthetic: >NC_021928.1-cand-10660-10739
  source 1..80: mol_type = other DNA
atttccaacaagcgaatgtgttaagctatttcacatttgaaatgatccttatgatttccgatgtatttgaaggaaggcaa

SEQ ID NO: 2930 - DNA, 80 bp, synthetic construct
  misc_feature 1..80: note = Synthetic: >NC_021928.1-cand-10740-10819
  source 1..80: mol_type = other DNA
aatgtgtataggattatgttcattagttattacttgtctcctctgaaggatagaataaatgacttactcaattatgtaga

SEQ ID NO: 2931 - DNA, 80 bp, synthetic construct
  misc_feature 1..80: note = Synthetic: >NC_021928.1-cand-10820-10899
  source 1..80: mol_type = other DNA
caatttagcactgatcctaggtaataaggtttattcaattattgctaacttagaaagcttagtttatgctaagttacagc

SEQ ID NO: 2932 - DNA, 80 bp, synthetic construct
  misc_feature 1..80: note = Synthetic: >NC_021928.1-cand-10900-10979
  source 1..80: mol_type = other DNA
tgagagatccagtcttagaggtcagaggccaattccattgttttatactggaagagattatggaaattttacatgatgtt

SEQ ID NO: 2933 - DNA, 80 bp, synthetic construct
  misc_feature 1..80: note = Synthetic: >NC_021928.1-cand-10980-11059
  source 1..80: mol_type = other DNA
ttctcagttgaagagagtgctcaagtatgttctatattgtcatctttttttagtggtctatcgcctgacctcactgcaga

SEQ ID NO: 2934 - DNA, 80 bp, synthetic construct
  misc_feature 1..80: note = Synthetic: >NC_021928.1-cand-11090-11169
  source 1..80: mol_type = other DNA
tcccacactcacagctgcaggtgcagcagggaaagttcgtgaatctatgtgtgcacaaaagctattagatttcacaacaa

SEQ ID NO: 2935 - DNA, 80 bp, synthetic construct
  misc_feature 1..80: note = Synthetic: >NC_021928.1-cand-11140-11219
  source 1..80: mol_type = other DNA
gtgcacaaaagctattagatttcacaacaatcatgaaaacattatcattctttcatactatacttataaatgggtatagg

SEQ ID NO: 2936 - DNA, 80 bp, synthetic construct
  misc_feature 1..80: note = Synthetic: >NC_021928.1-cand-11220-11299
  source 1..80: mol_type = other DNA
agaaaacacggcgggatctggccaaatgtaatgttaattgatggtaccccaaattttattgtcagttcaaaaaatgataa

SEQ ID NO: 2937 - DNA, 80 bp, synthetic construct
  misc_feature 1..80: note = Synthetic: >NC_021928.1-cand-11300-11379
  source 1..80: mol_type = other DNA
cgcggaaataagctatgaagtagcactgaaatactggaaatggatatcactgtttgaatttgaaaaatgtttttcagctg

SEQ ID NO: 2938 - DNA, 80 bp, synthetic construct
  misc_feature 1..80: note = Synthetic: >NC_021928.1-cand-11380-11459
  source 1..80: mol_type = other DNA
acccaggtgaggatttaagtatattcatgaaagataaggcaataagttgtaacaagaaggattggatgagtgtatttaga

SEQ ID NO: 2939 - DNA, 80 bp, synthetic construct
  misc_feature 1..80: note = Synthetic: >NC_021928.1-cand-11460-11539
  source 1..80: mol_type = other DNA
cgaagcttaatacatgaaaggtgtgcaaaaaatcatctagaatgtccatcgaatgtgaatagacgattgttattaaactt

SEQ ID NO: 2940 - DNA, 80 bp, synthetic construct
  misc_feature 1..80: note = Synthetic: >NC_021928.1-cand-11540-11619
  source 1..80: mol_type = other DNA
cctaaatgattcaaatttcgatcctaatttagaattagagtatgtaactaccttacaatatctaactgatgataattttt

SEQ ID NO: 2941 - DNA, 80 bp, synthetic construct
  misc_feature 1..80: note = Synthetic: >NC_021928.1-cand-11620-11699
  source 1..80: mol_type = other DNA
gtgcctcatactctttgaaagaaaaggagataaaagaaactgggagaatatttgcaaaactcacaaagcagatgagatcg

SEQ ID NO: 2942 - DNA, 80 bp, synthetic construct
  misc_feature 1..80: note = Synthetic: >NC_021928.1-cand-11700-11779
  source 1..80: mol_type = other DNA
tgtcaagtaataacagaatcaatgcttgctaatcatgcagggaaattatttagagagaatggtgtagttcttgatcagct

SEQ ID NO: 2943 - DNA, 80 bp, synthetic construct
  misc_feature 1..80: note = Synthetic: >NC_026424.1-cand-810-889
  source 1..80: mol_type = other DNA
atgggcctccctgctctcagcggtcgaaattcttgctgatggatgctctgaaattaagcattgaggacccgagccacgaa

SEQ ID NO: 2944 - DNA, 80 bp, synthetic construct
  misc_feature 1..80: note = Synthetic: >NC_026424.1-cand-900-979
  source 1..80: mol_type = other DNA
taccgctatatgatgcgatcaaatgcatgaaaacgttcttcgggtggaaagagcccaacattatcaaaccacatgagaaa

SEQ ID NO: 2945 - DNA, 80 bp, synthetic construct
  misc_feature 1..80: note = Synthetic: >NC_026424.1-cand-980-1059
  source 1..80: mol_type = other DNA
ggcataaaccccaattatctcctgacttggaagcaggtgctagcagaacttcaggacattgaaaatgaagagaagattcc

SEQ ID NO: 2946 - DNA, 80 bp, synthetic construct
  misc_feature 1..80: note = Synthetic: >NC_026424.1-cand-1060-1139
  source 1..80: mol_type = other DNA
aaggacaaagaacatgaagaaaacaagccaattaaagtgggcactcggtgagaacatggcaccggagaaggtggactttg

SEQ ID NO: 2947 - DNA, 80 bp, synthetic construct
  misc_feature 1..80: note = Synthetic: >NC_026424.1-cand-1140-1219
  source 1..80: mol_type = other DNA
aggattgcaaagatgtcaacgacttgaaacagtacaacagtgatgagccagagcccagatcactagcatgttggatccag

SEQ ID NO: 2948 - DNA, 80 bp, synthetic construct
  misc_feature 1..80: note = Synthetic: >NC_026424.1-cand-1200-1279
  source 1..80: mol_type = other DNA
cactagcatgttggatccagaatgaattcaacaaggcgtgtgaactgactgactcaagctgggtagaacttgatgaaata

SEQ ID NO: 2949 - DNA, 80 bp, synthetic construct
  misc_feature 1..80: note = Synthetic: >NC_026424.1-cand-1300-1379
  source 1..80: mol_type = other DNA
cgaacacattgcaagcatgagacggaactattttacagcagaggtgtcccactgcagggctactgaatatataatgaagg

SEQ ID NO: 2950 - DNA, 80 bp, synthetic construct
  misc_feature 1..80: note = Synthetic: >NC_026424.1-cand-1380-1459
  source 1..80: mol_type = other DNA
gagtgtacataaatacagctttgctcaatgcatcttgtgcagccatggatgactttcaactgattccaatgataagtaaa

SEQ ID NO: 2951 - DNA, 80 bp, synthetic construct
  misc_feature 1..80: note = Synthetic: >NC_026424.1-cand-1460-1539
  source 1..80: mol_type = other DNA
tgtagaaccaaagaaggaagacggaaaacaaacctgtatggattcattataaaaggaagatctcatttgaggaatgatac

SEQ ID NO: 2952 - DNA, 80 bp, synthetic construct
  misc_feature 1..80: note = Synthetic: >NC_026424.1-cand-1540-1619
  source 1..80: mol_type = other DNA
cgacgtggtaaactttgtaagtatggaattttcccttaccgacccaaggttggaaccacataaatgggaaaagtattgtg

SEQ ID NO: 2953 - DNA, 80 bp, synthetic construct
  misc_feature 1..80: note = Synthetic: >NC_026424.1-cand-1640-1719
  source 1..80: mol_type = other DNA
ctcctgcgaactgcagtaggccaagtgtcaagacccatgtttctgtatgtgagaaccaatgggacctccaagatcaagat

SEQ ID NO: 2954 - DNA, 80 bp, synthetic construct
  misc_feature 1..80: note = Synthetic: >NC_026424.1-cand-1730-1809
  source 1..80: mol_type = other DNA
atggaaatgagacgctgccttcttcaatctctccaacagattgagagcatgattgaagctgaatcctccgtcaaagagaa

SEQ ID NO: 2955 - DNA, 80 bp, synthetic construct
  misc_feature 1..80: note = Synthetic: >NC_026424.1-cand-1790-1869
  source 1..80: mol_type = other DNA
gaatcctccgtcaaagagaaagacctgaccaaagaattctttgaaaacaaatcagaaacatggccaattggagagtcacc

SEQ ID NO: 2956 - DNA, 80 bp, synthetic construct
  misc_feature 1..80: note = Synthetic: >NC_026424.1-cand-1870-1949
  source 1..80: mol_type = other DNA
taaaggagtggaggaaggttccatcgggaaggtgtgcagaaccttactagcaaaatctgtattcaacagcctatatgcat

SEQ ID NO: 2957 - DNA, 80 bp, synthetic construct
  misc_feature 1..80: note = Synthetic: >NC_026424.1-cand-1880-1959
  source 1..80: mol_type = other DNA
gaggaaggttccatcgggaaggtgtgcagaaccttactagcaaaatctgtattcaacagcctatatgcatctccgcaact

SEQ ID NO: 2958 - DNA, 80 bp, synthetic construct
  misc_feature 1..80: note = Synthetic: >NC_026424.1-cand-2000-2079
  source 1..80: mol_type = other DNA
gttcaggcgcttagggataacctggaacctggaacctttgatcttgaagggctatatgaagcaatcgaggagtgcctgat

SEQ ID NO: 2959 - DNA, 80 bp, synthetic construct
  misc_feature 1..80: note = Synthetic: >NC_026431.1-cand-120-199
  source 1..80: mol_type = other DNA
tcatggaatggctaaagacaagaccaatcttgtcacctctgactaagggaattttaggatttgtgttcacgctcaccgtg

SEQ ID NO: 2960 - DNA, 80 bp, synthetic construct
  misc_feature 1..80: note = Synthetic: >NC_026431.1-cand-180-259
  source 1..80: mol_type = other DNA
ttgtgttcacgctcaccgtgcccagtgagcgaggactgcagcgtagacgctttgtccaaaatgccctaaatgggaatggg

SEQ ID NO: 2961 - DNA, 80 bp, synthetic construct
  misc_feature 1..80: note = Synthetic: >NC_026431.1-cand-330-409
  source 1..80: mol_type = other DNA
ccaaggaggtgtcactaagctattcaactggtgcacttgccagttgcatgggcctcatatacaacaggatgggaacagtg

SEQ ID NO: 2962 - DNA, 80 bp, synthetic construct
  misc_feature 1..80: note = Synthetic: >NC_026431.1-cand-360-439
  source 1..80: mol_type = other DNA
gtgcacttgccagttgcatgggcctcatatacaacaggatgggaacagtgaccacagaagctgcttttggtctagtgtgt

SEQ ID NO: 2963 - DNA, 80 bp, synthetic construct
  misc_feature 1..80: note = Synthetic: >NC_026431.1-cand-450-529
  source 1..80: mol_type = other DNA
aacagattgctgattcacagcatcggtctcacagacagatggctactaccaccaatccactaatcaggcatgaaaacaga

SEQ ID NO: 2964 - DNA, 80 bp, synthetic construct
  misc_feature 1..80: note = Synthetic: >NC_026431.1-cand-540-619
  source 1..80: mol_type = other DNA
ctagcactacggcaaaggctatggaacagatggctggatcgagtgaacaggcagcggaggccatggaggttgctaatcag

SEQ ID NO: 2965 - DNA, 80 bp, synthetic construct
  misc_feature 1..80: note = Synthetic: >NC_026431.1-cand-730-809
  source 1..80: mol_type = other DNA
agtgcagatgcagcgattcaagtgatcctctcgtcattgcagcaaatatcattgggatcttgcacctgatattgtggatt

SEQ ID NO: 2966 - DNA, 80 bp, synthetic construct
  misc_feature 1..80: note = Synthetic: >NC_026432.1-cand-0-79
  source 1..80: mol_type = other DNA
actccaacaccatgtcaagctttcaggtagactgtttcctttggcatatccgcaagcgatttgcagacaatggattgggt

SEQ ID NO: 2967 - DNA, 80 bp, synthetic construct
  misc_feature 1..80: note = Synthetic: >NC_026432.1-cand-90-169
  source 1..80: mol_type = other DNA
tccttgatcggctccgccgagatcaaaagtccttaaaaggaagaggcaacacccttggcctcgatatcgaaacagccact

SEQ ID NO: 2968 - DNA, 80 bp, synthetic construct
  misc_feature 1..80: note = Synthetic: >NC_026432.1-cand-170-249
  source 1..80: mol_type = other DNA
cttgttgggaaacaaatcgtggaatggatcttgaaagaggaatccagcgagacacttagaatgacaattgcatctgtacc

SEQ ID NO: 2969 - DNA, 80 bp, synthetic construct
  misc_feature 1..80: note = Synthetic: >NC_026432.1-cand-260-339
  source 1..80: mol_type = other DNA
tacctttctgacatgaccctcgaggaaatgtcacgagactggttcatgctcatgcctaggcaaaagataataggccctct

SEQ ID NO: 2970 - DNA, 80 bp, synthetic construct
  misc_feature 1..80: note = Synthetic: >NC_026432.1-cand-350-429
  source 1..80: mol_type = other DNA
ttggaccaggcgatcatggaaaagaacatagtactgaaagcgaacttcagtgtaatctttaaccgattagagaccttgat

SEQ ID NO: 2971 - DNA, 80 bp, synthetic construct
  misc_feature 1..80: note = Synthetic: >NC_026432.1-cand-450-529
  source 1..80: mol_type = other DNA
aggagggagcaatagttggagaaatttcaccattaccttctcttccaggacatacttatgaggatgtcaaaaatgcagtt

SEQ ID NO: 2972 - DNA, 80 bp, synthetic construct
  misc_feature 1..80: note = Synthetic: >NC_026432.1-cand-540-619
  source 1..80: mol_type = other DNA
tcggaggacttgaatggaatggtaacacggttcgagtctctgaaaatatacagagattcgcttggagaaactgtgatgag

SEQ ID NO: 2973 - DNA, 80 bp, synthetic construct
  misc_feature 1..80: note = Synthetic: >NC_026432.1-cand-630-709
  source 1..80: mol_type = other DNA
cttcactacctccagagcagaaatgaaaagtggcgagagcaattgggacagaaatttgaggaaataaggtggttaattga

SEQ ID NO: 2974 - DNA, 80 bp, synthetic construct
  misc_feature 1..80: note = Synthetic: >NC_026432.1-cand-710-789
  source 1..80: mol_type = other DNA
agaaatgcggcacagattgaaagcgacagagaatagtttcgaacaaataacatttatgcaagccttacaactactgcttg

SEQ ID NO: 2975 - DNA, 80 bp, synthetic construct
  misc_feature 1..80: note = Synthetic: >NC_038300.1-cand-2460-2539
  source 1..80: mol_type = other DNA
taaaatacacacggaaagtttgcattcagttaggaacagagcagacttgtaagaatattgatgtaaatgattgtttagtg

SEQ ID NO: 2976 - DNA, 80 bp, synthetic construct
  misc_feature 1..80: note = Synthetic: >NC_038300.1-cand-2510-2589
  source 1..80: mol_type = other DNA
aagaatattgatgtaaatgattgtttagtgacttcttcagttaaggtctgcatgataggaacaatttcaaagctgcaacc

SEQ ID NO: 2977 - DNA, 80 bp, synthetic construct
  misc_feature 1..80: note = Synthetic: >NC_038300.1-cand-2620-2699
  source 1..80: mol_type = other DNA
agaagaaggcgggttaatcttgaagcagtggtgtacaacaacatgtgcctttggcgacccaggtgacattatgtcaacta

SEQ ID NO: 2978 - DNA, 80 bp, synthetic construct
  misc_feature 1..80: note = Synthetic: >NC_038300.1-cand-2700-2779
  source 1..80: mol_type = other DNA
cctctgggatgcgttgccctgaacacacaggttccttcagaaagatctgcgggtttgctacaacaccaacctgtgagtat

SEQ ID NO: 2979 - DNA, 80 bp, synthetic construct
  misc_feature 1..80: note = Synthetic: >NC_038300.1-cand-2780-2859
  source 1..80: mol_type = other DNA
caagggaatactgtctctggatttaagcggctaatggcaactaaagactcatttcaatcatttaatgtctctgaggcaca

SEQ ID NO: 2980 - DNA, 80 bp, synthetic construct
  misc_feature 1..80: note = Synthetic: >NC_038300.1-cand-2860-2939
  source 1..80: mol_type = other DNA
cataacaacaaacagtctagagtgggtagatccagacaataacataaaagatcatatcaatctggttcttaaccgggata

SEQ ID NO: 2981 - DNA, 80 bp, synthetic construct
  misc_feature 1..80: note = Synthetic: >NC_038300.1-cand-2930-3009
  source 1..80: mol_type = other DNA
aaccgggatatttcatttcaagatctgagtgacaatccatgtaaggtggacctgtcaacacaatcgattgatggtgcatg

SEQ ID NO: 2982 - DNA, 80 bp, synthetic construct
  misc_feature 1..80: note = Synthetic: >NC_038300.1-cand-3020-3099
  source 1..80: mol_type = other DNA
gttggtttcacattgacatgtgtagttggcctgacagaatgcccgaattttataacctcaatcaaagcatgtgacatggc

SEQ ID NO: 2983 - DNA, 80 bp, synthetic construct
  misc_feature 1..80: note = Synthetic: >NC_038300.1-cand-3100-3179
  source 1..80: mol_type = other DNA
catgtgttatggtgctacagtggtcaatttagttagaggttctaatactatcaaggttgtaggtaaaggaggccactcag

SEQ ID NO: 2984 - DNA, 80 bp, synthetic construct
  misc_feature 1..80: note = Synthetic: >NC_038300.1-cand-3180-3259
  source 1..80: mol_type = other DNA
ggtcattgtttaagtgttgtcatgataaggactgtgcaggtacaggtttgtcggcatctgcacctcatttagagagggtt

SEQ ID NO: 2985 - DNA, 80 bp, synthetic construct
  misc_feature 1..80: note = Synthetic: >NC_038300.1-cand-3260-3339
  source 1..80: mol_type = other DNA
actggattcaatcaggttgactcagataaagtctatgatgatggtgcacctccttgttcaataaagtgttggttttcaaa

SEQ ID NO: 2986 - DNA, 80 bp, synthetic construct
  misc_feature 1..80: note = Synthetic: >NC_038300.1-cand-3340-3419
  source 1..80: mol_type = other DNA
atctggagaatggctccttgggattctgagtggaaattgggttgttgtggctgttcttgttgttatcctgttgatctcta

SEQ ID NO: 2987 - DNA, 80 bp, synthetic construct
  misc_feature 1..80: note = Synthetic: >NC_038300.1-cand-3420-3499
  source 1..80: mol_type = other DNA
tagtcctatttagtttcttgtgtcccataagatcacataagaaacagctttaagggcaagcaaaagaacaaatctttgtt

SEQ ID NO: 2988 - DNA, 80 bp, synthetic construct
  misc_feature 1..80: note = Synthetic: >NC_038300.1-cand-3500-3579
  source 1..80: mol_type = other DNA
tacccacaccatattaatctgcaatatcatttaggctttatagcatttactgcttcctaatgctttaaactgaaatagtt

SEQ ID NO: 2989 - DNA, 80 bp, synthetic construct
  misc_feature 1..80: note = Synthetic: >NC_038300.1-cand-3580-3659
  source 1..80: mol_type = other DNA
aatactaatttcactaaaaaaaactagagctttactaccatataactcatttacttcaagcctgggcttttgttcctgcg

SEQ ID NO: 2990 - DNA, 80 bp, synthetic construct
  misc_feature 1..80: note = Synthetic: >NC_038311.1-cand-0-79
  source 1..80: mol_type = other DNA
aactgggtgtgggttgttcccacccacaccacccaatgggtgttgtactctgttattccggtaactttgtacgccagttt

SEQ ID NO: 2991 - DNA, 80 bp, synthetic construct
  misc_feature 1..80: note = Synthetic: >NC_038312.1-cand-5810-5889
  source 1..80: mol_type = other DNA
ttggtctaaacccaataaacacacccaccaaaaccaagcttcatcctagtgtgttttacaatgtgttccctggaagcaaa

SEQ ID NO: 2992 - DNA, 80 bp, synthetic construct
  misc_feature 1..80: note = Synthetic: >NC_038312.1-cand-5890-5969
  source 1..80: mol_type = other DNA
caacccgctgtgctcaatgacaatgaccctagacttgaagtgaaattagctgaatctttgttttcaaagtataaaggtaa

SEQ ID NO: 2993 - DNA, 80 bp, synthetic construct
  misc_feature 1..80: note = Synthetic: >NC_038312.1-cand-5970-6049
  source 1..80: mol_type = other DNA
tgtccagatggaaccgactgaaaacatgctgatagctgtagatcattatgcagggcagttgatgtcattagatatctcta

SEQ ID NO: 2994 - DNA, 80 bp, synthetic construct
  misc_feature 1..80: note = Synthetic: >NC_038312.1-cand-6050-6129
  source 1..80: mol_type = other DNA
ctaaagagctaacactaaaagaagcactgtatggagtagatggcttagaaccaatagatgtaacaaccagtgcaggatac

SEQ ID NO: 2995 - DNA, 80 bp, synthetic construct
  misc_feature 1..80: note = Synthetic: >NC_038312.1-cand-6130-6209
  source 1..80: mol_type = other DNA
ccctatgttagtttagggataaagaagagagacatattaaacaaagaaactcaagatgtagagaaaatgaagttttactt

SEQ ID NO: 2996 - DNA, 80 bp, synthetic construct
  misc_feature 1..80: note = Synthetic: >NC_038312.1-cand-6210-6289
  source 1..80: mol_type = other DNA
agataaatatggaatagacttgccattagttacatacataaaagatgagctcaggagcgtagacaaagtgcgcttgggaa

SEQ ID NO: 2997 - DNA, 80 bp, synthetic construct
  misc_feature 1..80: note = Synthetic: >NC_038312.1-cand-6290-6369
  source 1..80: mol_type = other DNA
agagcagactgattgaagcttctagtttaaatgattctgtcaacatgagaatgaaactaggtaacctgtacaaagctttt

SEQ ID NO: 2998 - DNA, 80 bp, synthetic construct
  misc_feature 1..80: note = Synthetic: >NC_038312.1-cand-6370-6449
  source 1..80: mol_type = other DNA
caccaaaatccaggtataataacagaatctgcagtgggatgtgatccagatgtcttttggtctgttataccttgtttaat

SEQ ID NO: 2999 - DNA, 80 bp, synthetic construct
  misc_feature 1..80: note = Synthetic: >NC_038312.1-cand-6450-6529
  source 1..80: mol_type = other DNA
ggatggacatttgatggcatttgattattcaaactttgatgcgtctctttcaccagtctggtttgaatgtttagagaaag

SEQ ID NO: 3000 - DNA, 80 bp, synthetic construct
  misc_feature 1..80: note = Synthetic: >NC_038312.1-cand-6540-6619
  source 1..80: mol_type = other DNA
gttaggctttaaacaaccctcattaatacagtcaatttgcaatacacaccatatttttagagatgaaatttatagagtag

SEQ ID NO: 3001 - DNA, 80 bp, synthetic construct
  misc_feature 1..80: note = Synthetic: >NC_038312.1-cand-6620-6699
  source 1..80: mol_type = other DNA
agggaggtatgccatcaggttgttcaggaaccagtatattcaattccatgataaacaacataattatcagaacattaatt

SEQ ID NO: 3002 - DNA, 80 bp, synthetic construct
  misc_feature 1..80: note = Synthetic: >NC_038312.1-cand-6700-6779
  source 1..80: mol_type = other DNA
ttggatgcttataaaggcatagaccttgatagtctcagaatactagcttatggtgatgacttaatagtttcatacccctt

SEQ ID NO: 3003 - DNA, 80 bp, synthetic construct
  misc_feature 1..80: note = Synthetic: >NC_038312.1-cand-6780-6859
  source 1..80: mol_type = other DNA
tgaactagattctaacattttggcagcaatagggaaaaattatggtttaactattactccacctgataagtcagatgcat

SEQ ID NO: 3004 - DNA, 80 bp, synthetic construct
  misc_feature 1..80: note = Synthetic: >NC_038312.1-cand-6870-6949
  source 1..80: mol_type = other DNA
aacatgggaaaacattacattccttaaaaggtattttagacctgacccacagtttccctttttgatccatccagtaatgc

SEQ ID NO: 3005 - DNA, 80 bp, synthetic construct
  misc_feature 1..80: note = Synthetic: >NC_038312.1-cand-6950-7029
  source 1..80: mol_type = other DNA
caatgcaagatatctatgagtcaatcagatggacaagggatccaaggaatactcaagatcatgttagatcactatgcatg

SEQ ID NO: 3006 - DNA, 80 bp, synthetic construct
  misc_feature 1..80: note = Synthetic: >NC_038312.1-cand-7030-7109
  source 1..80: mol_type = other DNA
ctagcttggcattcaggtgagaaagactacaatgatttcataaccaagatcagaacaacagacattggcaaatgtcttaa

SEQ ID NO: 3007 - DNA, 80 bp, synthetic construct
  misc_feature 1..80: note = Synthetic: >NC_044932.1-cand-6690-6769
  source 1..80: mol_type = other DNA
gtttcagtaatggcaggagctttcttagcaggattggctggtgacatagtcacaaatagtgtaggttctttagttaatgc

SEQ ID NO: 3008 - DNA, 80 bp, synthetic construct
  misc_feature 1..80: note = Synthetic: >NC_044932.1-cand-6770-6849
  source 1..80: mol_type = other DNA
aggagctagtgcaatcaaccagaaaattgattttgaaaataataaataccttcaaggagaatcttttaaacatgataaag

SEQ ID NO: 3009 - DNA, 80 bp, synthetic construct
  misc_feature 1..80: note = Synthetic: >NC_044932.1-cand-6850-6929
  source 1..80: mol_type = other DNA
aaatgctgaatgcacaaattgaggctacaaagaaattgcagatggatatgataaacatcaaacaaggagttctttcagct

SEQ ID NO: 3010 - DNA, 80 bp, synthetic construct
  misc_feature 1..80: note = Synthetic: >NC_044932.1-cand-6940-7019
  source 1..80: mol_type = other DNA
cacccactgatgcggctcgtggagccatcaacgctcctatgacaaaggttctggattggaatgggactagatactgggca

SEQ ID NO: 3011 - DNA, 80 bp, synthetic construct
  misc_feature 1..80: note = Synthetic: >NC_044932.1-cand-7010-7089
  source 1..80: mol_type = other DNA
atactgggcacccaatgctcctgtaacaacatcactgtctggtggcttcactgggcaggccgtacacaggcccacaccaa

SEQ ID NO: 3012 - DNA, 80 bp, synthetic construct
  misc_feature 1..80: note = Synthetic: >NC_044932.1-cand-7050-7129
  source 1..80: mol_type = other DNA
ggtggcttcactgggcaggccgtacacaggcccacaccaaattttggcagcaatcaaatcccaaagacaatgtccagtag

SEQ ID NO: 3013 - DNA, 80 bp, synthetic construct
  misc_feature 1..80: note = Synthetic: >NC_044932.1-cand-7170-7249
  source 1..80: mol_type = other DNA
ctgggttcccaatcttctggttcctcccgaagcagtgtgactaccgtgagtagctcattgccttcaaccaacaggactag

SEQ ID NO: 3014 - DNA, 80 bp, synthetic construct
  misc_feature 1..80: note = Synthetic: >NC_044932.1-cand-7250-7329
  source 1..80: mol_type = other DNA
agagtgggtgaaccaacaaaatctcaatttggaacctcacctacctggatcactgaggacagcctttgtcactccaccat

SEQ ID NO: 3015 - DNA, 80 bp, synthetic construct
  misc_feature 1..80: note = Synthetic: >NC_044932.1-cand-7330-7409
  source 1..80: mol_type = other DNA
cgagcaccgcttccagctcaggcacagtctcaaccgtgcccaaaggtgttttggactcctggacatctgcattcaacaca

SEQ ID NO: 3016 - DNA, 80 bp, synthetic construct
  misc_feature 1..80: note = Synthetic: >NC_044932.1-cand-7360-7439
  source 1..80: mol_type = other DNA
caaccgtgcccaaaggtgttttggactcctggacatctgcattcaacacacgcagacagccgctgtttgcacaccttcgt

SEQ ID NO: 3017 - DNA, 80 bp, synthetic construct
  misc_feature 1..80: note = Synthetic: >U31794.1-cand-40-119
  source 1..80: mol_type = other DNA
ggtttaggaccgaaaacggtacatataaaaggcagcctgttgtgcctgtagatatccatggattccatattcagcaatac

SEQ ID NO: 3018 - DNA, 80 bp, synthetic construct
  misc_feature 1..80: note = Synthetic: >U31794.1-cand-120-199
  source 1..80: mol_type = other DNA
acaggaacgtccacgaagcctgcaccatctgagcgaggtattacaaatacctttacttgatcttagattatcatgtgtat

SEQ ID NO: 3019 - DNA, 80 bp, synthetic construct
  misc_feature 1..80: note = Synthetic: >U31794.1-cand-200-279
  source 1..80: mol_type = other DNA
actgcaaaaaggaacttacaagtttagagctatataggtttgcatgtattgagttaaaactagtatatagaaacaattgg

SEQ ID NO: 3020 - DNA, 80 bp, synthetic construct
  misc_feature 1..80: note = Synthetic: >U31794.1-cand-280-359
  source 1..80: mol_type = other DNA
ccatatgcagtatgtagggtatgtttattgttttatagtaaggttagaaaatataggtactataaatattcagtgtatgg

SEQ ID NO: 3021 - DNA, 80 bp, synthetic construct
  misc_feature 1..80: note = Synthetic: >U31794.1-cand-360-439
  source 1..80: mol_type = other DNA
ggcaacattagaaagtataactaaaaaacagttatctgatttatcaataaggtgctaccgatgtcaatgtccgttaacac

SEQ ID NO: 3022 - DNA, 80 bp, synthetic construct
  misc_feature 1..80: note = Synthetic: >U31794.1-cand-440-519
  source 1..80: mol_type = other DNA
cggaggaaaaacaattgcactgtgaacataaaagacgatttcattatatagcatatgcatggaccgggtcatgtttgcag

SEQ ID NO: 3023 - DNA, 80 bp, synthetic construct
  misc_feature 1..80: note = Synthetic: >AdVB7-cand-29200-29279
  source 1..80: mol_type = other DNA
cccactatgacaataattaaaatggctaataaagcattagaaaattttacatcaccaacaacgcccaatgaaaaaaacat

SEQ ID NO: 3024 - DNA, 80 bp, synthetic construct
  misc_feature 1..80: note = Synthetic: >NC_001611.1-cand-35380-35459
  source 1..80: mol_type = other DNA
attaaacttttcaggatctttggatagatcttccaatctatctatttgagaaaacatttttatcatgttcaatagttgaa

SEQ ID NO: 3025 - DNA, 80 bp, synthetic construct
  misc_feature 1..80: note = Synthetic: >NC_003310.1-cand-23970-24049
  source 1..80: mol_type = other DNA
atttttttaaacactctttctgaaggatctgtatacgccaacaacggaccacatccttcttcatcaaccgagttgttaat

SEQ ID NO: 3026 - DNA, 80 bp, synthetic construct
  misc_feature 1..80: note = Synthetic: >NC_003310.1-cand-76730-76809
  source 1..80: mol_type = other DNA
gagataagttagaagagtcattaaaatatgcggaacctcgagaatgttgggatccagagtgttcgaatgccaatgttaat

SEQ ID NO: 3027 - DNA, 80 bp, synthetic construct
  misc_feature 1..80: note = Synthetic: >NC_003310.1-cand-69620-69699
  source 1..80: mol_type = other DNA
gatgcgtctccgtatcgtataaatatttcattagatgttagacgcttcattaggggtatacttctataaggtttcttaat

SEQ ID NO: 3028 - DNA, 80 bp, synthetic construct
  misc_feature 1..80: note = Synthetic: >NC_001611.1-cand-142040-142119
  source 1..80: mol_type = other DNA
taccgcaatatgtatgctaatagcgtctacattgatagtgaccatatacgtgtttaaaaaaataaaaatgaactcttaat

SEQ ID NO: 3029 - DNA, 80 bp, synthetic construct
  misc_feature 1..80: note = Synthetic: >EVD70-cand-6900-6979
  source 1..80: mol_type = other DNA
ggtgatgatgtaattgctagttacccacatgagatagaccctggcctattggcaaaagccgggaaagagtatggattaat

SEQ ID NO: 3030 - DNA, 80 bp, synthetic construct
  misc_feature 1..80: note = Synthetic: >NC_003310.1-cand-174700-174779
  source 1..80: mol_type = other DNA
gcatagacttatactgtggaattctttatgcgaaacattataataatataacttggtataaagataataaggaaattaat

SEQ ID NO: 3031 - DNA, 80 bp, synthetic construct
  misc_feature 1..80: note = Synthetic: >NC_001611.1-cand-47950-48029
  source 1..80: mol_type = other DNA
attacttacgatagaaatagatcccttatcacacttaaaataaaaaatatccttatcctttaccaccaaataaaattctg

SEQ ID NO: 3032 - DNA, 80 bp, synthetic construct
  misc_feature 1..80: note = Synthetic: >NC_001611.1-cand-93810-93889
  source 1..80: mol_type = other DNA
tcatttagcgattcaaagtactgcttttttcgaaatggtaatgcgtatgataacggcagcgaagtctccgccgttctaat

SEQ ID NO: 3033 - DNA, 80 bp, synthetic construct
  misc_feature 1..80: note = Synthetic: >NC_003310.1-cand-97450-97529
  source 1..80: mol_type = other DNA
attagaagccactatagagtttctaaacatataacaatagttagatacaaggataccgaagaattaaatctaacaagaat

SEQ ID NO: 3034 - DNA, 80 bp, synthetic construct
  misc_feature 1..80: note = Synthetic: >NC_001611.1-cand-98580-98659
  source 1..80: mol_type = other DNA
ttaataatacaatatttttcgtttacaaaatcaaataatggtcgaaacacgtcaaaggttaacatcttataatcgctaat

SEQ ID NO: 3035 - DNA, 80 bp, synthetic construct
  misc_feature 1..80: note = Synthetic: >NC_001611.1-cand-70620-70699
  source 1..80: mol_type = other DNA
attaggttaaatgattttctgggactattggaatgtgttaaaaagaatattcctctaacagatattccgacaaaggattg

SEQ ID NO: 3036 - DNA, 80 bp, synthetic construct
  misc_feature 1..80: note = Synthetic: >NC_001611.1-cand-33290-33369
  source 1..80: mol_type = other DNA
tttagcacatgtataatataaaaacattattctatttcgaatttaggcttccaaaaatttttcatccgtaaaccgataat

SEQ ID NO: 3037 - DNA, 80 bp, synthetic construct
  misc_feature 1..80: note = Synthetic: >NC_001611.1-cand-99500-99579
  source 1..80: mol_type = other DNA
attatctccgttatagacgttacgttgactagtccaaagacttacaggaatagatgtatcgatgatgttgatactatgtg

SEQ ID NO: 3038 - DNA, 80 bp, synthetic construct
  misc_feature 1..80: note = Synthetic: >NC_001611.1-cand-74300-74379
  source 1..80: mol_type = other DNA
attatgtaagacttgtgggaaaacggaattggaatgtttcggtcactggggtaaagtaagtatctataaaactcatatag

SEQ ID NO: 3039 - DNA, 80 bp, synthetic construct
  misc_feature 1..80: note = Synthetic: >AJ410618.2-cand-80-159
  source 1..80: mol_type = other DNA
tggatcattgacagcagtggaatgtatagactatctggaccgtctttacgcaataaggcatgatattgttgaccaaatga

SEQ ID NO: 3040 - DNA, 80 bp, synthetic construct
  misc_feature 1..80: note = Synthetic: >AJ410618.2-cand-150-229
  source 1..80: mol_type = other DNA
gaccaaatgataaagcatgattggtcagacaataaggattcagaagagtctataggaaaggttttattgtttgccgggat

SEQ ID NO: 3041 - DNA, 80 bp, synthetic construct
  misc_feature 1..80: note = Synthetic: >AJ410618.2-cand-230-309
  source 1..80: mol_type = other DNA
acctaataatgtcataactgcaatggagaagaagatcatccctgaccacccaagcggcaagacactccgatctttcttca

SEQ ID NO: 3042 - DNA, 80 bp, synthetic construct
  misc_feature 1..80: note = Synthetic: >AJ410618.2-cand-310-389
  source 1..80: mol_type = other DNA
agatgacccctgacaactacaagataacaggttcaacgatcgaatttgttgaagtaacagttaccgttgatgttgataaa

SEQ ID NO: 3043 - DNA, 80 bp, synthetic construct
  misc_feature 1..80: note = Synthetic: >AJ410618.2-cand-390-469
  source 1..80: mol_type = other DNA
gggattagagagaagaagctgaaatatgaagcaggattgaagtacattgaacaagaattacataatcattttcttaaagg

SEQ ID NO: 3044 - DNA, 80 bp, synthetic construct
  misc_feature 1..80: note = Synthetic: >AJ410618.2-cand-470-549
  source 1..80: mol_type = other DNA
agatattccacagccttacaagttaacatttcaggttgtttcggttagaacagacggatctaacatttctacacagtggc

SEQ ID NO: 3045 - DNA, 80 bp, synthetic construct
  misc_feature 1..80: note = Synthetic: >AJ410618.2-cand-550-629
  source 1..80: mol_type = other DNA
ccagcaggagaaatgatggtgttgttcaatacatgaggctggtgcaggctgaaatcagttatgttagagaacacttaata

SEQ ID NO: 3046 - DNA, 80 bp, synthetic construct
  misc_feature 1..80: note = Synthetic: >AJ410618.2-cand-630-709
  source 1..80: mol_type = other DNA
cgacaagaagaaagagctgctttggaggccatgttcaatttgaaatttaatataagtaatgtgaaaaatcaaccatacta

SEQ ID NO: 3047 - DNA, 80 bp, synthetic construct
  misc_feature 1..80: note = Synthetic: >AJ410618.2-cand-710-789
  source 1..80: mol_type = other DNA
tattcctgattatagaggaattatgctaattcatccaagcatcaatgacttggttggttatatgaagaactggttgtcaa

SEQ ID NO: 3048 - DNA, 80 bp, synthetic construct
  misc_feature 1..80: note = Synthetic: >AJ410618.2-cand-790-869
  source 1..80: mol_type = other DNA
agagtcatgagttttcttttcatgaagtgaagggtcctgctgtatttgattgttttaatgagaatgaacttgaacatgcc

SEQ ID NO: 3049 - DNA, 80 bp, synthetic construct
  misc_feature 1..80: note = Synthetic: >AJ410618.2-cand-870-949
  source 1..80: mol_type = other DNA
atcaaatatccaatttcaagacatccaagaaacttcctgctgatacagtgttcgttattatcctcatacagtccagccac

SEQ ID NO: 3050 - DNA, 80 bp, synthetic construct
  misc_feature 1..80: note = Synthetic: >AJ410618.2-cand-950-1029
  source 1..80: mol_type = other DNA
aatcctttctgaccaggtggatagtagaagggcatgtaattctgtattaaatttgatccctgaaaccccaacttcattct

SEQ ID NO: 3051 - DNA, 80 bp, synthetic construct
  misc_feature 1..80: note = Synthetic: >AJ410618.2-cand-1030-1109
  source 1..80: mol_type = other DNA
tgatccatgatatggcttatagatacattaatctcacaagagaagatatgatttcattttatgcacctaagacccagttt

SEQ ID NO: 3052 - DNA, 80 bp, synthetic construct
  misc_feature 1..80: note = Synthetic: >AJ410618.2-cand-1110-1189
  source 1..80: mol_type = other DNA
atccctacacagagtgtaaaggagcctggaactttcaagttgactgctaattctatgaggccagagtccaaagcaatgtt

SEQ ID NO: 3053 - DNA, 80 bp, synthetic construct
  misc_feature 1..80: note = Synthetic: >AJ410618.2-cand-1190-1269
  source 1..80: mol_type = other DNA
ggacatgctaggtagccatgaaccaggtgaaaagaaaggtgccttaattgagagtttgaacttaagcagccacatagttc

SEQ ID NO: 3054 - DNA, 80 bp, synthetic construct
  misc_feature 1..80: note = Synthetic: >AJ410618.2-cand-1270-1349
  source 1..80: mol_type = other DNA
aatctgaatgcgtgagtttgattactaagatactgtctgatcttgagttaaatataagtgagccaacaagctataattcc

SEQ ID NO: 3055 - DNA, 80 bp, synthetic construct
  misc_feature 1..80: note = Synthetic: >AdVE4-cand-12690-12769
  source 1..80: mol_type = other DNA
gccacggtgtcgagcctgctgacgccaaactcgcgcctgctgctgctgctggtggcgccctttacggacagcggtagtat

SEQ ID NO: 3056 - DNA, 80 bp, synthetic construct
  misc_feature 1..80: note = Synthetic: >AdVE4-cand-12760-12839
  source 1..80: mol_type = other DNA
gcggtagtatcaaccgcaactcgtacctgggctacctgattaacctgtaccgcgaggccattggccaggcgcacgtggac

SEQ ID NO: 3057 - DNA, 80 bp, synthetic construct
  misc_feature 1..80: note = Synthetic: >AdVE4-cand-12840-12919
  source 1..80: mol_type = other DNA
gagcagacctaccaggaaattacccacgtaagccgcgccctaggccaggacgaccctggcaatctggaagccaccctaaa

SEQ ID NO: 3058 - DNA, 80 bp, synthetic construct
  misc_feature 1..80: note = Synthetic: >AdVE4-cand-12920-12999
  source 1..80: mol_type = other DNA
cttcttgctgaccaaccggtcgcagaagatcccgccccagtacgcgctgagcgccgaggaggagcgcatattgagatacg

SEQ ID NO: 3059 - DNA, 80 bp, synthetic construct
  misc_feature 1..80: note = Synthetic: >AdVE4-cand-13040-13119
  source 1..80: mol_type = other DNA
cacccccagcgccgcgcttgacatgaccgcgcacaacatggagcccagcatgtacgccagtaatcgcccgtttattaata

SEQ ID NO: 3060 - DNA, 80 bp, synthetic construct
  misc_feature 1..80: note = Synthetic: >AdVE4-cand-13080-13159
  source 1..80: mol_type = other DNA
gagcccagcatgtacgccagtaatcgcccgtttattaataagctgatggactacctgcatcgggcggccgccatgaactc

SEQ ID NO: 3061 - DNA, 80 bp, synthetic construct
  misc_feature 1..80: note = Synthetic: >AdVE4-cand-13130-13209
  source 1..80: mol_type = other DNA
ctacctgcatcgggcggccgccatgaactctgactattttaccaacgccatccttaacccccactggcttccgccgccgg

SEQ ID NO: 3062 - DNA, 80 bp, synthetic construct
  misc_feature 1..80: note = Synthetic: >AdVE4-cand-13240-13319
  source 1..80: mol_type = other DNA
accccaatgacgggtttttgtgggacgacgtggacagcagcgtgttctccccccgaccgggtgccaacgagcgccccttg

SEQ ID NO: 3063 - DNA, 80 bp, synthetic construct
  misc_feature 1..80: note = Synthetic: >AdVE4-cand-13320-13399
  source 1..80: mol_type = other DNA
tggaagaaagagggcagcgaccggcgcccgtcctcgacgctgtccggccgcacgggtgctgccgcggcggtgcccgaggc

SEQ ID NO: 3064 - DNA, 80 bp, synthetic construct
  misc_feature 1..80: note = Synthetic: >AdVE4-cand-13400-13479
  source 1..80: mol_type = other DNA
cgccagtccctttccgagcttgccattttcgctgaacagcgtccgcagcagcgagctgggcaggatcacgcgcccgcgct

SEQ ID NO: 3065 - DNA, 80 bp, synthetic construct
  misc_feature 1..80: note = Synthetic: >AdVE4-cand-13480-13559
  source 1..80: mol_type = other DNA
tgctgggcgaggaggagtacttaaataactcgctgttaaggcccgagcgggagaaaaacttccccaataacggaatagag

SEQ ID NO: 3066 - DNA, 80 bp, synthetic construct
  misc_feature 1..80: note = Synthetic: >AdVE4-cand-13550-13629
  source 1..80: mol_type = other DNA
cggaatagagagtctggtggacaagatgaaccgctggaagacgtatgcgcaggagcacagggacgatccccgggcaacgc

SEQ ID NO: 3067 - DNA, 80 bp, synthetic construct
  misc_feature 1..80: note = Synthetic: >AdVE4-cand-13690-13769
  source 1..80: mol_type = other DNA
gactgatgtgggacgatgaggattccgccgacgacagcagcgtgttggacttgggcgggagtggtggtggtaacccgttc

SEQ ID NO: 3068 - DNA, 80 bp, synthetic construct
  misc_feature 1..80: note = Synthetic: >AdVE4-cand-13720-13799
  source 1..80: mol_type = other DNA
acgacagcagcgtgttggacttgggcgggagtggtggtggtaacccgttcgctcacctgcgcccccgcgttgggcgcctg

SEQ ID NO: 3069 - DNA, 80 bp, synthetic construct
  misc_feature 1..80: note = Synthetic: >AdVE4-cand-13800-13879
  source 1..80: mol_type = other DNA
atgtaaaaagaaaccaaaaaataaatggtacttaccaaggccatggcgaccagcgtgcgttagtttcttctctgttgtat

SEQ ID NO: 3070 - DNA, 80 bp, synthetic construct
  misc_feature 1..80: note = Synthetic: >AdVE4-cand-13880-13959
  source 1..80: mol_type = other DNA
ctagtatgatgaggcgtgcgtacccggagggtcctcctccctcgtatgaaagcgtgatgcagcaggcaatggcggcggcg

SEQ ID NO: 3071 - DNA, 80 bp, synthetic construct
  misc_feature 1..80: note = Synthetic: >AdVE4-cand-33220-33299
  source 1..80: mol_type = other DNA
aatacactatcctctccccacgcacagccttaaacatctgaatgccattggtaatggacatggttttggtctccacattc

SEQ ID NO: 3072 - DNA, 80 bp, synthetic construct
  misc_feature 1..80: note = Synthetic: >AdVE4-cand-33300-33379
  source 1..80: mol_type = other DNA
cacacagtttcaaagcgagacaatctcgggtcggtcaaggagatgaaaccctccgggaactcctgcatctgcacctcaca

SEQ ID NO: 3073 - DNA, 80 bp, synthetic construct
  misc_feature 1..80: note = Synthetic: >AdVE4-cand-33380-33459
  source 1..80: mol_type = other DNA
gtttaacagctgagggctgtcctcggtggttggaatcacagttatctggaataagagcgatgagaatcataatccgcgaa

SEQ ID NO: 3074 - DNA, 80 bp, synthetic construct
  misc_feature 1..80: note = Synthetic: >AdVE4-cand-33450-33529
  source 1..80: mol_type = other DNA
aatccgcgaacgggatcgggcggttgtggcgcattaggccccgcaacagtcgctgtctacgccgctccgtcaagctgctg

SEQ ID NO: 3075 - DNA, 80 bp, synthetic construct
  misc_feature 1..80: note = Synthetic: >AdVE4-cand-33540-33619
  source 1..80: mol_type = other DNA
ccgggtcctgggactccctgcgcatgatgccaatggccctaagcatcagtcgcctggtacggcgggcacagcagcggatg

SEQ ID NO: 3076 - DNA, 80 bp, synthetic construct
  misc_feature 1..80: note = Synthetic: >AdVE4-cand-33620-33699
  source 1..80: mol_type = other DNA
cgaatctcacttaggtcaaagcagtacgtacagcacagcaccaccacgttgttcaacagtccatagtttaacgtgctcca

SEQ ID NO: 3077 - DNA, 80 bp, synthetic construct
  misc_feature 1..80: note = Synthetic: >AdVE4-cand-33700-33779
  source 1..80: mol_type = other DNA
gccaaaactcatctgtggaactatgctgcccacatgtccatcgtaccagattctgatgtaaatcaggtggcgccccctcc

SEQ ID NO: 3078 - DNA, 80 bp, synthetic construct
  misc_feature 1..80: note = Synthetic: >AdVE4-cand-33780-33859
  source 1..80: mol_type = other DNA
agaacacactgcccatgtacatgatctccttgggcatgtgcaggtttactacctcccggtaccacatcacccgctggtta

SEQ ID NO: 3079 - DNA, 80 bp, synthetic construct
  misc_feature 1..80: note = Synthetic: >AdVE4-cand-33860-33939
  source 1..80: mol_type = other DNA
aacatgcagccctggataatcctgcggaaccagatggccagcactgccccgcccgccatgcagcgcaaagaccccgggtc

SEQ ID NO: 3080 - DNA, 80 bp, synthetic construct
  misc_feature 1..80: note = Synthetic: >AdVE4-cand-33940-34019
  source 1..80: mol_type = other DNA
ctggcaatggcagtggatcacccaccgctcacggccgtggattaactgggaactaaacaagtctatgttggcacagcaca

SEQ ID NO: 3081 - DNA, 80 bp, synthetic construct
  misc_feature 1..80: note = Synthetic: >AdVE4-cand-33980-34059
  source 1..80: mol_type = other DNA
attaactgggaactaaacaagtctatgttggcacagcacaggcacacgctcatgcatgtcttcagcactctcaattcctt

SEQ ID NO: 3082 - DNA, 80 bp, synthetic construct
  misc_feature 1..80: note = Synthetic: >AdVE4-cand-34100-34179
  source 1..80: mol_type = other DNA
aggacagtaaagccggccgaacagggcaatcctcgcacggaacttacattgtgcatagacagggtatcgcaatcaggcag

SEQ ID NO: 3083 - DNA, 80 bp, synthetic construct
  misc_feature 1..80: note = Synthetic: >AdVE4-cand-34180-34259
  source 1..80: mol_type = other DNA
caccggatgatcctccaccagagaagcgcggctctcggtctcctcacagcgaggtaaggtggccggcggttggtacggat

SEQ ID NO: 3084 - DNA, 80 bp, synthetic construct
  misc_feature 1..80: note = Synthetic: >AdVE4-cand-34260-34339
  source 1..80: mol_type = other DNA
gatggcaagataacgctaatcgtgttctggatcgtgtcatgatggagctgtttccggacattttcgtattttacgaagca

SEQ ID NO: 3085 - DNA, 80 bp, synthetic construct
  misc_feature 1..80: note = Synthetic: >AdVE4-cand-34340-34419
  source 1..80: mol_type = other DNA
gaacctggtccgggcactgcacaccgctcgtcggcgacggtctcggcgctttgagcgctcgatgttgaagttatagaaca

SEQ ID NO: 3086 - DNA, 80 bp, synthetic construct
  misc_feature 1..80: note = Synthetic: >AdVE4-cand-34420-34499
  source 1..80: mol_type = other DNA
gccactcccttaaaacgtgcagtatctcctcagcctcttgggtgatgaaaatcccatttgccctaatggctctaatcaca

SEQ ID NO: 3087 - DNA, 80 bp, synthetic construct
  misc_feature 1..80: note = Synthetic: >EF397003.1-cand-5600-5679
  source 1..80: mol_type = other DNA
tactagcacatgcatatcactcattgcgggatatcagatatcaggctgtacaagcagttggtaatgtctggtttagaacg

SEQ ID NO: 3088 - DNA, 80 bp, synthetic construct
  misc_feature 1..80: note = Synthetic: >EF397003.1-cand-5680-5759
  source 1..80: mol_type = other DNA
gaacaacataaattgttcattaatccaattatatcctctggactcttagaaaattttatgaaaggtttaccagcagctat

SEQ ID NO: 3089 - DNA, 80 bp, synthetic construct
  misc_feature 1..80: note = Synthetic: >EF397003.1-cand-5760-5839
  source 1..80: mol_type = other DNA
acctcctgctgcatattctttgataatgaataaagcaaaaatatctgttgacttatttatgtttaacgagttattggcgt

SEQ ID NO: 3090 - DNA, 80 bp, synthetic construct
  misc_feature 1..80: note = Synthetic: >EF397003.1-cand-5840-5919
  source 1..80: mol_type = other DNA
tgattaataaaaagaacatattgaatttagatgggattgaggaaacttctgaagggtatagtacagtcacatccatgtca

SEQ ID NO: 3091 - DNA, 80 bp, synthetic construct
  misc_feature 1..80: note = Synthetic: >EF397003.1-cand-5920-5999
  source 1..80: mol_type = other DNA
agtagacaagggtcagaagagatgagtctcatgtctgatgatgatattgatgatgctgatgactttactattgcacttga

SEQ ID NO: 3092 - DNA, 80 bp, synthetic construct
  misc_feature 1..80: note = Synthetic: >EF397003.1-cand-6000-6079
  source 1..80: mol_type = other DNA
tgatatagactttgagcagatagacctagaggaagacatacagcattttcttcaggatgaatcagcatatgtgggcgatc

SEQ ID NO: 3093 - DNA, 80 bp, synthetic construct
  misc_feature 1..80: note = Synthetic: >EF397003.1-cand-6040-6119
  source 1..80: mol_type = other DNA
cagcattttcttcaggatgaatcagcatatgtgggcgatctcttgattcagactgaagaacttgaagtaaggaaaattag

SEQ ID NO: 3094 - DNA, 80 bp, synthetic construct
  misc_feature 1..80: note = Synthetic: >EF397003.1-cand-6140-6219
  source 1..80: mol_type = other DNA
aaccagttaggttaataaaaagttgggtctccaagggcttaggtattgataaagtatataacccaatcggtattgtacta

SEQ ID NO: 3095 - DNA, 80 bp, synthetic construct
  misc_feature 1..80: note = Synthetic: >EF397003.1-cand-6220-6299
  source 1..80: mol_type = other DNA
atggctagatatatgtcaaagacttttaattttggtgctgctcctcttgccttgctaaatccttatgacttaactgaact

SEQ ID NO: 3096 - DNA, 80 bp, synthetic construct
  misc_feature 1..80: note = Synthetic: >EF397003.1-cand-6330-6409
  source 1..80: mol_type = other DNA
agttaatgacagattcattgaattggatacagaagcacaggcactcgttcgggagaagggcatccagcctgaggatatat

SEQ ID NO: 3097 - DNA, 80 bp, synthetic construct
  misc_feature 1..80: note = Synthetic: >EF397003.1-cand-6380-6459
  source 1..80: mol_type = other DNA
gggagaagggcatccagcctgaggatatattgccggattcattattttcatttcgacatgttgatgttttactcagaaga

SEQ ID NO: 3098 - DNA, 80 bp, synthetic construct
  misc_feature 1..80: note = Synthetic: >EF397003.1-cand-6470-6549
  source 1..80: mol_type = other DNA
aggatcctgtatcctcgttttactagggtatatacgtctcaattaattctacttatgttattcattgttcttttctcgga

SEQ ID NO: 3099 - DNA, 80 bp, synthetic construct
  misc_feature 1..80: note = Synthetic: >EF571895.1-cand-100-179
  source 1..80: mol_type = other DNA
caggcagaagcttaaagatgcagaaaaagcagttgatgtggacccagatgaagttaacaagagcacattacaaggtagac

SEQ ID NO: 3100 - DNA, 80 bp, synthetic construct
  misc_feature 1..80: note = Synthetic: >EF571895.1-cand-220-299
  source 1..80: mol_type = other DNA
taagagacagctggcagatttggttgcggctcaaagactggcttcaaaaccagttgatccaacagggattgagcctgatg

SEQ ID NO: 3101 - DNA, 80 bp, synthetic construct
  misc_feature 1..80: note = Synthetic: >EF571895.1-cand-320-399
  source 1..80: mol_type = other DNA
tcactgagatatgggaatgtgctggatgtcaaccctatcgatcttgaagagccaagtggccagacagcagactggaaggc

SEQ ID NO: 3102 - DNA, 80 bp, synthetic construct
  misc_feature 1..80: note = Synthetic: >EF571895.1-cand-430-509
  source 1..80: mol_type = other DNA
ccctattatactaaaggccttatatatgctgtcaacccgtggaaggcagacagtgaaagacaacaagggcactaggataa

SEQ ID NO: 3103 - DNA, 80 bp, synthetic construct
  misc_feature 1..80: note = Synthetic: >EVB79-cand-1920-1999
  source 1..80: mol_type = other DNA
tcaacaccatcaatgcctacgggatcccagtcagtgccagcaactcatcccgagacgaagcaattttcgcattccaactt

SEQ ID NO: 3104 - DNA, 80 bp, synthetic construct
  misc_feature 1..80: note = Synthetic: >EVB79-cand-1960-2039
  source 1..80: mol_type = other DNA
caactcatcccgagacgaagcaattttcgcattccaacttgacccgggtcatagtagcgtgttaagcaggactctattgg

SEQ ID NO: 3105 - DNA, 80 bp, synthetic construct
  misc_feature 1..80: note = Synthetic: >EVB79-cand-2070-2149
  source 1..80: mol_type = other DNA
ctggcagtctgaagttcacttttctattctgtggttccgctatggcaactggaaaaattttgctttcatactcaccacct

SEQ ID NO: 3106 - DNA, 80 bp, synthetic construct
  misc_feature 1..80: note = Synthetic: >EVB79-cand-2160-2239
  source 1..80: mol_type = other DNA
taccagaaaagaggaaggatgccatgttaggaacacacatcatatgggacctcgggttgcaatccagctgcgtgttatgt

SEQ ID NO: 3107 - DNA, 80 bp, synthetic construct
  misc_feature 1..80: note = Synthetic: >EVB79-cand-2240-2319
  source 1..80: mol_type = other DNA
gtgccatggatcagccaatcacactaccggttggtgcaacaagatgagtatagtgcagctggtttcatatcaggttggta

SEQ ID NO: 3108 - DNA, 80 bp, synthetic construct
  misc_feature 1..80: note = Synthetic: >EVB79-cand-2320-2399
  source 1..80: mol_type = other DNA
tcaaacgaacatcattgtgcctccaaacacccccacagattgtcgcgtgttgtgcttcgtatccgcctgcaacgacttct

SEQ ID NO: 3109 - DNA, 80 bp, synthetic construct
  misc_feature 1..80: note = Synthetic: >EVB79-cand-2400-2479
  source 1..80: mol_type = other DNA
ctgtgcggatgctgcgtgacacaccattcgcaacccaagatgctaagttacaaggagatgacaagatccaagaaacggta

SEQ ID NO: 3110 - DNA, 80 bp, synthetic construct
  misc_feature 1..80: note = Synthetic: >EVB79-cand-2480-2559
  source 1..80: mol_type = other DNA
gccaacacagaacgcagtgggccatcaaactcagaacaagtaccagcactgacagcagtggagacagggcacacctccca

SEQ ID NO: 3111 - DNA, 80 bp, synthetic construct
  misc_feature 1..80: note = Synthetic: >EVB79-cand-2560-2639
  source 1..80: mol_type = other DNA
agtgacacccagtgacaccatccaaaccaggcatgtggcaaactaccactcaagatcagagtcaagcattgagaatttcc

SEQ ID NO: 3112 - DNA, 80 bp, synthetic construct
  misc_feature 1..80: note = Synthetic: >EVB79-cand-2610-2689
  source 1..80: mol_type = other DNA
caagatcagagtcaagcattgagaatttcctgtgcaggtcagcatgtgtgtttaaagatgaatacaacgcatcaggcggt

SEQ ID NO: 3113 - DNA, 80 bp, synthetic construct
  misc_feature 1..80: note = Synthetic: >EVB79-cand-2720-2799
  source 1..80: mol_type = other DNA
tgggacatcagtgtaaaagacatggttcaaatgagaagaaagtgtgagatgttcacatacttgcgatttgacatggaggt

SEQ ID NO: 3114 - DNA, 80 bp, synthetic construct
  misc_feature 1..80: note = Synthetic: >EVB79-cand-2800-2879
  source 1..80: mol_type = other DNA
cacctttgtcataaccagcaagatgagtgatggcaccgccacaagccaaataccagtcgtgacacaccaggtaatgtata

SEQ ID NO: 3115 - DNA, 80 bp, synthetic construct
  misc_feature 1..80: note = Synthetic: >EVB79-cand-2890-2969
  source 1..80: mol_type = other DNA
aggcccaataccaaccaaagtagatgggtatgagtggcagacatcaaccaacccaagcgtcttctggacggaagggaatg

SEQ ID NO: 3116 - DNA, 80 bp, synthetic construct
  misc_feature 1..80: note = Synthetic: >EVB79-cand-2980-3059
  source 1..80: mol_type = other DNA
tatgtctatcccgttcataagcataggcaatgcatatagcatgttttatgacggatggtccaattttgagcaaacaggat

SEQ ID NO: 3117 - DNA, 80 bp, synthetic construct
  misc_feature 1..80: note = Synthetic: >EVB79-cand-3090-3169
  source 1..80: mol_type = other DNA
ggaaactgtacattagacatgtgaatgcaaatatcacaaacctgaccagcacagtccgagtgtacttcaaacccaaacac

SEQ ID NO: 3118 - DNA, 80 bp, synthetic construct
  misc_feature 1..80: note = Synthetic: >EVB79-cand-3140-3219
  source 1..80: mol_type = other DNA
acagtccgagtgtacttcaaacccaaacacgtgcgtgcttgggtcccaagaccaccaaggttatgcaagtacttatataa

SEQ ID NO: 3119 - DNA, 80 bp, synthetic construct
  misc_feature 1..80: note = Synthetic: >EVB83-cand-6740-6819
  source 1..80: mol_type = other DNA
acactactttgtgcgcggtggcatgccctcgggatgttctggcactagtatctttaattctatgatcaacaacattataa

SEQ ID NO: 3120 - DNA, 80 bp, synthetic construct
  misc_feature 1..80: note = Synthetic: >EVB83-cand-6820-6899
  source 1..80: mol_type = other DNA
tcagaacacttatgctaaaggtgtacaaaggtattgacctggatcaatttagaatgattgcgtatggtgatgacgtgatc

SEQ ID NO: 3121 - DNA, 80 bp, synthetic construct
  misc_feature 1..80: note = Synthetic: >EVB83-cand-6990-7069
  source 1..80: mol_type = other DNA
tgttttaatgaagtcacctggactaatgtcacctttctgaagaggtacttcagagcagatgagcaatatcctttcttagt

SEQ ID NO: 3122 - DNA, 80 bp, synthetic construct
  misc_feature 1..80: note = Synthetic: >EVB83-cand-7060-7139
  source 1..80: mol_type = other DNA
ctttcttagttcacccggtcatgcctatgaaggatatccacgagtccattagatggacaaaagacccaaagaacactcaa

SEQ ID NO: 3123 - DNA, 80 bp, synthetic construct
  misc_feature 1..80: note = Synthetic: >EVB83-cand-7140-7219
  source 1..80: mol_type = other DNA
gatcacgtgcgatccttgtgcctattggcttggcacaatggtgagcatgaatacgaggagttcatccagaagattcgaag

SEQ ID NO: 3124 - DNA, 80 bp, synthetic construct
  misc_feature 1..80: note = Synthetic: >EVB83-cand-7220-7299
  source 1..80: mol_type = other DNA
catcccaatagggcgttgtttgaccctgcctgcattttcaaccctgcgcaggaaatggttggattccttctaaattagag

SEQ ID NO: 3125 - DNA, 80 bp, synthetic construct
  misc_feature 1..80: note = Synthetic: >EVB83-cand-7290-7369
  source 1..80: mol_type = other DNA
taaattagagcacaatttaacacaatttaaattggcttaaccctactgcactcaccgaactagacaacggtgcagtaggg

SEQ ID NO: 3126 - DNA, 80 bp, synthetic construct
  misc_feature 1..80: note = Synthetic: >EVB84-cand-70-149
  source 1..80: mol_type = other DNA
tgcgcctgttttatccaccccttcccaaagtaacttagaagcaaaacatgtaaacggtcaataggtggctcagtaagcca

SEQ ID NO: 3127 - DNA, 80 bp, synthetic construct
  misc_feature 1..80: note = Synthetic: >EVB84-cand-300-379
  source 1..80: mol_type = other DNA
ccccagtgtagatcaggtcgatgagtcaccgcattcctcacgggcgaccgtggcggtggctgcgttggcggcctgcccat

SEQ ID NO: 3128 - DNA, 80 bp, synthetic construct
  misc_feature 1..80: note = Synthetic: >EVB84-cand-630-709
  source 1..80: mol_type = other DNA
ggccatccggtgactaacagagctattgtatacctatttgttggtttcgtaccactaaactataaagttctaaagaccct

SEQ ID NO: 3129 - DNA, 80 bp, synthetic construct
  misc_feature 1..80: note = Synthetic: >EVB84-cand-710-789
  source 1..80: mol_type = other DNA
caattttatcttagaactaaacacagcaaaatgggagctcaagtgtcaacacagaaaactggagcgcatgaaacagggct

SEQ ID NO: 3130 - DNA, 80 bp, synthetic construct
  misc_feature 1..80: note = Synthetic: >EVB84-cand-790-869
  source 1..80: mol_type = other DNA
aagagctagcggacactcagtaatccaatacaccaatataaattactacagggatgcagcttcaaactcatcaaacaggc

SEQ ID NO: 3131 - DNA, 80 bp, synthetic construct
  misc_feature 1..80: note = Synthetic: >EVB84-cand-870-949
  source 1..80: mol_type = other DNA
aagaattttcacaagaccctggcaagttcaccgagcctgtcaaagatatcatggtcaagacactgccagccctgaactca

SEQ ID NO: 3132 - DNA, 80 bp, synthetic construct
  misc_feature 1..80: note = Synthetic: >EVB84-cand-950-1029
  source 1..80: mol_type = other DNA
cccagtgcagaagagtgcggttatagtgatcgcgtgcgatcaataacactaggaaactccaccataacaactcaagagag

SEQ ID NO: 3133 - DNA, 80 bp, synthetic construct
  misc_feature 1..80: note = Synthetic: >EVB84-cand-1030-1109
  source 1..80: mol_type = other DNA
tgcaaatgtagtggtcgcatatggcgagtggcccgagtatttgaaagatgaggaagccacagccgaggaccaaccaaccc

SEQ ID NO: 3134 - DNA, 80 bp, synthetic construct
  misc_feature 1..80: note = Synthetic: >EVB84-cand-1110-1189
  source 1..80: mol_type = other DNA
aaccagatgtggccacgtgtaggttctacacactagaatcagtgcagtgggagacgggatcgcctggatggtggtggaaa

SEQ ID NO: 3135 - DNA, 80 bp, synthetic construct
  misc_feature 1..80: note = Synthetic: >FJ809772.1-cand-3270-3349
  source 1..80: mol_type = other DNA
gtggaattgcttgtttccagagttagagtgtttttttgaatttgcacaccactcagatgatgctttatttatttatggtt

SEQ ID NO: 3136 - DNA, 80 bp, synthetic construct
  misc_feature 1..80: note = Synthetic: >FJ809772.1-cand-3350-3429
  source 1..80: mol_type = other DNA
atttagaaccagaagatgatggtactgattggtttctgtatgtatcccatcaaatacaagcgggaaactatcactggcat

SEQ ID NO: 3137 - DNA, 80 bp, synthetic construct
  misc_feature 1..80: note = Synthetic: >FJ809772.1-cand-3430-3509
  source 1..80: mol_type = other DNA
gcagtaaatcaagagatgtggaaaagcatgtttaaccttcatgagcatctgctcttaatgggttcaattaaggtttcacc

SEQ ID NO: 3138 - DNA, 80 bp, synthetic construct
  misc_feature 1..80: note = Synthetic: >FJ809772.1-cand-3510-3589
  source 1..80: mol_type = other DNA
caagaaaacaactgtttcaccaactaatgcagaattcctttcaacattctttgaaggttgtgcagtatctattcctttcg

SEQ ID NO: 3139 - DNA, 80 bp, synthetic construct
  misc_feature 1..80: note = Synthetic: >FJ809772.1-cand-3590-3669
  source 1..80: mol_type = other DNA
tgaaaattttactgggttctttatcagatcttcctggacttggtttctttgatgatttggctgcagcacaaagtagatgt

SEQ ID NO: 3140 - DNA, 80 bp, synthetic construct
  misc_feature 1..80: note = Synthetic: >FJ809772.1-cand-3670-3749
  source 1..80: mol_type = other DNA
gttaaagcattggatttaggcgcgtgtcctcagcttgcacagcttgctatagtcttgtgtaccagtaaagtagaacgact

SEQ ID NO: 3141 - DNA, 80 bp, synthetic construct
  misc_feature 1..80: note = Synthetic: >FJ809772.1-cand-3750-3829
  source 1..80: mol_type = other DNA
ttatggtactgctgatggtatggtaaattcaccaactgcattcttgaaggcaaagaaatcatatgtcccaattccacttg

SEQ ID NO: 3142 - DNA, 80 bp, synthetic construct
  misc_feature 1..80: note = Synthetic: >FJ809772.1-cand-3830-3909
  source 1..80: mol_type = other DNA
gcggtgatggttctatgtcaataatggagttagcaactgcagggattgggatggctgacaaaaatatattaaaaaatgct

SEQ ID NO: 3143 - DNA, 80 bp, synthetic construct
  misc_feature 1..80: note = Synthetic: >FJ809772.1-cand-3910-3989
  source 1..80: mol_type = other DNA
tatatatcatttaagcatacacgtagagatggtgataggtatgtactgggtttatttaagtttttgatgtcattgagcga

SEQ ID NO: 3144 - DNA, 80 bp, synthetic construct
  misc_feature 1..80: note = Synthetic: >FJ809772.1-cand-4020-4099
  source 1..80: mol_type = other DNA
atttagttttgtgggcaaagttcaatggaaagtatttacaccaaagtcagaatttgagttccatgaccagttctctcaga

SEQ ID NO: 3145 - DNA, 80 bp, synthetic construct
  misc_feature 1..80: note = Synthetic: >FJ809772.1-cand-4070-4149
  source 1..80: mol_type = other DNA
aatttgagttccatgaccagttctctcagacatatttagctgcatggacaaagcagcatccagtgtatgattatataatc

SEQ ID NO: 3146 - DNA, 80 bp, synthetic construct
  misc_feature 1..80: note = Synthetic: >FJ809772.1-cand-4150-4229
  source 1..80: mol_type = other DNA
ccgcgtgggagagacaatttacttgtttatctagtaagaaaactgaatgatcctagtattgtcactgcaatgactatgca

SEQ ID NO: 3147 - DNA, 80 bp, synthetic construct
  misc_feature 1..80: note = Synthetic: >FJ809772.1-cand-4230-4309
  source 1..80: mol_type = other DNA
gtcaccgttacaattacgatttaggatgcaggcaaaacaacatatgaaagtttgtaggtttgatggtgaatgggtaacat

SEQ ID NO: 3148 - DNA, 80 bp, synthetic construct
  misc_feature 1..80: note = Synthetic: >FJ809772.1-cand-4310-4389
  source 1..80: mol_type = other DNA
ttagagaggtattggctgcagcagatagttttgcaactacataccaacctagtgagaaagatttggatctgttcaataca

SEQ ID NO: 3149 - DNA, 80 bp, synthetic construct
  misc_feature 1..80: note = Synthetic: >FJ809772.1-cand-4390-4469
  source 1..80: mol_type = other DNA
cttgtaagttgtacattctcaaaggaatatgcttggaaagatttcttgaatgaggttagatgtgaagttgtgactgcaag

SEQ ID NO: 3150 - DNA, 80 bp, synthetic construct
  misc_feature 1..80: note = Synthetic: >FJ809772.1-cand-4470-4549
  source 1..80: mol_type = other DNA
gcatgttcataggcccaaaattgcaaggacattcacagttagggaaaaggatcaggcaattcaaaatccaatcacatcca

SEQ ID NO: 3151 - DNA, 80 bp, synthetic construct
  misc_feature 1..80: note = Synthetic: >FJ809772.1-cand-5820-5899
  source 1..80: mol_type = other DNA
caatgagctattagccttgatcaatcgccataatatattaaatcttgatgggatagaagagacatcagaaggttatagta

SEQ ID NO: 3152 - DNA, 80 bp, synthetic construct
  misc_feature 1..80: note = Synthetic: >FJ809772.1-cand-5900-5979
  source 1..80: mol_type = other DNA
cagtaacttcaatgtcaagcagacaatggtcagaggaaatgagtttaatgtcagatgatgatgtggatgatatggatgat

SEQ ID NO: 3153 - DNA, 80 bp, synthetic construct
  misc_feature 1..80: note = Synthetic: >FJ809772.1-cand-5980-6059
  source 1..80: mol_type = other DNA
tttacaatagcattagatgacatcgattttgaacaaatcaatcttgatgaagatatccagcacttccttcaggatgagtc

SEQ ID NO: 3154 - DNA, 80 bp, synthetic construct
  misc_feature 1..80: note = Synthetic: >FJ809772.1-cand-6060-6139
  source 1..80: mol_type = other DNA
tgcatatgttggtgacttgttaatacaaactgaggacgttgaggtcagaaagataagaggtgttacaaaagtattagagc

SEQ ID NO: 3155 - DNA, 80 bp, synthetic construct
  misc_feature 1..80: note = Synthetic: >FJ809772.1-cand-6140-6219
  source 1..80: mol_type = other DNA
cagttcgcctaataaagagttgggtgtcaaagggtttagcaatagataaagtgtataacccaatcgggattattttgatg

SEQ ID NO: 3156 - DNA, 80 bp, synthetic construct
  misc_feature 1..80: note = Synthetic: >FJ809772.1-cand-6230-6309
  source 1..80: mol_type = other DNA
tgtcgaagacatacaattttgggactgtgccattagctctgttaaatccttatgaccttacagaattagaaagtgttgtc

SEQ ID NO: 3157 - DNA, 80 bp, synthetic construct
  misc_feature 1..80: note = Synthetic: >FJ809772.1-cand-6320-6399
  source 1..80: mol_type = other DNA
gtgaaacagttaatgataggtttattgagttggacagagaagcacagttacttgttagagagaaaggtattcaaccagaa

SEQ ID NO: 3158 - DNA, 80 bp, synthetic construct
  misc_feature 1..80: note = Synthetic: >FJ809772.1-cand-6390-6469
  source 1..80: mol_type = other DNA
tcaaccagaagatatcctgccagactctttattctcattcaggcatgtagatgtactccttagaaggttgtttcctagag

SEQ ID NO: 3159 - DNA, 80 bp, synthetic construct
  misc_feature 1..80: note = Synthetic: >FJ809772.1-cand-6470-6549
  source 1..80: mol_type = other DNA
accctacttctatcttttattaattgattgatcatctttatttattctatgtgcataatatagtgttcttttcccggagc

SEQ ID NO: 3160 - DNA, 80 bp, synthetic construct
  misc_feature 1..80: note = Synthetic: >GU997097.1-cand-0-79
  source 1..80: mol_type = other DNA
agtagactccgagatagagaagttcagaaaaatggaaaaatatagagagatacatcagagagtaagggaaatagcaccag

SEQ ID NO: 3161 - DNA, 80 bp, synthetic construct
  misc_feature 1..80: note = Synthetic: >GU997097.1-cand-80-159
  source 1..80: mol_type = other DNA
ggactggctcagcattagattgtatggacctgttagataggctgtatgctgtacgccatgatcttgttgaccaaatgata

SEQ ID NO: 3162 - DNA, 80 bp, synthetic construct
  misc_feature 1..80: note = Synthetic: >GU997097.1-cand-160-239
  source 1..80: mol_type = other DNA
aagcatgattggtcggataataaagatgtggaaacacctatagggcaagtcctactgatggcaggtgtacctaatgatat

SEQ ID NO: 3163 - DNA, 80 bp, synthetic construct
  misc_feature 1..80: note = Synthetic: >GU997097.1-cand-240-319
  source 1..80: mol_type = other DNA
aattcaagggatggaaaagaagataatcccaaacagcccaacaggacagattttaaagagcttctttaaaatgacaccag

SEQ ID NO: 3164 - DNA, 80 bp, synthetic construct
  misc_feature 1..80: note = Synthetic: >GU997097.1-cand-300-379
  source 1..80: mol_type = other DNA
cttctttaaaatgacaccagacaattttaaaattactggaaatcagattgaatttattgaggtaactgttactgctgatg

SEQ ID NO: 3165 - DNA, 80 bp, synthetic construct
  misc_feature 1..80: note = Synthetic: >GU997097.1-cand-400-479
  source 1..80: mol_type = other DNA
aagagacttaaatatgagagtggtcttcgctttacagaagaacttttagaactagaggtaaaaaaaggaaatcttcaaca

SEQ ID NO: 3166 - DNA, 80 bp, synthetic construct
  misc_feature 1..80: note = Synthetic: >GU997097.1-cand-480-559
  source 1..80: mol_type = other DNA
ggtttatagaataagttttaatgttgtagctgttaagactgatgggtctaatatctcaacacagtggccgagtagaagga

SEQ ID NO: 3167 - DNA, 80 bp, synthetic construct
  misc_feature 1..80: note = Synthetic: >HCV.A13-cand-3930-4009
  source 1..80: mol_type = other DNA
gtgagatcacctccatggtcaattcagtgatcacagaaaaattactcaagaatctaatcaaattagttagtagtctagtc

SEQ ID NO: 3168 - DNA, 80 bp, synthetic construct
  misc_feature 1..80: note = Synthetic: >HCV.A13-cand-4010-4089
  source 1..80: mol_type = other DNA
ataattgtcagaaattatgaagacaccaccacagtgctagccacattggccttactagggtgtgatgtttcaccatgggc

SEQ ID NO: 3169 - DNA, 80 bp, synthetic construct
  misc_feature 1..80: note = Synthetic: >HCV.A13-cand-4090-4169
  source 1..80: mol_type = other DNA
ctggttgaagaagaaagtttgtgacattctggaaattccctttgttatgaagcaaggagattcatggatgaagaagttca

SEQ ID NO: 3170 - DNA, 80 bp, synthetic construct
  misc_feature 1..80: note = Synthetic: >HCV.A13-cand-4170-4249
  source 1..80: mol_type = other DNA
cagaagcttgcaacgcagctaaaggattggaatggatgagcaacaaaatttccaaatttattgattggatcaaaaacaag

SEQ ID NO: 3171 - DNA, 80 bp, synthetic construct
  misc_feature 1..80: note = Synthetic: >HCV.A13-cand-4250-4329
  source 1..80: mol_type = other DNA
atcatccctgaagccagagacaaggtggagtatgtttccaaacttaagcaactgggtatgttagaaaaccaaatcaacac

SEQ ID NO: 3172 - DNA, 80 bp, synthetic construct
  misc_feature 1..80: note = Synthetic: >HCV.A13-cand-4330-4409
  source 1..80: mol_type = other DNA
aatacaccagtcatgtcccagccaagaacagcaggaaatattgtttaacaatgttaggtggttggccatacaatcaagaa

SEQ ID NO: 3173 - DNA, 80 bp, synthetic construct
  misc_feature 1..80: note = Synthetic: >HCV.A13-cand-4410-4489
  source 1..80: mol_type = other DNA
gatttgcaccactgtacgcggtagaggccaagaggatcagcaagttggaaaacaccatcaacaactacatacagttcaag

SEQ ID NO: 3174 - DNA, 80 bp, synthetic construct
  misc_feature 1..80: note = Synthetic: >HCV.A13-cand-4490-4569
  source 1..80: mol_type = other DNA
agcaaacaccgtattgaaccagtatgtgtgttgatacatggcagtcctggtacaggcaaatcagttgccactagcctgat

SEQ ID NO: 3175 - DNA, 80 bp, synthetic construct
  misc_feature 1..80: note = Synthetic: >HCV.A13-cand-4580-4659
  source 1..80: mol_type = other DNA
attgcagaaaaagaaaacacctcaacatactcactgcccccagacccagcacactttgatggttacaaacaacaaggtgt

SEQ ID NO: 3176 - DNA, 80 bp, synthetic construct
  misc_feature 1..80: note = Synthetic: >HCV.A13-cand-4660-4739
  source 1..80: mol_type = other DNA
ggtgatcatggatgacctcaatcaaaatccagatggtctggacatgaaactattttgtcagatggtctccacagtggagt

SEQ ID NO: 3177 - DNA, 80 bp, synthetic construct
  misc_feature 1..80: note = Synthetic: >HCV.A13-cand-4740-4819
  source 1..80: mol_type = other DNA
ttataccaccaatggcatccctagaggagaagggaattctgttcacatcagattatgtactggcatccaccaattccagc

SEQ ID NO: 3178 - DNA, 80 bp, synthetic construct
  misc_feature 1..80: note = Synthetic: >HCV.A13-cand-4820-4899
  source 1..80: mol_type = other DNA
acaatcacaccaccaaccgtagctcacagtgatgccttgacacggagatttgcctttgacatggagatttgcccgatgtc

SEQ ID NO: 3179 - DNA, 80 bp, synthetic construct
  misc_feature 1..80: note = Synthetic: >HCV.A13-cand-4900-4979
  source 1..80: mol_type = other DNA
acaatacacaatcaaaggtaaattaaacatggctgaagcaaccagattgtgcaaggaatgtccccaaccagccaacttca

SEQ ID NO: 3180 - DNA, 80 bp, synthetic construct
  misc_feature 1..80: note = Synthetic: >HCV.A13-cand-4980-5059
  source 1..80: mol_type = other DNA
aaaagtgttgtcccctggtgtgtggaaaagcaatccaactgatggacaagtacaccagacagagattcagtgtggatgag

SEQ ID NO: 3181 - DNA, 80 bp, synthetic construct
  misc_feature 1..80: note = Synthetic: >HCV.A13-cand-5060-5139
  source 1..80: mol_type = other DNA
atgaccaccctagtaatcaatgaaaagatcaggagagccaatattggcaattgcatggaagcactgttccaaggaccatt

SEQ ID NO: 3182 - DNA, 80 bp, synthetic construct
  misc_feature 1..80: note = Synthetic: >HCV.A13-cand-5140-5219
  source 1..80: mol_type = other DNA
acagtacaaagacctcaaaattgacatcaaaactagtccacccccagagtgcatcaatgatttgcttcaatcagtagatt

SEQ ID NO: 3183 - DNA, 80 bp, synthetic construct
  misc_feature 1..80: note = Synthetic: >HCV.A21-cand-3580-3659
  source 1..80: mol_type = other DNA
tgaatcaagaaggaagtattaccctgtcactttcaccggtccaacattccgattcatggaagcaaatgactactacccag

SEQ ID NO: 3184 - DNA, 80 bp, synthetic construct
  misc_feature 1..80: note = Synthetic: >HCV.A21-cand-3660-3739
  source 1..80: mol_type = other DNA
caagataccagtctcacatgctgataggatgtggatttgcagagcctggagactgcggtgggatactaaggtgcactcat

SEQ ID NO: 3185 - DNA, 80 bp, synthetic construct
  misc_feature 1..80: note = Synthetic: >HCV.A21-cand-3770-3849
  source 1..80: mol_type = other DNA
gaaggagtagtagcctttgctgacatcagggacctttgggtgtatgaagaggaggccatggaacagggaataacaagcta

SEQ ID NO: 3186 - DNA, 80 bp, synthetic construct
  misc_feature 1..80: note = Synthetic: >HCV.A21-cand-3830-3909
  source 1..80: mol_type = other DNA
gaacagggaataacaagctacattgaatcccttggcacagcctttggtgcagggttcacccacacaattagtgaaaaagt

SEQ ID NO: 3187 - DNA, 80 bp, synthetic construct
  misc_feature 1..80: note = Synthetic: >HCV.A21-cand-3910-3989
  source 1..80: mol_type = other DNA
gactgagttaactacaatgatcaccagtaccattacagaaaaactactgaaaaacttggtaaaaatagtatcagctttag

SEQ ID NO: 3188 - DNA, 80 bp, synthetic construct
  misc_feature 1..80: note = Synthetic: >HCV.A21-cand-3990-4069
  source 1..80: mol_type = other DNA
taattgttgtgagaaactatgaagatactaccacagtccttgcaacactagcattgcttgggtgtgacatatctccttgg

SEQ ID NO: 3189 - DNA, 80 bp, synthetic construct
  misc_feature 1..80: note = Synthetic: >HCV.A21-cand-4070-4149
  source 1..80: mol_type = other DNA
caatggttgaagaaaaaggcatgtgacctactagagattcctcacgtgatgcgccagggtgatgggtggatgaagaaatt

SEQ ID NO: 3190 - DNA, 80 bp, synthetic construct
  misc_feature 1..80: note = Synthetic: >HCV.A21-cand-4150-4229
  source 1..80: mol_type = other DNA
cacagaggcttgcaatgcagctaagggcttagaatggattagcaacaaaatctctaagtttatagattggttgaagtgca

SEQ ID NO: 3191 - DNA, 80 bp, synthetic construct
  misc_feature 1..80: note = Synthetic: >HCV.A21-cand-4240-4319
  source 1..80: mol_type = other DNA
agaagccaaagacaaggtggaatttctcaccaagctgaaacagttagacatgttagaaaatcaaattgcaaccatccacc

SEQ ID NO: 3192 - DNA, 80 bp, synthetic construct
  misc_feature 1..80: note = Synthetic: >HCV.A21-cand-4320-4399
  source 1..80: mol_type = other DNA
agtcttgccccagccaagagcaacaagagattctctttaacaatgtgagatggttagcagtccagtcccgtcggtttgca

SEQ ID NO: 3193 - DNA, 80 bp, synthetic construct
  misc_feature 1..80: note = Synthetic: >HCV.A21-cand-4400-4479
  source 1..80: mol_type = other DNA
ccgctatacgctgtggaagcacgaagaattagcaaaatggagaacacaataaacaactacatacagttcaagagcaaaca

SEQ ID NO: 3194 - DNA, 80 bp, synthetic construct
  misc_feature 1..80: note = Synthetic: >HCV.A21-cand-4480-4559
  source 1..80: mol_type = other DNA
ccgtattgaaccagtatgtatgctcatccatgggtcaccagggacaggtaaatcaatagccacctcattgataggcagag

SEQ ID NO: 3195 - DNA, 80 bp, synthetic construct
  misc_feature 1..80: note = Synthetic: >HCV.A21-cand-4560-4639
  source 1..80: mol_type = other DNA
cgatagcagagaaggagaacacgtcagtctactcaatgccacctgacccgtctcacttcgatggctacaaacagcaaggg

SEQ ID NO: 3196 - DNA, 80 bp, synthetic construct
  misc_feature 1..80: note = Synthetic: >HCV.A21-cand-4650-4729
  source 1..80: mol_type = other DNA
tggatgacttaaaccaaaaccctgatggtatggatatgaaactgttctgccaaatggtgtcaacagtggagttcatccca

SEQ ID NO: 3197 - DNA, 80 bp, synthetic construct
  misc_feature 1..80: note = Synthetic: >HCV.A21-cand-4730-4809
  source 1..80: mol_type = other DNA
ccgatggcctcattggaggagaagggtattttgtttacatctgattatgtcctggcttccaccaactcccattcaatagc

SEQ ID NO: 3198 - DNA, 80 bp, synthetic construct
  misc_feature 1..80: note = Synthetic: >HCV.A21-cand-4810-4889
  source 1..80: mol_type = other DNA
accacccacggtagctcacagtgatgccttaaccagacgatttgcatttgatgtggaagtttacacaatgtcagaacatt

SEQ ID NO: 3199 - DNA, 80 bp, synthetic construct
  misc_feature 1..80: note = Synthetic: >HCV.A24-cand-480-559
  source 1..80: mol_type = other DNA
aatcccaaccacggagcaggtgattgcaacccagcaactagcctgtcgtaacgcgcaagtctgtggcggaaccgactact

SEQ ID NO: 3200 - DNA, 80 bp, synthetic construct
  misc_feature 1..80: note = Synthetic: >HCV.A24-cand-570-649
  source 1..80: mol_type = other DNA
gtgtttccttttatttacatatatggctgcttatggtgacaatcacagattgttgtcataaagcgaattggattggccat

SEQ ID NO: 3201 - DNA, 80 bp, synthetic construct
  misc_feature 1..80: note = Synthetic: >HCV.A24-cand-650-729
  source 1..80: mol_type = other DNA
ccggtgagaattaaaacaattatttacttgtttgttggatttgttcctatacacacccatacaccttgcttgattgaagt

SEQ ID NO: 3202 - DNA, 80 bp, synthetic construct
  misc_feature 1..80: note = Synthetic: >HCV.A24-cand-730-809
  source 1..80: mol_type = other DNA
aattctgttgataagacaacactattacaatgggtgcccaagtctcgtctcaaaaagttggcgcacatgagaacactaat

SEQ ID NO: 3203 - DNA, 80 bp, synthetic construct
  misc_feature 1..80: note = Synthetic: >HCV.A24-cand-810-889
  source 1..80: mol_type = other DNA
gtggcaactggcggatccacagtcaattacactaccattaattactataaagattcagccagtaatgcagcctccaaatt

SEQ ID NO: 3204 - DNA, 80 bp, synthetic construct
  misc_feature 1..80: note = Synthetic: >HCV.A24-cand-890-969
  source 1..80: mol_type = other DNA
ggacttttcacaggacccttccaaatttactgaaccagtcaaagatattatgataaagactgctccagccctaaactctc

SEQ ID NO: 3205 - DNA, 80 bp, synthetic construct
  misc_feature 1..80: note = Synthetic: >HCV.A24-cand-970-1049
  source 1..80: mol_type = other DNA
caaatgttgaggcttgtggatacagtgatagggttaggcaaattaccctagggaattccacaattactactcaagaggca

SEQ ID NO: 3206 - DNA, 80 bp, synthetic construct
  misc_feature 1..80: note = Synthetic: >HCV.A24-cand-1050-1129
  source 1..80: mol_type = other DNA
gcgaatgcagtggttgcctacggagagtggcctagttatctggatgataaagaagccaatcccatagatgccccaaccga

SEQ ID NO: 3207 - DNA, 80 bp, synthetic construct
  misc_feature 1..80: note = Synthetic: >HCV.A24-cand-1110-1189
  source 1..80: mol_type = other DNA
cccatagatgccccaaccgagccagatgtgagtagcaatagattctacaccttggattctgtgcaatggaaaagcaccag

SEQ ID NO: 3208 - DNA, 80 bp, synthetic construct
  misc_feature 1..80: note = Synthetic: >HCV.A24-cand-1210-1289
  source 1..80: mol_type = other DNA
tgccagatgccttaaaagacatgggcatgtttggccaaaacatgtattaccactacctaggcaggtctggctacacggtg

SEQ ID NO: 3209 - DNA, 80 bp, synthetic construct
  misc_feature 1..80: note = Synthetic: >HCV.A24-cand-1330-1409
  source 1..80: mol_type = other DNA
tgggagtttttgccataccagaatatgtcatggcctgcaacactgaagccaagacttcttatgtgtcctacgtcaatgcc

SEQ ID NO: 3210 - DNA, 80 bp, synthetic construct
  misc_feature 1..80: note = Synthetic: >HCV.A24-cand-1340-1419
  source 1..80: mol_type = other DNA
tgccataccagaatatgtcatggcctgcaacactgaagccaagacttcttatgtgtcctacgtcaatgccaatccaggtg

SEQ ID NO: 3211 - DNA, 80 bp, synthetic construct
  misc_feature 1..80: note = Synthetic: >HCV.A24-cand-1430-1509
  source 1..80: mol_type = other DNA
agtgtttgacaatgcttacaaccccagtacagaagcatctgagggcaggaaattcgcagcccttgactacttattagggt

SEQ ID NO: 3212 - DNA, 80 bp, synthetic construct
  misc_feature 1..80: note = Synthetic: >HCV.A24-cand-1530-1609
  source 1..80: mol_type = other DNA
gcgtttgtgtaccctcatcagattattaatcttaggacaaacaattcggcaacccttgtgctaccctacgtgaactccct

SEQ ID NO: 3213 - DNA, 80 bp, synthetic construct
  misc_feature 1..80: note = Synthetic: >HCV.A24-cand-1650-1729
  source 1..80: mol_type = other DNA
gttattttaccattgtgcaagctagattatgcaccaaactcatccacagagattcccataacagtgactattgcaccaat

SEQ ID NO: 3214 - DNA, 80 bp, synthetic construct
  misc_feature 1..80: note = Synthetic: >HCV.A24-cand-1690-1769
  source 1..80: mol_type = other DNA
catccacagagattcccataacagtgactattgcaccaatgttcacagaattcaacgggctcaggaacattaccgtgccc

SEQ ID NO: 3215 - DNA, 80 bp, synthetic construct
  misc_feature 1..80: note = Synthetic: >HCV.A24-cand-3060-3139
  source 1..80: mol_type = other DNA
acgtacggcagtgcaccacccagaatgtctatcccctatgttggcatagcaaacgcgtactcgcacttttacgacgggtt

SEQ ID NO: 3216 - DNA, 80 bp, synthetic construct
  misc_feature 1..80: note = Synthetic: >HCV.A24-cand-3140-3219
  source 1..80: mol_type = other DNA
cgcgcgtgttcctttgaaggatgagactgttgactctggagacacatattatggactggttaccatcaatgactttggga

SEQ ID NO: 3217 - DNA, 80 bp, synthetic construct
  misc_feature 1..80: note = Synthetic: >HCV.A24-cand-3220-3299
  source 1..80: mol_type = other DNA
ccttagcagtgagggtagtgaatgaatacaatcctgcccgcattacatctaagataagagtgtatatgaagcccaagcat

SEQ ID NO: 3218 - DNA, 80 bp, synthetic construct
  misc_feature 1..80: note = Synthetic: >HCV.A24-cand-3300-3379
  source 1..80: mol_type = other DNA
gtaaggtgttggtgtcccagaccacctcgtgcagttccgtaccgaggtgagggcgtcgatttcaaacaagactcaattac

SEQ ID NO: 3219 - DNA, 80 bp, synthetic construct
  misc_feature 1..80: note = Synthetic: >HCV.A24-cand-3380-3459
  source 1..80: mol_type = other DNA
cccactgacagccgttgaaaacattaatacttttggagggtttggacaccagaacatggcggtgtatgttgcaggttaca

SEQ ID NO: 3220 - DNA, 80 bp, synthetic construct
  misc_feature 1..80: note = Synthetic: >HCV.A24-cand-3460-3539
  source 1..80: mol_type = other DNA
agatttgcaattatcatctagccacccctgaagaccacagcaatgccgtggatgtgctatggaacagagacctcataatt

SEQ ID NO: 3221 - DNA, 80 bp, synthetic construct
  misc_feature 1..80: note = Synthetic: >HCV.A24-cand-3540-3619
  source 1..80: mol_type = other DNA
gtcagcagcagagcacagggaaccgacacaattgccagatgtagctgtagagcaggagtgtattactgtaagtcaatgaa

SEQ ID NO: 3222 - DNA, 80 bp, synthetic construct
  misc_feature 1..80: note = Synthetic: >HCV.A24-cand-3620-3699
  source 1..80: mol_type = other DNA
gaaatactacccagttacagtcacagaacccaccttccagtttatggaggctaatgagtactacccagccaggtaccaga

SEQ ID NO: 3223 - DNA, 80 bp, synthetic construct
  misc_feature 1..80: note = Synthetic: >HCV.A24-cand-3700-3779
  source 1..80: mol_type = other DNA
cacacatgcttcttggtgtgggatttgcagaaccaggtgattgtggaggtatcctgagatgcaatcatggagtcatgggt

SEQ ID NO: 3224 - DNA, 80 bp, synthetic construct
  misc_feature 1..80: note = Synthetic: >HCV.A24-cand-3780-3859
  source 1..80: mol_type = other DNA
attgtaacagcaggtggtaatgggattgttgcttttgcagatatcagagacctgtgggtgtatgaggaagaagcaatgga

SEQ ID NO: 3225 - DNA, 80 bp, synthetic construct
  misc_feature 1..80: note = Synthetic: >HCV.A24-cand-3850-3929
  source 1..80: mol_type = other DNA
aagcaatggaacagggtatcaccagctacattgagtcactgggtgccgcctttgggtccgggttcaccagtcagataggg

SEQ ID NO: 3226 - DNA, 80 bp, synthetic construct
  misc_feature 1..80: note = Synthetic: >HCV.A24-cand-3940-4019
  source 1..80: mol_type = other DNA
cggagctaacaagtatggtcaccaactctattacagagaaattattgaaaacacttataaaaattgtctccaccctagtg

SEQ ID NO: 3227 - DNA, 80 bp, synthetic construct
  misc_feature 1..80: note = Synthetic: >HCV.A24-cand-4020-4099
  source 1..80: mol_type = other DNA
ataattaacagaaactatgaggacaccaccacagtattggcgacactggccctattgggatgcgactgttcaccctggca

SEQ ID NO: 3228 - DNA, 80 bp, synthetic construct
  misc_feature 1..80: note = Synthetic: >HCV.A24-cand-4100-4179
  source 1..80: mol_type = other DNA
gtggattaagaaaaagacctgtgacattctgggacttccttatgtaatgagacagggagatagctggatgaagaaattta

SEQ ID NO: 3229 - DNA, 80 bp, synthetic construct
  misc_feature 1..80: note = Synthetic: >HCV.A24-cand-4180-4259
  source 1..80: mol_type = other DNA
ctgaagcctgtaatgctgccaaagggttagaatggatctccaataagatttccaaatttattgattggttgaaagagaag

SEQ ID NO: 3230 - DNA, 80 bp, synthetic construct
  misc_feature 1..80: note = Synthetic: >HCV.A24-cand-4260-4339
  source 1..80: mol_type = other DNA
attataccagaggcaaaggataaggttgagtttgtttccaagctcaagcagctgggaatgttagaaaatcagattaatac

SEQ ID NO: 3231 - DNA, 80 bp, synthetic construct
  misc_feature 1..80: note = Synthetic: >HCV.A8-cand-1140-1219
  source 1..80: mol_type = other DNA
tctacactatgtctacacaaatgtggcaggacacatctaaagggtggtattggaagttcccagatgtactaaccaagaca

SEQ ID NO: 3232 - DNA, 80 bp, synthetic construct
  misc_feature 1..80: note = Synthetic: >HCV.A8-cand-1220-1299
  source 1..80: mol_type = other DNA
ggtgtcttcggacaaaatgctcagtaccattatttgtatagatctggattctgcatacacgttcaatgcaatgctagtaa

SEQ ID NO: 3233 - DNA, 80 bp, synthetic construct
  misc_feature 1..80: note = Synthetic: >HCV.A8-cand-1300-1379
  source 1..80: mol_type = other DNA
attccatcaaggagcactgttagtggcagcggtccctgagatggtttttggagccaacagttcagaccccaagcccaaca

SEQ ID NO: 3234 - DNA, 80 bp, synthetic construct
  misc_feature 1..80: note = Synthetic: >HCV.A8-cand-1380-1459
  source 1..80: mol_type = other DNA
cggcaaaacaccccgagtttgctaccaccatgccaggtgctaatggtgggacttttgagaatccgtatatcatggatatg

SEQ ID NO: 3235 - DNA, 80 bp, synthetic construct
  misc_feature 1..80: note = Synthetic: >HCV.A8-cand-1460-1539
  source 1..80: mol_type = other DNA
ggagtccccttgagtcaagctctcgtgttcccgcatcagtggatcaacttgcggactaacaattgtgccaccataatagt

SEQ ID NO: 3236 - DNA, 80 bp, synthetic construct
  misc_feature 1..80: note = Synthetic: >HCV.A8-cand-1540-1619
  source 1..80: mol_type = other DNA
gccatacatcaatgctgtgccatttgactcagccattaatcacaacaacttcaccttagtagtgatcccaattagcccat

SEQ ID NO: 3237 - DNA, 80 bp, synthetic construct
  misc_feature 1..80: note = Synthetic: >HCV.A8-cand-1620-1699
  source 1..80: mol_type = other DNA
tgaaatactgcactggcgctacaacggccattccaataacagtgacaatagccccactaaattcggaattttgtggattg

SEQ ID NO: 3238 - DNA, 80 bp, synthetic construct
  misc_feature 1..80: note = Synthetic: >HCV.A8-cand-1700-1779
  source 1..80: mol_type = other DNA
agacaagctacttcacagggcataccagttgagttaaagcctggaactaaccagtttctaacaacagataatgaggtctc

SEQ ID NO: 3239 - DNA, 80 bp, synthetic construct
  misc_feature 1..80: note = Synthetic: >HCV.A8-cand-1780-1859
  source 1..80: mol_type = other DNA
agtaccaatattacctgggttccagccaacaccagcaatacatataccaggtgaggtgaacaacctcctggagctctgcc

SEQ ID NO: 3240 - DNA, 80 bp, synthetic construct
  misc_feature 1..80: note = Synthetic: >HCV.A8-cand-1860-1939
  source 1..80: mol_type = other DNA
aagtggagtcaatattggaagtcaacaatgtgactgggcaagaagggataaatcgacttctgatcccagtgtctacacag

SEQ ID NO: 3241 - DNA, 80 bp, synthetic construct
  misc_feature 1..80: note = Synthetic: >HCV.A8-cand-1940-2019
  source 1..80: mol_type = other DNA
agtgataaggacactttgtgtgcatcactccgagtcgatccaggtagggatggaccatggcaatccactttggttgggca

SEQ ID NO: 3242 - DNA, 80 bp, synthetic construct
  misc_feature 1..80: note = Synthetic: >HCV.A8-cand-2020-2099
  source 1..80: mol_type = other DNA
aatatgtagatattacactcagtggtcaggctcattggagatcacattcatgttcactggctcatttatggcaaccggga

SEQ ID NO: 3243 - DNA, 80 bp, synthetic construct
  misc_feature 1..80: note = Synthetic: >HCV.A8-cand-2100-2179
  source 1..80: mol_type = other DNA
aaatgctgatagcttactctccacctggaagtgcacaaccaaccacaagagacctagctatgcttggcacgcatgttgtg

SEQ ID NO: 3244 - DNA, 80 bp, synthetic construct
  misc_feature 1..80: note = Synthetic: >HCV.A8-cand-2180-2259
  source 1..80: mol_type = other DNA
tgggatttcgggttacaatcatccattacacttgtagtcccatggataagtaacacacacttcagaacaggcaaagttgg

SEQ ID NO: 3245 - DNA, 80 bp, synthetic construct
  misc_feature 1..80: note = Synthetic: >HCV.A8-cand-2260-2339
  source 1..80: mol_type = other DNA
tggatactttgattactatgcatcaggaatagtaactatttggtaccagacaaatttcgtcgttcctcctgacactccca

SEQ ID NO: 3246 - DNA, 80 bp, synthetic construct
  misc_feature 1..80: note = Synthetic: >HCV.A8-cand-2340-2419
  source 1..80: mol_type = other DNA
gccaagcccatataatagcattgggtgctgcacagaagaattttaccctcaagctgtgcaaggatactgatgaggttaca

SEQ ID NO: 3247 - DNA, 80 bp, synthetic construct
  misc_feature 1..80: note = Synthetic: >HCV.A8-cand-3700-3779
  source 1..80: mol_type = other DNA
tggcaacgggcttgtcggctttgcagatgttagggacctcctgtggctggatgaagaggcaatggagcaaggagtgtctg

SEQ ID NO: 3248 - DNA, 80 bp, synthetic construct
  misc_feature 1..80: note = Synthetic: >HCV.A8-cand-3780-3859
  source 1..80: mol_type = other DNA
actacatcaaaggactcggtgatgcatttggaactggcttcaccgatgcagtctccagagaagtggaggctcttaaaaac

SEQ ID NO: 3249 - DNA, 80 bp, synthetic construct
  misc_feature 1..80: note = Synthetic: >HCV.A8-cand-3860-3939
  source 1..80: mol_type = other DNA
cacctcattggttccgaaggagctgttgagaaaatcctaaagaatctgatcaagttaatctctgctctggtcattgtgat

SEQ ID NO: 3250 - DNA, 80 bp, synthetic construct
  misc_feature 1..80: note = Synthetic: >HCV.A8-cand-3940-4019
  source 1..80: mol_type = other DNA
caggagtgattatgacatggtcactctcacagcaacactagccctaattggctgtcacggcagtccctgggcctggatca

SEQ ID NO: 3251 - DNA, 80 bp, synthetic construct
  misc_feature 1..80: note = Synthetic: >HCV.A8-cand-4020-4099
  source 1..80: mol_type = other DNA
aagcaaagacagcatccatcctaggcatccctatcgctcaaaaacagagcgcctcctggcttaaaaagtttaatgatatg

SEQ ID NO: 3252 - DNA, 80 bp, synthetic construct
  misc_feature 1..80: note = Synthetic: >HCV.A8-cand-4180-4259
  source 1..80: mol_type = other DNA
agcagctaaggagaaggttgagtttctaaataatctgaaacaattgccactactggagaatcaaatctcaaacctcgaac

SEQ ID NO: 3253 - DNA, 80 bp, synthetic construct
  misc_feature 1..80: note = Synthetic: >HCV.A8-cand-4260-4339
  source 1..80: mol_type = other DNA
aatctgcagcctcacaagaagatcttgaggctatgtttgggaatgtgtcttacctagctcacttctgtcgcaaattccaa

SEQ ID NO: 3254 - DNA, 80 bp, synthetic construct
  misc_feature 1..80: note = Synthetic: >HCV.A8-cand-4340-4419
  source 1..80: mol_type = other DNA
ccactatacgctacagaagccaaaagggtctacgcactagagaagagaatgaacaattacatgcagttcaagagcaaaca

SEQ ID NO: 3255 - DNA, 80 bp, synthetic construct
  misc_feature 1..80: note = Synthetic: >HCV.A8-cand-4420-4499
  source 1..80: mol_type = other DNA
ccgtattgaacctgtatgtctcatcatcagaggctccccaggcactggaaaatccttggcaactggcatcatcgcccgag

SEQ ID NO: 3256 - DNA, 80 bp, synthetic construct
  misc_feature 1..80: note = Synthetic: >HCV.A8-cand-4500-4579
  source 1..80: mol_type = other DNA
cgatagctgacaagtatcattctagtgtgtattcgctaccaccagacccagatcactttgatggttacaaacagcaagtg

SEQ ID NO: 3257 - DNA, 80 bp, synthetic construct
  misc_feature 1..80: note = Synthetic: >HCV.A8-cand-4580-4659
  source 1..80: mol_type = other DNA
gtcacagtcatggatgacttatgccaaaaccctgacggtaaggacatgtcactgttctgtcagatggtgtccactgtgga

SEQ ID NO: 3258 - DNA, 80 bp, synthetic construct
  misc_feature 1..80: note = Synthetic: >HCV.A8-cand-4660-4739
  source 1..80: mol_type = other DNA
tttcattccaccaatggcttccttagaggagaaaggagtttctttcacatctaaatttgtcattgcatccactaatgcta

SEQ ID NO: 3259 - DNA, 80 bp, synthetic construct
  misc_feature 1..80: note = Synthetic: >HCV.A8-cand-4740-4819
  source 1..80: mol_type = other DNA
gtaatatcatagtgccaacagtatctgattcagacgctattcgccgcaggttctatatggactgtgacattgaagtgaca

SEQ ID NO: 3260 - DNA, 80 bp, synthetic construct
  misc_feature 1..80: note = Synthetic: >HCV.A8-cand-4820-4899
  source 1..80: mol_type = other DNA
gactcatacaaaacagatttgggcagattggatgccgggcgggctgccaaattatgttctgagaacaacacagcaaattt

SEQ ID NO: 3261 - DNA, 80 bp, synthetic construct
  misc_feature 1..80: note = Synthetic: >HCV.A8-cand-4920-4999
  source 1..80: mol_type = other DNA
tgtgtggaaaggctatccaactaagagacaggaaatccaaggtcagatacagcgtggatacagtggtctctgagctcata

SEQ ID NO: 3262 - DNA, 80 bp, synthetic construct
  misc_feature 1..80: note = Synthetic: >HCV.A8-cand-5000-5079
  source 1..80: mol_type = other DNA
agagagtacaacaatagatctgctattggtaacacaattgaagccttgttccagggcccacccaagtttaggcccataag

SEQ ID NO: 3263 - DNA, 80 bp, synthetic construct
  misc_feature 1..80: note = Synthetic: >HQ537689.1-cand-2590-2669
  source 1..80: mol_type = other DNA
catagtagattaacagtatttgaatttaaaaatccattcccatttgatgaaaatggtaacccagtgtatgcaataaatga

SEQ ID NO: 3264 - DNA, 80 bp, synthetic construct
  misc_feature 1..80: note = Synthetic: >HQ537689.1-cand-2750-2829
  source 1..80: mol_type = other DNA
gaaatatcagcacgtttaaatgcagtgcaggagaaaatactagatctttacgaagctgataaaactgatttaccatcaca

SEQ ID NO: 3265 - DNA, 80 bp, synthetic construct
  misc_feature 1..80: note = Synthetic: >HQ537689.1-cand-2830-2909
  source 1..80: mol_type = other DNA
aattgaacattggaaactgatacgcatggagtgtgctttattgtatacagccaaacaaatgggattttcacatttatgcc

SEQ ID NO: 3266 - DNA, 80 bp, synthetic construct
  misc_feature 1..80: note = Synthetic: >HQ537689.1-cand-2910-2989
  source 1..80: mol_type = other DNA
accaggtggtgccttctttgttagcatcaaagaccaaagcatttcaagtaattgaactacaaatggcattagagacatta

SEQ ID NO: 3267 - DNA, 80 bp, synthetic construct
  misc_feature 1..80: note = Synthetic: >HQ537689.1-cand-2990-3069
  source 1..80: mol_type = other DNA
agtaaatcacagtatagtacaagccaatggacattgcaacaaacaagcttagaggtgtggctttgtgaaccaccaaaatg

SEQ ID NO: 3268 - DNA, 80 bp, synthetic construct
  misc_feature 1..80: note = Synthetic: >HQ537689.1-cand-3060-3139
  source 1..80: mol_type = other DNA
caccaaaatgttttaaaaaacaaggagaaacagtaactgtgcaatatgacaatgacaaaaaaaatacaatggattataca

SEQ ID NO: 3269 - DNA, 80 bp, synthetic construct
  misc_feature 1..80: note = Synthetic: >HQ537689.1-cand-3160-3239
  source 1..80: mol_type = other DNA
tatagaggaagatacatgtactatggttacagggaaagtagattatataggtatgtattatatacataactgtgaaaagg

SEQ ID NO: 3270 - DNA, 80 bp, synthetic construct
  misc_feature 1..80: note = Synthetic: >HQ537689.1-cand-3250-3329
  source 1..80: mol_type = other DNA
atattttaaagaggatgctgcaaagtattctaaaacacaaatgtgggaagtacatgtgggtggtcaggtaattgtttgtc

SEQ ID NO: 3271 - DNA, 80 bp, synthetic construct
  misc_feature 1..80: note = Synthetic: >HQ537689.1-cand-3330-3409
  source 1..80: mol_type = other DNA
ctacgtctatatctagcaaccaaatatccactactgaaactgctgacatacagacagacaacgataaccgaccaccacaa

SEQ ID NO: 3272 - DNA, 80 bp, synthetic construct
  misc_feature 1..80: note = Synthetic: >HQ537689.1-cand-3440-3519
  source 1..80: mol_type = other DNA
accacagacaccgcccagccccttacaaagctgttctgtgcagaccccgccttggacaatagaacagcacgtactgcaac

SEQ ID NO: 3273 - DNA, 80 bp, synthetic construct
  misc_feature 1..80: note = Synthetic: >HQ537689.1-cand-3520-3599
  source 1..80: mol_type = other DNA
taactgcacaaacaagcagcggactgtgtgtagttctaacgttgcacctatagtgcatttaaaaggtgaatcaaatagtt

SEQ ID NO: 3274 - DNA, 80 bp, synthetic construct
  misc_feature 1..80: note = Synthetic: >HQ537689.1-cand-3600-3679
  source 1..80: mol_type = other DNA
taaaatgtttaagatacagattaaaaccttataaagagttgtatagttctatgtcatccacctggcattggaccagtgac

SEQ ID NO: 3275 - DNA, 80 bp, synthetic construct
  misc_feature 1..80: note = Synthetic: >HQ537689.1-cand-3680-3759
  source 1..80: mol_type = other DNA
aacaaaaatagtaaaaatggaattgtaactgtaacatttgtaactgaacagcaacaacaaatgtttttaggtactgtaaa

SEQ ID NO: 3276 - DNA, 80 bp, synthetic construct
  misc_feature 1..80: note = Synthetic: >HQ537689.1-cand-3760-3839
  source 1..80: mol_type = other DNA
aataccacctactgtgcaaataagtactggatttatgacattataagtgtacatcacaagccaatatgtgctgctaattg

SEQ ID NO: 3277 - DNA, 80 bp, synthetic construct
  misc_feature 1..80: note = Synthetic: >HQ537689.1-cand-3840-3919
  source 1..80: mol_type = other DNA
tatataaccatgatatttgtttttgtattatgttttatattgtttttatgcttatccttattattacgtcctttaatact

SEQ ID NO: 3278 - DNA, 80 bp, synthetic construct
  misc_feature 1..80: note = Synthetic: >HQ537689.1-cand-3920-3999
  source 1..80: mol_type = other DNA
ttccatttctacctatgcttggttgctggtgttggtattgctgctttgggtgtttgtgggatctcctttaaaaatttttt

SEQ ID NO: 3279 - DNA, 80 bp, synthetic construct
  misc_feature 1..80: note = Synthetic: >KF436887.1-cand-3680-3759
  source 1..80: mol_type = other DNA
aacaggcattgttacaattgtgtttgacagtgcacatcaacgggaaacatttataaaaaccattaaagtacccccaagtg

SEQ ID NO: 3280 - DNA, 80 bp, synthetic construct
  misc_feature 1..80: note = Synthetic: >KF436887.1-cand-3760-3839
  source 1..80: mol_type = other DNA
taacactgtcattgggaattatgacactgtaacaagtgtaatatatgtattgtacatatatactgtcacaagccaatatg

SEQ ID NO: 3281 - DNA, 80 bp, synthetic construct
  misc_feature 1..80: note = Synthetic: >KF436887.1-cand-3840-3919
  source 1..80: mol_type = other DNA
tgctgctaataattgtatatacatattgtaaccattgcagtgtttattattttgctatttgtgctttgcgtgtgtgtgtg

SEQ ID NO: 3282 - DNA, 80 bp, synthetic construct
  misc_feature 1..80: note = Synthetic: >KF436887.1-cand-3920-3999
  source 1..80: mol_type = other DNA
tcttgtgttgtgttgtgtgttgccgctactgctgtcccaatacgtgtttgcagctgccttattattaattttatgttttt

SEQ ID NO: 3283 - DNA, 80 bp, synthetic construct
  misc_feature 1..80: note = Synthetic: >KF436887.1-cand-4000-4079
  source 1..80: mol_type = other DNA
ggtttgttgttgcaacatcccgattaactacattttttgtatatttgatttttttttacttaccttgtttacttttacat

SEQ ID NO: 3284 - DNA, 80 bp, synthetic construct
  misc_feature 1..80: note = Synthetic: >KF436887.1-cand-4080-4159
  source 1..80: mol_type = other DNA
atatatacatttttacttttgcaataaacttgtcctatttttgtgattaaatatggtggctacacgtgcacggcgtcgga

SEQ ID NO: 3285 - DNA, 80 bp, synthetic construct
  misc_feature 1..80: note = Synthetic: >KF436887.1-cand-4160-4239
  source 1..80: mol_type = other DNA
agcgagcatctgtaacacaattatattctacatgcaaagctgctggtacatgtcctcctgatgttgttaataaggttgaa

SEQ ID NO: 3286 - DNA, 80 bp, synthetic construct
  misc_feature 1..80: note = Synthetic: >KF436887.1-cand-4220-4299
  source 1..80: mol_type = other DNA
atgttgttaataaggttgaaggtactacattggccgataaaatattacagtggagtgggttgggtatatttttgggtggc

SEQ ID NO: 3287 - DNA, 80 bp, synthetic construct
  misc_feature 1..80: note = Synthetic: >KF436887.1-cand-4250-4329
  source 1..80: mol_type = other DNA
tggccgataaaatattacagtggagtgggttgggtatatttttgggtggcctaggtattggtactgggtctggctctggg

SEQ ID NO: 3288 - DNA, 80 bp, synthetic construct
  misc_feature 1..80: note = Synthetic: >KF436887.1-cand-4380-4459
  source 1..80: mol_type = other DNA
ggatattgctcctgcaaggccacctattataattgaacctatagcacctactgaaccttctatagtaaatttggttgaag

SEQ ID NO: 3289 - DNA, 80 bp, synthetic construct
  misc_feature 1..80: note = Synthetic: >KF436887.1-cand-4460-4539
  source 1..80: mol_type = other DNA
actctagtattattcagtctgggtctcctatacctacctttactggtactgatggctttgaaattacttcatcttccaca

SEQ ID NO: 3290 - DNA, 80 bp, synthetic construct
  misc_feature 1..80: note = Synthetic: >KF436887.1-cand-4540-4619
  source 1..80: mol_type = other DNA
acaacccctgctgtgttggacataactccatctgctggtactgtacatgtttctagtactaacattgaaaatcctttata

SEQ ID NO: 3291 - DNA, 80 bp, synthetic construct
  misc_feature 1..80: note = Synthetic: >KF436887.1-cand-4620-4699
  source 1..80: mol_type = other DNA
tattgaacctccatccattgaggctccacaatctggagaagtgtcaggacatatatttactagtacacttacttctggta

SEQ ID NO: 3292 - DNA, 80 bp, synthetic construct
  misc_feature 1..80: note = Synthetic: >KF436887.1-cand-4700-4779
  source 1..80: mol_type = other DNA
ctcatgggtatgaagaaatacctatggaagtgtttgcatccaatgtcagtactggtactgaacctattagcagcacacct

SEQ ID NO: 3293 - DNA, 80 bp, synthetic construct
  misc_feature 1..80: note = Synthetic: >KF436887.1-cand-4790-4869
  source 1..80: mol_type = other DNA
ttagtcgcatagctgctccccgcttgtatagtaagtcttacacacaagttaaagttacaaatcctgattttattagtaag

SEQ ID NO: 3294 - DNA, 80 bp, synthetic construct
  misc_feature 1..80: note = Synthetic: >KF436887.1-cand-4870-4949
  source 1..80: mol_type = other DNA
ccatccacatttgttacatttaataatcctgcttttgagcctattgacacatccataacttttgaggaacctgacgctgt

SEQ ID NO: 3295 - DNA, 80 bp, synthetic construct
  misc_feature 1..80: note = Synthetic: >KF436887.1-cand-6230-6309
  source 1..80: mol_type = other DNA
tctgcagacacatatggtaattccatgttttttcatttacgcagggagcaaatttttgctaggcactattataataaact

SEQ ID NO: 3296 - DNA, 80 bp, synthetic construct
  misc_feature 1..80: note = Synthetic: >KF436887.1-cand-6330-6409
  source 1..80: mol_type = other DNA
ttcctaacgattattatattaagggtagtggtaatggccgtgaccctatagaaagttatatatactctgctactcccagt

SEQ ID NO: 3297 - DNA, 80 bp, synthetic construct
  misc_feature 1..80: note = Synthetic: >KF436887.1-cand-6390-6469
  source 1..80: mol_type = other DNA
tatactctgctactcccagtgggtctatgataacatctgattctcaaatttttaataagccttattggcttcaccgtgcg

SEQ ID NO: 3298 - DNA, 80 bp, synthetic construct
  misc_feature 1..80: note = Synthetic: >KF436887.1-cand-6470-6549
  source 1..80: mol_type = other DNA
cagggtcacaataatggcatttgctggaacaatcagctttttattacctgtgttgatactaccagaagtacaaatttaac

SEQ ID NO: 3299 - DNA, 80 bp, synthetic construct
  misc_feature 1..80: note = Synthetic: >KF436887.1-cand-6540-6619
  source 1..80: mol_type = other DNA
caaatttaactattagtactgccactgctgcagtttccccaacatttactccaagtaactttaagcaatatattaggcat

SEQ ID NO: 3300 - DNA, 80 bp, synthetic construct
  misc_feature 1..80: note = Synthetic: >KF436887.1-cand-6650-6729
  source 1..80: mol_type = other DNA
cagttatgtaaaattactttaactacagaggtaatggcttatttacacacaatggaccctaccatccttgaacagtggaa

SEQ ID NO: 3301 - DNA, 80 bp, synthetic construct
  misc_feature 1..80: note = Synthetic: >KF436887.1-cand-6730-6809
  source 1..80: mol_type = other DNA
ttttggattaacattacctccgtctgctagtttggaggatgcatataggtttgttcgaaatgcagccaccagctgtcaaa

SEQ ID NO: 3302 - DNA, 80 bp, synthetic construct
  misc_feature 1..80: note = Synthetic: >KF436887.1-cand-6810-6889
  source 1..80: mol_type = other DNA
aggacacccctccacaggctaagccagatcctttggccaaatataaattttgggatgttgatttaaaggaacggttttcg

SEQ ID NO: 3303 - DNA, 80 bp, synthetic construct
  misc_feature 1..80: note = Synthetic: >KF436887.1-cand-6890-6969
  source 1..80: mol_type = other DNA
ttagatttagaccaatttgcattgggtcgcaagtttttgttgcaggttggcgtacaacgcaagcccaaaccaggccttaa

SEQ ID NO: 3304 - DNA, 80 bp, synthetic construct
  misc_feature 1..80: note = Synthetic: >KF436887.1-cand-6970-7049
  source 1..80: mol_type = other DNA
acgcccggcttcatcggcctcctcttcctcttcctcttcagccaaacgtaaacgtgttaaaaagtaatgtatgttagttt

SEQ ID NO: 3305 - DNA, 80 bp, synthetic construct
  misc_feature 1..80: note = Synthetic: >KF436887.1-cand-7050-7129
  source 1..80: mol_type = other DNA
ttgtatgcttgtgcacaatgttgtatgcctgtatgtatatgtttgtgtatgtactgtatgtgttttttgtgtgtgtgtgt

SEQ ID NO: 3306 - DNA, 80 bp, synthetic construct
  misc_feature 1..80: note = Synthetic: >KF436887.1-cand-7120-7199
  source 1..80: mol_type = other DNA
gtgtgtgtgtgttgttgttcctgtatgtatgagttatgtatgtttattattaataaactatgtggtgtgtgtgtgtgtgt

SEQ ID NO: 3307 - DNA, 80 bp, synthetic construct
  misc_feature 1..80: note = Synthetic: >KF436887.1-cand-7190-7269
  source 1..80: mol_type = other DNA
gtgtgtgtgtttttgcatgactgcatttgtatgacatgtacgggtgtatgtgggtattacattatccccgtaggtcaagg

SEQ ID NO: 3308 - DNA, 80 bp, synthetic construct
  misc_feature 1..80: note = Synthetic: >KF436887.1-cand-7270-7349
  source 1..80: mol_type = other DNA
gtggtgtttcggtggcgtccctattgccctacccatttttttgcagcacaacagtttatatttgtgctatttagttatac

SEQ ID NO: 3309 - DNA, 80 bp, synthetic construct
  misc_feature 1..80: note = Synthetic: >KF436887.1-cand-7350-7429
  source 1..80: mol_type = other DNA
tttgtagcttccattttgttacagctgcagccattttgagtgcaaccgatttcggttgctgtacttttagtatatttgcc

SEQ ID NO: 3310 - DNA, 80 bp, synthetic construct
  misc_feature 1..80: note = Synthetic: >KF436887.1-cand-7430-7509
  source 1..80: mol_type = other DNA
aagttttaaaccacaactgccagttgtttttggcatgaaccatcagttttttataacatagtgcatacatccgcccgccc

SEQ ID NO: 3311 - DNA, 80 bp, synthetic construct
  misc_feature 1..80: note = Synthetic: >NC_001357.1-cand-60-139
  source 1..80: mol_type = other DNA
acggtgtatataaaagatgtgagaaacacaccacaatactatggcgcgctttgaggatccaacacggcgaccctacaagc

SEQ ID NO: 3312 - DNA, 80 bp, synthetic construct
  misc_feature 1..80: note = Synthetic: >NC_001357.1-cand-140-219
  source 1..80: mol_type = other DNA
tacctgatctgtgcacggaactgaacacttcactgcaagacatagaaataacctgtgtatattgcaagacagtattggaa

SEQ ID NO: 3313 - DNA, 80 bp, synthetic construct
  misc_feature 1..80: note = Synthetic: >NC_001357.1-cand-220-299
  source 1..80: mol_type = other DNA
cttacagaggtatttgaatttgcatttaaagatttatttgtggtgtatagagacagtataccccatgctgcatgccataa

SEQ ID NO: 3314 - DNA, 80 bp, synthetic construct
  misc_feature 1..80: note = Synthetic: >NC_001357.1-cand-300-379
  source 1..80: mol_type = other DNA
atgtatagatttttattctagaattagagaattaagacattattcagactctgtgtatggagacacattggaaaaactaa

SEQ ID NO: 3315 - DNA, 80 bp, synthetic construct
  misc_feature 1..80: note = Synthetic: >NC_001357.1-cand-380-459
  source 1..80: mol_type = other DNA
ctaacactgggttatacaatttattaataaggtgcctgcggtgccagaaaccgttgaatccagcagaaaaacttagacac

SEQ ID NO: 3316 - DNA, 80 bp, synthetic construct
  misc_feature 1..80: note = Synthetic: >NC_001357.1-cand-460-539
  source 1..80: mol_type = other DNA
cttaatgaaaaacgacgatttcacaacatagctgggcactatagaggccagtgccattcgtgctgcaaccgagcacgaca

SEQ ID NO: 3317 - DNA, 80 bp, synthetic construct
  misc_feature 1..80: note = Synthetic: >NC_001357.1-cand-540-619
  source 1..80: mol_type = other DNA
ggaacgactccaacgacgcagagaaacacaagtataatattaagtatgcatggacctaaggcaacattgcaagacattgt

SEQ ID NO: 3318 - DNA, 80 bp, synthetic construct
  misc_feature 1..80: note = Synthetic: >NC_001357.1-cand-620-699
  source 1..80: mol_type = other DNA
attgcatttagagccccaaaatgaaattccggttgaccttctatgtcacgagcaattaagcgactcagaggaagaaaacg

SEQ ID NO: 3319 - DNA, 80 bp, synthetic construct
  misc_feature 1..80: note = Synthetic: >NC_001357.1-cand-700-779
  source 1..80: mol_type = other DNA
atgaaatagatggagttaatcatcaacatttaccagcccgacgagccgaaccacaacgtcacacaatgttgtgtatgtgt

SEQ ID NO: 3320 - DNA, 80 bp, synthetic construct
  misc_feature 1..80: note = Synthetic: >NC_001357.1-cand-780-859
  source 1..80: mol_type = other DNA
tgtaagtgtgaagccagaattgagctagtagtagaaagctcagcagacgaccttcgagcattccagcagctgtttctgaa

SEQ ID NO: 3321 - DNA, 80 bp, synthetic construct
  misc_feature 1..80: note = Synthetic: >NC_001357.1-cand-850-929
  source 1..80: mol_type = other DNA
tgtttctgaacaccctgtcctttgtgtgtccgtggtgtgcatcccagcagtaagcaacaatggctgatccagaaggtaca

SEQ ID NO: 3322 - DNA, 80 bp, synthetic construct
  misc_feature 1..80: note = Synthetic: >NC_001357.1-cand-940-1019
  source 1..80: mol_type = other DNA
gcacgggttgtaacggctggttttatgtacaagctattgtagacaaaaaaacaggagatgtaatatcagatgacgaggac

SEQ ID NO: 3323 - DNA, 80 bp, synthetic construct
  misc_feature 1..80: note = Synthetic: >NC_001357.1-cand-1020-1099
  source 1..80: mol_type = other DNA
gaaaatgcaacagacacagggtcggatatggtagattttattgatacacaaggaacattttgtgaacaggcagagctaga

SEQ ID NO: 3324 - DNA, 80 bp, synthetic construct
  misc_feature 1..80: note = Synthetic: >NC_001357.1-cand-1100-1179
  source 1..80: mol_type = other DNA
gacagcacaggcattgttccatgcgcaggaggtccacaatgatgcacaagtgttgcatgttttaaaacgaaagtttgcag

SEQ ID NO: 3325 - DNA, 80 bp, synthetic construct
  misc_feature 1..80: note = Synthetic: >NC_001357.1-cand-1210-1289
  source 1..80: mol_type = other DNA
agcggctggaggtggatacagagttaagtccacggttacaagaaatatctttaaatagtgggcagaaaaaggcaaaaagg

SEQ ID NO: 3326 - DNA, 80 bp, synthetic construct
  misc_feature 1..80: note = Synthetic: >NC_001357.1-cand-1340-1419
  source 1..80: mol_type = other DNA
aacacagattcaggtaactacaaatggcgaacatggcggcaatgtatgtagtggcggcagtacggaggctatagacaacg

SEQ ID NO: 3327 - DNA, 80 bp, synthetic construct
  misc_feature 1..80: note = Synthetic: >NC_001357.1-cand-6700-6779
  source 1..80: mol_type = other DNA
agcagacatgttgaggaatatgatttgcagtttatttttcagttgtgtactattactttaactgcagatgttatgtccta

SEQ ID NO: 3328 - DNA, 80 bp, synthetic construct
  misc_feature 1..80: note = Synthetic: >NC_001357.1-cand-6780-6859
  source 1..80: mol_type = other DNA
tattcatagtatgaatagcagtattttagaggattggaactttggtgttcccccccccccaactactagtttggtggata

SEQ ID NO: 3329 - DNA, 80 bp, synthetic construct
  misc_feature 1..80: note = Synthetic: >NC_001357.1-cand-6860-6939
  source 1..80: mol_type = other DNA
catatcgttttgtacaatctgttgctattacctgtcaaaaggatgctgcaccggctgaaaataaggatccctatgataag

SEQ ID NO: 3330 - DNA, 80 bp, synthetic construct
  misc_feature 1..80: note = Synthetic: >NC_001357.1-cand-6950-7029
  source 1..80: mol_type = other DNA
ggaatgtggatttaaaggaaaagttttctttagacttagatcaatatccccttggacgtaaatttttggttcaggctgga

SEQ ID NO: 3331 - DNA, 80 bp, synthetic construct
  misc_feature 1..80: note = Synthetic: >NC_001357.1-cand-7030-7109
  source 1..80: mol_type = other DNA
ttgcgtcgcaagcccaccataggccctcgcaaacgttctgctccatctgccactacgtcttctaaacctgccaagcgtgt

SEQ ID NO: 3332 - DNA, 80 bp, synthetic construct
  misc_feature 1..80: note = Synthetic: >NC_001357.1-cand-7110-7189
  source 1..80: mol_type = other DNA
gcgtgtacgtgccaggaagtaatatgtgtgtgtgtatatatatatacatctattgttgtgtttgtatgtcctgtgtttgt

SEQ ID NO: 3333 - DNA, 80 bp, synthetic construct
  misc_feature 1..80: note = Synthetic: >NC_001357.1-cand-7190-7269
  source 1..80: mol_type = other DNA
gtttgttgtatgattgcattgtatggtatgtatggttgttgttgtatgttgtatgttactatatttgttggtatgtggca

SEQ ID NO: 3334 - DNA, 80 bp, synthetic construct
  misc_feature 1..80: note = Synthetic: >NC_001357.1-cand-7270-7349
  source 1..80: mol_type = other DNA
ttaaataaaatatgttttgtggttctgtgtgttatgtggttgcgccctagtgagtaacaactgtatttgtgtttgtggta

SEQ ID NO: 3335 - DNA, 80 bp, synthetic construct
  misc_feature 1..80: note = Synthetic: >NC_001357.1-cand-7350-7429
  source 1..80: mol_type = other DNA
tgggtgttgcttgttgggctatatattgtcctgtatttcaagttataaaactgcacaccttacagcatccattttatcct

SEQ ID NO: 3336 - DNA, 80 bp, synthetic construct
  misc_feature 1..80: note = Synthetic: >NC_001357.1-cand-7430-7509
  source 1..80: mol_type = other DNA
acaatcctccattttgctgtgcaaccgatttcggttgcctttggcttatgtctgtggttttctgcacaatacagtacgct

SEQ ID NO: 3337 - DNA, 80 bp, synthetic construct
  misc_feature 1..80: note = Synthetic: >NC_001357.1-cand-7510-7589
  source 1..80: mol_type = other DNA
ggcactattgcaaactttaatcttttgggcactgctcctacatattttgaacaattggcgcgcctctttggcgcatataa

SEQ ID NO: 3338 - DNA, 80 bp, synthetic construct
  misc_feature 1..80: note = Synthetic: >NC_001357.1-cand-7600-7679
  source 1..80: mol_type = other DNA
gtattagtcattttcctgtccaggtgcgctacaacaattgcttgcataactatatccactccctaagtaataaaactgct

SEQ ID NO: 3339 - DNA, 80 bp, synthetic construct
  misc_feature 1..80: note = Synthetic: >NC_001357.1-cand-7680-7759
  source 1..80: mol_type = other DNA
tttaggcacatattttagtttgtttttacttaagctaattgcatacttggcttgtacaactactttcatgtccaacattc

SEQ ID NO: 3340 - DNA, 80 bp, synthetic construct
  misc_feature 1..80: note = Synthetic: >NC_001357.1-cand-7760-7839
  source 1..80: mol_type = other DNA
tgtctacccttaacatgaactataatatgactaagctgtgcatacatagtttatgcaaccgaaataggttgggcagcaca

SEQ ID NO: 3341 - DNA, 80 bp, synthetic construct
  misc_feature 1..80: note = Synthetic: >NC_001430.1-cand-50-129
  source 1..80: mol_type = other DNA
tccggtaccccggtacccttgtacgcctgttttatactccctttcccaagtaactttagaagaaataaactaatgttcaa

SEQ ID NO: 3342 - DNA, 80 bp, synthetic construct
  misc_feature 1..80: note = Synthetic: >NC_001430.1-cand-140-219
  source 1..80: mol_type = other DNA
tacaaaccagtaccaccacgaacacacacttctgtttccccggtgaagttgcatagactgtacccacggttgaaagcgat

SEQ ID NO: 3343 - DNA, 80 bp, synthetic construct
  misc_feature 1..80: note = Synthetic: >NC_001434.1-cand-4210-4289
  source 1..80: mol_type = other DNA
ggcctggagtaagaccttctgtgcccttttcggcccctggttccgtgctattgagaaggctatcctggccctgctccctc

SEQ ID NO: 3344 - DNA, 80 bp, synthetic construct
  misc_feature 1..80: note = Synthetic: >NC_001434.1-cand-4310-4389
  source 1..80: mol_type = other DNA
gcctttgatgacaccgtcttctcggcggctgtggccgcagcaagggcatccatggtgtttgagaatgacttttctgagtt

SEQ ID NO: 3345 - DNA, 80 bp, synthetic construct
  misc_feature 1..80: note = Synthetic: >NC_001434.1-cand-4370-4449
  source 1..80: mol_type = other DNA
gagaatgacttttctgagtttgattccacccagaataatttttccttgggcctagagtgtgctattatggtggagtgtgg

SEQ ID NO: 3346 - DNA, 80 bp, synthetic construct
  misc_feature 1..80: note = Synthetic: >NC_001434.1-cand-4450-4529
  source 1..80: mol_type = other DNA
gatgccgcagtggctcatccgcttgtaccaccttataaggtctgcgtggattctgcaggccccgaaggagtccctgcgag

SEQ ID NO: 3347 - DNA, 80 bp, synthetic construct
  misc_feature 1..80: note = Synthetic: >NC_001434.1-cand-4530-4609
  source 1..80: mol_type = other DNA
ggttttggaagaaacactccggtgagcccggcacccttctatggaatacagtctggaacatggccgttatcacccactgt

SEQ ID NO: 3348 - DNA, 80 bp, synthetic construct
  misc_feature 1..80: note = Synthetic: >NC_001434.1-cand-4610-4689
  source 1..80: mol_type = other DNA
tatgatttccgcgatctgcaggtggccgcctttaaaggtgatgattcgatagtgctttgcagtgagtaccgtcagagccc

SEQ ID NO: 3349 - DNA, 80 bp, synthetic construct
  misc_feature 1..80: note = Synthetic: >NC_001434.1-cand-4700-4779
  source 1..80: mol_type = other DNA
gtcctgattgctggctgtggcctaaagttgaaggtggatttccgtccgattggtttgtatgcaggtgttgtggtggcccc

SEQ ID NO: 3350 - DNA, 80 bp, synthetic construct
  misc_feature 1..80: note = Synthetic: >NC_001434.1-cand-4760-4839
  source 1..80: mol_type = other DNA
gcaggtgttgtggtggcccccggccttggcgcgcttcctgacgtcgtgcgcttcgccggccggcttactgagaagaattg

SEQ ID NO: 3351 - DNA, 80 bp, synthetic construct
  misc_feature 1..80: note = Synthetic: >NC_001434.1-cand-4850-4929
  source 1..80: mol_type = other DNA
cccgagcgggcgaagcagctccgcctcgctgtgagtgattttctccgcaagctcacgaatgtagctcagatgtgtgtgga

SEQ ID NO: 3352 - DNA, 80 bp, synthetic construct
  misc_feature 1..80: note = Synthetic: >NC_001434.1-cand-4950-5029
  source 1..80: mol_type = other DNA
gggtttcccctggactcgttcataacctgattggcatgctacaggctgttgctgacggcaaggctcatttcactgagtca

SEQ ID NO: 3353 - DNA, 80 bp, synthetic construct
  misc_feature 1..80: note = Synthetic: >NC_001434.1-cand-5010-5089
  source 1..80: mol_type = other DNA
aggctcatttcactgagtcagtgaagccagtgctcgacctgacaaattcaatcctgtgtcgggtggaatgaataacatgt

SEQ ID NO: 3354 - DNA, 80 bp, synthetic construct
  misc_feature 1..80: note = Synthetic: >NC_001434.1-cand-5090-5169
  source 1..80: mol_type = other DNA
cttctgctgcgcccatgggttcgcgaccatgcgccctcggcctattttgctgttgctcctcatgtttctgcctatgctgc

SEQ ID NO: 3355 - DNA, 80 bp, synthetic construct
  misc_feature 1..80: note = Synthetic: >NC_001434.1-cand-5160-5239
  source 1..80: mol_type = other DNA
cctatgctgcccgcgccaccgcccggtcagccgtctggccgccgccgtgggcggcgcagcggcggttccggcggtggttt

SEQ ID NO: 3356 - DNA, 80 bp, synthetic construct
  misc_feature 1..80: note = Synthetic: >NC_001434.1-cand-5250-5329
  source 1..80: mol_type = other DNA
cgggctgattctcagcccttcgcaatcccctatattcatccaaccaaccccttcgcccccgatgtcaccgctgcggccgg

SEQ ID NO: 3357 - DNA, 80 bp, synthetic construct
  misc_feature 1..80: note = Synthetic: >NC_001434.1-cand-5330-5409
  source 1..80: mol_type = other DNA
ggctggacctcgtgttcgccaacccgcccgaccactcggctccgcttggcgtgaccaggcccagcgccccgccgctgcct

SEQ ID NO: 3358 - DNA, 80 bp, synthetic construct
  misc_feature 1..80: note = Synthetic: >NC_001434.1-cand-5440-5519
  source 1..80: mol_type = other DNA
cgccgctaaccgcggtcgctccggcccatgacaccccgccagtgcctgatgttgactcccgcggcgccatcctgcgccgg

SEQ ID NO: 3359 - DNA, 80 bp, synthetic construct
  misc_feature 1..80: note = Synthetic: >NC_001437.1-cand-880-959
  source 1..80: mol_type = other DNA
ctggcggcgacacttggctggatgcttggcagtaacaacggtcaacgcgtggtatttaccatcctcctgctgttggtcgc

SEQ ID NO: 3360 - DNA, 80 bp, synthetic construct
  misc_feature 1..80: note = Synthetic: >NC_001437.1-cand-960-1039
  source 1..80: mol_type = other DNA
tccggcttacagttttaattgtctgggaatgggcaatcgtgacttcatagaaggagccagtggagccacttgggtggact

SEQ ID NO: 3361 - DNA, 80 bp, synthetic construct
  misc_feature 1..80: note = Synthetic: >NC_001437.1-cand-1040-1119
  source 1..80: mol_type = other DNA
tggtgctagaaggagatagctgcttgacaatcatggcaaacgacaaaccaacattggacgtccgcatgattaacatcgaa

SEQ ID NO: 3362 - DNA, 80 bp, synthetic construct
  misc_feature 1..80: note = Synthetic: >NC_001437.1-cand-1120-1199
  source 1..80: mol_type = other DNA
gctagccaacttgctgaggtcagaagttactgctatcatgcttcagtcactgacatctcgacggtggctcggtgccccac

SEQ ID NO: 3363 - DNA, 80 bp, synthetic construct
  misc_feature 1..80: note = Synthetic: >NC_001437.1-cand-1190-1269
  source 1..80: mol_type = other DNA
ggtgccccacgactggagaagctcacaacgagaagcgagctgatagtagctatgtgtgcaaacaaggcttcactgatcgt

SEQ ID NO: 3364 - DNA, 80 bp, synthetic construct
  misc_feature 1..80: note = Synthetic: >NC_001437.1-cand-1280-1359
  source 1..80: mol_type = other DNA
acggatgtggacttttcgggaagggaagcattgacacatgtgcaaaattctcctgcaccagcaaagcgattggaagaaca

SEQ ID NO: 3365 - DNA, 80 bp, synthetic construct
  misc_feature 1..80: note = Synthetic: >NC_001437.1-cand-1360-1439
  source 1..80: mol_type = other DNA
atccagccagaaaacatcaaatacgaagttggcatttttgtgcatggaaccaccacttcggaaaaccatgggaattattc

SEQ ID NO: 3366 - DNA, 80 bp, synthetic construct
  misc_feature 1..80: note = Synthetic: >NC_001437.1-cand-1470-1549
  source 1..80: mol_type = other DNA
gtttacaataacacccaatgctccttcgataaccctcaaacttggtgactacggagaagtcacgctggactgtgagccaa

SEQ ID NO: 3367 - DNA, 80 bp, synthetic construct
  misc_feature 1..80: note = Synthetic: >NC_001437.1-cand-1510-1589
  source 1..80: mol_type = other DNA
cttggtgactacggagaagtcacgctggactgtgagccaaggagtggactgaacactgaagcgttttacgtcatgaccgt

SEQ ID NO: 3368 - DNA, 80 bp, synthetic construct
  misc_feature 1..80: note = Synthetic: >NC_001437.1-cand-1630-1709
  source 1..80: mol_type = other DNA
gacctcgctctcccctggacgtccccttcgagcacagcgtggagaaacagagaactcctcatggaatttgaagaggcgca

SEQ ID NO: 3369 - DNA, 80 bp, synthetic construct
  misc_feature 1..80: note = Synthetic: >NC_001437.1-cand-1710-1789
  source 1..80: mol_type = other DNA
cgccacaaaacagtccgttgttgctcttgggtcacaggaaggaggcctccatcaggcgttggcaggagccatcgtggtgg

SEQ ID NO: 3370 - DNA, 80 bp, synthetic construct
  misc_feature 1..80: note = Synthetic: >NC_001437.1-cand-1790-1869
  source 1..80: mol_type = other DNA
agtactcaagctcagtgaagttaacatcaggccacctgaaatgtaggctgaaaatggacaaactggctctgaaaggcaca

SEQ ID NO: 3371 - DNA, 80 bp, synthetic construct
  misc_feature 1..80: note = Synthetic: >NC_001437.1-cand-1870-1949
  source 1..80: mol_type = other DNA
acctatggcatgtgtacagaaaaattctcgttcgcgaaaaatccggcggacactggccacggaacagttgtcattgaact

SEQ ID NO: 3372 - DNA, 80 bp, synthetic construct
  misc_feature 1..80: note = Synthetic: >NC_001437.1-cand-1950-2029
  source 1..80: mol_type = other DNA
atcctactctgggagtgatggcccctgcaaaattccgattgtctccgttgcgagcctcaatgacatgacccccgttgggc

SEQ ID NO: 3373 - DNA, 80 bp, synthetic construct
  misc_feature 1..80: note = Synthetic: >NC_001437.1-cand-2030-2109
  source 1..80: mol_type = other DNA
ggctggtgacagtgaaccctttcgtcgcgacttccagtgccaactcaaaggtgctggtcgagatggaaccccccttcgga

SEQ ID NO: 3374 - DNA, 80 bp, synthetic construct
  misc_feature 1..80: note = Synthetic: >NC_001437.1-cand-2140-2219
  source 1..80: mol_type = other DNA
aagcagatcaaccaccattggcacaaagctggaagcacgctaggcaaggccttttcaacaactttgaagggagctcaaag

SEQ ID NO: 3375 - DNA, 80 bp, synthetic construct
  misc_feature 1..80: note = Synthetic: >NC_001437.1-cand-4730-4809
  source 1..80: mol_type = other DNA
agaatgttttccacacactatggcacacaactagaggagcagccattatgagtggagaaggaaaattgacgccatactgg

SEQ ID NO: 3376 - DNA, 80 bp, synthetic construct
  misc_feature 1..80: note = Synthetic: >NC_001437.1-cand-4830-4909
  source 1..80: mol_type = other DNA
catagcttacggaggcccatggaggtttgaccgaaaatggaatggaacagatgacgtgcaagtgatcgtggtagaaccgg

SEQ ID NO: 3377 - DNA, 80 bp, synthetic construct
  misc_feature 1..80: note = Synthetic: >NC_001437.1-cand-4980-5059
  source 1..80: mol_type = other DNA
tagtctggattacccgcgaggaacatccggctcacccattctggattctaatggagacatcataggcctatacggcaatg

SEQ ID NO: 3378 - DNA, 80 bp, synthetic construct
  misc_feature 1..80: note = Synthetic: >NC_001437.1-cand-5000-5079
  source 1..80: mol_type = other DNA
gaacatccggctcacccattctggattctaatggagacatcataggcctatacggcaatggagttgagcttggcgatggc

SEQ ID NO: 3379 - DNA, 80 bp, synthetic construct
  misc_feature 1..80: note = Synthetic: >NC_001437.1-cand-5080-5159
  source 1..80: mol_type = other DNA
tcatacgtcagcgccatcgtgcagggtgaccgtcaggaggaaccagtcccagaagcttacaccccaaacatgttgagaaa

SEQ ID NO: 3380 - DNA, 80 bp, synthetic construct
  misc_feature 1..80: note = Synthetic: >NC_001437.1-cand-5160-5239
  source 1..80: mol_type = other DNA
gagacagatgactgtgctagatttgcaccctggctcagggaagaccaggaaaattctgccacagataatcaaggacgcca

SEQ ID NO: 3381 - DNA, 80 bp, synthetic construct
  misc_feature 1..80: note = Synthetic: >NC_001437.1-cand-5240-5319
  source 1..80: mol_type = other DNA
tccagcagcgcctaagaacagctgtgctggcaccgacgcgggtggtagcagcagaaatggcagaagctttgagagggctc

SEQ ID NO: 3382 - DNA, 80 bp, synthetic construct
  misc_feature 1..80: note = Synthetic: >NC_001437.1-cand-5320-5399
  source 1..80: mol_type = other DNA
ccagtgcgatatcaaacttcagcagtgcagagagagcaccaagggaatgaaatagtggatgtgatgtgccacgccactct

SEQ ID NO: 3383 - DNA, 80 bp, synthetic construct
  misc_feature 1..80: note = Synthetic: >NC_001437.1-cand-5400-5479
  source 1..80: mol_type = other DNA
gacccatagactgatgtcaccgaacagagtgcccaactacaacctatttgtcatggatgaagctcatttcactgacccag

SEQ ID NO: 3384 - DNA, 80 bp, synthetic construct
  misc_feature 1..80: note = Synthetic: >NC_001437.1-cand-5440-5519
  source 1..80: mol_type = other DNA
aacctatttgtcatggatgaagctcatttcactgacccagccagcatagccgcacgaggatacattgctaccaaggtgga

SEQ ID NO: 3385 - DNA, 80 bp, synthetic construct
  misc_feature 1..80: note = Synthetic: >NC_001437.1-cand-5560-5639
  source 1..80: mol_type = other DNA
cctggaaccacggatccttttcctgactcaaatgccccaatccatgatttgcaagatgagataccagacagggcatggag

SEQ ID NO: 3386 - DNA, 80 bp, synthetic construct
  misc_feature 1..80: note = Synthetic: >NC_001437.1-cand-5620-5699
  source 1..80: mol_type = other DNA
ataccagacagggcatggagcagtggatacgaatggatcacagaatatgcgggcaaaaccgtgtggtttgtggcgagcgt

SEQ ID NO: 3387 - DNA, 80 bp, synthetic construct
  misc_feature 1..80: note = Synthetic: >NC_001437.1-cand-5740-5819
  source 1..80: mol_type = other DNA
gggaaaaaggtcatccaactcaaccgcaagtcctatgatacagaatacccaaaatgtaagaatggagactgggactttgt

SEQ ID NO: 3388 - DNA, 80 bp, synthetic construct
  misc_feature 1..80: note = Synthetic: >NC_001437.1-cand-5760-5839
  source 1..80: mol_type = other DNA
caaccgcaagtcctatgatacagaatacccaaaatgtaagaatggagactgggactttgtcattaccaccgacatctctg

SEQ ID NO: 3389 - DNA, 80 bp, synthetic construct
  misc_feature 1..80: note = Synthetic: >NC_001437.1-cand-5880-5959
  source 1..80: mol_type = other DNA
tagaaagagcgtgaaacccaccatcttagaagagggagaaggcagagtcatcctcggaaacccatctcccataaccagtg

SEQ ID NO: 3390 - DNA, 80 bp, synthetic construct
  misc_feature 1..80: note = Synthetic: >NC_001437.1-cand-5900-5979
  source 1..80: mol_type = other DNA
ccatcttagaagagggagaaggcagagtcatcctcggaaacccatctcccataaccagtgcaagcgcagctcaacggagg

SEQ ID NO: 3391 - DNA, 80 bp, synthetic construct
  misc_feature 1..80: note = Synthetic: >NC_001437.1-cand-8590-8669
  source 1..80: mol_type = other DNA
taccatggaagctatgaagtgaaggctactggctcagccagctctctcgtcaacggagtggtgaagctcatgagcaaacc

SEQ ID NO: 3392 - DNA, 80 bp, synthetic construct
  misc_feature 1..80: note = Synthetic: >NC_001437.1-cand-8670-8749
  source 1..80: mol_type = other DNA
ttgggacgccattgccaacgtcaccaccatggccatgactgacaccaccccttttggacagcaaagagtcttcaaggaga

SEQ ID NO: 3393 - DNA, 80 bp, synthetic construct
  misc_feature 1..80: note = Synthetic: >NC_001437.1-cand-8750-8829
  source 1..80: mol_type = other DNA
aagttgacacgaaggctcctgagccaccagctggagccaaggaagtgctcaacgagaccaccaactggctgtgggcccac

SEQ ID NO: 3394 - DNA, 80 bp, synthetic construct
  misc_feature 1..80: note = Synthetic: >NC_001437.1-cand-8830-8909
  source 1..80: mol_type = other DNA
ttgtcacgggaaaaaagaccccgcttgtgcaccaaggaagaatttataaagaaagtcaacagcaacgcggctcttggagc

SEQ ID NO: 3395 - DNA, 80 bp, synthetic construct
  misc_feature 1..80: note = Synthetic: >NC_001437.1-cand-8910-8989
  source 1..80: mol_type = other DNA
agtgttcgctgaacagaatcaatggagcacggctcgtgaggctgtggatgacccgcggttctgggagatggttgatgaag

SEQ ID NO: 3396 - DNA, 80 bp, synthetic construct
  misc_feature 1..80: note = Synthetic: >NC_001437.1-cand-8990-9069
  source 1..80: mol_type = other DNA
agagggaaaaccatctgcgaggagagtgtcatacatgtatctacaacatgatgggaaaaagagagaagaagcctggagag

SEQ ID NO: 3397 - DNA, 80 bp, synthetic construct
  misc_feature 1..80: note = Synthetic: >NC_001437.1-cand-9060-9139
  source 1..80: mol_type = other DNA
gcctggagagtttggaaaagctaaaggaagcagggccatttggttcatgtggcttggagcacggtatctagagtttgaag

SEQ ID NO: 3398 - DNA, 80 bp, synthetic construct
  misc_feature 1..80: note = Synthetic: >NC_001437.1-cand-9150-9229
  source 1..80: mol_type = other DNA
cctgaatgaagaccattggctgagccgagagaattcaggaggtggagtggaaggctcaggcgtccaaaagctgggataca

SEQ ID NO: 3399 - DNA, 80 bp, synthetic construct
  misc_feature 1..80: note = Synthetic: >NC_001437.1-cand-9230-9309
  source 1..80: mol_type = other DNA
tcctccgtgacatagcaggaaagcaaggagggaaaatgtacgctgatgacaccgccggatgggacactagaattaccaga

SEQ ID NO: 3400 - DNA, 80 bp, synthetic construct
  misc_feature 1..80: note = Synthetic: >NC_001437.1-cand-9310-9389
  source 1..80: mol_type = other DNA
actgatttagaaaatgaagccaaggtgctggagctcctagacggtgaacaccgcatgctcgctcgagccataattgaact

SEQ ID NO: 3401 - DNA, 80 bp, synthetic construct
  misc_feature 1..80: note = Synthetic: >NC_001437.1-cand-9380-9459
  source 1..80: mol_type = other DNA
taattgaactgacttacaggcacaaagtggtcaaggtcatgagacctgcagcagaaggaaagaccgtaatggacgtgata

SEQ ID NO: 3402 - DNA, 80 bp, synthetic construct
  misc_feature 1..80: note = Synthetic: >NC_001437.1-cand-9480-9559
  source 1..80: mol_type = other DNA
gagtggacaggtggtcacttatgcccttaacactttcacgaacattgctgtccagctcgtcaggctgatggaggctgagg

SEQ ID NO: 3403 - DNA, 80 bp, synthetic construct
  misc_feature 1..80: note = Synthetic: >NC_001437.1-cand-9560-9639
  source 1..80: mol_type = other DNA
gggtcattggaccacaacacttggaacagctacctagaaaaaccaagatagctgtcaggacctggctctttgagaatgga

SEQ ID NO: 3404 - DNA, 80 bp, synthetic construct
  misc_feature 1..80: note = Synthetic: >NC_001437.1-cand-9620-9699
  source 1..80: mol_type = other DNA
cctggctctttgagaatggagaggagagagtgaccaggatggcgatcagcggagatgactgtgtcgtcaagccgctggat

SEQ ID NO: 3405 - DNA, 80 bp, synthetic construct
  misc_feature 1..80: note = Synthetic: >NC_001437.1-cand-9700-9779
  source 1..80: mol_type = other DNA
gacagattcgccacagccctccacttcctcaacgcaatgtcaaaggtcagaaaagacatccaggaatggaagccttcgca

SEQ ID NO: 3406 - DNA, 80 bp, synthetic construct
  misc_feature 1..80: note = Synthetic: >NC_001437.1-cand-9780-9859
  source 1..80: mol_type = other DNA
tggctggcacgactggcagcaagttcccttctgctctaaccattttcaggagattgtgatgaaagatggaaggagcatag

SEQ ID NO: 3407 - DNA, 80 bp, synthetic construct
  misc_feature 1..80: note = Synthetic: >NC_001449.1-cand-1460-1539
  source 1..80: mol_type = other DNA
agcacaaggagccgtcacctctcattactgccgaggacatacaagaggctaagtgcgcagccgatgaggctaaggaagtg

SEQ ID NO: 3408 - DNA, 80 bp, synthetic construct
  misc_feature 1..80: note = Synthetic: >NC_001449.1-cand-1540-1619
  source 1..80: mol_type = other DNA
cgtgaagccgaggagctgcgcgctgctctaccacctttggcagctgattttgaggagcccactctggaagccgatgtcga

SEQ ID NO: 3409 - DNA, 80 bp, synthetic construct
  misc_feature 1..80: note = Synthetic: >NC_001449.1-cand-1640-1719
  source 1..80: mol_type = other DNA
gggccggctcagtggagacacctcgtggcttgataaaggttaccagctatgccggcgaggacaagatcggctcttacgca

SEQ ID NO: 3410 - DNA, 80 bp, synthetic construct
  misc_feature 1..80: note = Synthetic: >NC_001449.1-cand-1700-1779
  source 1..80: mol_type = other DNA
acaagatcggctcttacgcagtgctttctccacaggctgtactcaagagtgagaaactatcttgcattcaccctctcgct

SEQ ID NO: 3411 - DNA, 80 bp, synthetic construct
  misc_feature 1..80: note = Synthetic: >NC_001449.1-cand-1780-1859
  source 1..80: mol_type = other DNA
gaacaagtcatagtgataacacactctggccgaaaagggcgttatgccgtggaaccctaccatggaaaagtagtggtgcc

SEQ ID NO: 3412 - DNA, 80 bp, synthetic construct
  misc_feature 1..80: note = Synthetic: >NC_001449.1-cand-1860-1939
  source 1..80: mol_type = other DNA
agagggacatgcaatacccgtccaggactttcaagctctgagtgaaagtgccaccatcgtgtacaacgaacgagagttcg

SEQ ID NO: 3413 - DNA, 80 bp, synthetic construct
  misc_feature 1..80: note = Synthetic: >NC_001449.1-cand-1940-2019
  source 1..80: mol_type = other DNA
taaacaggtacctgcaccatattgccacacatggaggagcgctgaacacagatgaagaatattacaaaactgtcaagccc

SEQ ID NO: 3414 - DNA, 80 bp, synthetic construct
  misc_feature 1..80: note = Synthetic: >NC_001449.1-cand-2020-2099
  source 1..80: mol_type = other DNA
agcgagcacgacggcgaatacctgtacgacatcgacaggaaacaatgcgtcaagaaagaattagtcactgggctagggct

SEQ ID NO: 3415 - DNA, 80 bp, synthetic construct
  misc_feature 1..80: note = Synthetic: >NC_001449.1-cand-2100-2179
  source 1..80: mol_type = other DNA
tacaggcgagctggtggatcctcccttccatgaatttgcctacgagagtctgagaacacgtccggccgctccttaccaag

SEQ ID NO: 3416 - DNA, 80 bp, synthetic construct
  misc_feature 1..80: note = Synthetic: >NC_001449.1-cand-2210-2289
  source 1..80: mol_type = other DNA
ggtcaggcaagtctggcatcattaaaagcgcagtcaccaaaaaagatctggtggtgagcgccaagaaagaaaactgcgca

SEQ ID NO: 3417 - DNA, 80 bp, synthetic construct
  misc_feature 1..80: note = Synthetic: >NC_001449.1-cand-2270-2349
  source 1..80: mol_type = other DNA
ccaagaaagaaaactgcgcagaaataataagggacgtcaagaaaatgaaagggctggacgtcaatgccagaactgtggac

SEQ ID NO: 3418 - DNA, 80 bp, synthetic construct
  misc_feature 1..80: note = Synthetic: >NC_001449.1-cand-2350-2429
  source 1..80: mol_type = other DNA
tcagtgctcttgaatggatgcaaacaccccgtagagaccctgtatattgacgaagcttttgcttgtcatgcaggcactct

SEQ ID NO: 3419 - DNA, 80 bp, synthetic construct
  misc_feature 1..80: note = Synthetic: >NC_001449.1-cand-2390-2469
  source 1..80: mol_type = other DNA
tgtatattgacgaagcttttgcttgtcatgcaggcactctcagagcgctcatagccatcataagacctaaaaaggcagtg

SEQ ID NO: 3420 - DNA, 80 bp, synthetic construct
  misc_feature 1..80: note = Synthetic: >NC_001449.1-cand-2510-2589
  source 1..80: mol_type = other DNA
tgtgcctgaaagtgcattttaaccacgagatttgcacgcaggtcttccacaaaagcatctctcgccgttgcactaaatcc

SEQ ID NO: 3421 - DNA, 80 bp, synthetic construct
  misc_feature 1..80: note = Synthetic: >NC_001449.1-cand-2590-2669
  source 1..80: mol_type = other DNA
gtgacttcggtcgtctcaaccttgttttacgacaaaaggatgagaacgacgaacccgaaagagactaagattgtgattga

SEQ ID NO: 3422 - DNA, 80 bp, synthetic construct
  misc_feature 1..80: note = Synthetic: >NC_001449.1-cand-2670-2749
  source 1..80: mol_type = other DNA
cactactggcagtaccaaaccgaagcaggacgatctcattctcacttgtttcagagggtgggtgaagcagttgcaaatag

SEQ ID NO: 3423 - DNA, 80 bp, synthetic construct
  misc_feature 1..80: note = Synthetic: >NC_001449.1-cand-5340-5419
  source 1..80: mol_type = other DNA
ggcagtgtcagccgagactaactcctacttcgcaaggagcatggagtttcgggcgcgaccggtgcctgcgcctcgaaccg

SEQ ID NO: 3424 - DNA, 80 bp, synthetic construct
  misc_feature 1..80: note = Synthetic: >NC_001449.1-cand-5400-5479
  source 1..80: mol_type = other DNA
ggtgcctgcgcctcgaaccgtattcaggaaccctccacatcccgcaccgcgcacaagaacaccgccacttgcacacagca

SEQ ID NO: 3425 - DNA, 80 bp, synthetic construct
  misc_feature 1..80: note = Synthetic: >NC_001449.1-cand-5480-5559
  source 1..80: mol_type = other DNA
gggccagctcgagaactagcctagtttccaccccgccaggcgtgaatagggtgattactagagaggagctcgaggcgctt

SEQ ID NO: 3426 - DNA, 80 bp, synthetic construct
  misc_feature 1..80: note = Synthetic: >NC_001449.1-cand-5560-5639
  source 1..80: mol_type = other DNA
accccgtcccgcgctcctagcaggtcggcctcaagaactagcctggtctctaacccgccaggcgtaaatagggtgattac

SEQ ID NO: 3427 - DNA, 80 bp, synthetic construct
  misc_feature 1..80: note = Synthetic: >NC_001449.1-cand-5640-5719
  source 1..80: mol_type = other DNA
aagagaggagtttgaggcgttcgtagcacaacaacaatgacggtttgacgcgggtgcatacatcttttcctccgataccg

SEQ ID NO: 3428 - DNA, 80 bp, synthetic construct
  misc_feature 1..80: note = Synthetic: >NC_001449.1-cand-5720-5799
  source 1..80: mol_type = other DNA
gtcaagggcatttacaacaaaaatcagtaaggcaaacggtgttatccgaagtggtgttggagaggaccgaattggagatt

SEQ ID NO: 3429 - DNA, 80 bp, synthetic construct
  misc_feature 1..80: note = Synthetic: >NC_001449.1-cand-5800-5879
  source 1..80: mol_type = other DNA
tcgtatgccccgcgcctcgaccaggaaaaagaagaactactacgcaagaaattacagctgaatcccacacctgctaacag

SEQ ID NO: 3430 - DNA, 80 bp, synthetic construct
  misc_feature 1..80: note = Synthetic: >NC_001449.1-cand-5880-5959
  source 1..80: mol_type = other DNA
aagcagataccagtccaggagggtggagaatatgaaagccataacagctagacgtattctgcaaggcctagggcattatt

SEQ ID NO: 3431 - DNA, 80 bp, synthetic construct
  misc_feature 1..80: note = Synthetic: >NC_001449.1-cand-5960-6039
  source 1..80: mol_type = other DNA
tgaaggcagaaggaaaagtggagtgctatcgaaccctgcatcctgttcctttgtattcatctagtgtgaatcgtgctttt

SEQ ID NO: 3432 - DNA, 80 bp, synthetic construct
  misc_feature 1..80: note = Synthetic: >NC_001449.1-cand-6040-6119
  source 1..80: mol_type = other DNA
tcaagccccaaggtcgcagtggaagcctgcaatgccatgctgaaagaaaattttccgactgtagcttcctactgtattat

SEQ ID NO: 3433 - DNA, 80 bp, synthetic construct
  misc_feature 1..80: note = Synthetic: >NC_001449.1-cand-6110-6189
  source 1..80: mol_type = other DNA
actgtattattccagagtacgatgcctatctggacatggttgacggcgcttcttgttgcttagacactgccagtttttgc

SEQ ID NO: 3434 - DNA, 80 bp, synthetic construct
  misc_feature 1..80: note = Synthetic: >NC_001449.1-cand-6190-6269
  source 1..80: mol_type = other DNA
cctgcgaagctgcgcagctttccaaagaaacactcctatttggaacccacaatacggtcggcagtgccatcagcgattca

SEQ ID NO: 3435 - DNA, 80 bp, synthetic construct
  misc_feature 1..80: note = Synthetic: >NC_001449.1-cand-6270-6349
  source 1..80: mol_type = other DNA
gaacacgctccagaacgtcctggcagctgccacaaaaagaaattgcaacgtcacgcaaatgagagaattgcccgtattgg

SEQ ID NO: 3436 - DNA, 80 bp, synthetic construct
  misc_feature 1..80: note = Synthetic: >NC_001449.1-cand-6350-6429
  source 1..80: mol_type = other DNA
attcggctgcctttaatgtggaatgcttcaagaaatatgcgtgcaataatgaatattgggaaacgtttaaagaaaacccc

SEQ ID NO: 3437 - DNA, 80 bp, synthetic construct
  misc_feature 1..80: note = Synthetic: >NC_001449.1-cand-6430-6509
  source 1..80: mol_type = other DNA
atcaggcttactgaagaaaatgtggtaaattacattactaaattaaaaggaccaaaagctgctgctctttttgcgaagac

SEQ ID NO: 3438 - DNA, 80 bp, synthetic construct
  misc_feature 1..80: note = Synthetic: >NC_001449.1-cand-6510-6589
  source 1..80: mol_type = other DNA
acataatttgaatatgttacaggacataccaatggacaggtttgtaatggacttaaagagggacgtgaaagtgactccag

SEQ ID NO: 3439 - DNA, 80 bp, synthetic construct
  misc_feature 1..80: note = Synthetic: >NC_001449.1-cand-9140-9219
  source 1..80: mol_type = other DNA
tagcgccttggtgaaatgcaagtgcggcggcacaaagatctccgaaaccatcaacaaggcaaaacagttcagccagtgca

SEQ ID NO: 3440 - DNA, 80 bp, synthetic construct
  misc_feature 1..80: note = Synthetic: >NC_001449.1-cand-9220-9299
  source 1..80: mol_type = other DNA
caaagaaggagcagtgcagagcatatcgactgcagaatgacaagtgggtgtataattctgacaaactgcccaaagcagcg

SEQ ID NO: 3441 - DNA, 80 bp, synthetic construct
  misc_feature 1..80: note = Synthetic: >NC_001449.1-cand-9300-9379
  source 1..80: mol_type = other DNA
ggagccaccctaaaaggaaaactacacgtcccgttcttgctggcagacggcaaatgcaccgtgcctctagcaccggaacc

SEQ ID NO: 3442 - DNA, 80 bp, synthetic construct
  misc_feature 1..80: note = Synthetic: >NC_001449.1-cand-9380-9459
  source 1..80: mol_type = other DNA
tatgataaccttcggtttccgatcagtgtcactgaaactgcaccctaagaatcccacatatctgaccactcgccaacttg

SEQ ID NO: 3443 - DNA, 80 bp, synthetic construct
  misc_feature 1..80: note = Synthetic: >NC_001449.1-cand-9450-9529
  source 1..80: mol_type = other DNA
cgccaacttgctgatgagcctcattacacgcacgagctcatatctgaaccagctgttaggaattttaccgtcactgaaaa

SEQ ID NO: 3444 - DNA, 80 bp, synthetic construct
  misc_feature 1..80: note = Synthetic: >NC_001449.1-cand-9550-9629
  source 1..80: mol_type = other DNA
gaaaccatccgccgaaaaggttttgggcacaggaaacagcacccggaaatccacatgggctgccacatgaggtgataact

SEQ ID NO: 3445 - DNA, 80 bp, synthetic construct
  misc_feature 1..80: note = Synthetic: >NC_001449.1-cand-9620-9699
  source 1..80: mol_type = other DNA
ggtgataactcattattaccacagataccctatgtccaccatcctgggtttgtcaatttgcgccgccattgtaaccgttt

SEQ ID NO: 3446 - DNA, 80 bp, synthetic construct
  misc_feature 1..80: note = Synthetic: >NC_001449.1-cand-9700-9779
  source 1..80: mol_type = other DNA
ccgttgcagcgtccacctggctgttttgcaaatccagagtttcgtgcctaactccttaccggctaacacctaacgccagg

SEQ ID NO: 3447 - DNA, 80 bp, synthetic construct
  misc_feature 1..80: note = Synthetic: >NC_001449.1-cand-9780-9859
  source 1..80: mol_type = other DNA
atgccgctttgcctggccgtgctttgctgcgcccgcactgcccgggccgagaccacctgggagtccttggatcacctatg

SEQ ID NO: 3448 - DNA, 80 bp, synthetic construct
  misc_feature 1..80: note = Synthetic: >NC_001449.1-cand-9860-9939
  source 1..80: mol_type = other DNA
gaacaataaccaacagatgttctggattcaattgctgatccctctggccgccttgattgtagtgactcgcctgctcaagt

SEQ ID NO: 3449 - DNA, 80 bp, synthetic construct
  misc_feature 1..80: note = Synthetic: >NC_001449.1-cand-9940-10019
  source 1..80: mol_type = other DNA
gcgtgtgctgtgtagtgccttttttagtcgtggccggcgccgcaggcgccggcgcctacgagcacgcgaccacgatgccg

SEQ ID NO: 3450 - DNA, 80 bp, synthetic construct
  misc_feature 1..80: note = Synthetic: >NC_001449.1-cand-10020-10099
  source 1..80: mol_type = other DNA
agccaagcgggaatctcgtataacaccatagtcaacagagcaggctacgcgccactccctatcagcataacaccaacaaa

SEQ ID NO: 3451 - DNA, 80 bp, synthetic construct
  misc_feature 1..80: note = Synthetic: >NC_001449.1-cand-10100-10179
  source 1..80: mol_type = other DNA
gatcaagctgatacccacagtgaacttggagtacgtcacctgccactacaaaacaggaatggattcaccagccatcaaat

SEQ ID NO: 3452 - DNA, 80 bp, synthetic construct
  misc_feature 1..80: note = Synthetic: >NC_001449.1-cand-10160-10239
  source 1..80: mol_type = other DNA
ggattcaccagccatcaaatgctgcggatctcaggaatgtactccaactaacaggcctgatgaacagtgcaaagtcttca

SEQ ID NO: 3453 - DNA, 80 bp, synthetic construct
  misc_feature 1..80: note = Synthetic: >NC_001449.1-cand-10270-10349
  source 1..80: mol_type = other DNA
catattgcttttgcgacactgagaatactcaggtcagcaaggcctacgtaatgaaatctgacgactgccttgcggatcat

SEQ ID NO: 3454 - DNA, 80 bp, synthetic construct
  misc_feature 1..80: note = Synthetic: >NC_001449.1-cand-10320-10399
  source 1..80: mol_type = other DNA
atgaaatctgacgactgccttgcggatcatgctgaagcatacaaagcgcacacagcctcagtgcaggcgttcctcaacat

SEQ ID NO: 3455 - DNA, 80 bp, synthetic construct
  misc_feature 1..80: note = Synthetic: >NC_001472.1-cand-1750-1829
  source 1..80: mol_type = other DNA
gacaccgggtagcacgcaatttctgacttctgatgatttccaatcgccatcagcaatgccacaattcgacgtcacaccag

SEQ ID NO: 3456 - DNA, 80 bp, synthetic construct
  misc_feature 1..80: note = Synthetic: >NC_001472.1-cand-1830-1909
  source 1..80: mol_type = other DNA
agatgcagatcccgggtcgtgtcaacaatctgatggaaatagctgaggtggactctgtggtcccagtgaacaacactgac

SEQ ID NO: 3457 - DNA, 80 bp, synthetic construct
  misc_feature 1..80: note = Synthetic: >NC_001472.1-cand-1910-1989
  source 1..80: mol_type = other DNA
aacaacgtgaatggtcttaaagcctaccaaatccccgtgcaatccaatagcgacaatagaaggcaagtgttcgggtttcc

SEQ ID NO: 3458 - DNA, 80 bp, synthetic construct
  misc_feature 1..80: note = Synthetic: >NC_001472.1-cand-2010-2089
  source 1..80: mol_type = other DNA
atgttctcaacaggactttgttaggtgagattttgaactactacacccactggagtggtagtataaagctcacgttcatg

SEQ ID NO: 3459 - DNA, 80 bp, synthetic construct
  misc_feature 1..80: note = Synthetic: >NC_001472.1-cand-2070-2149
  source 1..80: mol_type = other DNA
gtataaagctcacgttcatgttttgtggatcggcgatggccactgggaagtttttgttagcatactcaccaccaggcgca

SEQ ID NO: 3460 - DNA, 80 bp, synthetic construct
  misc_feature 1..80: note = Synthetic: >NC_001472.1-cand-2160-2239
  source 1..80: mol_type = other DNA
aaaacagaagagacgcaatgttgggtacacatgtcatctgggacgtgggtttgcaatcaagttgtgtactttgtgtaccc

SEQ ID NO: 3461 - DNA, 80 bp, synthetic construct
  misc_feature 1..80: note = Synthetic: >NC_001472.1-cand-2230-2309
  source 1..80: mol_type = other DNA
ttgtgtaccctggatcagccagacacactataggtatgtggtggaggatgagtatacagcggcagggtatgttacatgct

SEQ ID NO: 3462 - DNA, 80 bp, synthetic construct
  misc_feature 1..80: note = Synthetic: >NC_001472.1-cand-2310-2389
  source 1..80: mol_type = other DNA
ggtaccaaacaaatatcattgttccagcggacgttcaaagcacatgcgacatcttgtgcttcgtatcggcatgcaatgat

SEQ ID NO: 3463 - DNA, 80 bp, synthetic construct
  misc_feature 1..80: note = Synthetic: >NC_001472.1-cand-2390-2469
  source 1..80: mol_type = other DNA
ttctctgtgcgtatgttaaaggataccccttttataagacaagacaatttttaccagggcccagtggaagaatcggtgga

SEQ ID NO: 3464 - DNA, 80 bp, synthetic construct
  misc_feature 1..80: note = Synthetic: >NC_001472.1-cand-2470-2549
  source 1..80: mol_type = other DNA
acgcgccatggtgcgcgtggctgatacggtcagctcaaagcctacgaattcagaatccatccccgccctcactgctgcgg

SEQ ID NO: 3465 - DNA, 80 bp, synthetic construct
  misc_feature 1..80: note = Synthetic: >NC_001472.1-cand-2550-2629
  source 1..80: mol_type = other DNA
agactggtcatacctctcaagtcgtacccagtgacaccatgcaaactagacacgtgaagaattaccactcaaggtcggaa

SEQ ID NO: 3466 - DNA, 80 bp, synthetic construct
  misc_feature 1..80: note = Synthetic: >NC_001472.1-cand-2630-2709
  source 1..80: mol_type = other DNA
tcttccattgaaaatttcttgtgccgatctgcttgtgtgtattacgccacctacaataataattctgagaagggctacgc

SEQ ID NO: 3467 - DNA, 80 bp, synthetic construct
  misc_feature 1..80: note = Synthetic: >NC_001472.1-cand-2710-2789
  source 1..80: mol_type = other DNA
agagtgggttatcaacaccaggcaggttgcgcagttgctgaggaggaaactagagttcacttacttaaggttcgatctgg

SEQ ID NO: 3468 - DNA, 80 bp, synthetic construct
  misc_feature 1..80: note = Synthetic: >NC_001472.1-cand-2790-2869
  source 1..80: mol_type = other DNA
aattgacatttgtgataacaagtgcccaggagcccagtaccgctaccagtgtagacgcacctgtacaaacccaacagata

SEQ ID NO: 3469 - DNA, 80 bp, synthetic construct
  misc_feature 1..80: note = Synthetic: >NC_001472.1-cand-2870-2949
  source 1..80: mol_type = other DNA
atgtatgtgcctccaggcgggccggtacctaccaaggttacagactacgcctggcaaacatccacaaaccccagcgtctt

SEQ ID NO: 3470 - DNA, 80 bp, synthetic construct
  misc_feature 1..80: note = Synthetic: >NC_001472.1-cand-2960-3039
  source 1..80: mol_type = other DNA
gggaatgccccaccgaggatgtctattcccttcatcagtattggaaatgcttatagctgcttttatgatggatggacaca

SEQ ID NO: 3471 - DNA, 80 bp, synthetic construct
  misc_feature 1..80: note = Synthetic: >NC_001472.1-cand-5650-5729
  source 1..80: mol_type = other DNA
gctagcaattaacaccagcaagttccctaacatgtatatcccagtgggacaagttacagagtatggcttcctgaatctgg

SEQ ID NO: 3472 - DNA, 80 bp, synthetic construct
  misc_feature 1..80: note = Synthetic: >NC_001472.1-cand-5730-5809
  source 1..80: mol_type = other DNA
gtggtacacccaccaagagaatgcttatgtacaacttccccacgagggcaggtcagtgtggcggagtgctcatgtccact

SEQ ID NO: 3473 - DNA, 80 bp, synthetic construct
  misc_feature 1..80: note = Synthetic: >NC_001472.1-cand-5830-5909
  source 1..80: mol_type = other DNA
tgttggcgggaatggtcatcaaggcttctcagcggcacttcttaaacactacttcaatgatgaacaaggagaaatcgagt

SEQ ID NO: 3474 - DNA, 80 bp, synthetic construct
  misc_feature 1..80: note = Synthetic: >NC_001472.1-cand-5890-5969
  source 1..80: mol_type = other DNA
tgaacaaggagaaatcgagttcattgaaagctcaaaggaagcagggttcccagtcatcaacacgcctagcaaaactaaat

SEQ ID NO: 3475 - DNA, 80 bp, synthetic construct
  misc_feature 1..80: note = Synthetic: >NC_001472.1-cand-5960-6039
  source 1..80: mol_type = other DNA
aaaactaaattggagccaagtgtcttccaccaggtttttgaaggcaataaagagccagcagtcctcaggaatggcgatcc

SEQ ID NO: 3476 - DNA, 80 bp, synthetic construct
  misc_feature 1..80: note = Synthetic: >NC_001472.1-cand-6040-6119
  source 1..80: mol_type = other DNA
acgcctcagagccaactttgaggaggccatattttccaaatacatcggaaatgttaacacacacgtggatgaatacatgc

SEQ ID NO: 3477 - DNA, 80 bp, synthetic construct
  misc_feature 1..80: note = Synthetic: >NC_001472.1-cand-6120-6199
  source 1..80: mol_type = other DNA
tggaagctgttgaccattatgctggtcaattggcaaccttagacatcagcaccgagccaatgagattggaagatgctgta

SEQ ID NO: 3478 - DNA, 80 bp, synthetic construct
  misc_feature 1..80: note = Synthetic: >NC_001472.1-cand-6200-6279
  source 1..80: mol_type = other DNA
tatggtactgaaggccttgaggctcttgatttaacaacgagtgcgggctacccgtatgtcgctctgggcattaaaaagag

SEQ ID NO: 3479 - DNA, 80 bp, synthetic construct
  misc_feature 1..80: note = Synthetic: >NC_001472.1-cand-6360-6439
  source 1..80: mol_type = other DNA
taacctatgtgaaagatgaactcagatctgcagagaaggtggcgaaagggaaatctaggctaattgaggcatccagtttg

SEQ ID NO: 3480 - DNA, 80 bp, synthetic construct
  misc_feature 1..80: note = Synthetic: >NC_001472.1-cand-6440-6519
  source 1..80: mol_type = other DNA
aatgactccgtggcaatgagacaaacatttggcaacctatacaaaacttttcacctaaacccagggattgtaactggcag

SEQ ID NO: 3481 - DNA, 80 bp, synthetic construct
  misc_feature 1..80: note = Synthetic: >NC_001472.1-cand-6520-6599
  source 1..80: mol_type = other DNA
tgccgtcgggtgtgatccagatctcttttggagcaagataccagtgatgttggatggccatctcgtagcttttgattatt

SEQ ID NO: 3482 - DNA, 80 bp, synthetic construct
  misc_feature 1..80: note = Synthetic: >NC_001472.1-cand-6590-6669
  source 1..80: mol_type = other DNA
tttgattattctggatatgacgctagcttgagtcccgtatggtttgcctgtctaaagctactgcttgagaaacttggtta

SEQ ID NO: 3483 - DNA, 80 bp, synthetic construct
  misc_feature 1..80: note = Synthetic: >NC_001472.1-cand-6660-6739
  source 1..80: mol_type = other DNA
aacttggttactcgcacaaggagaccaattacattgactacctgtgcaactcccatcacctgtacagggataaacattac

SEQ ID NO: 3484 - DNA, 80 bp, synthetic construct
  misc_feature 1..80: note = Synthetic: >NC_001472.1-cand-6750-6829
  source 1..80: mol_type = other DNA
gtggcatgccatcaggatgctctggcacaagcatcttcaactcaatgataaataacatcataatcaggacactaatgttg

SEQ ID NO: 3485 - DNA, 80 bp, synthetic construct
  misc_feature 1..80: note = Synthetic: >NC_001472.1-cand-6810-6889
  source 1..80: mol_type = other DNA
taatcaggacactaatgttgaaggtgtacaaagggatcgacttggatcaattcagaatgattgcttatggtgatgacgtg

SEQ ID NO: 3486 - DNA, 80 bp, synthetic construct
  misc_feature 1..80: note = Synthetic: >NC_001472.1-cand-6890-6969
  source 1..80: mol_type = other DNA
atcgcatcatatccgtggcccatagatgcgtccctgcttgctgaagctggtagggattgtgggttgatcatgacaccagc

SEQ ID NO: 3487 - DNA, 80 bp, synthetic construct
  misc_feature 1..80: note = Synthetic: >NC_001474.2-cand-2170-2249
  source 1..80: mol_type = other DNA
cattttaggtgacacagcctgggattttggatccttgggaggagtgtttacatctataggaaaggctctccaccaagtct

SEQ ID NO: 3488 - DNA, 80 bp, synthetic construct
  misc_feature 1..80: note = Synthetic: >NC_001474.2-cand-2280-2359
  source 1..80: mol_type = other DNA
gggtttcatggactatgaaaatcctcataggagtcattatcacatggataggaatgaattcacgcagcacctcactgtct

SEQ ID NO: 3489 - DNA, 80 bp, synthetic construct
  misc_feature 1..80: note = Synthetic: >NC_001474.2-cand-2330-2409
  source 1..80: mol_type = other DNA
ggaatgaattcacgcagcacctcactgtctgtgacactagtattggtgggaattgtgacactgtatttgggagtcatggt

SEQ ID NO: 3490 - DNA, 80 bp, synthetic construct
  misc_feature 1..80: note = Synthetic: >NC_001474.2-cand-2410-2489
  source 1..80: mol_type = other DNA
gcaggccgatagtggttgcgttgtgagctggaaaaacaaagaactgaaatgtggcagtgggattttcatcacagacaacg

SEQ ID NO: 3491 - DNA, 80 bp, synthetic construct
  misc_feature 1..80: note = Synthetic: >NC_001474.2-cand-2490-2569
  source 1..80: mol_type = other DNA
tgcacacatggacagaacaatacaagttccaaccagaatccccttcaaaactagcttcagctatccagaaagcccatgaa

SEQ ID NO: 3492 - DNA, 80 bp, synthetic construct
  misc_feature 1..80: note = Synthetic: >NC_001474.2-cand-2570-2649
  source 1..80: mol_type = other DNA
gagggcatttgtggaatccgctcagtaacaagactggagaatctgatgtggaaacaaataacaccagaattgaatcacat

SEQ ID NO: 3493 - DNA, 80 bp, synthetic construct
  misc_feature 1..80: note = Synthetic: >NC_001474.2-cand-2650-2729
  source 1..80: mol_type = other DNA
tctatcagaaaatgaggtgaagttaactattatgacaggagacatcaaaggaatcatgcaggcaggaaaacgatctctgc

SEQ ID NO: 3494 - DNA, 80 bp, synthetic construct
  misc_feature 1..80: note = Synthetic: >NC_001474.2-cand-2770-2849
  source 1..80: mol_type = other DNA
gggcaaagcaaaaatgctctctacagagtctcataaccagacctttctcattgatggccccgaaacagcagaatgcccca

SEQ ID NO: 3495 - DNA, 80 bp, synthetic construct
  misc_feature 1..80: note = Synthetic: >NC_001474.2-cand-2820-2899
  source 1..80: mol_type = other DNA
ttgatggccccgaaacagcagaatgccccaacacaaatagagcttggaattcgttggaagttgaagactatggctttgga

SEQ ID NO: 3496 - DNA, 80 bp, synthetic construct
  misc_feature 1..80: note = Synthetic: >NC_001474.2-cand-2900-2979
  source 1..80: mol_type = other DNA
gtattcaccaccaatatatggctaaaattgaaagaaaaacaggatgtattctgcgactcaaaactcatgtcagcggccat

SEQ ID NO: 3497 - DNA, 80 bp, synthetic construct
  misc_feature 1..80: note = Synthetic: >NC_001474.2-cand-2980-3059
  source 1..80: mol_type = other DNA
aaaagacaacagagccgtccatgccgatatgggttattggatagaaagtgcactcaatgacacatggaagatagagaaag

SEQ ID NO: 3498 - DNA, 80 bp, synthetic construct
  misc_feature 1..80: note = Synthetic: >NC_001474.2-cand-3060-3139
  source 1..80: mol_type = other DNA
cctctttcattgaagttaaaaactgccactggccaaaatcacacaccctctggagcaatggagtgctagaaagtgagatg

SEQ ID NO: 3499 - DNA, 80 bp, synthetic construct
  misc_feature 1..80: note = Synthetic: >NC_001474.2-cand-3140-3219
  source 1..80: mol_type = other DNA
ataattccaaagaatctcgctggaccagtgtctcaacacaactatagaccaggctaccatacacaaataacaggaccatg

SEQ ID NO: 3500 - DNA, 80 bp, synthetic construct
  misc_feature 1..80: note = Synthetic: >NC_001474.2-cand-3220-3299
  source 1..80: mol_type = other DNA
gcatctaggtaagcttgagatggactttgatttctgtgatggaacaacagtggtagtgactgaggactgcggaaatagag

SEQ ID NO: 3501 - DNA, 80 bp, synthetic construct
  misc_feature 1..80: note = Synthetic: >NC_001474.2-cand-3300-3379
  source 1..80: mol_type = other DNA
gaccctctttgagaacaaccactgcctctggaaaactcataacagaatggtgctgccgatcttgcacattaccaccgcta

SEQ ID NO: 3502 - DNA, 80 bp, synthetic construct
  misc_feature 1..80: note = Synthetic: >NC_001474.2-cand-3380-3459
  source 1..80: mol_type = other DNA
agatacagaggtgaggatgggtgctggtacgggatggaaatcagaccattgaaggagaaagaagagaatttggtcaactc

SEQ ID NO: 3503 - DNA, 80 bp, synthetic construct
  misc_feature 1..80: note = Synthetic: >NC_001474.2-cand-6000-6079
  source 1..80: mol_type = other DNA
tagataacatcaacacgccagaaggaatcattcctagcatgttcgaaccagagcgtgaaaaggtggatgccattgatggc

SEQ ID NO: 3504 - DNA, 80 bp, synthetic construct
  misc_feature 1..80: note = Synthetic: >NC_001474.2-cand-6080-6159
  source 1..80: mol_type = other DNA
gaataccgcttgagaggagaagcaaggaaaacctttgtagacttaatgagaagaggagacctaccagtctggttggccta

SEQ ID NO: 3505 - DNA, 80 bp, synthetic construct
  misc_feature 1..80: note = Synthetic: >NC_001474.2-cand-6160-6239
  source 1..80: mol_type = other DNA
cagagtggcagctgaaggcatcaactacgcagacagaaggtggtgttttgatggagtcaagaacaaccaaatcctagaag

SEQ ID NO: 3506 - DNA, 80 bp, synthetic construct
  misc_feature 1..80: note = Synthetic: >NC_001474.2-cand-6280-6359
  source 1..80: mol_type = other DNA
gaagaaattgaaacccagatggttggatgctaggatctattctgacccactggcgctaaaagaatttaaggaatttgcag

SEQ ID NO: 3507 - DNA, 80 bp, synthetic construct
  misc_feature 1..80: note = Synthetic: >NC_001474.2-cand-6320-6399
  source 1..80: mol_type = other DNA
tctgacccactggcgctaaaagaatttaaggaatttgcagccggaagaaagtctctgaccctgaacctaatcacagaaat

SEQ ID NO: 3508 - DNA, 80 bp, synthetic construct
  misc_feature 1..80: note = Synthetic: >NC_001474.2-cand-6400-6479
  source 1..80: mol_type = other DNA
gggtaggctcccaaccttcatgactcagaaggcaagagacgcactggacaacttagcagtgctgcacacggctgaggcag

SEQ ID NO: 3509 - DNA, 80 bp, synthetic construct
  misc_feature 1..80: note = Synthetic: >NC_001474.2-cand-6480-6559
  source 1..80: mol_type = other DNA
gtggaagggcgtacaaccatgctctcagtgaactgccggagaccctggagacattgcttttactgacacttctggctaca

SEQ ID NO: 3510 - DNA, 80 bp, synthetic construct
  misc_feature 1..80: note = Synthetic: >NC_001474.2-cand-6520-6599
  source 1..80: mol_type = other DNA
gaccctggagacattgcttttactgacacttctggctacagtcacgggagggatctttttattcttgatgagcggaaggg

SEQ ID NO: 3511 - DNA, 80 bp, synthetic construct
  misc_feature 1..80: note = Synthetic: >NC_001474.2-cand-6640-6719
  source 1..80: mol_type = other DNA
ggctagcatcctcctatggtacgcacaaatacagccacactggatagcagcttcaataatactggagttttttctcatag

SEQ ID NO: 3512 - DNA, 80 bp, synthetic construct
  misc_feature 1..80: note = Synthetic: >NC_001474.2-cand-6720-6799
  source 1..80: mol_type = other DNA
ttttgcttattccagaacctgaaaaacagagaacaccccaagacaaccaactgacctacgttgtcatagccatcctcaca

SEQ ID NO: 3513 - DNA, 80 bp, synthetic construct
  misc_feature 1..80: note = Synthetic: >NC_001474.2-cand-6820-6899
  source 1..80: mol_type = other DNA
aaacgagatgggtttcctagaaaaaacgaagaaagatctcggattgggaagcattgcaacccagcaacccgagagcaaca

SEQ ID NO: 3514 - DNA, 80 bp, synthetic construct
  misc_feature 1..80: note = Synthetic: >NC_001474.2-cand-6900-6979
  source 1..80: mol_type = other DNA
tcctggacatagatctacgtcctgcatcagcatggacgctgtatgccgtggccacaacatttgttacaccaatgttgaga

SEQ ID NO: 3515 - DNA, 80 bp, synthetic construct
  misc_feature 1..80: note = Synthetic: >NC_001474.2-cand-6980-7059
  source 1..80: mol_type = other DNA
catagcattgaaaattcctcagtgaatgtgtccctaacagctatagccaaccaagccacagtgttaatgggtctcgggaa

SEQ ID NO: 3516 - DNA, 80 bp, synthetic construct
  misc_feature 1..80: note = Synthetic: >NC_001474.2-cand-7060-7139
  source 1..80: mol_type = other DNA
aggatggccattgtcaaagatggacatcggagttccccttctcgccattggatgctactcacaagtcaaccccataactc

SEQ ID NO: 3517 - DNA, 80 bp, synthetic construct
  misc_feature 1..80: note = Synthetic: >NC_001474.2-cand-7140-7219
  source 1..80: mol_type = other DNA
tcacagcagctcttttcttattggtagcacattatgccatcatagggccaggactccaagcaaaagcaaccagagaagct

SEQ ID NO: 3518 - DNA, 80 bp, synthetic construct
  misc_feature 1..80: note = Synthetic: >NC_001474.2-cand-7220-7299
  source 1..80: mol_type = other DNA
cagaaaagagcagcggcgggcatcatgaaaaacccaactgtcgatggaataacagtgattgacctagatccaatacctta

SEQ ID NO: 3519 - DNA, 80 bp, synthetic construct
  misc_feature 1..80: note = Synthetic: >NC_001474.2-cand-9860-9939
  source 1..80: mol_type = other DNA
tacttccacagacgcgacctcaggctggcggcaaatgctatttgctcggcagtaccatcacattgggttccaacaagtcg

SEQ ID NO: 3520 - DNA, 80 bp, synthetic construct
  misc_feature 1..80: note = Synthetic: >NC_001474.2-cand-9940-10019
  source 1..80: mol_type = other DNA
aacaacctggtccatacatgctaaacatgaatggatgacaacggaagacatgctgacagtctggaacagggtgtggattc

SEQ ID NO: 3521 - DNA, 80 bp, synthetic construct
  misc_feature 1..80: note = Synthetic: >NC_001474.2-cand-10000-10079
  source 1..80: mol_type = other DNA
ctggaacagggtgtggattcaagaaaacccatggatggaagacaaaactccagtggaatcatgggaggaaatcccatact

SEQ ID NO: 3522 - DNA, 80 bp, synthetic construct
  misc_feature 1..80: note = Synthetic: >NC_001474.2-cand-10110-10189
  source 1..80: mol_type = other DNA
cattgattgggttaacaagcagggccacctgggcaaagaacatccaagcagcaataaatcaagttagatcccttataggc

SEQ ID NO: 3523 - DNA, 80 bp, synthetic construct
  misc_feature 1..80: note = Synthetic: >NC_001474.2-cand-10190-10269
  source 1..80: mol_type = other DNA
aatgaagaatacacagattacatgccatccatgaaaagattcagaagagaagaggaagaagcaggagttctgtggtagaa

SEQ ID NO: 3524 - DNA, 80 bp, synthetic construct
  misc_feature 1..80: note = Synthetic: >NC_001474.2-cand-10270-10349
  source 1..80: mol_type = other DNA
agcaaaactaacatgaaacaaggctagaagtcaggtcggattaagccatagtacggaaaaaactatgctacctgtgagcc

SEQ ID NO: 3525 - DNA, 80 bp, synthetic construct
  misc_feature 1..80: note = Synthetic: >NC_001474.2-cand-10360-10439
  source 1..80: mol_type = other DNA
acgttaaaagaagtcaggccatcataaatgccatagcttgagtaaactatgcagcctgtagctccacctgagaaggtgta

SEQ ID NO: 3526 - DNA, 80 bp, synthetic construct
  misc_feature 1..80: note = Synthetic: >NC_001474.2-cand-10440-10519
  source 1..80: mol_type = other DNA
aaaaatccgggaggccacaaaccatggaagctgtacgcatggcgtagtggactagcggttagaggagacccctcccttac

SEQ ID NO: 3527 - DNA, 80 bp, synthetic construct
  misc_feature 1..80: note = Synthetic: >NC_001474.2-cand-10540-10619
  source 1..80: mol_type = other DNA
gcccaaggcgagatgaagctgtagtctcgctggaaggactagaggttagaggagacccccccgaaacaaaaaacagcata

SEQ ID NO: 3528 - DNA, 80 bp, synthetic construct
  misc_feature 1..80: note = Synthetic: >NC_001475.2-cand-0-79
  source 1..80: mol_type = other DNA
gttagtctacgtggaccgacaagaacagtttcgactcggaagcttgcttaacgtagtgctgacagttttttattagagag

SEQ ID NO: 3529 - DNA, 80 bp, synthetic construct
  misc_feature 1..80: note = Synthetic: >NC_001475.2-cand-80-159
  source 1..80: mol_type = other DNA
cagatctctgatgaacaaccaacggaagaagacgggaaaaccgtctatcaatatgctgaaacgcgtgagaaaccgtgtgt

SEQ ID NO: 3530 - DNA, 80 bp, synthetic construct
  misc_feature 1..80: note = Synthetic: >NC_001475.2-cand-160-239
  source 1..80: mol_type = other DNA
caactggatcacagttggcgaagagattctcaaaaggactgctgaacggccagggaccaatgaaattggttatggcgttc

SEQ ID NO: 3531 - DNA, 80 bp, synthetic construct
  misc_feature 1..80: note = Synthetic: >NC_001475.2-cand-210-289
  source 1..80: mol_type = other DNA
cagggaccaatgaaattggttatggcgttcatagctttcctcagatttctagccattccaccaacagcaggagtcttggc

SEQ ID NO: 3532 - DNA, 80 bp, synthetic construct
  misc_feature 1..80: note = Synthetic: >NC_001475.2-cand-320-399
  source 1..80: mol_type = other DNA
cattaaggtcctgaaaggcttcaagaaggagatctcaaacatgctgagcataatcaaccaacggaaaaagacatcgctct

SEQ ID NO: 3533 - DNA, 80 bp, synthetic construct
  misc_feature 1..80: note = Synthetic: >NC_001475.2-cand-390-469
  source 1..80: mol_type = other DNA
acatcgctctgtctcatgatgatattgccagcagcacttgctttccacttgacttcacgagatggagagccgcgcatgat

SEQ ID NO: 3534 - DNA, 80 bp, synthetic construct
  misc_feature 1..80: note = Synthetic: >NC_001475.2-cand-480-559
  source 1..80: mol_type = other DNA
aatgaaagaggtaaatccctactttttaagacagcctctggaatcaacatgtgcacactcatagccatggatttgggaga

SEQ ID NO: 3535 - DNA, 80 bp, synthetic construct
  misc_feature 1..80: note = Synthetic: >NC_001475.2-cand-3110-3189
  source 1..80: mol_type = other DNA
tggtgtgctagagagtgacatgatcatcccaaagagtctagctggtcctatctcacaacacaactacaggcccgggtacc

SEQ ID NO: 3536 - DNA, 80 bp, synthetic construct
  misc_feature 1..80: note = Synthetic: >NC_001475.2-cand-3190-3269
  source 1..80: mol_type = other DNA
acacccaaacggcaggaccctggcacttaggaaaattggagctggacttcaactactgtgaaggaacaacagttgtcatc

SEQ ID NO: 3537 - DNA, 80 bp, synthetic construct
  misc_feature 1..80: note = Synthetic: >NC_001475.2-cand-3270-3349
  source 1..80: mol_type = other DNA
acagaaagctgtgggacaagaggcccatcattgagaacaacaacagtgtcagggaagttgatacacgaatggtgttgccg

SEQ ID NO: 3538 - DNA, 80 bp, synthetic construct
  misc_feature 1..80: note = Synthetic: >NC_001475.2-cand-3350-3429
  source 1..80: mol_type = other DNA
ctcgtgcacacttccccccctgcgatacatgggagaagacggctgctggtatggcatggaaatcagacccatcagtgaga

SEQ ID NO: 3539 - DNA, 80 bp, synthetic construct
  misc_feature 1..80: note = Synthetic: >NC_001475.2-cand-3430-3509
  source 1..80: mol_type = other DNA
aagaagagaacatggtaaagtctttagtctcagcgggaagtggaaaggtggacaacttcacaatgggtgtcttgtgtttg

SEQ ID NO: 3540 - DNA, 80 bp, synthetic construct
  misc_feature 1..80: note = Synthetic: >NC_001475.2-cand-3490-3569
  source 1..80: mol_type = other DNA
caatgggtgtcttgtgtttggcaatcctctttgaagaggtgttgagaggaaaatttgggaagaaacacatgattgcaggg

SEQ ID NO: 3541 - DNA, 80 bp, synthetic construct
  misc_feature 1..80: note = Synthetic: >NC_001475.2-cand-3590-3669
  source 1..80: mol_type = other DNA
ccttctctcagggcaaataacatggagagacatggcgcacacactaataatgatcgggtccaacgcctctgacaggatgg

SEQ ID NO: 3542 - DNA, 80 bp, synthetic construct
  misc_feature 1..80: note = Synthetic: >NC_001475.2-cand-3670-3749
  source 1..80: mol_type = other DNA
gaatgggcgtcacctacctagctctaattgcaacatttaaaatccagccattcttggctttgggatttttcctaagaaag

SEQ ID NO: 3543 - DNA, 80 bp, synthetic construct
  misc_feature 1..80: note = Synthetic: >NC_001475.2-cand-3750-3829
  source 1..80: mol_type = other DNA
ctgacatctagagaaaatttattgttaggagttgggttggccatggcaacaacgttacaactgccagaggacattgaaca

SEQ ID NO: 3544 - DNA, 80 bp, synthetic construct
  misc_feature 1..80: note = Synthetic: >NC_001475.2-cand-3860-3939
  source 1..80: mol_type = other DNA
ggctcttaaactgataacacaatttgaaacataccaattgtggacggcattagtctccttaacgtgttcaaacacaattt

SEQ ID NO: 3545 - DNA, 80 bp, synthetic construct
  misc_feature 1..80: note = Synthetic: >NC_001475.2-cand-3910-3989
  source 1..80: mol_type = other DNA
tagtctccttaacgtgttcaaacacaatttttacgttgactgttgcctggagaacagccactctgattttggccggagtt

SEQ ID NO: 3546 - DNA, 80 bp, synthetic construct
  misc_feature 1..80: note = Synthetic: >NC_001475.2-cand-3990-4069
  source 1..80: mol_type = other DNA
tcgcttttaccagtgtgccagtcttcaagcatgaggaaaacagattggctcccaatgacagtggcagctatgggagttcc

SEQ ID NO: 3547 - DNA, 80 bp, synthetic construct
  misc_feature 1..80: note = Synthetic: >NC_001475.2-cand-4060-4139
  source 1..80: mol_type = other DNA
tgggagttccaccccttccactttttatttttagcttgaaagacacactcaaaaggagaagctggccactgaatgaaggg

SEQ ID NO: 3548 - DNA, 80 bp, synthetic construct
  misc_feature 1..80: note = Synthetic: >NC_001475.2-cand-4140-4219
  source 1..80: mol_type = other DNA
gtgatggctgttgggcttgtgagcattctggccagttctctccttagaaatgatgtgcccatggctggaccattagtggc

SEQ ID NO: 3549 - DNA, 80 bp, synthetic construct
  misc_feature 1..80: note = Synthetic: >NC_001475.2-cand-4230-4309
  source 1..80: mol_type = other DNA
ctgatagcgtgctacgtcataactggcacgtcagcggacctcactgtagaaaaagccccagatgtaacatgggaggaaga

SEQ ID NO: 3550 - DNA, 80 bp, synthetic construct
  misc_feature 1..80: note = Synthetic: >NC_001475.2-cand-4310-4389
  source 1..80: mol_type = other DNA
ggctgagcagacaggagtgtcccacaacttaatgatcacagttgatgatgatggaacaatgagaataaaagatgatgaga

SEQ ID NO: 3551 - DNA, 80 bp, synthetic construct
  misc_feature 1..80: note = Synthetic: >NC_001475.2-cand-6980-7059
  source 1..80: mol_type = other DNA
catagagaattctacagcaaatgtgtccctggcagctatagccaaccaggcagtggtcctgatgggtttggacaaaggat

SEQ ID NO: 3552 - DNA, 80 bp, synthetic construct
  misc_feature 1..80: note = Synthetic: >NC_001475.2-cand-7060-7139
  source 1..80: mol_type = other DNA
ggccaatatcaaaaatggacttaggcgtgccactactggcactgggttgctattcacaagtgaacccactgactctaact

SEQ ID NO: 3553 - DNA, 80 bp, synthetic construct
  misc_feature 1..80: note = Synthetic: >NC_001475.2-cand-7140-7219
  source 1..80: mol_type = other DNA
gcggcagtacttttgctaatcacacattatgctatcataggtccaggattgcaagcaaaagccacccgtgaagctcagaa

SEQ ID NO: 3554 - DNA, 80 bp, synthetic construct
  misc_feature 1..80: note = Synthetic: >NC_001475.2-cand-7220-7299
  source 1..80: mol_type = other DNA
aaggacagctgctggaataatgaagaatccaacagtggatgggataatgacaatagacctagattctgtaatatttgatt

SEQ ID NO: 3555 - DNA, 80 bp, synthetic construct
  misc_feature 1..80: note = Synthetic: >NC_001475.2-cand-7300-7379
  source 1..80: mol_type = other DNA
caaaatttgaaaaacaactgggacaggttatgctcctggttttgtgcgcagtccaactcttgctaatgagaacatcatgg

SEQ ID NO: 3556 - DNA, 80 bp, synthetic construct
  misc_feature 1..80: note = Synthetic: >NC_001475.2-cand-7380-7459
  source 1..80: mol_type = other DNA
gccttgtgtgaagctttaactctagctacaggaccaataacaacactctgggaaggatcacctggtaagttctggaacac

SEQ ID NO: 3557 - DNA, 80 bp, synthetic construct
  misc_feature 1..80: note = Synthetic: >NC_001475.2-cand-7460-7539
  source 1..80: mol_type = other DNA
cacgatagctgtttccatggcgaacatttttagagggagctatttagcaggagctgggcttgctttttctattatgaaat

SEQ ID NO: 3558 - DNA, 80 bp, synthetic construct
  misc_feature 1..80: note = Synthetic: >NC_001475.2-cand-7540-7619
  source 1..80: mol_type = other DNA
cagttggaacaggaaaaagaggaacaggctcacaaggtgaaactttaggagaaaaatggaaaaagaaattaaatcaatta

SEQ ID NO: 3559 - DNA, 80 bp, synthetic construct
  misc_feature 1..80: note = Synthetic: >NC_001475.2-cand-7620-7699
  source 1..80: mol_type = other DNA
tcccggaaagagtttgacctttacaagaaatctggaatcactgaagtggatagaacagaagccaaagaagggttgaaaag

SEQ ID NO: 3560 - DNA, 80 bp, synthetic construct
  misc_feature 1..80: note = Synthetic: >NC_001475.2-cand-7700-7779
  source 1..80: mol_type = other DNA
aggagagacaacacatcatgccgtgtcccgaggtagcgcaaaacttcaatggtttgtggaaagaaacatggtcgttcccg

SEQ ID NO: 3561 - DNA, 80 bp, synthetic construct
  misc_feature 1..80: note = Synthetic: >NC_001475.2-cand-7780-7859
  source 1..80: mol_type = other DNA
aaggaagagtcatagacttgggctgtggaagaggaggctggtcatattactgtgcaggactgaaaaaagtcacagaagtg

SEQ ID NO: 3562 - DNA, 80 bp, synthetic construct
  misc_feature 1..80: note = Synthetic: >NC_001475.2-cand-7860-7939
  source 1..80: mol_type = other DNA
cgaggatacacaaaaggcggtccaggacacgaagaaccagtacctatgtctacatatggatggaacatagttaagttaat

SEQ ID NO: 3563 - DNA, 80 bp, synthetic construct
  misc_feature 1..80: note = Synthetic: >NC_001475.2-cand-7930-8009
  source 1..80: mol_type = other DNA
ttaagttaatgagcggaaaggatgtgttctatctcccacctgaaaagtgtgataccctgttgtgtgacattggagaatct

SEQ ID NO: 3564 - DNA, 80 bp, synthetic construct
  misc_feature 1..80: note = Synthetic: >NC_001475.2-cand-8010-8089
  source 1..80: mol_type = other DNA
tcaccaagcccaacagtggaagagagcagaactataagagttttgaagatggttgaaccatggctaaaaaacaaccagtt

SEQ ID NO: 3565 - DNA, 80 bp, synthetic construct
  misc_feature 1..80: note = Synthetic: >NC_001475.2-cand-8090-8169
  source 1..80: mol_type = other DNA
ttgcattaaagttttgaacccttacatgccaactgtgattgagcacctagaaagactacaaaggaaacatggaggaatgc

SEQ ID NO: 3566 - DNA, 80 bp, synthetic construct
  misc_feature 1..80: note = Synthetic: >NC_001475.2-cand-8170-8249
  source 1..80: mol_type = other DNA
ttgtgagaaatccactttcacgaaactccacgcacgaaatgtactggatatctaatggcacaggtaacattgtctcttca

SEQ ID NO: 3567 - DNA, 80 bp, synthetic construct
  misc_feature 1..80: note = Synthetic: >NC_001477.1-cand-210-289
  source 1..80: mol_type = other DNA
caaggacccatgaaattggtgatggcttttatagcattcctaagatttctagccatacctccaacagcaggaattttggc

SEQ ID NO: 3568 - DNA, 80 bp, synthetic construct
  misc_feature 1..80: note = Synthetic: >NC_001477.1-cand-340-419
  source 1..80: mol_type = other DNA
tcaagaaagaaatctcaaacatgttgaacataatgaacaggaggaaaagatctgtgaccatgctcctcatgctgctgccc

SEQ ID NO: 3569 - DNA, 80 bp, synthetic construct
  misc_feature 1..80: note = Synthetic: >NC_001477.1-cand-370-449
  source 1..80: mol_type = other DNA
taatgaacaggaggaaaagatctgtgaccatgctcctcatgctgctgcccacagccctggcgttccatctgaccacccga

SEQ ID NO: 3570 - DNA, 80 bp, synthetic construct
  misc_feature 1..80: note = Synthetic: >NC_001477.1-cand-490-569
  source 1..80: mol_type = other DNA
gaaaatcacttttgtttaagacctctgcaggtgtcaacatgtgcacccttattgcaatggatttgggagagttatgtgag

SEQ ID NO: 3571 - DNA, 80 bp, synthetic construct
  misc_feature 1..80: note = Synthetic: >NC_001477.1-cand-570-649
  source 1..80: mol_type = other DNA
gacacaatgacctacaaatgcccccggatcactgagacggaaccagatgacgttgactgttggtgcaatgccacggagac

SEQ ID NO: 3572 - DNA, 80 bp, synthetic construct
  misc_feature 1..80: note = Synthetic: >NC_001477.1-cand-650-729
  source 1..80: mol_type = other DNA
atgggtgacctatggaacatgttctcaaactggtgaacaccgacgagacaaacgttccgtcgcactggcaccacacgtag

SEQ ID NO: 3573 - DNA, 80 bp, synthetic construct
  misc_feature 1..80: note = Synthetic: >NC_001477.1-cand-730-809
  source 1..80: mol_type = other DNA
ggcttggtctagaaacaagaaccgaaacgtggatgtcctctgaaggcgcttggaaacaaatacaaaaagtggagacctgg

SEQ ID NO: 3574 - DNA, 80 bp, synthetic construct
  misc_feature 1..80: note = Synthetic: >NC_001477.1-cand-810-889
  source 1..80: mol_type = other DNA
gctctgagacacccaggattcacggtgatagccctttttctagcacatgccataggaacatccatcacccagaaagggat

SEQ ID NO: 3575 - DNA, 80 bp, synthetic construct
  misc_feature 1..80: note = Synthetic: >NC_001477.1-cand-890-969
  source 1..80: mol_type = other DNA
catttttattttgctgatgctggtaactccatccatggccatgcggtgcgtgggaataggcaacagagacttcgtggaag

SEQ ID NO: 3576 - DNA, 80 bp, synthetic construct
  misc_feature 1..80: note = Synthetic: >NC_001477.1-cand-970-1049
  source 1..80: mol_type = other DNA
gactgtcaggagctacgtgggtggatgtggtactggagcatggaagttgcgtcactaccatggcaaaagacaaaccaaca

SEQ ID NO: 3577 - DNA, 80 bp, synthetic construct
  misc_feature 1..80: note = Synthetic: >NC_001477.1-cand-1050-1129
  source 1..80: mol_type = other DNA
ctggacattgaactcttgaagacggaggtcacaaaccctgccgtcctgcgcaaactgtgcattgaagctaaaatatcaaa

SEQ ID NO: 3578 - DNA, 80 bp, synthetic construct
  misc_feature 1..80: note = Synthetic: >NC_001477.1-cand-1130-1209
  source 1..80: mol_type = other DNA
caccaccaccgattcgagatgtccaacacaaggagaagccacgctggtggaagaacaggacacgaactttgtgtgtcgac

SEQ ID NO: 3579 - DNA, 80 bp, synthetic construct
  misc_feature 1..80: note = Synthetic: >NC_001477.1-cand-1240-1319
  source 1..80: mol_type = other DNA
gttgtgggctattcggaaaaggtagcttaataacgtgtgctaagtttaagtgtgtgacaaaactggaaggaaagatagtc

SEQ ID NO: 3580 - DNA, 80 bp, synthetic construct
  misc_feature 1..80: note = Synthetic: >NC_001477.1-cand-1290-1369
  source 1..80: mol_type = other DNA
tgtgtgacaaaactggaaggaaagatagtccaatatgaaaacttaaaatattcagtgatagtcaccgtacacactggaga

SEQ ID NO: 3581 - DNA, 80 bp, synthetic construct
  misc_feature 1..80: note = Synthetic: >NC_001477.1-cand-1370-1449
  source 1..80: mol_type = other DNA
ccagcaccaagttggaaatgagaccacagaacatggaacaactgcaaccataacacctcaagctcccacgtcggaaatac

SEQ ID NO: 3582 - DNA, 80 bp, synthetic construct
  misc_feature 1..80: note = Synthetic: >NC_001477.1-cand-1450-1529
  source 1..80: mol_type = other DNA
agctgacagactacggagctctaacattggattgttcacctagaacagggctagactttaatgagatggtgttgttgaca

SEQ ID NO: 3583 - DNA, 80 bp, synthetic construct
  misc_feature 1..80: note = Synthetic: >NC_001477.1-cand-4030-4109
  source 1..80: mol_type = other DNA
aaaaaacaacatggcttccggtgttgctgggatctcttggatgcaaaccactaaccatgtttcttataacagaaaacaaa

SEQ ID NO: 3584 - DNA, 80 bp, synthetic construct
  misc_feature 1..80: note = Synthetic: >NC_001477.1-cand-4130-4209
  source 1..80: mol_type = other DNA
gcctctcaatgaaggaattatggctgttggaatagttagcattcttctaagttcacttctcaagaatgatgtgccactag

SEQ ID NO: 3585 - DNA, 80 bp, synthetic construct
  misc_feature 1..80: note = Synthetic: >NC_001477.1-cand-4210-4289
  source 1..80: mol_type = other DNA
ctggcccactaatagctggaggcatgctaatagcatgttatgtcatatctggaagctcggccgatttatcactggagaaa

SEQ ID NO: 3586 - DNA, 80 bp, synthetic construct
  misc_feature 1..80: note = Synthetic: >NC_001477.1-cand-4290-4369
  source 1..80: mol_type = other DNA
gcggctgaggtctcctgggaagaagaagcagaacactctggtgcctcacacaacatactagtggaggtccaagatgatgg

SEQ ID NO: 3587 - DNA, 80 bp, synthetic construct
  misc_feature 1..80: note = Synthetic: >NC_001477.1-cand-4360-4439
  source 1..80: mol_type = other DNA
aagatgatggaaccatgaagataaaggatgaagagagagatgacacactcaccattctcctcaaagcaactctgctagca

SEQ ID NO: 3588 - DNA, 80 bp, synthetic construct
  misc_feature 1..80: note = Synthetic: >NC_001477.1-cand-4450-4529
  source 1..80: mol_type = other DNA
tatacccaatgtcaataccggcgaccctctttgtgtggtatttttggcagaaaaagaaacagagatcaggagtgctatgg

SEQ ID NO: 3589 - DNA, 80 bp, synthetic construct
  misc_feature 1..80: note = Synthetic: >NC_001477.1-cand-4530-4609
  source 1..80: mol_type = other DNA
gacacacccagccctccagaagtggaaagagcagtccttgatgatggcatttatagaattctccaaagaggattgttggg

SEQ ID NO: 3590 - DNA, 80 bp, synthetic construct
  misc_feature 1..80: note = Synthetic: >NC_001477.1-cand-4590-4669
  source 1..80: mol_type = other DNA
ctccaaagaggattgttgggcaggtctcaagtaggagtaggagtttttcaagaaggcgtgttccacacaatgtggcacgt

SEQ ID NO: 3591 - DNA, 80 bp, synthetic construct
  misc_feature 1..80: note = Synthetic: >NC_001477.1-cand-4690-4769
  source 1..80: mol_type = other DNA
tgtaccaagggaagagactggaaccaagttgggccagtgtcaaaaaagacttgatctcatatggaggaggttggaggttt

SEQ ID NO: 3592 - DNA, 80 bp, synthetic construct
  misc_feature 1..80: note = Synthetic: >NC_001477.1-cand-4740-4819
  source 1..80: mol_type = other DNA
ttgatctcatatggaggaggttggaggtttcaaggatcctggaacgcgggagaagaagtgcaggtgattgctgttgaacc

SEQ ID NO: 3593 - DNA, 80 bp, synthetic construct
  misc_feature 1..80: note = Synthetic: >NC_001477.1-cand-4850-4929
  source 1..80: mol_type = other DNA
gccgggtaccttcaagacccctgaaggcgaagttggagccatagctctagactttaaacccggcacatctggatctccta

SEQ ID NO: 3594 - DNA, 80 bp, synthetic construct
  misc_feature 1..80: note = Synthetic: >NC_001477.1-cand-4930-5009
  source 1..80: mol_type = other DNA
tcgtgaacagagagggaaaaatagtaggtctttatggaaatggagtggtgacaacaagtggtacctacgtcagtgccata

SEQ ID NO: 3595 - DNA, 80 bp, synthetic construct
  misc_feature 1..80: note = Synthetic: >NC_001477.1-cand-5010-5089
  source 1..80: mol_type = other DNA
gctcaagctaaagcatcacaagaagggcctctaccagagattgaggacgaggtgtttaggaaaagaaacttaacaataat

SEQ ID NO: 3596 - DNA, 80 bp, synthetic construct
  misc_feature 1..80: note = Synthetic: >NC_001477.1-cand-5090-5169
  source 1..80: mol_type = other DNA
ggacctacatccaggatcgggaaaaacaagaagataccttccagccatagtccgtgaggccataaaaagaaagctgcgca

SEQ ID NO: 3597 - DNA, 80 bp, synthetic construct
  misc_feature 1..80: note = Synthetic: >NC_001477.1-cand-5170-5249
  source 1..80: mol_type = other DNA
cgctagtcttagctcccacaagagttgtcgcttctgaaatggcagaggcgctcaagggaatgccaataaggtatcagaca

SEQ ID NO: 3598 - DNA, 80 bp, synthetic construct
  misc_feature 1..80: note = Synthetic: >NC_001477.1-cand-5250-5329
  source 1..80: mol_type = other DNA
acagcagtgaagagtgaacacacgggaaaggagatagttgaccttatgtgtcacgccactttcactatgcgtctcctgtc

SEQ ID NO: 3599 - DNA, 80 bp, synthetic construct
  misc_feature 1..80: note = Synthetic: >NC_001489.1-cand-4830-4909
  source 1..80: mol_type = other DNA
gaatgttaatttagctaaaacaaatgatgcaatcaaagatatgtcttgtgttgatttgataatggatggacataatgttt

SEQ ID NO: 3600 - DNA, 80 bp, synthetic construct
  misc_feature 1..80: note = Synthetic: >NC_001489.1-cand-4910-4989
  source 1..80: mol_type = other DNA
cattgatggatttgctcagttctttagtcatgacagttgaaattagaaaacaaaacatgactgaattcatggagttgtgg

SEQ ID NO: 3601 - DNA, 80 bp, synthetic construct
  misc_feature 1..80: note = Synthetic: >NC_001489.1-cand-4990-5069
  source 1..80: mol_type = other DNA
tctcagggaatttcagatgatgataatgatagtgcagtagctgagtttttccagtcttttccatctggtgaaccatcgaa

SEQ ID NO: 3602 - DNA, 80 bp, synthetic construct
  misc_feature 1..80: note = Synthetic: >NC_001489.1-cand-5070-5149
  source 1..80: mol_type = other DNA
ctctaaattatctggctttttccaatctgttactaatcacaagtgggttgctgtgggagctgcagttggcattcttggag

SEQ ID NO: 3603 - DNA, 80 bp, synthetic construct
  misc_feature 1..80: note = Synthetic: >NC_001489.1-cand-5140-5219
  source 1..80: mol_type = other DNA
attcttggagtgctcgttggaggatggtttgtgtataagcatttctcccgcaaagaggaggaaccaatcccagctgaagg

SEQ ID NO: 3604 - DNA, 80 bp, synthetic construct
  misc_feature 1..80: note = Synthetic: >NC_001489.1-cand-5240-5319
  source 1..80: mol_type = other DNA
agcccaagcaagtgattaaattagatgcagatccagtagaatctcagtcaactttggaaatagcaggactggttaggaag

SEQ ID NO: 3605 - DNA, 80 bp, synthetic construct
  misc_feature 1..80: note = Synthetic: >NC_001489.1-cand-5320-5399
  source 1..80: mol_type = other DNA
aacttggttcagtttggagttggagagaagaatggatgtgtgagatgggttatgaatgccttgggagtgaaagatgattg

SEQ ID NO: 3606 - DNA, 80 bp, synthetic construct
  misc_feature 1..80: note = Synthetic: >NC_001489.1-cand-5400-5479
  source 1..80: mol_type = other DNA
gctgcttgtgccttcccatgcttataaatttgagaaagattatgaaatgatggagttttattttaatagaggtggaactt

SEQ ID NO: 3607 - DNA, 80 bp, synthetic construct
  misc_feature 1..80: note = Synthetic: >NC_001489.1-cand-5480-5559
  source 1..80: mol_type = other DNA
actattcaatttcagctggtaatgttgttattcaatctttggatgtgggattccaggatgttgttctgatgaaggttcct

SEQ ID NO: 3608 - DNA, 80 bp, synthetic construct
  misc_feature 1..80: note = Synthetic: >NC_001489.1-cand-5520-5599
  source 1..80: mol_type = other DNA
ggatgtgggattccaggatgttgttctgatgaaggttcctacaattcctaagtttagagatattactcagcattttatta

SEQ ID NO: 3609 - DNA, 80 bp, synthetic construct
  misc_feature 1..80: note = Synthetic: >NC_001489.1-cand-5640-5719
  source 1..80: mol_type = other DNA
attagtgacaactgtaaatggaacccctatgttaatttctgagggcccactaaagatggaagagaaagctacttatgttc

SEQ ID NO: 3610 - DNA, 80 bp, synthetic construct
  misc_feature 1..80: note = Synthetic: >NC_001489.1-cand-5720-5799
  source 1..80: mol_type = other DNA
ataagaaaaatgatggtacaacagttgatttaactgtggatcaggcatggagaggaaaaggcgaaggtcttcctggaatg

SEQ ID NO: 3611 - DNA, 80 bp, synthetic construct
  misc_feature 1..80: note = Synthetic: >NC_001489.1-cand-5810-5889
  source 1..80: mol_type = other DNA
ccttggtttcatcgaatcaatctatacagaatgcaatcttgggcatccatgttgctggaggaaattcaattcttgttgca

SEQ ID NO: 3612 - DNA, 80 bp, synthetic construct
  misc_feature 1..80: note = Synthetic: >NC_001489.1-cand-5880-5959
  source 1..80: mol_type = other DNA
tcttgttgcaaaattggttactcaagaaatgttccaaaatattgataagaaaattgaaagtcagagaattatgaaagtgg

SEQ ID NO: 3613 - DNA, 80 bp, synthetic construct
  misc_feature 1..80: note = Synthetic: >NC_001489.1-cand-5960-6039
  source 1..80: mol_type = other DNA
agtttactcagtgttcaatgaatgtggtctccaaaacgctttttagaaagagtcccatttatcatcacattgataaaacc

SEQ ID NO: 3614 - DNA, 80 bp, synthetic construct
  misc_feature 1..80: note = Synthetic: >NC_001489.1-cand-6040-6119
  source 1..80: mol_type = other DNA
atgattaattttcctgcagctatgcccttttctaaagctgaaattgatccaatggctgtgatgttatctaagtattcatt

SEQ ID NO: 3615 - DNA, 80 bp, synthetic construct
  misc_feature 1..80: note = Synthetic: >NC_001611.1-cand-161640-161719
  source 1..80: mol_type = other DNA
tgcatgatagaatggttcagtggcaaacttccatggaaaaacaaaagtagtatagcaatacaacagaaaagagaatataa

SEQ ID NO: 3616 - DNA, 80 bp, synthetic construct
  misc_feature 1..80: note = Synthetic: >NC_001611.1-cand-161720-161799
  source 1..80: mol_type = other DNA
aaaatttatagctactttctttgaggactgttttccggaaggaaataaacctttggaattagtatacacgttagattatt

SEQ ID NO: 3617 - DNA, 80 bp, synthetic construct
  misc_feature 1..80: note = Synthetic: >NC_001611.1-cand-161800-161879
  source 1..80: mol_type = other DNA
ctcaaactcctaattatgaaagactacgtagactagactgtttatacaagattgaaattatattcttttttatagagcgt

SEQ ID NO: 3618 - DNA, 80 bp, synthetic construct
  misc_feature 1..80: note = Synthetic: >NC_001611.1-cand-161880-161959
  source 1..80: mol_type = other DNA
gtgatgttacggatatctaataatattagactatctctgacactacacgaccaaatcgattactatggatatcttcaggg

SEQ ID NO: 3619 - DNA, 80 bp, synthetic construct
  misc_feature 1..80: note = Synthetic: >NC_001611.1-cand-161960-162039
  source 1..80: mol_type = other DNA
aaatcgcatcttctacgaaaggagagaatgtattcatttctccagcgacaatctcgtcagtattgacaatactgtattat

SEQ ID NO: 3620 - DNA, 80 bp, synthetic construct
  misc_feature 1..80: note = Synthetic: >NC_001611.1-cand-162040-162119
  source 1..80: mol_type = other DNA
ggagctaatggatccactgctgaacagttatcaaaatatgtagaaaaggaggagaccatggataaagttagcgctcagaa

SEQ ID NO: 3621 - DNA, 80 bp, synthetic construct
  misc_feature 1..80: note = Synthetic: >NC_001611.1-cand-162190-162269
  source 1..80: mol_type = other DNA
aaaattggcgataatttccaaactgttgacttcactgattgtcgcactatagatgctatcaataagtgtgttgatgtctt

SEQ ID NO: 3622 - DNA, 80 bp, synthetic construct
  misc_feature 1..80: note = Synthetic: >NC_001611.1-cand-162280-162359
  source 1..80: mol_type = other DNA
aaaatcaatccactattgactgaacaattgtctcccaatacctgtctcctagcaattagtgccgtatactttaaagcaaa

SEQ ID NO: 3623 - DNA, 80 bp, synthetic construct
  misc_feature 1..80: note = Synthetic: >NC_001611.1-cand-162360-162439
  source 1..80: mol_type = other DNA
atggttgataccattcaaaaaggaatttaccagtgattatccattttacgtatcaccaacggaaatggtagacgtaagta

SEQ ID NO: 3624 - DNA, 80 bp, synthetic construct
  misc_feature 1..80: note = Synthetic: >NC_001611.1-cand-162440-162519
  source 1..80: mol_type = other DNA
tgatgtctatgtatggtgagtcatttaattacgcatctgtaaaagaatcattcggtaacttttcaatcatagaactgcca

SEQ ID NO: 3625 - DNA, 80 bp, synthetic construct
  misc_feature 1..80: note = Synthetic: >NC_001611.1-cand-162520-162599
  source 1..80: mol_type = other DNA
tatgttggaaatactagtatgatggtcattcttccagacaagattgatggattagaatccataaaacaaaatctaacaga

SEQ ID NO: 3626 - DNA, 80 bp, synthetic construct
  misc_feature 1..80: note = Synthetic: >NC_001611.1-cand-162680-162759
  source 1..80: mol_type = other DNA
cgtataatctggtggatactctagtaaagttgggactgacagatgtgttctattcaactggcgattatagcaatatgtgt

SEQ ID NO: 3627 - DNA, 80 bp, synthetic construct
  misc_feature 1..80: note = Synthetic: >NC_001611.1-cand-163180-163259
  source 1..80: mol_type = other DNA
atatatttattggtcgtcctatgcataccgcaacaggcaatgcgctggacagttgtattccacactcctctcttttagag

SEQ ID NO: 3628 - DNA, 80 bp, synthetic construct
  misc_feature 1..80: note = Synthetic: >NC_001611.1-cand-163260-163339
  source 1..80: mol_type = other DNA
atgatgcggaatcagtgttcatcgatgttcgcgagctggtgaaaaatatgccgtgggatgatgtcaaagattgtgtagaa

SEQ ID NO: 3629 - DNA, 80 bp, synthetic construct
  misc_feature 1..80: note = Synthetic: >NC_001611.1-cand-163430-163509
  source 1..80: mol_type = other DNA
ggaggcgaagaccatcccactagtaacagtctgaacgcattgtttgtgatgcttaaaatgctcaattacgtggattataa

SEQ ID NO: 3630 - DNA, 80 bp, synthetic construct
  misc_feature 1..80: note = Synthetic: >NC_001611.1-cand-163500-163579
  source 1..80: mol_type = other DNA
tggattataacatcatattccggcgtatgaattgacatttctccctttcccagaaataaacttttttacccactataaaa

SEQ ID NO: 3631 - DNA, 80 bp, synthetic construct
  misc_feature 1..80: note = Synthetic: >NC_001611.1-cand-167430-167509
  source 1..80: mol_type = other DNA
atattatacatgttaacaatttacgatctttataatatatcgtatccacctaccaaagtatagttgtatttgtaattttt

SEQ ID NO: 3632 - DNA, 80 bp, synthetic construct
  misc_feature 1..80: note = Synthetic: >NC_001611.1-cand-167510-167589
  source 1..80: mol_type = other DNA
ctcatacgatgtgtgtaaaaactgatattataaattatcttagtgtcgtatgatgaagatgacgatgaaaatgatggtac

SEQ ID NO: 3633 - DNA, 80 bp, synthetic construct
  misc_feature 1..80: note = Synthetic: >NC_001611.1-cand-167590-167669
  source 1..80: mol_type = other DNA
atatatattttgtatcattattgttattgctattccacagttacgccatagacattgaaaatgaaatcacagatttcttc

SEQ ID NO: 3634 - DNA, 80 bp, synthetic construct
  misc_feature 1..80: note = Synthetic: >NC_001611.1-cand-167670-167749
  source 1..80: mol_type = other DNA
aataaaatgaaagatactctaccagctaaagactctaaatggttgaatccaacatgtatatttggaggcacaatgaataa

SEQ ID NO: 3635 - DNA, 80 bp, synthetic construct
  misc_feature 1..80: note = Synthetic: >NC_001611.1-cand-167750-167829
  source 1..80: mol_type = other DNA
tatggctgctataggagagccattcagtgcaaagtgtcctcctattgaagacagtcttttatcgcgtagatatataaata

SEQ ID NO: 3636 - DNA, 80 bp, synthetic construct
  misc_feature 1..80: note = Synthetic: >NC_001611.1-cand-167830-167909
  source 1..80: mol_type = other DNA
aagacaacgtagttaactgggagaaaataggaaaaactagacgacctcttaatagacgtgttaaaaacggtgacttatgg

SEQ ID NO: 3637 - DNA, 80 bp, synthetic construct
  misc_feature 1..80: note = Synthetic: >NC_001611.1-cand-167910-167989
  source 1..80: mol_type = other DNA
atagccaactatacatctaacgacagtcatcgtatgtatttgtgtacagtgattacaaagaatggcgactgtattcaagg

SEQ ID NO: 3638 - DNA, 80 bp, synthetic construct
  misc_feature 1..80: note = Synthetic: >NC_001611.1-cand-167990-168069
  source 1..80: mol_type = other DNA
tatagttagatcccatgtacggaaaccttcttcatgcattccagaaatctatgaactaggtactcatgataagtatggaa

SEQ ID NO: 3639 - DNA, 80 bp, synthetic construct
  misc_feature 1..80: note = Synthetic: >NC_001611.1-cand-168150-168229
  source 1..80: mol_type = other DNA
gatgatattaagtattcacaaacgggaaaggaattaattattcataatccagcattagaagatagcggaagatatgactg

SEQ ID NO: 3640 - DNA, 80 bp, synthetic construct
  misc_feature 1..80: note = Synthetic: >NC_001611.1-cand-168310-168389
  source 1..80: mol_type = other DNA
aagaccacaggtttaaactaatactagattcgaaaatcaacgtaattataggagaacctgccaatataacatgcactgct

SEQ ID NO: 3641 - DNA, 80 bp, synthetic construct
  misc_feature 1..80: note = Synthetic: >NC_001611.1-cand-168390-168469
  source 1..80: mol_type = other DNA
gtatcaacgtcattattgttcgatgatgtactgattgaatgggaaaatccatccggatggcttataggattcgattttga

SEQ ID NO: 3642 - DNA, 80 bp, synthetic construct
  misc_feature 1..80: note = Synthetic: >NC_001611.1-cand-168470-168549
  source 1..80: mol_type = other DNA
tgtatactctgttttaactagtagaggcggtattactgaggcgaccttgtattttaaaaatgttactgaagaatatatag

SEQ ID NO: 3643 - DNA, 80 bp, synthetic construct
  misc_feature 1..80: note = Synthetic: >NC_001611.1-cand-168550-168629
  source 1..80: mol_type = other DNA
gtaatacatataaatgtcgtggacacaactattattttgaaaaaacccttacaactacagtagtattggagtaaatacac

SEQ ID NO: 3644 - DNA, 80 bp, synthetic construct
  misc_feature 1..80: note = Synthetic: >NC_001611.1-cand-168950-169029
  source 1..80: mol_type = other DNA
agaactggtatgaatagcgagagtgagagtgataatatatcaatcaaaacagaatatgagaatgaatacgaattctatga

SEQ ID NO: 3645 - DNA, 80 bp, synthetic construct
  misc_feature 1..80: note = Synthetic: >NC_001611.1-cand-169030-169109
  source 1..80: mol_type = other DNA
tgaaacacaagatcaaagtacacaactagtaggttacgacattaaactcaaaaccaatgaggatgattttgtggatgaat

SEQ ID NO: 3646 - DNA, 80 bp, synthetic construct
  misc_feature 1..80: note = Synthetic: >NC_001611.1-cand-169270-169349
  source 1..80: mol_type = other DNA
cgaagacagacatacagtagacgaattctacaagatagacagcgtatcaaatgtaaatgacgcggaacacatatctcaga

SEQ ID NO: 3647 - DNA, 80 bp, synthetic construct
  misc_feature 1..80: note = Synthetic: >NC_001611.1-cand-173900-173979
  source 1..80: mol_type = other DNA
ggtattacttactttttgaccgtgtgtaaaatgactcgagtatttgacttccagatatggattattatcgaggagactgt

SEQ ID NO: 3648 - DNA, 80 bp, synthetic construct
  misc_feature 1..80: note = Synthetic: >NC_001611.1-cand-173980-174059
  source 1..80: mol_type = other DNA
ctagaagtcgtttatataacaatgacttataaaaatactaaaactgaagagactgattacgcatacctctctaatgtgcg

SEQ ID NO: 3649 - DNA, 80 bp, synthetic construct
  misc_feature 1..80: note = Synthetic: >NC_001611.1-cand-174100-174179
  source 1..80: mol_type = other DNA
ggttgattattgattagttttccttattctttttattcacataaaagaatattttttataaacatgaaaccactgtctaa

SEQ ID NO: 3650 - DNA, 80 bp, synthetic construct
  misc_feature 1..80: note = Synthetic: >NC_001611.1-cand-174140-174219
  source 1..80: mol_type = other DNA
ataaaagaatattttttataaacatgaaaccactgtctaaatgtaattatgatcttgatttatagatgaaaatcagctgc

SEQ ID NO: 3651 - DNA, 80 bp, synthetic construct
  misc_feature 1..80: note = Synthetic: >NC_001611.1-cand-174220-174299
  source 1..80: mol_type = other DNA
tttagatgattttggttagtatgtataatataaaaaaataaatataacttattttaagattaagtgctattgtacttaat

SEQ ID NO: 3652 - DNA, 80 bp, synthetic construct
  misc_feature 1..80: note = Synthetic: >NC_001611.1-cand-174300-174379
  source 1..80: mol_type = other DNA
tttttgttctataaactgaatatatagctacaattattgacgggtttatttatgaccggcaaccatgaatttacagagat

SEQ ID NO: 3653 - DNA, 80 bp, synthetic construct
  misc_feature 1..80: note = Synthetic: >NC_001611.1-cand-174380-174459
  source 1..80: mol_type = other DNA
tatctctggctatatatcttactgtgacatgttcgtggtgttatgaaacatgtatgagaaaaactgcgttgtttcatgac

SEQ ID NO: 3654 - DNA, 80 bp, synthetic construct
  misc_feature 1..80: note = Synthetic: >NC_001611.1-cand-174470-174549
  source 1..80: mol_type = other DNA
ggcatgcggaagacaatcaagatagtgtagcgtcgctaccgtacaagtatctacaagtagtcaataaaagagaacgtagt

SEQ ID NO: 3655 - DNA, 80 bp, synthetic construct
  misc_feature 1..80: note = Synthetic: >NC_001611.1-cand-174540-174619
  source 1..80: mol_type = other DNA
agaacgtagtagattgctggctacgtttaattggacaagtatagctgagggtgttaaaaatgatttcattagaatatgtg

SEQ ID NO: 3656 - DNA, 80 bp, synthetic construct
  misc_feature 1..80: note = Synthetic: >NC_001611.1-cand-174620-174699
  source 1..80: mol_type = other DNA
atatcaacggaacatatctatataattatactattgctgctagtatgattattgattccatggaagaactaccaacaatt

SEQ ID NO: 3657 - DNA, 80 bp, synthetic construct
  misc_feature 1..80: note = Synthetic: >NC_001611.1-cand-174700-174779
  source 1..80: mol_type = other DNA
acaacatatgaaccgtctacctataattatactttcgataatagcactgttagtactactgaagaactaaaagtgactcc

SEQ ID NO: 3658 - DNA, 80 bp, synthetic construct
  misc_feature 1..80: note = Synthetic: >NC_001611.1-cand-174780-174859
  source 1..80: mol_type = other DNA
atcaccaactacatacgcgactgtaacaactcctcttccaacatcatcagttccatatgatcaacgatctaataacaatg

SEQ ID NO: 3659 - DNA, 80 bp, synthetic construct
  misc_feature 1..80: note = Synthetic: >NC_001611.1-cand-174940-175019
  source 1..80: mol_type = other DNA
aaaaatgccacggttgacaataacacattgtatggtaatataggatttttggaaataaataattgctacaatatttctgt

SEQ ID NO: 3660 - DNA, 80 bp, synthetic construct
  misc_feature 1..80: note = Synthetic: >NC_001611.1-cand-175020-175099
  source 1..80: mol_type = other DNA
atcaaatgctagttttagaataacattagtaaacaatacttctgaagaaattgttataatgctaacagggactagttcat

SEQ ID NO: 3661 - DNA, 80 bp, synthetic construct
  misc_feature 1..80: note = Synthetic: >NC_001611.1-cand-175100-175179
  source 1..80: mol_type = other DNA
ccgacaccttcatatcttccaccaataccactgaatgtttgaaaacattaatcaataatacgtcgaatattagtgatgta

SEQ ID NO: 3662 - DNA, 80 bp, synthetic construct
  misc_feature 1..80: note = Synthetic: >NC_001611.1-cand-175180-175259
  source 1..80: mol_type = other DNA
agtataacacaaaatatgaatgtaacatctaattgtgataaatgttcaatgaatttgatgacatccgttatccctgccgt

SEQ ID NO: 3663 - DNA, 80 bp, synthetic construct
  misc_feature 1..80: note = Synthetic: >NC_001959.2-cand-5610-5689
  source 1..80: mol_type = other DNA
tccccatcttaatcctttcttgctccatctatcacaaatgtataatggttgggttggtaacatgagagtcaggattatgc

SEQ ID NO: 3664 - DNA, 80 bp, synthetic construct
  misc_feature 1..80: note = Synthetic: >NC_001959.2-cand-5720-5799
  source 1..80: mol_type = other DNA
taatagtttcctgcataccccctggttttggttcacataatcttactatagcacaagcaactctctttccacatgtgatt

SEQ ID NO: 3665 - DNA, 80 bp, synthetic construct
  misc_feature 1..80: note = Synthetic: >NC_001959.2-cand-5770-5849
  source 1..80: mol_type = other DNA
gcacaagcaactctctttccacatgtgattgctgatgttaggactctagaccccattgaggtgcctttggaagatgttag

SEQ ID NO: 3666 - DNA, 80 bp, synthetic construct
  misc_feature 1..80: note = Synthetic: >NC_001959.2-cand-5850-5929
  source 1..80: mol_type = other DNA
gaatgttctctttcataataatgatagaaatcaacaaaccatgcgccttgtgtgcatgctgtacacccccctccgcactg

SEQ ID NO: 3667 - DNA, 80 bp, synthetic construct
  misc_feature 1..80: note = Synthetic: >NC_001959.2-cand-5930-6009
  source 1..80: mol_type = other DNA
gtggtggtactggtgattcttttgtagttgcagggcgagttatgacttgccccagtcctgattttaatttcttgttttta

SEQ ID NO: 3668 - DNA, 80 bp, synthetic construct
  misc_feature 1..80: note = Synthetic: >NC_001959.2-cand-5990-6069
  source 1..80: mol_type = other DNA
attttaatttcttgtttttagtccctcctacggtggagcagaaaaccaggcccttcacactcccaaatctgccattgagt

SEQ ID NO: 3669 - DNA, 80 bp, synthetic construct
  misc_feature 1..80: note = Synthetic: >NC_001959.2-cand-6070-6149
  source 1..80: mol_type = other DNA
tctctgtctaactcacgtgcccctctcccaatcagtagtatgggcatttccccagacaatgtccagagtgtgcagttcca

SEQ ID NO: 3670 - DNA, 80 bp, synthetic construct
  misc_feature 1..80: note = Synthetic: >NC_001959.2-cand-6150-6229
  source 1..80: mol_type = other DNA
aaatggtcggtgtactctggatggccgcctggttggcaccaccccagtttcattgtcacatgttgccaagataagaggga

SEQ ID NO: 3671 - DNA, 80 bp, synthetic construct
  misc_feature 1..80: note = Synthetic: >NC_001959.2-cand-6230-6309
  source 1..80: mol_type = other DNA
cctccaatggcactgtaatcaaccttactgaattggatggcacaccctttcacccttttgagggccctgcccccattggg

SEQ ID NO: 3672 - DNA, 80 bp, synthetic construct
  misc_feature 1..80: note = Synthetic: >NC_001959.2-cand-6310-6389
  source 1..80: mol_type = other DNA
tttccagacctcggtggttgtgattggcatatcaatatgacacagtttggccattctagccagacccagtatgatgtaga

SEQ ID NO: 3673 - DNA, 80 bp, synthetic construct
  misc_feature 1..80: note = Synthetic: >NC_001959.2-cand-6380-6459
  source 1..80: mol_type = other DNA
atgatgtagacaccacccctgacacttttgtcccccatcttggttcaattcaggcaaatggcattggcagtggtaattat

SEQ ID NO: 3674 - DNA, 80 bp, synthetic construct
  misc_feature 1..80: note = Synthetic: >NC_001959.2-cand-6460-6539
  source 1..80: mol_type = other DNA
gttggtgttcttagctggatttcccccccatcacacccgtctggctcccaagttgacctttggaagatccccaattatgg

SEQ ID NO: 3675 - DNA, 80 bp, synthetic construct
  misc_feature 1..80: note = Synthetic: >NC_001959.2-cand-6540-6619
  source 1..80: mol_type = other DNA
gtcaagtattacggaggcaacacatctagccccttctgtatacccccctggtttcggagaggtattggtctttttcatgt

SEQ ID NO: 3676 - DNA, 80 bp, synthetic construct
  misc_feature 1..80: note = Synthetic: >NC_001959.2-cand-6620-6699
  source 1..80: mol_type = other DNA
caaaaatgccaggtcctggtgcttataatttgccctgtctattaccacaagagtacatttcacatcttgctagtgaacaa

SEQ ID NO: 3677 - DNA, 80 bp, synthetic construct
  misc_feature 1..80: note = Synthetic: >NC_001959.2-cand-6680-6759
  source 1..80: mol_type = other DNA
cacatcttgctagtgaacaagcccctactgtaggtgaggctgccctgctccactatgttgaccctgataccggtcggaat

SEQ ID NO: 3678 - DNA, 80 bp, synthetic construct
  misc_feature 1..80: note = Synthetic: >NC_001959.2-cand-6850-6929
  source 1..80: mol_type = other DNA
gtctttgtctttgtttcatgggtgtccagattttatcaattaaagcctgtgggaactgccagctcggcaagaggtaggct

SEQ ID NO: 3679 - DNA, 80 bp, synthetic construct
  misc_feature 1..80: note = Synthetic: >NC_002018.1-cand-790-869
  source 1..80: mol_type = other DNA
tctcactatgaggaatgttcctgttaccctgataccggcaaagtgatgtgtgtgtgcagagacaattggcatggttcgaa

SEQ ID NO: 3680 - DNA, 80 bp, synthetic construct
  misc_feature 1..80: note = Synthetic: >NC_002018.1-cand-850-929
  source 1..80: mol_type = other DNA
gacaattggcatggttcgaaccggccatgggtgtctttcgatcaaaacctggattatcaaataggatacatctgcagtgg

SEQ ID NO: 3681 - DNA, 80 bp, synthetic construct
  misc_feature 1..80: note = Synthetic: >NC_002018.1-cand-970-1049
  source 1..80: mol_type = other DNA
agctgtggtccagtgtatgttgatggagcaaacggagtaaagggattttcatataggtatggtaatggtgtttggatagg

SEQ ID NO: 3682 - DNA, 80 bp, synthetic construct
  misc_feature 1..80: note = Synthetic: >NC_002018.1-cand-1050-1129
  source 1..80: mol_type = other DNA
aaggaccaaaagtcacagttccagacatgggtttgagatgatttgggatcctaatggatggacagagactgatagtaagt

SEQ ID NO: 3683 - DNA, 80 bp, synthetic construct
  misc_feature 1..80: note = Synthetic: >NC_002018.1-cand-1140-1219
  source 1..80: mol_type = other DNA
gcaagatgttgtggcaatgactgattggtcagggtatagcgggagtttcgttcaacatcctgagctaacagggctagact

SEQ ID NO: 3684 - DNA, 80 bp, synthetic construct
  misc_feature 1..80: note = Synthetic: >NC_002018.1-cand-1260-1339
  source 1..80: mol_type = other DNA
acctaaagaaaaaacaatctggactagtgcgagcagcatttctttttgtggcgtgaatagtgatactgtagattggtctt

SEQ ID NO: 3685 - DNA, 80 bp, synthetic construct
  misc_feature 1..80: note = Synthetic: >NC_002018.1-cand-1320-1399
  source 1..80: mol_type = other DNA
tgatactgtagattggtcttggccagacggtgctgagttgccattcaccattgacaagtagtctgttcaaaaaactcctt

SEQ ID NO: 3686 - DNA, 80 bp, synthetic construct
  misc_feature 1..80: note = Synthetic: >NC_002019.1-cand-90-169
  source 1..80: mol_type = other DNA
gagaacgccagaatgccactgaaatcagagcatccgtcggaaaaatgattggtggaattggacgattctacatccaaatg

SEQ ID NO: 3687 - DNA, 80 bp, synthetic construct
  misc_feature 1..80: note = Synthetic: >NC_002019.1-cand-170-249
  source 1..80: mol_type = other DNA
tgcacagaacttaaactcagtgattatgagggacggttgatccaaaacagcttaacaatagagagaatggtgctctctgc

SEQ ID NO: 3688 - DNA, 80 bp, synthetic construct
  misc_feature 1..80: note = Synthetic: >NC_002019.1-cand-210-289
  source 1..80: mol_type = other DNA
tccaaaacagcttaacaatagagagaatggtgctctctgcttttgacgaaaggagaaataaatacctggaagaacatccc

SEQ ID NO: 3689 - DNA, 80 bp, synthetic construct
  misc_feature 1..80: note = Synthetic: >NC_002019.1-cand-320-399
  source 1..80: mol_type = other DNA
ggacctatatacagaagagtaaacggaaagtggatgagagaactcatcctttatgacaaagaagaaataaggcgaatctg

SEQ ID NO: 3690 - DNA, 80 bp, synthetic construct
  misc_feature 1..80: note = Synthetic: >NC_002019.1-cand-410-489
  source 1..80: mol_type = other DNA
aataatggtgacgatgcaacggctggtctgactcacatgatgatctggcattccaatttgaatgatgcaacttatcagag

SEQ ID NO: 3691 - DNA, 80 bp, synthetic construct
  misc_feature 1..80: note = Synthetic: >NC_002019.1-cand-490-569
  source 1..80: mol_type = other DNA
gacaagggctcttgttcgcaccggaatggatcccaggatgtgctctctgatgcaaggttcaactctccctaggaggtctg

SEQ ID NO: 3692 - DNA, 80 bp, synthetic construct
  misc_feature 1..80: note = Synthetic: >NC_002019.1-cand-670-749
  source 1..80: mol_type = other DNA
gaatggacgaaaaacaagaattgcttatgaaagaatgtgcaacattctcaaagggaaatttcaaactgctgcacaaaaag

SEQ ID NO: 3693 - DNA, 80 bp, synthetic construct
  misc_feature 1..80: note = Synthetic: >NC_002019.1-cand-740-819
  source 1..80: mol_type = other DNA
gcacaaaaagcaatgatggatcaagtgagagagagccgggacccagggaatgctgagttcgaagatctcacttttctagc

SEQ ID NO: 3694 - DNA, 80 bp, synthetic construct
  misc_feature 1..80: note = Synthetic: >NC_002019.1-cand-830-909
  source 1..80: mol_type = other DNA
ctcatattgagagggtcggttgctcacaagtcctgcctgcctgcctgtgtgtatggacctgccgtagccagtgggtacga

SEQ ID NO: 3695 - DNA, 80 bp, synthetic construct
  misc_feature 1..80: note = Synthetic: >NC_002021.1-cand-1560-1639
  source 1..80: mol_type = other DNA
tgtctgggagcaacgagtcagcggacatgagtattggagttactgtcatcaaaaacaatatgataaacaatgatcttggt

SEQ ID NO: 3696 - DNA, 80 bp, synthetic construct
  misc_feature 1..80: note = Synthetic: >NC_002021.1-cand-1620-1699
  source 1..80: mol_type = other DNA
tgataaacaatgatcttggtccagcaacagctcaaatggcccttcagttgttcatcaaagattacaggtacacgtaccga

SEQ ID NO: 3697 - DNA, 80 bp, synthetic construct
  misc_feature 1..80: note = Synthetic: >NC_002021.1-cand-1700-1779
  source 1..80: mol_type = other DNA
tgccatagaggtgacacacaaatacaaacccgaagatcatttgaaataaagaaactgtgggagcaaacccgttccaaagc

SEQ ID NO: 3698 - DNA, 80 bp, synthetic construct
  misc_feature 1..80: note = Synthetic: >NC_002021.1-cand-1780-1859
  source 1..80: mol_type = other DNA
tggactgctggtctccgacggaggcccaaatttatacaacattagaaatctccacattcctgaagtctgcctaaaatggg

SEQ ID NO: 3699 - DNA, 80 bp, synthetic construct
  misc_feature 1..80: note = Synthetic: >NC_002021.1-cand-1890-1969
  source 1..80: mol_type = other DNA
tatgcaacccactgaacccatttgtcagccataaagaaattgaatcaatgaacaatgcagtgatgatgccagcacatggt

SEQ ID NO: 3700 - DNA, 80 bp, synthetic construct
  misc_feature 1..80: note = Synthetic: >NC_002021.1-cand-1930-2009
  source 1..80: mol_type = other DNA
tgaatcaatgaacaatgcagtgatgatgccagcacatggtccagccaaaaacatggagtatgatgctgttgcaacaacac

SEQ ID NO: 3701 - DNA, 80 bp, synthetic construct
  misc_feature 1..80: note = Synthetic: >NC_002021.1-cand-2010-2089
  source 1..80: mol_type = other DNA
actcctggatccccaaaagaaatcgatccatcttgaatacaagtcaaagaggagtacttgaagatgaacaaatgtaccaa

SEQ ID NO: 3702 - DNA, 80 bp, synthetic construct
  misc_feature 1..80: note = Synthetic: >NC_002021.1-cand-2090-2169
  source 1..80: mol_type = other DNA
aggtgctgcaatttatttgaaaaattcttccccagcagttcatacagaagaccagtcgggatatccagtatggtggaggc

SEQ ID NO: 3703 - DNA, 80 bp, synthetic construct
  misc_feature 1..80: note = Synthetic: >NC_002021.1-cand-2170-2249
  source 1..80: mol_type = other DNA
tatggtttccagagcccgaattgatgcacggattgatttcgaatctggaaggataaagaaagaagagttcactgagatca

SEQ ID NO: 3704 - DNA, 80 bp, synthetic construct
  misc_feature 1..80: note = Synthetic: >NC_002022.1-cand-10-89
  source 1..80: mol_type = other DNA
ctgatccaaaatggaagattttgtgcgacaatgcttcaatccgatgattgtcgagcttgcggaaaaaacaatgaaagagt

SEQ ID NO: 3705 - DNA, 80 bp, synthetic construct
  misc_feature 1..80: note = Synthetic: >NC_002022.1-cand-100-179
  source 1..80: mol_type = other DNA
cctgaaaatcgaaacaaacaaatttgcagcaatatgcactcacttggaagtatgcttcatgtattcagatttccacttca

SEQ ID NO: 3706 - DNA, 80 bp, synthetic construct
  misc_feature 1..80: note = Synthetic: >NC_002022.1-cand-170-249
  source 1..80: mol_type = other DNA
ttccacttcatcaatgagcaaggcgagtcaataatcgtagaacttggtgatcctaatgcacttttgaagcacagatttga

SEQ ID NO: 3707 - DNA, 80 bp, synthetic construct
  misc_feature 1..80: note = Synthetic: >NC_002022.1-cand-230-309
  source 1..80: mol_type = other DNA
cttttgaagcacagatttgaaataatcgagggaagagatcgcacaatggcctggacagtagtaaacagtatttgcaacac

SEQ ID NO: 3708 - DNA, 80 bp, synthetic construct
  misc_feature 1..80: note = Synthetic: >NC_002022.1-cand-330-409
  source 1..80: mol_type = other DNA
agtttctaccagatttgtatgattacaaggaaaatagattcatcgaaattggagtaacaaggagagaagttcacatatac

SEQ ID NO: 3709 - DNA, 80 bp, synthetic construct
  misc_feature 1..80: note = Synthetic: >NC_002022.1-cand-390-469
  source 1..80: mol_type = other DNA
ggagagaagttcacatatactatctggaaaaggccaataaaattaaatctgagaaaacacacatccacattttctcgttc

SEQ ID NO: 3710 - DNA, 80 bp, synthetic construct
  misc_feature 1..80: note = Synthetic: >NC_002022.1-cand-490-569
  source 1..80: mol_type = other DNA
aaaggccgactacactctcgatgaagaaagcagggctaggatcaaaaccaggctattcaccataagacaagaaatggcca

SEQ ID NO: 3711 - DNA, 80 bp, synthetic construct
  misc_feature 1..80: note = Synthetic: >NC_003310.1-cand-35660-35739
  source 1..80: mol_type = other DNA
gcaggatcccatgacgagcgtcacattaaactaattcattttcaattataatatactgattagtaatgaccattaaaata

SEQ ID NO: 3712 - DNA, 80 bp, synthetic construct
  misc_feature 1..80: note = Synthetic: >NC_003310.1-cand-35740-35819
  source 1..80: mol_type = other DNA
aaaatattcttcataaccggtaagaaagtaaaaagttcacattgaaactatgtcagtagttatacatcatgagatgatat

SEQ ID NO: 3713 - DNA, 80 bp, synthetic construct
  misc_feature 1..80: note = Synthetic: >NC_003310.1-cand-35900-35979
  source 1..80: mol_type = other DNA
tcacattaaatgagtgtccatattttgcaatttcttcatatgatggcggtgtacgtggacgaggctgctcctgttcttgt

SEQ ID NO: 3714 - DNA, 80 bp, synthetic construct
  misc_feature 1..80: note = Synthetic: >NC_003310.1-cand-35980-36059
  source 1..80: mol_type = other DNA
agtcgccgactgtcgtgtttgcgtttagatccctccattatcgcgattgcgtagtgagtactatttataccttgtaatta

SEQ ID NO: 3715 - DNA, 80 bp, synthetic construct
  misc_feature 1..80: note = Synthetic: >NC_003310.1-cand-36220-36299
  source 1..80: mol_type = other DNA
gtggaacgtatattttatttaaggacttaacaattgtctgtaaaccacaatttgcttccgccgatcctgtattaactatc

SEQ ID NO: 3716 - DNA, 80 bp, synthetic construct
  misc_feature 1..80: note = Synthetic: >NC_003310.1-cand-36380-36459
  source 1..80: mol_type = other DNA
cgcatacgcattacagttcttttctagcttggatactacactaggtacatcatctaaatctattcctatttcctcagcga

SEQ ID NO: 3717 - DNA, 80 bp, synthetic construct
  misc_feature 1..80: note = Synthetic: >NC_003310.1-cand-37100-37179
  source 1..80: mol_type = other DNA
ctgcatgtaaaaagttgtcacaacagggtagttcgtagattttaatgtataacagagacatctgtaaaaagataaacttt

SEQ ID NO: 3718 - DNA, 80 bp, synthetic construct
  misc_feature 1..80: note = Synthetic: >NC_003310.1-cand-37170-37249
  source 1..80: mol_type = other DNA
gataaactttatgtattgtaccaaagatttaaatcctaatttgatagctaactcggtatctactttatctgccgaataca

SEQ ID NO: 3719 - DNA, 80 bp, synthetic construct
  misc_feature 1..80: note = Synthetic: >NC_003310.1-cand-37580-37659
  source 1..80: mol_type = other DNA
cgattaattttttttcatctccctttagattgttgtatagaaatttgggtactgtgaactccgccgtagtttccatggga

SEQ ID NO: 3720 - DNA, 80 bp, synthetic construct
  misc_feature 1..80: note = Synthetic: >NC_003310.1-cand-37790-37869
  source 1..80: mol_type = other DNA
ggaaaaaagatgaattaatgtaatcattctcttctatctttagtagtgtttccttattaaaattcttaaaataatttaac

SEQ ID NO: 3721 - DNA, 80 bp, synthetic construct
  misc_feature 1..80: note = Synthetic: >NC_003310.1-cand-38000-38079
  source 1..80: mol_type = other DNA
aatcattggcaacacccatttattgtacaaaaagccccaatttacaaacgaaagtccaggtttgatagagacaaactatt

SEQ ID NO: 3722 - DNA, 80 bp, synthetic construct
  misc_feature 1..80: note = Synthetic: >NC_003310.1-cand-38030-38109
  source 1..80: mol_type = other DNA
aaagccccaatttacaaacgaaagtccaggtttgatagagacaaactattaactattttgtctctgtttttaacacctcc

SEQ ID NO: 3723 - DNA, 80 bp, synthetic construct
  misc_feature 1..80: note = Synthetic: >NC_003310.1-cand-38270-38349
  source 1..80: mol_type = other DNA
agtgattctttgatggtatcagcatacgaattacaataatgcagaaactcagttaacatgcaggaattatagtaagccaa

SEQ ID NO: 3724 - DNA, 80 bp, synthetic construct
  misc_feature 1..80: note = Synthetic: >NC_003310.1-cand-38350-38429
  source 1..80: mol_type = other DNA
ttccaattgttgcctgtattgtattagagtattaatatgcgcaatgatgtccttgcgtttctctgatagaatgcgagcag

SEQ ID NO: 3725 - DNA, 80 bp, synthetic construct
  misc_feature 1..80: note = Synthetic: >NC_003310.1-cand-38430-38509
  source 1..80: mol_type = other DNA
cgattttggcgttatcatttgacgatatttctggaataacgaatcctgtttctactaacttcttggtaggacaaagtgaa

SEQ ID NO: 3726 - DNA, 80 bp, synthetic construct
  misc_feature 1..80: note = Synthetic: >NC_003310.1-cand-38670-38749
  source 1..80: mol_type = other DNA
ccgtaaatcctgcactatgcccaagatagagagctcctttggtgaatccatcactatgtttcagtttaaccaagaaacag

SEQ ID NO: 3727 - DNA, 80 bp, synthetic construct
  misc_feature 1..80: note = Synthetic: >NC_003310.1-cand-73780-73859
  source 1..80: mol_type = other DNA
acttggtagttgaatctacctatagaaaaggagttagaataatcccattggatagattttttgaaggatatcttaatgca

SEQ ID NO: 3728 - DNA, 80 bp, synthetic construct
  misc_feature 1..80: note = Synthetic: >NC_003310.1-cand-73940-74019
  source 1..80: mol_type = other DNA
atttggtcatgatagaatgtattgttttaaattggtagctgaatgttataaaaatgccggtattgatacatcgtctaaac

SEQ ID NO: 3729 - DNA, 80 bp, synthetic construct
  misc_feature 1..80: note = Synthetic: >NC_003310.1-cand-74020-74099
  source 1..80: mol_type = other DNA
gaatattaggtaaagatatttttctgagccaaaactttacagatgataatagatggataaagatatatgattctaataat

SEQ ID NO: 3730 - DNA, 80 bp, synthetic construct
  misc_feature 1..80: note = Synthetic: >NC_003310.1-cand-74340-74419
  source 1..80: mol_type = other DNA
tttctcactcgtgtctagcattctagagcattccatgatttgtttatcgttgatattggccggaaagatagattttttat

SEQ ID NO: 3731 - DNA, 80 bp, synthetic construct
  misc_feature 1..80: note = Synthetic: >NC_003310.1-cand-75130-75209
  source 1..80: mol_type = other DNA
ttaatagatatatctctcaatacagattgcactatacattttgaaactatgtcaaaaattgtagaacgacgctgttctgt

SEQ ID NO: 3732 - DNA, 80 bp, synthetic construct
  misc_feature 1..80: note = Synthetic: >NC_003310.1-cand-75370-75449
  source 1..80: mol_type = other DNA
gcggatctgtaaacatttgggccattatacctctcagtgcatcagtgttctaccgcggagccgaaaatattgtgtttaac

SEQ ID NO: 3733 - DNA, 80 bp, synthetic construct
  misc_feature 1..80: note = Synthetic: >NC_003310.1-cand-75690-75769
  source 1..80: mol_type = other DNA
gtcattcatctagaatggttgttgggctttatcaagtgtattagtcagcatcagcatttggctattatgtttaaagatga

SEQ ID NO: 3734 - DNA, 80 bp, synthetic construct
  misc_feature 1..80: note = Synthetic: >NC_003310.1-cand-76180-76259
  source 1..80: mol_type = other DNA
ataggaccactaacaaaagataaagaggataaagtaaagaaaagatatccagagtttagattagtcaacacaggacccgg

SEQ ID NO: 3735 - DNA, 80 bp, synthetic construct
  misc_feature 1..80: note = Synthetic: >NC_003310.1-cand-76260-76339
  source 1..80: mol_type = other DNA
tggtctttcggcattattaagacaatcatataatggaaccgcacccaattgctgtcgcacttttaatcgtactcattatt

SEQ ID NO: 3736 - DNA, 80 bp, synthetic construct
  misc_feature 1..80: note = Synthetic: >NC_003310.1-cand-76370-76449
  source 1..80: mol_type = other DNA
atgaagagggcgcagtattagaatcgtgttggcccgacgtccacgacactggaaaatgcgatgttgatttattcgactgg

SEQ ID NO: 3737 - DNA, 80 bp, synthetic construct
  misc_feature 1..80: note = Synthetic: >NC_003310.1-cand-78330-78409
  source 1..80: mol_type = other DNA
gtgctcctgtagcatactttttttttaccttgagaatatccattgtttgcttggtcaatagcgatatgtgattttttatc

SEQ ID NO: 3738 - DNA, 80 bp, synthetic construct
  misc_feature 1..80: note = Synthetic: >NC_003310.1-cand-78640-78719
  source 1..80: mol_type = other DNA
atatatgccacgtttatacatggaatataaaataactacagtttgaaaaataacagtatcatttaaacatttaacttgcg

SEQ ID NO: 3739 - DNA, 80 bp, synthetic construct
  misc_feature 1..80: note = Synthetic: >NC_003310.1-cand-78980-79059
  source 1..80: mol_type = other DNA
ctgtatttattatcttgtctcggtggctgattaggctgtggtctatcgttgttgaatctattttggtcattaaatctttc

SEQ ID NO: 3740 - DNA, 80 bp, synthetic construct
  misc_feature 1..80: note = Synthetic: >NC_003310.1-cand-79280-79359
  source 1..80: mol_type = other DNA
caagatctatgctttctatttttaatatagtacctagaacgatgtcaaaatatgagttggagttgattcataacgagaat

SEQ ID NO: 3741 - DNA, 80 bp, synthetic construct
  misc_feature 1..80: note = Synthetic: >NC_003310.1-cand-79370-79449
  source 1..80: mol_type = other DNA
caatgtttaccacaatgtataatataagaaacaatttgggtctaggcgatgataaactaactattgaagccattgaaaac

SEQ ID NO: 3742 - DNA, 80 bp, synthetic construct
  misc_feature 1..80: note = Synthetic: >NC_003310.1-cand-79680-79759
  source 1..80: mol_type = other DNA
tttgatatctaaatatgcgggaattaatatcctgaatgtgtattctccttccacgtccatgagattgaatgccatttacg

SEQ ID NO: 3743 - DNA, 80 bp, synthetic construct
  misc_feature 1..80: note = Synthetic: >NC_003461.1-cand-9630-9709
  source 1..80: mol_type = other DNA
atcactactagaacctttatcacttgctttaatacagttggatgaccctgtaactaatttaaaaggagctttcatgagac

SEQ ID NO: 3744 - DNA, 80 bp, synthetic construct
  misc_feature 1..80: note = Synthetic: >NC_003461.1-cand-9710-9789
  source 1..80: mol_type = other DNA
atgttttgactgagctacatacaattttaataaaagataatatatacacagattcagaagcagacagcataatggaatca

SEQ ID NO: 3745 - DNA, 80 bp, synthetic construct
  misc_feature 1..80: note = Synthetic: >NC_003461.1-cand-9790-9869
  source 1..80: mol_type = other DNA
ttgataaagattttcagagagacatcaattgatgaaaaagcagaaattttctccttttttagaacgtttggacatcctag

SEQ ID NO: 3746 - DNA, 80 bp, synthetic construct
  misc_feature 1..80: note = Synthetic: >NC_003461.1-cand-9870-9949
  source 1..80: mol_type = other DNA
cttagaagcaataactgctgccgataaagtaaggacacatatgtattcctccaaaaaaatcatactaaagacactatatg

SEQ ID NO: 3747 - DNA, 80 bp, synthetic construct
  misc_feature 1..80: note = Synthetic: >NC_003461.1-cand-9950-10029
  source 1..80: mol_type = other DNA
agtgtcatgcaatcttctgtgcaattataataaacggatatagagaaagacacggtggtcaatggccgccatgcgaattc

SEQ ID NO: 3748 - DNA, 80 bp, synthetic construct
  misc_feature 1..80: note = Synthetic: >NC_003461.1-cand-10030-10109
  source 1..80: mol_type = other DNA
cccaatcatgtatgtcttgaactcaagaatgcacaaggatccaactctgcaatttcgtatgaatgtgccgtagacaatta

SEQ ID NO: 3749 - DNA, 80 bp, synthetic construct
  misc_feature 1..80: note = Synthetic: >NC_003461.1-cand-10110-10189
  source 1..80: mol_type = other DNA
tagtagttttataggatttaaatttttaaaatttattgagcctcaattagatgaagatttgacaatttatatgaaggata

SEQ ID NO: 3750 - DNA, 80 bp, synthetic construct
  misc_feature 1..80: note = Synthetic: >NC_003461.1-cand-10190-10269
  source 1..80: mol_type = other DNA
aggctctatcacctaggaaagcagcatgggattcagtatatcccgacagtaatttatattacaaagtccctgaatcagaa

SEQ ID NO: 3751 - DNA, 80 bp, synthetic construct
  misc_feature 1..80: note = Synthetic: >NC_003461.1-cand-10270-10349
  source 1..80: mol_type = other DNA
gagactcgtaggttaatcgaggtttttataaatgataataattttaaccctgcggatattattaattatgtagagtcagg

SEQ ID NO: 3752 - DNA, 80 bp, synthetic construct
  misc_feature 1..80: note = Synthetic: >NC_003461.1-cand-10350-10429
  source 1..80: mol_type = other DNA
agaatggttaaatgacgatagcttcaacatatcttacagtctcaaagaaaaagaaattaaacaagagggtcgactctttg

SEQ ID NO: 3753 - DNA, 80 bp, synthetic construct
  misc_feature 1..80: note = Synthetic: >NC_003461.1-cand-10430-10509
  source 1..80: mol_type = other DNA
ccaagatgacatataagatgagagcagtccaggtattagcagaaacactactagcaaaaggagtaggtgagttattcagt

SEQ ID NO: 3754 - DNA, 80 bp, synthetic construct
  misc_feature 1..80: note = Synthetic: >NC_003461.1-cand-10510-10589
  source 1..80: mol_type = other DNA
gaaaatgggatggtaaagggagaaattgacctactaaagagactgactacattatctgtctcaggtgttccaagatccaa

SEQ ID NO: 3755 - DNA, 80 bp, synthetic construct
  misc_feature 1..80: note = Synthetic: >NC_003461.1-cand-10590-10669
  source 1..80: mol_type = other DNA
ctcagtttacaataatcccatattacatgagaaattgatcaaaaatatgaataagtgcaattcaaatgggtattgggatg

SEQ ID NO: 3756 - DNA, 80 bp, synthetic construct
  misc_feature 1..80: note = Synthetic: >NC_003461.1-cand-10640-10719
  source 1..80: mol_type = other DNA
ataagtgcaattcaaatgggtattgggatgaaagaaagaaatctaaaaatgaattcaaagctgcagactcatcaaccgag

SEQ ID NO: 3757 - DNA, 80 bp, synthetic construct
  misc_feature 1..80: note = Synthetic: >NC_003461.1-cand-10750-10829
  source 1..80: mol_type = other DNA
accgatttgaaaaaatactgtctcaactggagatttgaaagtacagcgttgttcggtcaaagatgtaatgagatattcgg

SEQ ID NO: 3758 - DNA, 80 bp, synthetic construct
  misc_feature 1..80: note = Synthetic: >NC_003461.1-cand-10830-10909
  source 1..80: mol_type = other DNA
gtttaaaactttctttaactggatgcaccctattctagaaaaaagtacaatttatgtaggagatccttactgtccagtac

SEQ ID NO: 3759 - DNA, 80 bp, synthetic construct
  misc_feature 1..80: note = Synthetic: >NC_003461.1-cand-13490-13569
  source 1..80: mol_type = other DNA
ttgacctcttcatgcgtgattggcaagagggcataccgcttgaaatatttatttgtgataacgacccaaatatagcagaa

SEQ ID NO: 3760 - DNA, 80 bp, synthetic construct
  misc_feature 1..80: note = Synthetic: >NC_003461.1-cand-13570-13649
  source 1..80: mol_type = other DNA
atgagaaaactttcatttttagctagacatctagcatacttgtgtagtttggcagagatagctaaagagggaccaaaatt

SEQ ID NO: 3761 - DNA, 80 bp, synthetic construct
  misc_feature 1..80: note = Synthetic: >NC_003461.1-cand-13650-13729
  source 1..80: mol_type = other DNA
ggaatctatgacatctctcgaacgactcgaatcattgaaagagtatctagaacttacttttttagacgatcctatattaa

SEQ ID NO: 3762 - DNA, 80 bp, synthetic construct
  misc_feature 1..80: note = Synthetic: >NC_003461.1-cand-13730-13809
  source 1..80: mol_type = other DNA
gatatagtcaattgacaggcttagttattaagatattcccttcaacgttaacttacatcaggaaatcttcaattaaggtg

SEQ ID NO: 3763 - DNA, 80 bp, synthetic construct
  misc_feature 1..80: note = Synthetic: >NC_003461.1-cand-13810-13889
  source 1..80: mol_type = other DNA
ttgagagtaagaggtatagggataccagaagtcttagaggactgggatcctgatgccgatagtatgctactagataatat

SEQ ID NO: 3764 - DNA, 80 bp, synthetic construct
  misc_feature 1..80: note = Synthetic: >NC_003461.1-cand-13860-13939
  source 1..80: mol_type = other DNA
tgatgccgatagtatgctactagataatataactgctgaggttcaacacaatatacctttaaagaagaacgaaagaactc

SEQ ID NO: 3765 - DNA, 80 bp, synthetic construct
  misc_feature 1..80: note = Synthetic: >NC_003461.1-cand-13970-14049
  source 1..80: mol_type = other DNA
aagttctgcgacttagaggttatgaagagataaaaagggaagaaagaggaagatcaggtgtaggattaactctacctttt

SEQ ID NO: 3766 - DNA, 80 bp, synthetic construct
  misc_feature 1..80: note = Synthetic: >NC_003461.1-cand-14050-14129
  source 1..80: mol_type = other DNA
gatgggcgatatttatcacaccaattgagacttttcgggattaatagcaccagttgtttgaaagcattggaacttaccta

SEQ ID NO: 3767 - DNA, 80 bp, synthetic construct
  misc_feature 1..80: note = Synthetic: >NC_003461.1-cand-14130-14209
  source 1..80: mol_type = other DNA
tttactgaatcctctagtcaataaggataaagatagattatatctcggagaaggtgcaggtgcaatgctgtcttgttatg

SEQ ID NO: 3768 - DNA, 80 bp, synthetic construct
  misc_feature 1..80: note = Synthetic: >NC_003461.1-cand-14210-14289
  source 1..80: mol_type = other DNA
atgctacattaggaccctgcatgaactattataattcaggtgttaattcttgtgatctcaacggacaaagagaattaaat

SEQ ID NO: 3769 - DNA, 80 bp, synthetic construct
  misc_feature 1..80: note = Synthetic: >NC_003461.1-cand-14300-14379
  source 1..80: mol_type = other DNA
cagaagtggcactggtagggaagaaattgaataatgtcacgagtttatgtcaaagagttaaggttttattcaatgggaat

SEQ ID NO: 3770 - DNA, 80 bp, synthetic construct
  misc_feature 1..80: note = Synthetic: >NC_003461.1-cand-14380-14459
  source 1..80: mol_type = other DNA
cctggatcaacttggatagggaatgatgaatgtgaaacactaatctggaatgaattacagaataattcaatagggtttat

SEQ ID NO: 3771 - DNA, 80 bp, synthetic construct
  misc_feature 1..80: note = Synthetic: >NC_003461.1-cand-14460-14539
  source 1..80: mol_type = other DNA
tcattgtgacatggaaggtggagaacacaaatgtgatcaggtggtcttacatgaacattatagtgtgatcaggattgcat

SEQ ID NO: 3772 - DNA, 80 bp, synthetic construct
  misc_feature 1..80: note = Synthetic: >NC_003461.1-cand-14550-14629
  source 1..80: mol_type = other DNA
ggataaggacgttatcttagtaagcaaaattgcaccaagattaggtacagactggacaaaacaattaagtttgtatttaa

SEQ ID NO: 3773 - DNA, 80 bp, synthetic construct
  misc_feature 1..80: note = Synthetic: >NC_003461.1-cand-14620-14699
  source 1..80: mol_type = other DNA
ttgtatttaagatactggagagatgtcagcttaatagtgttgaaaacatctaacccagcctctacagaaatgtatctgat

SEQ ID NO: 3774 - DNA, 80 bp, synthetic construct
  misc_feature 1..80: note = Synthetic: >NC_003461.1-cand-14700-14779
  source 1..80: mol_type = other DNA
atcaaaagatcctaaatctgatattatagaggatagtaatacagtattggcaaaccttcttccattatctaaagaggata

SEQ ID NO: 3775 - DNA, 80 bp, synthetic construct
  misc_feature 1..80: note = Synthetic: >NC_003899.1-cand-5540-5619
  source 1..80: mol_type = other DNA
catgagccgcagcgcagacacgatcaaaccaattccaaagccgcgtaaatgccaggtgaagtacacgcagccacctggcg

SEQ ID NO: 3776 - DNA, 80 bp, synthetic construct
  misc_feature 1..80: note = Synthetic: >NC_003899.1-cand-5620-5699
  source 1..80: mol_type = other DNA
tcgccagggccatatcggcagcggaatttgacgagtttgtgcggaggcactcgaattgacggtacgaagcgggcgcgtac

SEQ ID NO: 3777 - DNA, 80 bp, synthetic construct
  misc_feature 1..80: note = Synthetic: >NC_003899.1-cand-5700-5779
  source 1..80: mol_type = other DNA
attttctcatccgagacgggacaagggcacctgcaacaaaaatctacgcggcaatgcaaactccagtatccaatcctgga

SEQ ID NO: 3778 - DNA, 80 bp, synthetic construct
  misc_feature 1..80: note = Synthetic: >NC_003899.1-cand-5780-5859
  source 1..80: mol_type = other DNA
gcgttccgtccatgagaaattttacgccccgcgcctcgatctcgagcgtgagaagctgttgcagaagaaactacaattgt

SEQ ID NO: 3779 - DNA, 80 bp, synthetic construct
  misc_feature 1..80: note = Synthetic: >NC_003899.1-cand-5860-5939
  source 1..80: mol_type = other DNA
gtgcttctgaaggtaatcggagcaggtatcagtctcgtaaagtagagaacatgaaggcaatcaccgttgagcgtctactg

SEQ ID NO: 3780 - DNA, 80 bp, synthetic construct
  misc_feature 1..80: note = Synthetic: >NC_003899.1-cand-5950-6029
  source 1..80: mol_type = other DNA
gctcatatctctctgcagaaccgcaaccagttgaatgctacaaagttacctatcctgctcccatgtattcaagtactgca

SEQ ID NO: 3781 - DNA, 80 bp, synthetic construct
  misc_feature 1..80: note = Synthetic: >NC_003899.1-cand-6020-6099
  source 1..80: mol_type = other DNA
aagtactgcaagcaacagcttctcatcagcagaagtggccgtcaaagtttgcaacctagtactgcaagagaattttccca

SEQ ID NO: 3782 - DNA, 80 bp, synthetic construct
  misc_feature 1..80: note = Synthetic: >NC_003899.1-cand-6110-6189
  source 1..80: mol_type = other DNA
ctataacataacggatgagtatgatgcctatcttgacatggtggacggagcatcctgctgtttagatactgccacctttt

SEQ ID NO: 3783 - DNA, 80 bp, synthetic construct
  misc_feature 1..80: note = Synthetic: >NC_003899.1-cand-6190-6269
  source 1..80: mol_type = other DNA
gcccagctaaattaaggagctttccaaagaagcacagttatttgcggcctgagatacgatcagcagtgccatcaccgatt

SEQ ID NO: 3784 - DNA, 80 bp, synthetic construct
  misc_feature 1..80: note = Synthetic: >NC_003899.1-cand-6270-6349
  source 1..80: mol_type = other DNA
caaaacacgctccaagatgtactagcagcagccacgaaacggaattgcaatgttactcaaatgagggaacttccagtgtt

SEQ ID NO: 3785 - DNA, 80 bp, synthetic construct
  misc_feature 1..80: note = Synthetic: >NC_003899.1-cand-6350-6429
  source 1..80: mol_type = other DNA
ggattcagctgccttcaacgtagagtgtttcaaaaagtacgcctgtaacgatgagtactgggacttctacaagacaaacc

SEQ ID NO: 3786 - DNA, 80 bp, synthetic construct
  misc_feature 1..80: note = Synthetic: >NC_003899.1-cand-6430-6509
  source 1..80: mol_type = other DNA
cgataagactcaccgcagaaaatgtcactcagtatgttactaagttaaagggacccaaagcagctgccctttttgcgaaa

SEQ ID NO: 3787 - DNA, 80 bp, synthetic construct
  misc_feature 1..80: note = Synthetic: >NC_003899.1-cand-6510-6589
  source 1..80: mol_type = other DNA
acgcataacttacagccattgcatgagataccaatggatagattcgtgatggaccttaaacgggatgtcaaggtcacacc

SEQ ID NO: 3788 - DNA, 80 bp, synthetic construct
  misc_feature 1..80: note = Synthetic: >NC_003899.1-cand-6590-6669
  source 1..80: mol_type = other DNA
cgggacaaaacatactgaagaaagaccaaaagttcaggtgatacaggcagctgatccacttgcaaccgcctacctatgtg

SEQ ID NO: 3789 - DNA, 80 bp, synthetic construct
  misc_feature 1..80: note = Synthetic: >NC_003899.1-cand-6670-6749
  source 1..80: mol_type = other DNA
gtatacatcgagagcttgtgcgcaggttgaacgctgtgctgctaccgaatatccacactttgtttgacatgtctgcagaa

SEQ ID NO: 3790 - DNA, 80 bp, synthetic construct
  misc_feature 1..80: note = Synthetic: >NC_003899.1-cand-6750-6829
  source 1..80: mol_type = other DNA
gattttgatgctatcattgcagaacactttcaattcggcgacgcggtgctagagacagacatagcttcttttgataaaag

SEQ ID NO: 3791 - DNA, 80 bp, synthetic construct
  misc_feature 1..80: note = Synthetic: >NC_005215.1-cand-3250-3329
  source 1..80: mol_type = other DNA
ggttacaggctataatcaaatagattctgataaagtttatgatgacggtgcaccgccctgtacaatcaagtgctggttca

SEQ ID NO: 3792 - DNA, 80 bp, synthetic construct
  misc_feature 1..80: note = Synthetic: >NC_005215.1-cand-3330-3409
  source 1..80: mol_type = other DNA
ccaagtcaggtgaatggctgttgggaatccttaatggcaattgggtggtagttgctgttctgattgtaattttgatatta

SEQ ID NO: 3793 - DNA, 80 bp, synthetic construct
  misc_feature 1..80: note = Synthetic: >NC_005215.1-cand-3410-3489
  source 1..80: mol_type = other DNA
tcgatactcctttttagctttttttgtcctgtcagaagtagaaagaataaagctaattagtgaatatatatgtgagcaag

SEQ ID NO: 3794 - DNA, 80 bp, synthetic construct
  misc_feature 1..80: note = Synthetic: >NC_005215.1-cand-3490-3569
  source 1..80: mol_type = other DNA
agtatgacaacattatttcattatatgtatgttcttatatcaataacatttgtatattcccataaccgaaatatttatac

SEQ ID NO: 3795 - DNA, 80 bp, synthetic construct
  misc_feature 1..80: note = Synthetic: >NC_005216.1-cand-100-179
  source 1..80: mol_type = other DNA
caggcagaagctcaaagatgcagaaagagcggtggaattggaccccgatgatgttaacaaaagcacattacagagcagac

SEQ ID NO: 3796 - DNA, 80 bp, synthetic construct
  misc_feature 1..80: note = Synthetic: >NC_005216.1-cand-270-349
  source 1..80: mol_type = other DNA
ctgttgatccaacagggattgaacctgatgaccatctaaaggaaaagtcatcattgagatatggaaatgtccttgatgta

SEQ ID NO: 3797 - DNA, 80 bp, synthetic construct
  misc_feature 1..80: note = Synthetic: >NC_005216.1-cand-350-429
  source 1..80: mol_type = other DNA
aattccattgacttagaagagccaagtgggcaaacagctgattggaaatccatcggactctacattctaagtttcgcatt

SEQ ID NO: 3798 - DNA, 80 bp, synthetic construct
  misc_feature 1..80: note = Synthetic: >NC_005216.1-cand-470-549
  source 1..80: mol_type = other DNA
ggccgtcaaacaatcaaagaaaacaagggaacaagaattcgattcaaggatgattcatcttatgaagaagtcaatgggat

SEQ ID NO: 3799 - DNA, 80 bp, synthetic construct
  misc_feature 1..80: note = Synthetic: >NC_005216.1-cand-520-599
  source 1..80: mol_type = other DNA
tgattcatcttatgaagaagtcaatgggatacgtaagccaagacatctgtatgtttctatgccaactgcccagtctacaa

SEQ ID NO: 3800 - DNA, 80 bp, synthetic construct
  misc_feature 1..80: note = Synthetic: >NC_005216.1-cand-600-679
  source 1..80: mol_type = other DNA
tgaaagcagatgagattactcccgggaggttccgtacaattgcttgtggattattcccagcccaagtcaaagcaaggaat

SEQ ID NO: 3801 - DNA, 80 bp, synthetic construct
  misc_feature 1..80: note = Synthetic: >NC_005216.1-cand-680-759
  source 1..80: mol_type = other DNA
attatcagtcctgtcatgggtgtgattggctttagtttttttgtgaaagattggatggaaaggattgatgacttcctggc

SEQ ID NO: 3802 - DNA, 80 bp, synthetic construct
  misc_feature 1..80: note = Synthetic: >NC_005216.1-cand-760-839
  source 1..80: mol_type = other DNA
tgcacgttgcccatttctgcctgagcagaaagaccctagagatgctgcattggcaactaatagagcctattttataacac

SEQ ID NO: 3803 - DNA, 80 bp, synthetic construct
  misc_feature 1..80: note = Synthetic: >NC_005216.1-cand-840-919
  source 1..80: mol_type = other DNA
gtcaattacaggttgatgagtcaaaggttagtgatattgaggacctgattgctgatgcaagggctgagtctgccactata

SEQ ID NO: 3804 - DNA, 80 bp, synthetic construct
  misc_feature 1..80: note = Synthetic: >NC_005216.1-cand-920-999
  source 1..80: mol_type = other DNA
ttcgcagatattgctactcctcattcagtttgggtctttgcatgtgctccagatcgttgtccacctacagcattatatgt

SEQ ID NO: 3805 - DNA, 80 bp, synthetic construct
  misc_feature 1..80: note = Synthetic: >NC_005216.1-cand-1000-1079
  source 1..80: mol_type = other DNA
ggccgggatgccggaactgggtgcattttttgctattctccaggatatgaggaacaccataatggcatccaaatctgtgg

SEQ ID NO: 3806 - DNA, 80 bp, synthetic construct
  misc_feature 1..80: note = Synthetic: >NC_005216.1-cand-1090-1169
  source 1..80: mol_type = other DNA
agagaaattgaagaagaaatcagcattctaccagtcatacttaagacgtactcagtcaatgggaattcaactggaccaga

SEQ ID NO: 3807 - DNA, 80 bp, synthetic construct
  misc_feature 1..80: note = Synthetic: >NC_006213.1-cand-300-379
  source 1..80: mol_type = other DNA
tagttcagaggtggatatgatttgctccaccactgcgcaaaagctggaaacagacggaatttgtcctgaaaatcatgtga

SEQ ID NO: 3808 - DNA, 80 bp, synthetic construct
  misc_feature 1..80: note = Synthetic: >NC_006213.1-cand-380-459
  source 1..80: mol_type = other DNA
tggtggattgtcgccgacttcttaaacaagagtgttgtgtgcagtctagcctaatacgtgaaattgttatgaatgcaagt

SEQ ID NO: 3809 - DNA, 80 bp, synthetic construct
  misc_feature 1..80: note = Synthetic: >NC_006213.1-cand-460-539
  source 1..80: mol_type = other DNA
ccatatgatttggaggtgctacttcaagatgctttgcagtcccgtgaagcagttttggttacaacccccttaggtatgtc

SEQ ID NO: 3810 - DNA, 80 bp, synthetic construct
  misc_feature 1..80: note = Synthetic: >NC_006213.1-cand-540-619
  source 1..80: mol_type = other DNA
tttagaggcatgctatgtgagaggttgtaatcctaaaggatggaccatgggtttgtttcggcgtagaagtgtgtgtaaca

SEQ ID NO: 3811 - DNA, 80 bp, synthetic construct
  misc_feature 1..80: note = Synthetic: >NC_006213.1-cand-620-699
  source 1..80: mol_type = other DNA
ctggtcgttgcactgttaataagcatgtggcctatcagttatatatgattgatcctgcaggtgtctgtcttggtgcaggt

SEQ ID NO: 3812 - DNA, 80 bp, synthetic construct
  misc_feature 1..80: note = Synthetic: >NC_006213.1-cand-700-779
  source 1..80: mol_type = other DNA
caattcgtgggttgggtcatacccttagcctttatgcctgtgcaatcccggaaatttattgttccatgggttatgtactt

SEQ ID NO: 3813 - DNA, 80 bp, synthetic construct
  misc_feature 1..80: note = Synthetic: >NC_006213.1-cand-780-859
  source 1..80: mol_type = other DNA
gcgtaagcgtggcgaaaagggtgcttacaataaagatcatggacgtggcggttttggacatgtttatgattttaaagttg

SEQ ID NO: 3814 - DNA, 80 bp, synthetic construct
  misc_feature 1..80: note = Synthetic: >NC_006213.1-cand-860-939
  source 1..80: mol_type = other DNA
aagatgcttatgaccaggtgcatgatgagcctaagggtaagttttctaagaaggcttatgctttaattagagggtatcgt

SEQ ID NO: 3815 - DNA, 80 bp, synthetic construct
  misc_feature 1..80: note = Synthetic: >NC_006213.1-cand-940-1019
  source 1..80: mol_type = other DNA
ggtgttaaaccacttctctatgtagaccagtatggttgtgattatactggtagtcttgcagatggcttagaggcttatgc

SEQ ID NO: 3816 - DNA, 80 bp, synthetic construct
  misc_feature 1..80: note = Synthetic: >NC_006213.1-cand-1020-1099
  source 1..80: mol_type = other DNA
tgataagacattgcaagaaatgaaggcattatttcctacttggagtcaggaactcctttttgatgtaattgtggcatggc

SEQ ID NO: 3817 - DNA, 80 bp, synthetic construct
  misc_feature 1..80: note = Synthetic: >NC_006213.1-cand-1100-1179
  source 1..80: mol_type = other DNA
atgttgtgcgtgatccacgttatgttatgagattgcagagtgctgctactatacgtagtgttgcatatgttgctaatcct

SEQ ID NO: 3818 - DNA, 80 bp, synthetic construct
  misc_feature 1..80: note = Synthetic: >NC_006213.1-cand-1180-1259
  source 1..80: mol_type = other DNA
actgaagacttgtgtgatggttctgttgttataaaagaacctgtgcatgtttatgcagatgactctattattttacgtca

SEQ ID NO: 3819 - DNA, 80 bp, synthetic construct
  misc_feature 1..80: note = Synthetic: >NC_006213.1-cand-1260-1339
  source 1..80: mol_type = other DNA
atataatttagttgacattatgagtcatttttatatggaggcagatacagttgtaaatgctttttatggtgttgctttga

SEQ ID NO: 3820 - DNA, 80 bp, synthetic construct
  misc_feature 1..80: note = Synthetic: >NC_006213.1-cand-1340-1419
  source 1..80: mol_type = other DNA
aagattgcggttttgttatgcagtttggttacattgattgcgaacaagactcgtgtgattttaaaggttggattcctggt

SEQ ID NO: 3821 - DNA, 80 bp, synthetic construct
  misc_feature 1..80: note = Synthetic: >NC_006213.1-cand-1420-1499
  source 1..80: mol_type = other DNA
aacatgatagatggttttgcttgcaccacttgtggtcatgtttatgaagtaggtgatttgatggcacaatcttcaggtgt

SEQ ID NO: 3822 - DNA, 80 bp, synthetic construct
  misc_feature 1..80: note = Synthetic: >NC_006213.1-cand-1500-1579
  source 1..80: mol_type = other DNA
tttgcctgttaaccctgtattgcatactaagagtgcagcaggctatggtggttttggttgtaaagattcttttactctgt

SEQ ID NO: 3823 - DNA, 80 bp, synthetic construct
  misc_feature 1..80: note = Synthetic: >NC_007549.1-cand-1010-1089
  source 1..80: mol_type = other DNA
gatgctaggagccgacggatatgtgttaacacagaagacaagattggatagagatcagcaattaatagctaacagaagat

SEQ ID NO: 3824 - DNA, 80 bp, synthetic construct
  misc_feature 1..80: note = Synthetic: >NC_007549.1-cand-1090-1169
  source 1..80: mol_type = other DNA
ctgtggtatttgatagaatgtgtgaattgtcagggcctttatatagatcacgtattgttcattcaatgagaatgatgtca

SEQ ID NO: 3825 - DNA, 80 bp, synthetic construct
  misc_feature 1..80: note = Synthetic: >NC_007549.1-cand-1180-1259
  source 1..80: mol_type = other DNA
gaacgaatgtctttagaacttctcttgaagatgaaataaccaaaatttacgccgctgctgaggtatctatggtttctatt

SEQ ID NO: 3826 - DNA, 80 bp, synthetic construct
  misc_feature 1..80: note = Synthetic: >NC_007549.1-cand-1260-1339
  source 1..80: mol_type = other DNA
gatgcgactacgtctgcactttccaccattaatattgcatcagctgaacaaacgctgaatgcgttattaaacatgtcttt

SEQ ID NO: 3827 - DNA, 80 bp, synthetic construct
  misc_feature 1..80: note = Synthetic: >NC_007549.1-cand-1350-1429
  source 1..80: mol_type = other DNA
gagttagatttaattggtagtcagtcttcttttggagctgcaatgtctgcaatgattgcactaatgatactcccaacaga

SEQ ID NO: 3828 - DNA, 80 bp, synthetic construct
  misc_feature 1..80: note = Synthetic: >NC_007549.1-cand-1440-1519
  source 1..80: mol_type = other DNA
atggatgacgaagtgtttgatgttctatgcaatcttgtttacaatgaattaatagcatgggctgctgatagacctgtttt

SEQ ID NO: 3829 - DNA, 80 bp, synthetic construct
  misc_feature 1..80: note = Synthetic: >NC_007549.1-cand-1520-1599
  source 1..80: mol_type = other DNA
cgttaggagagctggagcaacaaacgcatttaggcaatttgttaatgctggattgaatcgtgacatcactaattatatga

SEQ ID NO: 3830 - DNA, 80 bp, synthetic construct
  misc_feature 1..80: note = Synthetic: >NC_007549.1-cand-1610-1689
  source 1..80: mol_type = other DNA
gttaagaagaccttggcttccactttacaactctagagatgtgcggagaaatgctcacgttctggttcctaatgttgatt

SEQ ID NO: 3831 - DNA, 80 bp, synthetic construct
  misc_feature 1..80: note = Synthetic: >NC_007549.1-cand-1690-1769
  source 1..80: mol_type = other DNA
tagctaatattaatgatcaagtgtacgttgcaattaatagtttcctgaatggaattattgaagcatcaagaaggaaccca

SEQ ID NO: 3832 - DNA, 80 bp, synthetic construct
  misc_feature 1..80: note = Synthetic: >NC_007549.1-cand-1770-1849
  source 1..80: mol_type = other DNA
aatcctaataaaacgatttctgccaattcatttcgaaaattaatgaaaaacatgagagatatttgtgttaatagattgat

SEQ ID NO: 3833 - DNA, 80 bp, synthetic construct
  misc_feature 1..80: note = Synthetic: >NC_007549.1-cand-1850-1929
  source 1..80: mol_type = other DNA
gccagttataagattaattagatacaacgttgaaagaataggtatgattttgcacatgttaccatattcagcagacattt

SEQ ID NO: 3834 - DNA, 80 bp, synthetic construct
  misc_feature 1..80: note = Synthetic: >NC_007549.1-cand-1930-2009
  source 1..80: mol_type = other DNA
ttgatatcaacagaaatttgagagatgaacggcttagaattaaaattccgatgtctggctttctgtccttagttatgggc

SEQ ID NO: 3835 - DNA, 80 bp, synthetic construct
  misc_feature 1..80: note = Synthetic: >NC_007549.1-cand-2010-2089
  source 1..80: mol_type = other DNA
ataacgaaagctcctgatgcttttgattggtcacaggttctaaattttgctgatgatgtaaggaaaatggattatgctga

SEQ ID NO: 3836 - DNA, 80 bp, synthetic construct
  misc_feature 1..80: note = Synthetic: >NC_007549.1-cand-2090-2169
  source 1..80: mol_type = other DNA
agcaatttcaattgaagattcagcatcagtggctataatgcggaatgatgctaatagagcaacttcgaagaaagaaattt

SEQ ID NO: 3837 - DNA, 80 bp, synthetic construct
  misc_feature 1..80: note = Synthetic: >NC_007549.1-cand-2170-2249
  source 1..80: mol_type = other DNA
tcatttcagaagttaaaccaccaactccaactgtagcttcaatacaaaaaattccctcagcaactttgactgcaatgttt

SEQ ID NO: 3838 - DNA, 80 bp, synthetic construct
  misc_feature 1..80: note = Synthetic: >NC_007549.1-cand-2250-2329
  source 1..80: mol_type = other DNA
tcagacagacagttaattaatttaattagagacactcattcattcagagtaattcgtgaaatagctgtagctctccaagc

SEQ ID NO: 3839 - DNA, 80 bp, synthetic construct
  misc_feature 1..80: note = Synthetic: >NC_011508.2-cand-2330-2409
  source 1..80: mol_type = other DNA
ctacgtagcaaatgttagtggagtattatctacatactttaaaatctataacgtattttataaaaatcaaataacttttg

SEQ ID NO: 3840 - DNA, 80 bp, synthetic construct
  misc_feature 1..80: note = Synthetic: >NC_011508.2-cand-2410-2489
  source 1..80: mol_type = other DNA
gccaatccagaatgtttattccgcacataacattaagcttcaataacatgagaacagtaaggatagagactactaaatta

SEQ ID NO: 3841 - DNA, 80 bp, synthetic construct
  misc_feature 1..80: note = Synthetic: >NC_011508.2-cand-2500-2579
  source 1..80: mol_type = other DNA
ccatttatttaagaaagattaagggtgatacagtgtttgatatggttgagtgagctaaaaacttaacacactagtcatga

SEQ ID NO: 3842 - DNA, 80 bp, synthetic construct
  misc_feature 1..80: note = Synthetic: >NC_011509.2-cand-0-79
  source 1..80: mol_type = other DNA
tttaaacgaagtcttcaacatggatgtcctatactctttgtcaaagactcttaaagacgctagagacaaaattgtcgaag

SEQ ID NO: 3843 - DNA, 80 bp, synthetic construct
  misc_feature 1..80: note = Synthetic: >NC_011509.2-cand-90-169
  source 1..80: mol_type = other DNA
ttctaacgtgagtgatctaattcaacaatttaatcaaatgataattactatgaatggaaatgaatttcaaactggaggaa

SEQ ID NO: 3844 - DNA, 80 bp, synthetic construct
  misc_feature 1..80: note = Synthetic: >NC_011509.2-cand-180-259
  source 1..80: mol_type = other DNA
gccaattagaaactggaattttaatttcgggttacttggaacaactttgctgaacttagacgctaattatgttgaaacgg

SEQ ID NO: 3845 - DNA, 80 bp, synthetic construct
  misc_feature 1..80: note = Synthetic: >NC_011509.2-cand-270-349
  source 1..80: mol_type = other DNA
aattgattatttcgtggattttgtagacaatgtatgcatggatgagatggttagagaatcacaaaggaacggaattgcac

SEQ ID NO: 3846 - DNA, 80 bp, synthetic construct
  misc_feature 1..80: note = Synthetic: >NC_011509.2-cand-340-419
  source 1..80: mol_type = other DNA
ggaattgcacctcaatcagactcgctaagaaagctgtcagccattaaattcaaaagaataaattttgataattcgtcgga

SEQ ID NO: 3847 - DNA, 80 bp, synthetic construct
  misc_feature 1..80: note = Synthetic: >NC_011509.2-cand-430-509
  source 1..80: mol_type = other DNA
aactggaatttgcaaaatagaagacagaggacaggtttcacttttcataaaccaaacatttttccttattcagcatcatt

SEQ ID NO: 3848 - DNA, 80 bp, synthetic construct
  misc_feature 1..80: note = Synthetic: >NC_011509.2-cand-510-589
  source 1..80: mol_type = other DNA
tacactaaatagatcacaacccgctcatgataatttgatgggcacaatgtggttaaacgcaggatcggaaattcaagtcg

SEQ ID NO: 3849 - DNA, 80 bp, synthetic construct
  misc_feature 1..80: note = Synthetic: >NC_011509.2-cand-600-679
  source 1..80: mol_type = other DNA
ctactcatgtgctattaacgcaccagccaatatacaacaatttgagcatattgtgccactccgaagagtgttaactacag

SEQ ID NO: 3850 - DNA, 80 bp, synthetic construct
  misc_feature 1..80: note = Synthetic: >NC_011509.2-cand-660-739
  source 1..80: mol_type = other DNA
ccgaagagtgttaactacagctacgataactcttctaccagacgcggaaaggtttagttttccaagagtgatcaattcag

SEQ ID NO: 3851 - DNA, 80 bp, synthetic construct
  misc_feature 1..80: note = Synthetic: >NC_011509.2-cand-780-859
  source 1..80: mol_type = other DNA
caggccgaataacgttgaagtggagtttctattgaatggacagataataaacacttatcaagcaagatttggaactatcg

SEQ ID NO: 3852 - DNA, 80 bp, synthetic construct
  misc_feature 1..80: note = Synthetic: >NC_011509.2-cand-870-949
  source 1..80: mol_type = other DNA
ttttgatactattagactatcattccagttaatgagaccaccaaacatgacaccagcagtagcagtactattcccgaatg

SEQ ID NO: 3853 - DNA, 80 bp, synthetic construct
  misc_feature 1..80: note = Synthetic: >NC_011509.2-cand-1080-1159
  source 1..80: mol_type = other DNA
aataccagttggaccagtctttccaccaggtatgaactggactgatttaatcaccaattattcaccgtctagggaggaca

SEQ ID NO: 3854 - DNA, 80 bp, synthetic construct
  misc_feature 1..80: note = Synthetic: >NC_011509.2-cand-1170-1249
  source 1..80: mol_type = other DNA
cgtatttacagtggcttccattagaagcatgctcattaaatgaggaccaagctaacaacttggtatccaactttggtgag

SEQ ID NO: 3855 - DNA, 80 bp, synthetic construct
  misc_feature 1..80: note = Synthetic: >NC_025114.1-cand-6250-6329
  source 1..80: mol_type = other DNA
gcctctgcgggtccccgatgatcgccaccgaccctggcggcttgggtgtcctcggcatccatgtcgccggtgttgctggc

SEQ ID NO: 3856 - DNA, 80 bp, synthetic construct
  misc_feature 1..80: note = Synthetic: >NC_025114.1-cand-6330-6409
  source 1..80: mol_type = other DNA
tacaacgggttctccgcacgcctcacccctgaacgtgtccaaaatttcatctctcaattggcaactccccaatctgttct

SEQ ID NO: 3857 - DNA, 80 bp, synthetic construct
  misc_feature 1..80: note = Synthetic: >NC_025114.1-cand-6430-6509
  source 1..80: mol_type = other DNA
ggccgcctgcgcacgtttcccggcgcagtcgactccacccctcccccgcatttggtgccttccccatcaccaaggaacca

SEQ ID NO: 3858 - DNA, 80 bp, synthetic construct
  misc_feature 1..80: note = Synthetic: >NC_025114.1-cand-6490-6569
  source 1..80: mol_type = other DNA
tccccatcaccaaggaaccagctgccctctctcgaaaggacccccgcctccccgaaggtactgatctggacgccatcact

SEQ ID NO: 3859 - DNA, 80 bp, synthetic construct
  misc_feature 1..80: note = Synthetic: >NC_025114.1-cand-6570-6649
  source 1..80: mol_type = other DNA
cttgccaagcatgacaagggtgacatcccgacgccctggccctgcatggaagaggcggccgattggtatttctcccttct

SEQ ID NO: 3860 - DNA, 80 bp, synthetic construct
  misc_feature 1..80: note = Synthetic: >NC_025114.1-cand-6650-6729
  source 1..80: mol_type = other DNA
ccctgactctctccctgtcctttcccaggaagatgccatccgtggtctcgaccacatggatggtattgacctctcccaat

SEQ ID NO: 3861 - DNA, 80 bp, synthetic construct
  misc_feature 1..80: note = Synthetic: >NC_025114.1-cand-6730-6809
  source 1..80: mol_type = other DNA
ctcctggctacccgtggacgacaatgggccggtcccgccggtctttgtttgacgcggatggcaaccccacccctgacctc

SEQ ID NO: 3862 - DNA, 80 bp, synthetic construct
  misc_feature 1..80: note = Synthetic: >NC_025114.1-cand-6810-6889
  source 1..80: mol_type = other DNA
caggaagccatcgatgccgtctgggacggtggctcctacatctaccaatccttccttaaggacgagctgcgccctacggc

SEQ ID NO: 3863 - DNA, 80 bp, synthetic construct
  misc_feature 1..80: note = Synthetic: >NC_025114.1-cand-6890-6969
  source 1..80: mol_type = other DNA
gaaagcccgagcagggaaaacccggattgtcgaggccgcaccgatacaagcaattgtcgtcggtcgccggcttctaggtt

SEQ ID NO: 3864 - DNA, 80 bp, synthetic construct
  misc_feature 1..80: note = Synthetic: >NC_025114.1-cand-6970-7049
  source 1..80: mol_type = other DNA
ctctcatcaaccacatccagggcaaccccctctcgttcggcagcgctgttgggtgcaacccggacatccactggacccaa

SEQ ID NO: 3865 - DNA, 80 bp, synthetic construct
  misc_feature 1..80: note = Synthetic: >NC_025114.1-cand-7050-7129
  source 1..80: mol_type = other DNA
atcttccactctctcactcctttccctaatgtctggtccattgactactcttgctttgatgctactatcccctcctgcct

SEQ ID NO: 3866 - DNA, 80 bp, synthetic construct
  misc_feature 1..80: note = Synthetic: >NC_025114.1-cand-7130-7209
  source 1..80: mol_type = other DNA
tcttcacgctatcgctactcgcatagcgaagcgctctgaccaacctggtcgtgttcttgactatctctcctacactacct

SEQ ID NO: 3867 - DNA, 80 bp, synthetic construct
  misc_feature 1..80: note = Synthetic: >NC_025114.1-cand-7220-7299
  source 1..80: mol_type = other DNA
tgtctacgactccctgtggtacaccatgattggtgggaatccctccgggtgtgttgggacctccatcctcaacaccattg

SEQ ID NO: 3868 - DNA, 80 bp, synthetic construct
  misc_feature 1..80: note = Synthetic: >NC_025114.1-cand-7300-7379
  source 1..80: mol_type = other DNA
caaacaacatagcgatcatctccgctatgatgtattgcaacaaatttgacccaagggatcctccagtcttgtactgctac

SEQ ID NO: 3869 - DNA, 80 bp, synthetic construct
  misc_feature 1..80: note = Synthetic: >NC_025114.1-cand-7400-7479
  source 1..80: mol_type = other DNA
ctccaatcaagactttcaccctcgtgaactccaggctttctatcagaaattcaccaactttgtcgtcactcctgccgaca

SEQ ID NO: 3870 - DNA, 80 bp, synthetic construct
  misc_feature 1..80: note = Synthetic: >NC_025114.1-cand-7480-7559
  source 1..80: mol_type = other DNA
aagcctctgactttcctgacacttcttccatctttgacatcactttccttaaacgctattttgtccctgatgacatccac

SEQ ID NO: 3871 - DNA, 80 bp, synthetic construct
  misc_feature 1..80: note = Synthetic: >NC_038374.1-cand-1830-1909
  source 1..80: mol_type = other DNA
gctaacgggcagatttcaagaggcattaaagaagtcattaaaaaaaccagaggtgaagaaaggctgctacaggactttag

SEQ ID NO: 3872 - DNA, 80 bp, synthetic construct
  misc_feature 1..80: note = Synthetic: >NC_038374.1-cand-1960-2039
  source 1..80: mol_type = other DNA
cttctaacatttgaaattgttgtctgggcagcaagcgcagagactcctcaaactgaagcaggttggtctgatactgctca

SEQ ID NO: 3873 - DNA, 80 bp, synthetic construct
  misc_feature 1..80: note = Synthetic: >NC_038374.1-cand-2030-2109
  source 1..80: mol_type = other DNA
atactgctcacggtgtaggtgtgatcccaatgaagacagacctagagcttgatttttcattaccatcatcatcttcttac

SEQ ID NO: 3874 - DNA, 80 bp, synthetic construct
  misc_feature 1..80: note = Synthetic: >NC_038374.1-cand-2110-2189
  source 1..80: mol_type = other DNA
agttacagaagaaaattgattaatccagcaaaccatgaagaaactattccttttcactttcaacttgatcagcaagttat

SEQ ID NO: 3875 - DNA, 80 bp, synthetic construct
  misc_feature 1..80: note = Synthetic: >NC_038374.1-cand-2180-2259
  source 1..80: mol_type = other DNA
agcaagttattcatgctgaaattcagacattaggtcattggatggatgcaacatttaatatcaaaactgcctttcattgt

SEQ ID NO: 3876 - DNA, 80 bp, synthetic construct
  misc_feature 1..80: note = Synthetic: >NC_038374.1-cand-2270-2349
  source 1..80: mol_type = other DNA
gtaacaaatattcatacccctggcaaactgccaaatgcttctttgagaaggattatcagtatgagacaggatgggcttgc

SEQ ID NO: 3877 - DNA, 80 bp, synthetic construct
  misc_feature 1..80: note = Synthetic: >NC_038374.1-cand-2370-2449
  source 1..80: mol_type = other DNA
ggttggcacaggctgtacagcgtgtggtgtttacctggataagttaaaatcaataggaaaggcctataaagtaatctcac

SEQ ID NO: 3878 - DNA, 80 bp, synthetic construct
  misc_feature 1..80: note = Synthetic: >NC_038374.1-cand-2440-2519
  source 1..80: mol_type = other DNA
gtaatctcactaagatatactcgtaaagtgtgcatacagctgggtacagaacagacatgcaaacatattgacgcaaatga

SEQ ID NO: 3879 - DNA, 80 bp, synthetic construct
  misc_feature 1..80: note = Synthetic: >NC_038374.1-cand-2520-2599
  source 1..80: mol_type = other DNA
ctgccttgttaccccgtctgtaaaagtctgcatgatcgggacagtctcaaaattgcagcctgctgacacactgctctttc

SEQ ID NO: 3880 - DNA, 80 bp, synthetic construct
  misc_feature 1..80: note = Synthetic: >NC_038374.1-cand-2610-2689
  source 1..80: mol_type = other DNA
tgagcagggcggtattattctgaagcagtggtgtacaacctcttgtgcctttggtgatcctggcgatattatggctacta

SEQ ID NO: 3881 - DNA, 80 bp, synthetic construct
  misc_feature 1..80: note = Synthetic: >NC_038374.1-cand-2690-2769
  source 1..80: mol_type = other DNA
ctgcaggaatgcggtgtccagaacacacaggttcgtttagaaaaatctgcgggtttgccactacaccagtatgtgagtat

SEQ ID NO: 3882 - DNA, 80 bp, synthetic construct
  misc_feature 1..80: note = Synthetic: >NC_038374.1-cand-2770-2849
  source 1..80: mol_type = other DNA
caaggcaatactgtgtcaggatatcaaaggcttatggcaacaaaggattcatttcaatcattcaacttaagcaatcctca

SEQ ID NO: 3883 - DNA, 80 bp, synthetic construct
  misc_feature 1..80: note = Synthetic: >NC_038374.1-cand-2850-2929
  source 1..80: mol_type = other DNA
tctgacagccaacaacctagaatggacggatcctgatggagctacaaaagatcatgttaatttggtattaaatagagatg

SEQ ID NO: 3884 - DNA, 80 bp, synthetic construct
  misc_feature 1..80: note = Synthetic: >NC_038374.1-cand-2920-2999
  source 1..80: mol_type = other DNA
aatagagatgtttcattccaggatctaagtgataacccatgtaaggtagaccttcatacacagtctatagagggtgcatg

SEQ ID NO: 3885 - DNA, 80 bp, synthetic construct
  misc_feature 1..80: note = Synthetic: >NC_038374.1-cand-3010-3089
  source 1..80: mol_type = other DNA
gtagggtttacattaacttgcaatgttggattaacagaatgcccaagctttcttacatctattaaagcttgtgatctggc

SEQ ID NO: 3886 - DNA, 80 bp, synthetic construct
  misc_feature 1..80: note = Synthetic: >NC_038374.1-cand-3130-3209
  source 1..80: mol_type = other DNA
tctaacacgattaaagtagttggaaaaggtgggcactcaggttctgcatttaagtgctgtcatgacactgattgttcgaa

SEQ ID NO: 3887 - DNA, 80 bp, synthetic construct
  misc_feature 1..80: note = Synthetic: >NC_044932.1-cand-4160-4239
  source 1..80: mol_type = other DNA
tctcatggatgagatgaaggctaactgtgtgagattgcccatcagggtcgggatgaacatgaatgaagatggacctataa

SEQ ID NO: 3888 - DNA, 80 bp, synthetic construct
  misc_feature 1..80: note = Synthetic: >NC_044932.1-cand-4190-4269
  source 1..80: mol_type = other DNA
gagattgcccatcagggtcgggatgaacatgaatgaagatggacctataatctttgagaaacatgcaaaatatagatatc

SEQ ID NO: 3889 - DNA, 80 bp, synthetic construct
  misc_feature 1..80: note = Synthetic: >NC_044932.1-cand-4270-4349
  source 1..80: mol_type = other DNA
attatgatgctgattattccaggtgggactcaacccaacagagacacatactgggtgttgcacttgacatcatggttaaa

SEQ ID NO: 3890 - DNA, 80 bp, synthetic construct
  misc_feature 1..80: note = Synthetic: >NC_044932.1-cand-4350-4429
  source 1..80: mol_type = other DNA
ttctcagctgaaccagaactatcacaagtggtgtctgaggatcttctgtcacccagtgtcgtggatgttggtgactttaa

SEQ ID NO: 3891 - DNA, 80 bp, synthetic construct
  misc_feature 1..80: note = Synthetic: >NC_044932.1-cand-4430-4509
  source 1..80: mol_type = other DNA
gatcacaataaacgagggccttccctcaggtgtcccatgcacatctcaatggaactcaattgctcattggcttctaacac

SEQ ID NO: 3892 - DNA, 80 bp, synthetic construct
  misc_feature 1..80: note = Synthetic: >NC_044932.1-cand-4500-4579
  source 1..80: mol_type = other DNA
cttctaacactgtgtgccatgtcggaagtctctggactctcccccgacgtggtacaatcaaattcatgtttctccttcta

SEQ ID NO: 3893 - DNA, 80 bp, synthetic construct
  misc_feature 1..80: note = Synthetic: >NC_044932.1-cand-4590-4669
  source 1..80: mol_type = other DNA
gagatagtcagcacagacataaagttggacccacaaaaactgacagacaaactgagagagtatgggctcattccaacccg

SEQ ID NO: 3894 - DNA, 80 bp, synthetic construct
  misc_feature 1..80: note = Synthetic: >NC_044932.1-cand-4690-4769
  source 1..80: mol_type = other DNA
cactcataattagagagagcttagagggtctgacgttcctcaggagagatatatgtagggacccagtcggctggtatggt

SEQ ID NO: 3895 - DNA, 80 bp, synthetic construct
  misc_feature 1..80: note = Synthetic: >NC_044932.1-cand-4760-4839
  source 1..80: mol_type = other DNA
ctggtatggtaagcttgaccagtcctcaatcatgagacaactgtattggaccaaaggacccaaccatgaggatcccaatg

SEQ ID NO: 3896 - DNA, 80 bp, synthetic construct
  misc_feature 1..80: note = Synthetic: >NC_044932.1-cand-4840-4919
  source 1..80: mol_type = other DNA
aaacaatgattccacattctcaaagaccaatacaattaatgtcccttctcggtgaggctgccctgcatggaccaacattt

SEQ ID NO: 3897 - DNA, 80 bp, synthetic construct
  misc_feature 1..80: note = Synthetic: >NC_044932.1-cand-4920-4999
  source 1..80: mol_type = other DNA
tacaagaaagttagcaaattggtaatcactgaactcaaagaaggtggaatggatttttacgtgcccagacaagaaccaat

SEQ ID NO: 3898 - DNA, 80 bp, synthetic construct
  misc_feature 1..80: note = Synthetic: >NC_044932.1-cand-5000-5079
  source 1..80: mol_type = other DNA
gtacaggtggatgagattctccgacttgagcacgtgggagggtgatcgcaatcttgctcccgaaggtgtgaatgaagatg

SEQ ID NO: 3899 - DNA, 80 bp, synthetic construct
  misc_feature 1..80: note = Synthetic: >NC_044932.1-cand-5080-5159
  source 1..80: mol_type = other DNA
gcgtcgaatgacgccgctccatctaatgatggtgctgccaacctcgttccagaggccaactcagaggcattggcattgga

SEQ ID NO: 3900 - DNA, 80 bp, synthetic construct
  misc_feature 1..80: note = Synthetic: >NC_044932.1-cand-5180-5259
  source 1..80: mol_type = other DNA
ttgccgcacctctcactggtcaaacaaatataattgacccctggattatgaaaaactttgtgcaggcacctaatggtgaa

SEQ ID NO: 3901 - DNA, 80 bp, synthetic construct
  misc_feature 1..80: note = Synthetic: >NC_044932.1-cand-5240-5319
  source 1..80: mol_type = other DNA
tgcaggcacctaatggtgaattcacaatatccccaagaaattcccctggagaaattttgttaaaccttgagttaggacca

SEQ ID NO: 3902 - DNA, 80 bp, synthetic construct
  misc_feature 1..80: note = Synthetic: >NC_044932.1-cand-5290-5369
  source 1..80: mol_type = other DNA
gaaattttgttaaaccttgagttaggaccagaaattaatccttttcttgcccacttatctaggatgtataatgggtttgc

SEQ ID NO: 3903 - DNA, 80 bp, synthetic construct
  misc_feature 1..80: note = Synthetic: >NC_044854.1-cand-5350-5429
  source 1..80: mol_type = other DNA
atgatgatggcgtctaaggacgccccaacatcccctgatggcgccagtggcgctggccagctggtaccggaggctaatac

SEQ ID NO: 3904 - DNA, 80 bp, synthetic construct
  misc_feature 1..80: note = Synthetic: >NC_001611.1-cand-58620-58699
  source 1..80: mol_type = other DNA
atggcactcttattatagacgaagttcatgagcatgatcaaataggagatattattatagcagtagcgagaaagcatcat

SEQ ID NO: 3905 - DNA, 80 bp, synthetic construct
  misc_feature 1..80: note = Synthetic: >NC_004296.1-cand-1930-2009
  source 1..80: mol_type = other DNA
atgattcaatctgtgaggtttgggacacgacttgcctacaatatgcctatgagttggtattttgactaggtgaaggaaga

SEQ ID NO: 3906 - DNA, 80 bp, synthetic construct
  misc_feature 1..80: note = Synthetic: >NC_001611.1-cand-114730-114809
  source 1..80: mol_type = other DNA
atgattccagcaattaacactccggaaaaataatttccaatcataagcatcatgtccatttaactaataaaaattttaaa

SEQ ID NO: 3907 - DNA, 80 bp, synthetic construct
  misc_feature 1..80: note = Synthetic: >NC_001611.1-cand-64210-64289
  source 1..80: mol_type = other DNA
ggttttccaagtagtgtgctctacatgcggtaaagatatttctcacgaacgatataaattgattatacgaaaaaaatcat

SEQ ID NO: 3908 - DNA, 80 bp, synthetic construct
  misc_feature 1..80: note = Synthetic: >NC_001611.1-cand-64930-65009
  source 1..80: mol_type = other DNA
tttccctcgttctttttcttaacgttgtttgccatcactctcataatgtaaagatattctaaaatggtaaacttttgcat

SEQ ID NO: 3909 - DNA, 80 bp, synthetic construct
  misc_feature 1..80: note = Synthetic: >NC_001611.1-cand-84540-84619
  source 1..80: mol_type = other DNA
atgcaagactcacgcatcgagtatagccaaacaattggcgtgtgtggacattattaaagaggatattagcgaatatatca

SEQ ID NO: 3910 - DNA, 80 bp, synthetic construct
  misc_feature 1..80: note = Synthetic: >AdVB7-cand-26340-26419
  source 1..80: mol_type = other DNA
cttccaagaccggtaagaaggagcgacagggatacaagtcctggcgtggacacaaaaacgctatcatctcctgcttgcat

SEQ ID NO: 3911 - DNA, 80 bp, synthetic construct
  misc_feature 1..80: note = Synthetic: >NC_003310.1-cand-76100-76179
  source 1..80: mol_type = other DNA
tacccactgatgagatgttattaaacgtggataaaatgcatgacgtgatagctcccgctaagcttttagaatatgtgcat

SEQ ID NO: 3912 - DNA, 80 bp, synthetic construct
  misc_feature 1..80: note = Synthetic: >NC_004296.1-cand-1620-1699
  source 1..80: mol_type = other DNA
cacacaggtgtcgttgttgaaaagaagaaaagaggcggtaaagaggaaataacccctcactgtgcactaatggactgcat

SEQ ID NO: 3913 - DNA, 80 bp, synthetic construct
  misc_feature 1..80: note = Synthetic: >NC_001611.1-cand-143940-144019
  source 1..80: mol_type = other DNA
atgcattagtttacttttctactcagcaaaataaattagtcatacgtaatgaagttaatgatacacactatactgtcgaa

SEQ ID NO: 3914 - DNA, 80 bp, synthetic construct
  misc_feature 1..80: note = Synthetic: >AdVB3-cand-6470-6549
  source 1..80: mol_type = other DNA
gcgggatcatccaaggtcatctgccattctcgaactgccagcgcgcgctcataggggttaagaggggtgccccagggcat

SEQ ID NO: 3915 - DNA, 80 bp, synthetic construct
  misc_feature 1..80: note = Synthetic: >EVB79-cand-7340-7419
  source 1..80: mol_type = other DNA
tttgatttaattctaattggcttaaccctaccacactcaccgaactagacaacggtgcagtaggggtaaattctccgcat

SEQ ID NO: 3916 - DNA, 80 bp, synthetic construct
  misc_feature 1..80: note = Synthetic: >EVB82-cand-460-539
  source 1..80: mol_type = other DNA
atgcggctaatcctaactgcggagcacgtgcctccaatccagggggtggcgtgtcgtaacgggtaactctgcagcggaac

SEQ ID NO: 3917 - DNA, 80 bp, synthetic construct
  misc_feature 1..80: note = Synthetic: >NC_001611.1-cand-174860-174939
  source 1..80: mol_type = other DNA
taggtactatatctattcagatactgagtaaaatattgggagtcaatgaaacagaattaactaattatcttattacgcat

SEQ ID NO: 3918 - DNA, 80 bp, synthetic construct
  misc_feature 1..80: note = Synthetic: >NC_001611.1-cand-13550-13629
  source 1..80: mol_type = other DNA
ttcatcctttgataattttccaaattctggattggatgtcactgcagtaatattgttaattatttctaacattgacgcat

SEQ ID NO: 3919 - DNA, 80 bp, synthetic construct
  misc_feature 1..80: note = Synthetic: >NC_001611.1-cand-109320-109399
  source 1..80: mol_type = other DNA
atttttaatatccgtcaagagagttatctggtaagttcattatctgaaataacatatagattttatctaattaatctaaa

SEQ ID NO: 3920 - DNA, 80 bp, synthetic construct
  misc_feature 1..80: note = Synthetic: >NC_001611.1-cand-63650-63729
  source 1..80: mol_type = other DNA
cacccaccaacttaaacaaaatacaattgtttagtgattttacaatcaataatatagtcactagtttggcaattaaaaat

SEQ ID NO: 3921 - DNA, 80 bp, synthetic construct
  misc_feature 1..80: note = Synthetic: >NC_003310.1-cand-8910-8989
  source 1..80: mol_type = other DNA
atttttctgatattttctataatatcagaattgtcttccataggaagttgtatactatcggaatcagttacatgtttaaa

SEQ ID NO: 3922 - DNA, 80 bp, synthetic construct
  misc_feature 1..80: note = Synthetic: >NC_003310.1-cand-144120-144199
  source 1..80: mol_type = other DNA
tataggaccatacattataggtaacataaaaattgtccaaatagatgcacgggatataaaatattccgacatgcaaaaat

SEQ ID NO: 3923 - DNA, 80 bp, synthetic construct
  misc_feature 1..80: note = Synthetic: >AdVB3-cand-17440-17519
  source 1..80: mol_type = other DNA
ggcgataccaggcatagcttccgtggcggttcaggcctcgcagcgccactaacattggaaaaaacttataaataaaaaat

SEQ ID NO: 3924 - DNA, 80 bp, synthetic construct
  misc_feature 1..80: note = Synthetic: >AdVB7-cand-2610-2689
  source 1..80: mol_type = other DNA
taggtttagaggggatgggtataatggcattgtatttatggctaacactaagctgattctacatggttgtagcttttttg

SEQ ID NO: 3925 - DNA, 80 bp, synthetic construct
  misc_feature 1..80: note = Synthetic: >NC_003310.1-cand-83940-84019
  source 1..80: mol_type = other DNA
catcaatatccagctaacttattttatacagactactttcccatccctccgttgattattagaccggctattagtttttg

SEQ ID NO: 3926 - DNA, 80 bp, synthetic construct
  misc_feature 1..80: note = Synthetic: >HCV.A8-cand-6760-6839
  source 1..80: mol_type = other DNA
caaaacctattgtgtgcttggtgggatgccctcgggctgctcaggaacatccatcttcaactcaatgattaataacatca

SEQ ID NO: 3927 - DNA, 80 bp, synthetic construct
  misc_feature 1..80: note = Synthetic: >AdVB3-cand-14720-14799
  source 1..80: mol_type = other DNA
tcaggaaaagacatccattccaggagggtttcaaaattatgtatgaagatcttgaagggggtaatattcctgcccttttg

SEQ ID NO: 3928 - DNA, 80 bp, synthetic construct
  misc_feature 1..80: note = Synthetic: >NC_001611.1-cand-54610-54689
  source 1..80: mol_type = other DNA
caaaatagttgtatgaaaagtctcgttcgtaaataataactgagttgagtttatccttatatttgttaactacatccatg

SEQ ID NO: 3929 - DNA, 80 bp, synthetic construct
  misc_feature 1..80: note = Synthetic: >NC_007378.1-cand-610-689
  source 1..80: mol_type = other DNA
caaaatttctcctttgatggttgcatacatgttagagagagaacttgtccgaaaaacgagatttctcccagttgctggtg

SEQ ID NO: 3930 - DNA, 80 bp, synthetic construct
  misc_feature 1..80: note = Synthetic: >AdVB3-cand-18160-18239
  source 1..80: mol_type = other DNA
caaacctgtcgctaccagaaagcccaccgccgtacagcccgtcgccgtagccagaccgcgtcctgggggcacaccgcgcc

SEQ ID NO: 3931 - DNA, 80 bp, synthetic construct
  misc_feature 1..80: note = Synthetic: >NC_003310.1-cand-95780-95859
  source 1..80: mol_type = other DNA
caaacgaaaggtattagcgattgattttggaaacggtgctgacctggaaaaatacttttatggagagattgcgttattgg

SEQ ID NO: 3932 - DNA, 80 bp, synthetic construct
  misc_feature 1..80: note = Synthetic: >NC_003310.1-cand-51090-51169
  source 1..80: mol_type = other DNA
caaactggtagaatagtccatagcaatctaacagaaacgtttagggattatatctttcccggagataagactagctattg

SEQ ID NO: 3933 - DNA, 80 bp, synthetic construct
  misc_feature 1..80: note = Synthetic: >NC_001611.1-cand-71340-71419
  source 1..80: mol_type = other DNA
caaacttaataaaggatatttgttcgactttgtgattagtttgatgcgattcaaaaaagaatcagctctagctaccaccg

SEQ ID NO: 3934 - DNA, 80 bp, synthetic construct
  misc_feature 1..80: note = Synthetic: >NC_007364.1-cand-0-79
  source 1..80: mol_type = other DNA
caaagacataatggattccaacacgataacctcgtttcaggtagattgttatctatggcacataagaaagctactcagta

SEQ ID NO: 3935 - DNA, 80 bp, synthetic construct
  misc_feature 1..80: note = Synthetic: >AF482716.1-cand-700-779
  source 1..80: mol_type = other DNA
ggtcattggttttagtttctttgtgaaggattggatggaacggatagagggattcttggcagcggaatgccctttcttac

SEQ ID NO: 3936 - DNA, 80 bp, synthetic construct
  misc_feature 1..80: note = Synthetic: >AF482716.1-cand-760-839
  source 1..80: mol_type = other DNA
agcggaatgccctttcttacctaagcccaaaacagctgctgagacattcatggccaccaataaggcatacttttttaaca

SEQ ID NO: 3937 - DNA, 80 bp, synthetic construct
  misc_feature 1..80: note = Synthetic: >AF482716.1-cand-830-909
  source 1..80: mol_type = other DNA
ttttttaacaggcaacgccaggttgatgagtctcaagtcccagatattgttgaacttattgaccaggctgagtctgagtc

SEQ ID NO: 3938 - DNA, 80 bp, synthetic construct
  misc_feature 1..80: note = Synthetic: >AF482716.1-cand-920-999
  source 1..80: mol_type = other DNA
tttacagaaatagctagcccccattcagtgtgggtgtttgcatgtgcacctgataggtgtccaccgacagcattatatgt

SEQ ID NO: 3939 - DNA, 80 bp, synthetic construct
  misc_feature 1..80: note = Synthetic: >AF482716.1-cand-990-1069
  source 1..80: mol_type = other DNA
cattatatgtggcaggagtgccagagctaggtgccttttttgccatactacaagatatgagaaataccattatggcatca

SEQ ID NO: 3940 - DNA, 80 bp, synthetic construct
  misc_feature 1..80: note = Synthetic: >AF482716.1-cand-1070-1149
  source 1..80: mol_type = other DNA
aagtctgtgggaacagctgaggagaagttaaagaagaaatcagcattctatcaatcttatttgagacgaacacagtcaat

SEQ ID NO: 3941 - DNA, 80 bp, synthetic construct
  misc_feature 1..80: note = Synthetic: >AF482716.1-cand-1200-1279
  source 1..80: mol_type = other DNA
gtaaggaggctgtgaaccatttccatcttggtgatgatatggatcctgaattgagacaactagcacaggctttaattgat

SEQ ID NO: 3942 - DNA, 80 bp, synthetic construct
  misc_feature 1..80: note = Synthetic: >AF482716.1-cand-1280-1359
  source 1..80: mol_type = other DNA
actaaagtgaaggagatctcaaaccaggagcctttgaagctgtaagtgtcaagggtgtagggtggtgtttagtcttaatg

SEQ ID NO: 3943 - DNA, 80 bp, synthetic construct
  misc_feature 1..80: note = Synthetic: >AF482716.1-cand-1410-1489
  source 1..80: mol_type = other DNA
tactgtgattaacagggtgatattataagggtgggaagtgggtttactactaattacgggttactgtcctttgcactact

SEQ ID NO: 3944 - DNA, 80 bp, synthetic construct
  misc_feature 1..80: note = Synthetic: >AF482716.1-cand-1430-1509
  source 1..80: mol_type = other DNA
tattataagggtgggaagtgggtttactactaattacgggttactgtcctttgcactactattaaatacatttgcactat

SEQ ID NO: 3945 - DNA, 80 bp, synthetic construct
  misc_feature 1..80: note = Synthetic: >AF482716.1-cand-1520-1599
  source 1..80: mol_type = other DNA
gggatatacatgtagtcagtatgtattcaatatgtattcagtgtgtatcgttagttgtttagttgtttaggtaagtagct

SEQ ID NO: 3946 - DNA, 80 bp, synthetic construct
  misc_feature 1..80: note = Synthetic: >AF482716.1-cand-1600-1679
  source 1..80: mol_type = other DNA
aactagttgtatgaaatcaataatcgatcaacttagttagtcattataaccaattatatcattatgcctttaagtcaagt

SEQ ID NO: 3947 - DNA, 80 bp, synthetic construct
  misc_feature 1..80: note = Synthetic: >AF482716.1-cand-1680-1759
  source 1..80: mol_type = other DNA
taaatcattagatacactaatacttatatcttatccatagatgtaaatttcattccgtgctttgctgctttatgctatac

SEQ ID NO: 3948 - DNA, 80 bp, synthetic construct
  misc_feature 1..80: note = Synthetic: >AF482716.1-cand-1770-1849
  source 1..80: mol_type = other DNA
caaacctacctcatccacagacccttccctttctacctcaaaaaaatactacctcgaatatgatttttcttgattgcttc

SEQ ID NO: 3949 - DNA, 80 bp, synthetic construct
  misc_feature 1..80: note = Synthetic: >AJ410618.2-cand-0-79
  source 1..80: mol_type = other DNA
agtagactccggaagagacagattactatagagatggaaaaatacagagaaattcacagggatttgcaatcctttccagt

SEQ ID NO: 3950 - DNA, 80 bp, synthetic construct
  misc_feature 1..80: note = Synthetic: >AdVB7-cand-16180-16259
  source 1..80: mol_type = other DNA
gggcgaagagccatgcttagagcggccagacgcgcggctttaggtgccagcagcggcaggtcccgcaggcgcgcggccac

SEQ ID NO: 3951 - DNA, 80 bp, synthetic construct
  misc_feature 1..80: note = Synthetic: >AdVB7-cand-16630-16709
  source 1..80: mol_type = other DNA
gtgctcagacccggaaccactgtggtttttacacctggcgagcgttccagcactacttttaaacggtcctatgatgaggt

SEQ ID NO: 3952 - DNA, 80 bp, synthetic construct
  misc_feature 1..80: note = Synthetic: >AdVB7-cand-17490-17569
  source 1..80: mol_type = other DNA
tccttgcagatatggccctcacttgccgccttcgcgtccccattactggctaccgaggaagaaactcgcgccgtagaagg

SEQ ID NO: 3953 - DNA, 80 bp, synthetic construct
  misc_feature 1..80: note = Synthetic: >AdVB7-cand-17820-17899
  source 1..80: mol_type = other DNA
tttcatccctggctccgcgacacggcacgaggccgtacatgggcacctggagcgacatcggcacgagccaactgaacggg

SEQ ID NO: 3954 - DNA, 80 bp, synthetic construct
  misc_feature 1..80: note = Synthetic: >AdVB7-cand-18110-18189
  source 1..80: mol_type = other DNA
ataaacagccgcctggacccgccgcccgcaacccctggtgaaatggaagtggaggaagaacttcctccgctggaaaagcg

SEQ ID NO: 3955 - DNA, 80 bp, synthetic construct
  misc_feature 1..80: note = Synthetic: >AdVB7-cand-18320-18399
  source 1..80: mol_type = other DNA
gtaatgaaaccttctcagacacatcgacccgccaccttggacttgcctcctccccctgcttctgcggcacctgttcccaa

SEQ ID NO: 3956 - DNA, 80 bp, synthetic construct
  misc_feature 1..80: note = Synthetic: >AdVB7-cand-18470-18549
  source 1..80: mol_type = other DNA
ccgcgcccgaaagcaaactggcaaagtactctgaacagcatcgtgggtctgggcgtgcagagtgtaaagcgccgtcgctg

SEQ ID NO: 3957 - DNA, 80 bp, synthetic construct
  misc_feature 1..80: note = Synthetic: >AdVB7-cand-18800-18879
  source 1..80: mol_type = other DNA
gtttagaaaccccacagtggcgcccacccacgatgtgaccaccgaccgtagccagcgactgatgctgcgcttcgtgcccg

SEQ ID NO: 3958 - DNA, 80 bp, synthetic construct
  misc_feature 1..80: note = Synthetic: >AdVB7-cand-18850-18929
  source 1..80: mol_type = other DNA
gccagcgactgatgctgcgcttcgtgcccgttgaccgggaggacaatacatactcttacaaagtgcggtacaccctcgcc

SEQ ID NO: 3959 - DNA, 80 bp, synthetic construct
  misc_feature 1..80: note = Synthetic: >AdVB7-cand-18900-18979
  source 1..80: mol_type = other DNA
tactcttacaaagtgcggtacaccctcgccgtgggcgacaacagagtgcttgacatggccagcacattctttgacattag

SEQ ID NO: 3960 - DNA, 80 bp, synthetic construct
  misc_feature 1..80: note = Synthetic: >AdVB7-cand-19010-19089
  source 1..80: mol_type = other DNA
gccatattccggcacagcttacaattcactggctcctaagggcgcgcctaacacatctcagtggatagttacaacgggag

SEQ ID NO: 3961 - DNA, 80 bp, synthetic construct
  misc_feature 1..80: note = Synthetic: >AdVB7-cand-19090-19169
  source 1..80: mol_type = other DNA
aagacaatgccaccacatacacatttggcattgcttccacgaagggagacaatattactaaggaaggtttagaaattggg

SEQ ID NO: 3962 - DNA, 80 bp, synthetic construct
  misc_feature 1..80: note = Synthetic: >AdVB7-cand-19250-19329
  source 1..80: mol_type = other DNA
gactgatattgatggaacaaatgaaaaatttggaggtagagctcttaaaccagctactaaaatgaagccatgctacgggt

SEQ ID NO: 3963 - DNA, 80 bp, synthetic construct
  misc_feature 1..80: note = Synthetic: >AdVB7-cand-19360-19439
  source 1..80: mol_type = other DNA
gccaagctaaaaacagaaaagtaacaccaaccgaaggagatgttgaagctgaggagccagatattgatatggaatttttt

SEQ ID NO: 3964 - DNA, 80 bp, synthetic construct
  misc_feature 1..80: note = Synthetic: >AdVB7-cand-19410-19489
  source 1..80: mol_type = other DNA
gaggagccagatattgatatggaattttttgatggtagagaagctgctgacgctttttcgcctgaaattgtgctttacac

SEQ ID NO: 3965 - DNA, 80 bp, synthetic construct
  misc_feature 1..80: note = Synthetic: >AdVB7-cand-19490-19569
  source 1..80: mol_type = other DNA
ggaaaatgtcaatttggaaactccagacagccatgtggtatacaagccaggaacttctgatggtaactctcatgcaaatt

SEQ ID NO: 3966 - DNA, 80 bp, synthetic construct
  misc_feature 1..80: note = Synthetic: >AdVE4-cand-11320-11399
  source 1..80: mol_type = other DNA
caaaaatccttcaacaaccacgtgcgcaccctgatagcgcgcgaggaggtgaccctgggcctgatgcacctgtgggacct

SEQ ID NO: 3967 - DNA, 80 bp, synthetic construct
  misc_feature 1..80: note = Synthetic: >AdVE4-cand-11400-11479
  source 1..80: mol_type = other DNA
gctggaggccattgtgcagaaccccaccagcaaaccgcttacggcgcagctattcctggtggtgcagcacagtcgggaca

SEQ ID NO: 3968 - DNA, 80 bp, synthetic construct
  misc_feature 1..80: note = Synthetic: >AdVE4-cand-11480-11559
  source 1..80: mol_type = other DNA
acgagactttcagggaggctctgctgaatatcaccgagccagagggccgctggctcctggacctggtgaatattttacag

SEQ ID NO: 3969 - DNA, 80 bp, synthetic construct
  misc_feature 1..80: note = Synthetic: >AdVE4-cand-11560-11639
  source 1..80: mol_type = other DNA
agcattgtggtgcaggagcgcgggctgccgctgtccgagaagctggcggccattaacttttcggtgctgagtctgggcaa

SEQ ID NO: 3970 - DNA, 80 bp, synthetic construct
  misc_feature 1..80: note = Synthetic: >AdVE4-cand-11640-11719
  source 1..80: mol_type = other DNA
gtactatgctaggaagatatacaagactccgtacgtgcccatagacaaggaggtgaagattgacgggttttacatgcgca

SEQ ID NO: 3971 - DNA, 80 bp, synthetic construct
  misc_feature 1..80: note = Synthetic: >AdVE4-cand-11760-11839
  source 1..80: mol_type = other DNA
gtaccgcaacgacaggatgcaccgcgcggtgagcgccagtaggcggcgcgagctaagcgatcaggagctaatgcacagcc

SEQ ID NO: 3972 - DNA, 80 bp, synthetic construct
  misc_feature 1..80: note = Synthetic: >AdVE4-cand-11780-11859
  source 1..80: mol_type = other DNA
accgcgcggtgagcgccagtaggcggcgcgagctaagcgatcaggagctaatgcacagcctgcagcgggccctcaccggg

SEQ ID NO: 3973 - DNA, 80 bp, synthetic construct
  misc_feature 1..80: note = Synthetic: >AdVE4-cand-11880-11959
  source 1..80: mol_type = other DNA
ctactttgacatgggcgcagacctgcactggcagcccagccgccgggtcttggaagccgcggcggtcccttacgtagaag

SEQ ID NO: 3974 - DNA, 80 bp, synthetic construct
  misc_feature 1..80: note = Synthetic: >AdVE4-cand-11960-12039
  source 1..80: mol_type = other DNA
aggtggacgatgaggatgagggcgagtacctggaagactgatggcgcgaccgtatttttgctagatgcagcaacagtcac

SEQ ID NO: 3975 - DNA, 80 bp, synthetic construct
  misc_feature 1..80: note = Synthetic: >AdVE4-cand-12040-12119
  source 1..80: mol_type = other DNA
ctcctgatcccgcaatgcgggcggcgctgcaaagccagccgtccggcattaactcctcggacgattggacccaagccatg

SEQ ID NO: 3976 - DNA, 80 bp, synthetic construct
  misc_feature 1..80: note = Synthetic: >AdVE4-cand-12200-12279
  source 1..80: mol_type = other DNA
ggaggccgtggtgccttcgcgctccaaccccacgcacgagaaggtgctggccattgtgaatgcgctggttgagaacaagg

SEQ ID NO: 3977 - DNA, 80 bp, synthetic construct
  misc_feature 1..80: note = Synthetic: >AdVE4-cand-12280-12359
  source 1..80: mol_type = other DNA
ccatccgcggcgacgaggccgggctggtgtacaacgcgctgctggagcgcgtggcccgctacaacagcaccaacgtgcag

SEQ ID NO: 3978 - DNA, 80 bp, synthetic construct
  misc_feature 1..80: note = Synthetic: >AdVE4-cand-12360-12439
  source 1..80: mol_type = other DNA
actaacctggaccgtatggtgaccgacgtgcgcgaggccgtggcccagcgcgaacggttccaccgcgagtccaacctggg

SEQ ID NO: 3979 - DNA, 80 bp, synthetic construct
  misc_feature 1..80: note = Synthetic: >AdVE4-cand-12410-12489
  source 1..80: mol_type = other DNA
cgaacggttccaccgcgagtccaacctgggatccatggtggcgctaaatgccttcctcagcacgcagcccgccaacgtgc

SEQ ID NO: 3980 - DNA, 80 bp, synthetic construct
  misc_feature 1..80: note = Synthetic: >AdVE4-cand-12520-12599
  source 1..80: mol_type = other DNA
tcagcgccctgcggctgatggtaaccgaggtaccccaaagcgaggtgtaccagtcgggcccggactactttttccagacc

SEQ ID NO: 3981 - DNA, 80 bp, synthetic construct
  misc_feature 1..80: note = Synthetic: >AdVE4-cand-12580-12659
  source 1..80: mol_type = other DNA
cggactactttttccagaccagtcgccagggcttgcagaccgtaaacctcagtcaggctttcaaaaacttgcagggactg

SEQ ID NO: 3982 - DNA, 80 bp, synthetic construct
  misc_feature 1..80: note = Synthetic: >AiVC-cand-7240-7319
  source 1..80: mol_type = other DNA
tggcaagcatggtagtgctgttggttgcaacccagacctacactggacaaaatttttcttcaaattctgtcactaccctc

SEQ ID NO: 3983 - DNA, 80 bp, synthetic construct
  misc_feature 1..80: note = Synthetic: >AiVC-cand-7320-7399
  source 1..80: mol_type = other DNA
aagtctttgatctggactacaagtgttttgatgccaccctcccctcctgtgccttccgcatcgttgagaaacatctcgaa

SEQ ID NO: 3984 - DNA, 80 bp, synthetic construct
  misc_feature 1..80: note = Synthetic: >AiVC-cand-7400-7479
  source 1..80: mol_type = other DNA
cgtctcattggagacgaacgggtgacccgttacatcgagaccatacgacactcgcgccatgtctttggcaacgagacgta

SEQ ID NO: 3985 - DNA, 80 bp, synthetic construct
  misc_feature 1..80: note = Synthetic: >AiVC-cand-7480-7559
  source 1..80: mol_type = other DNA
tgagatgattggcggaaacccgtctggatgtgttggcacttccatcatcaacaccatcatcaacaacatttgtgttcttt

SEQ ID NO: 3986 - DNA, 80 bp, synthetic construct
  misc_feature 1..80: note = Synthetic: >AiVC-cand-7560-7639
  source 1..80: mol_type = other DNA
ctgctctaatccaacaccctgacttttctcctgaatccttcagaattttggcctatggtgatgatgtgatctatgggtgt

SEQ ID NO: 3987 - DNA, 80 bp, synthetic construct
  misc_feature 1..80: note = Synthetic: >AiVC-cand-7640-7719
  source 1..80: mol_type = other DNA
gacccacccatccatccgtcattcatcaaggagttttatgacaagcacacaccacttgttgtgactccagcaaacaaaac

SEQ ID NO: 3988 - DNA, 80 bp, synthetic construct
  misc_feature 1..80: note = Synthetic: >AiVC-cand-7720-7799
  source 1..80: mol_type = other DNA
agacactttcccggaaaactccaccatctatgacgtcacgtttctgaaacgttggtttgtgcctgatgacattcgaccat

SEQ ID NO: 3989 - DNA, 80 bp, synthetic construct
  misc_feature 1..80: note = Synthetic: >AiVC-cand-7800-7879
  source 1..80: mol_type = other DNA
tctacatccacccggtcatggatccagacacttacgaacaatcagttatgtggctgagagatggagatttccaagacctt

SEQ ID NO: 3990 - DNA, 80 bp, synthetic construct
  misc_feature 1..80: note = Synthetic: >AiVC-cand-7880-7959
  source 1..80: mol_type = other DNA
gtcacttctctctgttaccttgctttccactccggtccgaagacctacgatcgctggtgcactcgcgtcagagatcaggt

SEQ ID NO: 3991 - DNA, 80 bp, synthetic construct
  misc_feature 1..80: note = Synthetic: >AiVC-cand-7960-8039
  source 1..80: mol_type = other DNA
aatgaagactactggtttccctccaacttttcttccttactcttatcttcagacccgctggttaaacctcttggcagcgt

SEQ ID NO: 3992 - DNA, 80 bp, synthetic construct
  misc_feature 1..80: note = Synthetic: >AiVC-cand-8040-8119
  source 1..80: mol_type = other DNA
gagacaccagatacactcttgctctgtatcgctctgtgtagaatagactcatgctttcctaagaccggaactctccttcc

SEQ ID NO: 3993 - DNA, 80 bp, synthetic construct
  misc_feature 1..80: note = Synthetic: >AiVC-cand-8120-8199
  source 1..80: mol_type = other DNA
ggcactttcacccacctgccctgccttcatcttgaagctgcacccagggaggcggtccctgactgtcctttactttctat

SEQ ID NO: 3994 - DNA, 80 bp, synthetic construct
  misc_feature 1..80: note = Synthetic: >EF177176.1-cand-30-109
  source 1..80: mol_type = other DNA
aaccgaaaagggtttaagaccgaaaacggtacatataaaaggcagcttattctgtgtggacatattcatggagccacaat

SEQ ID NO: 3995 - DNA, 80 bp, synthetic construct
  misc_feature 1..80: note = Synthetic: >EF177176.1-cand-110-189
  source 1..80: mol_type = other DNA
tcaacaatccacaggaacgtccacgacgcctgcaccacttgagtgaggtattagaaatacctttaattgatcttagatta

SEQ ID NO: 3996 - DNA, 80 bp, synthetic construct
  misc_feature 1..80: note = Synthetic: >EF177176.1-cand-190-269
  source 1..80: mol_type = other DNA
tcatgtgtatattgcaaaaaagaactaacacgtgctgaggtatataattttgcatgcactgaattaaacttagtgtatag

SEQ ID NO: 3997 - DNA, 80 bp, synthetic construct
  misc_feature 1..80: note = Synthetic: >EF177176.1-cand-270-349
  source 1..80: mol_type = other DNA
ggatgattttccttatgcagtgtgcagagtatgtttattgttttatagtaaagttagaaaatataggtattatgactatt

SEQ ID NO: 3998 - DNA, 80 bp, synthetic construct
  misc_feature 1..80: note = Synthetic: >EVA90-cand-60-139
  source 1..80: mol_type = other DNA
cacggtacctttgtgcgcctgttttatactccctctcccccatgtaacttagaagtatattaaacaaagttcaatagaag

SEQ ID NO: 3999 - DNA, 80 bp, synthetic construct
  misc_feature 1..80: note = Synthetic: >EVA90-cand-150-229
  source 1..80: mol_type = other DNA
ccagtgccaccacgaacaagcacttctgtttccccggactgaagctgcatagactgtccccacggttgaaagcggcagca

SEQ ID NO: 4000 - DNA, 80 bp, synthetic construct
  misc_feature 1..80: note = Synthetic: >EVA90-cand-380-459
  source 1..80: mol_type = other DNA
tacctgtggtgaaaaccacaggacgcttagatgtgaacaaggtgtgaagagtctattgagctaccaaagagtcctccggc

SEQ ID NO: 4001 - DNA, 80 bp, synthetic construct
  misc_feature 1..80: note = Synthetic: >EVA90-cand-630-709
  source 1..80: mol_type = other DNA
tggattggccatccggtagactaacagagatattatatacctatttgttggttttattaaattaaatactactacattca

SEQ ID NO: 4002 - DNA, 80 bp, synthetic construct
  misc_feature 1..80: note = Synthetic: >EVA90-cand-720-799
  source 1..80: mol_type = other DNA
ttatatcatacaattgaatagtagaaagagaaaatgggagctcaagtctcaacccaaaagactggatctcacgagaacca

SEQ ID NO: 4003 - DNA, 80 bp, synthetic construct
  misc_feature 1..80: note = Synthetic: >EVA90-cand-800-879
  source 1..80: mol_type = other DNA
gaacatagctgctagcggttctaccataaattacacaaccattaactactacaaggactcctacgccgcttcagctgcaa

SEQ ID NO: 4004 - DNA, 80 bp, synthetic construct
  misc_feature 1..80: note = Synthetic: >EVA90-cand-880-959
  source 1..80: mol_type = other DNA
aacaggatttctctcaagacccctccaaattcactcaacctgttgtggatgccctcaaagaaacagctccaccacttaaa

SEQ ID NO: 4005 - DNA, 80 bp, synthetic construct
  misc_feature 1..80: note = Synthetic: >EVA90-cand-960-1039
  source 1..80: mol_type = other DNA
tcaccatcagctgaagcatgtggttatagtgatagggttgcccaactaacactaggtaattccaccatcacaactcagga

SEQ ID NO: 4006 - DNA, 80 bp, synthetic construct
  misc_feature 1..80: note = Synthetic: >EVA90-cand-1040-1119
  source 1..80: mol_type = other DNA
ggctgccaatatcacagttggatatggtgaatggcccgaatattccaaagatactgaggccactgcagtggacaagccta

SEQ ID NO: 4007 - DNA, 80 bp, synthetic construct
  misc_feature 1..80: note = Synthetic: >EVA90-cand-1130-1209
  source 1..80: mol_type = other DNA
tgtgtcagtcaataggttctacacactcccagcaaaattatgggccagcaactctaaaggatggtattggaagtttccag

SEQ ID NO: 4008 - DNA, 80 bp, synthetic construct
  misc_feature 1..80: note = Synthetic: >EVA90-cand-1210-1289
  source 1..80: mol_type = other DNA
atgttctctgtgagctaggagtgtttggtcaaaatgcacagtatcattacttgtacaggtctggattctgcatacatgtt

SEQ ID NO: 4009 - DNA, 80 bp, synthetic construct
  misc_feature 1..80: note = Synthetic: >EVA90-cand-1290-1369
  source 1..80: mol_type = other DNA
cagtgtaatgctagtaaattccatcaaggtacactcttagtggctgctataccagaattaatgcttgctaggtcgagtgc

SEQ ID NO: 4010 - DNA, 80 bp, synthetic construct
  misc_feature 1..80: note = Synthetic: >EVA90-cand-1370-1449
  source 1..80: mol_type = other DNA
tgacactaacccagcaactgccccccacccaccatataatgcaacacaacctggagaggcaggtaaggagtttgctttcc

SEQ ID NO: 4011 - DNA, 80 bp, synthetic construct
  misc_feature 1..80: note = Synthetic: >EVA90-cand-1450-1529
  source 1..80: mol_type = other DNA
cttacgttcttgactctggtatcccactgtctcaagctctgatcttccctcaccagtggatcaacttgcgcactaacaac

SEQ ID NO: 4012 - DNA, 80 bp, synthetic construct
  misc_feature 1..80: note = Synthetic: >EVA90-cand-1530-1609
  source 1..80: mol_type = other DNA
tgtgccactatagtcatgccctatatcaactgcttgccctttgactcagccctgaaccactgcaacttttccctggtggt

SEQ ID NO: 4013 - DNA, 80 bp, synthetic construct
  misc_feature 1..80: note = Synthetic: >EVA90-cand-1610-1689
  source 1..80: mol_type = other DNA
cataccagttgcaccactagcttacaatgaaggagcaactacagctatacccattaccataactgttgccccaatgtgct

SEQ ID NO: 4014 - DNA, 80 bp, synthetic construct
  misc_feature 1..80: note = Synthetic: >EVB69-cand-6930-7009
  source 1..80: mol_type = other DNA
ccatagatgcgtccttgcttgctgaggctggcaaggattacgggttgatcatgacaccagcagataagggagagtgcttt

SEQ ID NO: 4015 - DNA, 80 bp, synthetic construct
  misc_feature 1..80: note = Synthetic: >EVB69-cand-7010-7089
  source 1..80: mol_type = other DNA
aatgaagtcacctggaccaatgttacttttctaaagaggtacttcagagcagatgaacaataccccttcttagtgcaccc

SEQ ID NO: 4016 - DNA, 80 bp, synthetic construct
  misc_feature 1..80: note = Synthetic: >EVB69-cand-7090-7169
  source 1..80: mol_type = other DNA
tgttatgcccatgaaggacatacacgagtcaatcagatggaccaaagatccaaagaacactcaggatcatgtgcgctcac

SEQ ID NO: 4017 - DNA, 80 bp, synthetic construct
  misc_feature 1..80: note = Synthetic: >EVB69-cand-7170-7249
  source 1..80: mol_type = other DNA
tgtgtctactagcatggcacaacggagagcatgagtatgaggagttcattcgcaaaattagaagcgtcccagtcggacgt

SEQ ID NO: 4018 - DNA, 80 bp, synthetic construct
  misc_feature 1..80: note = Synthetic: >EVB69-cand-7300-7379
  source 1..80: mol_type = other DNA
cttctaaattagagacaatttgaaacaatttgaattggcttaaccctactgtactaaccgaactagataacggtgcagta

SEQ ID NO: 4019 - DNA, 80 bp, synthetic construct
  misc_feature 1..80: note = Synthetic: >EVB73-cand-50-129
  source 1..80: mol_type = other DNA
actggtatcacggtacctttgtgcgcctgttttatacacccccccccccactgtaacttagaagtcaatgcaaacctggt

SEQ ID NO: 4020 - DNA, 80 bp, synthetic construct
  misc_feature 1..80: note = Synthetic: >EVB73-cand-130-209
  source 1..80: mol_type = other DNA
caacagtgggcgtggcaaaccagccacgtcatgaccaagcacttctgtttccccggaccgagtatcaataggctgctcgc

SEQ ID NO: 4021 - DNA, 80 bp, synthetic construct
  misc_feature 1..80: note = Synthetic: >EVB73-cand-210-289
  source 1..80: mol_type = other DNA
gcggctgaaggagaaagcgttcgttacccggccaactacttcgagaagcctaagtaacaccatgaaagttgcggagcgtt

SEQ ID NO: 4022 - DNA, 80 bp, synthetic construct
  misc_feature 1..80: note = Synthetic: >EVB73-cand-450-529
  source 1..80: mol_type = other DNA
tccggcccctgaatgcggctaatcccaactgcggagcacgcaccctcaaaccagagggcagcatgtcgtaacgggcaact

SEQ ID NO: 4023 - DNA, 80 bp, synthetic construct
  misc_feature 1..80: note = Synthetic: >EVB73-cand-690-769
  source 1..80: mol_type = other DNA
aacataaaagacatcaagacactgaactatatcttagcactaaacacggcaaaatgggagcacaagtgtcaacacaaaaa

SEQ ID NO: 4024 - DNA, 80 bp, synthetic construct
  misc_feature 1..80: note = Synthetic: >EVB73-cand-770-849
  source 1..80: mol_type = other DNA
acaggtgcccatgagaccggattgagtgctagcaatggatcaatcataccactacaccaatattaattattacaaggaac

SEQ ID NO: 4025 - DNA, 80 bp, synthetic construct
  misc_feature 1..80: note = Synthetic: >EVB73-cand-850-929
  source 1..80: mol_type = other DNA
cagcctcaaattcagcaaacagacaggatttcacacaagacccaggaaagttcacagaacccatgaaggatataatggtc

SEQ ID NO: 4026 - DNA, 80 bp, synthetic construct
  misc_feature 1..80: note = Synthetic: >EVB73-cand-930-1009
  source 1..80: mol_type = other DNA
aagtcgctaccagctctgaactcccctactgtagaagagtgcgggtatagcgatagggtgcgctccataacactgggaaa

SEQ ID NO: 4027 - DNA, 80 bp, synthetic construct
  misc_feature 1..80: note = Synthetic: >EVB73-cand-1010-1089
  source 1..80: mol_type = other DNA
ctcaacaatcacgactcaagagtgcgcaaatgtggtagtaggctatggagtgtggcccacatacctgtcagacgaagagg

SEQ ID NO: 4028 - DNA, 80 bp, synthetic construct
  misc_feature 1..80: note = Synthetic: >EVB73-cand-1090-1169
  source 1..80: mol_type = other DNA
ctacagctgaggaccaaccaacacaaccagacgtagcaacgtgtagattttacaccctcgaatcagtcaattgggaaaaa

SEQ ID NO: 4029 - DNA, 80 bp, synthetic construct
  misc_feature 1..80: note = Synthetic: >EVB73-cand-1170-1249
  source 1..80: mol_type = other DNA
acctccgcagggtggtggtggaagtttccagatgcactcaaagacatgggattattcggccaaaacatgctataccatta

SEQ ID NO: 4030 - DNA, 80 bp, synthetic construct
  misc_feature 1..80: note = Synthetic: >EVB77-cand-6440-6519
  source 1..80: mol_type = other DNA
ggaagtctaggctaattgaagcatccagcctcaatgactcagtagcaatgagacagacttttggcaatttgtacaagacc

SEQ ID NO: 4031 - DNA, 80 bp, synthetic construct
  misc_feature 1..80: note = Synthetic: >EVB77-cand-6520-6599
  source 1..80: mol_type = other DNA
tttcatctaaatccagggattgtaactggcagtgcagtcggatgcgatccagatcttttctggagtaagataccagtgat

SEQ ID NO: 4032 - DNA, 80 bp, synthetic construct
  misc_feature 1..80: note = Synthetic: >EVB77-cand-6610-6689
  source 1..80: mol_type = other DNA
catctcatagcatttgactactcaggttatgacgccagcttaagccccgtctggtttgcctgcttaaaattgttacttga

SEQ ID NO: 4033 - DNA, 80 bp, synthetic construct
  misc_feature 1..80: note = Synthetic: >EVB77-cand-6690-6769
  source 1..80: mol_type = other DNA
gaaacttgggtacacccacaaagagactaactacattgactacttgtgtaactctcaccacctgtacagagataaacact

SEQ ID NO: 4034 - DNA, 80 bp, synthetic construct
  misc_feature 1..80: note = Synthetic: >EVB77-cand-6770-6849
  source 1..80: mol_type = other DNA
acttcgtgagaggtgggatgccttcagggtgctctggcaccagtatcttcaattcaatgattaacaacattatcatcaga

SEQ ID NO: 4035 - DNA, 80 bp, synthetic construct
  misc_feature 1..80: note = Synthetic: >EVB77-cand-6850-6929
  source 1..80: mol_type = other DNA
acccttatgttgaaagtatacaagggaattgatttggaccagttcaggatgatcgcgtatggagatgatgtgatcgcatc

SEQ ID NO: 4036 - DNA, 80 bp, synthetic construct
  misc_feature 1..80: note = Synthetic: >EVB77-cand-6930-7009
  source 1..80: mol_type = other DNA
gtatccatggcccatagatgcatccttacttgctgaagctggaaaagactacgggttgatcatgacaccagcagataaag

SEQ ID NO: 4037 - DNA, 80 bp, synthetic construct
  misc_feature 1..80: note = Synthetic: >EVB77-cand-7010-7089
  source 1..80: mol_type = other DNA
gggagtgcttcaatgaagtaacatggaccaacgtcacctttttaaaaaggtatttcagagcagatgaccagtaccctttc

SEQ ID NO: 4038 - DNA, 80 bp, synthetic construct
  misc_feature 1..80: note = Synthetic: >EVB77-cand-7090-7169
  source 1..80: mol_type = other DNA
ctagtgcaccctgttatgcccatgaaggacatacatgagtcaatcagatggaccaaagatccaaagaacactcaagacca

SEQ ID NO: 4039 - DNA, 80 bp, synthetic construct
  misc_feature 1..80: note = Synthetic: >EVB77-cand-7170-7249
  source 1..80: mol_type = other DNA
tgtgcgctcactgtgcctattggcttggcacaatggagagcacgagtacgaggagtttatccgtaaaattaggagcgtcc

SEQ ID NO: 4040 - DNA, 80 bp, synthetic construct
  misc_feature 1..80: note = Synthetic: >EVB77-cand-7260-7339
  source 1..80: mol_type = other DNA
ctgcttaacccttcctgcattctcaacactgcgcaggaagtggttggattccttttgacttagagacaatttaaaataaa

SEQ ID NO: 4041 - DNA, 80 bp, synthetic construct
  misc_feature 1..80: note = Synthetic: >EVB77-cand-7310-7389
  source 1..80: mol_type = other DNA
ccttttgacttagagacaatttaaaataaattaaattggcttaaccctactgcactaaccgaactagaaaacggtgcagt

SEQ ID NO: 4042 - DNA, 80 bp, synthetic construct
  misc_feature 1..80: note = Synthetic: >EVB79-cand-80-159
  source 1..80: mol_type = other DNA
ttataccccctcccccaaattgtaacatagaagcaataaacactcccggtcaatagctggcatggcacgccagttgagtc

SEQ ID NO: 4043 - DNA, 80 bp, synthetic construct
  misc_feature 1..80: note = Synthetic: >EVB79-cand-300-379
  source 1..80: mol_type = other DNA
ttcccccgtgtagatcaggtcgatgagtcaccgcattccccacgggcgaccgtggcggtggctgcgttggcggcctgcct

SEQ ID NO: 4044 - DNA, 80 bp, synthetic construct
  misc_feature 1..80: note = Synthetic: >EVB79-cand-510-589
  source 1..80: mol_type = other DNA
tgtgtcgtaacgggcaactctgcagcggaaccgactactttgggtgtccgtgtttccttttatctcttatattggctgct

SEQ ID NO: 4045 - DNA, 80 bp, synthetic construct
  misc_feature 1..80: note = Synthetic: >EVB79-cand-550-629
  source 1..80: mol_type = other DNA
tgggtgtccgtgtttccttttatctcttatattggctgcttatggtgacaattgcagaattgttaccatatagctattgg

SEQ ID NO: 4046 - DNA, 80 bp, synthetic construct
  misc_feature 1..80: note = Synthetic: >EVB83-cand-4090-4169
  source 1..80: mol_type = other DNA
agtggattgccgtcaagattcaaaagttcatagagtggcttaaaatcaaaatcttaccagaggtcaaagagaaacatgag

SEQ ID NO: 4047 - DNA, 80 bp, synthetic construct
  misc_feature 1..80: note = Synthetic: >EVB83-cand-4140-4219
  source 1..80: mol_type = other DNA
atcttaccagaggtcaaagagaaacatgagtttctcactagactcaaacaactacctcttctggagaatcaaattgttac

SEQ ID NO: 4048 - DNA, 80 bp, synthetic construct
  misc_feature 1..80: note = Synthetic: >EVB83-cand-4220-4299
  source 1..80: mol_type = other DNA
cattgagcaaagtgcgccatcccaaagtgaccaggaacagctcttctcaaatgtacaatattttgcacactattgcagga

SEQ ID NO: 4049 - DNA, 80 bp, synthetic construct
  misc_feature 1..80: note = Synthetic: >EVB83-cand-4300-4379
  source 1..80: mol_type = other DNA
agtatgcacctttgtatgcagctgaagccaagagggtgttctccctcgaaaagaaaatgagtaactacatacagttcaag

SEQ ID NO: 4050 - DNA, 80 bp, synthetic construct
  misc_feature 1..80: note = Synthetic: >EVB83-cand-4380-4459
  source 1..80: mol_type = other DNA
tccaaatgccgtattgagcctgtatgtttgctcttgcacggaagccccggagctggaaagtcagtcgcgaccaacctaat

SEQ ID NO: 4051 - DNA, 80 bp, synthetic construct
  misc_feature 1..80: note = Synthetic: >EVB83-cand-4460-4539
  source 1..80: mol_type = other DNA
tgggcgttcactagctgaaaaattaaacagctcagtatactccttaccaccagatccagatcactttgatggttacaagc

SEQ ID NO: 4052 - DNA, 80 bp, synthetic construct
  misc_feature 1..80: note = Synthetic: >EVB83-cand-4540-4619
  source 1..80: mol_type = other DNA
agcaagccgtggtgatcatggatgatctatgtcaaaaccccgatggtaaggatgtgtctttgttctgccaaatggtgtct

SEQ ID NO: 4053 - DNA, 80 bp, synthetic construct
  misc_feature 1..80: note = Synthetic: >EVB83-cand-4620-4699
  source 1..80: mol_type = other DNA
agtgtagatttcgtgccaccaatggctgctctggaagaaaagggcattcttttcacttccccttttgtcctggcgtcgac

SEQ ID NO: 4054 - DNA, 80 bp, synthetic construct
  misc_feature 1..80: note = Synthetic: >EVB83-cand-4700-4779
  source 1..80: mol_type = other DNA
taatgctggctctatcaatgcaccaacagtctcggatagcagagctttggccagaagatttcattttgatatgaacattg

SEQ ID NO: 4055 - DNA, 80 bp, synthetic construct
  misc_feature 1..80: note = Synthetic: >EVB83-cand-4780-4859
  source 1..80: mol_type = other DNA
aagttatctccatgtacagcctaaacggtaagatcaacatgcccatgtcagtgaagacatgtgatgatgattgctgccca

SEQ ID NO: 4056 - DNA, 80 bp, synthetic construct
  misc_feature 1..80: note = Synthetic: >EVB83-cand-4860-4939
  source 1..80: mol_type = other DNA
gtcaacttcaaaaagtgctgcccccttgtgtgcgggaaggccatccagttcattgacagacgaacccaagtcaggtactc

SEQ ID NO: 4057 - DNA, 80 bp, synthetic construct
  misc_feature 1..80: note = Synthetic: >EVB83-cand-4940-5019
  source 1..80: mol_type = other DNA
attggacatgttagtcactgagatgttcagggagtataatcacagacacagtgtgggagcaaccctggaagccctgtttc

SEQ ID NO: 4058 - DNA, 80 bp, synthetic construct
  misc_feature 1..80: note = Synthetic: >EVB83-cand-5060-5139
  source 1..80: mol_type = other DNA
acccgaaaccccaccaccaccagcaattgcagacctactaaaatcagtggacagtgaagcagtgagggagtactgtaaag

SEQ ID NO: 4059 - DNA, 80 bp, synthetic construct
  misc_feature 1..80: note = Synthetic: >EVB83-cand-5180-5259
  source 1..80: mol_type = other DNA
gattgaaaagcatgttagcagagccttcatatgcctccaagcactaacaacctttgtctctgtggctggaatcatataca

SEQ ID NO: 4060 - DNA, 80 bp, synthetic construct
  misc_feature 1..80: note = Synthetic: >EVB83-cand-5260-5339
  source 1..80: mol_type = other DNA
tcatttacaaattatttgcaggattccagggcgcgtatacagggatgcccaatcaaaagcccaaagtgcccacactaaga

SEQ ID NO: 4061 - DNA, 80 bp, synthetic construct
  misc_feature 1..80: note = Synthetic: >EVB83-cand-5340-5419
  source 1..80: mol_type = other DNA
caagctaaagtgcaaggtcccgcttttgaattcgccgtggccatgatgaagagaaactccagcacagtgaaaacagaata

SEQ ID NO: 4062 - DNA, 80 bp, synthetic construct
  misc_feature 1..80: note = Synthetic: >EVB86-cand-2740-2819
  source 1..80: mol_type = other DNA
ttcaactgcgcaggaagtgtgaattgtttacgtacctgcgctttgacatggaggtcacttttgtcatcacaagcagtggt

SEQ ID NO: 4063 - DNA, 80 bp, synthetic construct
  misc_feature 1..80: note = Synthetic: >EVB86-cand-2850-2929
  source 1..80: mol_type = other DNA
caccagataatgtacatcccccctggtggtcctatacctgaaagcgttaccagttacgcgtggcaaacctccaccaaccc

SEQ ID NO: 4064 - DNA, 80 bp, synthetic construct
  misc_feature 1..80: note = Synthetic: >EVB86-cand-2930-3009
  source 1..80: mol_type = other DNA
aagcgtcttctggaccgaagggaatgccccaccgcgcatgtccatcccctttataagtataggtaacgcctatagttcat

SEQ ID NO: 4065 - DNA, 80 bp, synthetic construct
  misc_feature 1..80: note = Synthetic: >EVB86-cand-3050-3129
  source 1..80: mol_type = other DNA
tggatacagcaccttgaacaacctaggacagctgtatgtgaggcatgtgaacgctaaggcacagaacgtcacaagcacaa

SEQ ID NO: 4066 - DNA, 80 bp, synthetic construct
  misc_feature 1..80: note = Synthetic: >EVB86-cand-3090-3169
  source 1..80: mol_type = other DNA
aggcatgtgaacgctaaggcacagaacgtcacaagcacaataaggatatattttaaaccaaagcatgtgcgcgcttgggt

SEQ ID NO: 4067 - DNA, 80 bp, synthetic construct
  misc_feature 1..80: note = Synthetic: >EVB86-cand-3180-3259
  source 1..80: mol_type = other DNA
ccacgactatgccagtacaaaagaaaagccaatgtgaactttgaggtaactaaggttaccgaaaccagggtgagcataac

SEQ ID NO: 4068 - DNA, 80 bp, synthetic construct
  misc_feature 1..80: note = Synthetic: >EVB86-cand-3230-3309
  source 1..80: mol_type = other DNA
taaggttaccgaaaccagggtgagcataacaacgctcccatccctaggtccacgcacaactggtgcctttgggcaacagt

SEQ ID NO: 4069 - DNA, 80 bp, synthetic construct
  misc_feature 1..80: note = Synthetic: >EVB86-cand-3340-3419
  source 1..80: mol_type = other DNA
tggtgaataggcacttggcaacgcacaatgactggcagaattgtgtgtgggaagattataatagggatcttcttgtaagc

SEQ ID NO: 4070 - DNA, 80 bp, synthetic construct
  misc_feature 1..80: note = Synthetic: >EVB86-cand-3420-3499
  source 1..80: mol_type = other DNA
actaccactgcacacggatgtgacaccatagccagatgccagtgcacgacgggagtatacttctgccaatccagaaacaa

SEQ ID NO: 4071 - DNA, 80 bp, synthetic construct
  misc_feature 1..80: note = Synthetic: >EVB86-cand-3500-3579
  source 1..80: mol_type = other DNA
acattacccagttagcttcgagggcccaggcctagtggaggttcaagagagtgagtactatcctaagaggtaccaatccc

SEQ ID NO: 4072 - DNA, 80 bp, synthetic construct
  misc_feature 1..80: note = Synthetic: >EVB86-cand-3540-3619
  source 1..80: mol_type = other DNA
gttcaagagagtgagtactatcctaagaggtaccaatcccatgtgctgcttgctgcaggtttctcagagccaggcgattg

SEQ ID NO: 4073 - DNA, 80 bp, synthetic construct
  misc_feature 1..80: note = Synthetic: >EVB86-cand-3680-3759
  source 1..80: mol_type = other DNA
tgttgtcggttttgctgatgtccgcgatcttttgtggctggaagatgatgccatggaacaaggcgtcaaagactatgttg

SEQ ID NO: 4074 - DNA, 80 bp, synthetic construct
  misc_feature 1..80: note = Synthetic: >EVB86-cand-3740-3819
  source 1..80: mol_type = other DNA
aggcgtcaaagactatgttgagcaactcgggaatgctttcgggtctggtttcaccaaccaaatttgtgaacaggtaaata

SEQ ID NO: 4075 - DNA, 80 bp, synthetic construct
  misc_feature 1..80: note = Synthetic: >EVB86-cand-3820-3899
  source 1..80: mol_type = other DNA
tcctcaaggagtcactcatcgggcaagattccatccttgagaagtcactcagagctctagtaaaaatcatatcagcattg

SEQ ID NO: 4076 - DNA, 80 bp, synthetic construct
  misc_feature 1..80: note = Synthetic: >EVB86-cand-3900-3979
  source 1..80: mol_type = other DNA
gttattgtggtgagaaaccacgatgacttgattacagtgacagccacactagccctcataggctgcacctcatcaccatg

SEQ ID NO: 4077 - DNA, 80 bp, synthetic construct
  misc_feature 1..80: note = Synthetic: >EVB86-cand-3980-4059
  source 1..80: mol_type = other DNA
gcggtggctcaaacagaaagtgtcccaatattacgggatccccatggctgagagacaaaacaatggttggctcaagagat

SEQ ID NO: 4078 - DNA, 80 bp, synthetic construct
  misc_feature 1..80: note = Synthetic: >FJ608550.1-cand-1770-1849
  source 1..80: mol_type = other DNA
attgcatgactataacagaagccacacagagtgcactgcaggcccattttacaatctgtaagctaacaggtaggtttcag

SEQ ID NO: 4079 - DNA, 80 bp, synthetic construct
  misc_feature 1..80: note = Synthetic: >FJ608550.1-cand-1850-1929
  source 1..80: mol_type = other DNA
gaggcattaaaaaaatctttaaaaaagccagaagtgcatcgaggatgttaccgtacacttggagtgttccggtataggag

SEQ ID NO: 4080 - DNA, 80 bp, synthetic construct
  misc_feature 1..80: note = Synthetic: >FJ608550.1-cand-1960-2039
  source 1..80: mol_type = other DNA
tctattgacaattgagttaatattatgggcagcaagtgcagaaacacctcttttagaatcaggatggtctgatacagcac

SEQ ID NO: 4081 - DNA, 80 bp, synthetic construct
  misc_feature 1..80: note = Synthetic: >FJ608550.1-cand-2010-2089
  source 1..80: mol_type = other DNA
ttttagaatcaggatggtctgatacagcacatggtataggtgagattcccttgaagaccgacttggaacttgatttttca

SEQ ID NO: 4082 - DNA, 80 bp, synthetic construct
  misc_feature 1..80: note = Synthetic: >FJ608550.1-cand-2090-2169
  source 1..80: mol_type = other DNA
ttgccatcttcatcatcttacagctatcgaagaaaattgaccaatcctgccaataaggaggaatcagtcccttttcattt

SEQ ID NO: 4083 - DNA, 80 bp, synthetic construct
  misc_feature 1..80: note = Synthetic: >FJ608550.1-cand-2170-2249
  source 1..80: mol_type = other DNA
ccaaatggagaaacaagttattcatgctgagatacaagtattgggacattggatggatgcaacatttaatattaaaactg

SEQ ID NO: 4084 - DNA, 80 bp, synthetic construct
  misc_feature 1..80: note = Synthetic: >FJ608550.1-cand-2180-2259
  source 1..80: mol_type = other DNA
aaacaagttattcatgctgagatacaagtattgggacattggatggatgcaacatttaatattaaaactgcatttcactg

SEQ ID NO: 4085 - DNA, 80 bp, synthetic construct
  misc_feature 1..80: note = Synthetic: >FJ608550.1-cand-2400-2479
  source 1..80: mol_type = other DNA
tatatcttgataaactaaaatccattgggaaggcatataaggtaatctctttaaagtatacaaggaaagtctgcatccaa

SEQ ID NO: 4086 - DNA, 80 bp, synthetic construct
  misc_feature 1..80: note = Synthetic: >FJ608550.1-cand-2420-2499
  source 1..80: mol_type = other DNA
tccattgggaaggcatataaggtaatctctttaaagtatacaaggaaagtctgcatccaattaggaactgagcaggtctg

SEQ ID NO: 4087 - DNA, 80 bp, synthetic construct
  misc_feature 1..80: note = Synthetic: >FJ608550.1-cand-2490-2569
  source 1..80: mol_type = other DNA
agcaggtctgtaagcatatagatgcaaatgattgtttggttacaccatcagtaaaagtgtgtattataggcacagtatct

SEQ ID NO: 4088 - DNA, 80 bp, synthetic construct
  misc_feature 1..80: note = Synthetic: >FJ608550.1-cand-2570-2649
  source 1..80: mol_type = other DNA
aaacttcagccttctgacacactcttgttcttaggccctttagaacaaggtggcttgatcctgaaacaatggtgtacaac

SEQ ID NO: 4089 - DNA, 80 bp, synthetic construct
  misc_feature 1..80: note = Synthetic: >FJ608550.1-cand-2680-2759
  source 1..80: mol_type = other DNA
tatgtccactacttcaggaatgaggtgtcctgaacatactggttcatttagaaaaatctgtgggtttgcaacaactccgg

SEQ ID NO: 4090 - DNA, 80 bp, synthetic construct
  misc_feature 1..80: note = Synthetic: >FJ608550.1-cand-2730-2809
  source 1..80: mol_type = other DNA
gaaaaatctgtgggtttgcaacaactccggtatgtgagtatcaaggtaatactatttctggatatcagagattaatggca

SEQ ID NO: 4091 - DNA, 80 bp, synthetic construct
  misc_feature 1..80: note = Synthetic: >FJ608550.1-cand-2810-2889
  source 1..80: mol_type = other DNA
acaaaggattcttttcagtcatttaatttaacagacccccacataactacaaatagactagagtggattgatcctgacgg

SEQ ID NO: 4092 - DNA, 80 bp, synthetic construct
  misc_feature 1..80: note = Synthetic: >FJ608550.1-cand-2880-2959
  source 1..80: mol_type = other DNA
atcctgacggaaatacaagagatcatgtgaaccttgtgctgaatagagatgtgtcattccaagatttaagtgataaccca

SEQ ID NO: 4093 - DNA, 80 bp, synthetic construct
  misc_feature 1..80: note = Synthetic: >FJ608550.1-cand-2920-2999
  source 1..80: mol_type = other DNA
gaatagagatgtgtcattccaagatttaagtgataacccatgtaaagtagatctacacacacaatccatagaaggtgctt

SEQ ID NO: 4094 - DNA, 80 bp, synthetic construct
  misc_feature 1..80: note = Synthetic: >HCV.A13-cand-5220-5299
  source 1..80: mol_type = other DNA
cacaagaagtcagagattactgtgaaaagaaaggatggattgtcaatgtatcaagtgatgtaacaattgagagaaacctg

SEQ ID NO: 4095 - DNA, 80 bp, synthetic construct
  misc_feature 1..80: note = Synthetic: >HCV.A13-cand-5300-5379
  source 1..80: mol_type = other DNA
aatcgggccatgaccattctgcaagcactaaccacatttgcagcagtagctggtgttgtgtatgtcatgtacaggctgtt

SEQ ID NO: 4096 - DNA, 80 bp, synthetic construct
  misc_feature 1..80: note = Synthetic: >HCV.A13-cand-5380-5459
  source 1..80: mol_type = other DNA
tgctgggcaacaaggagcatacactggtttacccaacaagaaacctaatatccccaccatcagaacagcaaaagtacaag

SEQ ID NO: 4097 - DNA, 80 bp, synthetic construct
  misc_feature 1..80: note = Synthetic: >HCV.A13-cand-5460-5539
  source 1..80: mol_type = other DNA
gaccaggatttgactatgcagtggctatggccaagagaaacatcctcacagccaccactagtaaaggagagttcacaatg

SEQ ID NO: 4098 - DNA, 80 bp, synthetic construct
  misc_feature 1..80: note = Synthetic: >HCV.A13-cand-5540-5619
  source 1..80: mol_type = other DNA
cttggagtccatgacaatgtagccattctaccaacccatgccgcaccaggtgaaaccatagtcattgatggcaaagaagt

SEQ ID NO: 4099 - DNA, 80 bp, synthetic construct
  misc_feature 1..80: note = Synthetic: >HCV.A13-cand-5620-5699
  source 1..80: mol_type = other DNA
ggaggtcattgatgccaaagctcttgaagatcaggctggtaccaatttggaaatcaccattgtcactctcaaaagaaatg

SEQ ID NO: 4100 - DNA, 80 bp, synthetic construct
  misc_feature 1..80: note = Synthetic: >HCV.A13-cand-5700-5779
  source 1..80: mol_type = other DNA
agaagttcagagacattagaccacatattcccacccaaatcactgagacaaatgatggagtgttgatcgtgaacactagt

SEQ ID NO: 4101 - DNA, 80 bp, synthetic construct
  misc_feature 1..80: note = Synthetic: >HCV.A13-cand-5780-5859
  source 1..80: mol_type = other DNA
aagtaccccaacatgtatgtccccgtcggtgctgtgaccgagcagggatatctgaatctcggtgggcgtcaaactgctcg

SEQ ID NO: 4102 - DNA, 80 bp, synthetic construct
  misc_feature 1..80: note = Synthetic: >HCV.A13-cand-5860-5939
  source 1..80: mol_type = other DNA
cacactgatgtacaactttccaaccagagcaggtcagtgtggtggagtcatcacatgcactggcaaggtcatcgggatgc

SEQ ID NO: 4103 - DNA, 80 bp, synthetic construct
  misc_feature 1..80: note = Synthetic: >HCV.A13-cand-6020-6099
  source 1..80: mol_type = other DNA
tggatgagaccatcaaaagaggtgggttatccaatcataaatgccccatccaaaaccaaattggaacccagtgcctttca

SEQ ID NO: 4104 - DNA, 80 bp, synthetic construct
  misc_feature 1..80: note = Synthetic: >HCV.A13-cand-6120-6199
  source 1..80: mol_type = other DNA
aagaaccagcagtgctcactaaaaatgatcccagactaaagactgactttgaagaggccatcttctccaaatatgtggga

SEQ ID NO: 4105 - DNA, 80 bp, synthetic construct
  misc_feature 1..80: note = Synthetic: >HCV.A13-cand-6180-6259
  source 1..80: mol_type = other DNA
tcttctccaaatatgtgggaaacaaaatcactgaggtggatgagtacatgaaggaagcagtggatcactatgcaggacag

SEQ ID NO: 4106 - DNA, 80 bp, synthetic construct
  misc_feature 1..80: note = Synthetic: >HCV.A13-cand-6260-6339
  source 1..80: mol_type = other DNA
ctcatgtctctggacatcaacacagagcaaatgtgtctagaggatgccatgtatggtactgatggtctggaagctctgga

SEQ ID NO: 4107 - DNA, 80 bp, synthetic construct
  misc_feature 1..80: note = Synthetic: >HCV.A13-cand-6340-6419
  source 1..80: mol_type = other DNA
cctaaccaccagtgctggatacccttatgtagcaatgggaaagaagaagagagacatcctgaacaaacagaccagagaca

SEQ ID NO: 4108 - DNA, 80 bp, synthetic construct
  misc_feature 1..80: note = Synthetic: >HCV.A13-cand-6420-6499
  source 1..80: mol_type = other DNA
ccaaagaaatgcagagactattagacacctatggaatcaacctaccactagtcacttatgtgaaagatgaactcagatcc

SEQ ID NO: 4109 - DNA, 80 bp, synthetic construct
  misc_feature 1..80: note = Synthetic: >HCV.A13-cand-6500-6579
  source 1..80: mol_type = other DNA
aaaaccaaagtggaacagggaaagtccagattaattgaagcttctagtctgaatgactcagtggccatgagaatggcctt

SEQ ID NO: 4110 - DNA, 80 bp, synthetic construct
  misc_feature 1..80: note = Synthetic: >HCV.A21-cand-1030-1109
  source 1..80: mol_type = other DNA
cacacaagaagcagctaatgctattgttgcttatggtgagtggcctacttacataaatgactcagaagcaaacccagtag

SEQ ID NO: 4111 - DNA, 80 bp, synthetic construct
  misc_feature 1..80: note = Synthetic: >HCV.A21-cand-1100-1179
  source 1..80: mol_type = other DNA
aacccagtagatgcacccactgaaccagatgttagtagcaacaggttttacaccctggaatcagtgtcttggaagactac

SEQ ID NO: 4112 - DNA, 80 bp, synthetic construct
  misc_feature 1..80: note = Synthetic: >HCV.A21-cand-1230-1309
  source 1..80: mol_type = other DNA
tgtttggtcagaatatgtactaccactacttaggacgctctggttacaccattcatgtccagtgcaatgcctcaaaattt

SEQ ID NO: 4113 - DNA, 80 bp, synthetic construct
  misc_feature 1..80: note = Synthetic: >HCV.A21-cand-1330-1409
  source 1..80: mol_type = other DNA
tttcctgataccagagtttgtcatggcctgcaacactgagagcaaaacatcatatgtttcatacattaacgcaaatcctg

SEQ ID NO: 4114 - DNA, 80 bp, synthetic construct
  misc_feature 1..80: note = Synthetic: >HCV.A21-cand-1430-1509
  source 1..80: mol_type = other DNA
acaaacatctacaatccatcaaacacagatgctagtgagggcagacaatttgcagcgctagactatttactgggttctgg

SEQ ID NO: 4115 - DNA, 80 bp, synthetic construct
  misc_feature 1..80: note = Synthetic: >HCV.A21-cand-1510-1589
  source 1..80: mol_type = other DNA
tgttctagctggaaacgcatttgtgtacccgcaccagatcattaacctgcgtaccaacaacagtgcaacaattgtggtac

SEQ ID NO: 4116 - DNA, 80 bp, synthetic construct
  misc_feature 1..80: note = Synthetic: >HCV.A21-cand-1560-1639
  source 1..80: mol_type = other DNA
gtaccaacaacagtgcaacaattgtggtaccatatgtgaactcacttgtcattgattgcatggcaaaacacaataactgg

SEQ ID NO: 4117 - DNA, 80 bp, synthetic construct
  misc_feature 1..80: note = Synthetic: >HCV.A21-cand-1680-1759
  source 1..80: mol_type = other DNA
caacatcatcaccacaggtgcctattacagtgaccattgcacccatgtgcgcagaattcaatggattgagaaacatcacc

SEQ ID NO: 4118 - DNA, 80 bp, synthetic construct
  misc_feature 1..80: note = Synthetic: >HCV.A21-cand-1760-1839
  source 1..80: mol_type = other DNA
attccagtgcatcaaggattgccaacaatgaacacacctggttccaatcaatttctcacatctgatgacttccagtcacc

SEQ ID NO: 4119 - DNA, 80 bp, synthetic construct
  misc_feature 1..80: note = Synthetic: >HCV.A21-cand-1840-1919
  source 1..80: mol_type = other DNA
ctgcgccttacccaattttgatgtcactccaccaatacacatacccggagaagtgaagaacatgatggaactggccgaaa

SEQ ID NO: 4120 - DNA, 80 bp, synthetic construct
  misc_feature 1..80: note = Synthetic: >HCV.A21-cand-1920-1999
  source 1..80: mol_type = other DNA
ttgacacgctgatcccaatgaatgcagtggacggaaaggtgaacactatggaaatgtatcaaataccattaaatgacgaa

SEQ ID NO: 4121 - DNA, 80 bp, synthetic construct
  misc_feature 1..80: note = Synthetic: >HCV.A21-cand-2000-2079
  source 1..80: mol_type = other DNA
ttgagcaaagcacccatattttgcctatctctgtcacctgcttctgacaaacgattaagtcatacaatgttgggtgaaat

SEQ ID NO: 4122 - DNA, 80 bp, synthetic construct
  misc_feature 1..80: note = Synthetic: >HCV.A21-cand-2080-2159
  source 1..80: mol_type = other DNA
tctaaattattacacccattggacagggtccattaggttcacctttctattctgtggtagtatgatggccactggtaagc

SEQ ID NO: 4123 - DNA, 80 bp, synthetic construct
  misc_feature 1..80: note = Synthetic: >HCV.A21-cand-2160-2239
  source 1..80: mol_type = other DNA
tgcttctcagttattccccaccaggagctaaaccaccaaccaatcgcaaagatgcaatgttgggcacacacatcatctgg

SEQ ID NO: 4124 - DNA, 80 bp, synthetic construct
  misc_feature 1..80: note = Synthetic: >HCV.A21-cand-2250-2329
  source 1..80: mol_type = other DNA
tacaatccagttgctccatggttgcaccatggatctctaatacagtatacaggcggtgtgcacgtgatgacttcacagaa

SEQ ID NO: 4125 - DNA, 80 bp, synthetic construct
  misc_feature 1..80: note = Synthetic: >HCV.A9-cand-850-929
  source 1..80: mol_type = other DNA
tccaactcagctaaccgccaagactttacacaggacccgagcaaattcactgaaccagtcaaggatgtcatgatcaagtc

SEQ ID NO: 4126 - DNA, 80 bp, synthetic construct
  misc_feature 1..80: note = Synthetic: >HCV.A9-cand-930-1009
  source 1..80: mol_type = other DNA
acttcccgcactcaactcaccaactgtggaggagtgcggatacagcgaccgcgtcagatccattacccttgggaactcca

SEQ ID NO: 4127 - DNA, 80 bp, synthetic construct
  misc_feature 1..80: note = Synthetic: >HCV.A9-cand-1050-1129
  source 1..80: mol_type = other DNA
tggtaggtggcccacgtatcttagagatgatgaggcgaccgcggaagatcaacccactcaacccgacgtggcgacgtgtc

SEQ ID NO: 4128 - DNA, 80 bp, synthetic construct
  misc_feature 1..80: note = Synthetic: >HCV.A9-cand-1090-1169
  source 1..80: mol_type = other DNA
gcggaagatcaacccactcaacccgacgtggcgacgtgtcgtttttacacactggattcgattaaatgggaaaaaggatc

SEQ ID NO: 4129 - DNA, 80 bp, synthetic construct
  misc_feature 1..80: note = Synthetic: >HCV.A9-cand-1220-1299
  source 1..80: mol_type = other DNA
tcggtcagaacatgcagtaccactacctgggtcgcgcagggtacaccatacatgtgcagtgtaatgcatccaaattccac

SEQ ID NO: 4130 - DNA, 80 bp, synthetic construct
  misc_feature 1..80: note = Synthetic: >HCV.A9-cand-1250-1329
  source 1..80: mol_type = other DNA
gtcgcgcagggtacaccatacatgtgcagtgtaatgcatccaaattccaccaagggtgtctgttagttgtgtgtgtaccc

SEQ ID NO: 4131 - DNA, 80 bp, synthetic construct
  misc_feature 1..80: note = Synthetic: >HCV.A9-cand-1350-1429
  source 1..80: mol_type = other DNA
cgtcgtcggtcaggcattcccttcaaccgcagtggctgacggtgacaaggcatatgagtttactagcacaacccaaagtg

SEQ ID NO: 4132 - DNA, 80 bp, synthetic construct
  misc_feature 1..80: note = Synthetic: >HCV.A9-cand-1410-1489
  source 1..80: mol_type = other DNA
tactagcacaacccaaagtgaacaaaccaaagttcaaaccgcagtgcataatgcaggcatgggtgtgggcgtgggaaatc

SEQ ID NO: 4133 - DNA, 80 bp, synthetic construct
  misc_feature 1..80: note = Synthetic: >HCV.A9-cand-1490-1569
  source 1..80: mol_type = other DNA
tcacaatcttcccgcatcagtggataaacctgcgcacgaacaacagtgccaccatagtgatgccatacataaatagtgta

SEQ ID NO: 4134 - DNA, 80 bp, synthetic construct
  misc_feature 1..80: note = Synthetic: >HCV.A9-cand-1570-1649
  source 1..80: mol_type = other DNA
ccgatggacaatatgtttaggcactacaacttcacactgatggtgataccttttgttaaactggattatgctgacaccgc

SEQ ID NO: 4135 - DNA, 80 bp, synthetic construct
  misc_feature 1..80: note = Synthetic: >HCV.A9-cand-1650-1729
  source 1..80: mol_type = other DNA
atccacttatgtaccaatcaccgttactgttgccccgatgtgcgctgagtacaatggtctgcggttggcgcaagcacaag

SEQ ID NO: 4136 - DNA, 80 bp, synthetic construct
  misc_feature 1..80: note = Synthetic: >HCV.A9-cand-1730-1809
  source 1..80: mol_type = other DNA
gtttaccgaccatgaacacaccagggagtacgcaatttctgacctcggacgacttccagtcaccgtgtgcactcccccaa

SEQ ID NO: 4137 - DNA, 80 bp, synthetic construct
  misc_feature 1..80: note = Synthetic: >HCV.A9-cand-1850-1929
  source 1..80: mol_type = other DNA
aaaatctaatggaggtggcagaagtggactccgttgtgccggtgaacaacgtacaagacactaccgaccaaatggaaatg

SEQ ID NO: 4138 - DNA, 80 bp, synthetic construct
  misc_feature 1..80: note = Synthetic: >HCV.A9-cand-1890-1969
  source 1..80: mol_type = other DNA
ggtgaacaacgtacaagacactaccgaccaaatggaaatgttcaggattccagtgaccattaatgccccattacaacagc

SEQ ID NO: 4139 - DNA, 80 bp, synthetic construct
  misc_feature 1..80: note = Synthetic: >HCV.A9-cand-1950-2029
  source 1..80: mol_type = other DNA
taatgccccattacaacagcaggtctttgggttgagattacagcctggattagacagcgtgttcaagcacactctactgg

SEQ ID NO: 4140 - DNA, 80 bp, synthetic construct
  misc_feature 1..80: note = Synthetic: >HCV.A9-cand-2040-2119
  source 1..80: mol_type = other DNA
aaactactacgcacactggtcaggcagtatgaagttaacatttgtgttctgtggctctgcgatggcgacaggcaagtttt

SEQ ID NO: 4141 - DNA, 80 bp, synthetic construct
  misc_feature 1..80: note = Synthetic: >HQ537675.1-cand-5350-5429
  source 1..80: mol_type = other DNA
gccactaagtacaggttttgacattcccatattttctgggcctgatgtacctatagagcatgcacctacacaggttttcc

SEQ ID NO: 4142 - DNA, 80 bp, synthetic construct
  misc_feature 1..80: note = Synthetic: >HQ537675.1-cand-5400-5479
  source 1..80: mol_type = other DNA
ctatagagcatgcacctacacaggttttcccatttcctttggcccctacaacgccacaagtgtctatttttgttgatggg

SEQ ID NO: 4143 - DNA, 80 bp, synthetic construct
  misc_feature 1..80: note = Synthetic: >HQ537675.1-cand-5500-5579
  source 1..80: mol_type = other DNA
tagttattatatgttaaaacgtcgacgtaaacgtgtatcatatttttttacagatgtctctgtggcggcctagcgaggct

SEQ ID NO: 4144 - DNA, 80 bp, synthetic construct
  misc_feature 1..80: note = Synthetic: >HQ537675.1-cand-5580-5659
  source 1..80: mol_type = other DNA
actgtctacttaccacctgtcccagtgtctaaagttgtaagcacggatgaatatgtaacacgaaccaacatatattatca

SEQ ID NO: 4145 - DNA, 80 bp, synthetic construct
  misc_feature 1..80: note = Synthetic: >HQ537675.1-cand-5660-5739
  source 1..80: mol_type = other DNA
cgcaggcagtgctaggctgcttacagtaggccatccatattattccatacctaaatctgacaatcctaaaaaaatagttg

SEQ ID NO: 4146 - DNA, 80 bp, synthetic construct
  misc_feature 1..80: note = Synthetic: >HQ537675.1-cand-5740-5819
  source 1..80: mol_type = other DNA
taccaaaggtgtcaggattacaatatagggtatttagggttcgtttaccagatccaaacaaatttggatttcctgataca

SEQ ID NO: 4147 - DNA, 80 bp, synthetic construct
  misc_feature 1..80: note = Synthetic: >HQ537675.1-cand-5820-5899
  source 1..80: mol_type = other DNA
tctttttataatcctgaaactcaacgcttagtttgggcctgtgttggtttagaggtaggtcgcgggcagccattaggtgt

SEQ ID NO: 4148 - DNA, 80 bp, synthetic construct
  misc_feature 1..80: note = Synthetic: >HQ537675.1-cand-5900-5979
  source 1..80: mol_type = other DNA
aggtattagtggtcatccattattaaataaatttgatgacactgaaaactctaatagatatgccggtggtcctggcactg

SEQ ID NO: 4149 - DNA, 80 bp, synthetic construct
  misc_feature 1..80: note = Synthetic: >HQ537675.1-cand-5980-6059
  source 1..80: mol_type = other DNA
ataatagggaatgtatatcaatggattataaacaaacacaactgtgtttacttggttgcaaaccacctattggagagcat

SEQ ID NO: 4150 - DNA, 80 bp, synthetic construct
  misc_feature 1..80: note = Synthetic: >HQ537675.1-cand-6070-6149
  source 1..80: mol_type = other DNA
gtagtccttgtagtaacaatgctattacccctggtgattgtcctccattagaattaaaaaattcagttatacaagatggg

SEQ ID NO: 4151 - DNA, 80 bp, synthetic construct
  misc_feature 1..80: note = Synthetic: >HQ537675.1-cand-6150-6229
  source 1..80: mol_type = other DNA
gatatggttgatacaggctttggagctatggattttactgctttacaagacactaaaagtaatgttcctttggacatttg

SEQ ID NO: 4152 - DNA, 80 bp, synthetic construct
  misc_feature 1..80: note = Synthetic: >HQ537675.1-cand-6220-6299
  source 1..80: mol_type = other DNA
tggacatttgtaattctatttgtaaatatccagattatcttaaaatggttgctgagccatatggcgatacattatttttt

SEQ ID NO: 4153 - DNA, 80 bp, synthetic construct
  misc_feature 1..80: note = Synthetic: >HQ537675.1-cand-6300-6379
  source 1..80: mol_type = other DNA
tatttacgtagggaacaaatgtttgtaaggcatttttttaatagatcaggcacggttggtgaatcggttcctactgactt

SEQ ID NO: 4154 - DNA, 80 bp, synthetic construct
  misc_feature 1..80: note = Synthetic: >HQ537675.1-cand-6380-6459
  source 1..80: mol_type = other DNA
atatattaaaggctccggttcaacagctactttagctaacagtacatactttcctacacctagcggctccatggttactt

SEQ ID NO: 4155 - DNA, 80 bp, synthetic construct
  misc_feature 1..80: note = Synthetic: >HQ537675.1-cand-6450-6529
  source 1..80: mol_type = other DNA
atggttacttcagatgcacaaatttttaataaaccatattggatgcaacgtgctcagggacacaataatggtatttgttg

SEQ ID NO: 4156 - DNA, 80 bp, synthetic construct
  misc_feature 1..80: note = Synthetic: >HQ537675.1-cand-6550-6629
  source 1..80: mol_type = other DNA
ctgtggtagataccacacgtagtaccaatatgtctgtttgtgctgcaattgcaaacagtgatactacatttaaaagtagt

SEQ ID NO: 4157 - DNA, 80 bp, synthetic construct
  misc_feature 1..80: note = Synthetic: >HQ537689.1-cand-1280-1359
  source 1..80: mol_type = other DNA
ctgaagtggaaactcagcagatggtacaacaggtagaaagtcaaaatggcgacacaaacttaaatgacttagaatctagt

SEQ ID NO: 4158 - DNA, 80 bp, synthetic construct
  misc_feature 1..80: note = Synthetic: >HQ537689.1-cand-1390-1469
  source 1..80: mol_type = other DNA
gaaacaaatgtagatagctgtgaaaatgttacgttgcaggaaattagtaatgttctacatagtagtaatacaaaagcaaa

SEQ ID NO: 4159 - DNA, 80 bp, synthetic construct
  misc_feature 1..80: note = Synthetic: >HQ537689.1-cand-1470-1549
  source 1..80: mol_type = other DNA
tatattatataaatttaaagaggcctatggaataagttttatggaattagtaagaccatttaaaagtgataaaacaagct

SEQ ID NO: 4160 - DNA, 80 bp, synthetic construct
  misc_feature 1..80: note = Synthetic: >HQ537689.1-cand-1550-1629
  source 1..80: mol_type = other DNA
gtacagattggtgtataacaggatatggaattagtccatcagtagcagaaagtttaaaagtattaattaaacagcatagt

SEQ ID NO: 4161 - DNA, 80 bp, synthetic construct
  misc_feature 1..80: note = Synthetic: >HQ537689.1-cand-1630-1709
  source 1..80: mol_type = other DNA
ttgtatactcatttacaatgtttaacttgcgatagaggaataataatattattgttaattagatttaggtgtagcaaaaa

SEQ ID NO: 4162 - DNA, 80 bp, synthetic construct
  misc_feature 1..80: note = Synthetic: >HQ537689.1-cand-1710-1789
  source 1..80: mol_type = other DNA
caggttaacagtagcaaaactaatgagtaatttattatcaatacctgaaacatgtatggttatagagccaccaaaattac

SEQ ID NO: 4163 - DNA, 80 bp, synthetic construct
  misc_feature 1..80: note = Synthetic: >HQ537689.1-cand-1790-1869
  source 1..80: mol_type = other DNA
ggagccaaacatgtgcattgtattggtttagaacagcaatgtcaaacattagtgatgtacaaggtacaacacctgaatgg

SEQ ID NO: 4164 - DNA, 80 bp, synthetic construct
  misc_feature 1..80: note = Synthetic: >HQ537689.1-cand-1870-1949
  source 1..80: mol_type = other DNA
atagatagactaactgttttacaacatagctttaatgataatatatttgatttaagtgaaatggtacagtgggcatatga

SEQ ID NO: 4165 - DNA, 80 bp, synthetic construct
  misc_feature 1..80: note = Synthetic: >HQ537689.1-cand-1950-2029
  source 1..80: mol_type = other DNA
taacgagttaacggacgatagtgacattgcatattattatgcacaacttgcagattcaaatagtaatgctgctgcatttt

SEQ ID NO: 4166 - DNA, 80 bp, synthetic construct
  misc_feature 1..80: note = Synthetic: >HQ537689.1-cand-2030-2109
  source 1..80: mol_type = other DNA
taaaaagtaactcacaagcaaaaatagtaaaggactgtggaataatgtgtagacattataaaaaagcagaaaaacgtaaa

SEQ ID NO: 4167 - DNA, 80 bp, synthetic construct
  misc_feature 1..80: note = Synthetic: >HQ537689.1-cand-2110-2189
  source 1..80: mol_type = other DNA
atgtcaataggacaatggatacaaagtagatgtgaaaaaacaaatgatggaggaaattggagaccaatagtacagttgtt

SEQ ID NO: 4168 - DNA, 80 bp, synthetic construct
  misc_feature 1..80: note = Synthetic: >HQ537689.1-cand-2190-2269
  source 1..80: mol_type = other DNA
aagatatcaaaacattgaatttacagcatttttaggtgcatttaaaaagtttttaaaaggtataccaaaaaaaagctgta

SEQ ID NO: 4169 - DNA, 80 bp, synthetic construct
  misc_feature 1..80: note = Synthetic: >HQ537689.1-cand-2270-2349
  source 1..80: mol_type = other DNA
tgctaatttgtggaccagcaaatacaggaaagtcatattttggaatgagtttaatacagtttttaaaagggtgtgttata

SEQ ID NO: 4170 - DNA, 80 bp, synthetic construct
  misc_feature 1..80: note = Synthetic: >HQ537689.1-cand-2350-2429
  source 1..80: mol_type = other DNA
tcatgtgtaaattctaaaagtcacttttggttgcagccattatcagatgcaaaaataggaatgatagatgatgtaacgcc

SEQ ID NO: 4171 - DNA, 80 bp, synthetic construct
  misc_feature 1..80: note = Synthetic: >HQ537689.1-cand-2430-2509
  source 1..80: mol_type = other DNA
aataagttggacatatatagatgattacatgagaaatgcgttagatggaaatgaaatttcaatagatgtgaaacataggg

SEQ ID NO: 4172 - DNA, 80 bp, synthetic construct
  misc_feature 1..80: note = Synthetic: >HQ537689.1-cand-2510-2589
  source 1..80: mol_type = other DNA
cattagtgcaattaaaatgtccaccactgcttcttacctccaatacaaatgcaggcacagactctagatggccatattta

SEQ ID NO: 4173 - DNA, 80 bp, synthetic construct
  misc_feature 1..80: note = Synthetic: >KF436887.1-cand-4950-5029
  source 1..80: mol_type = other DNA
tgcacctgatcctgattttctggatattattaaactgcaccgccctgcccttacatctcgtagaggcacagtacgcttta

SEQ ID NO: 4174 - DNA, 80 bp, synthetic construct
  misc_feature 1..80: note = Synthetic: >KF436887.1-cand-5030-5109
  source 1..80: mol_type = other DNA
gtaggttaggtcaaaaagccaccatgcgcactcgtagtggcaaacaaattggtgctcgtgtacattattatcatgatatt

SEQ ID NO: 4175 - DNA, 80 bp, synthetic construct
  misc_feature 1..80: note = Synthetic: >KF436887.1-cand-5110-5189
  source 1..80: mol_type = other DNA
agtagaattgcaccagctgatgaacttgaaatgcagcctttactttcaccttctaataattatagttatgacatttatgc

SEQ ID NO: 4176 - DNA, 80 bp, synthetic construct
  misc_feature 1..80: note = Synthetic: >KF436887.1-cand-5180-5259
  source 1..80: mol_type = other DNA
acatttatgctgatttagatgaagctgaaacaggttttatacagcccacacacaccacacctatgtcacactcctctttg

SEQ ID NO: 4177 - DNA, 80 bp, synthetic construct
  misc_feature 1..80: note = Synthetic: >KF436887.1-cand-5260-5339
  source 1..80: mol_type = other DNA
tctaggcagttgccctccttatcttcatctatgtcttcatcttatgcaaatgttactattccattttcaactacatattc

SEQ ID NO: 4178 - DNA, 80 bp, synthetic construct
  misc_feature 1..80: note = Synthetic: >KF436887.1-cand-5340-5419
  source 1..80: mol_type = other DNA
tgttcctattcatacagggcctgatgtagtattgcccacatctcctacagtatggccttatgttccccacacttccattg

SEQ ID NO: 4179 - DNA, 80 bp, synthetic construct
  misc_feature 1..80: note = Synthetic: >KF436887.1-cand-5450-5529
  source 1..80: mol_type = other DNA
gggattactatttgtggccctatacacatttactacgcaaacgccgtaaacgtataccctatttttttacagatggcatt

SEQ ID NO: 4180 - DNA, 80 bp, synthetic construct
  misc_feature 1..80: note = Synthetic: >KF436887.1-cand-5500-5579
  source 1..80: mol_type = other DNA
cgtataccctatttttttacagatggcattgtggcgcactaatgacagcaaggtgtatttgccacctgcacctgtgtctc

SEQ ID NO: 4181 - DNA, 80 bp, synthetic construct
  misc_feature 1..80: note = Synthetic: >KF436887.1-cand-5580-5659
  source 1..80: mol_type = other DNA
gaattgtgaatacagaagaatatatcacacgcaccggcatatattactatgcaggcagttccagactcataacattagga

SEQ ID NO: 4182 - DNA, 80 bp, synthetic construct
  misc_feature 1..80: note = Synthetic: >KF436887.1-cand-5660-5739
  source 1..80: mol_type = other DNA
catccctattttccaatacctaaaacctcaacgcgtgctgctattcctaaagtatctgcatttcaatacagggtatttag

SEQ ID NO: 4183 - DNA, 80 bp, synthetic construct
  misc_feature 1..80: note = Synthetic: >KF436887.1-cand-5740-5819
  source 1..80: mol_type = other DNA
ggtacagttaccagatcctaacaagtttggacttccggatccaaatttatataatccagacacagataggttggtgtggg

SEQ ID NO: 4184 - DNA, 80 bp, synthetic construct
  misc_feature 1..80: note = Synthetic: >KF436887.1-cand-5820-5899
  source 1..80: mol_type = other DNA
gttgtgtgggcgttgaggtgggcagaggacagccccttggtgttggccttagtggtcatcccttatttaataaatatgat

SEQ ID NO: 4185 - DNA, 80 bp, synthetic construct
  misc_feature 1..80: note = Synthetic: >KF436887.1-cand-5900-5979
  source 1..80: mol_type = other DNA
gacacagaaaattcacgcatagcaaatggcaatgcacaacaagatgttagagataacacatctgttgacaacaaacagac

SEQ ID NO: 4186 - DNA, 80 bp, synthetic construct
  misc_feature 1..80: note = Synthetic: >KF436887.1-cand-5940-6019
  source 1..80: mol_type = other DNA
aagatgttagagataacacatctgttgacaacaaacagactcagttatgtataataggctgtgctccacctattggtgaa

SEQ ID NO: 4187 - DNA, 80 bp, synthetic construct
  misc_feature 1..80: note = Synthetic: >KF436887.1-cand-6050-6129
  source 1..80: mol_type = other DNA
acagctgtacctccaggagactgcccccccctggaacttgtatcctctgtcattcaggatggcgatatgattgatacagg

SEQ ID NO: 4188 - DNA, 80 bp, synthetic construct
  misc_feature 1..80: note = Synthetic: >KF436887.1-cand-6150-6229
  source 1..80: mol_type = other DNA
ctgccctacaggccaccaaatcagacgtccctttggatatttcacagtctgtttgtaaatatcctgattatttgaaaatg

SEQ ID NO: 4189 - DNA, 80 bp, synthetic construct
  misc_feature 1..80: note = Synthetic: >NC_001357.1-cand-4020-4099
  source 1..80: mol_type = other DNA
gtatgcatgggtattggtatttgtgtatattgtggtaataacgtcccctgccacagcattcacagtatatgtattttgtt

SEQ ID NO: 4190 - DNA, 80 bp, synthetic construct
  misc_feature 1..80: note = Synthetic: >NC_001357.1-cand-4100-4179
  source 1..80: mol_type = other DNA
ttttattgcccatgttactattgcatatacatgctatattgtctttacagtaattgtataggttgttttatacagtgtat

SEQ ID NO: 4191 - DNA, 80 bp, synthetic construct
  misc_feature 1..80: note = Synthetic: >NC_001357.1-cand-4200-4279
  source 1..80: mol_type = other DNA
ttataccttttatgctttttgtatttttgtaataaaagtatggtatcccaccgtgccgcacgacgcaaacgggcttcggt

SEQ ID NO: 4192 - DNA, 80 bp, synthetic construct
  misc_feature 1..80: note = Synthetic: >NC_001357.1-cand-4280-4359
  source 1..80: mol_type = other DNA
aactgacttatataaaacatgtaaacaatctggtacatgtccacctgatgttgttcctaaggtggagggcaccacgttag

SEQ ID NO: 4193 - DNA, 80 bp, synthetic construct
  misc_feature 1..80: note = Synthetic: >NC_001357.1-cand-4350-4429
  source 1..80: mol_type = other DNA
accacgttagcagataaaatattgcaatggtcaagccttggtatatttttgggtggacttggcataggtactggcagtgg

SEQ ID NO: 4194 - DNA, 80 bp, synthetic construct
  misc_feature 1..80: note = Synthetic: >NC_001357.1-cand-4440-4519
  source 1..80: mol_type = other DNA
cgtacagggtacattccattgggtgggcgttccaatacagtggtggatgttggtcctacacgtcccccagtggttattga

SEQ ID NO: 4195 - DNA, 80 bp, synthetic construct
  misc_feature 1..80: note = Synthetic: >NC_001357.1-cand-4520-4599
  source 1..80: mol_type = other DNA
acctgtgggccccacagacccatctattgttacattaatagaggactccagtgtggttacatcaggtgcacctaggccta

SEQ ID NO: 4196 - DNA, 80 bp, synthetic construct
  misc_feature 1..80: note = Synthetic: >NC_001357.1-cand-4600-4679
  source 1..80: mol_type = other DNA
cgtttactggcacgtctgggtttgatataacatctgcgggtacaactacacctgcggttttggatatcacaccttcgtct

SEQ ID NO: 4197 - DNA, 80 bp, synthetic construct
  misc_feature 1..80: note = Synthetic: >NC_001357.1-cand-4680-4759
  source 1..80: mol_type = other DNA
acctctgtgtctatttccacaaccaattttaccaatcctgcattttctgatccgtccattattgaagttccacaaactgg

SEQ ID NO: 4198 - DNA, 80 bp, synthetic construct
  misc_feature 1..80: note = Synthetic: >NC_001357.1-cand-4760-4839
  source 1..80: mol_type = other DNA
ggaggtggcaggtaatgtatttgttggtacccctacatctggaacacatgggtatgaggaaatacctttacaaacatttg

SEQ ID NO: 4199 - DNA, 80 bp, synthetic construct
  misc_feature 1..80: note = Synthetic: >NC_001357.1-cand-4860-4939
  source 1..80: mol_type = other DNA
gaacccattagtagtaccccattgcctactgtgcggcgtgtagcaggtccccgcctttacagtagggcctaccaacaagt

SEQ ID NO: 4200 - DNA, 80 bp, synthetic construct
  misc_feature 1..80: note = Synthetic: >NC_001357.1-cand-4920-4999
  source 1..80: mol_type = other DNA
agtagggcctaccaacaagtgtcagtggctaaccctgagtttcttacacgtccatcctctttaattacatatgacaaccc

SEQ ID NO: 4201 - DNA, 80 bp, synthetic construct
  misc_feature 1..80: note = Synthetic: >NC_001357.1-cand-5000-5079
  source 1..80: mol_type = other DNA
ggcctttgagcctgtggacactacattaacatttgatcctcgtagtgatgttcctgattcagattttatggatattatcc

SEQ ID NO: 4202 - DNA, 80 bp, synthetic construct
  misc_feature 1..80: note = Synthetic: >NC_001357.1-cand-5080-5159
  source 1..80: mol_type = other DNA
gtctacataggcctgctttaacatccaggcgtgggactgttcgctttagtagattaggtcaacgggcaactatgtttacc

SEQ ID NO: 4203 - DNA, 80 bp, synthetic construct
  misc_feature 1..80: note = Synthetic: >NC_001357.1-cand-5160-5239
  source 1..80: mol_type = other DNA
cgcagcggtacacaaataggtgctagggttcacttttatcatgatataagtcctattgcaccttccccagaatatattga

SEQ ID NO: 4204 - DNA, 80 bp, synthetic construct
  misc_feature 1..80: note = Synthetic: >NC_001357.1-cand-5230-5309
  source 1..80: mol_type = other DNA
aatatattgaactgcagcctttagtatctgccacggaggacaatgacttgtttgatatatatgcagatgacatggaccct

SEQ ID NO: 4205 - DNA, 80 bp, synthetic construct
  misc_feature 1..80: note = Synthetic: >NC_001538.1-cand-2610-2689
  source 1..80: mol_type = other DNA
ttgacaaacagggacaattgcaaaccaaaatgctttaaacaggtgcttttattgtacatatacatttaataaatgctgct

SEQ ID NO: 4206 - DNA, 80 bp, synthetic construct
  misc_feature 1..80: note = Synthetic: >NC_001538.1-cand-2640-2719
  source 1..80: mol_type = other DNA
tgctttaaacaggtgcttttattgtacatatacatttaataaatgctgcttttgtataagccacttttaagcttgtgtta

SEQ ID NO: 4207 - DNA, 80 bp, synthetic construct
  misc_feature 1..80: note = Synthetic: >NC_001538.1-cand-2820-2899
  source 1..80: mol_type = other DNA
gctgaagtatctgagacttgggaagagcattgtgattgggattcagtgcttgatccatgtccagagtcttcagtttctga

SEQ ID NO: 4208 - DNA, 80 bp, synthetic construct
  misc_feature 1..80: note = Synthetic: >NC_001538.1-cand-2840-2919
  source 1..80: mol_type = other DNA
ggaagagcattgtgattgggattcagtgcttgatccatgtccagagtcttcagtttctgaatcctcttctcttgtaatat

SEQ ID NO: 4209 - DNA, 80 bp, synthetic construct
  misc_feature 1..80: note = Synthetic: >NC_001538.1-cand-2920-2999
  source 1..80: mol_type = other DNA
caagaatacatttccccatgcatatattatatttcatccttgaaaaagtatacatacttatctcagaatccagcctttcc

SEQ ID NO: 4210 - DNA, 80 bp, synthetic construct
  misc_feature 1..80: note = Synthetic: >NC_001538.1-cand-3000-3079
  source 1..80: mol_type = other DNA
ttccattcaacaattctagattgtatatcagttgcaaaatcagctacaggcctaaaccaaattagcagtagcaacaaggt

SEQ ID NO: 4211 - DNA, 80 bp, synthetic construct
  misc_feature 1..80: note = Synthetic: >NC_001538.1-cand-3080-3159
  source 1..80: mol_type = other DNA
cattccactttgtaaaattcttttttcaagtaagaactctgagttttgtaaggattttcttaaatatattttgggcctaa

SEQ ID NO: 4212 - DNA, 80 bp, synthetic construct
  misc_feature 1..80: note = Synthetic: >NC_001538.1-cand-3160-3239
  source 1..80: mol_type = other DNA
aatctatttgtcttacaaatctagcttgcagggttttagggacaggatactcattcattgtaaccaagcctggtggaaat

SEQ ID NO: 4213 - DNA, 80 bp, synthetic construct
  misc_feature 1..80: note = Synthetic: >NC_001538.1-cand-3240-3319
  source 1..80: mol_type = other DNA
atttgggttcttttgtttaaatgtttcttttctaaatttaccttaacacttccatctaaataatctctcaaactgtctaa

SEQ ID NO: 4214 - DNA, 80 bp, synthetic construct
  misc_feature 1..80: note = Synthetic: >NC_001538.1-cand-3320-3399
  source 1..80: mol_type = other DNA
attgtttattccatgtcctgaaggcaaatcctttgattcagctcctgtcccttttacatcttcaaaaacaaccatgtact

SEQ ID NO: 4215 - DNA, 80 bp, synthetic construct
  misc_feature 1..80: note = Synthetic: >NC_001538.1-cand-3400-3479
  source 1..80: mol_type = other DNA
gatctatagctacacctagctcaaaggttagcctttccatgggtaggtttacatttaaggctttaccaccacacaaatct

SEQ ID NO: 4216 - DNA, 80 bp, synthetic construct
  misc_feature 1..80: note = Synthetic: >NC_001538.1-cand-3480-3559
  source 1..80: mol_type = other DNA
aataaccctgcagctagtgttgtttttccactatcaatgggacctttaaataaccagtatcttcttttaggtacattgaa

SEQ ID NO: 4217 - DNA, 80 bp, synthetic construct
  misc_feature 1..80: note = Synthetic: >NC_001538.1-cand-3560-3639
  source 1..80: mol_type = other DNA
aacaatacagtgcaaaaaatcaaatattacagaatccattttaggtagcaaacagtgcagccaagcaacacctgccatat

SEQ ID NO: 4218 - DNA, 80 bp, synthetic construct
  misc_feature 1..80: note = Synthetic: >NC_001538.1-cand-3640-3719
  source 1..80: mol_type = other DNA
attgttctagtacagcatttccatgagctccaaatattaaatccattttatctaatatatgattgaatctttctgttagc

SEQ ID NO: 4219 - DNA, 80 bp, synthetic construct
  misc_feature 1..80: note = Synthetic: >NC_001538.1-cand-3720-3799
  source 1..80: mol_type = other DNA
atttcttccctggtcatatgaagggtatctactctttttttagctaaaactgtatctactgcttgctgacaaatactttt

SEQ ID NO: 4220 - DNA, 80 bp, synthetic construct
  misc_feature 1..80: note = Synthetic: >NC_001538.1-cand-3800-3879
  source 1..80: mol_type = other DNA
ttgatttttactttctgcaaaaataatagcatttgcaaagtgcttttcatgatacttaaagtgataaggctggtcttttt

SEQ ID NO: 4221 - DNA, 80 bp, synthetic construct
  misc_feature 1..80: note = Synthetic: >NC_001545.2-cand-6410-6489
  source 1..80: mol_type = other DNA
atcttacctactctaaccaggtcatcacccaccgttgtttcgccgcatctggtgggtacccaacttttgccattcgggag

SEQ ID NO: 4222 - DNA, 80 bp, synthetic construct
  misc_feature 1..80: note = Synthetic: >NC_001545.2-cand-6480-6559
  source 1..80: mol_type = other DNA
cattcgggagagccccagggtgcccgaatggcttctactacccccatcaccatggaggacctccagaaggccctcgaggc

SEQ ID NO: 4223 - DNA, 80 bp, synthetic construct
  misc_feature 1..80: note = Synthetic: >NC_001545.2-cand-6560-6639
  source 1..80: mol_type = other DNA
acaatcccgcgccctgcgcgcggaactcgccgccggcgcctcgcagtcgcgccggccgcggccgccgcgacagcgcgact

SEQ ID NO: 4224 - DNA, 80 bp, synthetic construct
  misc_feature 1..80: note = Synthetic: >NC_001545.2-cand-6620-6699
  source 1..80: mol_type = other DNA
gccgccgcgacagcgcgactccagcacctccggagatgactccggccgtgactccggagggccccgccgccgccgcggca

SEQ ID NO: 4225 - DNA, 80 bp, synthetic construct
  misc_feature 1..80: note = Synthetic: >NC_001545.2-cand-6720-6799
  source 1..80: mol_type = other DNA
agggactggtccagggccccgccccccccggaggagcggcaagaaactcgctcccagactccggccccgaagccatcgcg

SEQ ID NO: 4226 - DNA, 80 bp, synthetic construct
  misc_feature 1..80: note = Synthetic: >NC_001545.2-cand-6760-6839
  source 1..80: mol_type = other DNA
aagaaactcgctcccagactccggccccgaagccatcgcgggcgccgccacaacagcctcaacccccgcgcatgcaaacc

SEQ ID NO: 4227 - DNA, 80 bp, synthetic construct
  misc_feature 1..80: note = Synthetic: >NC_001545.2-cand-6880-6959
  source 1..80: mol_type = other DNA
cgaccaacccgttccaagcagccgtggcgcgtggcctgcgcccgcctctccacgaccctgacaccgaggcacccaccgag

SEQ ID NO: 4228 - DNA, 80 bp, synthetic construct
  misc_feature 1..80: note = Synthetic: >NC_001545.2-cand-6960-7039
  source 1..80: mol_type = other DNA
gcctgcgtgacctcgtggctttggagcgagggcgaaggcgcggtcttttaccgcgtcgacctgcatttcaccaacctggg

SEQ ID NO: 4229 - DNA, 80 bp, synthetic construct
  misc_feature 1..80: note = Synthetic: >NC_001545.2-cand-7040-7119
  source 1..80: mol_type = other DNA
cacccccccactcgacgaggacggccgctgggaccctgcgctcatgtacaacccttgcgggcccgagccgcccgctcacg

SEQ ID NO: 4230 - DNA, 80 bp, synthetic construct
  misc_feature 1..80: note = Synthetic: >NC_001545.2-cand-7070-7149
  source 1..80: mol_type = other DNA
ggaccctgcgctcatgtacaacccttgcgggcccgagccgcccgctcacgtcgtccgcgcgtacaatcaacctgccggcg

SEQ ID NO: 4231 - DNA, 80 bp, synthetic construct
  misc_feature 1..80: note = Synthetic: >NC_001545.2-cand-7200-7279
  source 1..80: mol_type = other DNA
ttccgcgtcggcggcacgcgctggcaccgactgctgcgcatgccagtgcgcggcctcgacggcgacagcgccccgcttcc

SEQ ID NO: 4232 - DNA, 80 bp, synthetic construct
  misc_feature 1..80: note = Synthetic: >NC_001545.2-cand-7280-7359
  source 1..80: mol_type = other DNA
cccccacaccaccgagcgcattgagacccgctcggcgcgccatccttggcgcatccgcttcggtgccccccaggccttcc

SEQ ID NO: 4233 - DNA, 80 bp, synthetic construct
  misc_feature 1..80: note = Synthetic: >NC_001545.2-cand-7360-7439
  source 1..80: mol_type = other DNA
ttgccgggctcttgctcgccacggtcgccgttggcaccgcgcgcgccgggctccagccccgcgctgatatggcggcacct

SEQ ID NO: 4234 - DNA, 80 bp, synthetic construct
  misc_feature 1..80: note = Synthetic: >NC_001545.2-cand-7440-7519
  source 1..80: mol_type = other DNA
cctacgctgccgcagcccccctgtgcgcacgggcagcattacggccaccaccaccatcagctgccgttcctcgggcacga

SEQ ID NO: 4235 - DNA, 80 bp, synthetic construct
  misc_feature 1..80: note = Synthetic: >NC_001545.2-cand-7520-7599
  source 1..80: mol_type = other DNA
cggccatcatggcggcaccttgcgcgtcggccagcattaccgaaacgccagcgacgtgctgcccggccactggctccaag

SEQ ID NO: 4236 - DNA, 80 bp, synthetic construct
  misc_feature 1..80: note = Synthetic: >NC_001545.2-cand-7610-7689
  source 1..80: mol_type = other DNA
ttgctacaacctgagcgactggcaccagggcactcatgtctgtcataccaagcacatggacttctggtgtgtggagcacg

SEQ ID NO: 4237 - DNA, 80 bp, synthetic construct
  misc_feature 1..80: note = Synthetic: >NC_001563.2-cand-3270-3349
  source 1..80: mol_type = other DNA
tcgagattgactttgactattgcccaggaacaacagtaactataagtgacagttgcgaacaccgtggacctgcggcacgc

SEQ ID NO: 4238 - DNA, 80 bp, synthetic construct
  misc_feature 1..80: note = Synthetic: >NC_001563.2-cand-3310-3389
  source 1..80: mol_type = other DNA
tataagtgacagttgcgaacaccgtggacctgcggcacgcacaaccactgagagtgggaagctcatcacagactggtgct

SEQ ID NO: 4239 - DNA, 80 bp, synthetic construct
  misc_feature 1..80: note = Synthetic: >NC_001563.2-cand-3390-3469
  source 1..80: mol_type = other DNA
gcagaagttgcaccctccctccactgcgcttccagactgagaatggctgttggtatggaatggaaattcgacctacgcgg

SEQ ID NO: 4240 - DNA, 80 bp, synthetic construct
  misc_feature 1..80: note = Synthetic: >NC_001563.2-cand-3470-3549
  source 1..80: mol_type = other DNA
cacgacgaaaagaccctcgtgcaatcgagagtgaatgcatacaacgccgacatgattgatccttttcagttgggccttat

SEQ ID NO: 4241 - DNA, 80 bp, synthetic construct
  misc_feature 1..80: note = Synthetic: >NC_001563.2-cand-3650-3729
  source 1..80: mol_type = other DNA
ggtattacgtacactgatgtcctgcgatatgtcattctcgtcggcgccgcgtttgctgaagcaaactcaggaggagacgt

SEQ ID NO: 4242 - DNA, 80 bp, synthetic construct
  misc_feature 1..80: note = Synthetic: >NC_001563.2-cand-3710-3789
  source 1..80: mol_type = other DNA
gcaaactcaggaggagacgtcgtgcacttggcacttatggctacattcaagattcaaccagtctttctggtggcttcctt

SEQ ID NO: 4243 - DNA, 80 bp, synthetic construct
  misc_feature 1..80: note = Synthetic: >NC_001563.2-cand-3790-3869
  source 1..80: mol_type = other DNA
tttgaaggcaaggtggaccaaccaagagagtattttgctcatgcttgcagctgctttcttccaaatggcttactatgacg

SEQ ID NO: 4244 - DNA, 80 bp, synthetic construct
  misc_feature 1..80: note = Synthetic: >NC_001563.2-cand-3870-3949
  source 1..80: mol_type = other DNA
ccaagaatgttctgtcatgggaagtgcctgacgttttgaactctctctccgttgcgtggatgattctcagagctataagc

SEQ ID NO: 4245 - DNA, 80 bp, synthetic construct
  misc_feature 1..80: note = Synthetic: >NC_001563.2-cand-3950-4029
  source 1..80: mol_type = other DNA
ttcaccaacacttcaaatgtggtggtgccgctgctggcccttttgacacctggattgaaatgcttaaaccttgatgtgta

SEQ ID NO: 4246 - DNA, 80 bp, synthetic construct
  misc_feature 1..80: note = Synthetic: >NC_001563.2-cand-4030-4109
  source 1..80: mol_type = other DNA
cagaattttgctactcatggttggagttggaagcctcatcaaagaaaaaaggagctctgcagcaaaaaagaaaggagctt

SEQ ID NO: 4247 - DNA, 80 bp, synthetic construct
  misc_feature 1..80: note = Synthetic: >NC_001563.2-cand-4110-4189
  source 1..80: mol_type = other DNA
gcctcatctgcctagcgctggcgtctacaggagtgttcaatccaatgatacttgcagctgggctaatggcttgcgacccc

SEQ ID NO: 4248 - DNA, 80 bp, synthetic construct
  misc_feature 1..80: note = Synthetic: >NC_001563.2-cand-4120-4199
  source 1..80: mol_type = other DNA
cctagcgctggcgtctacaggagtgttcaatccaatgatacttgcagctgggctaatggcttgcgaccccaaccgcaagc

SEQ ID NO: 4249 - DNA, 80 bp, synthetic construct
  misc_feature 1..80: note = Synthetic: >NC_001563.2-cand-4270-4349
  source 1..80: mol_type = other DNA
acttgacatagattctatggctatccccatgaccatcgccggacttatgttcgcggcatttgtcatctctggaaagtcaa

SEQ ID NO: 4250 - DNA, 80 bp, synthetic construct
  misc_feature 1..80: note = Synthetic: >NC_001563.2-cand-4350-4429
  source 1..80: mol_type = other DNA
cagacatgtggattgagaggacggctgacattacttgggagagtgatgctgaaatcacaggctctagcgaaagagtagat

SEQ ID NO: 4251 - DNA, 80 bp, synthetic construct
  misc_feature 1..80: note = Synthetic: >NC_001563.2-cand-4390-4469
  source 1..80: mol_type = other DNA
gagtgatgctgaaatcacaggctctagcgaaagagtagatgtgaggctggatgatgatggaaattttcaactgatgaatg

SEQ ID NO: 4252 - DNA, 80 bp, synthetic construct
  misc_feature 1..80: note = Synthetic: >NC_001563.2-cand-4520-4599
  source 1..80: mol_type = other DNA
ataagtgcctacacaccttgggcaattctcccctcggtcatcggattctggataacccttcagtacacaaagagaggagg

SEQ ID NO: 4253 - DNA, 80 bp, synthetic construct
  misc_feature 1..80: note = Synthetic: >NC_001563.2-cand-9780-9859
  source 1..80: mol_type = other DNA
ggtatgactggcagcaggttccattctgttcaaaccatttcacggaactgatcatgaaggacggcaggacgctggtggtc

SEQ ID NO: 4254 - DNA, 80 bp, synthetic construct
  misc_feature 1..80: note = Synthetic: >NC_001563.2-cand-9830-9909
  source 1..80: mol_type = other DNA
atcatgaaggacggcaggacgctggtggtcccgtgtcgtggacaagacgagttgattggacgtgccaggatctctccagg

SEQ ID NO: 4255 - DNA, 80 bp, synthetic construct
  misc_feature 1..80: note = Synthetic: >NC_001563.2-cand-9920-9999
  source 1..80: mol_type = other DNA
aatgtgcgcgacaccgcctgcctggcgaagtcatacgcgcagatgtggctgctgctttatttccaccgtagagacctgag

SEQ ID NO: 4256 - DNA, 80 bp, synthetic construct
  misc_feature 1..80: note = Synthetic: >NC_001563.2-cand-10000-10079
  source 1..80: mol_type = other DNA
attgatggccaatgccatctgttccgctgtgcctgccaactgggttcccacagggcgtaccacttggtcgatccacgcaa

SEQ ID NO: 4257 - DNA, 80 bp, synthetic construct
  misc_feature 1..80: note = Synthetic: >NC_001563.2-cand-10080-10159
  source 1..80: mol_type = other DNA
aaggagaatggatgacgacggaagacatgctcgcagtctggaacagagtgtggattgaggagaatgagtggatggaagac

SEQ ID NO: 4258 - DNA, 80 bp, synthetic construct
  misc_feature 1..80: note = Synthetic: >NC_001563.2-cand-10160-10239
  source 1..80: mol_type = other DNA
aaaacaccagttgagaggtggagtgatgttccatactctggaaagagagaggacatttggtgtggcagtttgatcggcac

SEQ ID NO: 4259 - DNA, 80 bp, synthetic construct
  misc_feature 1..80: note = Synthetic: >NC_001563.2-cand-10240-10319
  source 1..80: mol_type = other DNA
acgaacccgcgccacttgggctgaaaatatccatgtggcaatcaatcaggtccgttcagtgattggagaagagaagtatg

SEQ ID NO: 4260 - DNA, 80 bp, synthetic construct
  misc_feature 1..80: note = Synthetic: >NC_001563.2-cand-10320-10399
  source 1..80: mol_type = other DNA
tggattacatgagctccttgaggaggtatgaagacaccattgtagtggaggacactgttttgtaaaagatagtattatag

SEQ ID NO: 4261 - DNA, 80 bp, synthetic construct
  misc_feature 1..80: note = Synthetic: >NC_001563.2-cand-10400-10479
  source 1..80: mol_type = other DNA
ttagtttagtgtaaataggatttattgagaatggaagtcaggccagattaatgctgccaccggaagttgagtagacggtg

SEQ ID NO: 4262 - DNA, 80 bp, synthetic construct
  misc_feature 1..80: note = Synthetic: >NC_001563.2-cand-10480-10559
  source 1..80: mol_type = other DNA
ctgcctgcggctcaaccccaggaggactgggtgaccaaagctgcgaggtgatccacgtaagccctcagaaccgtctcgga

SEQ ID NO: 4263 - DNA, 80 bp, synthetic construct
  misc_feature 1..80: note = Synthetic: >NC_001563.2-cand-10560-10639
  source 1..80: mol_type = other DNA
aggaggaccccacgtgctttagcctcaaagcccagtgtcagaccacactttaatgtgccactctgcggagagtgcagtct

SEQ ID NO: 4264 - DNA, 80 bp, synthetic construct
  misc_feature 1..80: note = Synthetic: >NC_001563.2-cand-10640-10719
  source 1..80: mol_type = other DNA
gcgatagtgccccaggtggactgggttaacaaaggcaaaacatcgccccacgcggccataaccctggctatggtgttaac

SEQ ID NO: 4265 - DNA, 80 bp, synthetic construct
  misc_feature 1..80: note = Synthetic: >NC_001563.2-cand-10710-10789
  source 1..80: mol_type = other DNA
tggtgttaaccagggagaagggactagaggttagaggagaccccgcgtaaaaaagtgcacggcccaacttggctgaagct

SEQ ID NO: 4266 - DNA, 80 bp, synthetic construct
  misc_feature 1..80: note = Synthetic: >NC_001563.2-cand-10790-10869
  source 1..80: mol_type = other DNA
gtaagccaagggaaggactagaggttagaggagaccccgtgccaaaaacaccaaaagaaacagcatattgacacctggga

SEQ ID NO: 4267 - DNA, 80 bp, synthetic construct
  misc_feature 1..80: note = Synthetic: >NC_001563.2-cand-10800-10879
  source 1..80: mol_type = other DNA
ggaaggactagaggttagaggagaccccgtgccaaaaacaccaaaagaaacagcatattgacacctgggatagactaggg

SEQ ID NO: 4268 - DNA, 80 bp, synthetic construct
  misc_feature 1..80: note = Synthetic: >NC_001611.1-cand-10-89
  source 1..80: mol_type = other DNA
ttgttgaacgttattgtttgagaaatagttgatgcatcagaatggtttgcatttattgtagacgtaataatgcactacat

SEQ ID NO: 4269 - DNA, 80 bp, synthetic construct
  misc_feature 1..80: note = Synthetic: >NC_001611.1-cand-90470-90549
  source 1..80: mol_type = other DNA
tacaaagttcgtcgaagatagtccagaaatggaagagttaataaatatcattaacgatatccaaccattaacggatgaaa

SEQ ID NO: 4270 - DNA, 80 bp, synthetic construct
  misc_feature 1..80: note = Synthetic: >NC_001611.1-cand-90610-90689
  source 1..80: mol_type = other DNA
aaggatgtttaacattcttttttggagaaacggcaactggaaagtcgacaaccaaacgtttgttaaagtctgctatcagt

SEQ ID NO: 4271 - DNA, 80 bp, synthetic construct
  misc_feature 1..80: note = Synthetic: >NC_001611.1-cand-90690-90769
  source 1..80: mol_type = other DNA
gatctgtttgttgagacgggtcaaacaattttaacagatgtattggataaaggacctaatccatttatcgctaacatgca

SEQ ID NO: 4272 - DNA, 80 bp, synthetic construct
  misc_feature 1..80: note = Synthetic: >NC_001611.1-cand-90770-90849
  source 1..80: mol_type = other DNA
tttgaaaagatctgtgttctgtagcgaactacctgattttgcatgtagtgggacaaagaaaatcagatctgataatatta

SEQ ID NO: 4273 - DNA, 80 bp, synthetic construct
  misc_feature 1..80: note = Synthetic: >NC_001611.1-cand-91000-91079
  source 1..80: mol_type = other DNA
gattcagaacacacttttctcaaccttctggtagagaggctgctgaaaataatgacgcgtacgataaagtcaaactatta

SEQ ID NO: 4274 - DNA, 80 bp, synthetic construct
  misc_feature 1..80: note = Synthetic: >NC_001611.1-cand-91090-91169
  source 1..80: mol_type = other DNA
tagatggtaaaatacaaaataatagatatagattcgcatttctatacttgttggtgaaatggtacagaaaatatcatgtt

SEQ ID NO: 4275 - DNA, 80 bp, synthetic construct
  misc_feature 1..80: note = Synthetic: >NC_001611.1-cand-91250-91329
  source 1..80: mol_type = other DNA
tagctctgtaaagcatattccattaatgacggacctctccaaaaagggatatatattgcacgataatgtggttactcttc

SEQ ID NO: 4276 - DNA, 80 bp, synthetic construct
  misc_feature 1..80: note = Synthetic: >NC_001611.1-cand-91650-91729
  source 1..80: mol_type = other DNA
attgttccatattatgggatcaggtaaaacaataatcgctttgttgttcgccttgatagcttccagatttaaaaaggttc

SEQ ID NO: 4277 - DNA, 80 bp, synthetic construct
  misc_feature 1..80: note = Synthetic: >NC_001611.1-cand-91730-91809
  source 1..80: mol_type = other DNA
acattctagtgccgaacattaacattttgaaaatttttaattataatatgggtgtagctatgaacttgtttaatgatgaa

SEQ ID NO: 4278 - DNA, 80 bp, synthetic construct
  misc_feature 1..80: note = Synthetic: >NC_001611.1-cand-91890-91969
  source 1..80: mol_type = other DNA
cggattatctcgctacaataactctatttttatcgttgatgaggcacataatatctttgggaataatactggagaactta

SEQ ID NO: 4279 - DNA, 80 bp, synthetic construct
  misc_feature 1..80: note = Synthetic: >NC_001611.1-cand-91970-92049
  source 1..80: mol_type = other DNA
tgaccgtaataaaaaataaaaacaagattccttttctactattgtctggatctcccattactaacacacctaatactctg

SEQ ID NO: 4280 - DNA, 80 bp, synthetic construct
  misc_feature 1..80: note = Synthetic: >NC_001611.1-cand-92130-92209
  source 1..80: mol_type = other DNA
acttcttaacgaacgcggtgtgaatgtactcaaggatttgcttaaaggaagaatatcatattacgaaatgcctgataaag

SEQ ID NO: 4281 - DNA, 80 bp, synthetic construct
  misc_feature 1..80: note = Synthetic: >NC_001611.1-cand-92450-92529
  source 1..80: mol_type = other DNA
taaataatggtgtgttatacggagaagaattggtaacgttaaacattagttccaaatttaaatactttatcaatcggata

SEQ ID NO: 4282 - DNA, 80 bp, synthetic construct
  misc_feature 1..80: note = Synthetic: >NC_001611.1-cand-92530-92609
  source 1..80: mol_type = other DNA
cagacactcaacggaaaacattttatatacttttctaattctacatatggtggattagtaattaaatatatcatgctcag

SEQ ID NO: 4283 - DNA, 80 bp, synthetic construct
  misc_feature 1..80: note = Synthetic: >NC_001611.1-cand-92930-93009
  source 1..80: mol_type = other DNA
atgtatatcttttagcagccgtatattccgatttcaatgacgaagtgacgtcattaaacgattacacgcaggatgaattg

SEQ ID NO: 4284 - DNA, 80 bp, synthetic construct
  misc_feature 1..80: note = Synthetic: >NC_001611.1-cand-93310-93389
  source 1..80: mol_type = other DNA
gtatttgataaatctcttttatacaaatacgaaaacgatattattacagtaccgtttagactttcctacgaaccgtttgt

SEQ ID NO: 4285 - DNA, 80 bp, synthetic construct
  misc_feature 1..80: note = Synthetic: >NC_001611.1-cand-102640-102719
  source 1..80: mol_type = other DNA
ggtgtaacattctccaccaaacatattcttattctgacgtcgttctacataaaacatcattgctccattaacgataacag

SEQ ID NO: 4286 - DNA, 80 bp, synthetic construct
  misc_feature 1..80: note = Synthetic: >NC_001611.1-cand-102740-102819
  source 1..80: mol_type = other DNA
atcacattagttcccaatgaatcaatgtgtgtaactccagaacatcttccatagcctatgttaggaggagcgaacactac

SEQ ID NO: 4287 - DNA, 80 bp, synthetic construct
  misc_feature 1..80: note = Synthetic: >NC_001611.1-cand-102810-102889
  source 1..80: mol_type = other DNA
cgaacactactcttccactattgccatcgaatgccatagaataaatatccttggaattgatagaaatcggactgtcggat

SEQ ID NO: 4288 - DNA, 80 bp, synthetic construct
  misc_feature 1..80: note = Synthetic: >NC_001611.1-cand-102890-102969
  source 1..80: mol_type = other DNA
gttgtgatcatcttcataggattaacaacaatgtatggtgccgcctgaagtttcatatcgtaactgatgccgtttatagg

SEQ ID NO: 4289 - DNA, 80 bp, synthetic construct
  misc_feature 1..80: note = Synthetic: >NC_001611.1-cand-102970-103049
  source 1..80: mol_type = other DNA
tctagccacagaaaccaatgtaggtctaaatccaactatagacaaaatagaagccaatatctgttcctcatctgtcataa

SEQ ID NO: 4290 - DNA, 80 bp, synthetic construct
  misc_feature 1..80: note = Synthetic: >NC_001611.1-cand-103090-103169
  source 1..80: mol_type = other DNA
atctaccgcatcatcatcgttacaataaaaaattcccattctaatgttcataattgcttttctaatcatggtatgcatgt

SEQ ID NO: 4291 - DNA, 80 bp, synthetic construct
  misc_feature 1..80: note = Synthetic: >NC_001611.1-cand-103130-103209
  source 1..80: mol_type = other DNA
ctaatgttcataattgcttttctaatcatggtatgcatgtttgccctttgaatctctgtggaaattagatctgatacacc

SEQ ID NO: 4292 - DNA, 80 bp, synthetic construct
  misc_feature 1..80: note = Synthetic: >NC_001611.1-cand-103200-103279
  source 1..80: mol_type = other DNA
ctgatacacctgtaatcactatcggattatcctccgtaagacgattaaccaacaacatataattataagactttactctt

SEQ ID NO: 4293 - DNA, 80 bp, synthetic construct
  misc_feature 1..80: note = Synthetic: >NC_001611.1-cand-103280-103359
  source 1..80: mol_type = other DNA
ctaaattcataaagttgctggattagactatatgtgtctccatgtacatacgcgttctcaagcgcgggaagtttaatgcc

SEQ ID NO: 4294 - DNA, 80 bp, synthetic construct
  misc_feature 1..80: note = Synthetic: >NC_001611.1-cand-103490-103569
  source 1..80: mol_type = other DNA
tgatgattagacggagagtatattttatctaactctttgagttggtcaccaattctaggactagctcgagaatgaataag

SEQ ID NO: 4295 - DNA, 80 bp, synthetic construct
  misc_feature 1..80: note = Synthetic: >NC_001611.1-cand-103570-103649
  source 1..80: mol_type = other DNA
tactaaaggatgagtacatttcacagaaacactggcgttgttcaatgtgctctttacatgggtaaggagttgaaatagct

SEQ ID NO: 4296 - DNA, 80 bp, synthetic construct
  misc_feature 1..80: note = Synthetic: >NC_001611.1-cand-103650-103729
  source 1..80: mol_type = other DNA
cgtttctatttgttctgacaatatttagtttattcataatgttaagcatatcctgaatagtaaaattagatgtgtcatac

SEQ ID NO: 4297 - DNA, 80 bp, synthetic construct
  misc_feature 1..80: note = Synthetic: >NC_001611.1-cand-103810-103889
  source 1..80: mol_type = other DNA
atctatagaaaccatacaatcctttttggtagtctgttgagcttgatcatttcctgcacgtttaggtttggtacgttgat

SEQ ID NO: 4298 - DNA, 80 bp, synthetic construct
  misc_feature 1..80: note = Synthetic: >NC_001611.1-cand-104330-104409
  source 1..80: mol_type = other DNA
atttggattttgttgtgctgttgtacatactgtaccaccagtaggtgtaggagtacatacagtggccacaataggaggtt

SEQ ID NO: 4299 - DNA, 80 bp, synthetic construct
  misc_feature 1..80: note = Synthetic: >NC_001611.1-cand-104410-104489
  source 1..80: mol_type = other DNA
gaggaggtgtaactgtcggagtagtacaagaaatacttccatccgattgttgtgtacatgtagttgttggtaacgtctga

SEQ ID NO: 4300 - DNA, 80 bp, synthetic construct
  misc_feature 1..80: note = Synthetic: >NC_001611.1-cand-104490-104569
  source 1..80: mol_type = other DNA
gaaggttgggtagatggcgtcgtcgtcgtcttttgatctttattaaatttagagataatatcctgaacagcattgatcgg

SEQ ID NO: 4301 - DNA, 80 bp, synthetic construct
  misc_feature 1..80: note = Synthetic: >NC_001722.1-cand-2030-2109
  source 1..80: mol_type = other DNA
agacccagcagtaaaaaattggatgacccaaacgctgctaatacagaatgccaacccagactgcaagttagtactaaaag

SEQ ID NO: 4302 - DNA, 80 bp, synthetic construct
  misc_feature 1..80: note = Synthetic: >NC_001722.1-cand-2160-2239
  source 1..80: mol_type = other DNA
gtaggcggaccaggccagaaagccaggctaatggctgaagccctaaaagaggctatgggaccaagccctatcccatttgc

SEQ ID NO: 4303 - DNA, 80 bp, synthetic construct
  misc_feature 1..80: note = Synthetic: >NC_001722.1-cand-2190-2269
  source 1..80: mol_type = other DNA
atggctgaagccctaaaagaggctatgggaccaagccctatcccatttgcagcagcccaacaaagaaaggcaattaggta

SEQ ID NO: 4304 - DNA, 80 bp, synthetic construct
  misc_feature 1..80: note = Synthetic: >NC_001722.1-cand-2270-2349
  source 1..80: mol_type = other DNA
ttggaactgtggaaaggagggacactcggcaagacagtgccgagcacctagaagacagggctgctggaagtgtggcaagc

SEQ ID NO: 4305 - DNA, 80 bp, synthetic construct
  misc_feature 1..80: note = Synthetic: >NC_001722.1-cand-2330-2409
  source 1..80: mol_type = other DNA
ctgctggaagtgtggcaagccaggacacatcatggcaaactgcccggaaagacaggcaggttttttagggttgggcccac

SEQ ID NO: 4306 - DNA, 80 bp, synthetic construct
  misc_feature 1..80: note = Synthetic: >NC_001722.1-cand-2460-2539
  source 1..80: mol_type = other DNA
ataccaacagcacctccggcagatccagcagcggaactgttggagagatatatgcagcaagggagaaagcagagggagca

SEQ ID NO: 4307 - DNA, 80 bp, synthetic construct
  misc_feature 1..80: note = Synthetic: >NC_001722.1-cand-2510-2589
  source 1..80: mol_type = other DNA
tatgcagcaagggagaaagcagagggagcagagggagagaccatacaaagaggtgacggaggacttgctgcacctcgagc

SEQ ID NO: 4308 - DNA, 80 bp, synthetic construct
  misc_feature 1..80: note = Synthetic: >NC_001722.1-cand-2590-2669
  source 1..80: mol_type = other DNA
agagagagacacctcacagagaggagacagaggacttgctgcacctcaattctctctttggaaaagaccagtagtcacag

SEQ ID NO: 4309 - DNA, 80 bp, synthetic construct
  misc_feature 1..80: note = Synthetic: >NC_001722.1-cand-2630-2709
  source 1..80: mol_type = other DNA
gcacctcaattctctctttggaaaagaccagtagtcacagcgtacatcgaggatcagccggtagaagtcttactagacac

SEQ ID NO: 4310 - DNA, 80 bp, synthetic construct
  misc_feature 1..80: note = Synthetic: >NC_001722.1-cand-2790-2869
  source 1..80: mol_type = other DNA
ttataaacaccaaagaatacaaaaatgtagaaataaaagtactaaataaaagagtaagagccaccataatgacaggagat

SEQ ID NO: 4311 - DNA, 80 bp, synthetic construct
  misc_feature 1..80: note = Synthetic: >NC_001722.1-cand-2830-2909
  source 1..80: mol_type = other DNA
actaaataaaagagtaagagccaccataatgacaggagataccccaatcaacatctttggcagaaatattctgacagcct

SEQ ID NO: 4312 - DNA, 80 bp, synthetic construct
  misc_feature 1..80: note = Synthetic: >NC_001722.1-cand-2910-2989
  source 1..80: mol_type = other DNA
taggcatgtcattaaatttaccagttgccaagatagagccaataaaagtaacattgaagccagggaaagatggaccaagg

SEQ ID NO: 4313 - DNA, 80 bp, synthetic construct
  misc_feature 1..80: note = Synthetic: >NC_001722.1-cand-2990-3069
  source 1..80: mol_type = other DNA
ctgaaacaatggcccctaacaaaagagaaaatagaagcactaaaagagatctgtgaaaaaatggaaaaagagggccagct

SEQ ID NO: 4314 - DNA, 80 bp, synthetic construct
  misc_feature 1..80: note = Synthetic: >NC_001722.1-cand-3070-3149
  source 1..80: mol_type = other DNA
agaagaggcacctccaactaatccttataatacccccacatttgcaattaagaaaaaggacaagaacaaatggaggatgc

SEQ ID NO: 4315 - DNA, 80 bp, synthetic construct
  misc_feature 1..80: note = Synthetic: >NC_001722.1-cand-3150-3229
  source 1..80: mol_type = other DNA
tgatagattttagagaactaaataaggtgactcaagatttcacagaaattcagctaggaattccacacccggcaggacta

SEQ ID NO: 4316 - DNA, 80 bp, synthetic construct
  misc_feature 1..80: note = Synthetic: >NC_001722.1-cand-3270-3349
  source 1..80: mol_type = other DNA
cctatttttccataccactacatgaagattttaggcagtatactgcatttaccctaccagcagtaaacaatatggaacca

SEQ ID NO: 4317 - DNA, 80 bp, synthetic construct
  misc_feature 1..80: note = Synthetic: >NC_001722.1-cand-8480-8559
  source 1..80: mol_type = other DNA
gggatgtgcgtttagacaggtctgccacactactgtaccgtgggtaaatgactctttatcgcctgactggaaaaatatga

SEQ ID NO: 4318 - DNA, 80 bp, synthetic construct
  misc_feature 1..80: note = Synthetic: >NC_001722.1-cand-8500-8579
  source 1..80: mol_type = other DNA
tctgccacactactgtaccgtgggtaaatgactctttatcgcctgactggaaaaatatgacatggcaggagtgggagaaa

SEQ ID NO: 4319 - DNA, 80 bp, synthetic construct
  misc_feature 1..80: note = Synthetic: >NC_001722.1-cand-8580-8659
  source 1..80: mol_type = other DNA
caagtccgctacctagaggcaaatatcagtcaaagtttagaagaagcccaaattcaacaagaaaagaatatgtatgaatt

SEQ ID NO: 4320 - DNA, 80 bp, synthetic construct
  misc_feature 1..80: note = Synthetic: >NC_001722.1-cand-8660-8739
  source 1..80: mol_type = other DNA
acaaaaattaaatagctgggatattcttggcaactggtttgacttaacctcctgggtcaagtatattcaatatggagtgc

SEQ ID NO: 4321 - DNA, 80 bp, synthetic construct
  misc_feature 1..80: note = Synthetic: >NC_001722.1-cand-8740-8819
  source 1..80: mol_type = other DNA
atatagtagtgggaataatagctttaagaatagcaatctatgtagtgcaattgttaagtagatttagaaagggctatagg

SEQ ID NO: 4322 - DNA, 80 bp, synthetic construct
  misc_feature 1..80: note = Synthetic: >NC_001722.1-cand-8790-8869
  source 1..80: mol_type = other DNA
ttgttaagtagatttagaaagggctataggcctgttttctcttccccccccggttatctccaacagatccatatccacaa

SEQ ID NO: 4323 - DNA, 80 bp, synthetic construct
  misc_feature 1..80: note = Synthetic: >NC_001722.1-cand-8900-8979
  source 1..80: mol_type = other DNA
agaagaagacgtcggaggcgacagtggttacgacttgtggccttggccaataaactatgtgcagttcctgatccacctac

SEQ ID NO: 4324 - DNA, 80 bp, synthetic construct
  misc_feature 1..80: note = Synthetic: >NC_001722.1-cand-8980-9059
  source 1..80: mol_type = other DNA
tgactcgcctcttgatcgggctatacaacatctgcagagacttactatccaagaactccccgacccgccgactgatctcc

SEQ ID NO: 4325 - DNA, 80 bp, synthetic construct
  misc_feature 1..80: note = Synthetic: >NC_001722.1-cand-9060-9139
  source 1..80: mol_type = other DNA
cagagtctaacagcaatcagggactggctgagacttaaggcggcccaactgcaatatgggtgcgagtggatccaagaagc

SEQ ID NO: 4326 - DNA, 80 bp, synthetic construct
  misc_feature 1..80: note = Synthetic: >NC_001722.1-cand-9110-9189
  source 1..80: mol_type = other DNA
gcaatatgggtgcgagtggatccaagaagctttccaagcattcgcgaggactacgagagagactcttgcgggcgcgtggg

SEQ ID NO: 4327 - DNA, 80 bp, synthetic construct
  misc_feature 1..80: note = Synthetic: >NC_001722.1-cand-9230-9309
  source 1..80: mol_type = other DNA
actcgcagttccaagaagaatcaggcagggagcagaactcgccctcctgtgagggacagcagtatcagcagggagagtac

SEQ ID NO: 4328 - DNA, 80 bp, synthetic construct
  misc_feature 1..80: note = Synthetic: >NC_001722.1-cand-9300-9379
  source 1..80: mol_type = other DNA
gggagagtacatgaacagcccatggagaaacccagcaacagaaagacagaaagatttgtataggcagcaaaatatggatg

SEQ ID NO: 4329 - DNA, 80 bp, synthetic construct
  misc_feature 1..80: note = Synthetic: >NC_001722.1-cand-9380-9459
  source 1..80: mol_type = other DNA
atgtagattctgatgatgatgacctaataggagttcctgttacaccaagagtaccacggagagaaatgacctataaattg

SEQ ID NO: 4330 - DNA, 80 bp, synthetic construct
  misc_feature 1..80: note = Synthetic: >NC_001722.1-cand-9500-9579
  source 1..80: mol_type = other DNA
tgcaagggatgttttacagtaggaggagacatagaatcctagacatatacctagaaaaagaggaagggataataccagat

SEQ ID NO: 4331 - DNA, 80 bp, synthetic construct
  misc_feature 1..80: note = Synthetic: >NC_001722.1-cand-9540-9619
  source 1..80: mol_type = other DNA
agacatatacctagaaaaagaggaagggataataccagattggcagaattatactcatgggccaggagtaaggtacccaa

SEQ ID NO: 4332 - DNA, 80 bp, synthetic construct
  misc_feature 1..80: note = Synthetic: >NC_001722.1-cand-9620-9699
  source 1..80: mol_type = other DNA
tgtacttcgggtggctgtggaagctagtatcagtagaactctcacaagaggcagaggaagatgaggccaactgcttagta

SEQ ID NO: 4333 - DNA, 80 bp, synthetic construct
  misc_feature 1..80: note = Synthetic: >NC_001897.1-cand-6440-6519
  source 1..80: mol_type = other DNA
atttaccaaactccatgttactattcagggcttgctgttggtatcaatccgtacagagattggcacttcatgattaatgc

SEQ ID NO: 4334 - DNA, 80 bp, synthetic construct
  misc_feature 1..80: note = Synthetic: >NC_001897.1-cand-6520-6599
  source 1..80: mol_type = other DNA
actcaatgattacaattatgaaatggactactcccaatatgatggatcacttagttcaatgctattgtgggaggctgtgc

SEQ ID NO: 4335 - DNA, 80 bp, synthetic construct
  misc_feature 1..80: note = Synthetic: >NC_001897.1-cand-6600-6679
  source 1..80: mol_type = other DNA
aggtcctagcctattgccatgattcacctgatctcgttatgcaactacacaaaccagtgattgactctgatcacgtggtc

SEQ ID NO: 4336 - DNA, 80 bp, synthetic construct
  misc_feature 1..80: note = Synthetic: >NC_001897.1-cand-6680-6759
  source 1..80: mol_type = other DNA
tttaacgagaggtggctgatacatggtggtatgccttcaggatctccctgtaccacagttctgaattcactttgtaatct

SEQ ID NO: 4337 - DNA, 80 bp, synthetic construct
  misc_feature 1..80: note = Synthetic: >NC_001897.1-cand-6740-6819
  source 1..80: mol_type = other DNA
ctgaattcactttgtaatctgatgatgtgcatctacactacaaatctaattagccctgggattgattgcttaccaatagt

SEQ ID NO: 4338 - DNA, 80 bp, synthetic construct
  misc_feature 1..80: note = Synthetic: >NC_001897.1-cand-6840-6919
  source 1..80: mol_type = other DNA
tatcccttgacaaggaaatagaaccagagagactgcaaagtatcatggcagaatcatttggagctgaagtgaccggttca

SEQ ID NO: 4339 - DNA, 80 bp, synthetic construct
  misc_feature 1..80: note = Synthetic: >NC_001897.1-cand-6930-7009
  source 1..80: mol_type = other DNA
aaccaccatcattgaaaccaaggatggaggttgaattccttaagcgcaagccaggttactttccagagtctacatttata

SEQ ID NO: 4340 - DNA, 80 bp, synthetic construct
  misc_feature 1..80: note = Synthetic: >NC_001897.1-cand-7010-7089
  source 1..80: mol_type = other DNA
gtaggtaaattggacactgaaaacatgatacaacatctaatgtggatgaaaaatttcagcacatttaagcagcaactcca

SEQ ID NO: 4341 - DNA, 80 bp, synthetic construct
  misc_feature 1..80: note = Synthetic: >NC_001897.1-cand-7090-7169
  source 1..80: mol_type = other DNA
atcctacttgatggagttatgcctccatggaaaggacacttaccaacactacgtcaaaatcttgaatccttatctcaagg

SEQ ID NO: 4342 - DNA, 80 bp, synthetic construct
  misc_feature 1..80: note = Synthetic: >NC_001897.1-cand-7170-7249
  source 1..80: mol_type = other DNA
aatggaatattccagtggatgattatgaagtggttattggtaagttggtgcccatggtgtttgattaaaattaatgtttt

SEQ ID NO: 4343 - DNA, 80 bp, synthetic construct
  misc_feature 1..80: note = Synthetic: >NC_001897.1-cand-7250-7329
  source 1..80: mol_type = other DNA
ggttttcttttgctatggactattcattaggatactaatttgattagaacactaatttggaatattggacataacaaaaa

SEQ ID NO: 4344 - DNA, 80 bp, synthetic construct
  misc_feature 1..80: note = Synthetic: >NC_001906.3-cand-10-89
  source 1..80: mol_type = other DNA
aatatggatacgtgttaaaaaactgcgtatgtttaaaacttaggaaccaagacagtgacaattggtcttggtattggaca

SEQ ID NO: 4345 - DNA, 80 bp, synthetic construct
  misc_feature 1..80: note = Synthetic: >NC_001906.3-cand-90-169
  source 1..80: mol_type = other DNA
attgttcaaggttccaaaatgagtgatatatttgacgaggcggctagtttcagaagctatcaatcgaaactcggtcgaga

SEQ ID NO: 4346 - DNA, 80 bp, synthetic construct
  misc_feature 1..80: note = Synthetic: >NC_001906.3-cand-170-249
  source 1..80: mol_type = other DNA
tgggcgggcaagtgcggcaacagctactttgactactaagataagaatttttgtaccagcaactaatagcccagaactga

SEQ ID NO: 4347 - DNA, 80 bp, synthetic construct
  misc_feature 1..80: note = Synthetic: >NC_001906.3-cand-250-329
  source 1..80: mol_type = other DNA
gatgggagttgactttgttcgctctcgatgtaatcagatcaccaagtgcagcagaatcaatgaagattggtgctgctttc

SEQ ID NO: 4348 - DNA, 80 bp, synthetic construct
  misc_feature 1..80: note = Synthetic: >NC_001906.3-cand-330-409
  source 1..80: mol_type = other DNA
actctgatatcaatgtactcagaaagacctggcgctttaatcaggagcctccttaacgacccagacatagaagctgtcat

SEQ ID NO: 4349 - DNA, 80 bp, synthetic construct
  misc_feature 1..80: note = Synthetic: >NC_001906.3-cand-5610-5689
  source 1..80: mol_type = other DNA
attactaaattgaatgactccggcatctacatgatcccaaggacaatgctagaattcagaaggaacaacgctattgcttt

SEQ ID NO: 4350 - DNA, 80 bp, synthetic construct
  misc_feature 1..80: note = Synthetic: >NC_001906.3-cand-5690-5769
  source 1..80: mol_type = other DNA
caatcttctagtatacctcaaaatcgatgcagatcttgcaaaagctggaatccaaggaagcttcgacaaagacggaacca

SEQ ID NO: 4351 - DNA, 80 bp, synthetic construct
  misc_feature 1..80: note = Synthetic: >NC_001906.3-cand-5770-5849
  source 1..80: mol_type = other DNA
aagtggcatctttcatgctccatctcgggaattttgtccgacgagctgggaagtactattctgtcgaatactgcaagaga

SEQ ID NO: 4352 - DNA, 80 bp, synthetic construct
  misc_feature 1..80: note = Synthetic: >NC_001906.3-cand-5810-5889
  source 1..80: mol_type = other DNA
acgagctgggaagtactattctgtcgaatactgcaagagaaagattgacagaatgaagctccagttctctcttggttcaa

SEQ ID NO: 4353 - DNA, 80 bp, synthetic construct
  misc_feature 1..80: note = Synthetic: >NC_001906.3-cand-5930-6009
  source 1..80: mol_type = other DNA
cagtaagagattatttgcccagatgggtttccagaagaacctttgcttttctctaatggacatcaatccttggctcaaca

SEQ ID NO: 4354 - DNA, 80 bp, synthetic construct
  misc_feature 1..80: note = Synthetic: >NC_001906.3-cand-6010-6089
  source 1..80: mol_type = other DNA
gactgacttggaacaacagttgtgagatcagcagggtggcagctgtactgcagccctcggtgccacgtgaattcatgatc

SEQ ID NO: 4355 - DNA, 80 bp, synthetic construct
  misc_feature 1..80: note = Synthetic: >NC_001906.3-cand-6050-6129
  source 1..80: mol_type = other DNA
agctgtactgcagccctcggtgccacgtgaattcatgatctatgacgatgtgttcattgacaacacagggaagatcctaa

SEQ ID NO: 4356 - DNA, 80 bp, synthetic construct
  misc_feature 1..80: note = Synthetic: >NC_001906.3-cand-6170-6249
  source 1..80: mol_type = other DNA
taaattaaccagataaccactttaatcttcattctaaagaatgccacagtgtcagtaagttacacaggtacaatacataa

SEQ ID NO: 4357 - DNA, 80 bp, synthetic construct
  misc_feature 1..80: note = Synthetic: >NC_001906.3-cand-6250-6329
  source 1..80: mol_type = other DNA
tctaaattcatgtcttcccttcaaaggattgatttggacctttaaaatagtagaggtaagaattgagtatatccaatatt

SEQ ID NO: 4358 - DNA, 80 bp, synthetic construct
  misc_feature 1..80: note = Synthetic: >NC_001906.3-cand-6330-6409
  source 1..80: mol_type = other DNA
aagaaaaacttaggagccaagttttggtctctttagattaatcaagctgtttgtcaatctgtattcgtaaggttgttaaa

SEQ ID NO: 4359 - DNA, 80 bp, synthetic construct
  misc_feature 1..80: note = Synthetic: >NC_001906.3-cand-6410-6489
  source 1..80: mol_type = other DNA
ataatctgtgtctatcctttagatatccacttgggttgtagatatagtcaatcaactggtctgacaagtcataccccaaa

SEQ ID NO: 4360 - DNA, 80 bp, synthetic construct
  misc_feature 1..80: note = Synthetic: >NC_001906.3-cand-6490-6569
  source 1..80: mol_type = other DNA
caatccaaatctggaatcacctgttcgctcagtagtaatatcttggcaaacactacactaacctcgtctgtactgtctga

SEQ ID NO: 4361 - DNA, 80 bp, synthetic construct
  misc_feature 1..80: note = Synthetic: >NC_001906.3-cand-6570-6649
  source 1..80: mol_type = other DNA
aagtggtcaggattgattgacagttattatttatctttaagcaatggctacacaagaggtcaggctaaagtgtttgctct

SEQ ID NO: 4362 - DNA, 80 bp, synthetic construct
  misc_feature 1..80: note = Synthetic: >NC_001906.3-cand-6650-6729
  source 1..80: mol_type = other DNA
gtgggatcatagttctggttttgtcattagaagggctagggatactacattatgagaaacttagtaagatagggctggtt

SEQ ID NO: 4363 - DNA, 80 bp, synthetic construct
  misc_feature 1..80: note = Synthetic: >NC_001906.3-cand-6730-6809
  source 1..80: mol_type = other DNA
aaaggtattacaagaaagtacaagattaagagtaaccctttgaccaaggatattgtgatcaaaatgatccctaatgtctc

SEQ ID NO: 4364 - DNA, 80 bp, synthetic construct
  misc_feature 1..80: note = Synthetic: >NC_001906.3-cand-6810-6889
  source 1..80: mol_type = other DNA
gaatgtctcaaagtgcaccgggactgttatggagaattacaaaagcagactcacagggattctctcaccaatcaaaggcg

SEQ ID NO: 4365 - DNA, 80 bp, synthetic construct
  misc_feature 1..80: note = Synthetic: >NC_002206.1-cand-330-409
  source 1..80: mol_type = other DNA
attataaaaccaagaggtttatcgaagtcggaataacaaagggattggctgatgattacttttggaaaaagaaagaaaag

SEQ ID NO: 4366 - DNA, 80 bp, synthetic construct
  misc_feature 1..80: note = Synthetic: >NC_002206.1-cand-430-509
  source 1..80: mol_type = other DNA
gatgatattcagctacaatcaagactactcgttaagtgatgaatcttcattggatgaggaaggaaaagggagagtgctaa

SEQ ID NO: 4367 - DNA, 80 bp, synthetic construct
  misc_feature 1..80: note = Synthetic: >NC_002206.1-cand-490-569
  source 1..80: mol_type = other DNA
aggaaaagggagagtgctaagcagactcacagaacttcaggctgagttaagtttgaaaaacctatggcaagttctaatag

SEQ ID NO: 4368 - DNA, 80 bp, synthetic construct
  misc_feature 1..80: note = Synthetic: >NC_002206.1-cand-590-669
  source 1..80: mol_type = other DNA
ggaattgacttcaaacttggacaaacaatatctaaactgaggaatatatctgttccagctggtttctccaattttgaagg

SEQ ID NO: 4369 - DNA, 80 bp, synthetic construct
  misc_feature 1..80: note = Synthetic: >NC_002206.1-cand-670-749
  source 1..80: mol_type = other DNA
gatgagaagttacatagacaacatagaccctaaaggagcaatagagagaaatctagcaaggatgtctcccttagtatcag

SEQ ID NO: 4370 - DNA, 80 bp, synthetic construct
  misc_feature 1..80: note = Synthetic: >NC_002206.1-cand-760-839
  source 1..80: mol_type = other DNA
aaagttgaaatgggaggacctgagacccatagggcctcacatttacaaccatgagctaccagaagttccatataatgcct

SEQ ID NO: 4371 - DNA, 80 bp, synthetic construct
  misc_feature 1..80: note = Synthetic: >NC_002206.1-cand-870-949
  source 1..80: mol_type = other DNA
ccaatatgactgaaggaaagtccaagaaaccgaagaccttagctaaggaatgtctagaaaggtattcaacactacgtgat

SEQ ID NO: 4372 - DNA, 80 bp, synthetic construct
  misc_feature 1..80: note = Synthetic: >NC_002206.1-cand-930-1009
  source 1..80: mol_type = other DNA
ggtattcaacactacgtgatcaaactgacccaatattgataatgaaaagcgaaaaagctaacgaaaacttcttatggagg

SEQ ID NO: 4373 - DNA, 80 bp, synthetic construct
  misc_feature 1..80: note = Synthetic: >NC_002206.1-cand-1010-1089
  source 1..80: mol_type = other DNA
ttatggagggactgtgtaaatacaataagcaatgaggaaacaggcaacgaattacagaaaaccaattatgccaagtgggc

SEQ ID NO: 4374 - DNA, 80 bp, synthetic construct
  misc_feature 1..80: note = Synthetic: >NC_002206.1-cand-1090-1169
  source 1..80: mol_type = other DNA
cacaggagatggactaacataccaaaaaataatgaaagaagtagcaatagatgacgaaacgatgtaccaagaagaaccca

SEQ ID NO: 4375 - DNA, 80 bp, synthetic construct
  misc_feature 1..80: note = Synthetic: >NC_002206.1-cand-1170-1249
  source 1..80: mol_type = other DNA
aaatacccaataaatgtagagtggctgcttgggttcaggcagagatgaatctactgagtactctgacaagtaaaagggcc

SEQ ID NO: 4376 - DNA, 80 bp, synthetic construct
  misc_feature 1..80: note = Synthetic: >NC_002206.1-cand-1260-1339
  source 1..80: mol_type = other DNA
cagaaatagggccagatgtagcacccgtggagcatgtagggagtgaaagaaggaaatactttgttaatgaaatcaactac

SEQ ID NO: 4377 - DNA, 80 bp, synthetic construct
  misc_feature 1..80: note = Synthetic: >NC_002206.1-cand-1340-1419
  source 1..80: mol_type = other DNA
tgtaaagcctctacagttatgatgaagtatgtactttttcacacttcattattaaatgaaagcaatgctagtatgggaaa

SEQ ID NO: 4378 - DNA, 80 bp, synthetic construct
  misc_feature 1..80: note = Synthetic: >NC_002206.1-cand-1380-1459
  source 1..80: mol_type = other DNA
acacttcattattaaatgaaagcaatgctagtatgggaaaatataaagtaataccaatcaccaacagagtggtaaatgaa

SEQ ID NO: 4379 - DNA, 80 bp, synthetic construct
  misc_feature 1..80: note = Synthetic: >NC_002206.1-cand-1530-1609
  source 1..80: mol_type = other DNA
atgttgtaacagttgtgactttcgagtttagtagtacagatcctagagtggactcaggaaagtggccaaaatatactgtc

SEQ ID NO: 4380 - DNA, 80 bp, synthetic construct
  misc_feature 1..80: note = Synthetic: >NC_002206.1-cand-1580-1659
  source 1..80: mol_type = other DNA
gactcaggaaagtggccaaaatatactgtctttaaaattggctccctatttgtgagtggaagagaaaaacctgtgtacct

SEQ ID NO: 4381 - DNA, 80 bp, synthetic construct
  misc_feature 1..80: note = Synthetic: >NC_003310.1-cand-6700-6779
  source 1..80: mol_type = other DNA
tagattatttttttaaatactgatcctcacaattccgtgatgtagcagtagttggtgcatggtctatatcgttaaaatgt

SEQ ID NO: 4382 - DNA, 80 bp, synthetic construct
  misc_feature 1..80: note = Synthetic: >NC_003310.1-cand-6780-6859
  source 1..80: mol_type = other DNA
atcatatataatagttttctgacgtggagtacagaattttcgattaatgagttcatggtaaggaagggcaaatgtctgta

SEQ ID NO: 4383 - DNA, 80 bp, synthetic construct
  misc_feature 1..80: note = Synthetic: >NC_003310.1-cand-6860-6939
  source 1..80: mol_type = other DNA
tataatatacataagttaatagttttttatcatattttctaataccataataaaaattatcattatgtataatcatcact

SEQ ID NO: 4384 - DNA, 80 bp, synthetic construct
  misc_feature 1..80: note = Synthetic: >NC_003310.1-cand-6940-7019
  source 1..80: mol_type = other DNA
gtcgctatcattattgcgtttgtgtagttctgccctatcatctacatcactgtcactctcactatatcttctaaaattac

SEQ ID NO: 4385 - DNA, 80 bp, synthetic construct
  misc_feature 1..80: note = Synthetic: >NC_003310.1-cand-7020-7099
  source 1..80: mol_type = other DNA
aaacaactggatattcgataacagcatttgtgtagtttttgtcttttacagtatatacgttattgtcaaaatctaaacaa

SEQ ID NO: 4386 - DNA, 80 bp, synthetic construct
  misc_feature 1..80: note = Synthetic: >NC_003310.1-cand-7100-7179
  source 1..80: mol_type = other DNA
atattagcataatacatctataagatcaggatccatgttcgagcatactagccatgtatatttgtaacttcgtcatacag

SEQ ID NO: 4387 - DNA, 80 bp, synthetic construct
  misc_feature 1..80: note = Synthetic: >NC_003310.1-cand-7170-7249
  source 1..80: mol_type = other DNA
cgtcatacagcgttagatcaatagaataaacaatcgtgtgacgcaacttttttacgatctagttgtatgagtttatcgtt

SEQ ID NO: 4388 - DNA, 80 bp, synthetic construct
  misc_feature 1..80: note = Synthetic: >NC_003310.1-cand-7250-7329
  source 1..80: mol_type = other DNA
tacataagcaattaacggctttaacagatgatctgagtaataatatacctctgttatacgtttaatgttcacggtcttag

SEQ ID NO: 4389 - DNA, 80 bp, synthetic construct
  misc_feature 1..80: note = Synthetic: >NC_003310.1-cand-7320-7399
  source 1..80: mol_type = other DNA
acggtcttagtatttttagatatcaattgtgatttacaccatattcgactccctgtgtgcaacgttagaaattctaaatc

SEQ ID NO: 4390 - DNA, 80 bp, synthetic construct
  misc_feature 1..80: note = Synthetic: >NC_003310.1-cand-7480-7559
  source 1..80: mol_type = other DNA
ttattagtttatattactgaattaataatataaaattcccaatcttgtcataaacacaaaatccattaaaaatgtcgata

SEQ ID NO: 4391 - DNA, 80 bp, synthetic construct
  misc_feature 1..80: note = Synthetic: >NC_003310.1-cand-7640-7719
  source 1..80: mol_type = other DNA
agaaattacaaacgctacaacagatattccagctatcagattatgtggtccagagggagatggatattgtttacacggtg

SEQ ID NO: 4392 - DNA, 80 bp, synthetic construct
  misc_feature 1..80: note = Synthetic: >NC_003310.1-cand-7800-7879
  source 1..80: mol_type = other DNA
gtattagtagactatcaacgttcaggaaaaccagacactacaacatcatatatcccatctctaggtattgtgcttgtatt

SEQ ID NO: 4393 - DNA, 80 bp, synthetic construct
  misc_feature 1..80: note = Synthetic: >NC_003310.1-cand-7880-7959
  source 1..80: mol_type = other DNA
agtaggcattattattacgtgttgtctattatctgtttataggttcactcgaagaactaaactacctatacaagatatgg

SEQ ID NO: 4394 - DNA, 80 bp, synthetic construct
  misc_feature 1..80: note = Synthetic: >NC_003310.1-cand-7960-8039
  source 1..80: mol_type = other DNA
ttgtgttatattttttataaaatttttttatgagtatttttacaaaaatgtatatgtataaaaaaatactaagtatgcga

SEQ ID NO: 4395 - DNA, 80 bp, synthetic construct
  misc_feature 1..80: note = Synthetic: >NC_003310.1-cand-8040-8119
  source 1..80: mol_type = other DNA
tgtatcctgtattatttgtatttatctaaacaatacttctgcctctagatgggatacaaaaattttttatttcagcatat

SEQ ID NO: 4396 - DNA, 80 bp, synthetic construct
  misc_feature 1..80: note = Synthetic: >NC_003310.1-cand-8120-8199
  source 1..80: mol_type = other DNA
taaagtaaaatctagttaccttgaaaatgaatacagtgggtggttccgtatcaccagtaagaacataatagtcgaataca

SEQ ID NO: 4397 - DNA, 80 bp, synthetic construct
  misc_feature 1..80: note = Synthetic: >NC_003310.1-cand-14830-14909
  source 1..80: mol_type = other DNA
taatctaaataatcaaactcgtcatcccaattaaaataaatataatcagtacattgaatgggtatgatattgtacccata

SEQ ID NO: 4398 - DNA, 80 bp, synthetic construct
  misc_feature 1..80: note = Synthetic: >NC_003310.1-cand-14910-14989
  source 1..80: mol_type = other DNA
ctgtatgttgctacatgtaggtattcctttatccaataatagtttaaatacatctatattaggatttgatgttgtcgcgt

SEQ ID NO: 4399 - DNA, 80 bp, synthetic construct
  misc_feature 1..80: note = Synthetic: >NC_003310.1-cand-14990-15069
  source 1..80: mol_type = other DNA
atttctctacaatattaataccatttttgatactatttatttctatacctttcgaaattagtaatttcaataagtctata

SEQ ID NO: 4400 - DNA, 80 bp, synthetic construct
  misc_feature 1..80: note = Synthetic: >NC_003310.1-cand-15070-15149
  source 1..80: mol_type = other DNA
tcgatgttatcagaacatagatattcaaatatatcaaaatcattgatatttttatagtcgactgacgacaataacaaaat

SEQ ID NO: 4401 - DNA, 80 bp, synthetic construct
  misc_feature 1..80: note = Synthetic: >NC_003310.1-cand-15150-15229
  source 1..80: mol_type = other DNA
cacaacatcgtttttgatattattattttttttggtaacgtatgcctttaatggagtttcaccatcatactcatataatg

SEQ ID NO: 4402 - DNA, 80 bp, synthetic construct
  misc_feature 1..80: note = Synthetic: >NC_003310.1-cand-15230-15309
  source 1..80: mol_type = other DNA
gatttgcaccactttctattaatgattgtgcaatactggcatcgatgttaaatgttttacaactatcatagagtatctta

SEQ ID NO: 4403 - DNA, 80 bp, synthetic construct
  misc_feature 1..80: note = Synthetic: >NC_003310.1-cand-15310-15389
  source 1..80: mol_type = other DNA
tcgttaaccatgattggttgttgacgttatcacattttttggtttctttcatttcagttatgtatggatttagcacgttt

SEQ ID NO: 4404 - DNA, 80 bp, synthetic construct
  misc_feature 1..80: note = Synthetic: >NC_003310.1-cand-15390-15469
  source 1..80: mol_type = other DNA
gggaagcatgagctcatatgatttcagtactgtagtgtcagtactattagtttcgatcagatcaatgtctagatctatag

SEQ ID NO: 4405 - DNA, 80 bp, synthetic construct
  misc_feature 1..80: note = Synthetic: >NC_003310.1-cand-15470-15549
  source 1..80: mol_type = other DNA
aatcaaaacacgataggtcagaagataatgaatatctgtacgcttcttcttgtactgtaacttctggttttgttagatgg

SEQ ID NO: 4406 - DNA, 80 bp, synthetic construct
  misc_feature 1..80: note = Synthetic: >NC_003310.1-cand-15550-15629
  source 1..80: mol_type = other DNA
ttgcatcgtgctttaacgtcaatggtacaaattttatcctcgctttgtgtatcatattcgtctctagtataaaattctat

SEQ ID NO: 4407 - DNA, 80 bp, synthetic construct
  misc_feature 1..80: note = Synthetic: >NC_003310.1-cand-15630-15709
  source 1..80: mol_type = other DNA
attcaaattatcatgcgatgtgtatacgctaacggtatcaataaacggagcacagcatttagtcaacagtaatccaaatt

SEQ ID NO: 4408 - DNA, 80 bp, synthetic construct
  misc_feature 1..80: note = Synthetic: >NC_003310.1-cand-15710-15789
  source 1..80: mol_type = other DNA
tttttaaagtatatcttaacgaaagaagttgtcatcgttagagtgtggtaaatcattgtctacggtactagatcctcata

SEQ ID NO: 4409 - DNA, 80 bp, synthetic construct
  misc_feature 1..80: note = Synthetic: >NC_003310.1-cand-15790-15869
  source 1..80: mol_type = other DNA
agtgtatatatctagagtaatatttaatttatcaaatggttgataatatggatgtcgtggcaatttcctaatacggaaat

SEQ ID NO: 4410 - DNA, 80 bp, synthetic construct
  misc_feature 1..80: note = Synthetic: >NC_003310.1-cand-15870-15949
  source 1..80: mol_type = other DNA
aagacataaacacgcaataaatctaattgcggacatgttacactccttaaaaatacgaataaaaactttggcttttagta

SEQ ID NO: 4411 - DNA, 80 bp, synthetic construct
  misc_feature 1..80: note = Synthetic: >NC_003310.1-cand-16030-16109
  source 1..80: mol_type = other DNA
gatgagtagttctcttctttaattttatactttttactaatcatatttagactgatgtatgggtaatagtgtttgaagag

SEQ ID NO: 4412 - DNA, 80 bp, synthetic construct
  misc_feature 1..80: note = Synthetic: >NC_003310.1-cand-16340-16419
  source 1..80: mol_type = other DNA
atccgtagttatctcctctatgtaactgtaaatttctcaacgcgatatctccattaataatgatgtcgaattcgtgttgt

SEQ ID NO: 4413 - DNA, 80 bp, synthetic construct
  misc_feature 1..80: note = Synthetic: >NC_003310.1-cand-115510-115589
  source 1..80: mol_type = other DNA
tgtggctacaaacttttctttttccacatcatctagtttattatataccgatttcacaacggcaccagatttaaggaacc

SEQ ID NO: 4414 - DNA, 80 bp, synthetic construct
  misc_feature 1..80: note = Synthetic: >NC_003310.1-cand-115820-115899
  source 1..80: mol_type = other DNA
atttatttacagatttagttgtttaatttatttgtgctcttccagagttgggatagtatttttctaacgtcggtattata

SEQ ID NO: 4415 - DNA, 80 bp, synthetic construct
  misc_feature 1..80: note = Synthetic: >NC_003310.1-cand-116110-116189
  source 1..80: mol_type = other DNA
aacaccattcccgcgtcagagtgaataggagtttgaatagtttgttttggaaatagatccttcaataacttatagttggg

SEQ ID NO: 4416 - DNA, 80 bp, synthetic construct
  misc_feature 1..80: note = Synthetic: >NC_003310.1-cand-117180-117259
  source 1..80: mol_type = other DNA
tatatcggacacaagatctgtaaatagttttacgttattaatcatcacggtatcgccatcgctagataatgctaatgtac

SEQ ID NO: 4417 - DNA, 80 bp, synthetic construct
  misc_feature 1..80: note = Synthetic: >NC_003310.1-cand-117500-117579
  source 1..80: mol_type = other DNA
ttgtttcaaacttgataatattattatctacatcttcgtacgatccaaattccggaatagatgtatcgcacgctctggcc

SEQ ID NO: 4418 - DNA, 80 bp, synthetic construct
  misc_feature 1..80: note = Synthetic: >NC_003310.1-cand-117580-117659
  source 1..80: mol_type = other DNA
acccagataaccaaaaagtcacacgctccagaatatacattgtataaaaagctatcgttttttagtagtgtttttttctg

SEQ ID NO: 4419 - DNA, 80 bp, synthetic construct
  misc_feature 1..80: note = Synthetic: >NC_003310.1-cand-117660-117739
  source 1..80: mol_type = other DNA
agtatatacgaaaggattaaaaatagtattatcaacgtaactatattccaaattattcttatgagaatagataataatat

SEQ ID NO: 4420 - DNA, 80 bp, synthetic construct
  misc_feature 1..80: note = Synthetic: >NC_003310.1-cand-117990-118069
  source 1..80: mol_type = other DNA
taaagtgaaaatctactaccgatgatgtaagtcttacaatgttcgaaccagtaccagatcttaatttggaggcctccgta

SEQ ID NO: 4421 - DNA, 80 bp, synthetic construct
  misc_feature 1..80: note = Synthetic: >NC_003310.1-cand-118080-118159
  source 1..80: mol_type = other DNA
aggtaaatatagatcaaacaacacctatgataaaggagaatagcggttttatatcccgtagtagacgtctattcgcccat

SEQ ID NO: 4422 - DNA, 80 bp, synthetic construct
  misc_feature 1..80: note = Synthetic: >NC_003310.1-cand-118690-118769
  source 1..80: mol_type = other DNA
gattacagtgtatgacaaattacaactggccatagaaaatgattcacaatttacatgttcattggctgtggaatcagaac

SEQ ID NO: 4423 - DNA, 80 bp, synthetic construct
  misc_feature 1..80: note = Synthetic: >NC_003310.1-cand-118850-118929
  source 1..80: mol_type = other DNA
ataagcaaacgcgataaggatacgctattaaaacattttacttatgactggagttagaatttatagacgactcatttcgt

SEQ ID NO: 4424 - DNA, 80 bp, synthetic construct
  misc_feature 1..80: note = Synthetic: >NC_003310.1-cand-118920-118999
  source 1..80: mol_type = other DNA
ctcatttcgtttatcattattactattactatcattattagtattcttcttgtcatcttgttcagaaatatacagcaatg

SEQ ID NO: 4425 - DNA, 80 bp, synthetic construct
  misc_feature 1..80: note = Synthetic: >NC_003310.1-cand-119000-119079
  source 1..80: mol_type = other DNA
ctatacctaataccaaatacattatcatgcttgcaatggctctaacaacaacgaaccaaaatgaatttggtcgtagcttt

SEQ ID NO: 4426 - DNA, 80 bp, synthetic construct
  misc_feature 1..80: note = Synthetic: >NC_003310.1-cand-119080-119159
  source 1..80: mol_type = other DNA
tgttcacaaaaatacataaagaaatgtctacataaatctatggcgccattggctacttgaaatagcgccagtcctcctac

SEQ ID NO: 4427 - DNA, 80 bp, synthetic construct
  misc_feature 1..80: note = Synthetic: >NC_003310.1-cand-119140-119219
  source 1..80: mol_type = other DNA
aatagcgccagtcctcctacagattttaatatagctgtataacatgacatttattcatcatcaaaagagacagagtcacc

SEQ ID NO: 4428 - DNA, 80 bp, synthetic construct
  misc_feature 1..80: note = Synthetic: >NC_003310.1-cand-119220-119299
  source 1..80: mol_type = other DNA
atctgtcatatttagattttttttcatgtgttcaaagtatcctctactcatttcattataatagtttatcatacttagaa

SEQ ID NO: 4429 - DNA, 80 bp, synthetic construct
  misc_feature 1..80: note = Synthetic: >NC_003443.1-cand-11100-11179
  source 1..80: mol_type = other DNA
gagcatggttcaaggagataatcaggcgattgcagttacaacaagagttcctagatcattacctagtattcagaaaaagg

SEQ ID NO: 4430 - DNA, 80 bp, synthetic construct
  misc_feature 1..80: note = Synthetic: >NC_003443.1-cand-11180-11259
  source 1..80: mol_type = other DNA
agttagcctatgcagcaagcaagttattttttgaaagacttagggcaaataattatgggttgggtcatcagctaaaggct

SEQ ID NO: 4431 - DNA, 80 bp, synthetic construct
  misc_feature 1..80: note = Synthetic: >NC_003443.1-cand-11260-11339
  source 1..80: mol_type = other DNA
caagaaactataataagttccacgttcttcatatatagtaaacgggtattttatcaaggacgtatactaacacaggcact

SEQ ID NO: 4432 - DNA, 80 bp, synthetic construct
  misc_feature 1..80: note = Synthetic: >NC_003443.1-cand-11340-11419
  source 1..80: mol_type = other DNA
caaaaatgctagcaagttatgtcttactgcagatgtattaggtgaatgtactcaagcttcctgttcaaattctgctacta

SEQ ID NO: 4433 - DNA, 80 bp, synthetic construct
  misc_feature 1..80: note = Synthetic: >NC_003443.1-cand-11450-11529
  source 1..80: mol_type = other DNA
agaaagatacatgttataagcttaatatttatcagtccattcgtcaactcacatatgatctaatatttccccaatactcc

SEQ ID NO: 4434 - DNA, 80 bp, synthetic construct
  misc_feature 1..80: note = Synthetic: >NC_003443.1-cand-11500-11579
  source 1..80: mol_type = other DNA
acatatgatctaatatttccccaatactccataccaggtgaaactataagtgagattttcctacagcatccaagactaat

SEQ ID NO: 4435 - DNA, 80 bp, synthetic construct
  misc_feature 1..80: note = Synthetic: >NC_003443.1-cand-11580-11659
  source 1..80: mol_type = other DNA
ctcacgtattgttctgctcccttcacagctaggtggtcttaattacctcgcatgtagcagattatttaaccgcaatatcg

SEQ ID NO: 4436 - DNA, 80 bp, synthetic construct
  misc_feature 1..80: note = Synthetic: >NC_003443.1-cand-11660-11739
  source 1..80: mol_type = other DNA
gagatcctcttggtacagctgtggcagatctcaagaggttaattaaatgtggtgctcttgaatcatggatactgtataat

SEQ ID NO: 4437 - DNA, 80 bp, synthetic construct
  misc_feature 1..80: note = Synthetic: >NC_003443.1-cand-11740-11819
  source 1..80: mol_type = other DNA
ttactagcaagaaaaccagggaaaggttcatgggcaactttagcagccgatccatactcattgaatcaagaatatcttta

SEQ ID NO: 4438 - DNA, 80 bp, synthetic construct
  misc_feature 1..80: note = Synthetic: >NC_003443.1-cand-11820-11899
  source 1..80: mol_type = other DNA
tcctcctactactatacttaaaagacatactcaaaatactttaatggagatatgtcggaatcctatgttaaagggagttt

SEQ ID NO: 4439 - DNA, 80 bp, synthetic construct
  misc_feature 1..80: note = Synthetic: >NC_003443.1-cand-11900-11979
  source 1..80: mol_type = other DNA
ttacagataatgcaaaagaggaggaaaatctccttgcaaaatttcttcttgatcgtgatatagtattgccaagagttgca

SEQ ID NO: 4440 - DNA, 80 bp, synthetic construct
  misc_feature 1..80: note = Synthetic: >NC_003443.1-cand-11990-12069
  source 1..80: mol_type = other DNA
tagatcaatctagcatcggaaggaagaaacagatacaaggattttttgacaccacaaggaccataatgagacgatcattt

SEQ ID NO: 4441 - DNA, 80 bp, synthetic construct
  misc_feature 1..80: note = Synthetic: >NC_003443.1-cand-12070-12149
  source 1..80: mol_type = other DNA
gaaatcaaaccactctcaactaagaagactctttcagtcatagaatataatactaattacttatcttataactaccctgt

SEQ ID NO: 4442 - DNA, 80 bp, synthetic construct
  misc_feature 1..80: note = Synthetic: >NC_003443.1-cand-12150-12229
  source 1..80: mol_type = other DNA
catacttaatcctttacctattcctggatatttaaattatattactgaccaaacttgcagtattgatatatctagaagtt

SEQ ID NO: 4443 - DNA, 80 bp, synthetic construct
  misc_feature 1..80: note = Synthetic: >NC_003443.1-cand-12230-12309
  source 1..80: mol_type = other DNA
taagaaaattatcatggtcttctttattgaatggaagaactttagaaggattagaaactccagatccaattgaagttgtc

SEQ ID NO: 4444 - DNA, 80 bp, synthetic construct
  misc_feature 1..80: note = Synthetic: >NC_003443.1-cand-12310-12389
  source 1..80: mol_type = other DNA
aatggtttcttgattgtaggtacaggagattgtgatttttgtatgcagggtgacgacaaatttacttggttctttttacc

SEQ ID NO: 4445 - DNA, 80 bp, synthetic construct
  misc_feature 1..80: note = Synthetic: >NC_003461.1-cand-3260-3339
  source 1..80: mol_type = other DNA
agagttcaagcctgacttgataagagaggatgaactgagagatgacatcaaaaatccggtactagaagaaaacaacaatg

SEQ ID NO: 4446 - DNA, 80 bp, synthetic construct
  misc_feature 1..80: note = Synthetic: >NC_003461.1-cand-3340-3419
  source 1..80: mol_type = other DNA
agcctcaagcatccaatgcatcacgcctgattccgtccactgaaaaacacactctgcactcactcaaactagttatcgaa

SEQ ID NO: 4447 - DNA, 80 bp, synthetic construct
  misc_feature 1..80: note = Synthetic: >NC_003461.1-cand-3420-3499
  source 1..80: mol_type = other DNA
aacagtcctctaagcagagtagagaagaaggcttacatcaaatccctttataagtgtcggacaaaccaagaggttaaaaa

SEQ ID NO: 4448 - DNA, 80 bp, synthetic construct
  misc_feature 1..80: note = Synthetic: >NC_003461.1-cand-3500-3579
  source 1..80: mol_type = other DNA
tgtaatggagctattcgaggaagacatagattcactaactaactaaacatgaatctacaatttcaaccagcaatcaaaat

SEQ ID NO: 4449 - DNA, 80 bp, synthetic construct
  misc_feature 1..80: note = Synthetic: >NC_003461.1-cand-3580-3659
  source 1..80: mol_type = other DNA
caatatccagagccaactcaaaaagctccctcaaaacaattaagaaaaacttagggtcaaagaaattttgcccggagaaa

SEQ ID NO: 4450 - DNA, 80 bp, synthetic construct
  misc_feature 1..80: note = Synthetic: >NC_003461.1-cand-3660-3739
  source 1..80: mol_type = other DNA
ggaaatggctgaaacatacaggttccccagattctcacacgaagaaaatgggacagtagaacctctccctctcaaaacag

SEQ ID NO: 4451 - DNA, 80 bp, synthetic construct
  misc_feature 1..80: note = Synthetic: >NC_003461.1-cand-3740-3819
  source 1..80: mol_type = other DNA
gtcctgacaaaaaagcaatccctcacatcagaatagtcaaggtaggagatcctccaaaacatggagtcaggtatcttgat

SEQ ID NO: 4452 - DNA, 80 bp, synthetic construct
  misc_feature 1..80: note = Synthetic: >NC_003461.1-cand-3820-3899
  source 1..80: mol_type = other DNA
gtgctactattgggattctttgaaacacctaagcaaggacctctatctggcagcatatctgatctcacagaatcaaccag

SEQ ID NO: 4453 - DNA, 80 bp, synthetic construct
  misc_feature 1..80: note = Synthetic: >NC_003461.1-cand-3900-3979
  source 1..80: mol_type = other DNA
ttattcaatctgtggatccggatccttaccaattggcatagccaagtattacggcacagatcaagaattattaaaagcct

SEQ ID NO: 4454 - DNA, 80 bp, synthetic construct
  misc_feature 1..80: note = Synthetic: >NC_003461.1-cand-3980-4059
  source 1..80: mol_type = other DNA
gcattgacctcaaaataactgtacgaagaacagttagatctggagaaatgatagtatacatggtagattcgatccatgct

SEQ ID NO: 4455 - DNA, 80 bp, synthetic construct
  misc_feature 1..80: note = Synthetic: >NC_003461.1-cand-4060-4139
  source 1..80: mol_type = other DNA
cctctactaccatggtccagccgactgagacaagggatgatatataatgccaataaagtagctctagcacctcaatgtct

SEQ ID NO: 4456 - DNA, 80 bp, synthetic construct
  misc_feature 1..80: note = Synthetic: >NC_003461.1-cand-4140-4219
  source 1..80: mol_type = other DNA
cccagtcgacaaagacatcagattcagggttgtatttgtcaatggaacatcactaggtacaattacaattgctaaggtcc

SEQ ID NO: 4457 - DNA, 80 bp, synthetic construct
  misc_feature 1..80: note = Synthetic: >NC_003461.1-cand-4220-4299
  source 1..80: mol_type = other DNA
caaaaactcttgcagatcttgcattaccgaactcaatatcagtgaatctgctggttacacttagggcaggagtatcaacg

SEQ ID NO: 4458 - DNA, 80 bp, synthetic construct
  misc_feature 1..80: note = Synthetic: >NC_003461.1-cand-4300-4379
  source 1..80: mol_type = other DNA
gaacaaaaaggaatcctccccgttctagacgatgatggagaaaagaagctcaacttcatggtacacctaggaatcataag

SEQ ID NO: 4459 - DNA, 80 bp, synthetic construct
  misc_feature 1..80: note = Synthetic: >NC_003461.1-cand-4380-4459
  source 1..80: mol_type = other DNA
aagaaaagttgggaagatatattcagttgaatactgcaaaaataaaattgagaagatgaagctaatattctctctcgggc

SEQ ID NO: 4460 - DNA, 80 bp, synthetic construct
  misc_feature 1..80: note = Synthetic: >NC_003461.1-cand-4460-4539
  source 1..80: mol_type = other DNA
ttgtaggtggaataagtttccatgtacatgcaacaggcacattatccaaaactctaatgagccaacttgcatggaaaaaa

SEQ ID NO: 4461 - DNA, 80 bp, synthetic construct
  misc_feature 1..80: note = Synthetic: >NC_003908.1-cand-6740-6819
  source 1..80: mol_type = other DNA
gctatcgccatttcggcgttgatgatccttgaggacttaggtgtcgaccaaccgctcttagatttgatagaggcggcgtt

SEQ ID NO: 4462 - DNA, 80 bp, synthetic construct
  misc_feature 1..80: note = Synthetic: >NC_003908.1-cand-6820-6899
  source 1..80: mol_type = other DNA
cggcaatatcacatctgtgcacctacctacaggaacgaggtttaaatttggtgccatgatgaaatccggtatgttcttaa

SEQ ID NO: 4463 - DNA, 80 bp, synthetic construct
  misc_feature 1..80: note = Synthetic: >NC_003908.1-cand-6890-6969
  source 1..80: mol_type = other DNA
atgttcttaacgctgtttgtcaacacactagtcaatatcatgattgctagcagagtactacgtgaacggttaaccacgtc

SEQ ID NO: 4464 - DNA, 80 bp, synthetic construct
  misc_feature 1..80: note = Synthetic: >NC_003908.1-cand-6970-7049
  source 1..80: mol_type = other DNA
agcgtgcgcggcctctatcggcgacgataacatagtgcatggtgtcgtctccgacaccttgatggcggagagatgcgcca

SEQ ID NO: 4465 - DNA, 80 bp, synthetic construct
  misc_feature 1..80: note = Synthetic: >NC_003908.1-cand-7030-7109
  source 1..80: mol_type = other DNA
gatggcggagagatgcgccacttggctgaacatggaagtaaaaattattgatgcagttattggtatcaaagcaccctact

SEQ ID NO: 4466 - DNA, 80 bp, synthetic construct
  misc_feature 1..80: note = Synthetic: >NC_003908.1-cand-7130-7209
  source 1..80: mol_type = other DNA
gtggaccagataacaggcacagcctgcagagtcgcagaccctctaaaaaggctttttaagcttggaaaaccattgccagt

SEQ ID NO: 4467 - DNA, 80 bp, synthetic construct
  misc_feature 1..80: note = Synthetic: >NC_003908.1-cand-7210-7289
  source 1..80: mol_type = other DNA
cgatgatacccaagactgcgaccgccgccgggcactgcatgatgaagcaatgcgatggaacagaattggaattacggacg

SEQ ID NO: 4468 - DNA, 80 bp, synthetic construct
  misc_feature 1..80: note = Synthetic: >NC_003908.1-cand-7290-7369
  source 1..80: mol_type = other DNA
agttagtgaaggccgtagaatccagatacgagatcatactggcaggcctgatcatcacgtctctgtccacgttagccgaa

SEQ ID NO: 4469 - DNA, 80 bp, synthetic construct
  misc_feature 1..80: note = Synthetic: >NC_003908.1-cand-7370-7449
  source 1..80: mol_type = other DNA
agcgttaagaacttcaagagcataagagggagcccaatcaccctctacggctgacctaaataggtgacgtagtagacacg

SEQ ID NO: 4470 - DNA, 80 bp, synthetic construct
  misc_feature 1..80: note = Synthetic: >NC_003908.1-cand-7450-7529
  source 1..80: mol_type = other DNA
cacctacccaccggcagaatgtttccataccctcagctgaactttccaccagtttaccctacaaatccgatggcttaccg

SEQ ID NO: 4471 - DNA, 80 bp, synthetic construct
  misc_feature 1..80: note = Synthetic: >NC_003908.1-cand-7530-7609
  source 1..80: mol_type = other DNA
agatccaaaccctcctaggcgccgctggaggccgtttcggcccccgctggctgctcaaatcgaagatcttaggaggtcga

SEQ ID NO: 4472 - DNA, 80 bp, synthetic construct
  misc_feature 1..80: note = Synthetic: >NC_003908.1-cand-7610-7689
  source 1..80: mol_type = other DNA
tagtcaacttgactttcaaacaacgatcacctaatccgccgccaggtccaccgccaaagaagaagaagagtgctcctaag

SEQ ID NO: 4473 - DNA, 80 bp, synthetic construct
  misc_feature 1..80: note = Synthetic: >NC_003908.1-cand-7690-7769
  source 1..80: mol_type = other DNA
ccaaaacctactcagcctaaaaagaagaagcagcaagccaagaggacgaaacgcaagcctaaaccagggaaacgacaacg

SEQ ID NO: 4474 - DNA, 80 bp, synthetic construct
  misc_feature 1..80: note = Synthetic: >NC_003908.1-cand-7770-7849
  source 1..80: mol_type = other DNA
tatgtgtatgaagttggagtcggacaagacatttccgatcatgctgaacggccaagtgaatggatatgcctgcgttgtcg

SEQ ID NO: 4475 - DNA, 80 bp, synthetic construct
  misc_feature 1..80: note = Synthetic: >NC_003908.1-cand-7850-7929
  source 1..80: mol_type = other DNA
gaggaaggctgatgaaaccactccacgttgaaggaaaaattgataatgagcaattagcggccgtgaaattgaagaaggct

SEQ ID NO: 4476 - DNA, 80 bp, synthetic construct
  misc_feature 1..80: note = Synthetic: >NC_003908.1-cand-7930-8009
  source 1..80: mol_type = other DNA
agcatgtacgacttggagtacggcgacgttccccagaacatgaaatcagacacgctgcagtacaccagcgacaaaccacc

SEQ ID NO: 4477 - DNA, 80 bp, synthetic construct
  misc_feature 1..80: note = Synthetic: >NC_005080.1-cand-1540-1619
  source 1..80: mol_type = other DNA
actagtgggtttatcatcgaagataagacaacttgcaccatgaagttcctgcaaacttgctgtgggctgatgccaacttc

SEQ ID NO: 4478 - DNA, 80 bp, synthetic construct
  misc_feature 1..80: note = Synthetic: >NC_005080.1-cand-1620-1699
  source 1..80: mol_type = other DNA
ccaatttgtatactctgactgtctaacatgggctgaagcgcaatcactctgtttcacaatataaacattattatctctta

SEQ ID NO: 4479 - DNA, 80 bp, synthetic construct
  misc_feature 1..80: note = Synthetic: >NC_005080.1-cand-1700-1779
  source 1..80: mol_type = other DNA
ctttcaataagtgacttataatccctaagttttcattcatcatgtctagagccacacagacatctagaaacttgagtctt

SEQ ID NO: 4480 - DNA, 80 bp, synthetic construct
  misc_feature 1..80: note = Synthetic: >NC_005080.1-cand-1770-1849
  source 1..80: mol_type = other DNA
cttgagtcttccactatccaaagatctgttcacttgaagatcattcataaagggtgccaaatgttcttcaaatagtttgg

SEQ ID NO: 4481 - DNA, 80 bp, synthetic construct
  misc_feature 1..80: note = Synthetic: >NC_005080.1-cand-1860-1939
  source 1..80: mol_type = other DNA
tcgtatagaatgcaatacatggttcatgcctaattggtcttctatctgtcgtactgctttgggtttaacagcccagaaga

SEQ ID NO: 4482 - DNA, 80 bp, synthetic construct
  misc_feature 1..80: note = Synthetic: >NC_005080.1-cand-1970-2049
  source 1..80: mol_type = other DNA
gtggactcttaatagcagaaaacacccactcccctaactcacaggcatttgtcagcaccaaagagaagtaatcccacaaa

SEQ ID NO: 4483 - DNA, 80 bp, synthetic construct
  misc_feature 1..80: note = Synthetic: >NC_005080.1-cand-2020-2099
  source 1..80: mol_type = other DNA
gtcagcaccaaagagaagtaatcccacaaaattggtttagaaaattggttaacttctttaagtgatttttgacagtaaat

SEQ ID NO: 4484 - DNA, 80 bp, synthetic construct
  misc_feature 1..80: note = Synthetic: >NC_005080.1-cand-2100-2179
  source 1..80: mol_type = other DNA
aactttaggctttctctcacaaattccacaaagacatggcattattcgagtaaatatgtcctttatatacagaaatccgc

SEQ ID NO: 4485 - DNA, 80 bp, synthetic construct
  misc_feature 1..80: note = Synthetic: >NC_005080.1-cand-2180-2259
  source 1..80: mol_type = other DNA
ctttaccatccctaacacacttactccccatactcttacaaaacccaatgaagcctgaggcaacagaagactgaaatgca

SEQ ID NO: 4486 - DNA, 80 bp, synthetic construct
  misc_feature 1..80: note = Synthetic: >NC_005080.1-cand-2260-2339
  source 1..80: mol_type = other DNA
gatttgttgattgactctgccaagatcttcttcacgccttttgtgaaatttcttgacagcctggactgtattgtccttat

SEQ ID NO: 4487 - DNA, 80 bp, synthetic construct
  misc_feature 1..80: note = Synthetic: >NC_005080.1-cand-2340-2419
  source 1..80: mol_type = other DNA
caatgttggcatctcttctttctctaacactcttcgacttgtcatgagtttggtcctcaagaccaacctcaagtccccaa

SEQ ID NO: 4488 - DNA, 80 bp, synthetic construct
  misc_feature 1..80: note = Synthetic: >NC_005080.1-cand-2420-2499
  source 1..80: mol_type = other DNA
agctcgctaaattgacccatctgtagtctagagtttgtctgatttcatcttcactacacccggcatattgcaggaatccg

SEQ ID NO: 4489 - DNA, 80 bp, synthetic construct
  misc_feature 1..80: note = Synthetic: >NC_005080.1-cand-2500-2579
  source 1..80: mol_type = other DNA
gataaagcctcatcccctcccctgcttatcaagttgataaggttttcctcaaagattttgcctctcttaatgtcattaaa

SEQ ID NO: 4490 - DNA, 80 bp, synthetic construct
  misc_feature 1..80: note = Synthetic: >NC_005080.1-cand-2580-2659
  source 1..80: mol_type = other DNA
cactttcctcgcgcagttccttataaacattgtctccttatcatcagaaaaaatagcttcaattttcctctgtagacggt

SEQ ID NO: 4491 - DNA, 80 bp, synthetic construct
  misc_feature 1..80: note = Synthetic: >NC_005080.1-cand-2660-2739
  source 1..80: mol_type = other DNA
accctctagacccatcaacccagtctttgacatcttgttcttcaatagctccaaacggagtctctctgtatccagagtat

SEQ ID NO: 4492 - DNA, 80 bp, synthetic construct
  misc_feature 1..80: note = Synthetic: >NC_005080.1-cand-2740-2819
  source 1..80: mol_type = other DNA
ctaatcaattggttgactctaatggaaatctttgacactatatgagtgctaaccccattagcaatacattgatcacaaat

SEQ ID NO: 4493 - DNA, 80 bp, synthetic construct
  misc_feature 1..80: note = Synthetic: >NC_005225.1-cand-1170-1249
  source 1..80: mol_type = other DNA
caaaatcaaaagcattaattgatgtcatatcaaaggattcaaaaaaaggagtgttcggtgagttgattgatagtgttgat

SEQ ID NO: 4494 - DNA, 80 bp, synthetic construct
  misc_feature 1..80: note = Synthetic: >NC_005225.1-cand-1250-1329
  source 1..80: mol_type = other DNA
gtagcaagtcaagtacagcataatgaatgctcaaaaactattgagaaaattttgtcagatttagaagttaatctaggtga

SEQ ID NO: 4495 - DNA, 80 bp, synthetic construct
  misc_feature 1..80: note = Synthetic: >NC_005225.1-cand-1330-1409
  source 1..80: mol_type = other DNA
tgtggcaaatggattagatcaacctaagaaaacaactggtgtggatgatattttaagaaaattttatgataatgagcttg

SEQ ID NO: 4496 - DNA, 80 bp, synthetic construct
  misc_feature 1..80: note = Synthetic: >NC_005225.1-cand-1410-1489
  source 1..80: mol_type = other DNA
ttaagtacttgatatctgttatacggaaaacaacagcctggcatctaggacatttattacgagatattactgagtcctta

SEQ ID NO: 4497 - DNA, 80 bp, synthetic construct
  misc_feature 1..80: note = Synthetic: >NC_005225.1-cand-1490-1569
  source 1..80: mol_type = other DNA
attgcacatgcagggcttaaaagatctaaatactggtctgctcacggttatgcatgtggtagtgtcttattatgcatatt

SEQ ID NO: 4498 - DNA, 80 bp, synthetic construct
  misc_feature 1..80: note = Synthetic: >NC_005225.1-cand-1570-1649
  source 1..80: mol_type = other DNA
accatctaaatcacttgaagttgctggatcatttataaggttctttactgtatttaaggaaggtctaggtttaattgata

SEQ ID NO: 4499 - DNA, 80 bp, synthetic construct
  misc_feature 1..80: note = Synthetic: >NC_005225.1-cand-1650-1729
  source 1..80: mol_type = other DNA
cagataatcttgactctaaagcagaaattgatggcgtttcatggtgctttagtaagataattagtttagatttaaataga

SEQ ID NO: 4500 - DNA, 80 bp, synthetic construct
  misc_feature 1..80: note = Synthetic: >NC_005225.1-cand-1730-1809
  source 1..80: mol_type = other DNA
ttactggccttgaatattgcatttgaaaaatcccttcttgccacagcaacatggtttcagtattatactgaagatcaagg

SEQ ID NO: 4501 - DNA, 80 bp, synthetic construct
  misc_feature 1..80: note = Synthetic: >NC_005225.1-cand-1810-1889
  source 1..80: mol_type = other DNA
acattttcctcttcaacatgcacttcggtccgtatttgcattccatttccttctttctgtatcccagaagatgaaattgt

SEQ ID NO: 4502 - DNA, 80 bp, synthetic construct
  misc_feature 1..80: note = Synthetic: >NC_005225.1-cand-1890-1969
  source 1..80: mol_type = other DNA
gcgcaatctttgataatctccgatatttgattccagctgtcacatctacctactctggctttgaacctttaatcagaaaa

SEQ ID NO: 4503 - DNA, 80 bp, synthetic construct
  misc_feature 1..80: note = Synthetic: >NC_005225.1-cand-1970-2049
  source 1..80: mol_type = other DNA
ttctttgagcggccttttaaaagtgcacttgaagtctacttatatggtattataaaagtattactagtgagcttggctca

SEQ ID NO: 4504 - DNA, 80 bp, synthetic construct
  misc_feature 1..80: note = Synthetic: >NC_005225.1-cand-2050-2129
  source 1..80: mol_type = other DNA
gaataacaaaataaggttttattccagggttagacttttagggttaactgttgaccaatcaacgattggagcaagcggag

SEQ ID NO: 4505 - DNA, 80 bp, synthetic construct
  misc_feature 1..80: note = Synthetic: >NC_005225.1-cand-2130-2209
  source 1..80: mol_type = other DNA
tgtatccctctcttatgtcaagggttgtttataagcattatcgcagtttaatatcagaggcaactacttgtttctttctt

SEQ ID NO: 4506 - DNA, 80 bp, synthetic construct
  misc_feature 1..80: note = Synthetic: >NC_005225.1-cand-2210-2289
  source 1..80: mol_type = other DNA
tttgagaagggattgcatggcaatcttacagaagaagctaaaatccacctagaaacagttgaatgggctagaaaatttag

SEQ ID NO: 4507 - DNA, 80 bp, synthetic construct
  misc_feature 1..80: note = Synthetic: >NC_005225.1-cand-2310-2389
  source 1..80: mol_type = other DNA
ggagttatataatggaagaaggttatcatatacaagatgttctaaataaccaagtagctgttgaacagcaacttttttgt

SEQ ID NO: 4508 - DNA, 80 bp, synthetic construct
  misc_feature 1..80: note = Synthetic: >NC_005225.1-cand-2380-2459
  source 1..80: mol_type = other DNA
acttttttgtcaagaagttgtcgaactagctgctcaagaactaaacacttacttacatgccaaatcccaagtcatggcaa

SEQ ID NO: 4509 - DNA, 80 bp, synthetic construct
  misc_feature 1..80: note = Synthetic: >NC_005831.2-cand-9940-10019
  source 1..80: mol_type = other DNA
attctagtttatgtgatgagttcacactagctgaagttgtgaagcagatgtatggtgttaacttgcaaagtggtaaggtt

SEQ ID NO: 4510 - DNA, 80 bp, synthetic construct
  misc_feature 1..80: note = Synthetic: >NC_005831.2-cand-10050-10129
  source 1..80: mol_type = other DNA
agcgttttcttcacaatgttttgggcagaactctttatttatacaaacactatatggataaaccctgtgatacttacacc

SEQ ID NO: 4511 - DNA, 80 bp, synthetic construct
  misc_feature 1..80: note = Synthetic: >NC_005831.2-cand-10130-10209
  source 1..80: mol_type = other DNA
tatattttgtctacttttgtttttgtcattagttttaactatgtttcttaaacataagtttttgtttttgcaagtatttt

SEQ ID NO: 4512 - DNA, 80 bp, synthetic construct
  misc_feature 1..80: note = Synthetic: >NC_005831.2-cand-10210-10289
  source 1..80: mol_type = other DNA
tattacctactgttattgcaactgctttatataattgtgttttggattattacatagtaaaatttttggctgaccatttt

SEQ ID NO: 4513 - DNA, 80 bp, synthetic construct
  misc_feature 1..80: note = Synthetic: >NC_005831.2-cand-10290-10369
  source 1..80: mol_type = other DNA
aactataatgtttcagtattacaaatggatgttcagggtttagttaatgttttggtctgtttatttgttgtatttttaca

SEQ ID NO: 4514 - DNA, 80 bp, synthetic construct
  misc_feature 1..80: note = Synthetic: >NC_005831.2-cand-10370-10449
  source 1..80: mol_type = other DNA
cacatggcgcttttctaaagaacgttttacacattggtttacatatgtgtgttctcttatagcagttgcttacacttatt

SEQ ID NO: 4515 - DNA, 80 bp, synthetic construct
  misc_feature 1..80: note = Synthetic: >NC_005831.2-cand-10450-10529
  source 1..80: mol_type = other DNA
tttatagtggtgactttttgagtttgcttgttatgtttttatgtgctatatctagtgattggtacattggtgccattgtt

SEQ ID NO: 4516 - DNA, 80 bp, synthetic construct
  misc_feature 1..80: note = Synthetic: >NC_005831.2-cand-10530-10609
  source 1..80: mol_type = other DNA
tttaggttgtcacgtttgattgtatttttttcacctgaaagtgtatttagtgtttttggtgatgtgaaacttactttagt

SEQ ID NO: 4517 - DNA, 80 bp, synthetic construct
  misc_feature 1..80: note = Synthetic: >NC_005831.2-cand-10570-10649
  source 1..80: mol_type = other DNA
gtgtatttagtgtttttggtgatgtgaaacttactttagttgtttatttaatttgtggttatttagtttgtacttattgg

SEQ ID NO: 4518 - DNA, 80 bp, synthetic construct
  misc_feature 1..80: note = Synthetic: >NC_005831.2-cand-10690-10769
  source 1..80: mol_type = other DNA
tgggtgtttatgattttaaggtgagtgctgctgaatttaaatacatggttgctaatggacttcatgcaccacatggacct

SEQ ID NO: 4519 - DNA, 80 bp, synthetic construct
  misc_feature 1..80: note = Synthetic: >NC_005831.2-cand-10770-10849
  source 1..80: mol_type = other DNA
tttgatgcactttggttatcattcaaactacttggtattggtggtgaccgttgtataaaaatttcaactgtccaatccaa

SEQ ID NO: 4520 - DNA, 80 bp, synthetic construct
  misc_feature 1..80: note = Synthetic: >NC_005831.2-cand-10850-10929
  source 1..80: mol_type = other DNA
actgactgatttgaagtgtactaatgttgtgttattgggttgtttgtctagtatgaacattgcagctaattctagtgaat

SEQ ID NO: 4521 - DNA, 80 bp, synthetic construct
  misc_feature 1..80: note = Synthetic: >NC_005831.2-cand-10930-11009
  source 1..80: mol_type = other DNA
gggcttattgtgttgatttacacaataagattaatctttgtgatgaccctgaaaaagctcaaagtatgttgttagcactc

SEQ ID NO: 4522 - DNA, 80 bp, synthetic construct
  misc_feature 1..80: note = Synthetic: >NC_005831.2-cand-11010-11089
  source 1..80: mol_type = other DNA
cttgcgttctttctaagtaaacatagtgattttggtcttgatggccttattgattcttattttgataatagtagcaccct

SEQ ID NO: 4523 - DNA, 80 bp, synthetic construct
  misc_feature 1..80: note = Synthetic: >NC_005831.2-cand-11090-11169
  source 1..80: mol_type = other DNA
tcagagtgttgcttcatcatttgttagtatgccatcatatattgcttatgaaaatgctagacaagcttatgaggatgcta

SEQ ID NO: 4524 - DNA, 80 bp, synthetic construct
  misc_feature 1..80: note = Synthetic: >NC_005831.2-cand-11170-11249
  source 1..80: mol_type = other DNA
ttgctaatggatcttcttctcaacttattaaacaattgaagcgtgccatgaatatcgcaaagtctgaatttgatcatgag

SEQ ID NO: 4525 - DNA, 80 bp, synthetic construct
  misc_feature 1..80: note = Synthetic: >NC_006213.1-cand-14440-14519
  source 1..80: mol_type = other DNA
atgtagcttctgctagtgcattgtatgatttacgcacttgctgttttagtgttgccgctataacaagcggtgtaaaattt

SEQ ID NO: 4526 - DNA, 80 bp, synthetic construct
  misc_feature 1..80: note = Synthetic: >NC_006213.1-cand-14520-14599
  source 1..80: mol_type = other DNA
caaacagttaaacctggtaattttaatcaggatttttatgattttgttttaagtaaaggcctgcttaaagagggtagctc

SEQ ID NO: 4527 - DNA, 80 bp, synthetic construct
  misc_feature 1..80: note = Synthetic: >NC_006213.1-cand-14600-14679
  source 1..80: mol_type = other DNA
agttgatctgaagcactttttctttacacaggatggtaatgctgctattactgattataattattataagtataatttgc

SEQ ID NO: 4528 - DNA, 80 bp, synthetic construct
  misc_feature 1..80: note = Synthetic: >NC_006213.1-cand-14680-14759
  source 1..80: mol_type = other DNA
ccaccatggtggacattaagcagttgttgtttgttttggaagttgtttataagtattttgagatttatgatggtgggtgt

SEQ ID NO: 4529 - DNA, 80 bp, synthetic construct
  misc_feature 1..80: note = Synthetic: >NC_006213.1-cand-14750-14829
  source 1..80: mol_type = other DNA
tggtgggtgtataccggcatcacaagtcattgttaataattatgataagagtgctggctatccatttaacaaatttggaa

SEQ ID NO: 4530 - DNA, 80 bp, synthetic construct
  misc_feature 1..80: note = Synthetic: >NC_006213.1-cand-14830-14909
  source 1..80: mol_type = other DNA
aagccaggctctattatgaagcattatcatttgaggaacaggatgaaatttacgcttatactaagcgtaatgtcctgcca

SEQ ID NO: 4531 - DNA, 80 bp, synthetic construct
  misc_feature 1..80: note = Synthetic: >NC_006213.1-cand-14910-14989
  source 1..80: mol_type = other DNA
acacttactcaaatgaatttgaaatatgctattagtgctaagaatagagcccgcactgttgctggtgtttccatacttag

SEQ ID NO: 4532 - DNA, 80 bp, synthetic construct
  misc_feature 1..80: note = Synthetic: >NC_006213.1-cand-14990-15069
  source 1..80: mol_type = other DNA
tactatgactggcagaatgtttcatcaaaaatgtttgaaaagtatagcagctacacgtggtgttcctgtagttataggca

SEQ ID NO: 4533 - DNA, 80 bp, synthetic construct
  misc_feature 1..80: note = Synthetic: >NC_006213.1-cand-15070-15149
  source 1..80: mol_type = other DNA
ccactaaattttatggtggctgggatgatatgttacgccgccttattaaagatgttgacaatcctgtacttatgggttgg

SEQ ID NO: 4534 - DNA, 80 bp, synthetic construct
  misc_feature 1..80: note = Synthetic: >NC_006213.1-cand-15150-15229
  source 1..80: mol_type = other DNA
gattatcctaagtgtgatcgtgctatgccaaacctactacgtattgttagtagtttggtattagcccgaaaacatgagac

SEQ ID NO: 4535 - DNA, 80 bp, synthetic construct
  misc_feature 1..80: note = Synthetic: >NC_006213.1-cand-15230-15309
  source 1..80: mol_type = other DNA
atgttgttcgcaaagcgataggttttatcgacttgcgaatgaatgcgcacaagttttgagtgaaattgttatgtgtggtg

SEQ ID NO: 4536 - DNA, 80 bp, synthetic construct
  misc_feature 1..80: note = Synthetic: >NC_006213.1-cand-15310-15389
  source 1..80: mol_type = other DNA
gctgttattatgttaagcctggtggcactagtagtggtgatgcaactactgcttttgctaattcagtctttaacatatgt

SEQ ID NO: 4537 - DNA, 80 bp, synthetic construct
  misc_feature 1..80: note = Synthetic: >NC_006213.1-cand-15390-15469
  source 1..80: mol_type = other DNA
caagctgtttcagccaatgtatgtgccttaatgtcatgcaatggcaataagattgaagatcttagtatacgtgctcttca

SEQ ID NO: 4538 - DNA, 80 bp, synthetic construct
  misc_feature 1..80: note = Synthetic: >NC_006213.1-cand-15470-15549
  source 1..80: mol_type = other DNA
gaagcgcttatactcacatgtgtatagaagtgataaggttgattcaacctttgtcacagaatattatgaatttttaaata

SEQ ID NO: 4539 - DNA, 80 bp, synthetic construct
  misc_feature 1..80: note = Synthetic: >NC_006213.1-cand-15590-15669
  source 1..80: mol_type = other DNA
gtgttataattctgattatgcgtccaaagggtatattgctaatataagtgcctttcaacaggtattatattatcaaaata

SEQ ID NO: 4540 - DNA, 80 bp, synthetic construct
  misc_feature 1..80: note = Synthetic: >NC_006213.1-cand-15630-15709
  source 1..80: mol_type = other DNA
aatataagtgcctttcaacaggtattatattatcaaaataacgtttttatgtcagaatccaaatgttgggttgaacatga

SEQ ID NO: 4541 - DNA, 80 bp, synthetic construct
  misc_feature 1..80: note = Synthetic: >NC_006213.1-cand-20850-20929
  source 1..80: mol_type = other DNA
cagtggttgcctgctggtactattcttgtagataacgatttatacccatttgttagtgacagtgtcgctacatattttgg

SEQ ID NO: 4542 - DNA, 80 bp, synthetic construct
  misc_feature 1..80: note = Synthetic: >NC_006213.1-cand-20930-21009
  source 1..80: mol_type = other DNA
ggattgtataactttaccctttgattgtcaatgggatttgataatttctgatatgtatgaccctattactaagaacatag

SEQ ID NO: 4543 - DNA, 80 bp, synthetic construct
  misc_feature 1..80: note = Synthetic: >NC_006213.1-cand-21010-21089
  source 1..80: mol_type = other DNA
gggagtacaatgtgagtaaagatggtttctttacatacatttgtcatatgattcgagacaagttagctctgggtggcagt

SEQ ID NO: 4544 - DNA, 80 bp, synthetic construct
  misc_feature 1..80: note = Synthetic: >NC_006213.1-cand-21060-21139
  source 1..80: mol_type = other DNA
attcgagacaagttagctctgggtggcagtgttgctataaaaataacagagttttcttggaatgcagaattatataagtt

SEQ ID NO: 4545 - DNA, 80 bp, synthetic construct
  misc_feature 1..80: note = Synthetic: >NC_006213.1-cand-21170-21249
  source 1..80: mol_type = other DNA
ttgcacaaatgcaaatgcttcttctagtgaaggatttttaattggcataaattatttgtgtaagcccaaggttgagatag

SEQ ID NO: 4546 - DNA, 80 bp, synthetic construct
  misc_feature 1..80: note = Synthetic: >NC_006213.1-cand-21220-21299
  source 1..80: mol_type = other DNA
attatttgtgtaagcccaaggttgagatagatggaaatgttatgcatgccaattatttgttttggagaaattccacagtt

SEQ ID NO: 4547 - DNA, 80 bp, synthetic construct
  misc_feature 1..80: note = Synthetic: >NC_006213.1-cand-21330-21409
  source 1..80: mol_type = other DNA
atggctaaattcccgcttaagttggctggtactgccgtaataaatttaagagcagaccagattaatgatatggtttattc

SEQ ID NO: 4548 - DNA, 80 bp, synthetic construct
  misc_feature 1..80: note = Synthetic: >NC_006213.1-cand-21410-21489
  source 1..80: mol_type = other DNA
ccttcttgaaaagggtaaactacttattagagatacaaataaagaagttttcgttggtgacagtttggttaatgtaatct

SEQ ID NO: 4549 - DNA, 80 bp, synthetic construct
  misc_feature 1..80: note = Synthetic: >NC_006213.1-cand-21490-21569
  source 1..80: mol_type = other DNA
aaactttaaaaatggctgtcgcttatgcagacaagcctaatcattttatcaattttccacttacccattttcagggtttt

SEQ ID NO: 4550 - DNA, 80 bp, synthetic construct
  misc_feature 1..80: note = Synthetic: >NC_006213.1-cand-21570-21649
  source 1..80: mol_type = other DNA
gtgttaaattataaaggtttacaatttcaaattctcgatgaaggagtggattgtaaaatacaaacagcgccacacattag

SEQ ID NO: 4551 - DNA, 80 bp, synthetic construct
  misc_feature 1..80: note = Synthetic: >NC_006213.1-cand-21650-21729
  source 1..80: mol_type = other DNA
tcttactatgctggacatacagcctgaagactataaaagtgttgatgtcgctattcaagaagttattgatgatatgcatt

SEQ ID NO: 4552 - DNA, 80 bp, synthetic construct
  misc_feature 1..80: note = Synthetic: >NC_006213.1-cand-21740-21819
  source 1..80: mol_type = other DNA
ttttcagattaaatttgagaatcctcacatcctaggaagatgcatagttttagatgttaaaggtgtagaagaattgcatg

SEQ ID NO: 4553 - DNA, 80 bp, synthetic construct
  misc_feature 1..80: note = Synthetic: >NC_006213.1-cand-21810-21889
  source 1..80: mol_type = other DNA
gaattgcatgacgatttagttaattacattcgtgataaaggttgtgttgctgaccaatccaggaaatggattggccattg

SEQ ID NO: 4554 - DNA, 80 bp, synthetic construct
  misc_feature 1..80: note = Synthetic: >NC_006213.1-cand-21890-21969
  source 1..80: mol_type = other DNA
caccatagctcaactcacggatgcagcactgtccattaaggaaaatgttgattttataaacagcatgcaattcaattata

SEQ ID NO: 4555 - DNA, 80 bp, synthetic construct
  misc_feature 1..80: note = Synthetic: >NC_006213.1-cand-21970-22049
  source 1..80: mol_type = other DNA
aaatcaccatcaacccctcatcaccggctagacttgaaatagttaagctcggtgctgaaaagaaagatggtttttatgaa

SEQ ID NO: 4556 - DNA, 80 bp, synthetic construct
  misc_feature 1..80: note = Synthetic: >NC_006213.1-cand-22050-22129
  source 1..80: mol_type = other DNA
accatagttagtcactggatgggaattcgttttgaatacacatcacccactgataagctagctatgattatgggttattg

SEQ ID NO: 4557 - DNA, 80 bp, synthetic construct
  misc_feature 1..80: note = Synthetic: >NC_006213.1-cand-27230-27309
  source 1..80: mol_type = other DNA
aacctataactgaaaataatgttgttgttatgagtacctgcgctgttaattatactaaagcgccgtatgtaatgctgaac

SEQ ID NO: 4558 - DNA, 80 bp, synthetic construct
  misc_feature 1..80: note = Synthetic: >NC_006213.1-cand-27310-27389
  source 1..80: mol_type = other DNA
acttcaatacccaaccttcctgattttaaggaagagttggatcaatggtttaaaaatcaaacatcagtggcaccagattt

SEQ ID NO: 4559 - DNA, 80 bp, synthetic construct
  misc_feature 1..80: note = Synthetic: >NC_006213.1-cand-27390-27469
  source 1..80: mol_type = other DNA
gtcacttgattatataaatgttacattcttggacctacaagttgaaatgaataggttacaggaggcaataaaagtcttaa

SEQ ID NO: 4560 - DNA, 80 bp, synthetic construct
  misc_feature 1..80: note = Synthetic: >NC_006213.1-cand-27470-27549
  source 1..80: mol_type = other DNA
atcagagctacatcaatctcaaggacattggtacatatgaatattatgtaaaatggccttggtatgtatggcttttaatc

SEQ ID NO: 4561 - DNA, 80 bp, synthetic construct
  misc_feature 1..80: note = Synthetic: >NC_006213.1-cand-27550-27629
  source 1..80: mol_type = other DNA
tgccttgctggtgtagctatgcttgttttactattcttcatatgctgttgtacaggatgtgggactagttgttttaagaa

SEQ ID NO: 4562 - DNA, 80 bp, synthetic construct
  misc_feature 1..80: note = Synthetic: >NC_006213.1-cand-27630-27709
  source 1..80: mol_type = other DNA
atgtggtggttgttgtgatgattatactggataccaggagttagtaatcaaaacttcacatgacgactaagttcgtcttt

SEQ ID NO: 4563 - DNA, 80 bp, synthetic construct
  misc_feature 1..80: note = Synthetic: >NC_006213.1-cand-27710-27789
  source 1..80: mol_type = other DNA
gattcattgcactgatctcttgttagatctttttgcaatctagcatttgttaaagttcttaaggccacgccctattaatg

SEQ ID NO: 4564 - DNA, 80 bp, synthetic construct
  misc_feature 1..80: note = Synthetic: >NC_006213.1-cand-27790-27869
  source 1..80: mol_type = other DNA
gacatttggagacctgagaagaaatatctccgttatattaacggttttaatgtctcagaattagaagatgcttgttttaa

SEQ ID NO: 4565 - DNA, 80 bp, synthetic construct
  misc_feature 1..80: note = Synthetic: >NC_006213.1-cand-27870-27949
  source 1..80: mol_type = other DNA
atttaactatcaatttcctaaagtaggatattgtagagttcctagtcatgcttggtgccgtaatcaaggtagattttgtg

SEQ ID NO: 4566 - DNA, 80 bp, synthetic construct
  misc_feature 1..80: note = Synthetic: >NC_006213.1-cand-27950-28029
  source 1..80: mol_type = other DNA
ctacattcactctttatggtaaatccaaacattatgataaatattttggagtaataaatggtttcacagcattcgctaat

SEQ ID NO: 4567 - DNA, 80 bp, synthetic construct
  misc_feature 1..80: note = Synthetic: >NC_006213.1-cand-28030-28109
  source 1..80: mol_type = other DNA
actgtagaggatgctgttaacaaactggttttcttagctgttgactttattacctggcgcagacaggagttaaatgttta

SEQ ID NO: 4568 - DNA, 80 bp, synthetic construct
  misc_feature 1..80: note = Synthetic: >NC_006213.1-cand-28150-28229
  source 1..80: mol_type = other DNA
gcaaataatttttatagttgccatttgtttattggttacaatagttgtagtggcatttttggcaacttttaaattgtgta

SEQ ID NO: 4569 - DNA, 80 bp, synthetic construct
  misc_feature 1..80: note = Synthetic: >NC_006213.1-cand-28190-28269
  source 1..80: mol_type = other DNA
atagttgtagtggcatttttggcaacttttaaattgtgtattcaactttgcggtatgtgtaataccttagtactgtcccc

SEQ ID NO: 4570 - DNA, 80 bp, synthetic construct
  misc_feature 1..80: note = Synthetic: >NC_006213.1-cand-28270-28349
  source 1..80: mol_type = other DNA
ttctatttatgtgtttaatagaggtaggcagttttatgagttttacaatgatgtaaaaccaccagtccttgatgtggatg

SEQ ID NO: 4571 - DNA, 80 bp, synthetic construct
  misc_feature 1..80: note = Synthetic: >NC_006213.1-cand-28350-28429
  source 1..80: mol_type = other DNA
acgtttaggtaatccaaacattatgagtagtaaaactacaccagcaccagtttatatctggactgctgatgaagctatta

SEQ ID NO: 4572 - DNA, 80 bp, synthetic construct
  misc_feature 1..80: note = Synthetic: >NC_006213.1-cand-28430-28509
  source 1..80: mol_type = other DNA
aattcctaaaggaatggaatttttctttgggtattatactactttttattacaatcatattgcaatttggatatacaagt

SEQ ID NO: 4573 - DNA, 80 bp, synthetic construct
  misc_feature 1..80: note = Synthetic: >NC_007372.1-cand-850-929
  source 1..80: mol_type = other DNA
aaagaaggccaaactggcaaatgttgtgagaaaaatgatgactaattcacaagacactgagctttctttcacaatcactg

SEQ ID NO: 4574 - DNA, 80 bp, synthetic construct
  misc_feature 1..80: note = Synthetic: >NC_007372.1-cand-930-1009
  source 1..80: mol_type = other DNA
gggacaacactaagtggaatgaaaatcaaaaccctcgaatgtttttggcgatgattacatatatcacaaaaaatcaacct

SEQ ID NO: 4575 - DNA, 80 bp, synthetic construct
  misc_feature 1..80: note = Synthetic: >NC_007372.1-cand-1000-1079
  source 1..80: mol_type = other DNA
aaatcaacctgagtggttcagaaacatcctgagcatcgcaccaataatgttctcaaacaaaatggcaagactaggaaaag

SEQ ID NO: 4576 - DNA, 80 bp, synthetic construct
  misc_feature 1..80: note = Synthetic: >NC_007372.1-cand-1080-1159
  source 1..80: mol_type = other DNA
gatacatgttcgagagtaagagaatgaagctccgaacacaaatacccgcagaaatgctagcaagcattgacctgaagtat

SEQ ID NO: 4577 - DNA, 80 bp, synthetic construct
  misc_feature 1..80: note = Synthetic: >NC_007372.1-cand-1160-1239
  source 1..80: mol_type = other DNA
ttcaatgaatcaacaaggaagaaaattgagaaaataaggcctcttctaatagatggcacagcatcattgagccctgggat

SEQ ID NO: 4578 - DNA, 80 bp, synthetic construct
  misc_feature 1..80: note = Synthetic: >NC_007372.1-cand-1240-1319
  source 1..80: mol_type = other DNA
gatgatgggcatgttcaacatgctaagtacggttttaggagtctcggtactgaatcttgggcaaaagaaatacaccaaga

SEQ ID NO: 4579 - DNA, 80 bp, synthetic construct
  misc_feature 1..80: note = Synthetic: >NC_007372.1-cand-1480-1559
  source 1..80: mol_type = other DNA
agggacatttgaattcacaagctttttttatcgatatggatttgtggctaattttagcatggagcttcccagttttggag

SEQ ID NO: 4580 - DNA, 80 bp, synthetic construct
  misc_feature 1..80: note = Synthetic: >NC_007372.1-cand-1560-1639
  source 1..80: mol_type = other DNA
tgtctggaataaacgagtcagctgatatgagtattggagtaacagtgataaagaacaacatgataaacaatgaccttggg

SEQ ID NO: 4581 - DNA, 80 bp, synthetic construct
  misc_feature 1..80: note = Synthetic: >NC_007372.1-cand-1640-1719
  source 1..80: mol_type = other DNA
ccagcaacagcccagatggctctccaattgttcatcaaagactacagatatacatataggtgccatagaggagacacaca

SEQ ID NO: 4582 - DNA, 80 bp, synthetic construct
  misc_feature 1..80: note = Synthetic: >NC_007372.1-cand-1720-1799
  source 1..80: mol_type = other DNA
aattcagacgagaagatcattcgagctaaagaagctgtgggatcaaacccaatcaagggcaggactattggtatcagatg

SEQ ID NO: 4583 - DNA, 80 bp, synthetic construct
  misc_feature 1..80: note = Synthetic: >NC_007372.1-cand-1800-1879
  source 1..80: mol_type = other DNA
ggggaccaaacttatacaatatccggaaccttcacatccctgaagtctgcttaaagtgggagctaatggatgagaattat

SEQ ID NO: 4584 - DNA, 80 bp, synthetic construct
  misc_feature 1..80: note = Synthetic: >NC_007372.1-cand-1890-1969
  source 1..80: mol_type = other DNA
tttgtaaccccctgaatccctttgtcagccataaagaaattgagtctgtaaacaatgctgtagtgatgccagcccacggt

SEQ ID NO: 4585 - DNA, 80 bp, synthetic construct
  misc_feature 1..80: note = Synthetic: >NC_007372.1-cand-1970-2049
  source 1..80: mol_type = other DNA
ccagccaaaagtatggaatatgatgccgttgcaactacacactcctggaatcccaagaggaaccgctctattctaaacac

SEQ ID NO: 4586 - DNA, 80 bp, synthetic construct
  misc_feature 1..80: note = Synthetic: >NC_007372.1-cand-2060-2139
  source 1..80: mol_type = other DNA
ggaattcttgaggatgaacagatgtaccaaaagtgctgcaacttgttcgagaaatttttccctagtagttcatataggag

SEQ ID NO: 4587 - DNA, 80 bp, synthetic construct
  misc_feature 1..80: note = Synthetic: >NC_007373.1-cand-0-79
  source 1..80: mol_type = other DNA
aaagcaggtcaattatattcagtatggaaagaataaaagaactacggaacctgatgtcgcagtctcgcactcgcgagata

SEQ ID NO: 4588 - DNA, 80 bp, synthetic construct
  misc_feature 1..80: note = Synthetic: >NC_007373.1-cand-50-129
  source 1..80: mol_type = other DNA
ctgatgtcgcagtctcgcactcgcgagatactgacaaaaaccacagtggaccatatggccataattaagaagtacacatc

SEQ ID NO: 4589 - DNA, 80 bp, synthetic construct
  misc_feature 1..80: note = Synthetic: >NC_009824.1-cand-740-819
  source 1..80: mol_type = other DNA
tacatcccgctcgtcggcgctcctgtaggaggcgtcgcaagagccctcgcgcatggcgtgagggcccttgaagacgggat

SEQ ID NO: 4590 - DNA, 80 bp, synthetic construct
  misc_feature 1..80: note = Synthetic: >NC_009824.1-cand-810-889
  source 1..80: mol_type = other DNA
aagacgggataaatttcgcaacagggaacttgcccggttgctccttttctatcttccttcttgctctgttctcttgctta

SEQ ID NO: 4591 - DNA, 80 bp, synthetic construct
  misc_feature 1..80: note = Synthetic: >NC_009824.1-cand-890-969
  source 1..80: mol_type = other DNA
attcatccagcagccagtctagagtggcggaatacgtctggcctctacgtccttaccaacgactgttccaatagcagtat

SEQ ID NO: 4592 - DNA, 80 bp, synthetic construct
  misc_feature 1..80: note = Synthetic: >NC_009824.1-cand-970-1049
  source 1..80: mol_type = other DNA
tgtgtatgaggccgatgatgtcattctgcacacacccggctgtgtaccttgtgtccaggacggcaatacatctacgtgct

SEQ ID NO: 4593 - DNA, 80 bp, synthetic construct
  misc_feature 1..80: note = Synthetic: >NC_009824.1-cand-1050-1129
  source 1..80: mol_type = other DNA
ggaccccagtgacacctacagtggcagtcaggtacgtcggagcaactactgcttcgatacgcagtcatgtggacctatta

SEQ ID NO: 4594 - DNA, 80 bp, synthetic construct
  misc_feature 1..80: note = Synthetic: >NC_009824.1-cand-1100-1179
  source 1..80: mol_type = other DNA
gcttcgatacgcagtcatgtggacctattagtaggcgcggccacgatgtgctctgcgctctacgtgggtgatatgtgtgg

SEQ ID NO: 4595 - DNA, 80 bp, synthetic construct
  misc_feature 1..80: note = Synthetic: >NC_009824.1-cand-1210-1289
  source 1..80: mol_type = other DNA
gttcagacctcgacgccatcaaacggtccagacctgtaactgctcgctgtacccaggccatctttcaggacatcgaatgg

SEQ ID NO: 4596 - DNA, 80 bp, synthetic construct
  misc_feature 1..80: note = Synthetic: >NC_009824.1-cand-1290-1369
  source 1..80: mol_type = other DNA
cttgggatatgatgatgaattggtcccccgctgtgggtatggtggtggcgcatgtcctgcgtttaccccagaccttgttc

SEQ ID NO: 4597 - DNA, 80 bp, synthetic construct
  misc_feature 1..80: note = Synthetic: >NC_009824.1-cand-1300-1379
  source 1..80: mol_type = other DNA
gatgatgaattggtcccccgctgtgggtatggtggtggcgcatgtcctgcgtttaccccagaccttgttcgacataatgg

SEQ ID NO: 4598 - DNA, 80 bp, synthetic construct
  misc_feature 1..80: note = Synthetic: >NC_009824.1-cand-1480-1559
  source 1..80: mol_type = other DNA
tgcccacacatataccaccggtggcactgcatctcgtcatacccaagcgtttgctggtctttttgacataggcccccaac

SEQ ID NO: 4599 - DNA, 80 bp, synthetic construct
  misc_feature 1..80: note = Synthetic: >NC_009824.1-cand-1530-1609
  source 1..80: mol_type = other DNA
ttgctggtctttttgacataggcccccaacagaaactgcagctggtcaacaccaatggctcgtggcacatcaacagtact

SEQ ID NO: 4600 - DNA, 80 bp, synthetic construct
  misc_feature 1..80: note = Synthetic: >NC_009824.1-cand-1610-1689
  source 1..80: mol_type = other DNA
gccctaaattgcaatgagtccataaacaccgggtttatagctgggttgttttattaccataagttcaactctactggatg

SEQ ID NO: 4601 - DNA, 80 bp, synthetic construct
  misc_feature 1..80: note = Synthetic: >NC_009824.1-cand-1660-1739
  source 1..80: mol_type = other DNA
ttattaccataagttcaactctactggatgtcctcaaaggctcagcagctgcaagcccatcactttcttcaggcagggat

SEQ ID NO: 4602 - DNA, 80 bp, synthetic construct
  misc_feature 1..80: note = Synthetic: >NC_009824.1-cand-1770-1849
  source 1..80: mol_type = other DNA
gtccttctgatgacagaccatactgctggcactacgcacctagaccttgtgacattgtcccggcatcaagtgtctgcggc

SEQ ID NO: 4603 - DNA, 80 bp, synthetic construct
  misc_feature 1..80: note = Synthetic: >NC_009824.1-cand-1820-1899
  source 1..80: mol_type = other DNA
gacattgtcccggcatcaagtgtctgcggccctgtgtactgcttcacaccatcgccagtggtcgtaggcactactgatgc

SEQ ID NO: 4604 - DNA, 80 bp, synthetic construct
  misc_feature 1..80: note = Synthetic: >NC_009824.1-cand-1930-2009
  source 1..80: mol_type = other DNA
gaatgagaaagatgtgttcctgctgaagtcccagcggcctcccagtggtcggtggtttgggtgctcgtggatgaactcca

SEQ ID NO: 4605 - DNA, 80 bp, synthetic construct
  misc_feature 1..80: note = Synthetic: >NC_009996.1-cand-5610-5689
  source 1..80: mol_type = other DNA
gtagggttggttacgcagcagcactacttaggaaatattttgctgaggaacaaggtgccatcatttctaaatgtaatgtt

SEQ ID NO: 4606 - DNA, 80 bp, synthetic construct
  misc_feature 1..80: note = Synthetic: >NC_009996.1-cand-5690-5769
  source 1..80: mol_type = other DNA
aaggaaaagaactggaaacccgtcaatacaccctcccagaccaaactacaccctagtgtcttccacgatgtgtttcctgg

SEQ ID NO: 4607 - DNA, 80 bp, synthetic construct
  misc_feature 1..80: note = Synthetic: >NC_009996.1-cand-5770-5849
  source 1..80: mol_type = other DNA
tgttaaggaaccagcagctttacaccccaaggatccacgattggaagtagacctcactacagctgttatgtcaaaatata

SEQ ID NO: 4608 - DNA, 80 bp, synthetic construct
  misc_feature 1..80: note = Synthetic: >NC_009996.1-cand-5850-5929
  source 1..80: mol_type = other DNA
aaggtaatattgatgtccctatgaatgagtacatagaaacagccgttgaccactacgcggcacaactttacatgcttgac

SEQ ID NO: 4609 - DNA, 80 bp, synthetic construct
  misc_feature 1..80: note = Synthetic: >NC_009996.1-cand-5930-6009
  source 1..80: mol_type = other DNA
atcaacccagaaccaatcaccatggaacaagcaatatatggttatgctaacttggaaccattggaccttaccactagccc

SEQ ID NO: 4610 - DNA, 80 bp, synthetic construct
  misc_feature 1..80: note = Synthetic: >NC_009996.1-cand-6010-6089
  source 1..80: mol_type = other DNA
tggtttcccttatgtgtctttgggcgtgaaaaagaaagacatcttaaacaacgctactaaagacacaaggaaaatgcaac

SEQ ID NO: 4611 - DNA, 80 bp, synthetic construct
  misc_feature 1..80: note = Synthetic: >NC_009996.1-cand-6090-6169
  source 1..80: mol_type = other DNA
agatgttagatctgtatggtattgatctaccctacataactttcctaaaggatgaactccgcgccccagagaaaattaag

SEQ ID NO: 4612 - DNA, 80 bp, synthetic construct
  misc_feature 1..80: note = Synthetic: >NC_009996.1-cand-6170-6249
  source 1..80: mol_type = other DNA
gctggtaagaccaggattgtggaggctgctagtgtcaatgatacagtgtactttagaacaacttttggcaatctatacag

SEQ ID NO: 4613 - DNA, 80 bp, synthetic construct
  misc_feature 1..80: note = Synthetic: >NC_009996.1-cand-6210-6289
  source 1..80: mol_type = other DNA
atacagtgtactttagaacaacttttggcaatctatacagtacttttcatgcaaacccaggtatcttaacaggctcagct

SEQ ID NO: 4614 - DNA, 80 bp, synthetic construct
  misc_feature 1..80: note = Synthetic: >NC_009996.1-cand-6330-6409
  source 1..80: mol_type = other DNA
ctatgttagatggagaactcattgcttttgattacaccaattatgatggcagcttggaaccagtgtggtttaaagcgctt

SEQ ID NO: 4615 - DNA, 80 bp, synthetic construct
  misc_feature 1..80: note = Synthetic: >NC_009996.1-cand-6420-6499
  source 1..80: mol_type = other DNA
tagatcagcttggcttccctggacaccttacacaaagattgtgtaatacaacccacatcttcagagacacaacctacgat

SEQ ID NO: 4616 - DNA, 80 bp, synthetic construct
  misc_feature 1..80: note = Synthetic: >NC_009996.1-cand-6500-6579
  source 1..80: mol_type = other DNA
gtcaaaggtggcatgccgtcaggaatttcaggtacctccatatttaacactatgatgaacaatatcataataagaactct

SEQ ID NO: 4617 - DNA, 80 bp, synthetic construct
  misc_feature 1..80: note = Synthetic: >NC_009996.1-cand-6580-6659
  source 1..80: mol_type = other DNA
ggtcttggagacttacaaaaacatcaatttggacaaactacgcattattgcctacggtgatgatgtagtagcctcatatc

SEQ ID NO: 4618 - DNA, 80 bp, synthetic construct
  misc_feature 1..80: note = Synthetic: >NC_009996.1-cand-6660-6739
  source 1..80: mol_type = other DNA
cagatgaattggacccaaaggagattgccatgacggccaagcgttatggtctcactatcactcccccagataaaacagat

SEQ ID NO: 4619 - DNA, 80 bp, synthetic construct
  misc_feature 1..80: note = Synthetic: >NC_009996.1-cand-6740-6819
  source 1..80: mol_type = other DNA
caattttccaagatgacctgggataatgtgaccttccttaaacgtaaatttaaacctgactccaaatacaaatttctgat

SEQ ID NO: 4620 - DNA, 80 bp, synthetic construct
  misc_feature 1..80: note = Synthetic: >NC_009996.1-cand-6820-6899
  source 1..80: mol_type = other DNA
acatcctgtttactcaatgcaggatgtttatgagtcaatcagatggactaaggatccaaagaacacgcaggaccacgtcc

SEQ ID NO: 4621 - DNA, 80 bp, synthetic construct
  misc_feature 1..80: note = Synthetic: >NC_010562.1-cand-2230-2309
  source 1..80: mol_type = other DNA
agagtctcacatttaaccccactttctcaggtgctttcggtccttgtgttggcttcaagctaagatcaacagttgtattt

SEQ ID NO: 4622 - DNA, 80 bp, synthetic construct
  misc_feature 1..80: note = Synthetic: >NC_010562.1-cand-2310-2389
  source 1..80: mol_type = other DNA
tcccaagacctacctttcacttgagacctggagcctatataaggccaaccttcacctgataggcacaatttatataatag

SEQ ID NO: 4623 - DNA, 80 bp, synthetic construct
  misc_feature 1..80: note = Synthetic: >NC_010562.1-cand-2400-2479
  source 1..80: mol_type = other DNA
gggttcctgtttcctggtctctcatcgataaacatattttctcttttctttacacccaaaactgtcttgataatggttga

SEQ ID NO: 4624 - DNA, 80 bp, synthetic construct
  misc_feature 1..80: note = Synthetic: >NC_010562.1-cand-2470-2549
  source 1..80: mol_type = other DNA
taatggttgagaaattgtctggagtcacctttattgtttctaacatgtttcccccatccagaaaagtggccccggcctta

SEQ ID NO: 4625 - DNA, 80 bp, synthetic construct
  misc_feature 1..80: note = Synthetic: >NC_010562.1-cand-2550-2629
  source 1..80: mol_type = other DNA
acagctgctgaaaggctgaaattgtatcctgatatattgattgcactttcatccttagtgatgatctgaaggcaatcatg

SEQ ID NO: 4626 - DNA, 80 bp, synthetic construct
  misc_feature 1..80: note = Synthetic: >NC_010562.1-cand-2630-2709
  source 1..80: mol_type = other DNA
ttcggcagccaacttttccagatcagctaggtttgggaacttcacagtgtaaaggagacctaatgatgttaatgcttgga

SEQ ID NO: 4627 - DNA, 80 bp, synthetic construct
  misc_feature 1..80: note = Synthetic: >NC_010562.1-cand-2690-2769
  source 1..80: mol_type = other DNA
taatgatgttaatgcttggacaacatttcccattgtatcgcccccctgaacggtcatgcaggctattgtcagtgcaggaa

SEQ ID NO: 4628 - DNA, 80 bp, synthetic construct
  misc_feature 1..80: note = Synthetic: >NC_010562.1-cand-2780-2859
  source 1..80: mol_type = other DNA
ctggttgttcagtctggtgggatcagccacgtcccaaattctaacaacacctgtggatctcacctgtggttgttgaaatc

SEQ ID NO: 4629 - DNA, 80 bp, synthetic construct
  misc_feature 1..80: note = Synthetic: >NC_010562.1-cand-2860-2939
  source 1..80: mol_type = other DNA
ctagtctcctcaaaagatcagttcttttggataactgtgattggctaagattcccaaggtagaccccacctacaggagat

SEQ ID NO: 4630 - DNA, 80 bp, synthetic construct
  misc_feature 1..80: note = Synthetic: >NC_010562.1-cand-2940-3019
  source 1..80: mol_type = other DNA
ctctctgtctgtccaactttctttttcaacttttctagatcagatgcaagatccatgagctcagatttgttgagatcacc

SEQ ID NO: 4631 - DNA, 80 bp, synthetic construct
  misc_feature 1..80: note = Synthetic: >NC_010562.1-cand-3020-3099
  source 1..80: mol_type = other DNA
aagcttcaggatggtgttcttctgagcacttttcatggccatcaggttgtccacttctctattgaggtctcttagcttgt

SEQ ID NO: 4632 - DNA, 80 bp, synthetic construct
  misc_feature 1..80: note = Synthetic: >NC_010562.1-cand-3100-3179
  source 1..80: mol_type = other DNA
ccaaatctccatcggttctttttgtttttctaagaactctctgaacaagtgcaacttggctaaaatcgagaccatctgca

SEQ ID NO: 4633 - DNA, 80 bp, synthetic construct
  misc_feature 1..80: note = Synthetic: >NC_010562.1-cand-3180-3259
  source 1..80: mol_type = other DNA
atcattttagcatcttttagcacgtctgacttcacaggaattgtgaaactgctcaattctcgtcttaaagactgagtcca

SEQ ID NO: 4634 - DNA, 80 bp, synthetic construct
  misc_feature 1..80: note = Synthetic: >NC_010562.1-cand-3260-3339
  source 1..80: mol_type = other DNA
gcggaaacttggaatctcttttgagttgctcatgatggaaaggctttctgataagaaattgcttaccaaaaatgcctagg

SEQ ID NO: 4635 - DNA, 80 bp, synthetic construct
  misc_feature 1..80: note = Synthetic: >NC_010563.1-cand-0-79
  source 1..80: mol_type = other DNA
cagtggatcctaggcgttactaggtcttcaattcttgaactaattgttttcgggtttctactcaagctatgggtaacacc

SEQ ID NO: 4636 - DNA, 80 bp, synthetic construct
  misc_feature 1..80: note = Synthetic: >NC_010563.1-cand-80-159
  source 1..80: mol_type = other DNA
aaaacaaaggacagacagtatcaatcgaactcaagccaacccacaaacacatctgcaccagttctgctgagaaggcaggc

SEQ ID NO: 4637 - DNA, 80 bp, synthetic construct
  misc_feature 1..80: note = Synthetic: >NC_014361.1-cand-1360-1439
  source 1..80: mol_type = other DNA
tgtcctacacccaagcctgttccaaaacttattatgaagggcaatatagaggttctaaaccttgttacaggccctgacag

SEQ ID NO: 4638 - DNA, 80 bp, synthetic construct
  misc_feature 1..80: note = Synthetic: >NC_014361.1-cand-1440-1519
  source 1..80: mol_type = other DNA
tataacaacaattgaactctatcttaacaccaggatgggacaaaatgatgagtctaaggacaactatggttacagtgaaa

SEQ ID NO: 4639 - DNA, 80 bp, synthetic construct
  misc_feature 1..80: note = Synthetic: >NC_014361.1-cand-1520-1599
  source 1..80: mol_type = other DNA
aagtaactgttgctaacagcagtgaccaggacaagcctacttctggagagataccaacctacagtacagctagaattaat

SEQ ID NO: 4640 - DNA, 80 bp, synthetic construct
  misc_feature 1..80: note = Synthetic: >NC_014361.1-cand-1600-1679
  source 1..80: mol_type = other DNA
ctacccatgttgaatgaggacctaacctgtaatactctaactatgtgggaagctgtctctgtaaaaactgaagtggttgg

SEQ ID NO: 4641 - DNA, 80 bp, synthetic construct
  misc_feature 1..80: note = Synthetic: >NC_014361.1-cand-1680-1759
  source 1..80: mol_type = other DNA
ggttagctctctggtaaatgttcatatggctactaaaagaatgtatgatgacaaaggtattggtttcccagttgagggaa

SEQ ID NO: 4642 - DNA, 80 bp, synthetic construct
  misc_feature 1..80: note = Synthetic: >NC_014361.1-cand-1790-1869
  source 1..80: mol_type = other DNA
aacccctagaactccagtttctaactggaaactacagaactgattacagtgctaatgacaaattggttgttcccccaata

SEQ ID NO: 4643 - DNA, 80 bp, synthetic construct
  misc_feature 1..80: note = Synthetic: >NC_014361.1-cand-1840-1919
  source 1..80: mol_type = other DNA
gctaatgacaaattggttgttcccccaataaaacaccagagcacacaaggcctcaatcctcactacaaacaaaagctaac

SEQ ID NO: 4644 - DNA, 80 bp, synthetic construct
  misc_feature 1..80: note = Synthetic: >NC_014361.1-cand-1930-2009
  source 1..80: mol_type = other DNA
gcctttcctgtagagtgctggtgcccagacccttcaaaaaatgaaaatacaagatattatggcagctatactggtggtca

SEQ ID NO: 4645 - DNA, 80 bp, synthetic construct
  misc_feature 1..80: note = Synthetic: >NC_014361.1-cand-2000-2079
  source 1..80: mol_type = other DNA
ctggtggtcagagtacacctccagttttgcaatttacaaacactgtgactactgtgctactagatgagaatggtgttggc

SEQ ID NO: 4646 - DNA, 80 bp, synthetic construct
  misc_feature 1..80: note = Synthetic: >NC_014361.1-cand-2080-2159
  source 1..80: mol_type = other DNA
ccactttgtaaaggtgatggcctgtatgtgtcatgctgtgacatagtaggctttctggttgggaaagatggagacatgca

SEQ ID NO: 4647 - DNA, 80 bp, synthetic construct
  misc_feature 1..80: note = Synthetic: >NC_014361.1-cand-2160-2239
  source 1..80: mol_type = other DNA
atacagaggcctacctaggtactttaatattctattgagaaagagaactgtaagaaatccttacccagtttcttccttgt

SEQ ID NO: 4648 - DNA, 80 bp, synthetic construct
  misc_feature 1..80: note = Synthetic: >NC_014361.1-cand-2240-2319
  source 1..80: mol_type = other DNA
tgaataatcttttcactggtcttatgccagctgttcagggccagcctatggacaatggactaagtacacaggttgaagaa

SEQ ID NO: 4649 - DNA, 80 bp, synthetic construct
  misc_feature 1..80: note = Synthetic: >NC_014361.1-cand-2320-2399
  source 1..80: mol_type = other DNA
gtcagagtttatgatggaactgaaggccttcctggagatccagacatggtcagatatattgacaagtttggacaagacaa

SEQ ID NO: 4650 - DNA, 80 bp, synthetic construct
  misc_feature 1..80: note = Synthetic: >NC_014361.1-cand-2400-2479
  source 1..80: mol_type = other DNA
aacccgcccccccttccccgcccggctttattgagtcacaaacaaagtatttgctaaaaagctttattaaatggcttgct

SEQ ID NO: 4651 - DNA, 80 bp, synthetic construct
  misc_feature 1..80: note = Synthetic: >NC_014361.1-cand-2480-2559
  source 1..80: mol_type = other DNA
ttccatgctgcaggttttgctgttatataaaactaataaaggtttattgtgtttggaaaccagaatcatttgtttcagag

SEQ ID NO: 4652 - DNA, 80 bp, synthetic construct
  misc_feature 1..80: note = Synthetic: >NC_014361.1-cand-2560-2639
  source 1..80: mol_type = other DNA
aattcttcttcctcctcatcctccacctcaattacaacagaatcaagaggatctttaccctcctccacatttaatagcaa

SEQ ID NO: 4653 - DNA, 80 bp, synthetic construct
  misc_feature 1..80: note = Synthetic: >NC_021928.1-cand-220-299
  source 1..80: mol_type = other DNA
caaatgatccacagcaaagattcactctaatgaatttttgtctccggcaagctgtatcatcatctgccaaatcggcaatt

SEQ ID NO: 4654 - DNA, 80 bp, synthetic construct
  misc_feature 1..80: note = Synthetic: >NC_021928.1-cand-310-389
  source 1..80: mol_type = other DNA
cattattatctctgctttccttacaggccacatcaatgcagaatcatcttatgattgctgccagagccccagatgctgct

SEQ ID NO: 4655 - DNA, 80 bp, synthetic construct
  misc_feature 1..80: note = Synthetic: >NC_021928.1-cand-390-469
  source 1..80: mol_type = other DNA
cttaggatcattgaagttgatgcaatagacccgccagattatacattaactattaatccaagatctggctgggatgacat

SEQ ID NO: 4656 - DNA, 80 bp, synthetic construct
  misc_feature 1..80: note = Synthetic: >NC_021928.1-cand-470-549
  source 1..80: mol_type = other DNA
caagatcagagcttatagagcattatccagagatttgcctattagcttagctgataggacagtatttgtatccagagatg

SEQ ID NO: 4657 - DNA, 80 bp, synthetic construct
  misc_feature 1..80: note = Synthetic: >NC_021928.1-cand-550-629
  source 1..80: mol_type = other DNA
cagaacatgcagtatgcgatgatatggatacatatctgaataggatattcagtgtattaatacaggtttggataatggtg

SEQ ID NO: 4658 - DNA, 80 bp, synthetic construct
  misc_feature 1..80: note = Synthetic: >NC_021928.1-cand-630-709
  source 1..80: mol_type = other DNA
tgtaaatgcatgacagcttatgatcaacccactggatctgaagagagaagattagccaagtataagcagcagggtagaat

SEQ ID NO: 4659 - DNA, 80 bp, synthetic construct
  misc_feature 1..80: note = Synthetic: >NC_021928.1-cand-710-789
  source 1..80: mol_type = other DNA
gctggagagatatcaactgcaaacagatgccagaaaaatcatccaactagtaataagagaaagtatggttataagacaat

SEQ ID NO: 4660 - DNA, 80 bp, synthetic construct
  misc_feature 1..80: note = Synthetic: >NC_021928.1-cand-790-869
  source 1..80: mol_type = other DNA
ttcttgtacaggaaatgttaacagctgataaggtaggtgcttatactaacaggtattatgccatggtgggagacattgca

SEQ ID NO: 4661 - DNA, 80 bp, synthetic construct
  misc_feature 1..80: note = Synthetic: >NC_021928.1-cand-870-949
  source 1..80: mol_type = other DNA
aaatatatagctaatgtcggaatgagcgcgttctttcttacgcttaagttcggcttgggtaatagatggaaaccacttgc

SEQ ID NO: 4662 - DNA, 80 bp, synthetic construct
  misc_feature 1..80: note = Synthetic: >NC_021928.1-cand-950-1029
  source 1..80: mol_type = other DNA
tttagctgcattttctggtgaactagttaaactgaaatctcttatgtcactatacagaaggttaggtgacagatcaagat

SEQ ID NO: 4663 - DNA, 80 bp, synthetic construct
  misc_feature 1..80: note = Synthetic: >NC_021928.1-cand-1030-1109
  source 1..80: mol_type = other DNA
acttggctctcttggaatctcctgaactgatggaatttgctccagctaattacccactattgttcagttatgctatggga

SEQ ID NO: 4664 - DNA, 80 bp, synthetic construct
  misc_feature 1..80: note = Synthetic: >NC_021928.1-cand-1110-1189
  source 1..80: mol_type = other DNA
gttggaagtgttcaagatccgctgatcagaaattatcagtttggaagaaacttcttaaataccagttacttccagtatgg

SEQ ID NO: 4665 - DNA, 80 bp, synthetic construct
  misc_feature 1..80: note = Synthetic: >NC_021928.1-cand-1190-1269
  source 1..80: mol_type = other DNA
tgttgagactgcaatgaaacatcaaggaacagttgatcctaaatttgcctcagaacttggaataactgatgaagacagag

SEQ ID NO: 4666 - DNA, 80 bp, synthetic construct
  misc_feature 1..80: note = Synthetic: >NC_021928.1-cand-1230-1309
  source 1..80: mol_type = other DNA
aaatttgcctcagaacttggaataactgatgaagacagagtggacatcatgcaatctgtcgaaaagcatatatcaggaaa

SEQ ID NO: 4667 - DNA, 80 bp, synthetic construct
  misc_feature 1..80: note = Synthetic: >NC_021928.1-cand-1320-1399
  source 1..80: mol_type = other DNA
gatatatctcaaccccgcagtgctttcacaatgtctctgaacagatcagctttcattaccaacaataaccctcaagactt

SEQ ID NO: 4668 - DNA, 80 bp, synthetic construct
  misc_feature 1..80: note = Synthetic: >NC_021928.1-cand-1430-1509
  source 1..80: mol_type = other DNA
agggtggtctggtatagatcaggatgaaacaagagatactcttccggaatctacaatgcacagattccaaaacattgatt

SEQ ID NO: 4669 - DNA, 80 bp, synthetic construct
  misc_feature 1..80: note = Synthetic: >NC_026434.1-cand-1070-1149
  source 1..80: mol_type = other DNA
atagggagaactaaaagcattagttcaagaaacggttttgagatgatttgggatccgaacggatggactgggacagacaa

SEQ ID NO: 4670 - DNA, 80 bp, synthetic construct
  misc_feature 1..80: note = Synthetic: >NC_026434.1-cand-1150-1229
  source 1..80: mol_type = other DNA
taacttctcaataaagcaagatatcgtaggaataaatgagtggtcaggatatagcgggagttttgttcagcatccagaac

SEQ ID NO: 4671 - DNA, 80 bp, synthetic construct
  misc_feature 1..80: note = Synthetic: >NC_026434.1-cand-1230-1309
  source 1..80: mol_type = other DNA
taacagggctggattgtataagaccttgcttctgggttgaactaatcagagggcgacccaaagagaacacaatctggact

SEQ ID NO: 4672 - DNA, 80 bp, synthetic construct
  misc_feature 1..80: note = Synthetic: >NC_026434.1-cand-1320-1399
  source 1..80: mol_type = other DNA
gcatatccttttgtggtgtaaacagtgacactgtgggttggtcttggccagacggtgctgagttgccatttaccattgac

SEQ ID NO: 4673 - DNA, 80 bp, synthetic construct
  misc_feature 1..80: note = Synthetic: >NC_026435.1-cand-90-169
  source 1..80: mol_type = other DNA
atggaacaggaacaggatacaccatggacacagtaaacagaacacaccaatactcagaaaagggaaagtggacgacaaac

SEQ ID NO: 4674 - DNA, 80 bp, synthetic construct
  misc_feature 1..80: note = Synthetic: >NC_026435.1-cand-180-259
  source 1..80: mol_type = other DNA
gtgcaccccagctcaacccgattgatggaccactacctgaggataatgaaccaagtgggtatgcacaaacagactgtgtt

SEQ ID NO: 4675 - DNA, 80 bp, synthetic construct
  misc_feature 1..80: note = Synthetic: >NC_026435.1-cand-260-339
  source 1..80: mol_type = other DNA
ctagaggctatggctttccttgaagaatcccacccaggaatatttgagaattcatgccttgaaacaatggaagttgttca

SEQ ID NO: 4676 - DNA, 80 bp, synthetic construct
  misc_feature 1..80: note = Synthetic: >NC_026435.1-cand-420-499
  source 1..80: mol_type = other DNA
cattggccaacaccatagaagtctttagatcgaatggcctaacagctaatgagtcaggaaggctaatagatttcttaaag

SEQ ID NO: 4677 - DNA, 80 bp, synthetic construct
  misc_feature 1..80: note = Synthetic: >NC_026435.1-cand-580-659
  source 1..80: mol_type = other DNA
gaccaagaagatggtcacgcaaagaacaatagggaagaaaaaacaaagactgaataagagaggctatctaataagagcac

SEQ ID NO: 4678 - DNA, 80 bp, synthetic construct
  misc_feature 1..80: note = Synthetic: >NC_026435.1-cand-660-739
  source 1..80: mol_type = other DNA
tgacattaaatacgatgaccaaagatgcagagagaggcaagttaaaaagaagggctatcgcaacacctgggatgcagatt

SEQ ID NO: 4679 - DNA, 80 bp, synthetic construct
  misc_feature 1..80: note = Synthetic: >NC_026435.1-cand-730-809
  source 1..80: mol_type = other DNA
gatgcagattagaggtttcgtatactttgttgaaactttagctaggagcatttgcgaaaagcttgaacagtctgggctcc

SEQ ID NO: 4680 - DNA, 80 bp, synthetic construct
  misc_feature 1..80: note = Synthetic: >NC_026435.1-cand-820-899
  source 1..80: mol_type = other DNA
caatgaaaagaaggccaaactggcaaatgttgtgagaaagatgatgactaattcacaagacacagagatttctttcacaa

SEQ ID NO: 4681 - DNA, 80 bp, synthetic construct
  misc_feature 1..80: note = Synthetic: >NC_026435.1-cand-910-989
  source 1..80: mol_type = other DNA
caacactaagtggaatgaaaatcaaaatcctcgaatgttcctggcgatgattacatatatcaccagaaatcaacccgagt

SEQ ID NO: 4682 - DNA, 80 bp, synthetic construct
  misc_feature 1..80: note = Synthetic: >NC_026435.1-cand-990-1069
  source 1..80: mol_type = other DNA
ggttcagaaacatcctgagcatggcacccataatgttctcaaacaaaatggcaagactagggaaagggtacatgttcgag

SEQ ID NO: 4683 - DNA, 80 bp, synthetic construct
  misc_feature 1..80: note = Synthetic: >NC_026435.1-cand-1070-1149
  source 1..80: mol_type = other DNA
agtaaaagaatgaagattcgaacacaaataccagcagaaatgctagcaagcattgacctgaagtacttcaatgaatcaac

SEQ ID NO: 4684 - DNA, 80 bp, synthetic construct
  misc_feature 1..80: note = Synthetic: >NC_026435.1-cand-1150-1229
  source 1..80: mol_type = other DNA
aaagaagaaaattgagaaaataaggcctcttctaatagatggcacagcatcactgagtcctgggatgatgatgggcatgt

SEQ ID NO: 4685 - DNA, 80 bp, synthetic construct
  misc_feature 1..80: note = Synthetic: >NC_038299.1-cand-1170-1249
  source 1..80: mol_type = other DNA
caaaggctatccttgataatattggcaaacacaagtcagagaaaggactatttggacaaactattgaaagtattaacatc

SEQ ID NO: 4686 - DNA, 80 bp, synthetic construct
  misc_feature 1..80: note = Synthetic: >NC_038299.1-cand-1250-1329
  source 1..80: mol_type = other DNA
tctagtcagatccagttaaatgaatgctctaaagttattgaacaaatactatcaaatctagaaatcaacataggtgacct

SEQ ID NO: 4687 - DNA, 80 bp, synthetic construct
  misc_feature 1..80: note = Synthetic: >NC_038299.1-cand-1330-1409
  source 1..80: mol_type = other DNA
tagtgaaaatgtgccattgcctaagaaaacaacaggtgttgatgagttattagggaagttttatgaaaacgaaatcatca

SEQ ID NO: 4688 - DNA, 80 bp, synthetic construct
  misc_feature 1..80: note = Synthetic: >NC_038299.1-cand-1420-1499
  source 1..80: mol_type = other DNA
tggaattttaagaaagactgttgcatggcatattggtcatctggtgagagatataacagaaagtttaattgctcattcag

SEQ ID NO: 4689 - DNA, 80 bp, synthetic construct
  misc_feature 1..80: note = Synthetic: >NC_038299.1-cand-1500-1579
  source 1..80: mol_type = other DNA
gcctgcgtcgctcaaaatactggtctgtccatgcttatgatcatgggaatatgatattatttatccttccgtccaaatca

SEQ ID NO: 4690 - DNA, 80 bp, synthetic construct
  misc_feature 1..80: note = Synthetic: >NC_038299.1-cand-1580-1659
  source 1..80: mol_type = other DNA
cttgaagttgcaggctcttatataaggttttttacagtattcaaggatgggataggactagtggataacgacaacataga

SEQ ID NO: 4691 - DNA, 80 bp, synthetic construct
  misc_feature 1..80: note = Synthetic: >NC_038299.1-cand-1660-1739
  source 1..80: mol_type = other DNA
ctcaagggctgaaattgatgggatcacatgggtttattctaaagtaatgagtattgatcttaataggttgctggcattaa

SEQ ID NO: 4692 - DNA, 80 bp, synthetic construct
  misc_feature 1..80: note = Synthetic: >NC_038299.1-cand-1740-1819
  source 1..80: mol_type = other DNA
atatctcattcgagaaagcattgctggcaactgcaacttggtttcagtattatactgaagaccaagggcactttcctcta

SEQ ID NO: 4693 - DNA, 80 bp, synthetic construct
  misc_feature 1..80: note = Synthetic: >NC_038299.1-cand-1820-1899
  source 1..80: mol_type = other DNA
cagcatgctttacgatctgttttctccttccattttctactctgtgtatcgcagaagatgaagatatgtgctatatttga

SEQ ID NO: 4694 - DNA, 80 bp, synthetic construct
  misc_feature 1..80: note = Synthetic: >NC_038299.1-cand-1920-1999
  source 1..80: mol_type = other DNA
cttctgttacatcactatattctggttatgagttattaattgagaagttctttgagagaccatttaagagtgcattggat

SEQ ID NO: 4695 - DNA, 80 bp, synthetic construct
  misc_feature 1..80: note = Synthetic: >NC_038299.1-cand-2010-2089
  source 1..80: mol_type = other DNA
attcgattataaaaagcctattagtgagtcttgcgcaaaataataaagtaagattttattcaaaggtcaggctactcggg

SEQ ID NO: 4696 - DNA, 80 bp, synthetic construct
  misc_feature 1..80: note = Synthetic: >NC_038299.1-cand-2090-2169
  source 1..80: mol_type = other DNA
ttgacagttgatcaatccactgttggtgctagtggagtttacccctcattgatgtcacgagtggtttatagacattacag

SEQ ID NO: 4697 - DNA, 80 bp, synthetic construct
  misc_feature 1..80: note = Synthetic: >NC_038299.1-cand-2170-2249
  source 1..80: mol_type = other DNA
gagtttaatttctgaggcgacaacatgcttttttctttttgagaaagggcttcatggaaacttgacagaagaggcaaaga

SEQ ID NO: 4698 - DNA, 80 bp, synthetic construct
  misc_feature 1..80: note = Synthetic: >NC_038299.1-cand-2250-2329
  source 1..80: mol_type = other DNA
tccatctagaaacagtcgagtgggcaagaaaatttaacgagaaggaagataaatatggtgatatattgatgaaagaaggt

SEQ ID NO: 4699 - DNA, 80 bp, synthetic construct
  misc_feature 1..80: note = Synthetic: >NC_038299.1-cand-2330-2409
  source 1..80: mol_type = other DNA
tatacaattgaattgatagagaaacagaatgtgattatagagcagcaactattttgccaagaagttgtagagcttagtgc

SEQ ID NO: 4700 - DNA, 80 bp, synthetic construct
  misc_feature 1..80: note = Synthetic: >NC_038299.1-cand-2410-2489
  source 1..80: mol_type = other DNA
agctgagttgaataagtatctccaggcaaaatcccaggtattatgtgctaatataatgaataaacactgggataaaccct

SEQ ID NO: 4701 - DNA, 80 bp, synthetic construct
  misc_feature 1..80: note = Synthetic: >NC_038312.1-cand-670-749
  source 1..80: mol_type = other DNA
aatatattaactaatggatctaatcaaaccttcacagttattaattattacaaagatgcagctagttcatcttcagctgg

SEQ ID NO: 4702 - DNA, 80 bp, synthetic construct
  misc_feature 1..80: note = Synthetic: >NC_038312.1-cand-730-809
  source 1..80: mol_type = other DNA
gctagttcatcttcagctggacaatctttttcaatggatccatctaagttcacagagccagtcaaagatttaatgttgaa

SEQ ID NO: 4703 - DNA, 80 bp, synthetic construct
  misc_feature 1..80: note = Synthetic: >NC_038312.1-cand-830-909
  source 1..80: mol_type = other DNA
caccgaatgttgaagcatgtggttacagtgatagggttcaacaaatcaccctgggcaattccaccataactactcaggaa

SEQ ID NO: 4704 - DNA, 80 bp, synthetic construct
  misc_feature 1..80: note = Synthetic: >NC_038312.1-cand-920-999
  source 1..80: mol_type = other DNA
caattgtgtgttacgctgagtggcctgagtacctgtcagataatgatgctagtgatgtaaataaaacatcaaaaccagac

SEQ ID NO: 4705 - DNA, 80 bp, synthetic construct
  misc_feature 1..80: note = Synthetic: >NC_038312.1-cand-1000-1079
  source 1..80: mol_type = other DNA
atttctgtatgtagattttacacattagatagcaaaacatggaaagctacttccaaaggctggtgttggaagttgcccga

SEQ ID NO: 4706 - DNA, 80 bp, synthetic construct
  misc_feature 1..80: note = Synthetic: >NC_038312.1-cand-1080-1159
  source 1..80: mol_type = other DNA
tgctcttaaggacatgggagtatttggccagaatatgttttaccattcacttggtagaacaggttacacaatacatgtac

SEQ ID NO: 4707 - DNA, 80 bp, synthetic construct
  misc_feature 1..80: note = Synthetic: >NC_038312.1-cand-1160-1239
  source 1..80: mol_type = other DNA
agtgcaatgctaccaaatttcatagtggctgcctattggttgtggttatcccagaacaccaattagcatctcatgaggga

SEQ ID NO: 4708 - DNA, 80 bp, synthetic construct
  misc_feature 1..80: note = Synthetic: >NC_038312.1-cand-1240-1319
  source 1..80: mol_type = other DNA
ggaacagtttcagttaaatacaagtacacacatccaggagatcgaggtattgatctagacactgttgaagttgcaggtgg

SEQ ID NO: 4709 - DNA, 80 bp, synthetic construct
  misc_feature 1..80: note = Synthetic: >NC_038312.1-cand-1320-1399
  source 1..80: mol_type = other DNA
ccctaccagcgacgccatctacaacatggacggaactcttctaggcaatcttttgattttccctcaccaatttataaatt

SEQ ID NO: 4710 - DNA, 80 bp, synthetic construct
  misc_feature 1..80: note = Synthetic: >NC_038312.1-cand-1400-1479
  source 1..80: mol_type = other DNA
tgaggacaaacaacactgctacaatagttgttccttatatcaattcagtacctattgactcaatgaccagacacaacaat

SEQ ID NO: 4711 - DNA, 80 bp, synthetic construct
  misc_feature 1..80: note = Synthetic: >NC_038312.1-cand-1480-1559
  source 1..80: mol_type = other DNA
gtatcactgatggttgttccaatagctccacttaatgcacccactggatcttctcctacattacctgtgactgttacaat

SEQ ID NO: 4712 - DNA, 80 bp, synthetic construct
  misc_feature 1..80: note = Synthetic: >NC_038312.1-cand-1560-1639
  source 1..80: mol_type = other DNA
tgcaccaatgtgcacagaatttactggtattagatctagatccattgtaccacaagggttacccactactacccttccag

SEQ ID NO: 4713 - DNA, 80 bp, synthetic construct
  misc_feature 1..80: note = Synthetic: >NC_038312.1-cand-1640-1719
  source 1..80: mol_type = other DNA
gatctggtcaatttctcactacagatgacagacaatcaccaagtgccttacctagttatgaacctacaccgaggatacat

SEQ ID NO: 4714 - DNA, 80 bp, synthetic construct
  misc_feature 1..80: note = Synthetic: >NC_038312.1-cand-1700-1779
  source 1..80: mol_type = other DNA
aacctacaccgaggatacatattccagggaaagtgagaaatttattagagataatacaagtgggtacattgattccaatg

SEQ ID NO: 4715 - DNA, 80 bp, synthetic construct
  misc_feature 1..80: note = Synthetic: >NC_038312.1-cand-1780-1859
  source 1..80: mol_type = other DNA
aacaacacaggaacaaatgataatgtcacaaattacctcataccactgcatgcagatagacaaaatgagcagatatttgg

SEQ ID NO: 4716 - DNA, 80 bp, synthetic construct
  misc_feature 1..80: note = Synthetic: >NC_038312.1-cand-1860-1939
  source 1..80: mol_type = other DNA
cacaaaactctacattggtgatggtgttttcaagactactttattgggtgaaatagctcagtactacacacactggtctg

SEQ ID NO: 4717 - DNA, 80 bp, synthetic construct
  misc_feature 1..80: note = Synthetic: >NC_038506.1-cand-2920-2999
  source 1..80: mol_type = other DNA
aaatagagatgtgtcctttcaagatttgagtgataacccatgtaaagttgatctacacacccagtccattgacggtgctt

SEQ ID NO: 4718 - DNA, 80 bp, synthetic construct
  misc_feature 1..80: note = Synthetic: >NC_038506.1-cand-3030-3109
  source 1..80: mol_type = other DNA
gtgttgtgggtttaactgaatgtccaagctttatcacttccattaaagcatgtgaccttgcaatgtgctatgggtcaact

SEQ ID NO: 4719 - DNA, 80 bp, synthetic construct
  misc_feature 1..80: note = Synthetic: >NC_038506.1-cand-3130-3209
  source 1..80: mol_type = other DNA
ttccaacacagttaaagttgttggtaaaggtggacactctggatcttcatttaaatgttgtcatgactctgattgttcat

SEQ ID NO: 4720 - DNA, 80 bp, synthetic construct
  misc_feature 1..80: note = Synthetic: >NC_038506.1-cand-3190-3269
  source 1..80: mol_type = other DNA
tcatgactctgattgttcatctgagggattaatggcatctgcaccccatcttgagagggtcacagggttcaaccaaatag

SEQ ID NO: 4721 - DNA, 80 bp, synthetic construct
  misc_feature 1..80: note = Synthetic: >NC_038506.1-cand-3300-3379
  source 1..80: mol_type = other DNA
cgccatgctcttttaagtgctggttcactaagtctggtgagtggctccttggaattttaaatggcaattggattgtgatt

SEQ ID NO: 4722 - DNA, 80 bp, synthetic construct
  misc_feature 1..80: note = Synthetic: >NC_038506.1-cand-3360-3439
  source 1..80: mol_type = other DNA
atggcaattggattgtgattgccgtgctggttatcatcctaataatttcaataatattatttagcttcttatgtccaaga

SEQ ID NO: 4723 - DNA, 80 bp, synthetic construct
  misc_feature 1..80: note = Synthetic: >NC_038506.1-cand-3440-3519
  source 1..80: mol_type = other DNA
cggagtcataagaagaatgtataatctatactaacagtctattatatccatttctagtattatttgtatttattaaccta

SEQ ID NO: 4724 - DNA, 80 bp, synthetic construct
  misc_feature 1..80: note = Synthetic: >NC_038506.1-cand-3520-3599
  source 1..80: mol_type = other DNA
ctaaatctattatacccatatatacaaccacttattaaatttattaacccatactttgtattaccctaacactttataag

SEQ ID NO: 4725 - DNA, 80 bp, synthetic construct
  misc_feature 1..80: note = Synthetic: >NC_038506.1-cand-3600-3679
  source 1..80: mol_type = other DNA
tgacaaaaagctaatcaaaaaaaacaagatctttattcccatataattctatatctctttaccgaggcttttgttcctgc

SEQ ID NO: 4726 - DNA, 80 bp, synthetic construct
  misc_feature 1..80: note = Synthetic: >NC_039199.1-cand-40-119
  source 1..80: mol_type = other DNA
tcttcaagggattcacctgagtgatttatcatacaagcatgctatattaaaagagtctcagtacacaataaaaagagatg

SEQ ID NO: 4727 - DNA, 80 bp, synthetic construct
  misc_feature 1..80: note = Synthetic: >NC_039199.1-cand-120-199
  source 1..80: mol_type = other DNA
tgggtacaacaactgcagtgacaccctcatcattgcaacaagaaataacactgttgtgtggagaaattctgtatgctaaa

SEQ ID NO: 4728 - DNA, 80 bp, synthetic construct
  misc_feature 1..80: note = Synthetic: >NC_039199.1-cand-200-279
  source 1..80: mol_type = other DNA
catgctgactacaaatatgctgcagaaataggaatacaatatattagcacagctttaggatcagagagagtgcagcagat

SEQ ID NO: 4729 - DNA, 80 bp, synthetic construct
  misc_feature 1..80: note = Synthetic: >NC_039199.1-cand-250-329
  source 1..80: mol_type = other DNA
agctttaggatcagagagagtgcagcagattctgaggaactcaggcagtgaagtccaagtggtcttaaccagaacgtact

SEQ ID NO: 4730 - DNA, 80 bp, synthetic construct
  misc_feature 1..80: note = Synthetic: >NC_039199.1-cand-390-469
  source 1..80: mol_type = other DNA
tagagaagagctgggtagaagagatagacaaagaagcaaggaaaacaatggcaaccttgcttaaggaatcatcaggtaat

SEQ ID NO: 4731 - DNA, 80 bp, synthetic construct
  misc_feature 1..80: note = Synthetic: >NC_039199.1-cand-440-519
  source 1..80: mol_type = other DNA
gcaaccttgcttaaggaatcatcaggtaatatcccacaaaatcagaggccctcagcaccagacacacccataatcttatt

SEQ ID NO: 4732 - DNA, 80 bp, synthetic construct
  misc_feature 1..80: note = Synthetic: >NC_039199.1-cand-520-599
  source 1..80: mol_type = other DNA
atgtgtaggtgccttaatattcactaaactagcatcaaccatagaagtgggactagagaccacagtcagaagggctaacc

SEQ ID NO: 4733 - DNA, 80 bp, synthetic construct
  misc_feature 1..80: note = Synthetic: >NC_044856.1-cand-280-359
  source 1..80: mol_type = other DNA
gggatgctgaaccggaacaccaagaaagtacggctaaagcgtggtgtgacctatcgaaagaagaaaaggaggaaataatg

SEQ ID NO: 4734 - DNA, 80 bp, synthetic construct
  misc_feature 1..80: note = Synthetic: >NC_044856.1-cand-310-389
  source 1..80: mol_type = other DNA
cggctaaagcgtggtgtgacctatcgaaagaagaaaaggaggaaataatgcgcaacaatgaaaggcttttcgatgctgga

SEQ ID NO: 4735 - DNA, 80 bp, synthetic construct
  misc_feature 1..80: note = Synthetic: >NC_044856.1-cand-400-479
  source 1..80: mol_type = other DNA
catccaccctacctagcacgtttgaaagagctgaattgagcaacacctcaactgaacagcaaaccgtgtcttggtcagcc

SEQ ID NO: 4736 - DNA, 80 bp, synthetic construct
  misc_feature 1..80: note = Synthetic: >NC_044856.1-cand-500-579
  source 1..80: mol_type = other DNA
tgtaaatgacttgaccaccgtccgtgggccattctggaacatgtgccccctaccgccactggatgcccgcaacaatggcc

SEQ ID NO: 4737 - DNA, 80 bp, synthetic construct
  misc_feature 1..80: note = Synthetic: >NC_044856.1-cand-610-689
  source 1..80: mol_type = other DNA
tagagttctatgaaggtcacatattccattatgccatatatatgggccagggcaaaaccattggagtgcactcgccgcag

SEQ ID NO: 4738 - DNA, 80 bp, synthetic construct
  misc_feature 1..80: note = Synthetic: >NC_044856.1-cand-660-739
  source 1..80: mol_type = other DNA
ggcaaaaccattggagtgcactcgccgcaggccgccttctctatacctagaataacaatccatcccttggtggcttggtg

SEQ ID NO: 4739 - DNA, 80 bp, synthetic construct
  misc_feature 1..80: note = Synthetic: >NC_044856.1-cand-740-819
  source 1..80: mol_type = other DNA
gcgtgtgtgttacactcccacaagccagcaacgcctcacatatgaccagctcaaagaattggaaaacgagccatggcctt

SEQ ID NO: 4740 - DNA, 80 bp, synthetic construct
  misc_feature 1..80: note = Synthetic: >NC_044856.1-cand-820-899
  source 1..80: mol_type = other DNA
atgcctccatcaccaataattgctatgagttttgttgcagagtgatggcacttgatgatacctggctccagaggagactg

SEQ ID NO: 4741 - DNA, 80 bp, synthetic construct
  misc_feature 1..80: note = Synthetic: >NC_044856.1-cand-900-979
  source 1..80: mol_type = other DNA
gttagtgctgggaaatttaaccaccccacacaagagtggtcacaagacaccccagactttcaccaagattccaagcttga

SEQ ID NO: 4742 - DNA, 80 bp, synthetic construct
  misc_feature 1..80: note = Synthetic: >NC_044856.1-cand-980-1059
  source 1..80: mol_type = other DNA
gatggtaagagacgctgtattgtcagccatcaacggcctcgtgtcacagcccttcaaaaacatcttatcaaaaattaaac

SEQ ID NO: 4743 - DNA, 80 bp, synthetic construct
  misc_feature 1..80: note = Synthetic: >NC_044856.1-cand-1020-1099
  source 1..80: mol_type = other DNA
gtgtcacagcccttcaaaaacatcttatcaaaaattaaaccacttaacgtgcttaatctcttatcaaattgtgattggac

SEQ ID NO: 4744 - DNA, 80 bp, synthetic construct
  misc_feature 1..80: note = Synthetic: >NC_044856.1-cand-1140-1219
  source 1..80: mol_type = other DNA
ttatttgatatcttttggactccgccagatatttcaagcttcatagcctcattgctacctgagttccatctgcaaggccc

SEQ ID NO: 4745 - DNA, 80 bp, synthetic construct
  misc_feature 1..80: note = Synthetic: >NC_044856.1-cand-1220-1299
  source 1..80: mol_type = other DNA
ggaagacctggctagggacttggtcccccttgtgctaggtggcattggcttagcgattggcttcacgagagataagataa

SEQ ID NO: 4746 - DNA, 80 bp, synthetic construct
  misc_feature 1..80: note = Synthetic: >NC_044856.1-cand-1300-1379
  source 1..80: mol_type = other DNA
caaaagttatgaaaagtgctgttgacggcctacgatcagcaacacagcttggacaatatggactggaaatattctcaatt

SEQ ID NO: 4747 - DNA, 80 bp, synthetic construct
  misc_feature 1..80: note = Synthetic: >NC_044856.1-cand-1410-1489
  source 1..80: mol_type = other DNA
acagaaaagaccctaagaggtattgaggatgcagttatagacatggaggtgttatccagcactaatgtaactcaattggt

SEQ ID NO: 4748 - DNA, 80 bp, synthetic construct
  misc_feature 1..80: note = Synthetic: >NC_044856.1-cand-1460-1539
  source 1..80: mol_type = other DNA
gttatccagcactaatgtaactcaattggtcaaggacaagaaactagctagagcatacatgaatgtgctggacaacgagg

SEQ ID NO: 4749 - DNA, 80 bp, synthetic construct
  misc_feature 1..80: note = Synthetic: >NC_003310.1-cand-74660-74739
  source 1..80: mol_type = other DNA
ctactataataggctcaccgatgatcattggcaaaatcctatattgtaccagattaatgagagcatatttcatttccaat

SEQ ID NO: 4750 - DNA, 80 bp, synthetic construct
  misc_feature 1..80: note = Synthetic: >NC_001430.1-cand-2420-2499
  source 1..80: mol_type = other DNA
attggagaaatagtgaaaactgtggctaatacagtagagagtgagattaaggctgaattaggagtgataccttcactaaa

SEQ ID NO: 4751 - DNA, 80 bp, synthetic construct
  misc_feature 1..80: note = Synthetic: >AdVB7-cand-17910-17989
  source 1..80: mol_type = other DNA
attggagcagtatctggagcgggcttaaaaattttggctcgaccgtaaaaacctatgggaacaaagcttggaacagcagc

SEQ ID NO: 4752 - DNA, 80 bp, synthetic construct
  misc_feature 1..80: note = Synthetic: >NC_039477.1-cand-2150-2229
  source 1..80: mol_type = other DNA
attggctgcagaaaacaagtatggattggtggataccatgaaagttggcaatcaactaaaaggagtgaaaaccatggaag

SEQ ID NO: 4753 - DNA, 80 bp, synthetic construct
  misc_feature 1..80: note = Synthetic: >NC_001611.1-cand-92370-92449
  source 1..80: mol_type = other DNA
attgggacaacttaatctgatgaataatttagatactttatttcaggaacaggataaggaattgtacccaaatctgaaaa

SEQ ID NO: 4754 - DNA, 80 bp, synthetic construct
  misc_feature 1..80: note = Synthetic: >NC_001430.1-cand-4650-4729
  source 1..80: mol_type = other DNA
tagactttataccaccaatggccagtcttgaggaaaagggaaccctgtacactagcccatttctgattgcgaccaccaat

SEQ ID NO: 4755 - DNA, 80 bp, synthetic construct
  misc_feature 1..80: note = Synthetic: >NC_003310.1-cand-49040-49119
  source 1..80: mol_type = other DNA
attgtattctactcctttcttaatgcattttataccgaacaagagatagcgaaggaattctttttcggtaccgctagtac

SEQ ID NO: 4756 - DNA, 80 bp, synthetic construct
  misc_feature 1..80: note = Synthetic: >NC_001611.1-cand-148510-148589
  source 1..80: mol_type = other DNA
atttcatgattaaaccatgttgtgaaagagtttgtgaaaaagtcaagaacgtacacatcgacggacaatctaaaaacaat

SEQ ID NO: 4757 - DNA, 80 bp, synthetic construct
  misc_feature 1..80: note = Synthetic: >NC_001611.1-cand-134020-134099
  source 1..80: mol_type = other DNA
atttacagttactaaattaatttgataataaatcaaaatatggaaaactaaggtcgttagtagggaggagaacaaagaag

SEQ ID NO: 4758 - DNA, 80 bp, synthetic construct
  misc_feature 1..80: note = Synthetic: >NC_001611.1-cand-92210-92289
  source 1..80: mol_type = other DNA
atttaccaacgataagatatcacggacgtaagtttctagatactagagtagtatattgtcacatgtctaaacttcaagag

SEQ ID NO: 4759 - DNA, 80 bp, synthetic construct
  misc_feature 1..80: note = Synthetic: >AdVB7-cand-4710-4789
  source 1..80: mol_type = other DNA
tctggagccggggtgattaactgggatgaaagcaaattcctaagcagctgagacttgccgcacccagtgggaccgtaaat

SEQ ID NO: 4760 - DNA, 80 bp, synthetic construct
  misc_feature 1..80: note = Synthetic: >NC_003310.1-cand-176220-176299
  source 1..80: mol_type = other DNA
atttagaaatgattgatatcattaacaaacatacaactatctatgaacgcaggtatatagtacactcctatctaaaaaat

SEQ ID NO: 4761 - DNA, 80 bp, synthetic construct
  misc_feature 1..80: note = Synthetic: >NC_003310.1-cand-136100-136179
  source 1..80: mol_type = other DNA
atttagcaatttctgattctagagtactgattctgctcacgtatgtactaatagttgtcttatccttatcaagatcctcc

SEQ ID NO: 4762 - DNA, 80 bp, synthetic construct
  misc_feature 1..80: note = Synthetic: >AdVB7-cand-3510-3589
  source 1..80: mol_type = other DNA
atttagcccttatctgacgggcaggctcccaccatgggcaggagttcgtcagaatgtcatgggatccactgtggatggga

SEQ ID NO: 4763 - DNA, 80 bp, synthetic construct
  misc_feature 1..80: note = Synthetic: >NC_003310.1-cand-110300-110379
  source 1..80: mol_type = other DNA
atttataatactttggtagtatacaagcgagtgcttcttctttagcgggcttaaagactgctttaggtgctgaaataacc

SEQ ID NO: 4764 - DNA, 80 bp, synthetic construct
  misc_feature 1..80: note = Synthetic: >NC_003310.1-cand-71150-71229
  source 1..80: mol_type = other DNA
ttcaacttgtccaaattcctacttacagaagatgaggaatcgttggagatagtatcttccttatgtagaggatttgaaat

SEQ ID NO: 4765 - DNA, 80 bp, synthetic construct
  misc_feature 1..80: note = Synthetic: >NC_003310.1-cand-108180-108259
  source 1..80: mol_type = other DNA
caatgtttcataaaatggaagaaggacatgtgtcccctcccggatattttttacaatttcatccatttacaactctatag

SEQ ID NO: 4766 - DNA, 80 bp, synthetic construct
  misc_feature 1..80: note = Synthetic: >HCV.B6-cand-240-319
  source 1..80: mol_type = other DNA
caattacttcgagaaacccagtaacaccatgaaagttgcgtagcgtttcattcagcacaatcccagtgtagatcaggtcg

SEQ ID NO: 4767 - DNA, 80 bp, synthetic construct
  misc_feature 1..80: note = Synthetic: >NC_001611.1-cand-27280-27359
  source 1..80: mol_type = other DNA
gttttaaactctttagtttctgccatttatccagtctgagaaaatgtccctcataataaatttttccaagaaactaattg

SEQ ID NO: 4768 - DNA, 80 bp, synthetic construct
  misc_feature 1..80: note = Synthetic: >NC_001430.1-cand-3220-3299
  source 1..80: mol_type = other DNA
caattatgcaggtcggtcagctgcacccaatgctcccacagccatagtgtcccataggagtaccataaagacaatgccca

SEQ ID NO: 4769 - DNA, 80 bp, synthetic construct
  misc_feature 1..80: note = Synthetic: >AdVB7-cand-25620-25699
  source 1..80: mol_type = other DNA
cacaccccaccgctcccttgcctgcaacccccagttgctgagcgagacccagatcatcggcaccttcgagttgcagggtc

SEQ ID NO: 4770 - DNA, 80 bp, synthetic construct
  misc_feature 1..80: note = Synthetic: >HCV.A9-cand-5630-5709
  source 1..80: mol_type = other DNA
tgaagctcaaccggaatgagaagttcagagacatcagaggcttcctggccagagaggaggtggaggtcaacgaggctgtg

SEQ ID NO: 4771 - DNA, 80 bp, synthetic construct
  misc_feature 1..80: note = Synthetic: >LC270039.1-cand-6430-6509
  source 1..80: mol_type = other DNA
gtttgttcttttttcttagacgtgagcaaatgtttgttagacacttttttaatagggccggtaccttaggtgaccctgtg

SEQ ID NO: 4772 - DNA, 80 bp, synthetic construct
  misc_feature 1..80: note = Synthetic: >NC_001611.1-cand-106210-106289
  source 1..80: mol_type = other DNA
cggtatcttgacgcagtctagtatacatagagttaagagaaattagagtttgtacattaagcaacatgtctttaaatgtg

SEQ ID NO: 4773 - DNA, 80 bp, synthetic construct
  misc_feature 1..80: note = Synthetic: >NC_001430.1-cand-930-1009
  source 1..80: mol_type = other DNA
caccatcagcagaggcttgtggttatagtgacagggtcttacagctcaaattaggaaattccagtatagttacccaagaa

SEQ ID NO: 4774 - DNA, 80 bp, synthetic construct
  misc_feature 1..80: note = Synthetic: >NC_001722.1-cand-9700-9779
  source 1..80: mol_type = other DNA
cacccagcacaaacaagcagacatgatgatgagcatggggagacattagtgtggcagtttgactccatgctggcctataa

SEQ ID NO: 4775 - DNA, 80 bp, synthetic construct
  misc_feature 1..80: note = Synthetic: >AdVB3-cand-10080-10159
  source 1..80: mol_type = other DNA
cgagtatgcgcgggtgtcaaagatgtaatcgttgcaggtgcgcaccaggtactggtagccaatgagaaagtgtggcggtg

SEQ ID NO: 4776 - DNA, 80 bp, synthetic construct
  misc_feature 1..80: note = Synthetic: >EVD70-cand-3620-3699
  source 1..80: mol_type = other DNA
gggtccatgtcagccaggtgattgcgggggcctcttagtctgctcacatggagtgataggactcgtcaccgcaggcggtg

SEQ ID NO: 4777 - DNA, 80 bp, synthetic construct
  misc_feature 1..80: note = Synthetic: >NC_039477.1-cand-1450-1529
  source 1..80: mol_type = other DNA
tatctagcaggataagaccagtagttgttatgatatctggcaaaccaggaataggcaaaactcatctggccagggaggtg

SEQ ID NO: 4778 - DNA, 80 bp, synthetic construct
  misc_feature 1..80: note = Synthetic: >NC_001611.1-cand-133380-133459
  source 1..80: mol_type = other DNA
caccttcacaaaatacggagtcttcgataataatagccaatcgattattggatctaaccgtctgtatcatattcaacatg

SEQ ID NO: 4779 - DNA, 80 bp, synthetic construct
  misc_feature 1..80: note = Synthetic: >NC_001611.1-cand-113620-113699
  source 1..80: mol_type = other DNA
ccatatccagacaacaatcgtttggattaatctgttcctgtcgtctcataccggacgacatattaatctttttattagtg

SEQ ID NO: 4780 - DNA, 80 bp, synthetic construct
  misc_feature 1..80: note = Synthetic: >NC_001357.1-cand-5550-5629
  source 1..80: mol_type = other DNA
tggccattatattattttattcctaagaaacgtaaacgtgttccctatttttttgcagatggctttgtggcggcctagtg

SEQ ID NO: 4781 - DNA, 80 bp, synthetic construct
  misc_feature 1..80: note = Synthetic: >AJ410618.2-cand-1350-1429
  source 1..80: mol_type = other DNA
tttactactaaacatacttacgttgataatgtcctagagaagttctttcaaaatgaaatccagagatacttattagatgt

SEQ ID NO: 4782 - DNA, 80 bp, synthetic construct
  misc_feature 1..80: note = Synthetic: >AJ410618.2-cand-1430-1509
  source 1..80: mol_type = other DNA
tttgaaaaagacaactgcatggcatattggtcatcttatccgggacataacagaaagtttaattgctcattcaggtctca

SEQ ID NO: 4783 - DNA, 80 bp, synthetic construct
  misc_feature 1..80: note = Synthetic: >AJ410618.2-cand-1510-1589
  source 1..80: mol_type = other DNA
agaggtcaaagtactggtctgtacatgcctacaataatggaaatgtgattttattcatacttccgtctaaatcattggag

SEQ ID NO: 4784 - DNA, 80 bp, synthetic construct
  misc_feature 1..80: note = Synthetic: >AJ410618.2-cand-1590-1669
  source 1..80: mol_type = other DNA
gtcgcaggttcatatataagatttgtgacagtctttcgaatgggccctgggttagttgataaagataatctagatacaat

SEQ ID NO: 4785 - DNA, 80 bp, synthetic construct
  misc_feature 1..80: note = Synthetic: >AJ410618.2-cand-1700-1779
  source 1..80: mol_type = other DNA
ttcaaaggtcatgagtattgacttgaatagattactagcacttaatatagcgtttgaaaaagcactgattgctacagcaa

SEQ ID NO: 4786 - DNA, 80 bp, synthetic construct
  misc_feature 1..80: note = Synthetic: >AJ410618.2-cand-1750-1829
  source 1..80: mol_type = other DNA
cgtttgaaaaagcactgattgctacagcaacatggtttcaatactatacagaagaccaaggccaatttcctttgcaacat

SEQ ID NO: 4787 - DNA, 80 bp, synthetic construct
  misc_feature 1..80: note = Synthetic: >AJ410618.2-cand-1830-1909
  source 1..80: mol_type = other DNA
gctataaggtcaatctttgcttaccacttactattagctgtgtgtcaaaagatgaaattatgtgctatctttgataattt

SEQ ID NO: 4788 - DNA, 80 bp, synthetic construct
  misc_feature 1..80: note = Synthetic: >AJ410618.2-cand-1910-1989
  source 1..80: mol_type = other DNA
ccggtatttaatacctgctgtcacatccctttattctggtttcccctctttaataagcaaattgtttgaacgtcccttca

SEQ ID NO: 4789 - DNA, 80 bp, synthetic construct
  misc_feature 1..80: note = Synthetic: >AJ410618.2-cand-1990-2069
  source 1..80: mol_type = other DNA
agagtgctttggaagtatatgtttattacaatattaaaagtttgcttgtggcccttgcacagaataataaggccaggttt

SEQ ID NO: 4790 - DNA, 80 bp, synthetic construct
  misc_feature 1..80: note = Synthetic: >AJ410618.2-cand-2070-2149
  source 1..80: mol_type = other DNA
tattcaaaagtaaagcttttaggcttgacagtagatcaatcaactgttggtgctagtggaatttacccctcattcatgtc

SEQ ID NO: 4791 - DNA, 80 bp, synthetic construct
  misc_feature 1..80: note = Synthetic: >AJ410618.2-cand-2140-2219
  source 1..80: mol_type = other DNA
cattcatgtctcgtgtcatctataaacattatcgtagtcttatatcagaagtaacaacatgtttcttcttatttgaaaag

SEQ ID NO: 4792 - DNA, 80 bp, synthetic construct
  misc_feature 1..80: note = Synthetic: >AJ410618.2-cand-2240-2319
  source 1..80: mol_type = other DNA
cgaggaagcaaaaatacaccttgagactgtagaatgggcccttaagtttagacaaaaggaagaccaatatggagaatcta

SEQ ID NO: 4793 - DNA, 80 bp, synthetic construct
  misc_feature 1..80: note = Synthetic: >AJ410618.2-cand-2320-2399
  source 1..80: mol_type = other DNA
tggttgaaaatgggtatacaataggtgaactcaatgacaaccaagagttagttgaacagcaactttattgccaagatgct

SEQ ID NO: 4794 - DNA, 80 bp, synthetic construct
  misc_feature 1..80: note = Synthetic: >AJ410618.2-cand-2400-2479
  source 1..80: mol_type = other DNA
gtagagcttgcagctatggaactcaacaagatactgtcaacaaaatctcaggttgtagctaatagtatcctcaataaata

SEQ ID NO: 4795 - DNA, 80 bp, synthetic construct
  misc_feature 1..80: note = Synthetic: >AJ410618.2-cand-2480-2559
  source 1..80: mol_type = other DNA
ttgggaagttccttattttagtcagactaggaacataagtttgaaagggatgtcaggccaggttcaagaagatgggcatc

SEQ ID NO: 4796 - DNA, 80 bp, synthetic construct
  misc_feature 1..80: note = Synthetic: >AJ410618.2-cand-2560-2639
  source 1..80: mol_type = other DNA
ttgctgcatctgttacaattatagaggccataaggtacctttcatcctcacaaaacaatcccagtgtgctacaactttat

SEQ ID NO: 4797 - DNA, 80 bp, synthetic construct
  misc_feature 1..80: note = Synthetic: >AdVB7-cand-32380-32459
  source 1..80: mol_type = other DNA
taatgagacatcatattgtattcgtgtaacttggtcctggaatacaggagttgccccagaagtgcaaacctctgctacta

SEQ ID NO: 4798 - DNA, 80 bp, synthetic construct
  misc_feature 1..80: note = Synthetic: >AdVB7-cand-32460-32539
  source 1..80: mol_type = other DNA
ccctagtcacctctccatttaccttttactacattagagaagacgactgacaaataaagtttaacttgtttatttaaaat

SEQ ID NO: 4799 - DNA, 80 bp, synthetic construct
  misc_feature 1..80: note = Synthetic: >AdVB7-cand-32540-32619
  source 1..80: mol_type = other DNA
caattcataaaattcgagtagttattttgcctcccccttcccatttaacagaatacaccaatctctccccacgcacagct

SEQ ID NO: 4800 - DNA, 80 bp, synthetic construct
  misc_feature 1..80: note = Synthetic: >AdVB7-cand-32890-32969
  source 1..80: mol_type = other DNA
tgcgactgctgtttataggatcgggatccacagtgtcctgaagcatcattttaatagcccttaacattaactttctggtg

SEQ ID NO: 4801 - DNA, 80 bp, synthetic construct
  misc_feature 1..80: note = Synthetic: >AdVB7-cand-34490-34569
  source 1..80: mol_type = other DNA
gacgctacagtgcagtacaagcgcagacctccccaattggctccagcaaaaacaagattagaataagcatactggcaacc

SEQ ID NO: 4802 - DNA, 80 bp, synthetic construct
  misc_feature 1..80: note = Synthetic: >AdVB7-cand-34800-34879
  source 1..80: mol_type = other DNA
cacaagacaagccacagggtctccagctctaccctcgtaaaacctgtcatcgtgattaaacaacagcaccgaaagttcct

SEQ ID NO: 4803 - DNA, 80 bp, synthetic construct
  misc_feature 1..80: note = Synthetic: >AdVE4-cand-10-89
  source 1..80: mol_type = other DNA
taccttattagatggaatggtgccaatatgtaaatgaggtgtgaaaatttgaaaaaagtgcgcgctgtgtggtgattggc

SEQ ID NO: 4804 - DNA, 80 bp, synthetic construct
  misc_feature 1..80: note = Synthetic: >AdVE4-cand-120-199
  source 1..80: mol_type = other DNA
aattggctgggaggtgacgtaacttatgtgggaggagttatgttgcaagttattgtggttaaatgtgacgtaaaaccagg

SEQ ID NO: 4805 - DNA, 80 bp, synthetic construct
  misc_feature 1..80: note = Synthetic: >AdVE4-cand-160-239
  source 1..80: mol_type = other DNA
tgttgcaagttattgtggttaaatgtgacgtaaaaccaggtgtggtttaaacacggaagtagacagttttcccacgctta

SEQ ID NO: 4806 - DNA, 80 bp, synthetic construct
  misc_feature 1..80: note = Synthetic: >AdVE4-cand-400-479
  source 1..80: mol_type = other DNA
tcgattaccgtgttttttacctaaatttccgcgtacggtgtcaaagttcggtgtttttacgtaggtgtcagctgattgcc

SEQ ID NO: 4807 - DNA, 80 bp, synthetic construct
  misc_feature 1..80: note = Synthetic: >AdVE4-cand-480-559
  source 1..80: mol_type = other DNA
agggtatttaaacctgtgctgttcagtcaagaggccactcttgagtgccagcgagaagagttttctcctccgcgccgtga

SEQ ID NO: 4808 - DNA, 80 bp, synthetic construct
  misc_feature 1..80: note = Synthetic: >AdVE4-cand-560-639
  source 1..80: mol_type = other DNA
gtcaaatttacactttgaaatatgaggcacctgagagacctgcccgatgagaaaattattatcgcttccgggagcgagat

SEQ ID NO: 4809 - DNA, 80 bp, synthetic construct
  misc_feature 1..80: note = Synthetic: >AdVE4-cand-640-719
  source 1..80: mol_type = other DNA
tctggaactggtggtaaatgctataatgggcgacgaccatccggaaccccccaccccatttgagacaccttcgctgcacg

SEQ ID NO: 4810 - DNA, 80 bp, synthetic construct
  misc_feature 1..80: note = Synthetic: >AdVE4-cand-720-799
  source 1..80: mol_type = other DNA
atttgtatgatctggaggtggatgtgcccgaggacgaccccaacgaggaggcggtaaatgatttatttagtgatgccgcg

SEQ ID NO: 4811 - DNA, 80 bp, synthetic construct
  misc_feature 1..80: note = Synthetic: >AdVE4-cand-800-879
  source 1..80: mol_type = other DNA
ctgctagctgccgaggaggctttaagccctagctcagacagcgactcttcactgcatacccctagacacggcagaggtga

SEQ ID NO: 4812 - DNA, 80 bp, synthetic construct
  misc_feature 1..80: note = Synthetic: >AdVE4-cand-910-989
  source 1..80: mol_type = other DNA
gatggacttgcattgctatgaggaatgcttgcccccgagcgatgatgagtacgagcaggcgatccagaacgcagcgagcc

SEQ ID NO: 4813 - DNA, 80 bp, synthetic construct
  misc_feature 1..80: note = Synthetic: >EVA89-cand-1410-1489
  source 1..80: mol_type = other DNA
cagggaaaaatggaaaagagctagccttcccatatgtcttggatgctggtatcccacttagtgaagcactaatctttcct

SEQ ID NO: 4814 - DNA, 80 bp, synthetic construct
  misc_feature 1..80: note = Synthetic: >EVA89-cand-1490-1569
  source 1..80: mol_type = other DNA
catcagtggataaacttgagaactaacaactgtgccactatagttatgccctacatcaatgctgtgccatatgactcagc

SEQ ID NO: 4815 - DNA, 80 bp, synthetic construct
  misc_feature 1..80: note = Synthetic: >EVA89-cand-1570-1649
  source 1..80: mol_type = other DNA
gttgaaccattgcaatttcggattgtgtgtgatccctatagtccctcttgactacaatgaaggtgccacctcagcaatac

SEQ ID NO: 4816 - DNA, 80 bp, synthetic construct
  misc_feature 1..80: note = Synthetic: >EVA89-cand-1640-1719
  source 1..80: mol_type = other DNA
tcagcaatacccataacggttactattgcaccgctgaactccgaattcggtggtctgagacaagctgtgcaacaaggact

SEQ ID NO: 4817 - DNA, 80 bp, synthetic construct
  misc_feature 1..80: note = Synthetic: >EVA89-cand-1720-1799
  source 1..80: mol_type = other DNA
tcctgccgaactcaaaccaggtaccaaccaattcctcactacagatgatggtatttctgctccaatcttaccaggcttcc

SEQ ID NO: 4818 - DNA, 80 bp, synthetic construct
  misc_feature 1..80: note = Synthetic: >EVA89-cand-1800-1879
  source 1..80: mol_type = other DNA
accccactcctgagatacacataccaggtgaagtgacaaatttactagagatatgtcaagtagagtctattattgaagtg

SEQ ID NO: 4819 - DNA, 80 bp, synthetic construct
  misc_feature 1..80: note = Synthetic: >EVA89-cand-1880-1959
  source 1..80: mol_type = other DNA
aacaatttgagtaccctagaaacctcatcaactgccatgcagagactctcatttgaggtctcagtgcaaagtgcagtaga

SEQ ID NO: 4820 - DNA, 80 bp, synthetic construct
  misc_feature 1..80: note = Synthetic: >EVA89-cand-1960-2039
  source 1..80: mol_type = other DNA
ccagttgtgtgctgcattcagggtagacccaggtagagatggaccatggcaatcaaccttagttggccagatttgtaaat

SEQ ID NO: 4821 - DNA, 80 bp, synthetic construct
  misc_feature 1..80: note = Synthetic: >EVA89-cand-2030-2109
  source 1..80: mol_type = other DNA
atttgtaaatactacacccagtggtcaggttcactggaggtcacattcatgttcactggttccttcatggccacgggtaa

SEQ ID NO: 4822 - DNA, 80 bp, synthetic construct
  misc_feature 1..80: note = Synthetic: >EVA89-cand-2140-2219
  source 1..80: mol_type = other DNA
ccccaaaccagctaatcgtgagacagccatgctaggtacgcatgtcatctgggattttggcctacagtcctccgttacac

SEQ ID NO: 4823 - DNA, 80 bp, synthetic construct
  misc_feature 1..80: note = Synthetic: >EVA89-cand-2190-2269
  source 1..80: mol_type = other DNA
gggattttggcctacagtcctccgttacactagtgattccatggattagtaatacacacttcagaacacaagccacaggt

SEQ ID NO: 4824 - DNA, 80 bp, synthetic construct
  misc_feature 1..80: note = Synthetic: >EVA89-cand-2260-2339
  source 1..80: mol_type = other DNA
agccacaggtggttactttgattactacacagctggaattgtaacaatttggtaccagacaaattttgttgtcccagatg

SEQ ID NO: 4825 - DNA, 80 bp, synthetic construct
  misc_feature 1..80: note = Synthetic: >EVA89-cand-2350-2429
  source 1..80: mol_type = other DNA
ccaagcccgtatcatagcacttggtgctgctcaaaagaacttcactctaaggctgtgcaaggacactgcagagataactc

SEQ ID NO: 4826 - DNA, 80 bp, synthetic construct
  misc_feature 1..80: note = Synthetic: >EVA89-cand-2430-2509
  source 1..80: mol_type = other DNA
aaacagccattctacagggtgaccctatggaagacatggtcaacaatgctgtctccaatgccctgtccaatgccttttca

SEQ ID NO: 4827 - DNA, 80 bp, synthetic construct
  misc_feature 1..80: note = Synthetic: >EVA89-cand-2510-2589
  source 1..80: mol_type = other DNA
cgtcccagcacccagtccacagctgagaataccagacccagctctcacactattggcactggtgaagttcccgcattgca

SEQ ID NO: 4828 - DNA, 80 bp, synthetic construct
  misc_feature 1..80: note = Synthetic: >EVA89-cand-2590-2669
  source 1..80: mol_type = other DNA
agctgccgaaactggagccacctccaacactagtgatgagaatatgattgaaactagagcagttgtcaataaacacagtg

SEQ ID NO: 4829 - DNA, 80 bp, synthetic construct
  misc_feature 1..80: note = Synthetic: >EVB101-cand-6230-6309
  source 1..80: mol_type = other DNA
acccatgaaattggaggatgctgtgtatggcactgaaggactggaagcactagacttaaccaccagtgcaggctacccgt

SEQ ID NO: 4830 - DNA, 80 bp, synthetic construct
  misc_feature 1..80: note = Synthetic: >EVB101-cand-6310-6389
  source 1..80: mol_type = other DNA
atgtggcacttggcatcaagaagagagacatactttcaaagaagaccaaagaccttaccaaattgaaggagtgcatggac

SEQ ID NO: 4831 - DNA, 80 bp, synthetic construct
  misc_feature 1..80: note = Synthetic: >EVB101-cand-6390-6469
  source 1..80: mol_type = other DNA
aagtatgggctgaaccttccaatggtgacatatatcaaggatgagttaagatctgccgagaaagtagccatgggaaaatc

SEQ ID NO: 4832 - DNA, 80 bp, synthetic construct
  misc_feature 1..80: note = Synthetic: >EVB101-cand-6470-6549
  source 1..80: mol_type = other DNA
cagacttattgaggcctccagccttaatgactcagtggcgatgagacaaacatttggcaacttgtacaaaactttccacc

SEQ ID NO: 4833 - DNA, 80 bp, synthetic construct
  misc_feature 1..80: note = Synthetic: >EVB101-cand-6550-6629
  source 1..80: mol_type = other DNA
tcaacccaggtatcgttacgggtagtgccgtcgggtgtgaccctgatgtgttttggagcaaaatccccgtcatgcttgat

SEQ ID NO: 4834 - DNA, 80 bp, synthetic construct
  misc_feature 1..80: note = Synthetic: >EVB101-cand-6630-6709
  source 1..80: mol_type = other DNA
gggcacctaatagcctttgactactcgggttacgacgctagtctcagcccagtgtggtttgcatgtttgaaactcctttt

SEQ ID NO: 4835 - DNA, 80 bp, synthetic construct
  misc_feature 1..80: note = Synthetic: >EVB101-cand-6710-6789
  source 1..80: mol_type = other DNA
ggagaaactgggatatactaacaaagagacaaactatatagactacctctgtaactcccatcatttgtacagagacaagc

SEQ ID NO: 4836 - DNA, 80 bp, synthetic construct
  misc_feature 1..80: note = Synthetic: >EVB101-cand-6790-6869
  source 1..80: mol_type = other DNA
actacttcgtaagaggagggatgccgtcaggatgctcaggcactagcatatttaactctatgattaacaacatcataatc

SEQ ID NO: 4837 - DNA, 80 bp, synthetic construct
  misc_feature 1..80: note = Synthetic: >EVB101-cand-6850-6929
  source 1..80: mol_type = other DNA
tgattaacaacatcataatcaggactctcatgctgaaggtgtacaaaggaattgatttagaccaattcaggatgattgct

SEQ ID NO: 4838 - DNA, 80 bp, synthetic construct
  misc_feature 1..80: note = Synthetic: >EVB101-cand-6950-7029
  source 1..80: mol_type = other DNA
ttcatacccgtggcccattgatgcttcgctcctagctgaagcaggaagagattatggcctgatcatgaccccagctgata

SEQ ID NO: 4839 - DNA, 80 bp, synthetic construct
  misc_feature 1..80: note = Synthetic: >EVB101-cand-7030-7109
  source 1..80: mol_type = other DNA
aaggtgagtgcttcaacgaagtgacatggacaaacgtgaccttcttgaaaaggtacttcagggcagatgagcagtaccca

SEQ ID NO: 4840 - DNA, 80 bp, synthetic construct
  misc_feature 1..80: note = Synthetic: >EVB101-cand-7110-7189
  source 1..80: mol_type = other DNA
ttcctagtgcatcctgtgatgcccatgaaagacatacatgagtccattagatggactaaggatcccaaaaacacacagga

SEQ ID NO: 4841 - DNA, 80 bp, synthetic construct
  misc_feature 1..80: note = Synthetic: >EVB101-cand-7230-7309
  source 1..80: mol_type = other DNA
gagcacgagtacgaggagttcattcgtaagattagaagtgtgcccgttgggcgctgcttaacacttcctgcgttctcaac

SEQ ID NO: 4842 - DNA, 80 bp, synthetic construct
  misc_feature 1..80: note = Synthetic: >EVB69-cand-60-139
  source 1..80: mol_type = other DNA
ggtacctttgtgcgcctgttttataccccctaccccaactttaaacttagaagcaaagcaaacccgatcaatagcagatg

SEQ ID NO: 4843 - DNA, 80 bp, synthetic construct
  misc_feature 1..80: note = Synthetic: >EVB69-cand-390-469
  source 1..80: mol_type = other DNA
atgggacgctctaatatggacatggtgtgaagagtctattgagctagttggtagtcctccggcccctgaatgcggctaat

SEQ ID NO: 4844 - DNA, 80 bp, synthetic construct
  misc_feature 1..80: note = Synthetic: >EVB69-cand-420-499
  source 1..80: mol_type = other DNA
agagtctattgagctagttggtagtcctccggcccctgaatgcggctaatcctaactgcggagcacataccccaaagcca

SEQ ID NO: 4845 - DNA, 80 bp, synthetic construct
  misc_feature 1..80: note = Synthetic: >EVB75-cand-7100-7179
  source 1..80: mol_type = other DNA
tgtccatcctgtgatgccaatgaaggacatccatgaatctatcaggtggactaaagaccccaaaaacacccaagatcatg

SEQ ID NO: 4846 - DNA, 80 bp, synthetic construct
  misc_feature 1..80: note = Synthetic: >EVB75-cand-7260-7339
  source 1..80: mol_type = other DNA
gttgggcgctgcttgaccttacctgcgttctcaaccttacgcaggaaatggctggattctttttaaattagagcacaatt

SEQ ID NO: 4847 - DNA, 80 bp, synthetic construct
  misc_feature 1..80: note = Synthetic: >EVB75-cand-7320-7399
  source 1..80: mol_type = other DNA
ttttaaattagagcacaatttgatataattcaaattggcttaaccctaccacactcaccgaactagacaacggtgtggta

SEQ ID NO: 4848 - DNA, 80 bp, synthetic construct
  misc_feature 1..80: note = Synthetic: >EVB77-cand-0-79
  source 1..80: mol_type = other DNA
aacaggcttgttgggttgttcccacccacaaggcccactgggcgctagcacactggtattccggtacctttgtgcgcctg

SEQ ID NO: 4849 - DNA, 80 bp, synthetic construct
  misc_feature 1..80: note = Synthetic: >EVB77-cand-80-159
  source 1..80: mol_type = other DNA
ttttataccccctcccccccccgtaacaaacttagaagcaaagtaaactcgatcaatagccggtgtgacaaaccagtcgc

SEQ ID NO: 4850 - DNA, 80 bp, synthetic construct
  misc_feature 1..80: note = Synthetic: >EVB77-cand-160-239
  source 1..80: mol_type = other DNA
atcttgatcaagcacttctgtctccccggaccgagtatcaataaactgctcacgcggttgaaggagaaagcgttcgttac

SEQ ID NO: 4851 - DNA, 80 bp, synthetic construct
  misc_feature 1..80: note = Synthetic: >EVB77-cand-200-279
  source 1..80: mol_type = other DNA
ataaactgctcacgcggttgaaggagaaagcgttcgttacccgaccaattacttcgaaaaacctagtaccaccatgaaag

SEQ ID NO: 4852 - DNA, 80 bp, synthetic construct
  misc_feature 1..80: note = Synthetic: >EVB77-cand-300-379
  source 1..80: mol_type = other DNA
cacaaccccagtgtagatcaggtcgatgagtcaccgcattccccacgggcgaccgtggcggtggctgcgctggcggcctg

SEQ ID NO: 4853 - DNA, 80 bp, synthetic construct
  misc_feature 1..80: note = Synthetic: >EVB77-cand-560-639
  source 1..80: mol_type = other DNA
ccgtgtttccttttacctcaattttggctgcttatggtgacaattgaaagattgttaccatatagctattggattggcca

SEQ ID NO: 4854 - DNA, 80 bp, synthetic construct
  misc_feature 1..80: note = Synthetic: >EVB77-cand-640-719
  source 1..80: mol_type = other DNA
tccggtgactaacagagctattgtgtaccttttcgttggttttataccactcaccctcgcggaggttaagattttacttt

SEQ ID NO: 4855 - DNA, 80 bp, synthetic construct
  misc_feature 1..80: note = Synthetic: >EVB77-cand-720-799
  source 1..80: mol_type = other DNA
atataatacacttgaacacattaaaatgggagcacaggtgtcaactcaaaagactggagcccatgagaccggcgtaagcg

SEQ ID NO: 4856 - DNA, 80 bp, synthetic construct
  misc_feature 1..80: note = Synthetic: >EVB77-cand-810-889
  source 1..80: mol_type = other DNA
ctccgtcatccactacaccaacatcaattattataaagatgcagcgtcaaattccgccaacagacaagatttcaaacaag

SEQ ID NO: 4857 - DNA, 80 bp, synthetic construct
  misc_feature 1..80: note = Synthetic: >EVB77-cand-890-969
  source 1..80: mol_type = other DNA
atcctagtaaattcacggaaccgctcaaagatgtaatggtgaagtctttaccagcattgaattcaccatcagcagaggag

SEQ ID NO: 4858 - DNA, 80 bp, synthetic construct
  misc_feature 1..80: note = Synthetic: >EVB77-cand-970-1049
  source 1..80: mol_type = other DNA
tgcgggtacagtgatcgcgtcaggtcattgacgctaggcaactcaaccattactacacaggaaagtgccaacgttgttat

SEQ ID NO: 4859 - DNA, 80 bp, synthetic construct
  misc_feature 1..80: note = Synthetic: >EVB77-cand-1060-1139
  source 1..80: mol_type = other DNA
gagtggccagggtacttggcggatgatcaggctacggcagaggatcaaccgactcagccagatgtagcgacttgccgctt

SEQ ID NO: 4860 - DNA, 80 bp, synthetic construct
  misc_feature 1..80: note = Synthetic: >EVB77-cand-1130-1209
  source 1..80: mol_type = other DNA
cttgccgcttctacacgttggagtccgtgaagtgggaagccaactcccctgggtggtggtggaaattaccagacgcactg

SEQ ID NO: 4861 - DNA, 80 bp, synthetic construct
  misc_feature 1..80: note = Synthetic: >GU997097.1-cand-1830-1909
  source 1..80: mol_type = other DNA
tgcattgcgttcggttttttctttccatctcttactatgtgtttctcagaaaatgaaaatttgtgctatttttgataacc

SEQ ID NO: 4862 - DNA, 80 bp, synthetic construct
  misc_feature 1..80: note = Synthetic: >GU997097.1-cand-1910-1989
  source 1..80: mol_type = other DNA
taagatatctcataccatctgtgacttcattgtactcaggttatgagttgctgatagaaaagttttttgaaagaccattt

SEQ ID NO: 4863 - DNA, 80 bp, synthetic construct
  misc_feature 1..80: note = Synthetic: >GU997097.1-cand-1990-2069
  source 1..80: mol_type = other DNA
aagagtgcactggatgtatatctgtattcaattataaaaagcttattagtgagtttagcgcaaaataataaagtgaggtt

SEQ ID NO: 4864 - DNA, 80 bp, synthetic construct
  misc_feature 1..80: note = Synthetic: >GU997097.1-cand-2070-2149
  source 1..80: mol_type = other DNA
ttattctaaagtaagactacttggtttaacggttgatcaatctactgtgggtgcaagtggtgtttatccgtccttaatgt

SEQ ID NO: 4865 - DNA, 80 bp, synthetic construct
  misc_feature 1..80: note = Synthetic: >GU997097.1-cand-2150-2229
  source 1..80: mol_type = other DNA
cccgggtagtctacaaacattacaggagcttaatttcagaggcaactacctgtttctttctattcgaaaaagggttacac

SEQ ID NO: 4866 - DNA, 80 bp, synthetic construct
  misc_feature 1..80: note = Synthetic: >GU997097.1-cand-2230-2309
  source 1..80: mol_type = other DNA
ggcaatctgacagaggaggctaaaattcacttagaaactgtagaatgggctagaaagttcaatgagaaagagaatagata

SEQ ID NO: 4867 - DNA, 80 bp, synthetic construct
  misc_feature 1..80: note = Synthetic: >GU997097.1-cand-2310-2389
  source 1..80: mol_type = other DNA
tggtgatattttgatgaaagaagggtatacaattgagttagttgaaaatcaaaatgtgaccgtagaacagcaattattct

SEQ ID NO: 4868 - DNA, 80 bp, synthetic construct
  misc_feature 1..80: note = Synthetic: >GU997097.1-cand-2390-2469
  source 1..80: mol_type = other DNA
gtcaagaggttgttgagctcagtgcaatggagctaaataaatacttacatgcaaaatctcaagttctgtgtgcaaatata

SEQ ID NO: 4869 - DNA, 80 bp, synthetic construct
  misc_feature 1..80: note = Synthetic: >GU997097.1-cand-2470-2549
  source 1..80: mol_type = other DNA
atgaataaacattgggataagccttatttcagtcaagtaaggaatataagccttaagggcatgtctggctctctacaaga

SEQ ID NO: 4870 - DNA, 80 bp, synthetic construct
  misc_feature 1..80: note = Synthetic: >GU997097.1-cand-2550-2629
  source 1..80: mol_type = other DNA
ggatggccatctggcttctagtgttacacttatagaggcaatccggtttttaaatagctcacagattaaccccaatgtaa

SEQ ID NO: 4871 - DNA, 80 bp, synthetic construct
  misc_feature 1..80: note = Synthetic: >GU997097.1-cand-2630-2709
  source 1..80: mol_type = other DNA
ttgacatgtatgaacgtacaaagcattgcaaagcccaggctagaattgtaagaaaataccagaggactgaagctgataga

SEQ ID NO: 4872 - DNA, 80 bp, synthetic construct
  misc_feature 1..80: note = Synthetic: >GU997097.1-cand-2720-2799
  source 1..80: mol_type = other DNA
taacaaccctcccaacaagggtgagattggaaataatagaagattattacgatgcaattgcaaaagttgtacctgaagaa

SEQ ID NO: 4873 - DNA, 80 bp, synthetic construct
  misc_feature 1..80: note = Synthetic: >GU997097.1-cand-2800-2879
  source 1..80: mol_type = other DNA
tacatatcttacggaggtgaacgtaaaatcttaaacatacaatctgctttagaaaaggctctgaggtgggcttctggaat

SEQ ID NO: 4874 - DNA, 80 bp, synthetic construct
  misc_feature 1..80: note = Synthetic: >GU997097.1-cand-2880-2959
  source 1..80: mol_type = other DNA
ttctgaaatcataacaagtacgggtaaaaagataagatttaaacgaaagttgatgtatgttagtgcagatgctactaagt

SEQ ID NO: 4875 - DNA, 80 bp, synthetic construct
  misc_feature 1..80: note = Synthetic: >GU997097.1-cand-2970-3049
  source 1..80: mol_type = other DNA
ggataattctgcaaagtttcggagattcacacaagctatatatgatggcctcaatgatgacaaattaaagtgttgtgttg

SEQ ID NO: 4876 - DNA, 80 bp, synthetic construct
  misc_feature 1..80: note = Synthetic: >GU997097.1-cand-3040-3119
  source 1..80: mol_type = other DNA
tgttgtgttgtagactccttaaagaatatatatgagactgaatttttcatgtctagaaagctccataggtatatagatag

SEQ ID NO: 4877 - DNA, 80 bp, synthetic construct
  misc_feature 1..80: note = Synthetic: >HCV.A12-cand-5630-5709
  source 1..80: mol_type = other DNA
agagacatcactaagttcatcccagagagcattagtgctgcaagcgatgctaccttagtaatcaacacagaacacatgcc

SEQ ID NO: 4878 - DNA, 80 bp, synthetic construct
  misc_feature 1..80: note = Synthetic: >HCV.A12-cand-5710-5789
  source 1..80: mol_type = other DNA
ctctatgttcgtgccagtgggagacgttgtacaatatggctttctcaaccttagtggaaaaccaacccaccgtaccatga

SEQ ID NO: 4879 - DNA, 80 bp, synthetic construct
  misc_feature 1..80: note = Synthetic: >HCV.A12-cand-5790-5869
  source 1..80: mol_type = other DNA
tgtacaacttccccaccaaggcagggcaatgcggaggagtggttacatcagttggaaaggtcatcggtatacacataggt

SEQ ID NO: 4880 - DNA, 80 bp, synthetic construct
  misc_feature 1..80: note = Synthetic: >HCV.A12-cand-5950-6029
  source 1..80: mol_type = other DNA
acccaataaagaaactgggagactcaatatcaatgggccaactcgcaccaagctcgaacccagtgtgtttcatgatgttt

SEQ ID NO: 4881 - DNA, 80 bp, synthetic construct
  misc_feature 1..80: note = Synthetic: >HCV.A12-cand-6030-6109
  source 1..80: mol_type = other DNA
ttgagggaaacaaggagccagcggttctacatagtaaagatccccgtcttgaagtggactttgagcaagctctgttttcc

SEQ ID NO: 4882 - DNA, 80 bp, synthetic construct
  misc_feature 1..80: note = Synthetic: >HCV.A12-cand-6110-6189
  source 1..80: mol_type = other DNA
aagtacgtaggtaacacactacacgagcctgatgagtacattaaggaggcagctcttcattatgcaaatcagttgaagca

SEQ ID NO: 4883 - DNA, 80 bp, synthetic construct
  misc_feature 1..80: note = Synthetic: >HCV.A12-cand-6190-6269
  source 1..80: mol_type = other DNA
gctagatattgacacctcccaaatgagtatggaggaagcttgttacggcactgagaaccttgaggctatcgatcttcata

SEQ ID NO: 4884 - DNA, 80 bp, synthetic construct
  misc_feature 1..80: note = Synthetic: >HCV.A12-cand-6280-6359
  source 1..80: mol_type = other DNA
ctacccgtacagtgctctagggataaagaaaagagacatcttagatcctactactagggacgtgagcaagatgaaatttt

SEQ ID NO: 4885 - DNA, 80 bp, synthetic construct
  misc_feature 1..80: note = Synthetic: >HCV.A12-cand-6360-6439
  source 1..80: mol_type = other DNA
atatggacaagtatggtttggaccttccctactccacttatgttaaggacgagctgcgctcgatagagaagatcaagaaa

SEQ ID NO: 4886 - DNA, 80 bp, synthetic construct
  misc_feature 1..80: note = Synthetic: >HCV.A12-cand-6440-6519
  source 1..80: mol_type = other DNA
gggaaatctcgtcttattgaagccagcagcttgaatgactctgtgtaccttaggatgacttttggacacctttatgagac

SEQ ID NO: 4887 - DNA, 80 bp, synthetic construct
  misc_feature 1..80: note = Synthetic: >HCV.A12-cand-6480-6559
  source 1..80: mol_type = other DNA
ctgtgtaccttaggatgacttttggacacctttatgagacttttcatgcaaaccctggaactgtgaccggttcagctgtg

SEQ ID NO: 4888 - DNA, 80 bp, synthetic construct
  misc_feature 1..80: note = Synthetic: >HCV.A12-cand-6600-6679
  source 1..80: mol_type = other DNA
tgctccctggctcactctttgcttttgattactcagggtatgacgctagtcttagccctgtctggttcagggccctggaa

SEQ ID NO: 4889 - DNA, 80 bp, synthetic construct
  misc_feature 1..80: note = Synthetic: >HCV.A12-cand-6650-6729
  source 1..80: mol_type = other DNA
cttagccctgtctggttcagggccctggaattagttcttagggaaataggctacagcgaggaagcaatttcacttgttga

SEQ ID NO: 4890 - DNA, 80 bp, synthetic construct
  misc_feature 1..80: note = Synthetic: >HCV.A12-cand-6760-6839
  source 1..80: mol_type = other DNA
caacaaaacttattgtgtgcttggtggtatgccctctggttgttctggaacatccatatttaattcaatgattaataaca

SEQ ID NO: 4891 - DNA, 80 bp, synthetic construct
  misc_feature 1..80: note = Synthetic: >HCV.A12-cand-6830-6909
  source 1..80: mol_type = other DNA
attaataacatcattattagagcattgctcatcaaaacattcaagggcattgatctggacgagctcaacatgattgccta

SEQ ID NO: 4892 - DNA, 80 bp, synthetic construct
  misc_feature 1..80: note = Synthetic: >HCV.A12-cand-6920-6999
  source 1..80: mol_type = other DNA
gtgcttgctagttatcctttcccaattgactgcctagagttagcaagaacaggcaaggagtacggtttgaccatgactcc

SEQ ID NO: 4893 - DNA, 80 bp, synthetic construct
  misc_feature 1..80: note = Synthetic: >HCV.A13-cand-1370-1449
  source 1..80: mol_type = other DNA
aagaccaattacactagttatgtaaatgcaaacccaggagaaaaaggtggtgaatttgtttctaccttcacaccagacac

SEQ ID NO: 4894 - DNA, 80 bp, synthetic construct
  misc_feature 1..80: note = Synthetic: >HCV.A13-cand-1450-1529
  source 1..80: mol_type = other DNA
aagtgctgtacccaaacgcgagttccaaccagtagactacttgtttgggtgtggtgttatggcaggtaatgcatttgttt

SEQ ID NO: 4895 - DNA, 80 bp, synthetic construct
  misc_feature 1..80: note = Synthetic: >HCV.A13-cand-1530-1609
  source 1..80: mol_type = other DNA
tcccccatcagatcataaacttgcgcacaaacaactgtgccactctggtgttgccatatgttaattcattggcaattgat

SEQ ID NO: 4896 - DNA, 80 bp, synthetic construct
  misc_feature 1..80: note = Synthetic: >HCV.A13-cand-1640-1719
  source 1..80: mol_type = other DNA
gtcatattaccactgtccaaacttgattataatccagatgctagcaccaaattacccatcacagttacaatagcacccat

SEQ ID NO: 4897 - DNA, 80 bp, synthetic construct
  misc_feature 1..80: note = Synthetic: >HCV.A13-cand-1690-1769
  source 1..80: mol_type = other DNA
attacccatcacagttacaatagcacccatgtgttgtgaattcaatggcttgagaaacctgacaattccagccactcagg

SEQ ID NO: 4898 - DNA, 80 bp, synthetic construct
  misc_feature 1..80: note = Synthetic: >HCV.A13-cand-1770-1849
  source 1..80: mol_type = other DNA
gactaccagtaatgaacacaccaggcagtaaccagtatctcacatcagacaacttccagtcaccttgtgccttgccagag

SEQ ID NO: 4899 - DNA, 80 bp, synthetic construct
  misc_feature 1..80: note = Synthetic: >HCV.A13-cand-1850-1929
  source 1..80: mol_type = other DNA
tttgatgtgacacaacccattttcataccaggtgaagtgaaaaatatgatggagttagcagaaattgacacaatgatacc

SEQ ID NO: 4900 - DNA, 80 bp, synthetic construct
  misc_feature 1..80: note = Synthetic: >HCV.A13-cand-1930-2009
  source 1..80: mol_type = other DNA
aatggacttgagtgaagggaagaagaacacaatggaaatgtacagagtcaaattgtctgacgctggtgaccgcaacaaac

SEQ ID NO: 4901 - DNA, 80 bp, synthetic construct
  misc_feature 1..80: note = Synthetic: >HCV.A13-cand-2010-2089
  source 1..80: mol_type = other DNA
caattttgtgcttgtcactctcaccagcttcagacccaagactctcctataccatgctaggtgaaatcctgaattattac

SEQ ID NO: 4902 - DNA, 80 bp, synthetic construct
  misc_feature 1..80: note = Synthetic: >HCV.A13-cand-2090-2169
  source 1..80: mol_type = other DNA
acccactgggcaggttcattgaagttttcattcctattttgtggatccatgatggctactggaaagatactagtggctta

SEQ ID NO: 4903 - DNA, 80 bp, synthetic construct
  misc_feature 1..80: note = Synthetic: >HCV.A13-cand-2170-2249
  source 1..80: mol_type = other DNA
ctcaccaccaggagcacaaccaccccaggatagaaaggctgcaatgctgggaacacatgtgatctgggacattggtctac

SEQ ID NO: 4904 - DNA, 80 bp, synthetic construct
  misc_feature 1..80: note = Synthetic: >HCV.A13-cand-2250-2329
  source 1..80: mol_type = other DNA
aatcatcatgcacaatggtggttccatggattagtaacaccagttaccgcagaacagtgaaagatgacttcacggaggga

SEQ ID NO: 4905 - DNA, 80 bp, synthetic construct
  misc_feature 1..80: note = Synthetic: >HCV.A13-cand-2330-2409
  source 1..80: mol_type = other DNA
ggatacatcagcatgttctaccagacacggatagtcgtgccagcatcaacaccaaccaccatggacatcctgtgttttgt

SEQ ID NO: 4906 - DNA, 80 bp, synthetic construct
  misc_feature 1..80: note = Synthetic: >HCV.A13-cand-2410-2489
  source 1..80: mol_type = other DNA
atcagcttgtaatgacttcactgttagattgcttagggacaccacacacatcacccaggatgctatgccacaaggcattg

SEQ ID NO: 4907 - DNA, 80 bp, synthetic construct
  misc_feature 1..80: note = Synthetic: >HCV.A13-cand-2490-2569
  source 1..80: mol_type = other DNA
aggacataatccaacaggtggcatccaatgcactacaattgtcccaacccactagaccagctctaccaccagcagaacaa

SEQ ID NO: 4908 - DNA, 80 bp, synthetic construct
  misc_feature 1..80: note = Synthetic: >HCV.A13-cand-2570-2649
  source 1..80: mol_type = other DNA
agtgtcccaaacactaaccaaaccacaccagaacactccaaggaggtgccagcactgacagcagttgaaacaggcgccac

SEQ ID NO: 4909 - DNA, 80 bp, synthetic construct
  misc_feature 1..80: note = Synthetic: >HCV.A24-cand-1770-1849
  source 1..80: mol_type = other DNA
gctactcaaggattgcctacaatgttgaccccagggtcgtcgcagtttctgacatccgatgatttccaatccccctgtgc

SEQ ID NO: 4910 - DNA, 80 bp, synthetic construct
  misc_feature 1..80: note = Synthetic: >HCV.A24-cand-1850-1929
  source 1..80: mol_type = other DNA
cctccccaattttgatgtgaccccaccaatacacataccaggagaggtgtttaacatgatggagctagctgagattgact

SEQ ID NO: 4911 - DNA, 80 bp, synthetic construct
  misc_feature 1..80: note = Synthetic: >HCV.A24-cand-1930-2009
  source 1..80: mol_type = other DNA
cgatgattccaatgaattcagtaactggcaaggctaacacaatggagatgtacccgatcccactagatgacaaaggtggt

SEQ ID NO: 4912 - DNA, 80 bp, synthetic construct
  misc_feature 1..80: note = Synthetic: >HCV.A24-cand-1990-2069
  source 1..80: mol_type = other DNA
cactagatgacaaaggtggtgcaacacccatatttagtatttccctcagcccggcctccgataagagattgcagtatacc

SEQ ID NO: 4913 - DNA, 80 bp, synthetic construct
  misc_feature 1..80: note = Synthetic: >HCV.A24-cand-2090-2169
  source 1..80: mol_type = other DNA
ctactacacccactggaccggttcgttgaggttcacgttcctgttttgtggtagtatgatggccacagggaaaattctac

SEQ ID NO: 4914 - DNA, 80 bp, synthetic construct
  misc_feature 1..80: note = Synthetic: >HCV.A24-cand-2170-2249
  source 1..80: mol_type = other DNA
ttagctactcaccaccaggagctaaaccacccaccactagaaaggatgcaatgttgggcacacacataatatgggatctt

SEQ ID NO: 4915 - DNA, 80 bp, synthetic construct
  misc_feature 1..80: note = Synthetic: >HCV.A24-cand-2250-2329
  source 1..80: mol_type = other DNA
ggacttcaatcctcatgcaccatgctagccccttggatatccaacacagtctacagaagatgtattaaagatgactttac

SEQ ID NO: 4916 - DNA, 80 bp, synthetic construct
  misc_feature 1..80: note = Synthetic: >HCV.A24-cand-2330-2409
  source 1..80: mol_type = other DNA
agaaggaggctacatcacttgtttttaccagacaagaatagtggtgccatctggtacaccaacgtcaatgttcatgttgg

SEQ ID NO: 4917 - DNA, 80 bp, synthetic construct
  misc_feature 1..80: note = Synthetic: >HCV.A24-cand-2410-2489
  source 1..80: mol_type = other DNA
cctttgtgagtgcttgcccagattttagcgtgcgtctgttgagagacactaaccacatctcacagagaactttgtttgcg

SEQ ID NO: 4918 - DNA, 80 bp, synthetic construct
  misc_feature 1..80: note = Synthetic: >HCV.A24-cand-2500-2579
  source 1..80: mol_type = other DNA
gcattgaggagaccattgacaccgttattaccaatgcattacagctttcacagcctaaaccgcaaaagcagcacacagca

SEQ ID NO: 4919 - DNA, 80 bp, synthetic construct
  misc_feature 1..80: note = Synthetic: >HCV.A24-cand-2580-2659
  source 1..80: mol_type = other DNA
caatccacaccgctcactagtggagtcaactcacaggaggtgcccgcactaactgcagtagagactggtgcatctggcca

SEQ ID NO: 4920 - DNA, 80 bp, synthetic construct
  misc_feature 1..80: note = Synthetic: >HCV.A24-cand-2660-2739
  source 1..80: mol_type = other DNA
ggcggtgcccagtgatgtaattgagaccagacatgttgtgaattacaagactaggtctgaatcaacactagagtccttct

SEQ ID NO: 4921 - DNA, 80 bp, synthetic construct
  misc_feature 1..80: note = Synthetic: >HCV.A24-cand-2740-2819
  source 1..80: mol_type = other DNA
ttggaagatctgcttgtgtcaccatactggaagtggagaattttaacgccacgactgatgctgataggaaaaagcagttt

SEQ ID NO: 4922 - DNA, 80 bp, synthetic construct
  misc_feature 1..80: note = Synthetic: >HCV.A24-cand-2820-2899
  source 1..80: mol_type = other DNA
accacatgggctatcacgtacacagacacagtccagctaagaaggaaactggagttttttacctactccagatttgacct

SEQ ID NO: 4923 - DNA, 80 bp, synthetic construct
  misc_feature 1..80: note = Synthetic: >HCV.A24-cand-2900-2979
  source 1..80: mol_type = other DNA
agagatgacttttgtcataacggaaaggtactacgccagcaacacaggacatgccaggaatcaagtctaccagcttatgt

SEQ ID NO: 4924 - DNA, 80 bp, synthetic construct
  misc_feature 1..80: note = Synthetic: >HCV.A24-cand-2980-3059
  source 1..80: mol_type = other DNA
acataccacctggtgctccgcgacccacggcttgggacgactatacctggcagagctcatcgaacccgtcagtgttttac

SEQ ID NO: 4925 - DNA, 80 bp, synthetic construct
  misc_feature 1..80: note = Synthetic: >HCV.A24-cand-4340-4419
  source 1..80: mol_type = other DNA
tatacatcaatcatgcccaagccaggaacaacaagaaattttgtttaacaatgtgcggtggcttgcgatacagtcacgta

SEQ ID NO: 4926 - DNA, 80 bp, synthetic construct
  misc_feature 1..80: note = Synthetic: >HCV.A24-cand-4420-4499
  source 1..80: mol_type = other DNA
gattcgcgccactgtacgcagttgaggctaaaagaatttctaaattggaaaacaccattaacaactacatccagttcaag

SEQ ID NO: 4927 - DNA, 80 bp, synthetic construct
  misc_feature 1..80: note = Synthetic: >HCV.A24-cand-4500-4579
  source 1..80: mol_type = other DNA
agcaaacaccgtattgaaccggtatgtatgttgatacatggctccccaggaacaggaaagtccattgccacatcattgat

SEQ ID NO: 4928 - DNA, 80 bp, synthetic construct
  misc_feature 1..80: note = Synthetic: >HCV.A24-cand-4580-4659
  source 1..80: mol_type = other DNA
tggtagggcaatagctgaaaaagaaaatacctcaacatactcgctcccaccagatcccacgcactttgatgggtacaagc

SEQ ID NO: 4929 - DNA, 80 bp, synthetic construct
  misc_feature 1..80: note = Synthetic: >HCV.A24-cand-4670-4749
  source 1..80: mol_type = other DNA
tgtcattatggatgatcttaaccagaaccctgacggcaacgacatgaagctgttctgccaaatggtttccacagtagagt

SEQ ID NO: 4930 - DNA, 80 bp, synthetic construct
  misc_feature 1..80: note = Synthetic: >HCV.A24-cand-4700-4779
  source 1..80: mol_type = other DNA
tgacggcaacgacatgaagctgttctgccaaatggtttccacagtagagtttataccacctatggcatccttggaagaaa

SEQ ID NO: 4931 - DNA, 80 bp, synthetic construct
  misc_feature 1..80: note = Synthetic: >HCV.A24-cand-4820-4899
  source 1..80: mol_type = other DNA
aaactcacacactattacacctccaacagtctcacacagcgatgctttaaacagaaggtttgctttcgacatggaagttt

SEQ ID NO: 4932 - DNA, 80 bp, synthetic construct
  misc_feature 1..80: note = Synthetic: >HCV.A24-cand-4900-4979
  source 1..80: mol_type = other DNA
acactatgtctgagcactccgttaaaggaaagttaaatatggcaacagcaacgcaattgtgcaaggattgtccacaacca

SEQ ID NO: 4933 - DNA, 80 bp, synthetic construct
  misc_feature 1..80: note = Synthetic: >HCV.A24-cand-4980-5059
  source 1..80: mol_type = other DNA
gctaattttaagaagtgttgcccattggtttgtggaaaggctctacaattaatggacaagaacacccggcaaagattcac

SEQ ID NO: 4934 - DNA, 80 bp, synthetic construct
  misc_feature 1..80: note = Synthetic: >HCV.A24-cand-5060-5139
  source 1..80: mol_type = other DNA
cctggacgaaataactactcttataattaatgagaaaaacagaagggccaacattgggaattgcatggaggcattgtttc

SEQ ID NO: 4935 - DNA, 80 bp, synthetic construct
  misc_feature 1..80: note = Synthetic: >HCV.A24-cand-5140-5219
  source 1..80: mol_type = other DNA
aaggccctatacagtacagagatttgaagattgacattaaagagacacctgccccagactacattaatgatcttcttcaa

SEQ ID NO: 4936 - DNA, 80 bp, synthetic construct
  misc_feature 1..80: note = Synthetic: >HCV.A24-cand-5220-5299
  source 1..80: mol_type = other DNA
tcagtggacagccaagagctcagggactactgtgagaaaaagggatggattgtcaagcttaataacgacctagtggtaga

SEQ ID NO: 4937 - DNA, 80 bp, synthetic construct
  misc_feature 1..80: note = Synthetic: >HCV.A24-cand-5300-5379
  source 1..80: mol_type = other DNA
aagaaacctgaacagggccatgactgttttacaggctgtgactacatttgccgctgtggctgcagttgtttatgtaatgt

SEQ ID NO: 4938 - DNA, 80 bp, synthetic construct
  misc_feature 1..80: note = Synthetic: >HCV.A24-cand-5380-5459
  source 1..80: mol_type = other DNA
acaaactgtttgctgggcaccagggagcctacacaggattaccaaacaagaagcccagtgttcccaccattagaacagca

SEQ ID NO: 4939 - DNA, 80 bp, synthetic construct
  misc_feature 1..80: note = Synthetic: >HCV.A24-cand-5460-5539
  source 1..80: mol_type = other DNA
aaggtgcaagggcccgggtttgattatgcagtagcaatggctaaaagaaatgttttgactgctaccactagcaagggtga

SEQ ID NO: 4940 - DNA, 80 bp, synthetic construct
  misc_feature 1..80: note = Synthetic: >HCV.A24-cand-5540-5619
  source 1..80: mol_type = other DNA
atttaccatgcttggcgttcatgacaatgttgcaattcttccaactcatgcagccccaggagattcaattgtgattgacg

SEQ ID NO: 4941 - DNA, 80 bp, synthetic construct
  misc_feature 1..80: note = Synthetic: >HCV.A7-cand-5480-5559
  source 1..80: mol_type = other DNA
atcgactggccatcttgccgcgtcattcacaaccaggaaaaaccatctgggttgaacacaaactggtcaatgtccttgat

SEQ ID NO: 4942 - DNA, 80 bp, synthetic construct
  misc_feature 1..80: note = Synthetic: >HCV.A7-cand-5560-5639
  source 1..80: mol_type = other DNA
gctgtcgagctagtggatgaacaaggagttaatctggaactcaccctagtcactttggataccaatgagaaatttagaga

SEQ ID NO: 4943 - DNA, 80 bp, synthetic construct
  misc_feature 1..80: note = Synthetic: >HCV.A7-cand-5640-5719
  source 1..80: mol_type = other DNA
tatcactaagttcatcccagagaacatcagcggagctagtgatgctacattagtgatcaatactgagcacatgccatcaa

SEQ ID NO: 4944 - DNA, 80 bp, synthetic construct
  misc_feature 1..80: note = Synthetic: >HCV.A7-cand-5800-5879
  source 1..80: mol_type = other DNA
aacttccccacaaaagcgggacagtgtggaggtgtggtaacatcagtcggcaaaatcattggtatccacattggaggcaa

SEQ ID NO: 4945 - DNA, 80 bp, synthetic construct
  misc_feature 1..80: note = Synthetic: >HCV.A7-cand-5850-5929
  source 1..80: mol_type = other DNA
caaaatcattggtatccacattggaggcaatgggcgccaagggttttgtgctggtctgaagaggagctattttgcaagtg

SEQ ID NO: 4946 - DNA, 80 bp, synthetic construct
  misc_feature 1..80: note = Synthetic: >HCV.A7-cand-5960-6039
  source 1..80: mol_type = other DNA
ataaggagactggcaggttgaacatcaatgggccaacacgcacaaagctagaacccagtgtgttctatgatgtgtttgag

SEQ ID NO: 4947 - DNA, 80 bp, synthetic construct
  misc_feature 1..80: note = Synthetic: >HCV.A7-cand-6040-6119
  source 1..80: mol_type = other DNA
ggcaacaaggagccagcagtcctaacaagtaaagatcccagactagaggttgactttgagcaagccctgttctccaagta

SEQ ID NO: 4948 - DNA, 80 bp, synthetic construct
  misc_feature 1..80: note = Synthetic: >HCV.A7-cand-6120-6199
  source 1..80: mol_type = other DNA
cgtgggaaatgtactgcacgagcctgatgagtacgtgacccaggcagccctccattatgcaaaccaactgaagcagctgg

SEQ ID NO: 4949 - DNA, 80 bp, synthetic construct
  misc_feature 1..80: note = Synthetic: >HCV.A7-cand-6200-6279
  source 1..80: mol_type = other DNA
acataaacaccaacaagatgagcatggaggaagcgtgttatggcactgacaacctagaagctattgacctccacactagt

SEQ ID NO: 4950 - DNA, 80 bp, synthetic construct
  misc_feature 1..80: note = Synthetic: >HCV.A7-cand-6290-6369
  source 1..80: mol_type = other DNA
catacagtgccctgggtatcaagaagagagacatcctagatccaactaccagggatgtcactaaaatgaagttttacatg

SEQ ID NO: 4951 - DNA, 80 bp, synthetic construct
  misc_feature 1..80: note = Synthetic: >HCV.A7-cand-6370-6449
  source 1..80: mol_type = other DNA
gacaagtatggcctagatctaccttactccacttatgtgaaagatgagcttaggtccctagacaagatcaagaaagggaa

SEQ ID NO: 4952 - DNA, 80 bp, synthetic construct
  misc_feature 1..80: note = Synthetic: >HCV.A7-cand-6450-6529
  source 1..80: mol_type = other DNA
gtcccgcctgattgaagccagcagtctgaatgactctgtttaccttagaatgacttttgggcacctctatgaagtgtttc

SEQ ID NO: 4953 - DNA, 80 bp, synthetic construct
  misc_feature 1..80: note = Synthetic: >HCV.A7-cand-6570-6649
  source 1..80: mol_type = other DNA
caacccagatgtgttttggagcaaactgcccattctgcttcctggttcactctttgcttttgactactcaggatatgatg

SEQ ID NO: 4954 - DNA, 80 bp, synthetic construct
  misc_feature 1..80: note = Synthetic: >HCV.A7-cand-6610-6689
  source 1..80: mol_type = other DNA
cctggttcactctttgcttttgactactcaggatatgatgctagtctcagtccagtgtggtttagagctttggaagtagt

SEQ ID NO: 4955 - DNA, 80 bp, synthetic construct
  misc_feature 1..80: note = Synthetic: >HCV.A7-cand-6690-6769
  source 1..80: mol_type = other DNA
cctacgggagattggttactcagaggaggcagtgtctcttattgaaggaatcaaccacacccaccacgtgtaccgcaaca

SEQ ID NO: 4956 - DNA, 80 bp, synthetic construct
  misc_feature 1..80: note = Synthetic: >HCV.A7-cand-6770-6849
  source 1..80: mol_type = other DNA
agacatattgtgtgcttggtgggatgccctcaggctgctctggcacctctatcttcaactcaatgatcaataacatcatc

SEQ ID NO: 4957 - DNA, 80 bp, synthetic construct
  misc_feature 1..80: note = Synthetic: >HQ537689.1-cand-5290-5369
  source 1..80: mol_type = other DNA
tttgtatgatgtttatgctgacgatgtggataatgtacacaccccaatgcaacactcatacagtacgtttgcaacaacac

SEQ ID NO: 4958 - DNA, 80 bp, synthetic construct
  misc_feature 1..80: note = Synthetic: >HQ537689.1-cand-5370-5449
  source 1..80: mol_type = other DNA
gtaccagcaatgtgtctatacctttaaatacaggatttgatactcctgttatgtctggccctgatataccttccccttta

SEQ ID NO: 4959 - DNA, 80 bp, synthetic construct
  misc_feature 1..80: note = Synthetic: >HQ537689.1-cand-5450-5529
  source 1..80: mol_type = other DNA
tttcctacatctagcccatttgttcctatttcgcctttttttccttttgacaccattgttgtagacggtgctgactttgt

SEQ ID NO: 4960 - DNA, 80 bp, synthetic construct
  misc_feature 1..80: note = Synthetic: >HQ537689.1-cand-5620-5699
  source 1..80: mol_type = other DNA
cagtgtacctgcctcctgtacctgtatctaaagttgtcagcactgatgaatatgtgtctcgcacaagcatttattattat

SEQ ID NO: 4961 - DNA, 80 bp, synthetic construct
  misc_feature 1..80: note = Synthetic: >HQ537689.1-cand-5700-5779
  source 1..80: mol_type = other DNA
gctggtagttccagacttcttgctgttggccatccatatttttctattaaaaatcctactaacgctaaaaaattattggt

SEQ ID NO: 4962 - DNA, 80 bp, synthetic construct
  misc_feature 1..80: note = Synthetic: >HQ537689.1-cand-5780-5859
  source 1..80: mol_type = other DNA
acccaaagtatcaggcttgcaatatagggtttttagggtccgtttaccagatcctaataaatttggatttcctgacacct

SEQ ID NO: 4963 - DNA, 80 bp, synthetic construct
  misc_feature 1..80: note = Synthetic: >HQ537689.1-cand-5860-5939
  source 1..80: mol_type = other DNA
ccttttataaccctgatacacaacgattagtatgggcatgtgtaggccttgaaataggtagagggcagccattaggcgtt

SEQ ID NO: 4964 - DNA, 80 bp, synthetic construct
  misc_feature 1..80: note = Synthetic: >HQ537689.1-cand-5930-6009
  source 1..80: mol_type = other DNA
attaggcgttggcataagtggtcatcctttattaaacaaatttgatgacactgaaaccggtaacaagtatcctggacaac

SEQ ID NO: 4965 - DNA, 80 bp, synthetic construct
  misc_feature 1..80: note = Synthetic: >HQ537689.1-cand-6010-6089
  source 1..80: mol_type = other DNA
cgggtgctgataatagggaatgtttatccatggattataaacaaacacagttatgtttacttggatgtaagcctccaaca

SEQ ID NO: 4966 - DNA, 80 bp, synthetic construct
  misc_feature 1..80: note = Synthetic: >HQ537689.1-cand-6110-6189
  source 1..80: mol_type = other DNA
tgttgcttgtactaatgcagcacctgccaatgattgtccacctttagaacttataaatactattattgaggatggtgata

SEQ ID NO: 4967 - DNA, 80 bp, synthetic construct
  misc_feature 1..80: note = Synthetic: >HQ537689.1-cand-6170-6249
  source 1..80: mol_type = other DNA
tattattgaggatggtgatatggtggacacaggatttggttgcatggattttaaaacattgcaggctaataaaagtgaag

SEQ ID NO: 4968 - DNA, 80 bp, synthetic construct
  misc_feature 1..80: note = Synthetic: >HQ537689.1-cand-6250-6329
  source 1..80: mol_type = other DNA
ttcctattgatatttgtggcagtacatgcaaatatccagattatttaaaaatgactagtgagccttatggtgatagttta

SEQ ID NO: 4969 - DNA, 80 bp, synthetic construct
  misc_feature 1..80: note = Synthetic: >HQ537689.1-cand-6330-6409
  source 1..80: mol_type = other DNA
tttttctttcttcgacgtgaacaaatgtttgtaagacacttttttaatagggctggtacattaggagaggctgttcccga

SEQ ID NO: 4970 - DNA, 80 bp, synthetic construct
  misc_feature 1..80: note = Synthetic: >HQ537689.1-cand-6410-6489
  source 1..80: mol_type = other DNA
tgacctgtacattaaaggttcaggaactactgcctctattcaaagcagtgctttttttcccactcctagtggatcaatgg

SEQ ID NO: 4971 - DNA, 80 bp, synthetic construct
  misc_feature 1..80: note = Synthetic: >HQ537689.1-cand-6480-6559
  source 1..80: mol_type = other DNA
ggatcaatggttacttccgaatctcagttatttaataagccatattggctacaacgtgcacaaggtcataataatggtat

SEQ ID NO: 4972 - DNA, 80 bp, synthetic construct
  misc_feature 1..80: note = Synthetic: >HQ537689.1-cand-6570-6649
  source 1..80: mol_type = other DNA
aatcaggtatttgttactgtggtagataccactcgcagtactaatatgactttatgcacacaagtaactagtgacagtac

SEQ ID NO: 4973 - DNA, 80 bp, synthetic construct
  misc_feature 1..80: note = Synthetic: >KC470281.1-cand-6320-6399
  source 1..80: mol_type = other DNA
ctgaattgtatattaagggcactgacatacgtgacagtcctagtagttatgtatatgccccctcgcctagtgggtctatg

SEQ ID NO: 4974 - DNA, 80 bp, synthetic construct
  misc_feature 1..80: note = Synthetic: >KC470281.1-cand-6410-6489
  source 1..80: mol_type = other DNA
actcccagttatttaacaagccctattggctgcacaaggcacagggacacaacaatggtatttgttggcataatcaatta

SEQ ID NO: 4975 - DNA, 80 bp, synthetic construct
  misc_feature 1..80: note = Synthetic: >KC470281.1-cand-6490-6569
  source 1..80: mol_type = other DNA
tttcttactgttgtggataccactcgcagtactaattttactttgtctactactactgaatcagctgtaccagatgttta

SEQ ID NO: 4976 - DNA, 80 bp, synthetic construct
  misc_feature 1..80: note = Synthetic: >KC470281.1-cand-6570-6649
  source 1..80: mol_type = other DNA
tgatcctaataagtttaaggaatatattaggcatgttgaggaatatgatttgcaattcatatttcagttgtgtactataa

SEQ ID NO: 4977 - DNA, 80 bp, synthetic construct
  misc_feature 1..80: note = Synthetic: >KC470281.1-cand-6650-6729
  source 1..80: mol_type = other DNA
cattgtcaactgatgtaatgtcctatatacatactatgaatcctgctattttggatgattggaattttggtgttgcccct

SEQ ID NO: 4978 - DNA, 80 bp, synthetic construct
  misc_feature 1..80: note = Synthetic: >KC470281.1-cand-6720-6799
  source 1..80: mol_type = other DNA
tgttgcccctccaccatctgctagtcttgtagatacataccgctatctgcaatcagcagcaattacatgtcaaaaagacg

SEQ ID NO: 4979 - DNA, 80 bp, synthetic construct
  misc_feature 1..80: note = Synthetic: >KC470281.1-cand-6800-6879
  source 1..80: mol_type = other DNA
cccctgcacctactaaaaaggatccatatgatggcctaaacttttggaatgtaaatttaaaggaaaagtttagttctgaa

SEQ ID NO: 4980 - DNA, 80 bp, synthetic construct
  misc_feature 1..80: note = Synthetic: >KC470281.1-cand-6880-6959
  source 1..80: mol_type = other DNA
ctggaccagtttcctttaggacgcaaatttcttttacaggcaggtgtccgccgacgacccactataggcccccgcaaacg

SEQ ID NO: 4981 - DNA, 80 bp, synthetic construct
  misc_feature 1..80: note = Synthetic: >KC470281.1-cand-6960-7039
  source 1..80: mol_type = other DNA
ccctgccacagcaactacttcatctacctctaagcacaaacgtaaacgtgtgtcaaagtaattgttgtatgttttgtttt

SEQ ID NO: 4982 - DNA, 80 bp, synthetic construct
  misc_feature 1..80: note = Synthetic: >KC470281.1-cand-7040-7119
  source 1..80: mol_type = other DNA
gtatgttggttgtatgtgtggttgaatatgtgtcatgttgttgttggtatgttgtgcatgtatgtgtatatgtatatgtg

SEQ ID NO: 4983 - DNA, 80 bp, synthetic construct
  misc_feature 1..80: note = Synthetic: >KC470281.1-cand-7120-7199
  source 1..80: mol_type = other DNA
tatgtttgcaggtatgtttgtataatctgtttttgttaataaagtatgtatgtcagtttactttgtggttgcaccctgtg

SEQ ID NO: 4984 - DNA, 80 bp, synthetic construct
  misc_feature 1..80: note = Synthetic: >KC470281.1-cand-7190-7269
  source 1..80: mol_type = other DNA
gcaccctgtgactaacatatgtccttgttttacatataataggactgcaacatttcatacataatttgtagccctaccct

SEQ ID NO: 4985 - DNA, 80 bp, synthetic construct
  misc_feature 1..80: note = Synthetic: >KC470281.1-cand-7260-7339
  source 1..80: mol_type = other DNA
gccctaccctaaggtgtgttacagtacatgtaatatatatatatagttttatattataccaagtggccattttgtaaggc

SEQ ID NO: 4986 - DNA, 80 bp, synthetic construct
  misc_feature 1..80: note = Synthetic: >KC470281.1-cand-7340-7419
  source 1..80: mol_type = other DNA
catcttgtgtgcaaccgtcttcggtcggtggtgctatttcctcctatacagtattaaaaactatgtgtttcagcaaaaac

SEQ ID NO: 4987 - DNA, 80 bp, synthetic construct
  misc_feature 1..80: note = Synthetic: >KC470281.1-cand-7420-7499
  source 1..80: mol_type = other DNA
atgtttcaccttggtttacccacatagttggcaccggtaacagtatgtactggcgcaccttacttagtcatcatcctgtc

SEQ ID NO: 4988 - DNA, 80 bp, synthetic construct
  misc_feature 1..80: note = Synthetic: >KC470281.1-cand-7500-7579
  source 1..80: mol_type = other DNA
caggtgcagtgcaacaatagtttggcagcctatatatctccacccttgtaataaaactgcttttaggcatagttttttaa

SEQ ID NO: 4989 - DNA, 80 bp, synthetic construct
  misc_feature 1..80: note = Synthetic: >KF436887.1-cand-1070-1149
  source 1..80: mol_type = other DNA
ttgtttcaggcccaagaattacaggcaaacaaagaggctgtgcatcagttaaaacgaaagtttgtagtcagcccgcgaag

SEQ ID NO: 4990 - DNA, 80 bp, synthetic construct
  misc_feature 1..80: note = Synthetic: >KF436887.1-cand-1150-1229
  source 1..80: mol_type = other DNA
cagcccattaggagacattacaaatcaaaacaacacacacagccatagtcaggcaaacgagtcacaagttaaaaggagat

SEQ ID NO: 4991 - DNA, 80 bp, synthetic construct
  misc_feature 1..80: note = Synthetic: >KF436887.1-cand-1260-1339
  source 1..80: mol_type = other DNA
gcaatacacaagtggaaactgtggaagcaacgttgcaggtagatgggcaacatggcggttcacagaacagtgtgtgtagt

SEQ ID NO: 4992 - DNA, 80 bp, synthetic construct
  misc_feature 1..80: note = Synthetic: >KF436887.1-cand-1350-1429
  source 1..80: mol_type = other DNA
gcagtgttatggatgtggaaacaacagaaagctgtgcaaatgtagaactaaacagtatatgtgaagtattaaaaagtagt

SEQ ID NO: 4993 - DNA, 80 bp, synthetic construct
  misc_feature 1..80: note = Synthetic: >KF436887.1-cand-1420-1499
  source 1..80: mol_type = other DNA
aaaaagtagtaatgcaaaagcaacgttaatggcaaaatttaaagagttgtatggtattagttataatgagttggtacggg

SEQ ID NO: 4994 - DNA, 80 bp, synthetic construct
  misc_feature 1..80: note = Synthetic: >KF436887.1-cand-1500-1579
  source 1..80: mol_type = other DNA
tgtttaaaagtgataaaacatgttgtatagattgggtttgtgcattgtttggcgtttccccaatggtagcagaaaattta

SEQ ID NO: 4995 - DNA, 80 bp, synthetic construct
  misc_feature 1..80: note = Synthetic: >KF436887.1-cand-1560-1639
  source 1..80: mol_type = other DNA
caatggtagcagaaaatttaaaaacactaattaagccattttgcatgtactaccatatacaatgtttatcatgtgattgg

SEQ ID NO: 4996 - DNA, 80 bp, synthetic construct
  misc_feature 1..80: note = Synthetic: >KF436887.1-cand-1660-1739
  source 1..80: mol_type = other DNA
aattaggttttcatgtgcaaaaaacagaacaacaattgctaagtgtttaattacattagtaaatatcccacaatcacaaa

SEQ ID NO: 4997 - DNA, 80 bp, synthetic construct
  misc_feature 1..80: note = Synthetic: >KF436887.1-cand-1740-1819
  source 1..80: mol_type = other DNA
tgtttatagaaccaccaaaattacgtagtacacctgtggcattatatttttatagaacaggcatatcaaacattagcaat

SEQ ID NO: 4998 - DNA, 80 bp, synthetic construct
  misc_feature 1..80: note = Synthetic: >KF436887.1-cand-1820-1899
  source 1..80: mol_type = other DNA
acatatggagagacacctgaatggattacacgacaaacgcaactacaacatagttttgaggatagtacctttgaattatc

SEQ ID NO: 4999 - DNA, 80 bp, synthetic construct
  misc_feature 1..80: note = Synthetic: >KF436887.1-cand-1900-1979
  source 1..80: mol_type = other DNA
acaaatggtgcaatgggcatttgaccatgaagtattagatgatagtgaaatagcatttcattatgcacaattagcagata

SEQ ID NO: 5000 - DNA, 80 bp, synthetic construct
  misc_feature 1..80: note = Synthetic: >KF436887.1-cand-1980-2059
  source 1..80: mol_type = other DNA
tagatagtaatgctgcagcgtttttaaagagtaattgccaagcaaaatatgtaaaagattgtgggaccatggcacggcat

SEQ ID NO: 5001 - DNA, 80 bp, synthetic construct
  misc_feature 1..80: note = Synthetic: >KF436887.1-cand-2060-2139
  source 1..80: mol_type = other DNA
tataaacgagcacaaagaaaatcattatccatgtcagcctggataaggtatagatgtgatagagcaaaggatggaggcaa

SEQ ID NO: 5002 - DNA, 80 bp, synthetic construct
  misc_feature 1..80: note = Synthetic: >KF436887.1-cand-2140-2219
  source 1..80: mol_type = other DNA
ctggagagaaattgctaaatttttaagatatcaaggtgtaaactttatgtcctttattcaaatgttcaaacagtttttaa

SEQ ID NO: 5003 - DNA, 80 bp, synthetic construct
  misc_feature 1..80: note = Synthetic: >KF436887.1-cand-2220-2299
  source 1..80: mol_type = other DNA
aaggaacaccaaaacacaattgcatagttatatatggcccaccaaacacaggcaagtcattatttgcaatgagtttaatg

SEQ ID NO: 5004 - DNA, 80 bp, synthetic construct
  misc_feature 1..80: note = Synthetic: >KF436887.1-cand-2300-2379
  source 1..80: mol_type = other DNA
aagtttatgcaagggtccattatttcatatgtaaactctggtagtcatttttggttacagccactagaggatgctaaaat

SEQ ID NO: 5005 - DNA, 80 bp, synthetic construct
  misc_feature 1..80: note = Synthetic: >NC_001430.1-cand-210-289
  source 1..80: mol_type = other DNA
tgaaagcgatgaatccgttacccgcttaggtacttcgagaagcctagtatcatcttggaatcttcgatgcgttgcgatca

SEQ ID NO: 5006 - DNA, 80 bp, synthetic construct
  misc_feature 1..80: note = Synthetic: >NC_001430.1-cand-290-369
  source 1..80: mol_type = other DNA
gcactctaccccgagtgtagcttgggtcgatgagtctggacaccccacaccggcgacgtggtccaggctgcgttggcggc

SEQ ID NO: 5007 - DNA, 80 bp, synthetic construct
  misc_feature 1..80: note = Synthetic: >NC_001430.1-cand-1290-1369
  source 1..80: mol_type = other DNA
ctcttctaatagtggctatcccagaacaccaaattggaaagaaaggaacaggtacgtcagcaagctttgctgaagtcatg

SEQ ID NO: 5008 - DNA, 80 bp, synthetic construct
  misc_feature 1..80: note = Synthetic: >NC_001430.1-cand-3270-3349
  source 1..80: mol_type = other DNA
cccataggagtaccataaagacaatgcccaacgatatcaatttgacaacagccggtcccggttatggaggagcttttgtg

SEQ ID NO: 5009 - DNA, 80 bp, synthetic construct
  misc_feature 1..80: note = Synthetic: >NC_001430.1-cand-3650-3729
  source 1..80: mol_type = other DNA
ctcttagtctgctcacatggagtgataggactcgtcaccgcaggcggtgagggaatagttgctttcacagacattagaaa

SEQ ID NO: 5010 - DNA, 80 bp, synthetic construct
  misc_feature 1..80: note = Synthetic: >NC_001430.1-cand-4520-4599
  source 1..80: mol_type = other DNA
tcttactcactcccacctgatccaaaatattttgatgggtataaacaacagacagtggtcctgatggatgacttaatgca

SEQ ID NO: 5011 - DNA, 80 bp, synthetic construct
  misc_feature 1..80: note = Synthetic: >NC_001430.1-cand-5190-5269
  source 1..80: mol_type = other DNA
acccacccactgaactggtggtggacaagcacattagtagagcctttatagcgctacaggcaataaccacttttgtatca

SEQ ID NO: 5012 - DNA, 80 bp, synthetic construct
  misc_feature 1..80: note = Synthetic: >NC_001430.1-cand-5370-5449
  source 1..80: mol_type = other DNA
ccgccaaagtgcaaggaccttctcttgatttcgcacaagccataatgagaaagaatacagtaatagctaggactagcaaa

SEQ ID NO: 5013 - DNA, 80 bp, synthetic construct
  misc_feature 1..80: note = Synthetic: >NC_001430.1-cand-5680-5759
  source 1..80: mol_type = other DNA
tgcaatcctcagcgtaaacactagcaagttcccaaacatgtatataccagtaggacaaacactaaattatggtttcctta

SEQ ID NO: 5014 - DNA, 80 bp, synthetic construct
  misc_feature 1..80: note = Synthetic: >NC_001430.1-cand-5830-5909
  source 1..80: mol_type = other DNA
ggtggtgaccaccactggtaaagtgattggcattcacgttggtggcaatggtgcgcaaggctttgctgccatgctattgc

SEQ ID NO: 5015 - DNA, 80 bp, synthetic construct
  misc_feature 1..80: note = Synthetic: >NC_001430.1-cand-6290-6369
  source 1..80: mol_type = other DNA
gggaagaagaaaagagacatcttcaacagacaaactagagatacaacagagatgaccaaaatgttggacaaatatggtgt

SEQ ID NO: 5016 - DNA, 80 bp, synthetic construct
  misc_feature 1..80: note = Synthetic: >NC_001430.1-cand-7260-7339
  source 1..80: mol_type = other DNA
taccagtatattctagtttgaggcgcaagtggttagactcattctagataactctacttaggaacccaagaacccctccc

SEQ ID NO: 5017 - DNA, 80 bp, synthetic construct
  misc_feature 1..80: note = Synthetic: >NC_001434.1-cand-10-89
  source 1..80: mol_type = other DNA
tcagtttattaaggctcctggcatcactactgctattgagcaggctgctctagcagcggccaactctgcccttgcgaatg

SEQ ID NO: 5018 - DNA, 80 bp, synthetic construct
  misc_feature 1..80: note = Synthetic: >NC_001434.1-cand-90-169
  source 1..80: mol_type = other DNA
ctgtggtagttaggccttttctctctcaccagcagattgagatccttattaacctaatgcaacctcgccagcttgttttc

SEQ ID NO: 5019 - DNA, 80 bp, synthetic construct
  misc_feature 1..80: note = Synthetic: >NC_001434.1-cand-170-249
  source 1..80: mol_type = other DNA
cgccccgaggttttctggaaccatcccatccagcgtgttatccataatgagctggagctttactgtcgcgcccgttccgg

SEQ ID NO: 5020 - DNA, 80 bp, synthetic construct
  misc_feature 1..80: note = Synthetic: >NC_001434.1-cand-250-329
  source 1..80: mol_type = other DNA
ccgctgccttgaaattggtgcccacccccgctcaataaatgataaccctaatgtggtccaccgctgcttcctccgccctg

SEQ ID NO: 5021 - DNA, 80 bp, synthetic construct
  misc_feature 1..80: note = Synthetic: >NC_001434.1-cand-5490-5569
  source 1..80: mol_type = other DNA
gttgactcccgcggcgccatcctgcgccggcagtataacctatcaacatctccccttacctcttccgtggccaccggtac

SEQ ID NO: 5022 - DNA, 80 bp, synthetic construct
  misc_feature 1..80: note = Synthetic: >NC_001434.1-cand-5570-5649
  source 1..80: mol_type = other DNA
aaacttggttctttacgccgctcctcttagcccgcttctacccctccaggacggcaccaatactcatataatggctacag

SEQ ID NO: 5023 - DNA, 80 bp, synthetic construct
  misc_feature 1..80: note = Synthetic: >NC_001434.1-cand-5620-5699
  source 1..80: mol_type = other DNA
acggcaccaatactcatataatggctacagaagcttctaattatgcccagtaccgggttgttcgtgctacaattcgctac

SEQ ID NO: 5024 - DNA, 80 bp, synthetic construct
  misc_feature 1..80: note = Synthetic: >NC_001434.1-cand-5700-5779
  source 1..80: mol_type = other DNA
cgcccgctggtccccaacgctgttggtggctacgccatctccatctcgttctggccacagaccaccaccaccccgacgtc

SEQ ID NO: 5025 - DNA, 80 bp, synthetic construct
  misc_feature 1..80: note = Synthetic: >NC_001434.1-cand-5780-5859
  source 1..80: mol_type = other DNA
cgttgacatgaattcaataacctcgactgatgttcgtattttagtccagcccggcatagcctccgagcatgttatcccaa

SEQ ID NO: 5026 - DNA, 80 bp, synthetic construct
  misc_feature 1..80: note = Synthetic: >NC_001434.1-cand-5830-5909
  source 1..80: mol_type = other DNA
ccggcatagcctccgagcatgttatcccaagtgagcgcctacactatcgtaaccaaggttggcgctctgttgagacctcc

SEQ ID NO: 5027 - DNA, 80 bp, synthetic construct
  misc_feature 1..80: note = Synthetic: >NC_001434.1-cand-5940-6019
  source 1..80: mol_type = other DNA
cttgttatgctttgcatacatggctcactcgtaaactcttatactaatacaccttataccggtgccctcgggctgttgga

SEQ ID NO: 5028 - DNA, 80 bp, synthetic construct
  misc_feature 1..80: note = Synthetic: >NC_001434.1-cand-6020-6099
  source 1..80: mol_type = other DNA
ctttgccctcgaacttgagttccgcaacctcacccccggtaataccaacacgcgggtctcccgttactccagcactgccc

SEQ ID NO: 5029 - DNA, 80 bp, synthetic construct
  misc_feature 1..80: note = Synthetic: >NC_001434.1-cand-6100-6179
  source 1..80: mol_type = other DNA
gtcaccgccttcgtcgcggtgcagatgggactgccgagctcaccaccacggctgctacccgcttcatgaaggacctctat

SEQ ID NO: 5030 - DNA, 80 bp, synthetic construct
  misc_feature 1..80: note = Synthetic: >NC_001434.1-cand-6180-6259
  source 1..80: mol_type = other DNA
tttactagtactaatggtgtcggtgagatcggccgcgggatagcgcttaccctgtttaaccttgctgacaccctgcttgg

SEQ ID NO: 5031 - DNA, 80 bp, synthetic construct
  misc_feature 1..80: note = Synthetic: >NC_001434.1-cand-6260-6339
  source 1..80: mol_type = other DNA
cggtctaccgacagaattgatttcgtcggctggtggccagctgttctactctcgccccgtcgtctcagccaatggcgagc

SEQ ID NO: 5032 - DNA, 80 bp, synthetic construct
  misc_feature 1..80: note = Synthetic: >NC_001434.1-cand-6340-6419
  source 1..80: mol_type = other DNA
cgactgttaagctgtatacatctgtagagaatgctcagcaggataagggtattgcaatcccgcatgacatcgacctcggg

SEQ ID NO: 5033 - DNA, 80 bp, synthetic construct
  misc_feature 1..80: note = Synthetic: >NC_001434.1-cand-6420-6499
  source 1..80: mol_type = other DNA
gaatctcgtgtagttattcaggattatgataaccaacatgagcaggaccgaccgacaccttccccagccccatcgcgccc

SEQ ID NO: 5034 - DNA, 80 bp, synthetic construct
  misc_feature 1..80: note = Synthetic: >NC_001434.1-cand-6500-6579
  source 1..80: mol_type = other DNA
cttttctgtcctccgagctaatgatgtgctttggctttctctcaccgctgccgagtatgaccagtccacttacggctctt

SEQ ID NO: 5035 - DNA, 80 bp, synthetic construct
  misc_feature 1..80: note = Synthetic: >NC_001434.1-cand-6580-6659
  source 1..80: mol_type = other DNA
cgaccggcccagtctatgtctctgactctgtgaccttggttaatgtagcgaccggcgcgcaggccgttgcccggtcgctc

SEQ ID NO: 5036 - DNA, 80 bp, synthetic construct
  misc_feature 1..80: note = Synthetic: >NC_001434.1-cand-6660-6739
  source 1..80: mol_type = other DNA
gactggaccaaggtcacacttgatggtcgccccctttccaccacccagcagtattcaaagaccttctttgtcctgccgct

SEQ ID NO: 5037 - DNA, 80 bp, synthetic construct
  misc_feature 1..80: note = Synthetic: >NC_001437.1-cand-2180-2259
  source 1..80: mol_type = other DNA
taggcaaggccttttcaacaactttgaagggagctcaaagactggcagcgttgggcgacacagcctgggactttggctcc

SEQ ID NO: 5038 - DNA, 80 bp, synthetic construct
  misc_feature 1..80: note = Synthetic: >NC_001437.1-cand-2340-2419
  source 1..80: mol_type = other DNA
gtcttggatcacacaagggctaatgggtgccctactactctggatgggcgtcaacgcacgagaccgatcaattgctttgg

SEQ ID NO: 5039 - DNA, 80 bp, synthetic construct
  misc_feature 1..80: note = Synthetic: >NC_001437.1-cand-2350-2429
  source 1..80: mol_type = other DNA
acacaagggctaatgggtgccctactactctggatgggcgtcaacgcacgagaccgatcaattgctttggccttcttagc

SEQ ID NO: 5040 - DNA, 80 bp, synthetic construct
  misc_feature 1..80: note = Synthetic: >NC_001437.1-cand-2430-2509
  source 1..80: mol_type = other DNA
cacaggaggtgtgctcgtgttcttagcgaccaatgtgcatgctgacactggatgtgccattgacatcacaagaaaagaga

SEQ ID NO: 5041 - DNA, 80 bp, synthetic construct
  misc_feature 1..80: note = Synthetic: >NC_001437.1-cand-2510-2589
  source 1..80: mol_type = other DNA
tgagatgtggaagtggcatctttgtgcacaacgacgtggaagcctgggtggacaggtataaatacttgccagaaacgccc

SEQ ID NO: 5042 - DNA, 80 bp, synthetic construct
  misc_feature 1..80: note = Synthetic: >NC_001437.1-cand-2590-2669
  source 1..80: mol_type = other DNA
agatccctagcgaagatcgtccacaaagcgcacaaggaaggcgtgtgcggagtcagatctgtcactagattggagcacca

SEQ ID NO: 5043 - DNA, 80 bp, synthetic construct
  misc_feature 1..80: note = Synthetic: >NC_001437.1-cand-2670-2749
  source 1..80: mol_type = other DNA
aatgtgggaagccgtacgggacgaattgaacgtcctgctcaaagagaatgcagtggacctcagtgtggttgtgaacaagc

SEQ ID NO: 5044 - DNA, 80 bp, synthetic construct
  misc_feature 1..80: note = Synthetic: >NC_001437.1-cand-2740-2819
  source 1..80: mol_type = other DNA
gtgaacaagcccgtgggaagatatcgctcagcccctaaacgcctatccatgacgcaagagaagtttgaaatgggctggaa

SEQ ID NO: 5045 - DNA, 80 bp, synthetic construct
  misc_feature 1..80: note = Synthetic: >NC_001437.1-cand-2830-2909
  source 1..80: mol_type = other DNA
aaaagcattctctttgccccggaattggctaactccacatttgtcgtagatggacctgagacaaaggaatgccctgatga

SEQ ID NO: 5046 - DNA, 80 bp, synthetic construct
  misc_feature 1..80: note = Synthetic: >NC_001437.1-cand-2910-2989
  source 1..80: mol_type = other DNA
gcatagagcttggaacagcatgcaaatcgaagacttcggctttggcatcacatcaacccgtgtgtggctgaaaattagag

SEQ ID NO: 5047 - DNA, 80 bp, synthetic construct
  misc_feature 1..80: note = Synthetic: >NC_001437.1-cand-2990-3069
  source 1..80: mol_type = other DNA
aggagagcactgacgagtgtgatggagcgatcataggcacggctgtcaaaggacatgtggcagtccatagtgacttgtcg

SEQ ID NO: 5048 - DNA, 80 bp, synthetic construct
  misc_feature 1..80: note = Synthetic: >NC_001437.1-cand-3070-3149
  source 1..80: mol_type = other DNA
tactggattgagagtcgctacaacgacacatggaaacttgagagggcagtctttggagaggtcaaatcttgcacttggcc

SEQ ID NO: 5049 - DNA, 80 bp, synthetic construct
  misc_feature 1..80: note = Synthetic: >NC_001437.1-cand-3170-3249
  source 1..80: mol_type = other DNA
gagatggtgttgaggaaagtgaactcatcattccgcataccatagccggaccaaaaagcaagcacaatcggagggaaggg

SEQ ID NO: 5050 - DNA, 80 bp, synthetic construct
  misc_feature 1..80: note = Synthetic: >NC_001437.1-cand-3230-3309
  source 1..80: mol_type = other DNA
agcacaatcggagggaagggtataagacacaaaaccagggaccttgggatgagaatggcatagtcttggactttgactat

SEQ ID NO: 5051 - DNA, 80 bp, synthetic construct
  misc_feature 1..80: note = Synthetic: >NC_001437.1-cand-3320-3399
  source 1..80: mol_type = other DNA
cgaaagtcaccattacagaggactgtggcaagagaggcccttcggtcagaaccactactgacagtggaaagttgattact

SEQ ID NO: 5052 - DNA, 80 bp, synthetic construct
  misc_feature 1..80: note = Synthetic: >NC_001437.1-cand-3400-3479
  source 1..80: mol_type = other DNA
gactggtgctgtcgcagttgctcccttccgcccctacgattccggacagaaaatggctgctggtacggaatggaaatcag

SEQ ID NO: 5053 - DNA, 80 bp, synthetic construct
  misc_feature 1..80: note = Synthetic: >NC_001437.1-cand-6040-6119
  source 1..80: mol_type = other DNA
agtgaagatgacagtaacctagcccattggacagaggcaaagatcatgttagacaacatacacatgcccaatggactggt

SEQ ID NO: 5054 - DNA, 80 bp, synthetic construct
  misc_feature 1..80: note = Synthetic: >NC_001437.1-cand-6120-6199
  source 1..80: mol_type = other DNA
ggcccagctctatggaccagagagggaaaaggcttttacaatggatggtgaataccgtctcagaggtgaagaaaagaaaa

SEQ ID NO: 5055 - DNA, 80 bp, synthetic construct
  misc_feature 1..80: note = Synthetic: >NC_001437.1-cand-6200-6279
  source 1..80: mol_type = other DNA
acttcttggagctgcttaggacggctgacctcccggtgtggctggcctacaaggtggcgtccaatggcattcagtacacc

SEQ ID NO: 5056 - DNA, 80 bp, synthetic construct
  misc_feature 1..80: note = Synthetic: >NC_001437.1-cand-6280-6359
  source 1..80: mol_type = other DNA
gacagaaggtggtgttttgatgggccgcgcacgaatgccatactggaggacaacaccgaggtagagatagtcacccggat

SEQ ID NO: 5057 - DNA, 80 bp, synthetic construct
  misc_feature 1..80: note = Synthetic: >NC_001437.1-cand-6360-6439
  source 1..80: mol_type = other DNA
gggtgagaggaaaatcctcaagccgagatggcttgatgcaagagtttatgcagatcaccaagccctcaagtggttcaaag

SEQ ID NO: 5058 - DNA, 80 bp, synthetic construct
  misc_feature 1..80: note = Synthetic: >NC_001437.1-cand-6430-6509
  source 1..80: mol_type = other DNA
tggttcaaagactttgcagcagggaagagatcagccattagcttcatagaggtgctcggtcgcatgcctgagcatttcat

SEQ ID NO: 5059 - DNA, 80 bp, synthetic construct
  misc_feature 1..80: note = Synthetic: >NC_001437.1-cand-6510-6589
  source 1..80: mol_type = other DNA
gggaaagacgcgggaagctttagacaccatgtacttggttgcaacggctgagaaaggcgggaaagcacaccgaatggctc

SEQ ID NO: 5060 - DNA, 80 bp, synthetic construct
  misc_feature 1..80: note = Synthetic: >NC_001437.1-cand-6590-6669
  source 1..80: mol_type = other DNA
tcgaagagctgccagatgcactggaaaccatcacacttattgttgccattactgtgatgacaggaggattcttcctacta

SEQ ID NO: 5061 - DNA, 80 bp, synthetic construct
  misc_feature 1..80: note = Synthetic: >NC_001437.1-cand-6670-6749
  source 1..80: mol_type = other DNA
atgatgcagcgaaagggtatagggaagatgggtcttggagctctggtgctcacgctagctaccttcttcctgtgggcggc

SEQ ID NO: 5062 - DNA, 80 bp, synthetic construct
  misc_feature 1..80: note = Synthetic: >NC_001437.1-cand-6750-6829
  source 1..80: mol_type = other DNA
agaggttcctggaactaaaatagcagggaccctgctgatcgccctgctgctgatggtggtgctcatcccagaaccggaaa

SEQ ID NO: 5063 - DNA, 80 bp, synthetic construct
  misc_feature 1..80: note = Synthetic: >NC_001437.1-cand-6830-6909
  source 1..80: mol_type = other DNA
aacagaggtcacagacagataaccaactggcggtgtttctcatctgcgtcttgaccgtggttggagtggtggcagcaaac

SEQ ID NO: 5064 - DNA, 80 bp, synthetic construct
  misc_feature 1..80: note = Synthetic: >NC_001437.1-cand-6910-6989
  source 1..80: mol_type = other DNA
gagtacgggatgctagagaaaaccaaagcagatctcaagagcatgtttgtcggaaagacgcaggcatcagggctgactgg

SEQ ID NO: 5065 - DNA, 80 bp, synthetic construct
  misc_feature 1..80: note = Synthetic: >NC_001437.1-cand-6960-7039
  source 1..80: mol_type = other DNA
cggaaagacgcaggcatcagggctgactggattgccaagcatggcactggacctgcgtccagccacagcctgggcactgt

SEQ ID NO: 5066 - DNA, 80 bp, synthetic construct
  misc_feature 1..80: note = Synthetic: >NC_001437.1-cand-7070-7149
  source 1..80: mol_type = other DNA
ttctgaaacacctgatcacgtcggaatacgtcaccacatcgctagcctcaattaactcacaagctggctcattattcgtc

SEQ ID NO: 5067 - DNA, 80 bp, synthetic construct
  misc_feature 1..80: note = Synthetic: >NC_001437.1-cand-7130-7209
  source 1..80: mol_type = other DNA
aagctggctcattattcgtcttgccacgaggcgtgccttttaccgacctagacttgaccgttggcctcgtcttccttggc

SEQ ID NO: 5068 - DNA, 80 bp, synthetic construct
  misc_feature 1..80: note = Synthetic: >NC_001437.1-cand-7230-7309
  source 1..80: mol_type = other DNA
tacaacgtttctgacagccatggttctggcgacacttcattatgggtacatgctccctggatggcaagcagaagcactca

SEQ ID NO: 5069 - DNA, 80 bp, synthetic construct
  misc_feature 1..80: note = Synthetic: >NC_001437.1-cand-9860-9939
  source 1..80: mol_type = other DNA
ttgtcccgtgcagaggacaggatgagctgataggcagggctcgcatctctccaggagctggatggaatgtgaaggacaca

SEQ ID NO: 5070 - DNA, 80 bp, synthetic construct
  misc_feature 1..80: note = Synthetic: >NC_001437.1-cand-9940-10019
  source 1..80: mol_type = other DNA
gcttgtctggccaaagcatatgcacagatgtggctactcctatacttccatcgtagggacttgcgtctcatggcaaatgc

SEQ ID NO: 5071 - DNA, 80 bp, synthetic construct
  misc_feature 1..80: note = Synthetic: >NC_001437.1-cand-10020-10099
  source 1..80: mol_type = other DNA
gatttgctcagcagtgccagtggattgggtgcccacaggcaggacgtcctggtcaatacactcgaaaggagagtggatga

SEQ ID NO: 5072 - DNA, 80 bp, synthetic construct
  misc_feature 1..80: note = Synthetic: >NC_001437.1-cand-10100-10179
  source 1..80: mol_type = other DNA
ccacggaagacatgctgcaggtctggaacagagtctggattgaagaaaatgaatggatgatggacaagactccaatcaca

SEQ ID NO: 5073 - DNA, 80 bp, synthetic construct
  misc_feature 1..80: note = Synthetic: >NC_001437.1-cand-10180-10259
  source 1..80: mol_type = other DNA
agctggacagacgttccgtatgtgggaaagcgtgaggacatctggtgtggtagcctcatcggaacgcgatccagagcaac

SEQ ID NO: 5074 - DNA, 80 bp, synthetic construct
  misc_feature 1..80: note = Synthetic: >NC_001437.1-cand-10260-10339
  source 1..80: mol_type = other DNA
ctgggctgagaacatctatgcggcgataaaccaggtcagagctgtcatagggaaagaaaattatgttgactacatgacct

SEQ ID NO: 5075 - DNA, 80 bp, synthetic construct
  misc_feature 1..80: note = Synthetic: >NC_001437.1-cand-10340-10419
  source 1..80: mol_type = other DNA
cactcaggagatacgaagacgtcctgatccaggaagacagggtcatctagtgtgatttaaagtagaaaagtagactatgt

SEQ ID NO: 5076 - DNA, 80 bp, synthetic construct
  misc_feature 1..80: note = Synthetic: >NC_001437.1-cand-10400-10479
  source 1..80: mol_type = other DNA
agtagaaaagtagactatgtaaataatgtaaatgagaaaatgcatgcatatggagtcaggccagcaaaagctgccaccgg

SEQ ID NO: 5077 - DNA, 80 bp, synthetic construct
  misc_feature 1..80: note = Synthetic: >NC_001437.1-cand-10480-10559
  source 1..80: mol_type = other DNA
atactgggtagacggtgctgtctgcgtctcagtcccaggaggactgggttaacaaatctgacaacagaaagtgagaaagc

SEQ ID NO: 5078 - DNA, 80 bp, synthetic construct
  misc_feature 1..80: note = Synthetic: >NC_001437.1-cand-10560-10639
  source 1..80: mol_type = other DNA
cctcagaaccgtctcggaagtaggtccctgctcactggaagttgaaagaccaacgtcaggccacaaatttgtgccacccc

SEQ ID NO: 5079 - DNA, 80 bp, synthetic construct
  misc_feature 1..80: note = Synthetic: >NC_001437.1-cand-10650-10729
  source 1..80: mol_type = other DNA
gcggcctgcgcagccccaggaggactgggttaccaaagccgttgagcccccacggcccaagcctcgtctaggatgcaata

SEQ ID NO: 5080 - DNA, 80 bp, synthetic construct
  misc_feature 1..80: note = Synthetic: >NC_001437.1-cand-10720-10799
  source 1..80: mol_type = other DNA
ggatgcaatagacgaggtgtaaggactagaggttagaggagaccccgtggaaacaacaatatgcggcccaagccccctcg

SEQ ID NO: 5081 - DNA, 80 bp, synthetic construct
  misc_feature 1..80: note = Synthetic: >NC_001437.1-cand-10800-10879
  source 1..80: mol_type = other DNA
aagctgtagaggaggtggaaggactagaggttagaggagaccccgcatttgcatcaaacagcatattgacacctgggaat

SEQ ID NO: 5082 - DNA, 80 bp, synthetic construct
  misc_feature 1..80: note = Synthetic: >NC_001437.1-cand-10880-10959
  source 1..80: mol_type = other DNA
agactgggagatcttctgctctatctcaacatcagctactaggcacagagcgccgaagtatgtagctggtggtgaggaag

SEQ ID NO: 5083 - DNA, 80 bp, synthetic construct
  misc_feature 1..80: note = Synthetic: >NC_001449.1-cand-10-89
  source 1..80: mol_type = other DNA
agagaagcccaaaccaattacctacccaaaatggagaaagttcacgttgacatcgaggaagacagcccattcctcagagc

SEQ ID NO: 5084 - DNA, 80 bp, synthetic construct
  misc_feature 1..80: note = Synthetic: >NC_001449.1-cand-90-169
  source 1..80: mol_type = other DNA
tttacaacggagcttcccgcagtttgaggtagaagccaagcaggtcactgataatgaccatgctaatgccagagcgtttt

SEQ ID NO: 5085 - DNA, 80 bp, synthetic construct
  misc_feature 1..80: note = Synthetic: >NC_001449.1-cand-2750-2829
  source 1..80: mol_type = other DNA
attacaaaggcaacgaaataatgacggcagctgcctctcaagggctgacccgtaaaggcgtgtatgccgttcggtacaag

SEQ ID NO: 5086 - DNA, 80 bp, synthetic construct
  misc_feature 1..80: note = Synthetic: >NC_001449.1-cand-2830-2909
  source 1..80: mol_type = other DNA
gtgaatgaaaatcccctgtacgcacccacctcagaacatgtgaacgtcctactgacccgcacggaggaccgtatcgtgtg

SEQ ID NO: 5087 - DNA, 80 bp, synthetic construct
  misc_feature 1..80: note = Synthetic: >NC_001449.1-cand-2910-2989
  source 1..80: mol_type = other DNA
gaaaacactagccggtgatccatggataaaaatactgacggccaagtatcctgggaacttcactgccacgatagaggaat

SEQ ID NO: 5088 - DNA, 80 bp, synthetic construct
  misc_feature 1..80: note = Synthetic: >NC_001449.1-cand-2990-3069
  source 1..80: mol_type = other DNA
ggcaagcagagcatgatgccatcatgaggcacatcttggagagaccggaccctaccgacgttttccaaaataaggcgaac

SEQ ID NO: 5089 - DNA, 80 bp, synthetic construct
  misc_feature 1..80: note = Synthetic: >NC_001449.1-cand-3070-3149
  source 1..80: mol_type = other DNA
gtgtgttgggccaaggctttggtgccggtactgaagactgcaggcatagacatgaccactgaacaatggaacactgtgga

SEQ ID NO: 5090 - DNA, 80 bp, synthetic construct
  misc_feature 1..80: note = Synthetic: >NC_001449.1-cand-3150-3229
  source 1..80: mol_type = other DNA
ttacttcgaaacggacaaagctcactcagcagagatagtattgaaccaactatgcgtgaggttctttggactcgacctgg

SEQ ID NO: 5091 - DNA, 80 bp, synthetic construct
  misc_feature 1..80: note = Synthetic: >NC_001449.1-cand-3230-3309
  source 1..80: mol_type = other DNA
actccggtctattttctgcacccactgttccgttatccattaggaataatcactgggataattccccgtcgcctaacatg

SEQ ID NO: 5092 - DNA, 80 bp, synthetic construct
  misc_feature 1..80: note = Synthetic: >NC_001449.1-cand-3310-3389
  source 1..80: mol_type = other DNA
tacgggttgaataaagaagtggtccgccagctctcccgcaggtacccacaactgcctcgagcagttgccaccggaagagt

SEQ ID NO: 5093 - DNA, 80 bp, synthetic construct
  misc_feature 1..80: note = Synthetic: >NC_001449.1-cand-3390-3469
  source 1..80: mol_type = other DNA
ctatgacatgaacactggcacgctgcgcaattatgatccgcgcataaatctagtacctgtgaacagaagactgcctcatg

SEQ ID NO: 5094 - DNA, 80 bp, synthetic construct
  misc_feature 1..80: note = Synthetic: >NC_001449.1-cand-3470-3549
  source 1..80: mol_type = other DNA
ctttagtcctccaccataatgaacacccacagagtgacttttcttcattcgtcagcaaactgaagggcagaactgtcttg

SEQ ID NO: 5095 - DNA, 80 bp, synthetic construct
  misc_feature 1..80: note = Synthetic: >NC_001449.1-cand-3560-3639
  source 1..80: mol_type = other DNA
agaagttgtccgtcccaggcaaaaaggtcgactggttgtcagaccagcctgaggctacctttagagctcggctggattta

SEQ ID NO: 5096 - DNA, 80 bp, synthetic construct
  misc_feature 1..80: note = Synthetic: >NC_001449.1-cand-3630-3709
  source 1..80: mol_type = other DNA
gctggatttaggtatcccaggtgacgtgcccaaatacgacattgtatttattaacgtgaggactccatataaataccatc

SEQ ID NO: 5097 - DNA, 80 bp, synthetic construct
  misc_feature 1..80: note = Synthetic: >NC_001449.1-cand-3710-3789
  source 1..80: mol_type = other DNA
attatcagcagtgtgaagaccacgccattaagcttagtatgttgaccaagaaagcttgtctgcatttgaatcccggcgga

SEQ ID NO: 5098 - DNA, 80 bp, synthetic construct
  misc_feature 1..80: note = Synthetic: >NC_001449.1-cand-3790-3869
  source 1..80: mol_type = other DNA
acctgcgtcagcataggttatggttacgctgacagggccagcgagagcatcattggtgctatagcgcggcagttcaagtt

SEQ ID NO: 5099 - DNA, 80 bp, synthetic construct
  misc_feature 1..80: note = Synthetic: >NC_001449.1-cand-3880-3959
  source 1..80: mol_type = other DNA
tgcaaaccgaaatcctcacatgaagagacagaagtactgtttgtattcattgggtacgatcgcaaggcccgtacgcacaa

SEQ ID NO: 5100 - DNA, 80 bp, synthetic construct
  misc_feature 1..80: note = Synthetic: >NC_001449.1-cand-3960-4039
  source 1..80: mol_type = other DNA
tccttacaagctttcatctaccttgaccaacatctatacaggttccagactccacgaagccggatgcgcaccctcatatc

SEQ ID NO: 5101 - DNA, 80 bp, synthetic construct
  misc_feature 1..80: note = Synthetic: >NC_001449.1-cand-6590-6669
  source 1..80: mol_type = other DNA
gaacaaaacatactgaagaacggcccaaggtacaggtgattcaggctgccgatccactagcgacagcggatctgtgcgga

SEQ ID NO: 5102 - DNA, 80 bp, synthetic construct
  misc_feature 1..80: note = Synthetic: >NC_001449.1-cand-6670-6749
  source 1..80: mol_type = other DNA
atccaccgggagttggttaggagattaaatgctgtcctgcttccgaacatccatacactgtttgacatgtcggctgaaga

SEQ ID NO: 5103 - DNA, 80 bp, synthetic construct
  misc_feature 1..80: note = Synthetic: >NC_001449.1-cand-6790-6869
  source 1..80: mol_type = other DNA
tgtgtactggaaactgacattgcgtcgtttgataaaagtgaggacgacgccatggctctgaccgcgttaatgattctgga

SEQ ID NO: 5104 - DNA, 80 bp, synthetic construct
  misc_feature 1..80: note = Synthetic: >NC_001449.1-cand-6830-6909
  source 1..80: mol_type = other DNA
aggacgacgccatggctctgaccgcgttaatgattctggaagacctaggagtggacgcagagctgttgacgctgattgag

SEQ ID NO: 5105 - DNA, 80 bp, synthetic construct
  misc_feature 1..80: note = Synthetic: >NC_001449.1-cand-6910-6989
  source 1..80: mol_type = other DNA
gcggctttcggcgaaatatcatcaatacatttgcccaccaaaactaaatttaaattcggagccatgatgaaatccggaat

SEQ ID NO: 5106 - DNA, 80 bp, synthetic construct
  misc_feature 1..80: note = Synthetic: >NC_001449.1-cand-6990-7069
  source 1..80: mol_type = other DNA
gttcctcacactgtttgtgaacacagtcatcaacatcgtaatcgcaagcagagtgttaagagagcggctaaccggatcac

SEQ ID NO: 5107 - DNA, 80 bp, synthetic construct
  misc_feature 1..80: note = Synthetic: >NC_001449.1-cand-7070-7149
  source 1..80: mol_type = other DNA
catgtgcagcattcattggagatgacaatatcgtgaaaggagtcaaatctgacaaattaatggcagacaggtgcgccact

SEQ ID NO: 5108 - DNA, 80 bp, synthetic construct
  misc_feature 1..80: note = Synthetic: >NC_001449.1-cand-7150-7229
  source 1..80: mol_type = other DNA
tggttgaacatggaagtcaagatcatagacgccgtggtgggcgagaaagcgccctatttttgtggagggtttatcttgtg

SEQ ID NO: 5109 - DNA, 80 bp, synthetic construct
  misc_feature 1..80: note = Synthetic: >NC_001449.1-cand-7230-7309
  source 1..80: mol_type = other DNA
tgactccgtgaccggcacagcgtgccgtgtggcagaccccctaaaaaggctgtttaagcttggcaaacccctggcagtag

SEQ ID NO: 5110 - DNA, 80 bp, synthetic construct
  misc_feature 1..80: note = Synthetic: >NC_001449.1-cand-7310-7389
  source 1..80: mol_type = other DNA
acgatgaacatgacgatgacaggagaagggcattacacgaagagtcaacacgctggaatcgagtgggaattcttccagag

SEQ ID NO: 5111 - DNA, 80 bp, synthetic construct
  misc_feature 1..80: note = Synthetic: >NC_001449.1-cand-7390-7469
  source 1..80: mol_type = other DNA
ctgtgtaaggcagtagaatcaaggtatgaaaccgtaggaacttccatcatagttatggccatgactactctagctagcag

SEQ ID NO: 5112 - DNA, 80 bp, synthetic construct
  misc_feature 1..80: note = Synthetic: >NC_001449.1-cand-7500-7579
  source 1..80: mol_type = other DNA
ccctataactctctacggctaacctgaatggactacgacatagtctagtccgccaagatgttcccgttccaaccaatgta

SEQ ID NO: 5113 - DNA, 80 bp, synthetic construct
  misc_feature 1..80: note = Synthetic: >NC_001449.1-cand-7550-7629
  source 1..80: mol_type = other DNA
cgccaagatgttcccgttccaaccaatgtatccgatgcagccaatgccctatcgtaacccgttcgcggccccgcgcaggc

SEQ ID NO: 5114 - DNA, 80 bp, synthetic construct
  misc_feature 1..80: note = Synthetic: >NC_001449.1-cand-7630-7709
  source 1..80: mol_type = other DNA
cctggttccccagaaccgacccttttctggcgatgcaggtgcaggaattaacccgctcgatggctaacctgacgttcaag

SEQ ID NO: 5115 - DNA, 80 bp, synthetic construct
  misc_feature 1..80: note = Synthetic: >NC_001449.1-cand-7650-7729
  source 1..80: mol_type = other DNA
ccttttctggcgatgcaggtgcaggaattaacccgctcgatggctaacctgacgttcaagcaacgccgggacgcgccacc

SEQ ID NO: 5116 - DNA, 80 bp, synthetic construct
  misc_feature 1..80: note = Synthetic: >NC_001449.1-cand-7840-7919
  source 1..80: mol_type = other DNA
cgcctaatccgaaggcacagagtggaaacaagaagaagcccaacaagaaaccaggcaagagacagcgcatggtcatgaaa

SEQ ID NO: 5117 - DNA, 80 bp, synthetic construct
  misc_feature 1..80: note = Synthetic: >NC_001449.1-cand-10430-10509
  source 1..80: mol_type = other DNA
cgtgtatgtgaatggagaaactcctgtgaacttcaatggggtcaaactaactgcaggtccactttccacagcttggacac

SEQ ID NO: 5118 - DNA, 80 bp, synthetic construct
  misc_feature 1..80: note = Synthetic: >NC_001449.1-cand-10580-10659
  source 1..80: mol_type = other DNA
acaaccaggagcatttggagacatacaatccagaacagtctcaagctcagatctgtatgccaataccaacctagtgctgc

SEQ ID NO: 5119 - DNA, 80 bp, synthetic construct
  misc_feature 1..80: note = Synthetic: >NC_001449.1-cand-10590-10669
  source 1..80: mol_type = other DNA
gcatttggagacatacaatccagaacagtctcaagctcagatctgtatgccaataccaacctagtgctgcagagacccaa

SEQ ID NO: 5120 - DNA, 80 bp, synthetic construct
  misc_feature 1..80: note = Synthetic: >NC_001449.1-cand-10680-10759
  source 1..80: mol_type = other DNA
atccatgtgccatacactcaggcaccatcgggttttgagcaatggaagaaagataaagctccgtcattgaaattcaccgc

SEQ ID NO: 5121 - DNA, 80 bp, synthetic construct
  misc_feature 1..80: note = Synthetic: >NC_001449.1-cand-10760-10839
  source 1..80: mol_type = other DNA
ccctttcggatgcgaaatatatacaaaccccattcgcgccgaaaattgtgctgtagggtcaattccattagcctttgaca

SEQ ID NO: 5122 - DNA, 80 bp, synthetic construct
  misc_feature 1..80: note = Synthetic: >NC_001449.1-cand-10850-10929
  source 1..80: mol_type = other DNA
cttgttcaccagggtgtcagaaacaccgacactttcagcggccgaatgcactcttaacgagtgcgtgtattcatccgact

SEQ ID NO: 5123 - DNA, 80 bp, synthetic construct
  misc_feature 1..80: note = Synthetic: >NC_001449.1-cand-10930-11009
  source 1..80: mol_type = other DNA
ttggcgggatcgccacggtcaagtattcggccagcaagtcaggcaagtgcgcagtccatgtgccatcagggactgctacc

SEQ ID NO: 5124 - DNA, 80 bp, synthetic construct
  misc_feature 1..80: note = Synthetic: >NC_001449.1-cand-11010-11089
  source 1..80: mol_type = other DNA
ctaaaagaagcagcagtcgagctaaccgagcaagggtcggcgaccattcatttctcgaccgcaaatatccacccggagtt

SEQ ID NO: 5125 - DNA, 80 bp, synthetic construct
  misc_feature 1..80: note = Synthetic: >NC_001449.1-cand-11100-11179
  source 1..80: mol_type = other DNA
atatgcacatcatatgtcacgtgcaaaggtgattgtcaccccccgaaagaccacattgtgacacacccccagtatcacgc

SEQ ID NO: 5126 - DNA, 80 bp, synthetic construct
  misc_feature 1..80: note = Synthetic: >NC_001449.1-cand-11180-11259
  source 1..80: mol_type = other DNA
ccaaacatttacagccgcggtgtcaaaaaccgcgtggacgtggttaacatccctgctgggaggatcggccgtaattatta

SEQ ID NO: 5127 - DNA, 80 bp, synthetic construct
  misc_feature 1..80: note = Synthetic: >NC_001449.1-cand-11260-11339
  source 1..80: mol_type = other DNA
taattggcttagtgctggctactattgtggccatgtacgtgctgaccaaccagaaacataattgaacatagcagcaattg

SEQ ID NO: 5128 - DNA, 80 bp, synthetic construct
  misc_feature 1..80: note = Synthetic: >NC_001449.1-cand-11340-11419
  source 1..80: mol_type = other DNA
gcaagctgcttatatagaacttgcggcgattggcatgccgctttaaaattttattttattttcttttcttttccgaatcg

SEQ ID NO: 5129 - DNA, 80 bp, synthetic construct
  misc_feature 1..80: note = Synthetic: >NC_001472.1-cand-60-139
  source 1..80: mol_type = other DNA
gtacctttgtgcgcctgttttacatcccctccccaaattgtaatttagaagtttcacacaccgatcattagcaagcgtgg

SEQ ID NO: 5130 - DNA, 80 bp, synthetic construct
  misc_feature 1..80: note = Synthetic: >NC_001472.1-cand-150-229
  source 1..80: mol_type = other DNA
atgttttgatcaagcacttctgttaccccggactgagtatcaatagaccgctaacgcggttgaaggagaaaacgttcgtt

SEQ ID NO: 5131 - DNA, 80 bp, synthetic construct
  misc_feature 1..80: note = Synthetic: >NC_001472.1-cand-230-309
  source 1..80: mol_type = other DNA
acccggccaactacttcgaaaaacctagtaacaccatggaagttgcggagtgtttcgctcagcactaccccagtgtagat

SEQ ID NO: 5132 - DNA, 80 bp, synthetic construct
  misc_feature 1..80: note = Synthetic: >NC_001472.1-cand-300-379
  source 1..80: mol_type = other DNA
cagtgtagatcaggtcgatgagtcaccgcgttccccacgggcgaccgtggcggtggctgcgttggcggcctgcctacggg

SEQ ID NO: 5133 - DNA, 80 bp, synthetic construct
  misc_feature 1..80: note = Synthetic: >NC_001472.1-cand-3060-3139
  source 1..80: mol_type = other DNA
acggcattaataccctgaacaacatgggtacgctgtacatgcggcacgtaaatgaggcaggccaaggcccgatcaaaagt

SEQ ID NO: 5134 - DNA, 80 bp, synthetic construct
  misc_feature 1..80: note = Synthetic: >NC_001472.1-cand-3100-3179
  source 1..80: mol_type = other DNA
gcggcacgtaaatgaggcaggccaaggcccgatcaaaagtacagttagaatatattttaaacccaaacatgtgaaggcgt

SEQ ID NO: 5135 - DNA, 80 bp, synthetic construct
  misc_feature 1..80: note = Synthetic: >NC_001472.1-cand-3180-3259
  source 1..80: mol_type = other DNA
gggtgcccagaccgccgaggctatgtcaatatgagaagcaaaagaatgttaatttcaacccaacaggagtcaccacaacg

SEQ ID NO: 5136 - DNA, 80 bp, synthetic construct
  misc_feature 1..80: note = Synthetic: >NC_001472.1-cand-3220-3299
  source 1..80: mol_type = other DNA
aaagaatgttaatttcaacccaacaggagtcaccacaacgcgctcaaacattaccacaaccggcgcttttggacaacagt

SEQ ID NO: 5137 - DNA, 80 bp, synthetic construct
  misc_feature 1..80: note = Synthetic: >NC_001472.1-cand-3340-3419
  source 1..80: mol_type = other DNA
acacctcgccacccgcgaggactggcagcggtgcgtgtgggaagattacaacagagatcttcttgtgagtacaaccacgg

SEQ ID NO: 5138 - DNA, 80 bp, synthetic construct
  misc_feature 1..80: note = Synthetic: >NC_001472.1-cand-3380-3459
  source 1..80: mol_type = other DNA
gaagattacaacagagatcttcttgtgagtacaaccacggcacatggatgcgatatcatagccaggtgtcagtgcacaac

SEQ ID NO: 5139 - DNA, 80 bp, synthetic construct
  misc_feature 1..80: note = Synthetic: >NC_001472.1-cand-3520-3599
  source 1..80: mol_type = other DNA
tcttgtggaggttcaagagagtgagtactatccaaagaggtaccaatcccacgtgcttttagcggcaggcttttccgaac

SEQ ID NO: 5140 - DNA, 80 bp, synthetic construct
  misc_feature 1..80: note = Synthetic: >NC_001472.1-cand-3660-3739
  source 1..80: mol_type = other DNA
gaggggagggtgttgttggctttgccgacgtacgcgacctgctgtggttagaagatgatgcaatggagcagggggtcaaa

SEQ ID NO: 5141 - DNA, 80 bp, synthetic construct
  misc_feature 1..80: note = Synthetic: >NC_001472.1-cand-3740-3819
  source 1..80: mol_type = other DNA
gattacgtagagcaacttggaaacgcctttgggtcaggattcactaaccaagtctgtgaacaggttaaccttttgaaaga

SEQ ID NO: 5142 - DNA, 80 bp, synthetic construct
  misc_feature 1..80: note = Synthetic: >NC_001472.1-cand-3820-3899
  source 1..80: mol_type = other DNA
gtccctagtgggccaagactccatcttagaaaaatctctgaaagccctagtaaaaattgtgtcagccttggtgatagtcg

SEQ ID NO: 5143 - DNA, 80 bp, synthetic construct
  misc_feature 1..80: note = Synthetic: >NC_001472.1-cand-3900-3979
  source 1..80: mol_type = other DNA
tgaggaaccacgacgatttaataacagtgactgcaacacttgccctcattggctgcacctcctcaccatggagatggctt

SEQ ID NO: 5144 - DNA, 80 bp, synthetic construct
  misc_feature 1..80: note = Synthetic: >NC_001472.1-cand-3980-4059
  source 1..80: mol_type = other DNA
aagcaaaaggtgtcccagtactatggcattccaatggctgagcgccagaacagtggttggctcaagaagttcactgaaat

SEQ ID NO: 5145 - DNA, 80 bp, synthetic construct
  misc_feature 1..80: note = Synthetic: >NC_001472.1-cand-4060-4139
  source 1..80: mol_type = other DNA
gaccaacgcctgcaagggaatggagtggatagctattaaaatccagaaatttatagaatggctcaaagttaaaatcctac

SEQ ID NO: 5146 - DNA, 80 bp, synthetic construct
  misc_feature 1..80: note = Synthetic: >NC_001472.1-cand-4140-4219
  source 1..80: mol_type = other DNA
cagaagttaaagaaaaacatgagttcttaaacagacttaaacaacttccgttactggagagtcagattgccaccattgag

SEQ ID NO: 5147 - DNA, 80 bp, synthetic construct
  misc_feature 1..80: note = Synthetic: >NC_001472.1-cand-4220-4299
  source 1..80: mol_type = other DNA
caaagtgcaccttctcagagtgatcaagagcaattgttttctaatgttcagtactttgcacattactgcaggaaatacgc

SEQ ID NO: 5148 - DNA, 80 bp, synthetic construct
  misc_feature 1..80: note = Synthetic: >NC_001474.2-cand-880-959
  source 1..80: mol_type = other DNA
ccaaagagccctgattttcatcttactgacagctgtcactccttcaatgacaatgcgttgcataggaatgtcaaatagag

SEQ ID NO: 5149 - DNA, 80 bp, synthetic construct
  misc_feature 1..80: note = Synthetic: >NC_001474.2-cand-980-1059
  source 1..80: mol_type = other DNA
ggaggaagctgggttgacatagtcttagaacatggaagctgtgtgacgacgatggcaaaaaacaaaccaacattggattt

SEQ ID NO: 5150 - DNA, 80 bp, synthetic construct
  misc_feature 1..80: note = Synthetic: >NC_001474.2-cand-1040-1119
  source 1..80: mol_type = other DNA
aacaaaccaacattggattttgaactgataaaaacagaagccaaacagcctgccaccctaaggaagtactgtatagaggc

SEQ ID NO: 5151 - DNA, 80 bp, synthetic construct
  misc_feature 1..80: note = Synthetic: >NC_001474.2-cand-1080-1159
  source 1..80: mol_type = other DNA
ccaaacagcctgccaccctaaggaagtactgtatagaggcaaagctaaccaacacaacaacagaatctcgctgcccaaca

SEQ ID NO: 5152 - DNA, 80 bp, synthetic construct
  misc_feature 1..80: note = Synthetic: >NC_001474.2-cand-1240-1319
  source 1..80: mol_type = other DNA
tggatgtggactatttggaaagggaggcattgtgacctgtgctatgttcagatgcaaaaagaacatggaaggaaaagttg

SEQ ID NO: 5153 - DNA, 80 bp, synthetic construct
  misc_feature 1..80: note = Synthetic: >NC_001474.2-cand-1280-1359
  source 1..80: mol_type = other DNA
gctatgttcagatgcaaaaagaacatggaaggaaaagttgtgcaaccagaaaacttggaatacaccattgtgataacacc

SEQ ID NO: 5154 - DNA, 80 bp, synthetic construct
  misc_feature 1..80: note = Synthetic: >NC_001474.2-cand-1370-1449
  source 1..80: mol_type = other DNA
gaagagcatgcagtcggaaatgacacaggaaaacatggcaaggaaatcaaaataacaccacagagttccatcacagaagc

SEQ ID NO: 5155 - DNA, 80 bp, synthetic construct
  misc_feature 1..80: note = Synthetic: >NC_001474.2-cand-1440-1519
  source 1..80: mol_type = other DNA
tcacagaagcagaattgacaggttatggcactgtcacaatggagtgctctccaagaacgggcctcgacttcaatgagatg

SEQ ID NO: 5156 - DNA, 80 bp, synthetic construct
  misc_feature 1..80: note = Synthetic: >NC_001474.2-cand-1520-1599
  source 1..80: mol_type = other DNA
gtgttgctgcagatggaaaataaagcttggctggtgcacaggcaatggttcctagacctgccgttaccatggttgcccgg

SEQ ID NO: 5157 - DNA, 80 bp, synthetic construct
  misc_feature 1..80: note = Synthetic: >NC_001474.2-cand-1600-1679
  source 1..80: mol_type = other DNA
agcggacacacaagggtcaaattggatacagaaagagacattggtcactttcaaaaatccccatgcgaagaaacaggatg

SEQ ID NO: 5158 - DNA, 80 bp, synthetic construct
  misc_feature 1..80: note = Synthetic: >NC_001474.2-cand-1730-1809
  source 1..80: mol_type = other DNA
gccacagaaatccaaatgtcatcaggaaacttactcttcacaggacatctcaagtgcaggctgagaatggacaagctaca

SEQ ID NO: 5159 - DNA, 80 bp, synthetic construct
  misc_feature 1..80: note = Synthetic: >NC_001474.2-cand-1760-1839
  source 1..80: mol_type = other DNA
ttactcttcacaggacatctcaagtgcaggctgagaatggacaagctacagctcaaaggaatgtcatactctatgtgcac

SEQ ID NO: 5160 - DNA, 80 bp, synthetic construct
  misc_feature 1..80: note = Synthetic: >NC_001474.2-cand-1830-1909
  source 1..80: mol_type = other DNA
ctatgtgcacaggaaagtttaaagttgtgaaggaaatagcagaaacacaacatggaacaatagttatcagagtgcaatat

SEQ ID NO: 5161 - DNA, 80 bp, synthetic construct
  misc_feature 1..80: note = Synthetic: >NC_001474.2-cand-1920-1999
  source 1..80: mol_type = other DNA
gctctccatgcaagatcccttttgagataatggatttggaaaaaagacatgtcttaggtcgcctgattacagtcaaccca

SEQ ID NO: 5162 - DNA, 80 bp, synthetic construct
  misc_feature 1..80: note = Synthetic: >NC_001474.2-cand-2000-2079
  source 1..80: mol_type = other DNA
attgtgacagaaaaagatagcccagtcaacatagaagcagaacctccattcggagacagctacatcatcataggagtaga

SEQ ID NO: 5163 - DNA, 80 bp, synthetic construct
  misc_feature 1..80: note = Synthetic: >NC_001474.2-cand-2070-2149
  source 1..80: mol_type = other DNA
taggagtagagccgggacaactgaagctcaactggtttaagaaaggaagttctatcggccaaatgtttgagacaacaatg

SEQ ID NO: 5164 - DNA, 80 bp, synthetic construct
  misc_feature 1..80: note = Synthetic: >NC_001474.2-cand-4700-4779
  source 1..80: mol_type = other DNA
ggaaagaggattgaaccatcatgggcggacgtcaagaaagacctaatatcatatggaggaggctggaagttagaaggaga

SEQ ID NO: 5165 - DNA, 80 bp, synthetic construct
  misc_feature 1..80: note = Synthetic: >NC_001474.2-cand-4780-4859
  source 1..80: mol_type = other DNA
atggaaggaaggagaagaagtccaggtattggcactggagcctggaaaaaatccaagagccgtccaaacgaaacctggtc

SEQ ID NO: 5166 - DNA, 80 bp, synthetic construct
  misc_feature 1..80: note = Synthetic: >NC_001474.2-cand-4860-4939
  source 1..80: mol_type = other DNA
ttttcaaaaccaacgccggaacaataggtgctgtatctctggacttttctcctggaacgtcaggatctccaattatcgac

SEQ ID NO: 5167 - DNA, 80 bp, synthetic construct
  misc_feature 1..80: note = Synthetic: >NC_001474.2-cand-4940-5019
  source 1..80: mol_type = other DNA
aaaaaaggaaaagttgtgggtctttatggtaatggtgttgttacaaggagtggagcatatgtgagtgctatagcccagac

SEQ ID NO: 5168 - DNA, 80 bp, synthetic construct
  misc_feature 1..80: note = Synthetic: >NC_001474.2-cand-5020-5099
  source 1..80: mol_type = other DNA
tgaaaaaagcattgaagacaacccagagatcgaagatgacattttccgaaagagaagactgaccatcatggacctccacc

SEQ ID NO: 5169 - DNA, 80 bp, synthetic construct
  misc_feature 1..80: note = Synthetic: >NC_001474.2-cand-5080-5159
  source 1..80: mol_type = other DNA
gaccatcatggacctccacccaggagcgggaaagacgaagagataccttccggccatagtcagagaagctataaaacggg

SEQ ID NO: 5170 - DNA, 80 bp, synthetic construct
  misc_feature 1..80: note = Synthetic: >NC_001474.2-cand-5190-5269
  source 1..80: mol_type = other DNA
gagttgtggcagctgaaatggaggaagcccttagaggacttccaataagataccagaccccagccatcagagctgagcac

SEQ ID NO: 5171 - DNA, 80 bp, synthetic construct
  misc_feature 1..80: note = Synthetic: >NC_001474.2-cand-5280-5359
  source 1..80: mol_type = other DNA
agattgtggacctaatgtgtcatgccacatttaccatgaggctgctatcaccagttagagtgccaaactacaacctgatt

SEQ ID NO: 5172 - DNA, 80 bp, synthetic construct
  misc_feature 1..80: note = Synthetic: >NC_001474.2-cand-5360-5439
  source 1..80: mol_type = other DNA
atcatggacgaagcccatttcacagacccagcaagtatagcagctagaggatacatctcaactcgagtggagatgggtga

SEQ ID NO: 5173 - DNA, 80 bp, synthetic construct
  misc_feature 1..80: note = Synthetic: >NC_001474.2-cand-5440-5519
  source 1..80: mol_type = other DNA
ggcagctgggatttttatgacagccactcccccgggaagcagagacccatttcctcagagcaatgcaccaatcatagatg

SEQ ID NO: 5174 - DNA, 80 bp, synthetic construct
  misc_feature 1..80: note = Synthetic: >NC_001474.2-cand-5520-5599
  source 1..80: mol_type = other DNA
aagaaagagaaatccctgaacgttcgtggaattccggacatgaatgggtcacggattttaaagggaagactgtttggttc

SEQ ID NO: 5175 - DNA, 80 bp, synthetic construct
  misc_feature 1..80: note = Synthetic: >NC_001474.2-cand-5600-5679
  source 1..80: mol_type = other DNA
gttccaagtataaaagcaggaaatgatatagcagcttgcctgaggaaaaatggaaagaaagtgatacaactcagtaggaa

SEQ ID NO: 5176 - DNA, 80 bp, synthetic construct
  misc_feature 1..80: note = Synthetic: >NC_001474.2-cand-5680-5759
  source 1..80: mol_type = other DNA
gacctttgattctgagtatgtcaagactagaaccaatgattgggacttcgtggttacaactgacatttcagaaatgggtg

SEQ ID NO: 5177 - DNA, 80 bp, synthetic construct
  misc_feature 1..80: note = Synthetic: >NC_001474.2-cand-5760-5839
  source 1..80: mol_type = other DNA
ccaatttcaaggctgagagggttatagaccccagacgctgcatgaaaccagtcatactaacagatggtgaagagcgggtg

SEQ ID NO: 5178 - DNA, 80 bp, synthetic construct
  misc_feature 1..80: note = Synthetic: >NC_001474.2-cand-5840-5919
  source 1..80: mol_type = other DNA
attctggcaggacctatgccagtgacccactctagtgcagcacaaagaagagggagaataggaagaaatccaaaaaatga

SEQ ID NO: 5179 - DNA, 80 bp, synthetic construct
  misc_feature 1..80: note = Synthetic: >NC_001474.2-cand-5950-6029
  source 1..80: mol_type = other DNA
tctggaaaatgatgaagactgtgcacactggaaagaagctaaaatgctcctagataacatcaacacgccagaaggaatca

SEQ ID NO: 5180 - DNA, 80 bp, synthetic construct
  misc_feature 1..80: note = Synthetic: >NC_001474.2-cand-8580-8659
  source 1..80: mol_type = other DNA
cacagatggcaatgacagacacgactccatttggacaacagcgcgtttttaaagagaaagtggacacgagaacccaagaa

SEQ ID NO: 5181 - DNA, 80 bp, synthetic construct
  misc_feature 1..80: note = Synthetic: >NC_001474.2-cand-8660-8739
  source 1..80: mol_type = other DNA
ccgaaagaaggcacgaagaaactaatgaaaataacagcagagtggctttggaaagaattagggaagaaaaagacacccag

SEQ ID NO: 5182 - DNA, 80 bp, synthetic construct
  misc_feature 1..80: note = Synthetic: >NC_001474.2-cand-8710-8789
  source 1..80: mol_type = other DNA
gaaagaattagggaagaaaaagacacccaggatgtgcaccagagaagaattcacaagaaaggtgagaagcaatgcagcct

SEQ ID NO: 5183 - DNA, 80 bp, synthetic construct
  misc_feature 1..80: note = Synthetic: >NC_001474.2-cand-8820-8899
  source 1..80: mol_type = other DNA
ggaagtcggcacgtgaggctgttgaagatagtaggttttgggagctggttgacaaggaaaggaatctccatcttgaagga

SEQ ID NO: 5184 - DNA, 80 bp, synthetic construct
  misc_feature 1..80: note = Synthetic: >NC_001474.2-cand-8870-8949
  source 1..80: mol_type = other DNA
gacaaggaaaggaatctccatcttgaaggaaagtgtgaaacatgtgtgtacaacatgatgggaaaaagagagaagaagct

SEQ ID NO: 5185 - DNA, 80 bp, synthetic construct
  misc_feature 1..80: note = Synthetic: >NC_001474.2-cand-8980-9059
  source 1..80: mol_type = other DNA
agccatatggtacatgtggcttggagcacgcttcttagagtttgaagccctaggattcttaaatgaagatcactggttct

SEQ ID NO: 5186 - DNA, 80 bp, synthetic construct
  misc_feature 1..80: note = Synthetic: >NC_001474.2-cand-9060-9139
  source 1..80: mol_type = other DNA
ccagagagaactccctgagtggagtggaaggagaagggctgcacaagctaggttacattctaagagacgtgagcaagaaa

SEQ ID NO: 5187 - DNA, 80 bp, synthetic construct
  misc_feature 1..80: note = Synthetic: >NC_001474.2-cand-9140-9219
  source 1..80: mol_type = other DNA
gagggaggagcaatgtatgccgatgacaccgcaggatgggatacaagaatcacactagaagacctaaaaaatgaagaaat

SEQ ID NO: 5188 - DNA, 80 bp, synthetic construct
  misc_feature 1..80: note = Synthetic: >NC_001474.2-cand-9220-9299
  source 1..80: mol_type = other DNA
ggtaacaaaccacatggaaggagaacacaagaaactagccgaggccattttcaaactaacgtaccaaaacaaggtggtgc

SEQ ID NO: 5189 - DNA, 80 bp, synthetic construct
  misc_feature 1..80: note = Synthetic: >NC_001474.2-cand-9300-9379
  source 1..80: mol_type = other DNA
gtgtgcaaagaccaacaccaagaggcacagtaatggacatcatatcgagaagagaccaaagaggtagtggacaagttggc

SEQ ID NO: 5190 - DNA, 80 bp, synthetic construct
  misc_feature 1..80: note = Synthetic: >NC_001474.2-cand-9380-9459
  source 1..80: mol_type = other DNA
acctatggactcaatactttcaccaatatggaagcccaactaatcagacagatggagggagaaggagtctttaaaagcat

SEQ ID NO: 5191 - DNA, 80 bp, synthetic construct
  misc_feature 1..80: note = Synthetic: >NC_001474.2-cand-9430-9509
  source 1..80: mol_type = other DNA
gatggagggagaaggagtctttaaaagcattcagcacctaacaatcacagaagaaatcgctgtgcaaaactggttagcaa

SEQ ID NO: 5192 - DNA, 80 bp, synthetic construct
  misc_feature 1..80: note = Synthetic: >NC_001474.2-cand-9540-9619
  source 1..80: mol_type = other DNA
ccatcagtggagatgattgtgttgtgaaacctttagatgacaggttcgcaagcgctttaacagctctaaatgacatggga

SEQ ID NO: 5193 - DNA, 80 bp, synthetic construct
  misc_feature 1..80: note = Synthetic: >NC_001474.2-cand-9620-9699
  source 1..80: mol_type = other DNA
aagattaggaaagacatacaacaatgggaaccttcaagaggatggaatgattggacacaagtgcccttctgttcacacca

SEQ ID NO: 5194 - DNA, 80 bp, synthetic construct
  misc_feature 1..80: note = Synthetic: >NC_001474.2-cand-9700-9779
  source 1..80: mol_type = other DNA
tttccatgagttaatcatgaaagacggtcgcgtactcgttgttccatgtagaaaccaagatgaactgattggcagagccc

SEQ ID NO: 5195 - DNA, 80 bp, synthetic construct
  misc_feature 1..80: note = Synthetic: >NC_001474.2-cand-9740-9819
  source 1..80: mol_type = other DNA
gttccatgtagaaaccaagatgaactgattggcagagcccgaatctcccaaggagcagggtggtctttgcgggagacggc

SEQ ID NO: 5196 - DNA, 80 bp, synthetic construct
  misc_feature 1..80: note = Synthetic: >NC_001475.2-cand-1820-1899
  source 1..80: mol_type = other DNA
tgcaatgtgcacgaatacctttgtgttgaagaaagaagtctcagaaacgcagcacgggacaatactcattaaggttgagt

SEQ ID NO: 5197 - DNA, 80 bp, synthetic construct
  misc_feature 1..80: note = Synthetic: >NC_001475.2-cand-1920-1999
  source 1..80: mol_type = other DNA
tgcaagattcccttttccacagaggatggacaagggaaagctcataatggcagactgatcacagccaaccctgtggtgac

SEQ ID NO: 5198 - DNA, 80 bp, synthetic construct
  misc_feature 1..80: note = Synthetic: >NC_001475.2-cand-1960-2039
  source 1..80: mol_type = other DNA
ctcataatggcagactgatcacagccaaccctgtggtgactaagaaggaggagcctgtcaatattgaggctgaacctcct

SEQ ID NO: 5199 - DNA, 80 bp, synthetic construct
  misc_feature 1..80: note = Synthetic: >NC_001475.2-cand-2150-2229
  source 1..80: mol_type = other DNA
aaggcgcatggccatcttgggagacacagcttgggactttggatcagtgggtggtgttctgaactcattaggcaaaatgg

SEQ ID NO: 5200 - DNA, 80 bp, synthetic construct
  misc_feature 1..80: note = Synthetic: >NC_001475.2-cand-2160-2239
  source 1..80: mol_type = other DNA
gccatcttgggagacacagcttgggactttggatcagtgggtggtgttctgaactcattaggcaaaatggtgcaccaaat

SEQ ID NO: 5201 - DNA, 80 bp, synthetic construct
  misc_feature 1..80: note = Synthetic: >NC_001475.2-cand-2240-2319
  source 1..80: mol_type = other DNA
atttggaagtgcttatacagccctgttcagtggagtctcttgggtgatgaaaattggaataggtgtcctcttgacttgga

SEQ ID NO: 5202 - DNA, 80 bp, synthetic construct
  misc_feature 1..80: note = Synthetic: >NC_001475.2-cand-2320-2399
  source 1..80: mol_type = other DNA
tagggttgaattcaaaaaacacatccatgtcattttcatgcattgcgataggaatcattacactctatctgggagctgtg

SEQ ID NO: 5203 - DNA, 80 bp, synthetic construct
  misc_feature 1..80: note = Synthetic: >NC_001475.2-cand-2420-2499
  source 1..80: mol_type = other DNA
tgtcataaactggaagggcaaagaactcaaatgtggaagcggaattttcgtcaccaatgaggtccatacctggacagagc

SEQ ID NO: 5204 - DNA, 80 bp, synthetic construct
  misc_feature 1..80: note = Synthetic: >NC_001475.2-cand-2470-2549
  source 1..80: mol_type = other DNA
tcaccaatgaggtccatacctggacagagcaatacaaattccaagcagactccccaaaaagattggcaacagccattgca

SEQ ID NO: 5205 - DNA, 80 bp, synthetic construct
  misc_feature 1..80: note = Synthetic: >NC_001475.2-cand-2550-2629
  source 1..80: mol_type = other DNA
ggcgcctgggagaatggagtgtgtggaattaggtcaacaaccagaatggagaatctcttgtggaagcaaatagccaatga

SEQ ID NO: 5206 - DNA, 80 bp, synthetic construct
  misc_feature 1..80: note = Synthetic: >NC_001475.2-cand-2610-2689
  source 1..80: mol_type = other DNA
tggaagcaaatagccaatgaactgaactacatattatgggaaaacaatatcaaattaacggtagttgtgggcgatacact

SEQ ID NO: 5207 - DNA, 80 bp, synthetic construct
  misc_feature 1..80: note = Synthetic: >NC_001475.2-cand-2770-2849
  source 1..80: mol_type = other DNA
caaaaatagtgacagctgaaacacaaaattcctctttcataatagacgggccaaacacaccggagtgtccaagtgcctca

SEQ ID NO: 5208 - DNA, 80 bp, synthetic construct
  misc_feature 1..80: note = Synthetic: >NC_001475.2-cand-2790-2869
  source 1..80: mol_type = other DNA
acacaaaattcctctttcataatagacgggccaaacacaccggagtgtccaagtgcctcaagagcatggaatgtgtggga

SEQ ID NO: 5209 - DNA, 80 bp, synthetic construct
  misc_feature 1..80: note = Synthetic: >NC_001475.2-cand-2870-2949
  source 1..80: mol_type = other DNA
ggtggaagattacgggttcggagtcttcacaaccaacatatggctgaaactccgagaggtctacacccaactatgtgacc

SEQ ID NO: 5210 - DNA, 80 bp, synthetic construct
  misc_feature 1..80: note = Synthetic: >NC_001475.2-cand-2950-3029
  source 1..80: mol_type = other DNA
ataggctaatgtcggcagctgtcaaggatgagagggccgtgcatgccgacatgggctactggatagaaagccaaaagaat

SEQ ID NO: 5211 - DNA, 80 bp, synthetic construct
  misc_feature 1..80: note = Synthetic: >NC_001475.2-cand-3030-3109
  source 1..80: mol_type = other DNA
ggaagttggaagctagaaaaagcatccctcatagaggtaaaaacctgcacatggccaaaatcacacactctctggactaa

SEQ ID NO: 5212 - DNA, 80 bp, synthetic construct
  misc_feature 1..80: note = Synthetic: >NC_001475.2-cand-5660-5739
  source 1..80: mol_type = other DNA
tcaacttagtaggaagacttttgacacagaatatcagaagactaaactgaatgattgggactttgtggtgacaactgaca

SEQ ID NO: 5213 - DNA, 80 bp, synthetic construct
  misc_feature 1..80: note = Synthetic: >NC_001475.2-cand-5760-5839
  source 1..80: mol_type = other DNA
ttcaaagcagatagagtgatcgacccaagaagatgtctcaaaccagtgatcttgacagatggaccagagcgggtgatcct

SEQ ID NO: 5214 - DNA, 80 bp, synthetic construct
  misc_feature 1..80: note = Synthetic: >NC_001475.2-cand-5820-5899
  source 1..80: mol_type = other DNA
ggaccagagcgggtgatcctggccggaccaatgccagtcaccgcggcgagtgctgcgcaaaggagagggagagttggcag

SEQ ID NO: 5215 - DNA, 80 bp, synthetic construct
  misc_feature 1..80: note = Synthetic: >NC_001475.2-cand-5900-5979
  source 1..80: mol_type = other DNA
gaacccacaaaaagagaatgaccagtacatattcacgggccagcctctcaacaatgatgaagaccatgctcactggacag

SEQ ID NO: 5216 - DNA, 80 bp, synthetic construct
  misc_feature 1..80: note = Synthetic: >NC_001475.2-cand-5980-6059
  source 1..80: mol_type = other DNA
aagcaaaaatgctgctggacaacatcaacacaccagaagggattataccagctctctttgaaccagaaagggagaagtca

SEQ ID NO: 5217 - DNA, 80 bp, synthetic construct
  misc_feature 1..80: note = Synthetic: >NC_001475.2-cand-6130-6209
  source 1..80: mol_type = other DNA
gtgaccttccagtttggttagcccataaagtagcatcagaaggaatcaaatacacagatagaaaatggtgctttgatggg

SEQ ID NO: 5218 - DNA, 80 bp, synthetic construct
  misc_feature 1..80: note = Synthetic: >NC_001475.2-cand-6180-6259
  source 1..80: mol_type = other DNA
tacacagatagaaaatggtgctttgatgggcaacgcaataatcaaattttagaggagaacatggatgtggaaatttggac

SEQ ID NO: 5219 - DNA, 80 bp, synthetic construct
  misc_feature 1..80: note = Synthetic: >NC_001475.2-cand-6260-6339
  source 1..80: mol_type = other DNA
aaaggaaggagaaaagaaaaaattgagacctaggtggcttgatgcccgcacttattcagatccattggcactcaaggaat

SEQ ID NO: 5220 - DNA, 80 bp, synthetic construct
  misc_feature 1..80: note = Synthetic: >NC_001475.2-cand-6340-6419
  source 1..80: mol_type = other DNA
tcaaggactttgcggctggcagaaagtcaatcgcccttgatcttgtgacagaaataggaagagtgccttcacatctagcc

SEQ ID NO: 5221 - DNA, 80 bp, synthetic construct
  misc_feature 1..80: note = Synthetic: >NC_001475.2-cand-6420-6499
  source 1..80: mol_type = other DNA
cacagaacaagaaacgctctggacaatctggtgatgctgcatacgtcagaagatggcggtagggcttacaggcatgcggt

SEQ ID NO: 5222 - DNA, 80 bp, synthetic construct
  misc_feature 1..80: note = Synthetic: >NC_001475.2-cand-6500-6579
  source 1..80: mol_type = other DNA
ggaggaactaccagaaacaatggaaacactcctactcttgggactaatgatcttgttgacaggtggagcaatgcttttct

SEQ ID NO: 5223 - DNA, 80 bp, synthetic construct
  misc_feature 1..80: note = Synthetic: >NC_001475.2-cand-6580-6659
  source 1..80: mol_type = other DNA
tgatatcaggtaaagggattggaaagacttcaataggactcatttgtgtaatcgcttccagcggcatgttgtggatggcc

SEQ ID NO: 5224 - DNA, 80 bp, synthetic construct
  misc_feature 1..80: note = Synthetic: >NC_001475.2-cand-6660-6739
  source 1..80: mol_type = other DNA
gaagttccactccaatggatcgcgtcggctatagtcctggagttttttatgatggtgttgctcataccagaaccagaaaa

SEQ ID NO: 5225 - DNA, 80 bp, synthetic construct
  misc_feature 1..80: note = Synthetic: >NC_001475.2-cand-6740-6819
  source 1..80: mol_type = other DNA
gcagagaaccccccaagacaaccaactcgcatatgtcgtgataggcatacttacattggctgcaacaatagcagccaatg

SEQ ID NO: 5226 - DNA, 80 bp, synthetic construct
  misc_feature 1..80: note = Synthetic: >NC_001475.2-cand-6820-6899
  source 1..80: mol_type = other DNA
aaatgggactgctggaaaccacaaagagagacttaggaatgtctaaggagccaggtgttgtttctccaaccagctatttg

SEQ ID NO: 5227 - DNA, 80 bp, synthetic construct
  misc_feature 1..80: note = Synthetic: >NC_001475.2-cand-6900-6979
  source 1..80: mol_type = other DNA
gatgtggacttgcacccagcatcagcctggacattgtacgccgtggccactacagtaataacaccaatgttaagacatac

SEQ ID NO: 5228 - DNA, 80 bp, synthetic construct
  misc_feature 1..80: note = Synthetic: >NC_001475.2-cand-9560-9639
  source 1..80: mol_type = other DNA
gaaaccaatcgatgacaggttcgctaatgccctgcttgctttgaacgatatgggaaaggttcggaaagacatacctcaat

SEQ ID NO: 5229 - DNA, 80 bp, synthetic construct
  misc_feature 1..80: note = Synthetic: >NC_001475.2-cand-9650-9729
  source 1..80: mol_type = other DNA
aaagggatggcatgattggcaacaggttcctttctgctcccaccactttcatgaattgatcatgaaagatggaagaaagt

SEQ ID NO: 5230 - DNA, 80 bp, synthetic construct
  misc_feature 1..80: note = Synthetic: >NC_001475.2-cand-9730-9809
  source 1..80: mol_type = other DNA
tggtggttccctgcagaccccaggacgaactaataggaagagcaagaatctctcaaggagcgggatggagccttagagaa

SEQ ID NO: 5231 - DNA, 80 bp, synthetic construct
  misc_feature 1..80: note = Synthetic: >NC_001475.2-cand-9830-9909
  source 1..80: mol_type = other DNA
ctacgcccaaatgtggagtctcatgtattttcacagaagagatctcagattagcatccaacgccatatgttcagcagtac

SEQ ID NO: 5232 - DNA, 80 bp, synthetic construct
  misc_feature 1..80: note = Synthetic: >NC_001475.2-cand-9890-9969
  source 1..80: mol_type = other DNA
cgccatatgttcagcagtaccagtccactgggttcccacaagtagaacgacatggtctattcatgctcaccatcagtgga

SEQ ID NO: 5233 - DNA, 80 bp, synthetic construct
  misc_feature 1..80: note = Synthetic: >NC_001475.2-cand-9970-10049
  source 1..80: mol_type = other DNA
tgactacagaagacatgcttactgtttggaacagggtgtggatagaggaaaatccatggatggaagacaaaactccagtt

SEQ ID NO: 5234 - DNA, 80 bp, synthetic construct
  misc_feature 1..80: note = Synthetic: >NC_001475.2-cand-10050-10129
  source 1..80: mol_type = other DNA
acaacttgggaaaatgttccatatctaggaaagagagaagaccaatggtgtggatcacttattggtctcacttccagagc

SEQ ID NO: 5235 - DNA, 80 bp, synthetic construct
  misc_feature 1..80: note = Synthetic: >NC_001475.2-cand-10130-10209
  source 1..80: mol_type = other DNA
aacctgggcccagaacatacccacagcaattcaacaggtgagaagccttataggcaatgaagagttcctggactacatgc

SEQ ID NO: 5236 - DNA, 80 bp, synthetic construct
  misc_feature 1..80: note = Synthetic: >NC_001475.2-cand-10210-10289
  source 1..80: mol_type = other DNA
cttcaatgaagagattcaggaaggaagaggagtcggagggagccatttggtaaacgtaggaagtggaaaagaggctaact

SEQ ID NO: 5237 - DNA, 80 bp, synthetic construct
  misc_feature 1..80: note = Synthetic: >NC_001475.2-cand-10290-10369
  source 1..80: mol_type = other DNA
gtcaggccaccttaagccacagtacggaagaagctgtgctgcctgtgagccccgtccaaggacgttaaaagaagaagtca

SEQ ID NO: 5238 - DNA, 80 bp, synthetic construct
  misc_feature 1..80: note = Synthetic: >NC_001475.2-cand-10340-10419
  source 1..80: mol_type = other DNA
cccgtccaaggacgttaaaagaagaagtcaggccccaaagccacggtttgagcaaaccgtgctgcctgtagctccgtcgt

SEQ ID NO: 5239 - DNA, 80 bp, synthetic construct
  misc_feature 1..80: note = Synthetic: >NC_001475.2-cand-10440-10519
  source 1..80: mol_type = other DNA
gctgcaaactgtggaagctgtacgcacggtgtagcagactagcggttagaggagacccctcccatgacacaacgcagcag

SEQ ID NO: 5240 - DNA, 80 bp, synthetic construct
  misc_feature 1..80: note = Synthetic: >NC_001475.2-cand-10530-10609
  source 1..80: mol_type = other DNA
gcactgagggaagctgtacctccttgcaaaggactagaggttagaggagaccccccgcaaataaaaacagcatattgacg

SEQ ID NO: 5241 - DNA, 80 bp, synthetic construct
  misc_feature 1..80: note = Synthetic: >NC_001477.1-cand-10-89
  source 1..80: mol_type = other DNA
gtggaccgacaagaacagtttcgaatcggaagcttgcttaacgtagttctaacagttttttattagagagcagatctctg

SEQ ID NO: 5242 - DNA, 80 bp, synthetic construct
  misc_feature 1..80: note = Synthetic: >NC_001477.1-cand-90-169
  source 1..80: mol_type = other DNA
atgaacaaccaacggaaaaagacgggtcgaccgtctttcaatatgctgaaacgcgcgagaaaccgcgtgtcaactgtttc

SEQ ID NO: 5243 - DNA, 80 bp, synthetic construct
  misc_feature 1..80: note = Synthetic: >NC_001477.1-cand-170-249
  source 1..80: mol_type = other DNA
acagttggcgaagagattctcaaaaggattgctttcaggccaaggacccatgaaattggtgatggcttttatagcattcc

SEQ ID NO: 5244 - DNA, 80 bp, synthetic construct
  misc_feature 1..80: note = Synthetic: >NC_001477.1-cand-2800-2879
  source 1..80: mol_type = other DNA
agaataccaccttcatcatcgacggcccaaacaccccagaatgccctgataaccaaagagcatggaacatttgggaagtt

SEQ ID NO: 5245 - DNA, 80 bp, synthetic construct
  misc_feature 1..80: note = Synthetic: >NC_001477.1-cand-2880-2959
  source 1..80: mol_type = other DNA
gaagactatggatttggaattttcacgacaaacatatggttgaaattgcgtgactcctacactcaagtgtgtgaccaccg

SEQ ID NO: 5246 - DNA, 80 bp, synthetic construct
  misc_feature 1..80: note = Synthetic: >NC_001477.1-cand-2930-3009
  source 1..80: mol_type = other DNA
tgactcctacactcaagtgtgtgaccaccggctaatgtcagctgccatcaaggatagcaaagcagtccatgctgacatgg

SEQ ID NO: 5247 - DNA, 80 bp, synthetic construct
  misc_feature 1..80: note = Synthetic: >NC_001477.1-cand-3040-3119
  source 1..80: mol_type = other DNA
cttggaagttggcaagagcctccttcatagaagttaagacatgcatctggccaaaatcccacactctatggagcaatgga

SEQ ID NO: 5248 - DNA, 80 bp, synthetic construct
  misc_feature 1..80: note = Synthetic: >NC_001477.1-cand-3120-3199
  source 1..80: mol_type = other DNA
gtcctggaaagtgagatgataatcccaaagatatatggaggaccaatatctcagcacaactacagaccaggatatttcac

SEQ ID NO: 5249 - DNA, 80 bp, synthetic construct
  misc_feature 1..80: note = Synthetic: >NC_001477.1-cand-3200-3279
  source 1..80: mol_type = other DNA
acaaacagcagggccgtggcacttgggcaagttagaactagattttgatttatgtgaaggtaccactgttgttgtggatg

SEQ ID NO: 5250 - DNA, 80 bp, synthetic construct
  misc_feature 1..80: note = Synthetic: >NC_001477.1-cand-3280-3359
  source 1..80: mol_type = other DNA
aacattgtggaaatcgaggaccatctcttagaaccacaacagtcacaggaaagacaatccatgaatggtgctgtagatct

SEQ ID NO: 5251 - DNA, 80 bp, synthetic construct
  misc_feature 1..80: note = Synthetic: >NC_001477.1-cand-3360-3439
  source 1..80: mol_type = other DNA
tgcacgttaccccccctacgtttcaaaggagaagacgggtgctggtacggcatggaaatcagaccagtcaaggagaagga

SEQ ID NO: 5252 - DNA, 80 bp, synthetic construct
  misc_feature 1..80: note = Synthetic: >NC_001477.1-cand-3440-3519
  source 1..80: mol_type = other DNA
agagaacctagttaagtcaatggtctctgcagggtcaggagaagtggacagtttttcactaggactgctatgcatatcaa

SEQ ID NO: 5253 - DNA, 80 bp, synthetic construct
  misc_feature 1..80: note = Synthetic: >NC_001477.1-cand-3520-3599
  source 1..80: mol_type = other DNA
taatgatcgaagaggtaatgagatccagatggagcagaaaaatgctgatgactggaacattggctgtgttcctccttctc

SEQ ID NO: 5254 - DNA, 80 bp, synthetic construct
  misc_feature 1..80: note = Synthetic: >NC_001477.1-cand-3590-3669
  source 1..80: mol_type = other DNA
cctccttctcacaatgggacaattgacatggaatgatctgatcaggctatgtatcatggttggagccaacgcttcagaca

SEQ ID NO: 5255 - DNA, 80 bp, synthetic construct
  misc_feature 1..80: note = Synthetic: >NC_001477.1-cand-3680-3759
  source 1..80: mol_type = other DNA
gggaacaacgtacctagctttgatggccactttcagaatgagaccaatgttcgcagtcgggctactgtttcgcagattaa

SEQ ID NO: 5256 - DNA, 80 bp, synthetic construct
  misc_feature 1..80: note = Synthetic: >NC_001477.1-cand-3760-3839
  source 1..80: mol_type = other DNA
catctagagaagttcttcttcttacagttggattgagtctggtggcatctgtagaactaccaaattccttagaggagcta

SEQ ID NO: 5257 - DNA, 80 bp, synthetic construct
  misc_feature 1..80: note = Synthetic: >NC_001477.1-cand-3850-3929
  source 1..80: mol_type = other DNA
ttgcaatgggcatcatgatgttgaaattactgactgattttcagtcacatcagctatgggctaccttgctgtctttaaca

SEQ ID NO: 5258 - DNA, 80 bp, synthetic construct
  misc_feature 1..80: note = Synthetic: >NC_001477.1-cand-3890-3969
  source 1..80: mol_type = other DNA
tcagtcacatcagctatgggctaccttgctgtctttaacatttgtcaaaacaactttttcattgcactatgcatggaaga

SEQ ID NO: 5259 - DNA, 80 bp, synthetic construct
  misc_feature 1..80: note = Synthetic: >NC_001477.1-cand-3970-4049
  source 1..80: mol_type = other DNA
caatggctatgatactgtcaattgtatctctcttccctttatgcctgtccacgacttctcaaaaaacaacatggcttccg

SEQ ID NO: 5260 - DNA, 80 bp, synthetic construct
  misc_feature 1..80: note = Synthetic: >NC_001489.1-cand-1020-1099
  source 1..80: mol_type = other DNA
tttccatgaagttgcaaaattggatgtggtgaaattattatacaatgagcagtttgctgttcaagggttgttgagatacc

SEQ ID NO: 5261 - DNA, 80 bp, synthetic construct
  misc_feature 1..80: note = Synthetic: >NC_001489.1-cand-1080-1159
  source 1..80: mol_type = other DNA
tcaagggttgttgagataccatacatatgcaagatttggcattgaaattcaagttcagataaaccctacacctttccaac

SEQ ID NO: 5262 - DNA, 80 bp, synthetic construct
  misc_feature 1..80: note = Synthetic: >NC_001489.1-cand-1180-1259
  source 1..80: mol_type = other DNA
atggttcctggtgaccagagctatggttctatagcatcattgactgtttatcctcatggtttgttaaattgcaatattaa

SEQ ID NO: 5263 - DNA, 80 bp, synthetic construct
  misc_feature 1..80: note = Synthetic: >NC_001489.1-cand-1260-1339
  source 1..80: mol_type = other DNA
caatgtggttagaataaaggttccatttatttacacaagaggtgcttaccactttaaagatccacaatacccagtttggg

SEQ ID NO: 5264 - DNA, 80 bp, synthetic construct
  misc_feature 1..80: note = Synthetic: >NC_001489.1-cand-1320-1399
  source 1..80: mol_type = other DNA
tccacaatacccagtttgggaattgacaattagagtttggtcagaattaaatattgggacaggaacttcagcttatactt

SEQ ID NO: 5265 - DNA, 80 bp, synthetic construct
  misc_feature 1..80: note = Synthetic: >NC_001489.1-cand-1400-1479
  source 1..80: mol_type = other DNA
cactcaatgttttagctagatttacagatttggagttgcatggattaactcctctttctacacaaatgatgagaaatgaa

SEQ ID NO: 5266 - DNA, 80 bp, synthetic construct
  misc_feature 1..80: note = Synthetic: >NC_001489.1-cand-1480-1559
  source 1..80: mol_type = other DNA
tttagggtcagtactactgagaatgtggtgaatctgtcaaattatgaagatgcaagagcaaagatgtcttttgctttgga

SEQ ID NO: 5267 - DNA, 80 bp, synthetic construct
  misc_feature 1..80: note = Synthetic: >NC_001489.1-cand-1560-1639
  source 1..80: mol_type = other DNA
tcaggaagattggaaatctgatccgtcccagggtggtgggatcaaaattactcattttactacttggacatctattccaa

SEQ ID NO: 5268 - DNA, 80 bp, synthetic construct
  misc_feature 1..80: note = Synthetic: >NC_001489.1-cand-1640-1719
  source 1..80: mol_type = other DNA
ctttggctgctcagtttccatttaatgcttcagactcagttggtcaacaaattaaagttattccagttgacccatatttt

SEQ ID NO: 5269 - DNA, 80 bp, synthetic construct
  misc_feature 1..80: note = Synthetic: >NC_001489.1-cand-1720-1799
  source 1..80: mol_type = other DNA
ttccaaatgacaaatacgaatcctgaccaaaaatgtataactgctttggcttctatttgtcagatgttttgtttttggag

SEQ ID NO: 5270 - DNA, 80 bp, synthetic construct
  misc_feature 1..80: note = Synthetic: >NC_001489.1-cand-1800-1879
  source 1..80: mol_type = other DNA
aggagatcttgtctttgattttcaagtttttcccaccaaatatcattcaggtagattactgttttgttttgttcctggca

SEQ ID NO: 5271 - DNA, 80 bp, synthetic construct
  misc_feature 1..80: note = Synthetic: >NC_001489.1-cand-1870-1949
  source 1..80: mol_type = other DNA
gttcctggcaatgagctaatagatgtttctggaatcacattaaagcaagcaactactgctccttgtgcagtaatggatat

SEQ ID NO: 5272 - DNA, 80 bp, synthetic construct
  misc_feature 1..80: note = Synthetic: >NC_001489.1-cand-1950-2029
  source 1..80: mol_type = other DNA
tacaggagtgcagtcaactttgagatttcgtgttccctggatttctgacactccttacagagtgaacaggtatacaaagt

SEQ ID NO: 5273 - DNA, 80 bp, synthetic construct
  misc_feature 1..80: note = Synthetic: >NC_001489.1-cand-2030-2109
  source 1..80: mol_type = other DNA
cagcacatcagaaaggtgagtacactgccattgggaagcttattgtgtattgttataacagattgacctctccttctaac

SEQ ID NO: 5274 - DNA, 80 bp, synthetic construct
  misc_feature 1..80: note = Synthetic: >NC_001489.1-cand-2110-2189
  source 1..80: mol_type = other DNA
gttgcttcccatgtcagagtgaatgtttatctttcagcaattaacttggaatgttttgctcctctttatcatgctatgga

SEQ ID NO: 5275 - DNA, 80 bp, synthetic construct
  misc_feature 1..80: note = Synthetic: >NC_001489.1-cand-2190-2269
  source 1..80: mol_type = other DNA
tgttactacacaagttggagatgattctggaggtttttcaacaacagtttctacagaacagaatgttccagatccccaag

SEQ ID NO: 5276 - DNA, 80 bp, synthetic construct
  misc_feature 1..80: note = Synthetic: >NC_001526.4-cand-2700-2779
  source 1..80: mol_type = other DNA
aacagctcacacaaaggacggattaactgtaatagtaacactacacccatagtacatttaaaaggtgatgctaatacttt

SEQ ID NO: 5277 - DNA, 80 bp, synthetic construct
  misc_feature 1..80: note = Synthetic: >NC_001526.4-cand-2780-2859
  source 1..80: mol_type = other DNA
aaaatgtttaagatatagatttaaaaagcattgtacattgtatactgcagtgtcgtctacatggcattggacaggacata

SEQ ID NO: 5278 - DNA, 80 bp, synthetic construct
  misc_feature 1..80: note = Synthetic: >NC_001526.4-cand-2860-2939
  source 1..80: mol_type = other DNA
atgtaaaacataaaagtgcaattgttacacttacatatgatagtgaatggcaacgtgaccaatttttgtctcaagttaaa

SEQ ID NO: 5279 - DNA, 80 bp, synthetic construct
  misc_feature 1..80: note = Synthetic: >NC_001526.4-cand-2940-3019
  source 1..80: mol_type = other DNA
ataccaaaaactattacagtgtctactggatttatgtctatatgacaaatcttgatactgcatccacaacattactggcg

SEQ ID NO: 5280 - DNA, 80 bp, synthetic construct
  misc_feature 1..80: note = Synthetic: >NC_001526.4-cand-3020-3099
  source 1..80: mol_type = other DNA
tgctttttgctttgcttttgtgtgcttttgtgtgtctgcctattaatacgtccgctgcttttgtctgtgtctacatacac

SEQ ID NO: 5281 - DNA, 80 bp, synthetic construct
  misc_feature 1..80: note = Synthetic: >NC_001526.4-cand-3100-3179
  source 1..80: mol_type = other DNA
atcattaataatattggtattactattgtggataacagcagcctctgcgtttaggtgttttattgtatatattatatttg

SEQ ID NO: 5282 - DNA, 80 bp, synthetic construct
  misc_feature 1..80: note = Synthetic: >NC_001526.4-cand-3180-3259
  source 1..80: mol_type = other DNA
tttatataccattatttttaatacatacacatgcacgctttttaattacataatgtatatgtacataatgtaattgttac

SEQ ID NO: 5283 - DNA, 80 bp, synthetic construct
  misc_feature 1..80: note = Synthetic: >NC_001526.4-cand-3260-3339
  source 1..80: mol_type = other DNA
atataattgttgtataccataacttactattttttcttttttattttcatatataatttttttttttgtttgtttgtttg

SEQ ID NO: 5284 - DNA, 80 bp, synthetic construct
  misc_feature 1..80: note = Synthetic: >NC_001526.4-cand-3340-3419
  source 1..80: mol_type = other DNA
ttttttaataaactgttattacttaacaatgcgacacaaacgttctgcaaaacgcacaaaacgtgcatcggctacccaac

SEQ ID NO: 5285 - DNA, 80 bp, synthetic construct
  misc_feature 1..80: note = Synthetic: >NC_001526.4-cand-3410-3489
  source 1..80: mol_type = other DNA
gctacccaactttataaaacatgcaaacaggcaggtacatgtccacctgacattatacctaaggttgaaggcaaaactat

SEQ ID NO: 5286 - DNA, 80 bp, synthetic construct
  misc_feature 1..80: note = Synthetic: >NC_001526.4-cand-3490-3569
  source 1..80: mol_type = other DNA
tgctgatcaaatattacaatatggaagtatgggtgtattttttggtgggttaggaattggaacagggtcgggtacaggcg

SEQ ID NO: 5287 - DNA, 80 bp, synthetic construct
  misc_feature 1..80: note = Synthetic: >NC_001526.4-cand-3570-3649
  source 1..80: mol_type = other DNA
gacgcactgggtatattccattgggaacaaggcctcccacagctacagatacacttgctcctgtaagaccccctttaaca

SEQ ID NO: 5288 - DNA, 80 bp, synthetic construct
  misc_feature 1..80: note = Synthetic: >NC_001526.4-cand-3650-3729
  source 1..80: mol_type = other DNA
gtagatcctgtgggcccttctgatccttctatagtttctttagtggaagaaactagttttattgatgctggtgcaccaac

SEQ ID NO: 5289 - DNA, 80 bp, synthetic construct
  misc_feature 1..80: note = Synthetic: >NC_001526.4-cand-3730-3809
  source 1..80: mol_type = other DNA
atctgtaccttccattcccccagatgtatcaggatttagtattactacttcaactgataccacacctgctatattagata

SEQ ID NO: 5290 - DNA, 80 bp, synthetic construct
  misc_feature 1..80: note = Synthetic: >NC_001526.4-cand-3810-3889
  source 1..80: mol_type = other DNA
ttaataatactgttactactgttactacacataataatcccactttcactgacccatctgtattgcagcctccaacacct

SEQ ID NO: 5291 - DNA, 80 bp, synthetic construct
  misc_feature 1..80: note = Synthetic: >NC_001526.4-cand-3870-3949
  source 1..80: mol_type = other DNA
tattgcagcctccaacacctgcagaaactggagggcattttacactttcatcatccactattagtacacataattatgaa

SEQ ID NO: 5292 - DNA, 80 bp, synthetic construct
  misc_feature 1..80: note = Synthetic: >NC_001526.4-cand-6540-6619
  source 1..80: mol_type = other DNA
tatatactatattttgtagcgccagcggccattttgtagcttcaaccgaattcggttgcatgctttttggcacaaaatgt

SEQ ID NO: 5293 - DNA, 80 bp, synthetic construct
  misc_feature 1..80: note = Synthetic: >NC_001526.4-cand-6620-6699
  source 1..80: mol_type = other DNA
gtttttttaaatagttctatgtcagcaactatggtttaaacttgtacgtttcctgcttgccatgcgtgccaaatccctgt

SEQ ID NO: 5294 - DNA, 80 bp, synthetic construct
  misc_feature 1..80: note = Synthetic: >NC_001526.4-cand-6700-6779
  source 1..80: mol_type = other DNA
tttcctgacctgcactgcttgccaaccattccattgttttttacactgcactatgtgcaactactgaatcactatgtaca

SEQ ID NO: 5295 - DNA, 80 bp, synthetic construct
  misc_feature 1..80: note = Synthetic: >NC_001526.4-cand-6780-6859
  source 1..80: mol_type = other DNA
ttgtgtcatataaaataaatcactatgcgccaacgccttacataccgctgttaggcacatatttttggcttgttttaact

SEQ ID NO: 5296 - DNA, 80 bp, synthetic construct
  misc_feature 1..80: note = Synthetic: >NC_001526.4-cand-6860-6939
  source 1..80: mol_type = other DNA
aacctaattgcatatttggcataaggtttaaacttctaaggccaactaaatgtcaccctagttcatacatgaactgtgta

SEQ ID NO: 5297 - DNA, 80 bp, synthetic construct
  misc_feature 1..80: note = Synthetic: >NC_001526.4-cand-6940-7019
  source 1..80: mol_type = other DNA
aaggttagtcatacattgttcatttgtaaaactgcacatgggtgtgtgcaaaccgttttgggttacacatttacaagcaa

SEQ ID NO: 5298 - DNA, 80 bp, synthetic construct
  misc_feature 1..80: note = Synthetic: >NC_001526.4-cand-7020-7099
  source 1..80: mol_type = other DNA
cttatataataatactaaactacaataattcatgtataaaactaagggcgtaaccgaaatcggttgaaccgaaaccggtt

SEQ ID NO: 5299 - DNA, 80 bp, synthetic construct
  misc_feature 1..80: note = Synthetic: >NC_001526.4-cand-7100-7179
  source 1..80: mol_type = other DNA
agtataaaagcagacattttatgcaccaaaagagaactgcaatgtttcaggacccacaggagcgacccagaaagttacca

SEQ ID NO: 5300 - DNA, 80 bp, synthetic construct
  misc_feature 1..80: note = Synthetic: >NC_001526.4-cand-7180-7259
  source 1..80: mol_type = other DNA
cagttatgcacagagctgcaaacaactatacatgatataatattagaatgtgtgtactgcaagcaacagttactgcgacg

SEQ ID NO: 5301 - DNA, 80 bp, synthetic construct
  misc_feature 1..80: note = Synthetic: >NC_001526.4-cand-7250-7329
  source 1..80: mol_type = other DNA
tactgcgacgtgaggtatatgactttgcttttcgggatttatgcatagtatatagagatgggaatccatatgctgtatgt

SEQ ID NO: 5302 - DNA, 80 bp, synthetic construct
  misc_feature 1..80: note = Synthetic: >NC_001526.4-cand-7330-7409
  source 1..80: mol_type = other DNA
gataaatgtttaaagttttattctaaaattagtgagtatagacattattgttatagtttgtatggaacaacattagaaca

SEQ ID NO: 5303 - DNA, 80 bp, synthetic construct
  misc_feature 1..80: note = Synthetic: >NC_001526.4-cand-7410-7489
  source 1..80: mol_type = other DNA
gcaatacaacaaaccgttgtgtgatttgttaattaggtgtattaactgtcaaaagccactgtgtcctgaagaaaagcaaa

SEQ ID NO: 5304 - DNA, 80 bp, synthetic construct
  misc_feature 1..80: note = Synthetic: >NC_001526.4-cand-7530-7609
  source 1..80: mol_type = other DNA
tcggtggaccggtcgatgtatgtcttgttgcagatcatcaagaacacgtagagaaacccagctgtaatcatgcatggaga

SEQ ID NO: 5305 - DNA, 80 bp, synthetic construct
  misc_feature 1..80: note = Synthetic: >NC_001526.4-cand-7570-7649
  source 1..80: mol_type = other DNA
agaacacgtagagaaacccagctgtaatcatgcatggagatacacctacattgcatgaatatatgttagatttgcaacca

SEQ ID NO: 5306 - DNA, 80 bp, synthetic construct
  misc_feature 1..80: note = Synthetic: >NC_001526.4-cand-7650-7729
  source 1..80: mol_type = other DNA
gagacaactgatctctactgttatgagcaattaaatgacagctcagaggaggaggatgaaatagatggtccagctggaca

SEQ ID NO: 5307 - DNA, 80 bp, synthetic construct
  misc_feature 1..80: note = Synthetic: >NC_001526.4-cand-7730-7809
  source 1..80: mol_type = other DNA
agcagaaccggacagagcccattacaatattgtaaccttttgttgcaagtgtgactctacgcttcggttgtgcgtacaaa

SEQ ID NO: 5308 - DNA, 80 bp, synthetic construct
  misc_feature 1..80: note = Synthetic: >NC_001611.1-cand-141200-141279
  source 1..80: mol_type = other DNA
aacagaacatttgcaaagattaatccgggcgaagttattccgctcatcactaatcataatattctaaaacctcttattgg

SEQ ID NO: 5309 - DNA, 80 bp, synthetic construct
  misc_feature 1..80: note = Synthetic: >NC_001611.1-cand-141520-141599
  source 1..80: mol_type = other DNA
gttaattttaaatgatgataaaatggataatatccatattgacgatgtcaataatgccggtattggtatacagctcatcg

SEQ ID NO: 5310 - DNA, 80 bp, synthetic construct
  misc_feature 1..80: note = Synthetic: >NC_001611.1-cand-141570-141649
  source 1..80: mol_type = other DNA
ataatgccggtattggtatacagctcatcgatttttagatttcgttcagaggatgtggaattatgttatgggaatttgta

SEQ ID NO: 5311 - DNA, 80 bp, synthetic construct
  misc_feature 1..80: note = Synthetic: >NC_001611.1-cand-141880-141959
  source 1..80: mol_type = other DNA
cgtgcctcattaaaaatttggcaacgagtatatctactatattaacatctaaacataagacgtattctctacatcggtcc

SEQ ID NO: 5312 - DNA, 80 bp, synthetic construct
  misc_feature 1..80: note = Synthetic: >NC_001611.1-cand-141960-142039
  source 1..80: mol_type = other DNA
aagtgtattactataataggatatgattctattatatggtataaagatataaatgacaagtataatgatatctatgattt

SEQ ID NO: 5313 - DNA, 80 bp, synthetic construct
  misc_feature 1..80: note = Synthetic: >NC_001611.1-cand-142200-142279
  source 1..80: mol_type = other DNA
aaaaaataactattaacgacacaccaaaaaagaaaaggatgtattattagcgcaatcagttgctgttgaagaggcaaaag

SEQ ID NO: 5314 - DNA, 80 bp, synthetic construct
  misc_feature 1..80: note = Synthetic: >NC_001611.1-cand-142280-142359
  source 1..80: mol_type = other DNA
atgtcaaggtggaagaaaaaaatatcgatattgaaaatgacaatgacgatgatatggatgtagaaagcgtgtaatacgat

SEQ ID NO: 5315 - DNA, 80 bp, synthetic construct
  misc_feature 1..80: note = Synthetic: >NC_001611.1-cand-142360-142439
  source 1..80: mol_type = other DNA
ctataaaaaataagtatataaatactttttatttacggtactcttgtagtggtaatacccctactcgattatttttttta

SEQ ID NO: 5316 - DNA, 80 bp, synthetic construct
  misc_feature 1..80: note = Synthetic: >NC_001611.1-cand-142440-142519
  source 1..80: mol_type = other DNA
aaaaaaaatacttattctgattattctagccatttccgtgttcgttcaaatgccacatcaaagatatgggagtagttgaa

SEQ ID NO: 5317 - DNA, 80 bp, synthetic construct
  misc_feature 1..80: note = Synthetic: >NC_001611.1-cand-142520-142599
  source 1..80: mol_type = other DNA
atctagttctgcattgttggcgcgcctcaaatgtagtgttggatatcttcaacgtatagttgttgagtagtgatggtttt

SEQ ID NO: 5318 - DNA, 80 bp, synthetic construct
  misc_feature 1..80: note = Synthetic: >NC_001611.1-cand-142760-142839
  source 1..80: mol_type = other DNA
ctttaatctcagatcccggatactggatatattttacagccaacacatgcatccatgcaacatttcctacatatacccgg

SEQ ID NO: 5319 - DNA, 80 bp, synthetic construct
  misc_feature 1..80: note = Synthetic: >NC_001611.1-cand-142840-142919
  source 1..80: mol_type = other DNA
ctatgtaccgcgtcatcatcgactgtacgatacataatgttaccgtgttgcgtacattgctcgtaaaagactttcgttaa

SEQ ID NO: 5320 - DNA, 80 bp, synthetic construct
  misc_feature 1..80: note = Synthetic: >NC_001611.1-cand-142910-142989
  source 1..80: mol_type = other DNA
ctttcgttaatttgtctcctcctccgtaaattccagtgggtcttaggcaacaagtatacaattttgcaccattcataatt

SEQ ID NO: 5321 - DNA, 80 bp, synthetic construct
  misc_feature 1..80: note = Synthetic: >NC_001611.1-cand-142990-143069
  source 1..80: mol_type = other DNA
acagaattattggctttcgtgaccagttgctcgaccatacgtttactttttgcgtatacatgtccgggtgatatatcgta

SEQ ID NO: 5322 - DNA, 80 bp, synthetic construct
  misc_feature 1..80: note = Synthetic: >NC_001611.1-cand-143070-143149
  source 1..80: mol_type = other DNA
cagggtatgctcatgaccaatgaatggattaccgtgtttatttggtcctattgcttccatgctacctaatataaatcaaa

SEQ ID NO: 5323 - DNA, 80 bp, synthetic construct
  misc_feature 1..80: note = Synthetic: >NC_001611.1-cand-143230-143309
  source 1..80: mol_type = other DNA
gtattttccaaatacatccactagagcaaccgtatgaataatcagatttaccccatctagtgcttctttcaccttattaa

SEQ ID NO: 5324 - DNA, 80 bp, synthetic construct
  misc_feature 1..80: note = Synthetic: >NC_001672.1-cand-3280-3359
  source 1..80: mol_type = other DNA
agttatcagagaggagtgtcccggcacgaccgttaccatcaacgccaagtgtgacaaaagaggagcatctgtgaggagta

SEQ ID NO: 5325 - DNA, 80 bp, synthetic construct
  misc_feature 1..80: note = Synthetic: >NC_001672.1-cand-3360-3439
  source 1..80: mol_type = other DNA
ccacagagagtggcaaggttatcccagaatggtgctgccgagcgtgcacaatgccaccagtgacgttccggactggaact

SEQ ID NO: 5326 - DNA, 80 bp, synthetic construct
  misc_feature 1..80: note = Synthetic: >NC_001672.1-cand-3400-3479
  source 1..80: mol_type = other DNA
agcgtgcacaatgccaccagtgacgttccggactggaactgattgctggtatgccatggaaatacggccagtccatgacc

SEQ ID NO: 5327 - DNA, 80 bp, synthetic construct
  misc_feature 1..80: note = Synthetic: >NC_001672.1-cand-3520-3599
  source 1..80: mol_type = other DNA
tgaattacttagtgagggaggagtccccggaatagtggcattgtttgtggtccttgaatacatcatccgtaggaggccct

SEQ ID NO: 5328 - DNA, 80 bp, synthetic construct
  misc_feature 1..80: note = Synthetic: >NC_001672.1-cand-3540-3619
  source 1..80: mol_type = other DNA
gagtccccggaatagtggcattgtttgtggtccttgaatacatcatccgtaggaggccctccacgggaacgacggttgtg

SEQ ID NO: 5329 - DNA, 80 bp, synthetic construct
  misc_feature 1..80: note = Synthetic: >NC_001672.1-cand-3730-3809
  source 1..80: mol_type = other DNA
agagatcgtggccttgatgctactccaggctgtgtttgagctgagggtgggtttgctcagcgcatttgcattgcgcagaa

SEQ ID NO: 5330 - DNA, 80 bp, synthetic construct
  misc_feature 1..80: note = Synthetic: >NC_001672.1-cand-3760-3839
  source 1..80: mol_type = other DNA
tgtgtttgagctgagggtgggtttgctcagcgcatttgcattgcgcagaagcctcaccgtccgagagatggtgaccacct

SEQ ID NO: 5331 - DNA, 80 bp, synthetic construct
  misc_feature 1..80: note = Synthetic: >NC_001672.1-cand-3780-3859
  source 1..80: mol_type = other DNA
gtttgctcagcgcatttgcattgcgcagaagcctcaccgtccgagagatggtgaccacctactttcttttgctggtcctg

SEQ ID NO: 5332 - DNA, 80 bp, synthetic construct
  misc_feature 1..80: note = Synthetic: >NC_001672.1-cand-3980-4059
  source 1..80: mol_type = other DNA
ctcatggctctcatgacacagcaggatgtggtgactgtgcaccatggactggtgtgcttcctaagtgtagcttcggcatg

SEQ ID NO: 5333 - DNA, 80 bp, synthetic construct
  misc_feature 1..80: note = Synthetic: >NC_001672.1-cand-4000-4079
  source 1..80: mol_type = other DNA
gcaggatgtggtgactgtgcaccatggactggtgtgcttcctaagtgtagcttcggcatgctcggtctggaggctgctca

SEQ ID NO: 5334 - DNA, 80 bp, synthetic construct
  misc_feature 1..80: note = Synthetic: >NC_001672.1-cand-4050-4129
  source 1..80: mol_type = other DNA
cttcggcatgctcggtctggaggctgctcaagggacacagagagcagaagggattgacctgggttgtccccctggctggg

SEQ ID NO: 5335 - DNA, 80 bp, synthetic construct
  misc_feature 1..80: note = Synthetic: >NC_001672.1-cand-4160-4239
  source 1..80: mol_type = other DNA
ctgctggcgttttgggagttgtcagcgcacagaggaagacgatctttcagtgaaccactaactgtggtaggagtcatgct

SEQ ID NO: 5336 - DNA, 80 bp, synthetic construct
  misc_feature 1..80: note = Synthetic: >NC_001672.1-cand-4240-4319
  source 1..80: mol_type = other DNA
aacactggccagcggcatgatgcgacacacttcccaggaggctctctgtgcactcgcagtggcctcgtttctcttgctga

SEQ ID NO: 5337 - DNA, 80 bp, synthetic construct
  misc_feature 1..80: note = Synthetic: >NC_001672.1-cand-4340-4419
  source 1..80: mol_type = other DNA
aagatgcagctggttgccgaatggagtggctgcgttgaatggtatccggaactagtgaatgagggtggagaggttagcct

SEQ ID NO: 5338 - DNA, 80 bp, synthetic construct
  misc_feature 1..80: note = Synthetic: >NC_001672.1-cand-4400-4479
  source 1..80: mol_type = other DNA
gagggtggagaggttagcctgcgggtccggcaggacgcgatgggtaactttcacttgactgagctcgagaaagaagagag

SEQ ID NO: 5339 - DNA, 80 bp, synthetic construct
  misc_feature 1..80: note = Synthetic: >NC_001672.1-cand-4480-4559
  source 1..80: mol_type = other DNA
aatgatggctttttggctgattgccggcttggcagcttcggccattcactggtcaggcattcttggtgtgatgggactgt

SEQ ID NO: 5340 - DNA, 80 bp, synthetic construct
  misc_feature 1..80: note = Synthetic: >NC_001918.1-cand-4010-4089
  source 1..80: mol_type = other DNA
cagcgccaccaacaactgtacccacttcgtcagctccatcactggcgaatccctccccaacaccggcttctccctggccc

SEQ ID NO: 5341 - DNA, 80 bp, synthetic construct
  misc_feature 1..80: note = Synthetic: >NC_001918.1-cand-4090-4169
  source 1..80: mol_type = other DNA
tcggaatcggtgccctcaccgccatcgcagcctcggctgctgttgccgtgaaagcgctcccaggcatcaggcgacagggt

SEQ ID NO: 5342 - DNA, 80 bp, synthetic construct
  misc_feature 1..80: note = Synthetic: >NC_001918.1-cand-4170-4249
  source 1..80: mol_type = other DNA
ctcctcaccctctctgccgataccgagaccaaccagaccctcaacaagatcactggatctgtcaaccaagctgcccaggt

SEQ ID NO: 5343 - DNA, 80 bp, synthetic construct
  misc_feature 1..80: note = Synthetic: >NC_001918.1-cand-4250-4329
  source 1..80: mol_type = other DNA
cgtctcccaattcgatctgagcggccctgcaaattctgtctcccttgctgcttctgacatccgcgaggctgcccacaaag

SEQ ID NO: 5344 - DNA, 80 bp, synthetic construct
  misc_feature 1..80: note = Synthetic: >NC_001918.1-cand-4330-4409
  source 1..80: mol_type = other DNA
tggcctcctccctcaatggcttcactgacgtcatcgctgacatcaaagattccctgttcaccagggtgtctgacgctgtc

SEQ ID NO: 5345 - DNA, 80 bp, synthetic construct
  misc_feature 1..80: note = Synthetic: >NC_001918.1-cand-4410-4489
  source 1..80: mol_type = other DNA
gagagcggtgtcgccactttcctcacttggctcgtcaaactctttggctacctccttgttctctttggctctccaacccc

SEQ ID NO: 5346 - DNA, 80 bp, synthetic construct
  misc_feature 1..80: note = Synthetic: >NC_001918.1-cand-4490-4569
  source 1..80: mol_type = other DNA
catgtccatctccggtctcctcgtcatcatctgtgccgaccttgccccccacgctcgtgaatttttcaccgcctctggaa

SEQ ID NO: 5347 - DNA, 80 bp, synthetic construct
  misc_feature 1..80: note = Synthetic: >NC_001918.1-cand-4570-4649
  source 1..80: mol_type = other DNA
atgtcctctcctcactctactactggattgcctcaaaattaggcctgtccgtcacgccccaagagtgtgaacgggcaacc

SEQ ID NO: 5348 - DNA, 80 bp, synthetic construct
  misc_feature 1..80: note = Synthetic: >NC_001918.1-cand-4650-4729
  source 1..80: mol_type = other DNA
cttgaacctcaagggctcaaagacttcaacgacggcgcactcgcaatgcgcaacgtcgagtggattggtgagaccgcctg

SEQ ID NO: 5349 - DNA, 80 bp, synthetic construct
  misc_feature 1..80: note = Synthetic: >NC_001918.1-cand-4730-4809
  source 1..80: mol_type = other DNA
gaaatgggcccaccgcctccttgactggatccccggtaaggccaagacagacccccaggccaaactcgccgacgtccacg

SEQ ID NO: 5350 - DNA, 80 bp, synthetic construct
  misc_feature 1..80: note = Synthetic: >NC_001918.1-cand-4810-4889
  source 1..80: mol_type = other DNA
atgaaatcatgctccactactcagactccatattggctctcggatctgagaaactccccattgatcacatcactaaatcc

SEQ ID NO: 5351 - DNA, 80 bp, synthetic construct
  misc_feature 1..80: note = Synthetic: >NC_001918.1-cand-4890-4969
  source 1..80: mol_type = other DNA
atctcccgctgccgtgaattggtctccatcgcccaggaggccaaatccggccctcactcttccttcctcaaccaagcagt

SEQ ID NO: 5352 - DNA, 80 bp, synthetic construct
  misc_feature 1..80: note = Synthetic: >NC_001918.1-cand-4970-5049
  source 1..80: mol_type = other DNA
caaaaactacacccttgccatctcccaacaccgcaaatgccagacaggtcccaggcctgaacccgtggtggtctacctct

SEQ ID NO: 5353 - DNA, 80 bp, synthetic construct
  misc_feature 1..80: note = Synthetic: >NC_001918.1-cand-5050-5129
  source 1..80: mol_type = other DNA
acggaccccccggcactggcaaatccctccttgcttcactcctcgctcaaaccctttcccagcgtcttgctgggaccccc

SEQ ID NO: 5354 - DNA, 80 bp, synthetic construct
  misc_feature 1..80: note = Synthetic: >NC_001918.1-cand-5130-5209
  source 1..80: mol_type = other DNA
gatgacgtctactccccctcctccgcctcctgtgagtacttcgatgggtacacgggtcaaaccgtgcactttatcgatga

SEQ ID NO: 5355 - DNA, 80 bp, synthetic construct
  misc_feature 1..80: note = Synthetic: >NC_001918.1-cand-5230-5309
  source 1..80: mol_type = other DNA
ggcgggactgggctaatttcccaaacctcgtctcctctgcccccttcattgtcccaatggcctccctcgaggagaagggc

SEQ ID NO: 5356 - DNA, 80 bp, synthetic construct
  misc_feature 1..80: note = Synthetic: >NC_001918.1-cand-7850-7929
  source 1..80: mol_type = other DNA
ggtcacctctctctgccacctggccttccacagcggacccaagacctacgctgcctggtgcatgaaagtgcgcgagcagt

SEQ ID NO: 5357 - DNA, 80 bp, synthetic construct
  misc_feature 1..80: note = Synthetic: >NC_001918.1-cand-7930-8009
  source 1..80: mol_type = other DNA
gcctcaagtccgggttcgcccccaacttcctaccctactcctacctccaactccgctggctaaatctgctggctgcctga

SEQ ID NO: 5358 - DNA, 80 bp, synthetic construct
  misc_feature 1..80: note = Synthetic: >NC_001918.1-cand-8010-8089
  source 1..80: mol_type = other DNA
tagttagggaacacagtgcctcggcacgcttagttagttagaaccctttgcccactcctccatggtgatataaagaccac

SEQ ID NO: 5359 - DNA, 80 bp, synthetic construct
  misc_feature 1..80: note = Synthetic: >NC_001918.1-cand-8080-8159
  source 1..80: mol_type = other DNA
taaagaccacccacttccttcgggtgagcccctaagccatggttgtactgcactatcatcctaagacggtccttcttcgg

SEQ ID NO: 5360 - DNA, 80 bp, synthetic construct
  misc_feature 1..80: note = Synthetic: >NC_001918.1-cand-8160-8239
  source 1..80: mol_type = other DNA
atcgcaatctcaccctggtgccgcgcttccttcgggaactgcacccgcggaccagggccgtctttgaacttttctaactg

SEQ ID NO: 5361 - DNA, 80 bp, synthetic construct
  misc_feature 1..80: note = Synthetic: >NC_001943.1-cand-10-89
  source 1..80: mol_type = other DNA
gtgattggcctttggcttatcagtgtatagataacatttctctgaccgtttaccacacaattaacaacaatatggcatac

SEQ ID NO: 5362 - DNA, 80 bp, synthetic construct
  misc_feature 1..80: note = Synthetic: >NC_001943.1-cand-80-159
  source 1..80: mol_type = other DNA
tatggcatacggtgagccatactatagctctaaacctgacaaagatttcaattttggaagcacaatggcacgtaggcaga

SEQ ID NO: 5363 - DNA, 80 bp, synthetic construct
  misc_feature 1..80: note = Synthetic: >NC_001943.1-cand-160-239
  source 1..80: mol_type = other DNA
tgacacctactatggtaacaaagcttcccaaatttgttaggaattctccacaagcttatgattggatcgtaagaggtctg

SEQ ID NO: 5364 - DNA, 80 bp, synthetic construct
  misc_feature 1..80: note = Synthetic: >NC_001943.1-cand-240-319
  source 1..80: mol_type = other DNA
atctttcccaccattggtaaaacttatttccaacgagttgttgtgattactggtgggcttgaggatggaacatatggctc

SEQ ID NO: 5365 - DNA, 80 bp, synthetic construct
  misc_feature 1..80: note = Synthetic: >NC_001943.1-cand-320-399
  source 1..80: mol_type = other DNA
attcgcatttgacggtaaagagtgggtagggatctacccaatagagcacttaaatctcatgtcatctttgaaactgatac

SEQ ID NO: 5366 - DNA, 80 bp, synthetic construct
  misc_feature 1..80: note = Synthetic: >NC_001943.1-cand-400-479
  source 1..80: mol_type = other DNA
acaaagccaacgctcttcaggagagactgcgtctctcccaagaagagaaagccaccctcgctctggatgtgcaattcctt

SEQ ID NO: 5367 - DNA, 80 bp, synthetic construct
  misc_feature 1..80: note = Synthetic: >NC_001943.1-cand-480-559
  source 1..80: mol_type = other DNA
caacatgaaaacgtgcgattgaaggagatgatcccaaagccagagccacggaaaatacagatgaagtggataataatggg

SEQ ID NO: 5368 - DNA, 80 bp, synthetic construct
  misc_feature 1..80: note = Synthetic: >NC_001943.1-cand-600-679
  source 1..80: mol_type = other DNA
gcgcacagccagaccaacaacaccatatttactgacatgatagctgcctgcaagtactcaactgagacactaacagaaaa

SEQ ID NO: 5369 - DNA, 80 bp, synthetic construct
  misc_feature 1..80: note = Synthetic: >NC_001943.1-cand-640-719
  source 1..80: mol_type = other DNA
tagctgcctgcaagtactcaactgagacactaacagaaaatcttgaccttagaatcaagcttgcactagcaaacataacc

SEQ ID NO: 5370 - DNA, 80 bp, synthetic construct
  misc_feature 1..80: note = Synthetic: >NC_001943.1-cand-720-799
  source 1..80: mol_type = other DNA
attagtgataagctagatgctgtgaggcaaattcttaactttgcctttgtgcccagagcccattggttgagaactgtgtt

SEQ ID NO: 5371 - DNA, 80 bp, synthetic construct
  misc_feature 1..80: note = Synthetic: >NC_001943.1-cand-800-879
  source 1..80: mol_type = other DNA
ctattatatccattactatgaaatgtggaatatttttatgtttgttcttgctattggcactgtcatgaggagcgcccgcc

SEQ ID NO: 5372 - DNA, 80 bp, synthetic construct
  misc_feature 1..80: note = Synthetic: >NC_002023.1-cand-1500-1579
  source 1..80: mol_type = other DNA
gggtagtggtgagcattgaccggttcttgagagtccgggaccaacgaggaaatgtactactgtctcccgaggaggtcagt

SEQ ID NO: 5373 - DNA, 80 bp, synthetic construct
  misc_feature 1..80: note = Synthetic: >NC_002023.1-cand-1580-1659
  source 1..80: mol_type = other DNA
gaaacacagggaacagagaaactgacaataacttactcatcgtcaatgatgtgggagattaatggtcctgaatcagtgtt

SEQ ID NO: 5374 - DNA, 80 bp, synthetic construct
  misc_feature 1..80: note = Synthetic: >NC_002023.1-cand-1660-1739
  source 1..80: mol_type = other DNA
ggtcaatacctatcaatggatcatcagaaactgggaaactgttaaaattcagtggtcccagaaccctacaatgctataca

SEQ ID NO: 5375 - DNA, 80 bp, synthetic construct
  misc_feature 1..80: note = Synthetic: >NC_002023.1-cand-1740-1819
  source 1..80: mol_type = other DNA
ataaaatggaatttgaaccatttcagtctttagtacctaaggccattagaggccaatacagtgggtttgtgagaactctg

SEQ ID NO: 5376 - DNA, 80 bp, synthetic construct
  misc_feature 1..80: note = Synthetic: >NC_002023.1-cand-1820-1899
  source 1..80: mol_type = other DNA
ttccaacaaatgagggatgtgcttgggacatttgataccgcacagataataaaacttcttcccttcgcagccgctccacc

SEQ ID NO: 5377 - DNA, 80 bp, synthetic construct
  misc_feature 1..80: note = Synthetic: >NC_002023.1-cand-1860-1939
  source 1..80: mol_type = other DNA
cacagataataaaacttcttcccttcgcagccgctccaccaaagcaaagtagaatgcagttctcctcatttactgtgaat

SEQ ID NO: 5378 - DNA, 80 bp, synthetic construct
  misc_feature 1..80: note = Synthetic: >NC_002023.1-cand-1980-2059
  source 1..80: mol_type = other DNA
ctcctgtattcaactacaacaaggccacgaagagactcacagttctcggaaaggatgctggcactttaaccgaagaccca

SEQ ID NO: 5379 - DNA, 80 bp, synthetic construct
  misc_feature 1..80: note = Synthetic: >NC_002023.1-cand-2100-2179
  source 1..80: mol_type = other DNA
gattcctcattctgggcaaagaagacaggagatatgggccagcattaagcatcaatgaactgagcaaccttgcgaaagga

SEQ ID NO: 5380 - DNA, 80 bp, synthetic construct
  misc_feature 1..80: note = Synthetic: >NC_002031.1-cand-0-79
  source 1..80: mol_type = other DNA
aatcctgtgtgctaattgaggtgcattggtctgcaaatcgagttgctaggcaataaacacatttggattaattttaatcg

SEQ ID NO: 5381 - DNA, 80 bp, synthetic construct
  misc_feature 1..80: note = Synthetic: >NC_002031.1-cand-80-159
  source 1..80: mol_type = other DNA
ttcgttgagcgattagcagagaactgaccagaacatgtctggtcgtaaagctcagggaaaaaccctgggcgtcaatatgg

SEQ ID NO: 5382 - DNA, 80 bp, synthetic construct
  misc_feature 1..80: note = Synthetic: >NC_002031.1-cand-160-239
  source 1..80: mol_type = other DNA
tacgacgaggagttcgctccttgtcaaacaaaataaaacaaaaaacaaaacaaattggaaacagacctggaccttcaaga

SEQ ID NO: 5383 - DNA, 80 bp, synthetic construct
  misc_feature 1..80: note = Synthetic: >NC_002031.1-cand-240-319
  source 1..80: mol_type = other DNA
ggtgttcaaggatttatctttttctttttgttcaacattttgactggaaaaaagatcacagcccacctaaagaggttgtg

SEQ ID NO: 5384 - DNA, 80 bp, synthetic construct
  misc_feature 1..80: note = Synthetic: >NC_002031.1-cand-320-399
  source 1..80: mol_type = other DNA
gaaaatgctggacccaagacaaggcttggctgttctaaggaaagtcaagagagtggtggccagtttgatgagaggattgt

SEQ ID NO: 5385 - DNA, 80 bp, synthetic construct
  misc_feature 1..80: note = Synthetic: >NC_002031.1-cand-400-479
  source 1..80: mol_type = other DNA
cctcaaggaaacgccgttcccatgatgttctgactgtgcaattcctaattttgggaatgctgttgatgacgggtggagtg

SEQ ID NO: 5386 - DNA, 80 bp, synthetic construct
  misc_feature 1..80: note = Synthetic: >NC_002031.1-cand-480-559
  source 1..80: mol_type = other DNA
accttggtgcggaaaaacagatggttgctcctaaatgtgacatctgaggacctcgggaaaacattctctgtgggcacagg

SEQ ID NO: 5387 - DNA, 80 bp, synthetic construct
  misc_feature 1..80: note = Synthetic: >NC_002031.1-cand-560-639
  source 1..80: mol_type = other DNA
caactgcacaacaaacattttggaagccaagtactggtgcccagactcaatggaatacaactgtcccaatctcagtccaa

SEQ ID NO: 5388 - DNA, 80 bp, synthetic construct
  misc_feature 1..80: note = Synthetic: >NC_002031.1-cand-4480-4559
  source 1..80: mol_type = other DNA
tggccttggttggggctgccctccatccatttgctcttctgctggtccttgctgggtggctgtttcatgtcaggggagct

SEQ ID NO: 5389 - DNA, 80 bp, synthetic construct
  misc_feature 1..80: note = Synthetic: >NC_002031.1-cand-4570-4649
  source 1..80: mol_type = other DNA
gggatgtcttgtgggatattcccactcctaagatcatcgaggaatgtgaacatctggaggatgggatttatggcatattc

SEQ ID NO: 5390 - DNA, 80 bp, synthetic construct
  misc_feature 1..80: note = Synthetic: >NC_002031.1-cand-4580-4659
  source 1..80: mol_type = other DNA
gtgggatattcccactcctaagatcatcgaggaatgtgaacatctggaggatgggatttatggcatattccagtcaacct

SEQ ID NO: 5391 - DNA, 80 bp, synthetic construct
  misc_feature 1..80: note = Synthetic: >NC_002031.1-cand-4720-4799
  source 1..80: mol_type = other DNA
ggcatgtcacaagaggagctttccttgtcaggaatggcaagaagttgattccatcttgggcttcagtaaaggaagacctt

SEQ ID NO: 5392 - DNA, 80 bp, synthetic construct
  misc_feature 1..80: note = Synthetic: >NC_002031.1-cand-4800-4879
  source 1..80: mol_type = other DNA
gtcgcctatggtggctcatggaagttggaaggcagatgggatggagaggaagaggtccagttgatcgcggctgttccagg

SEQ ID NO: 5393 - DNA, 80 bp, synthetic construct
  misc_feature 1..80: note = Synthetic: >NC_002031.1-cand-4850-4929
  source 1..80: mol_type = other DNA
agaggtccagttgatcgcggctgttccaggaaagaacgtggtcaacgtccagacaaaaccgagcttgttcaaagtgagga

SEQ ID NO: 5394 - DNA, 80 bp, synthetic construct
  misc_feature 1..80: note = Synthetic: >NC_002031.1-cand-4960-5039
  source 1..80: mol_type = other DNA
actatccgagtggcacttcaggatctcctattgttaacaggaacggagaggtgattgggctgtacggcaatggcatcctt

SEQ ID NO: 5395 - DNA, 80 bp, synthetic construct
  misc_feature 1..80: note = Synthetic: >NC_002031.1-cand-5040-5119
  source 1..80: mol_type = other DNA
gtcggtgacaactccttcgtgtccgccatatcccagactgaggtgaaggaagaaggaaaggaggagctccaagagatccc

SEQ ID NO: 5396 - DNA, 80 bp, synthetic construct
  misc_feature 1..80: note = Synthetic: >NC_002031.1-cand-5120-5199
  source 1..80: mol_type = other DNA
gacaatgctaaagaaaggaatgacaactgtccttgattttcatcctggagctgggaagacaagacgtttcctcccacaga

SEQ ID NO: 5397 - DNA, 80 bp, synthetic construct
  misc_feature 1..80: note = Synthetic: >NC_002031.1-cand-5200-5279
  source 1..80: mol_type = other DNA
tcttggccgagtgcgcacggagacgcttgcgcactcttgtgttggcccccaccagggttgttctttctgaaatgaaggag

SEQ ID NO: 5398 - DNA, 80 bp, synthetic construct
  misc_feature 1..80: note = Synthetic: >NC_002031.1-cand-5280-5359
  source 1..80: mol_type = other DNA
gcttttcacggcctggacgtgaaattccacacacaggctttttccgctcacggcagcgggagagaagtcattgatgccat

SEQ ID NO: 5399 - DNA, 80 bp, synthetic construct
  misc_feature 1..80: note = Synthetic: >NC_002031.1-cand-5370-5449
  source 1..80: mol_type = other DNA
accctaacttacaggatgttggaaccaactagggttgttaactgggaagtgatcattatggatgaagcccattttttgga

SEQ ID NO: 5400 - DNA, 80 bp, synthetic construct
  misc_feature 1..80: note = Synthetic: >NC_002031.1-cand-5450-5529
  source 1..80: mol_type = other DNA
tccagctagcatagccgctagaggttgggcagcgcacagagctagggcaaatgaaagtgcaacaatcttgatgacagcca

SEQ ID NO: 5401 - DNA, 80 bp, synthetic construct
  misc_feature 1..80: note = Synthetic: >NC_002031.1-cand-5540-5619
  source 1..80: mol_type = other DNA
gactagtgatgaatttccacattcaaatggtgaaatagaagatgttcaaacggacatacccagtgagccctggaacacag

SEQ ID NO: 5402 - DNA, 80 bp, synthetic construct
  misc_feature 1..80: note = Synthetic: >NC_002031.1-cand-5620-5699
  source 1..80: mol_type = other DNA
ggcatgactggatcctagctgacaaaaggcccacggcatggttccttccatccatcagagctgcaaatgtcatggctgcc

SEQ ID NO: 5403 - DNA, 80 bp, synthetic construct
  misc_feature 1..80: note = Synthetic: >NC_002031.1-cand-5700-5779
  source 1..80: mol_type = other DNA
tctttgcgtaaggctggaaagagtgtggtggtcctgaacaggaaaacctttgagagagaataccccacgataaagcagaa

SEQ ID NO: 5404 - DNA, 80 bp, synthetic construct
  misc_feature 1..80: note = Synthetic: >NC_003310.1-cand-25850-25929
  source 1..80: mol_type = other DNA
taatacaatgcggtgtttcctttgtcatcaaattgtgaatcatccattccactgaatagcaaaatctttactattttggt

SEQ ID NO: 5405 - DNA, 80 bp, synthetic construct
  misc_feature 1..80: note = Synthetic: >NC_003310.1-cand-25930-26009
  source 1..80: mol_type = other DNA
atcttctaatgtggctgcctgatgtaatggaaattcattatctagaagatttttcaatgctccagcgttcaacaacgtac

SEQ ID NO: 5406 - DNA, 80 bp, synthetic construct
  misc_feature 1..80: note = Synthetic: >NC_003310.1-cand-26010-26089
  source 1..80: mol_type = other DNA
atactagacgcacgttattatcagctattgcataatacaagacactatgaccgttgatatccgccttaaatgcatctttg

SEQ ID NO: 5407 - DNA, 80 bp, synthetic construct
  misc_feature 1..80: note = Synthetic: >NC_003310.1-cand-26170-26249
  source 1..80: mol_type = other DNA
agtgtatattttttcattttttataattttgtcatattgcaccagaattaataatatctctaatagatctgattagtaga

SEQ ID NO: 5408 - DNA, 80 bp, synthetic construct
  misc_feature 1..80: note = Synthetic: >NC_003310.1-cand-26250-26329
  source 1..80: mol_type = other DNA
tacatggctatcgcaaaacaacatatacacatttaataaaaataatattcattaagaagattcagattccactgtaccca

SEQ ID NO: 5409 - DNA, 80 bp, synthetic construct
  misc_feature 1..80: note = Synthetic: >NC_003310.1-cand-26330-26409
  source 1..80: mol_type = other DNA
tcaatataaataaaataattattccttacatcgtaccataaacaatatattaagtagattccaccttacccataaacaat

SEQ ID NO: 5410 - DNA, 80 bp, synthetic construct
  misc_feature 1..80: note = Synthetic: >NC_003310.1-cand-26410-26489
  source 1..80: mol_type = other DNA
ataaatccagttatatcatgtctaatgatgaacacaaatggtgtattaaattccagttcttcaggagatgatctcgccgt

SEQ ID NO: 5411 - DNA, 80 bp, synthetic construct
  misc_feature 1..80: note = Synthetic: >NC_003310.1-cand-26890-26969
  source 1..80: mol_type = other DNA
ttcatcatgggaaccgttttcgtaccgtacttattagtaaaactagcattgtgtgttttagtgatatcaaacggatattg

SEQ ID NO: 5412 - DNA, 80 bp, synthetic construct
  misc_feature 1..80: note = Synthetic: >NC_003310.1-cand-26970-27049
  source 1..80: mol_type = other DNA
ccatgtacctttaaaatatatagtattaatgattgcccatagagtattatcgtcgagcatagtagaatcaactacattag

SEQ ID NO: 5413 - DNA, 80 bp, synthetic construct
  misc_feature 1..80: note = Synthetic: >NC_003310.1-cand-27050-27129
  source 1..80: mol_type = other DNA
acataccagatctacgttctactatagaattaattttattaaccgcatctcgtctaaagtttaatctatataggccgaat

SEQ ID NO: 5414 - DNA, 80 bp, synthetic construct
  misc_feature 1..80: note = Synthetic: >NC_003310.1-cand-27130-27209
  source 1..80: mol_type = other DNA
ctatgatattgttgataatacgacggtttaatacacacagtactatcgacgaaactttgatacgttagatcggtgtacgt

SEQ ID NO: 5415 - DNA, 80 bp, synthetic construct
  misc_feature 1..80: note = Synthetic: >NC_003310.1-cand-27200-27279
  source 1..80: mol_type = other DNA
cggtgtacgtatatttagatgttttcatcttagctaatcctgatattaattctgtaaatgctggacccagatctcttttt

SEQ ID NO: 5416 - DNA, 80 bp, synthetic construct
  misc_feature 1..80: note = Synthetic: >NC_003310.1-cand-27280-27359
  source 1..80: mol_type = other DNA
ctcaaattcatagtattcaataattctactctagtattacctgatgcagacaatagcgacataaacatagaaaacgaata

SEQ ID NO: 5417 - DNA, 80 bp, synthetic construct
  misc_feature 1..80: note = Synthetic: >NC_003310.1-cand-27360-27439
  source 1..80: mol_type = other DNA
cccaaacggtgagaagacaatattatcattatcatcctcatccccattttgaatatttttatacgctaatataccggcat

SEQ ID NO: 5418 - DNA, 80 bp, synthetic construct
  misc_feature 1..80: note = Synthetic: >NC_003310.1-cand-27440-27519
  source 1..80: mol_type = other DNA
tgataaatccctgcagacgatatgcggatactgaacacgctaatgatagtatcaataacgcaatcatgatttttatggta

SEQ ID NO: 5419 - DNA, 80 bp, synthetic construct
  misc_feature 1..80: note = Synthetic: >NC_003310.1-cand-27520-27599
  source 1..80: mol_type = other DNA
ttaataattaaccttatttttatgtttggtataaaatttattgatgtctacacatccttttgtataatcaactctaatca

SEQ ID NO: 5420 - DNA, 80 bp, synthetic construct
  misc_feature 1..80: note = Synthetic: >NC_003310.1-cand-32300-32379
  source 1..80: mol_type = other DNA
gctattcatcggaggaattggaatccaattgtttgatatataatttaccgctatagcattgttatgtatttcattgttca

SEQ ID NO: 5421 - DNA, 80 bp, synthetic construct
  misc_feature 1..80: note = Synthetic: >NC_003310.1-cand-32360-32439
  source 1..80: mol_type = other DNA
gttatgtatttcattgttcatccatccaccgatgagatatactacttctccaacatgagtacttgtacacatatggaata

SEQ ID NO: 5422 - DNA, 80 bp, synthetic construct
  misc_feature 1..80: note = Synthetic: >NC_003310.1-cand-32520-32599
  source 1..80: mol_type = other DNA
aatattttgttacagtctagtatccattttacattatgtatacctctgggagaaagataatttgacctgattacattttt

SEQ ID NO: 5423 - DNA, 80 bp, synthetic construct
  misc_feature 1..80: note = Synthetic: >NC_003310.1-cand-32600-32679
  source 1..80: mol_type = other DNA
gataagaagtagcagatttcctaatctatttcttcgcctcatataccacttaatgacaaaatcaactacataatcctcat

SEQ ID NO: 5424 - DNA, 80 bp, synthetic construct
  misc_feature 1..80: note = Synthetic: >NC_003310.1-cand-32680-32759
  source 1..80: mol_type = other DNA
ctggaacatttagttcgtcgctttctagaataagtttcatagatagataatcaaaattgtctatgatgtcatcttctagt

SEQ ID NO: 5425 - DNA, 80 bp, synthetic construct
  misc_feature 1..80: note = Synthetic: >NC_003310.1-cand-32840-32919
  source 1..80: mol_type = other DNA
cacgatacaatattcctttctaaaatctcgtaggataaagtatatacaagtgtagatgataaattctacagatgttaata

SEQ ID NO: 5426 - DNA, 80 bp, synthetic construct
  misc_feature 1..80: note = Synthetic: >NC_003310.1-cand-32920-32999
  source 1..80: mol_type = other DNA
tagaagcacgtaataaattgacgacgttatgactatctatatatacctttccagtatatgagtaaataactatagaagtt

SEQ ID NO: 5427 - DNA, 80 bp, synthetic construct
  misc_feature 1..80: note = Synthetic: >NC_003310.1-cand-33000-33079
  source 1..80: mol_type = other DNA
agactgtgaatgtcaaggtctagacaaaccctcgtaactggatctttattttttgtgtatttttgacgtaaatgtgtgcg

SEQ ID NO: 5428 - DNA, 80 bp, synthetic construct
  misc_feature 1..80: note = Synthetic: >NC_003310.1-cand-33080-33159
  source 1..80: mol_type = other DNA
aaagtatggagataactttttcaatattgtagaattgactattatattgcctcctatagcttcaataattgttttgaatt

SEQ ID NO: 5429 - DNA, 80 bp, synthetic construct
  misc_feature 1..80: note = Synthetic: >NC_003310.1-cand-33160-33239
  source 1..80: mol_type = other DNA
tcttagtcgtatacaatgctaatatattcttacagtacacagtattgacaaatatcggcatttatgtttctttaaaagtc

SEQ ID NO: 5430 - DNA, 80 bp, synthetic construct
  misc_feature 1..80: note = Synthetic: >NC_003310.1-cand-33320-33399
  source 1..80: mol_type = other DNA
tagtttttccttccaatgatatattttccatgaaatcaaacggattggtaacattgtaaatttttttaaatcccaattca

SEQ ID NO: 5431 - DNA, 80 bp, synthetic construct
  misc_feature 1..80: note = Synthetic: >NC_003310.1-cand-33400-33479
  source 1..80: mol_type = other DNA
gaaatcaatctatctgcgacgaattctatatatgttttcatcatttcacaattcattcctatgagtttaactggaagagc

SEQ ID NO: 5432 - DNA, 80 bp, synthetic construct
  misc_feature 1..80: note = Synthetic: >NC_003310.1-cand-33480-33559
  source 1..80: mol_type = other DNA
cacagtaagaaattcttgttcaatggataccgcatttgttataataaatctaacggtttcttcactcggtggatgtaata

SEQ ID NO: 5433 - DNA, 80 bp, synthetic construct
  misc_feature 1..80: note = Synthetic: >NC_003310.1-cand-33560-33639
  source 1..80: mol_type = other DNA
aatgtttaaacatcaaacatgcgaaatcgcagtgcagaccctcgtctctactaattaattcgttagaaaacgtgagtccg

SEQ ID NO: 5434 - DNA, 80 bp, synthetic construct
  misc_feature 1..80: note = Synthetic: >NC_003310.1-cand-33660-33739
  source 1..80: mol_type = other DNA
aagccaaaatatggaagcgaatgatccggaaaagaagattccttctactgcagcaaaggcaataagtctctctccataac

SEQ ID NO: 5435 - DNA, 80 bp, synthetic construct
  misc_feature 1..80: note = Synthetic: >NC_003310.1-cand-34220-34299
  source 1..80: mol_type = other DNA
tttcagttatctgtatgactgtacttggatcttttgtatatcgctatcgccgcaatcactacaataattacaagtattat

SEQ ID NO: 5436 - DNA, 80 bp, synthetic construct
  misc_feature 1..80: note = Synthetic: >NC_003310.1-cand-87060-87139
  source 1..80: mol_type = other DNA
gcggctcttcataaaaagtcagaacctattaacgataatagtagctgccacttttttagcaaggtccctaatataggaac

SEQ ID NO: 5437 - DNA, 80 bp, synthetic construct
  misc_feature 1..80: note = Synthetic: >NC_003310.1-cand-87140-87219
  source 1..80: mol_type = other DNA
tggatattacaaatactttatcgacttgggtcttctcatgagaatggaaaggaaattatctgataagatatcttctcaaa

SEQ ID NO: 5438 - DNA, 80 bp, synthetic construct
  misc_feature 1..80: note = Synthetic: >NC_003310.1-cand-87220-87299
  source 1..80: mol_type = other DNA
agatcaaggagatagaagaaacagaagacttttaattcttatcaataacatatttttctatgatctgtcttttaaacgat

SEQ ID NO: 5439 - DNA, 80 bp, synthetic construct
  misc_feature 1..80: note = Synthetic: >NC_003310.1-cand-87610-87689
  source 1..80: mol_type = other DNA
tgaacttaacttcagatgatggtgcatccatagcatttttataatttcccaaatacacattatttgttactcttgtcatt

SEQ ID NO: 5440 - DNA, 80 bp, synthetic construct
  misc_feature 1..80: note = Synthetic: >NC_003310.1-cand-88090-88169
  source 1..80: mol_type = other DNA
atttcggcgcctattttatagctatgcgattggataagaaaacatatctgccgcaagctattaggcgaggtactggagac

SEQ ID NO: 5441 - DNA, 80 bp, synthetic construct
  misc_feature 1..80: note = Synthetic: >NC_003310.1-cand-88320-88399
  source 1..80: mol_type = other DNA
tggtgttccgatcttagtaatatggaataagtgttagataaatgcggtaacaaatgttcctgtaaggaaccataacagtt

SEQ ID NO: 5442 - DNA, 80 bp, synthetic construct
  misc_feature 1..80: note = Synthetic: >NC_003310.1-cand-88480-88559
  source 1..80: mol_type = other DNA
aaaaatgaaatcagtggagtagtaaacgtgtacatgactcctggataacgtttagcagctaccgttcctattctagacca

SEQ ID NO: 5443 - DNA, 80 bp, synthetic construct
  misc_feature 1..80: note = Synthetic: >NC_003310.1-cand-88560-88639
  source 1..80: mol_type = other DNA
aaaatttggtttcatggtttcgaagcggtgttctgcaacaagacgaggatcgtgttctacatatttggcagagttatcca

SEQ ID NO: 5444 - DNA, 80 bp, synthetic construct
  misc_feature 1..80: note = Synthetic: >NC_003310.1-cand-88720-88799
  source 1..80: mol_type = other DNA
ataatttcatctacgatgttcagcgccgtagtaactctaataatataggctgataagctaacatcataccctcctgtata

SEQ ID NO: 5445 - DNA, 80 bp, synthetic construct
  misc_feature 1..80: note = Synthetic: >NC_003310.1-cand-88800-88879
  source 1..80: mol_type = other DNA
tgtgaatatggcatgatctttgtctattacaagctcggttttaactttatttcctgtaataatttctctcatctgtagga

SEQ ID NO: 5446 - DNA, 80 bp, synthetic construct
  misc_feature 1..80: note = Synthetic: >NC_003310.1-cand-88890-88969
  source 1..80: mol_type = other DNA
cttgtcatgtattgccttcaagacgggacgaagaaacgtaatatcctcaataacgttatcgttttctataataactacat

SEQ ID NO: 5447 - DNA, 80 bp, synthetic construct
  misc_feature 1..80: note = Synthetic: >NC_003310.1-cand-89050-89129
  source 1..80: mol_type = other DNA
tcctctgtacacatagtgttacaaaaccctgaaaagaagtgagtatacttgtcatcatctctaatatttcctccagtcca

SEQ ID NO: 5448 - DNA, 80 bp, synthetic construct
  misc_feature 1..80: note = Synthetic: >NC_003310.1-cand-89130-89209
  source 1..80: mol_type = other DNA
ttgtataaacacataatccttgtaatgatctggatcatcattgactatcacaacatctcttttttcttgcataacttcat

SEQ ID NO: 5449 - DNA, 80 bp, synthetic construct
  misc_feature 1..80: note = Synthetic: >NC_003310.1-cand-89290-89369
  source 1..80: mol_type = other DNA
actggcacaacaataacaggagttttcgccgccgccatttagttattgaaattaatcatatacaactctctaatacgagt

SEQ ID NO: 5450 - DNA, 80 bp, synthetic construct
  misc_feature 1..80: note = Synthetic: >NC_003310.1-cand-89530-89609
  source 1..80: mol_type = other DNA
tattgtacatgttcgtgatctatgagttcttcttcgaatggcataggatctccgaatctgaaaacgtataaataggagtt

SEQ ID NO: 5451 - DNA, 80 bp, synthetic construct
  misc_feature 1..80: note = Synthetic: >NC_003310.1-cand-89770-89849
  source 1..80: mol_type = other DNA
gttagctctttgaagtttttaagagatgcatcagttggttttacagatggagtaggtgtaacaattttttgtttaatgca

SEQ ID NO: 5452 - DNA, 80 bp, synthetic construct
  misc_feature 1..80: note = Synthetic: >NC_003461.1-cand-5810-5889
  source 1..80: mol_type = other DNA
cagaaattctaagtacaactaaaaaggataaatcagatatatatgacatcatttacactgaacaggttaagggaactgtg

SEQ ID NO: 5453 - DNA, 80 bp, synthetic construct
  misc_feature 1..80: note = Synthetic: >NC_003461.1-cand-5880-5959
  source 1..80: mol_type = other DNA
gggaactgtgatagatgttgatttggaaaaatacatggttaccctcttagttaaaataccaattttatcagaaataccag

SEQ ID NO: 5454 - DNA, 80 bp, synthetic construct
  misc_feature 1..80: note = Synthetic: >NC_003461.1-cand-5960-6039
  source 1..80: mol_type = other DNA
gcgtgttgatatacagagcttcatctatatcttataatattgaaggagaagaatggcatgtcgcaatcccaaattacata

SEQ ID NO: 5455 - DNA, 80 bp, synthetic construct
  misc_feature 1..80: note = Synthetic: >NC_003461.1-cand-6040-6119
  source 1..80: mol_type = other DNA
atcaataaggcatcatccttaggaggtgcagatgtcacaaactgtatagaatcaaaattggcatatatatgtcctagaga

SEQ ID NO: 5456 - DNA, 80 bp, synthetic construct
  misc_feature 1..80: note = Synthetic: >NC_003461.1-cand-6080-6159
  source 1..80: mol_type = other DNA
actgtatagaatcaaaattggcatatatatgtcctagagatcctacacaattaatacctgataaccaacagaagtgtata

SEQ ID NO: 5457 - DNA, 80 bp, synthetic construct
  misc_feature 1..80: note = Synthetic: >NC_003461.1-cand-6190-6269
  source 1..80: mol_type = other DNA
aaagtaataaacaatctagtaccaaagttcgcattcatcaatggtggtgtagtggctaattgcattgcatccacatgtac

SEQ ID NO: 5458 - DNA, 80 bp, synthetic construct
  misc_feature 1..80: note = Synthetic: >NC_003461.1-cand-6270-6349
  source 1..80: mol_type = other DNA
atgcgggacaaacagaataccagtgaatcaagatcgctcaagaggagttacattcttgacctataccaattgcggtttaa

SEQ ID NO: 5459 - DNA, 80 bp, synthetic construct
  misc_feature 1..80: note = Synthetic: >NC_003461.1-cand-6300-6379
  source 1..80: mol_type = other DNA
agatcgctcaagaggagttacattcttgacctataccaattgcggtttaataggtataaatggaatagaactatatgcca

SEQ ID NO: 5460 - DNA, 80 bp, synthetic construct
  misc_feature 1..80: note = Synthetic: >NC_003461.1-cand-6430-6509
  source 1..80: mol_type = other DNA
ccagcagtctccattagacctgtagacatttctttaaatcttgcatctgccacaaatttcctagaggaatccaagacaga

SEQ ID NO: 5461 - DNA, 80 bp, synthetic construct
  misc_feature 1..80: note = Synthetic: >NC_003461.1-cand-6510-6589
  source 1..80: mol_type = other DNA
gctcatgaaggcaagggcaatcatatcagcagttggaggatggcacaacacagagagtactcagataatcatgataataa

SEQ ID NO: 5462 - DNA, 80 bp, synthetic construct
  misc_feature 1..80: note = Synthetic: >NC_003461.1-cand-6590-6669
  source 1..80: mol_type = other DNA
ttgtgtgcatacttataataatcatatgtggtatattatactatctatacagggttagaagactattagtaatgattaat

SEQ ID NO: 5463 - DNA, 80 bp, synthetic construct
  misc_feature 1..80: note = Synthetic: >NC_003461.1-cand-6670-6749
  source 1..80: mol_type = other DNA
tcaactcataattcacctgttaatgcttatactctggagtcaagaatgagaaatccctacatgggtaacaactccaatta

SEQ ID NO: 5464 - DNA, 80 bp, synthetic construct
  misc_feature 1..80: note = Synthetic: >NC_003461.1-cand-6750-6829
  source 1..80: mol_type = other DNA
aaaaatcagatcaagtacattgtagcatacatacaacaatcaaatctatccacaacttcaccaatcaggtgtacaacaag

SEQ ID NO: 5465 - DNA, 80 bp, synthetic construct
  misc_feature 1..80: note = Synthetic: >NC_003461.1-cand-6830-6909
  source 1..80: mol_type = other DNA
taagaaaaacttagggttaaagacaatccagtcaacctataaggcaacagcatccgattatacaaacgatggctgaaaaa

SEQ ID NO: 5466 - DNA, 80 bp, synthetic construct
  misc_feature 1..80: note = Synthetic: >NC_003461.1-cand-6910-6989
  source 1..80: mol_type = other DNA
gggaaaacaaatagttcatattggtctacaacccgaaatgacaattccacggtaaacacacacattaatacaccagcagg

SEQ ID NO: 5467 - DNA, 80 bp, synthetic construct
  misc_feature 1..80: note = Synthetic: >NC_003461.1-cand-6990-7069
  source 1..80: mol_type = other DNA
aaggacacacatctggctactgattgcaacaacaatgcatacagtattgtccttcattatcatgatcctatgcattgacc

SEQ ID NO: 5468 - DNA, 80 bp, synthetic construct
  misc_feature 1..80: note = Synthetic: >NC_003461.1-cand-12190-12269
  source 1..80: mol_type = other DNA
caaaaaatgtggtttcatctaacttatggaagaccaatccacggtttagaaactccagacccgttagaattattaagagg

SEQ ID NO: 5469 - DNA, 80 bp, synthetic construct
  misc_feature 1..80: note = Synthetic: >NC_003461.1-cand-12280-12359
  source 1..80: mol_type = other DNA
gaaggctcagaaatatgtaaattttgtagatcagaagggaataaccctatgtatacttggttctatcttcctgacaacat

SEQ ID NO: 5470 - DNA, 80 bp, synthetic construct
  misc_feature 1..80: note = Synthetic: >NC_003461.1-cand-12360-12439
  source 1..80: mol_type = other DNA
cgacttagatacacttagcaatggaagtcctgccatacgtatcccttattttggttctgctactgatgaaagatcagagg

SEQ ID NO: 5471 - DNA, 80 bp, synthetic construct
  misc_feature 1..80: note = Synthetic: >NC_003461.1-cand-12440-12519
  source 1..80: mol_type = other DNA
ctcaactaggttatgttaagaacttaagcaagccggcaaaagcagcaataagaatcgcaatggtttacacttgggcttat

SEQ ID NO: 5472 - DNA, 80 bp, synthetic construct
  misc_feature 1..80: note = Synthetic: >NC_003461.1-cand-12520-12599
  source 1..80: mol_type = other DNA
ggaactgatgaaatatcatggatggaagcagcacttatagctcaaaccagggctaacttaagtttagagaatttgaagtt

SEQ ID NO: 5473 - DNA, 80 bp, synthetic construct
  misc_feature 1..80: note = Synthetic: >NC_003461.1-cand-12600-12679
  source 1..80: mol_type = other DNA
actcacccctgtatcgacttctacaaatttgtcccacagattgagagatactgctacacagatgaaattttcaagtgcta

SEQ ID NO: 5474 - DNA, 80 bp, synthetic construct
  misc_feature 1..80: note = Synthetic: >NC_003461.1-cand-12680-12759
  source 1..80: mol_type = other DNA
ctttagttcgagcgagtcgatttattaccatatctaatgataatatggcattaaaagaggcaggagagtctaaagatact

SEQ ID NO: 5475 - DNA, 80 bp, synthetic construct
  misc_feature 1..80: note = Synthetic: >NC_003461.1-cand-12760-12839
  source 1..80: mol_type = other DNA
aatttagtttatcaacaaattatgttaaccggattgagcttatttgaattcaatatgaggtataaacaaggatcattatc

SEQ ID NO: 5476 - DNA, 80 bp, synthetic construct
  misc_feature 1..80: note = Synthetic: >NC_003461.1-cand-12840-12919
  source 1..80: mol_type = other DNA
taaacctatgatattacacttacatttgaataataaatgctgtatcatagaatctcctcaagaattgaatattcctccta

SEQ ID NO: 5477 - DNA, 80 bp, synthetic construct
  misc_feature 1..80: note = Synthetic: >NC_003461.1-cand-12920-12999
  source 1..80: mol_type = other DNA
gatctacattggacttagagatcactcaggaaaataacaagttaatctatgatcctgatcctctcaaggacatagatcta

SEQ ID NO: 5478 - DNA, 80 bp, synthetic construct
  misc_feature 1..80: note = Synthetic: >NC_003461.1-cand-13000-13079
  source 1..80: mol_type = other DNA
gagttatttagtaaggttagggatgtagtacacacaattgatatgaattattggtctgatgatgaaataattagagcaac

SEQ ID NO: 5479 - DNA, 80 bp, synthetic construct
  misc_feature 1..80: note = Synthetic: >NC_003461.1-cand-13080-13159
  source 1..80: mol_type = other DNA
tagtatatgtacagctatgactattgcagacacaatgtctcaattagatagagacaatcttaaagaaatgatagcactga

SEQ ID NO: 5480 - DNA, 80 bp, synthetic construct
  misc_feature 1..80: note = Synthetic: >NC_003461.1-cand-13150-13229
  source 1..80: mol_type = other DNA
atagcactgataaatgatgatgatataaatagtttaatcaccgaatttatggttattgatatacccttattttgttccac

SEQ ID NO: 5481 - DNA, 80 bp, synthetic construct
  misc_feature 1..80: note = Synthetic: >NC_003461.1-cand-13310-13389
  source 1..80: mol_type = other DNA
atgtgatacgcataattaaagacacatcacatgcagtcctaaaagtactgtccaatgcattatcacatcctaaaatattc

SEQ ID NO: 5482 - DNA, 80 bp, synthetic construct
  misc_feature 1..80: note = Synthetic: >NC_003461.1-cand-13330-13409
  source 1..80: mol_type = other DNA
gacacatcacatgcagtcctaaaagtactgtccaatgcattatcacatcctaaaatattcaaacgattctgggatgcagg

SEQ ID NO: 5483 - DNA, 80 bp, synthetic construct
  misc_feature 1..80: note = Synthetic: >NC_003461.1-cand-13410-13489
  source 1..80: mol_type = other DNA
agttgtagagcctgtttatggacctaacttgtccaatcaagacaagatactgttagccatttcagtatgtgaatactctg

SEQ ID NO: 5484 - DNA, 80 bp, synthetic construct
  misc_feature 1..80: note = Synthetic: >NC_003467.2-cand-1550-1629
  source 1..80: mol_type = other DNA
cctgcggtcacattaataatattaaagtgtctaagggttttgacgttttcttgttcccattacactaatgagtcaaaatt

SEQ ID NO: 5485 - DNA, 80 bp, synthetic construct
  misc_feature 1..80: note = Synthetic: >NC_003467.2-cand-1640-1719
  source 1..80: mol_type = other DNA
ctggaaaaagttaaaattgaataccaaaagactatgggatcaatggtgtgcgatgtatgtcatcatgagtgtgaaacagc

SEQ ID NO: 5486 - DNA, 80 bp, synthetic construct
  misc_feature 1..80: note = Synthetic: >NC_003467.2-cand-1720-1799
  source 1..80: mol_type = other DNA
aaaagaacttgaatcacatagacagagttgtatcaatggacaatgtccttattgcatgacaataactgaagcaactgaaa

SEQ ID NO: 5487 - DNA, 80 bp, synthetic construct
  misc_feature 1..80: note = Synthetic: >NC_003467.2-cand-1800-1879
  source 1..80: mol_type = other DNA
gtgccttgcaagcccattattccatttgtaaattgacaggaagatttcaggaggcactgaaaaagtcacttaaaaagcca

SEQ ID NO: 5488 - DNA, 80 bp, synthetic construct
  misc_feature 1..80: note = Synthetic: >NC_003467.2-cand-1920-1999
  source 1..80: mol_type = other DNA
gatataaaagtagatgttatgtgggtttggtatggtgcctattgttgacatgtgaaattgttatttgggccgcaagtgca

SEQ ID NO: 5489 - DNA, 80 bp, synthetic construct
  misc_feature 1..80: note = Synthetic: >NC_003467.2-cand-1960-2039
  source 1..80: mol_type = other DNA
attgttgacatgtgaaattgttatttgggccgcaagtgcagagactccactaatggagtcaggctggtcagatacggctc

SEQ ID NO: 5490 - DNA, 80 bp, synthetic construct
  misc_feature 1..80: note = Synthetic: >NC_003467.2-cand-2040-2119
  source 1..80: mol_type = other DNA
atggtgttggtgagattccaatgaagacagacctcgagctggacttttcactgccttcttcatcctcttacagttatagg

SEQ ID NO: 5491 - DNA, 80 bp, synthetic construct
  misc_feature 1..80: note = Synthetic: >NC_003467.2-cand-2120-2199
  source 1..80: mol_type = other DNA
agaaagctcacaaacccagccaataaagaagagtctattcccttccacttccagatggaaaaacaagtaattcatgctga

SEQ ID NO: 5492 - DNA, 80 bp, synthetic construct
  misc_feature 1..80: note = Synthetic: >NC_003467.2-cand-2200-2279
  source 1..80: mol_type = other DNA
aatccaacccctgggtcattggatggatgcgacatttaatattaagactgcatttcattgttatggtgcatgccagaaat

SEQ ID NO: 5493 - DNA, 80 bp, synthetic construct
  misc_feature 1..80: note = Synthetic: >NC_003467.2-cand-2260-2339
  source 1..80: mol_type = other DNA
ttatggtgcatgccagaaatactcttatccatggcagacatctaagtgcttctttgaaaaggactaccagtatgaaacag

SEQ ID NO: 5494 - DNA, 80 bp, synthetic construct
  misc_feature 1..80: note = Synthetic: >NC_003467.2-cand-2370-2449
  source 1..80: mol_type = other DNA
gggttgggactggatgcactgcttgtggtgtttatctcgataaactaaaatctgttgggaaggcctataagataatttct

SEQ ID NO: 5495 - DNA, 80 bp, synthetic construct
  misc_feature 1..80: note = Synthetic: >NC_003467.2-cand-2460-2539
  source 1..80: mol_type = other DNA
ccagaaaggtttgtattcagttaggaacagaacaaacttgcaagcatattgatgcaaatgattgtttagtgacaccatct

SEQ ID NO: 5496 - DNA, 80 bp, synthetic construct
  misc_feature 1..80: note = Synthetic: >NC_003467.2-cand-2540-2619
  source 1..80: mol_type = other DNA
gtgaaagtttgcatagtgggcacagtttcaaaacttcaaccatctgatactcttttgttcttaggtccactagaacaagg

SEQ ID NO: 5497 - DNA, 80 bp, synthetic construct
  misc_feature 1..80: note = Synthetic: >NC_003467.2-cand-2670-2749
  source 1..80: mol_type = other DNA
ctggtgatatcatgtccactcccagtggtatgaggtgtccagagcacactggatcatttaggaaaatttgcggttttgct

SEQ ID NO: 5498 - DNA, 80 bp, synthetic construct
  misc_feature 1..80: note = Synthetic: >NC_003467.2-cand-2700-2779
  source 1..80: mol_type = other DNA
tgaggtgtccagagcacactggatcatttaggaaaatttgcggttttgctactacaccagtttgtgaatatcaaggaaat

SEQ ID NO: 5499 - DNA, 80 bp, synthetic construct
  misc_feature 1..80: note = Synthetic: >NC_003467.2-cand-2780-2859
  source 1..80: mol_type = other DNA
accatttctggatataaaagaatgatggcaacaaaagattcattccaatcatttaacttaacagaacctcacatcacaac

SEQ ID NO: 5500 - DNA, 80 bp, synthetic construct
  misc_feature 1..80: note = Synthetic: >NC_003899.1-cand-1690-1769
  source 1..80: mol_type = other DNA
aagaaatgatcggctcgtacgcagtgctttcaccacaagcggtccttaacagcgagaagctagcttgtattcacccgtta

SEQ ID NO: 5501 - DNA, 80 bp, synthetic construct
  misc_feature 1..80: note = Synthetic: >NC_003899.1-cand-1770-1849
  source 1..80: mol_type = other DNA
gctgagcaagtgctcgtgatgactcacaaagggcgcgcaggacgatacaaggtagagccataccacgatagagttatcgt

SEQ ID NO: 5502 - DNA, 80 bp, synthetic construct
  misc_feature 1..80: note = Synthetic: >NC_003899.1-cand-1850-1929
  source 1..80: mol_type = other DNA
ccccagtggtacagctataccaatccccgatttccaggctctgagtgaaagtgcaaccatagtatttaacgaacgggagt

SEQ ID NO: 5503 - DNA, 80 bp, synthetic construct
  misc_feature 1..80: note = Synthetic: >NC_003899.1-cand-1970-2049
  source 1..80: mol_type = other DNA
ggcattgaatacagatgaagagtactacaaggttgtgaaaagcactgagacagactctgagtacgtatttgacatcgacg

SEQ ID NO: 5504 - DNA, 80 bp, synthetic construct
  misc_feature 1..80: note = Synthetic: >NC_003899.1-cand-1990-2069
  source 1..80: mol_type = other DNA
agtactacaaggttgtgaaaagcactgagacagactctgagtacgtatttgacatcgacgcaaagaagtgcgtgaagaaa

SEQ ID NO: 5505 - DNA, 80 bp, synthetic construct
  misc_feature 1..80: note = Synthetic: >NC_003899.1-cand-2100-2179
  source 1..80: mol_type = other DNA
gaactagttgacccgccattccacgaatttgcgtacgagagtttaaaaacacgtcctgctgcaccacacaaagtgcctac

SEQ ID NO: 5506 - DNA, 80 bp, synthetic construct
  misc_feature 1..80: note = Synthetic: >NC_003899.1-cand-2180-2259
  source 1..80: mol_type = other DNA
catcggagtctacggagtcccaggttctggaaagtctggtataatcaaaagcgctgttaccaagcgtgatctggtggtca

SEQ ID NO: 5507 - DNA, 80 bp, synthetic construct
  misc_feature 1..80: note = Synthetic: >NC_003899.1-cand-2260-2339
  source 1..80: mol_type = other DNA
gtgcaaagaaagaaaattgcatggaaatcatcaaagacgtcaaacgcatgcgcggcatggacatcgccgcccgcacagtg

SEQ ID NO: 5508 - DNA, 80 bp, synthetic construct
  misc_feature 1..80: note = Synthetic: >NC_003899.1-cand-2360-2439
  source 1..80: mol_type = other DNA
ggtaaaacactccgtcgacacactgtacatagacgaggcattcgcttgccatgcagggactctgctagcacttatcgcca

SEQ ID NO: 5509 - DNA, 80 bp, synthetic construct
  misc_feature 1..80: note = Synthetic: >NC_003899.1-cand-2420-2499
  source 1..80: mol_type = other DNA
tctgctagcacttatcgccatcgtcaagccaaagaaagttgtattgtgtggagatccgaaacaatgcggcttctttaaca

SEQ ID NO: 5510 - DNA, 80 bp, synthetic construct
  misc_feature 1..80: note = Synthetic: >NC_003899.1-cand-2500-2579
  source 1..80: mol_type = other DNA
tgatgtgtctaaaagtgcattttaaccacgagatatgcacagaagtgtatcacaagagtatctctcggcgatgcactaag

SEQ ID NO: 5511 - DNA, 80 bp, synthetic construct
  misc_feature 1..80: note = Synthetic: >NC_003899.1-cand-2580-2659
  source 1..80: mol_type = other DNA
acagtgacatccattgtttccaccctgttctatgataaacggatgagaactgtcaacccatgcaatgataagatcataat

SEQ ID NO: 5512 - DNA, 80 bp, synthetic construct
  misc_feature 1..80: note = Synthetic: >NC_003899.1-cand-2660-2739
  source 1..80: mol_type = other DNA
agataccaccagtactaccaaacctttaaaggatgacataatattaacctgcttcagagggtgggttaagcaactgcaga

SEQ ID NO: 5513 - DNA, 80 bp, synthetic construct
  misc_feature 1..80: note = Synthetic: >NC_003899.1-cand-2700-2779
  source 1..80: mol_type = other DNA
atattaacctgcttcagagggtgggttaagcaactgcagattgactacaagaaccacgagatcatgaccgcagcggcctc

SEQ ID NO: 5514 - DNA, 80 bp, synthetic construct
  misc_feature 1..80: note = Synthetic: >NC_003899.1-cand-2820-2899
  source 1..80: mol_type = other DNA
aaggtcaatgagaacccgttatacgcacagacatctgagcatgtgaatgtactacttacacgcacagaaaaacgtatagt

SEQ ID NO: 5515 - DNA, 80 bp, synthetic construct
  misc_feature 1..80: note = Synthetic: >NC_003899.1-cand-2900-2979
  source 1..80: mol_type = other DNA
atggaagactttggccggtgacccttggatcaagacgttgacagcatcgtacccgggtaatttcaccgccacactggaag

SEQ ID NO: 5516 - DNA, 80 bp, synthetic construct
  misc_feature 1..80: note = Synthetic: >NC_005216.1-cand-1200-1279
  source 1..80: mol_type = other DNA
gaagagaggccgtgaatcacttccatcttggagatgatatggatcctgagcttagggaacttgcccagacccttgtagat

SEQ ID NO: 5517 - DNA, 80 bp, synthetic construct
  misc_feature 1..80: note = Synthetic: >NC_005216.1-cand-1250-1329
  source 1..80: mol_type = other DNA
cttagggaacttgcccagacccttgtagatatcaaggtcagggaaatctctaaccaagaaccacttaaactttaagtggg

SEQ ID NO: 5518 - DNA, 80 bp, synthetic construct
  misc_feature 1..80: note = Synthetic: >NC_005216.1-cand-1330-1409
  source 1..80: mol_type = other DNA
cagtaatcaacttatattcagggcattattataaccagggtaatgggcactaatcagggtttattgcactagggtgggtt

SEQ ID NO: 5519 - DNA, 80 bp, synthetic construct
  misc_feature 1..80: note = Synthetic: >NC_005216.1-cand-1370-1449
  source 1..80: mol_type = other DNA
taatgggcactaatcagggtttattgcactagggtgggttcaagggccaattatatcacagggtatataatctatattgt

SEQ ID NO: 5520 - DNA, 80 bp, synthetic construct
  misc_feature 1..80: note = Synthetic: >NC_005216.1-cand-1460-1539
  source 1..80: mol_type = other DNA
tgtagtattgtattatgtattgttagttaagcttattaaatcttgttaagtttgttaagttttgttaagttgtattaagt

SEQ ID NO: 5521 - DNA, 80 bp, synthetic construct
  misc_feature 1..80: note = Synthetic: >NC_005216.1-cand-1520-1599
  source 1..80: mol_type = other DNA
tttgttaagttgtattaagttttgttaagtttcggtaagtctgttaaatgtagttaatcttgatagtattaagtcatatg

SEQ ID NO: 5522 - DNA, 80 bp, synthetic construct
  misc_feature 1..80: note = Synthetic: >NC_005216.1-cand-1630-1709
  source 1..80: mol_type = other DNA
ttattgtttattgttatctgtttaatgctaagtctatatgatttattaatcaaaataagatttatatacatagatttatt

SEQ ID NO: 5523 - DNA, 80 bp, synthetic construct
  misc_feature 1..80: note = Synthetic: >NC_005216.1-cand-1710-1789
  source 1..80: mol_type = other DNA
ttatatacatagatttattttatcaactcattatcatctctcatcattaatcagggtttataaaattttctcaggtctat

SEQ ID NO: 5524 - DNA, 80 bp, synthetic construct
  misc_feature 1..80: note = Synthetic: >NC_005216.1-cand-1790-1869
  source 1..80: mol_type = other DNA
ccctatattggaagattgttctattaaccgttcaaactggaactaacactgtgactctgtaaagtccagattatattcac

SEQ ID NO: 5525 - DNA, 80 bp, synthetic construct
  misc_feature 1..80: note = Synthetic: >NC_005216.1-cand-1880-1959
  source 1..80: mol_type = other DNA
atggatgtaaatttcgttccgttaatagtacatgacactaatgcttgctttgctactaattgatttcttcattacaacaa

SEQ ID NO: 5526 - DNA, 80 bp, synthetic construct
  misc_feature 1..80: note = Synthetic: >NC_005217.1-cand-0-79
  source 1..80: mol_type = other DNA
agtagactccgagatagagaaattcaggaaaatggaaaaatatagggagattcatcaaagagtcaaggagattcctcctg

SEQ ID NO: 5527 - DNA, 80 bp, synthetic construct
  misc_feature 1..80: note = Synthetic: >NC_005217.1-cand-90-169
  source 1..80: mol_type = other DNA
tgcattagaatgtttagatttgcttgaccgtctttatgcagtcagacatgatgtagttgatcagatgatcaagcatgatt

SEQ ID NO: 5528 - DNA, 80 bp, synthetic construct
  misc_feature 1..80: note = Synthetic: >NC_005217.1-cand-160-239
  source 1..80: mol_type = other DNA
aagcatgattggtctgacaataaagatatggaaagacctataggtcaagttctgttaatggctggtgtaccaaatgatgt

SEQ ID NO: 5529 - DNA, 80 bp, synthetic construct
  misc_feature 1..80: note = Synthetic: >NC_005217.1-cand-240-319
  source 1..80: mol_type = other DNA
gattcaaggtatggagaagaaagttatacctacaagcccttcaggacagattttaaaaagctttttccgcatgacacctg

SEQ ID NO: 5530 - DNA, 80 bp, synthetic construct
  misc_feature 1..80: note = Synthetic: >NC_005217.1-cand-320-399
  source 1..80: mol_type = other DNA
ataattataaaatcacaggtgccttaattgagtttatcgaggtaacagtgactgcagatgttgctaaaggtatccgtgaa

SEQ ID NO: 5531 - DNA, 80 bp, synthetic construct
  misc_feature 1..80: note = Synthetic: >NC_005217.1-cand-400-479
  source 1..80: mol_type = other DNA
aagaaattaaagtatgagagtggtcttcagtttgtggagtctttattaagtcaagaacacaaaaaaggtaatataaatca

SEQ ID NO: 5532 - DNA, 80 bp, synthetic construct
  misc_feature 1..80: note = Synthetic: >NC_005831.2-cand-25290-25369
  source 1..80: mol_type = other DNA
tattaaactgattcaattgtgttttacttgtcattatttttttagtaggacattatatcaaccagtttataaaatttttc

SEQ ID NO: 5533 - DNA, 80 bp, synthetic construct
  misc_feature 1..80: note = Synthetic: >NC_005831.2-cand-25370-25449
  source 1..80: mol_type = other DNA
ttgcttaccaagattatatgcaaatagcacctgttccagctgaagtactaaatgtctaaactaaacgatgtctaatagta

SEQ ID NO: 5534 - DNA, 80 bp, synthetic construct
  misc_feature 1..80: note = Synthetic: >NC_005831.2-cand-25450-25529
  source 1..80: mol_type = other DNA
gtgtgcctcttttagaggtttatgtccatttacgtaactggaactttagttggaatttaattctaacgctttttatagtt

SEQ ID NO: 5535 - DNA, 80 bp, synthetic construct
  misc_feature 1..80: note = Synthetic: >NC_005831.2-cand-25530-25609
  source 1..80: mol_type = other DNA
gtgttgcagtatgggcattataagtatagcagacttctttatggtttaaagatgtctgttttatggtgtttatggccact

SEQ ID NO: 5536 - DNA, 80 bp, synthetic construct
  misc_feature 1..80: note = Synthetic: >NC_005831.2-cand-25610-25689
  source 1..80: mol_type = other DNA
tgttctagctttgtctatttttgactgttttgtcaattttaatgtggactgggtcttttttggttttagtattcttatgt

SEQ ID NO: 5537 - DNA, 80 bp, synthetic construct
  misc_feature 1..80: note = Synthetic: >NC_005831.2-cand-25690-25769
  source 1..80: mol_type = other DNA
ctattattacactttgtttatgggttatgtattttgttaatagtttcagactttggcgccgtgttaaaactttttgggct

SEQ ID NO: 5538 - DNA, 80 bp, synthetic construct
  misc_feature 1..80: note = Synthetic: >NC_005831.2-cand-25770-25849
  source 1..80: mol_type = other DNA
tttaatcctgaaactaatgcaatcatctctctccaggtttacggacataattattacttaccggtgatggctgcacctac

SEQ ID NO: 5539 - DNA, 80 bp, synthetic construct
  misc_feature 1..80: note = Synthetic: >NC_005831.2-cand-25850-25929
  source 1..80: mol_type = other DNA
aggtgttacattaacacttcttagtggtgtacttcttgttgatggccataagattgctactcgtgttcaagtgggtcagt

SEQ ID NO: 5540 - DNA, 80 bp, synthetic construct
  misc_feature 1..80: note = Synthetic: >NC_005831.2-cand-25930-26009
  source 1..80: mol_type = other DNA
tgcctaaatatgtaatagttgctacgcctagtaccacaattgtttgtgaccgtgttggtcgctctgttaatgaaacaagc

SEQ ID NO: 5541 - DNA, 80 bp, synthetic construct
  misc_feature 1..80: note = Synthetic: >NC_005831.2-cand-26010-26089
  source 1..80: mol_type = other DNA
cagactggttgggcattctacgtccgtgctaaacatggtgatttttctggtgttgcctctcaggagggtgttttgtcaga

SEQ ID NO: 5542 - DNA, 80 bp, synthetic construct
  misc_feature 1..80: note = Synthetic: >NC_005831.2-cand-26090-26169
  source 1..80: mol_type = other DNA
aagagagaagttgcttcatttaatctaaactaaacaaaatggctagtgtaaattgggccgatgacagagctgctaggaag

SEQ ID NO: 5543 - DNA, 80 bp, synthetic construct
  misc_feature 1..80: note = Synthetic: >NC_005831.2-cand-26160-26239
  source 1..80: mol_type = other DNA
tgctaggaagaaatttcctcctccttcattttacatgcctcttttggttagttctgataaggcaccatatagggtcattc

SEQ ID NO: 5544 - DNA, 80 bp, synthetic construct
  misc_feature 1..80: note = Synthetic: >NC_005831.2-cand-26240-26319
  source 1..80: mol_type = other DNA
ccaggaatcttgtccctattggtaagggtaataaagatgagcagattggttattggaatgttcaagagcgttggcgtatg

SEQ ID NO: 5545 - DNA, 80 bp, synthetic construct
  misc_feature 1..80: note = Synthetic: >NC_005831.2-cand-26330-26409
  source 1..80: mol_type = other DNA
aacgtgttgatttgcctcctaaagttcatttttattacctaggtactggacctcataaggaccttaaattcagacaacgt

SEQ ID NO: 5546 - DNA, 80 bp, synthetic construct
  misc_feature 1..80: note = Synthetic: >NC_005831.2-cand-26400-26479
  source 1..80: mol_type = other DNA
cagacaacgttctgatggtgttgtttgggttgctaaggaaggtgctaaaactgttaataccagtcttggtaatcgcaaac

SEQ ID NO: 5547 - DNA, 80 bp, synthetic construct
  misc_feature 1..80: note = Synthetic: >NC_005831.2-cand-26480-26559
  source 1..80: mol_type = other DNA
gtaatcagaaacctttggaaccaaagttctctattgctttgcctccagagctctctgttgttgagtttgaggatcgctct

SEQ ID NO: 5548 - DNA, 80 bp, synthetic construct
  misc_feature 1..80: note = Synthetic: >NC_007550.1-cand-630-709
  source 1..80: mol_type = other DNA
gtcacaaaagctacatttggagacacatttgtgtgcaatcatccgaacatgaattaccaagatttaatacctactatgac

SEQ ID NO: 5549 - DNA, 80 bp, synthetic construct
  misc_feature 1..80: note = Synthetic: >NC_007550.1-cand-710-789
  source 1..80: mol_type = other DNA
taaaaatagcatttaccatgatgttaaaagaataactaaaatccatgaatacattaatagtaaaaaaaagaagaaaaata

SEQ ID NO: 5550 - DNA, 80 bp, synthetic construct
  misc_feature 1..80: note = Synthetic: >NC_007550.1-cand-790-869
  source 1..80: mol_type = other DNA
gcactagtaaaataggaggaattcaaatagctgaatcaaaagacggattttggaaaatattaacgaaaaattatcaaatc

SEQ ID NO: 5551 - DNA, 80 bp, synthetic construct
  misc_feature 1..80: note = Synthetic: >NC_007550.1-cand-870-949
  source 1..80: mol_type = other DNA
aaactcaaatttggtgtcgaaggatatggagttatgggtggcacatttggaaattggctaattgatagtggatttaaaac

SEQ ID NO: 5552 - DNA, 80 bp, synthetic construct
  misc_feature 1..80: note = Synthetic: >NC_007550.1-cand-950-1029
  source 1..80: mol_type = other DNA
cgttgagacaaattatgagtaccagagaaacgggaagacaattaatgcaacaacggttgcttcagttaaaccatcaagaa

SEQ ID NO: 5553 - DNA, 80 bp, synthetic construct
  misc_feature 1..80: note = Synthetic: >NC_007550.1-cand-1030-1109
  source 1..80: mol_type = other DNA
aatgtggaactagaagtcctgtatttggacagttacagttttcaggagaaatgatggtgttatcacataatgatattcta

SEQ ID NO: 5554 - DNA, 80 bp, synthetic construct
  misc_feature 1..80: note = Synthetic: >NC_007550.1-cand-1110-1189
  source 1..80: mol_type = other DNA
actgtgttctatactgaaagggaatgggctttgtctaatgctatatatgcaaaaaactttgcaacggattttaaaagaca

SEQ ID NO: 5555 - DNA, 80 bp, synthetic construct
  misc_feature 1..80: note = Synthetic: >NC_007550.1-cand-1190-1269
  source 1..80: mol_type = other DNA
atttgaaataactgcacagtcagatgaattattagttcgtactaatgtagttccacatactataaaaaatacaccaggaa

SEQ ID NO: 5556 - DNA, 80 bp, synthetic construct
  misc_feature 1..80: note = Synthetic: >NC_007550.1-cand-1270-1349
  source 1..80: mol_type = other DNA
aagctttaatggaatattcacatggaggttttggccaaattgatacttccgactatactggcatggcacttacatttaga

SEQ ID NO: 5557 - DNA, 80 bp, synthetic construct
  misc_feature 1..80: note = Synthetic: >NC_007550.1-cand-1350-1429
  source 1..80: mol_type = other DNA
tttagatgcattagcgaagatttacccgaaggttattatgacagagataaagctttagctttcgctaatgtcggtctaac

SEQ ID NO: 5558 - DNA, 80 bp, synthetic construct
  misc_feature 1..80: note = Synthetic: >NC_007550.1-cand-1430-1509
  source 1..80: mol_type = other DNA
atcatttcaagatagacaagaagctaatggaacttattgggtatacaacacatctactgttggattcggttcatgttatc

SEQ ID NO: 5559 - DNA, 80 bp, synthetic construct
  misc_feature 1..80: note = Synthetic: >NC_007550.1-cand-1500-1579
  source 1..80: mol_type = other DNA
tcatgttatccgaaaaaagaatttgaatatgatatcaatgtgacatatactacactgttgccatctgatccagaatttac

SEQ ID NO: 5560 - DNA, 80 bp, synthetic construct
  misc_feature 1..80: note = Synthetic: >NC_007550.1-cand-1590-1669
  source 1..80: mol_type = other DNA
actaactatgctcaatcagttactgcagttctggaagaatcatttattaatttacaaaatcaagttaatgagatgttaac

SEQ ID NO: 5561 - DNA, 80 bp, synthetic construct
  misc_feature 1..80: note = Synthetic: >NC_007550.1-cand-1660-1739
  source 1..80: mol_type = other DNA
agatgttaacaagaatgaacatttctgatcttacttcgggagttatgtctgttttttctgtcgcaacatcttttccacaa

SEQ ID NO: 5562 - DNA, 80 bp, synthetic construct
  misc_feature 1..80: note = Synthetic: >NC_007550.1-cand-1740-1819
  source 1..80: mol_type = other DNA
attcttgatggtataagtgatctgttaaaagcagcttcatcagcttttaaaaaagtgaaaggaaaggtaggaagtgttgc

SEQ ID NO: 5563 - DNA, 80 bp, synthetic construct
  misc_feature 1..80: note = Synthetic: >NC_007550.1-cand-1820-1899
  source 1..80: mol_type = other DNA
taaaagactgagagggaagagatatgttagactttttgatgaaaatgtatcaatcgaggagactcccagatttcttgatt

SEQ ID NO: 5564 - DNA, 80 bp, synthetic construct
  misc_feature 1..80: note = Synthetic: >NC_007553.1-cand-1190-1269
  source 1..80: mol_type = other DNA
gattgcagctttctcctgcaaaatctgattggtcaggtttggtcacgcgctgcgaagcggcgttccgtagtagtatagaa

SEQ ID NO: 5565 - DNA, 80 bp, synthetic construct
  misc_feature 1..80: note = Synthetic: >NC_007554.1-cand-0-79
  source 1..80: mol_type = other DNA
aaaagctcttatcttagtcacatcatccagggttgcagctgggagagaatggtgtcgatcaaagtgtctttagctgattt

SEQ ID NO: 5566 - DNA, 80 bp, synthetic construct
  misc_feature 1..80: note = Synthetic: >NC_007554.1-cand-90-169
  source 1..80: mol_type = other DNA
actgaggaaggttggattccatctgataactgtcctgctttagatagatttaaaactaaaactgaaaaggagctgttgga

SEQ ID NO: 5567 - DNA, 80 bp, synthetic construct
  misc_feature 1..80: note = Synthetic: >NC_007554.1-cand-180-259
  source 1..80: mol_type = other DNA
aaagaaggagcagatagagcatcaattcgaaaacaattgtttttaacatctatatcaaataaaagacttactcaacttgg

SEQ ID NO: 5568 - DNA, 80 bp, synthetic construct
  misc_feature 1..80: note = Synthetic: >NC_007554.1-cand-260-339
  source 1..80: mol_type = other DNA
aggtgtgcctgtgcgagatattcgcacatccacgactattccatcttcaactagaaatttaatcactgattggttgttaa

SEQ ID NO: 5569 - DNA, 80 bp, synthetic construct
  misc_feature 1..80: note = Synthetic: >NC_007554.1-cand-460-539
  source 1..80: mol_type = other DNA
gagatagagtacatgaagatgggtttagaattttatcagcaacaatgctagctatagattctgatattgctactgagggt

SEQ ID NO: 5570 - DNA, 80 bp, synthetic construct
  misc_feature 1..80: note = Synthetic: >NC_007554.1-cand-550-629
  source 1..80: mol_type = other DNA
tagtaagagcgactgaagatgctattattgctaaatttgaaccagtttcagaacatctatgtataggaaatccaagaggt

SEQ ID NO: 5571 - DNA, 80 bp, synthetic construct
  misc_feature 1..80: note = Synthetic: >NC_007554.1-cand-640-719
  source 1..80: mol_type = other DNA
aagcttttccaataaaaaaagaacagccaatggtctatggagttaaggctttgttaggtatatctaatagagactttatc

SEQ ID NO: 5572 - DNA, 80 bp, synthetic construct
  misc_feature 1..80: note = Synthetic: >NC_007554.1-cand-730-809
  source 1..80: mol_type = other DNA
gtcatggtcatttaagaactgttccatattctgaaattaataacgcagttagatcttttgcaaaaaagaatgaagctgag

SEQ ID NO: 5573 - DNA, 80 bp, synthetic construct
  misc_feature 1..80: note = Synthetic: >NC_007554.1-cand-820-899
  source 1..80: mol_type = other DNA
ttcgttccgattcattgtcacccaatgcaggtgaaaaatttattaacatgtgcgatatgttgttacaaaaagagaaaatt

SEQ ID NO: 5574 - DNA, 80 bp, synthetic construct
  misc_feature 1..80: note = Synthetic: >NC_007554.1-cand-910-989
  source 1..80: mol_type = other DNA
tagctaaaataatgaaaagcgataaaaattagatgttatcagtaacattttgatcgaaaaaaactaagataatctttgat

SEQ ID NO: 5575 - DNA, 80 bp, synthetic construct
  misc_feature 1..80: note = Synthetic: >NC_007555.1-cand-0-79
  source 1..80: mol_type = other DNA
ttttcgattcttaagacgagcttgctccgatagagtcggaaatggcggaacttgtttgtgatgcactggctaccttaacc

SEQ ID NO: 5576 - DNA, 80 bp, synthetic construct
  misc_feature 1..80: note = Synthetic: >NC_007555.1-cand-40-119
  source 1..80: mol_type = other DNA
aatggcggaacttgtttgtgatgcactggctaccttaacccgcaacacatatggtgacaacgatgaatcagctaaatttt

SEQ ID NO: 5577 - DNA, 80 bp, synthetic construct
  misc_feature 1..80: note = Synthetic: >NC_007555.1-cand-130-209
  source 1..80: mol_type = other DNA
tcgaactatgataagagattctggtctatacggcaatattgaaaactggagagccgcattctacagagagcgattgccaa

SEQ ID NO: 5578 - DNA, 80 bp, synthetic construct
  misc_feature 1..80: note = Synthetic: >NC_007555.1-cand-220-299
  source 1..80: mol_type = other DNA
acactcaactgtatcaattcaattagataatttagaacgcgaggtgctaaaaattagagctgaaggattttgtcagggat

SEQ ID NO: 5579 - DNA, 80 bp, synthetic construct
  misc_feature 1..80: note = Synthetic: >NC_007555.1-cand-310-389
  source 1..80: mol_type = other DNA
ggagagaactttgaatgcatttgatttgagtgatgatggcaaaggaaatacaataattaaaccaacaacacatctttcta

SEQ ID NO: 5580 - DNA, 80 bp, synthetic construct
  misc_feature 1..80: note = Synthetic: >NC_011501.2-cand-530-609
  source 1..80: mol_type = other DNA
gaaatcgcgctatgagcaattggagcaaaggtttgaatcattgaaatccagggtaaatgaaaaatataataattgggtgt

SEQ ID NO: 5581 - DNA, 80 bp, synthetic construct
  misc_feature 1..80: note = Synthetic: >NC_011501.2-cand-620-699
  source 1..80: mol_type = other DNA
aaaaatgaatgaaaatatgcattctcttcaaaatgtcatctctcaacagcaagcacatatagctgagcttcaagtgtaca

SEQ ID NO: 5582 - DNA, 80 bp, synthetic construct
  misc_feature 1..80: note = Synthetic: >NC_011501.2-cand-710-789
  source 1..80: mol_type = other DNA
agaacgtgatttgcaaaataaaattggatcccttacttcttcgattgaatggtatttaagatcaatggaattagaccctg

SEQ ID NO: 5583 - DNA, 80 bp, synthetic construct
  misc_feature 1..80: note = Synthetic: >NC_011501.2-cand-800-879
  source 1..80: mol_type = other DNA
agacattgaacagcaaattaactcaattgatgcgataaatccattgcacgcttttgatgacttagaatcagtaatacgta

SEQ ID NO: 5584 - DNA, 80 bp, synthetic construct
  misc_feature 1..80: note = Synthetic: >NC_011501.2-cand-890-969
  source 1..80: mol_type = other DNA
tgattatgacaaattattccttatgttcaaaggattaatacagagatgtaattatcaatattcatttggttgcgaataac

SEQ ID NO: 5585 - DNA, 80 bp, synthetic construct
  misc_feature 1..80: note = Synthetic: >NC_011501.2-cand-1000-1079
  source 1..80: mol_type = other DNA
agtgttagtatgttgtcatctatgcataaccctctatgagcacaatagttaaaagctaacactgtcaaaaacctaaatgg

SEQ ID NO: 5586 - DNA, 80 bp, synthetic construct
  misc_feature 1..80: note = Synthetic: >NC_011502.2-cand-120-199
  source 1..80: mol_type = other DNA
attaaagctatgctgacagctaaagtagacaaaaaggacatggataagttttatgattcaattatttatggaatagcacc

SEQ ID NO: 5587 - DNA, 80 bp, synthetic construct
  misc_feature 1..80: note = Synthetic: >NC_011502.2-cand-200-279
  source 1..80: mol_type = other DNA
gcctcctcaatttaagaaacggtataatactaatgataattcaagaggcatgaattttgaaacaattatgtttactaagg

SEQ ID NO: 5588 - DNA, 80 bp, synthetic construct
  misc_feature 1..80: note = Synthetic: >NC_011502.2-cand-290-369
  source 1..80: mol_type = other DNA
gatatgtgaagctctaaattcattgaaagtgacgcaagcaaacgtctctaatgtattatcacgagtagtatcaataaggc

SEQ ID NO: 5589 - DNA, 80 bp, synthetic construct
  misc_feature 1..80: note = Synthetic: >NC_011502.2-cand-380-459
  source 1..80: mol_type = other DNA
tttggtgatacgtaaagaaaatccacaggatattctatttcattcaaaagatttacttttgaaatcaacactgattgcta

SEQ ID NO: 5590 - DNA, 80 bp, synthetic construct
  misc_feature 1..80: note = Synthetic: >NC_011502.2-cand-460-539
  source 1..80: mol_type = other DNA
ttggacagtctaaagaaattgaaactacaataactgcagaaggaggagaaattgtatttcaaaacgctgccttcaccatg

SEQ ID NO: 5591 - DNA, 80 bp, synthetic construct
  misc_feature 1..80: note = Synthetic: >NC_011502.2-cand-520-599
  source 1..80: mol_type = other DNA
aaaacgctgccttcaccatgtggaaactaacttatttagaacatcaattgatgccaattctggatcagaattttattgaa

SEQ ID NO: 5592 - DNA, 80 bp, synthetic construct
  misc_feature 1..80: note = Synthetic: >NC_011502.2-cand-610-689
  source 1..80: mol_type = other DNA
cattgaacgaagataaaccaatttcagatgttcatgttaaagaattagtcgctgaacttcgatggcaatataacaagttt

SEQ ID NO: 5593 - DNA, 80 bp, synthetic construct
  misc_feature 1..80: note = Synthetic: >NC_011502.2-cand-700-779
  source 1..80: mol_type = other DNA
cacatggtaagggtcattatagaattgtaaagtattcatcagttgctaatcacgctgacagagtatatgcaactttcaag

SEQ ID NO: 5594 - DNA, 80 bp, synthetic construct
  misc_feature 1..80: note = Synthetic: >NC_011502.2-cand-790-869
  source 1..80: mol_type = other DNA
aaactggagttaataatgattttaacctacttgatcaaagaattatttggcaaaactggtatgcatttacatcatcaatg

SEQ ID NO: 5595 - DNA, 80 bp, synthetic construct
  misc_feature 1..80: note = Synthetic: >NC_011502.2-cand-880-959
  source 1..80: mol_type = other DNA
atacacttgacgtgtgtaaaaggttgcttttccaaaaaatgaaaccagaaaaaaatccatttaaagggctgtcaacggat

SEQ ID NO: 5596 - DNA, 80 bp, synthetic construct
  misc_feature 1..80: note = Synthetic: >NC_012776.1-cand-2680-2759
  source 1..80: mol_type = other DNA
ccataccaatcatgttgaggagctctgacctcctgcccaattgatcctgactcagattccccctatagactccagggcct

SEQ ID NO: 5597 - DNA, 80 bp, synthetic construct
  misc_feature 1..80: note = Synthetic: >NC_012776.1-cand-2770-2849
  source 1..80: mol_type = other DNA
tcctggtcaccttctttttgagtttctccagatctgttgccagaatcatcaactcatcagaggttagtttcccaacacca

SEQ ID NO: 5598 - DNA, 80 bp, synthetic construct
  misc_feature 1..80: note = Synthetic: >NC_012776.1-cand-2850-2929
  source 1..80: mol_type = other DNA
accctgttcttcttattgctcgatttaaggtccaccaagccatccactgtctggttcaattctctcaatttcattaggtc

SEQ ID NO: 5599 - DNA, 80 bp, synthetic construct
  misc_feature 1..80: note = Synthetic: >NC_012776.1-cand-2930-3009
  source 1..80: mol_type = other DNA
ctcgtcattccttttatcctttctcatgagtctctggacatcggacaccatagagaaatcaaggccgttgatcagactca

SEQ ID NO: 5600 - DNA, 80 bp, synthetic construct
  misc_feature 1..80: note = Synthetic: >NC_012776.1-cand-2970-3049
  source 1..80: mol_type = other DNA
tcggacaccatagagaaatcaaggccgttgatcagactcacggcatccttgacaactttggctctcacgtccgtgcaaaa

SEQ ID NO: 5601 - DNA, 80 bp, synthetic construct
  misc_feature 1..80: note = Synthetic: >NC_012776.1-cand-3090-3169
  source 1..80: mol_type = other DNA
gatttcacttcttttgattgggacatattgtgagacaagatgtcgacaagcgcagaagagaaagctcactggaggaagta

SEQ ID NO: 5602 - DNA, 80 bp, synthetic construct
  misc_feature 1..80: note = Synthetic: >NC_012777.1-cand-0-79
  source 1..80: mol_type = other DNA
attggactacttttctagtacctcacttcagtgagagtgacatgggtcagagacattcctctggctccggccaacccaac

SEQ ID NO: 5603 - DNA, 80 bp, synthetic construct
  misc_feature 1..80: note = Synthetic: >NC_012777.1-cand-80-159
  source 1..80: mol_type = other DNA
cccaagccgagtgacagcgatcatgaagcgagaaggtcagagcttcactcggacgcctcccatctcggacctctgaactg

SEQ ID NO: 5604 - DNA, 80 bp, synthetic construct
  misc_feature 1..80: note = Synthetic: >NC_012777.1-cand-160-239
  source 1..80: mol_type = other DNA
caaatcttgctggaagtcaaagaaggcactggtgaagtgctatgatcactacctctgtctaaactgcttaagccttctaa

SEQ ID NO: 5605 - DNA, 80 bp, synthetic construct
  misc_feature 1..80: note = Synthetic: >NC_012777.1-cand-240-319
  source 1..80: mol_type = other DNA
tgggcatcaccccaagatgtcccttctgttacagagagctacccaaaaatctggaccttgcagaggcaccaagcgcacca

SEQ ID NO: 5606 - DNA, 80 bp, synthetic construct
  misc_feature 1..80: note = Synthetic: >NC_012777.1-cand-270-349
  source 1..80: mol_type = other DNA
acagagagctacccaaaaatctggaccttgcagaggcaccaagcgcaccacccctctgaagacccgcagcgaaacccaac

SEQ ID NO: 5607 - DNA, 80 bp, synthetic construct
  misc_feature 1..80: note = Synthetic: >NC_012777.1-cand-400-479
  source 1..80: mol_type = other DNA
tccacagaccacaccaatcatcgatgcagaagatcattcaatctcaatagtggatgtcccctctctcaatagtctacagc

SEQ ID NO: 5608 - DNA, 80 bp, synthetic construct
  misc_feature 1..80: note = Synthetic: >NC_012777.1-cand-480-559
  source 1..80: mol_type = other DNA
atactccaccaagtctcattccaccaccaggatgagcaatcaccagatccttgagatgcttgctgtacgctaatgtgtag

SEQ ID NO: 5609 - DNA, 80 bp, synthetic construct
  misc_feature 1..80: note = Synthetic: >NC_012777.1-cand-560-639
  source 1..80: mol_type = other DNA
gaactgagcttgacccatccgattacccctgagaaacagtccaccaaatcatgctccgttaggcccacatctttgaaaca

SEQ ID NO: 5610 - DNA, 80 bp, synthetic construct
  misc_feature 1..80: note = Synthetic: >NC_012777.1-cand-640-719
  source 1..80: mol_type = other DNA
cttgattaggtccaccctagacaaatcaacctcatgtttttgagactttttcagcattgtctctatccctttctttatta

SEQ ID NO: 5611 - DNA, 80 bp, synthetic construct
  misc_feature 1..80: note = Synthetic: >NC_012777.1-cand-720-799
  source 1..80: mol_type = other DNA
aagccatgtgctctgggtatagctcagccaagaatatcataacatctttagtatcaagactgacttttagctgtgcaact

SEQ ID NO: 5612 - DNA, 80 bp, synthetic construct
  misc_feature 1..80: note = Synthetic: >NC_012777.1-cand-5900-5979
  source 1..80: mol_type = other DNA
ctaagtctgaataaatgctttttaagatctctctgagttgacatcactgacacaagtctatctgagactgtggtgaatga

SEQ ID NO: 5613 - DNA, 80 bp, synthetic construct
  misc_feature 1..80: note = Synthetic: >NC_012777.1-cand-5980-6059
  source 1..80: mol_type = other DNA
ctgcccgcaccagacagactcatcatcatcccctctaggaaactcattctttaatgaaattagatgacttaacctaacaa

SEQ ID NO: 5614 - DNA, 80 bp, synthetic construct
  misc_feature 1..80: note = Synthetic: >NC_012777.1-cand-6060-6139
  source 1..80: mol_type = other DNA
catcaagacctaggagcagtttccttcttgtgttcattagtttgatactctttgatttattcaacatgctaatcattcca

SEQ ID NO: 5615 - DNA, 80 bp, synthetic construct
  misc_feature 1..80: note = Synthetic: >NC_012777.1-cand-6110-6189
  source 1..80: mol_type = other DNA
tttgatttattcaacatgctaatcattccacatgattttctatgataatgacggtcgttcccaaccttttcggccttatc

SEQ ID NO: 5616 - DNA, 80 bp, synthetic construct
  misc_feature 1..80: note = Synthetic: >NC_012777.1-cand-6220-6299
  source 1..80: mol_type = other DNA
gtcaaaataaatgaaattggtgaatgatgttgcttctttgaaatctcgcagcaactcccacttggattctggtgctgatg

SEQ ID NO: 5617 - DNA, 80 bp, synthetic construct
  misc_feature 1..80: note = Synthetic: >NC_012777.1-cand-6300-6379
  source 1..80: mol_type = other DNA
aaactccctgatctaagtacaagtcacagaattctttcagcaacctttctttgtctgtcatcatgaataagggtgggatg

SEQ ID NO: 5618 - DNA, 80 bp, synthetic construct
  misc_feature 1..80: note = Synthetic: >NC_012777.1-cand-6380-6459
  source 1..80: mol_type = other DNA
actcccttcttcaacttcgctttgaattctaagaagttctccactatcttggaattaacctctgacaagggaatgtctgg

SEQ ID NO: 5619 - DNA, 80 bp, synthetic construct
  misc_feature 1..80: note = Synthetic: >NC_012777.1-cand-6460-6539
  source 1..80: mol_type = other DNA
gcgcacaccttcaacacacagcctcattatattctcgaaatgctcacctgaattattcttaagcagattgaatgcgtcta

SEQ ID NO: 5620 - DNA, 80 bp, synthetic construct
  misc_feature 1..80: note = Synthetic: >NC_012777.1-cand-6560-6639
  source 1..80: mol_type = other DNA
ttgcctttgagtgattctgacagcctaatatactctgactcttccaacatcgcctcattctcttgcacatactctaatag

SEQ ID NO: 5621 - DNA, 80 bp, synthetic construct
  misc_feature 1..80: note = Synthetic: >NC_012777.1-cand-6640-6719
  source 1..80: mol_type = other DNA
tctgaagattaaattcttaaatttgaacaccacccaatcaggaatggagttgttttcatacccactcctgcccaccacca

SEQ ID NO: 5622 - DNA, 80 bp, synthetic construct
  misc_feature 1..80: note = Synthetic: >NC_012777.1-cand-6730-6809
  source 1..80: mol_type = other DNA
agtgatccctgagtgttcaagatcacccctcagtgatgatagcttcttcatgtcattgttgtatttctgctcatactcta

SEQ ID NO: 5623 - DNA, 80 bp, synthetic construct
  misc_feature 1..80: note = Synthetic: >NC_012777.1-cand-6820-6899
  source 1..80: mol_type = other DNA
tctcacaaaacattctagtagaatcaacatgtttcctgacaccttgaatccgtctggagtgacacatggaagagaaggga

SEQ ID NO: 5624 - DNA, 80 bp, synthetic construct
  misc_feature 1..80: note = Synthetic: >NC_012777.1-cand-6890-6969
  source 1..80: mol_type = other DNA
agagaagggacaacaaatccattttctcttaagataagttccactgacttctcttcagtgttgtggatgcaaccattctc

SEQ ID NO: 5625 - DNA, 80 bp, synthetic construct
  misc_feature 1..80: note = Synthetic: >NC_012777.1-cand-6970-7049
  source 1..80: mol_type = other DNA
atcgcagatgtcaatctcaatacacgtggataatagcttgagaccctcaatcataatgaacttgggctctgtttggcaaa

SEQ ID NO: 5626 - DNA, 80 bp, synthetic construct
  misc_feature 1..80: note = Synthetic: >NC_012777.1-cand-7070-7149
  source 1..80: mol_type = other DNA
gctagtctctcatcattaggaaagtttcttgagataagctgcaggagttcattctttaatgagtccattgtgaattttgt

SEQ ID NO: 5627 - DNA, 80 bp, synthetic construct
  misc_feature 1..80: note = Synthetic: >NC_014361.1-cand-0-79
  source 1..80: mol_type = other DNA
cagcctcctggtaatactgagaaaaaacaagatttccatagtaaccccctattaggaatttgaggaactatacttagagt

SEQ ID NO: 5628 - DNA, 80 bp, synthetic construct
  misc_feature 1..80: note = Synthetic: >NC_014361.1-cand-2640-2719
  source 1..80: mol_type = other DNA
ggtagcaaaattagtatgacccatgtatttacatagaatatctttccaatacttaacatcctcctttattgactctgaaa

SEQ ID NO: 5629 - DNA, 80 bp, synthetic construct
  misc_feature 1..80: note = Synthetic: >NC_014361.1-cand-2730-2809
  source 1..80: mol_type = other DNA
tggacagtaccaaaccaacaacaaagcaatagtgactccatcctgtagtattctttctgttaataagtagtcactaacct

SEQ ID NO: 5630 - DNA, 80 bp, synthetic construct
  misc_feature 1..80: note = Synthetic: >NC_014361.1-cand-2810-2889
  source 1..80: mol_type = other DNA
gaaggcaagatctaagattatgctttggagtaaaattcaaaacataagcaaaccttgtaaaaatggtttcaggcaagagg

SEQ ID NO: 5631 - DNA, 80 bp, synthetic construct
  misc_feature 1..80: note = Synthetic: >NC_014361.1-cand-2890-2969
  source 1..80: mol_type = other DNA
tactcattcatagtcacaagacagggtgggaagatctggcttcttttgttcacatgcttcctttctaaatttactttaac

SEQ ID NO: 5632 - DNA, 80 bp, synthetic construct
  misc_feature 1..80: note = Synthetic: >NC_014361.1-cand-2970-3049
  source 1..80: mol_type = other DNA
actgccatccagatggtctcttaaattatctaaattagatactccctgtccaggctgcagctttttattaagtgctattt

SEQ ID NO: 5633 - DNA, 80 bp, synthetic construct
  misc_feature 1..80: note = Synthetic: >NC_014361.1-cand-3050-3129
  source 1..80: mol_type = other DNA
gacccttgacatcttcaaaaataactacaaactggtctattgcacatccaagttcaaagggcaatttatctgcaggacaa

SEQ ID NO: 5634 - DNA, 80 bp, synthetic construct
  misc_feature 1..80: note = Synthetic: >NC_014361.1-cand-3130-3209
  source 1..80: mol_type = other DNA
ttgacatttaatgtttttcctcccaggaaattcatcagagcagctgcaaaagtagttttcccactattgattggtcctct

SEQ ID NO: 5635 - DNA, 80 bp, synthetic construct
  misc_feature 1..80: note = Synthetic: >NC_014361.1-cand-3210-3289
  source 1..80: mol_type = other DNA
aaaaaggcaatttctttttttagggacattttctacaattaactttaagattttggtgactacttcatctatattttcaa

SEQ ID NO: 5636 - DNA, 80 bp, synthetic construct
  misc_feature 1..80: note = Synthetic: >NC_014361.1-cand-3290-3369
  source 1..80: mol_type = other DNA
ataagcaagaataccaagcaactcccgccatatactgaagaattttaatttgaccaaactcatcagtaagtttctcaaac

SEQ ID NO: 5637 - DNA, 80 bp, synthetic construct
  misc_feature 1..80: note = Synthetic: >NC_014361.1-cand-3380-3459
  source 1..80: mol_type = other DNA
atctttcctccagtaattcttttctagtactttcaattaactttaatctctgttttgccatcaccacatctgctgcttgt

SEQ ID NO: 5638 - DNA, 80 bp, synthetic construct
  misc_feature 1..80: note = Synthetic: >NC_014361.1-cand-3460-3539
  source 1..80: mol_type = other DNA
tggcaggcagttttttgagttttgcactccttaaacagctttgcatttttatgatgtaagctatggtaattatagtgagc

SEQ ID NO: 5639 - DNA, 80 bp, synthetic construct
  misc_feature 1..80: note = Synthetic: >NC_014361.1-cand-3540-3619
  source 1..80: mol_type = other DNA
ttttagagcttttttagtgcatttagagcatatgcttggctcttctgcaaagtctaagtaatgagccataattaacaggg

SEQ ID NO: 5640 - DNA, 80 bp, synthetic construct
  misc_feature 1..80: note = Synthetic: >NC_014361.1-cand-3620-3699
  source 1..80: mol_type = other DNA
gatcatctagcctgttggtaactgcaaaatcagtgagaaggttccaattaaccacaggcttcccattttcttcattaaac

SEQ ID NO: 5641 - DNA, 80 bp, synthetic construct
  misc_feature 1..80: note = Synthetic: >NC_014361.1-cand-3700-3779
  source 1..80: mol_type = other DNA
tcatattcaaatattcctggcttgctttcctccagtagcttaaatggttcactgcacatacatctgtaacattctacttg

SEQ ID NO: 5642 - DNA, 80 bp, synthetic construct
  misc_feature 1..80: note = Synthetic: >NC_014361.1-cand-3780-3859
  source 1..80: mol_type = other DNA
tttaattactgctttgcataacaagaaactaacagtgcagtgtgttacacataaattcttaattgctgaaactctatgct

SEQ ID NO: 5643 - DNA, 80 bp, synthetic construct
  misc_feature 1..80: note = Synthetic: >NC_014361.1-cand-3860-3939
  source 1..80: mol_type = other DNA
tgccaggagtcattaggaataccatgctcccttcctgaaaagagtgcctacttttaaattcaggattaaatttatcaagc

SEQ ID NO: 5644 - DNA, 80 bp, synthetic construct
  misc_feature 1..80: note = Synthetic: >NC_014396.1-cand-2230-2309
  source 1..80: mol_type = other DNA
gaagatcaaaccaagttcttaaagataaaaactgtctcaagtgagctatcatgcagggagggccagagttattggactgg

SEQ ID NO: 5645 - DNA, 80 bp, synthetic construct
  misc_feature 1..80: note = Synthetic: >NC_014396.1-cand-2260-2339
  source 1..80: mol_type = other DNA
actgtctcaagtgagctatcatgcagggagggccagagttattggactgggtcctttagccctaaatgtttgagctcaag

SEQ ID NO: 5646 - DNA, 80 bp, synthetic construct
  misc_feature 1..80: note = Synthetic: >NC_014396.1-cand-2270-2349
  source 1..80: mol_type = other DNA
gtgagctatcatgcagggagggccagagttattggactgggtcctttagccctaaatgtttgagctcaaggagatgccac

SEQ ID NO: 5647 - DNA, 80 bp, synthetic construct
  misc_feature 1..80: note = Synthetic: >NC_014396.1-cand-2480-2559
  source 1..80: mol_type = other DNA
ggtgtgggtgtttcaatgtgaacccatcttgcttatttgtgcacacgtatctgcagtcagttagaaaagaggcccttaga

SEQ ID NO: 5648 - DNA, 80 bp, synthetic construct
  misc_feature 1..80: note = Synthetic: >NC_014396.1-cand-2500-2579
  source 1..80: mol_type = other DNA
aacccatcttgcttatttgtgcacacgtatctgcagtcagttagaaaagaggcccttagagtttttaactgtatcgactg

SEQ ID NO: 5649 - DNA, 80 bp, synthetic construct
  misc_feature 1..80: note = Synthetic: >NC_014396.1-cand-2580-2659
  source 1..80: mol_type = other DNA
ggtgcataaactcactctagagatcacagactttgatggctctgtttcaacaatagacttgggagcatcatctagccgtt

SEQ ID NO: 5650 - DNA, 80 bp, synthetic construct
  misc_feature 1..80: note = Synthetic: >NC_014396.1-cand-2670-2749
  source 1..80: mol_type = other DNA
gggttcagttagcctctcactggacgcagagggcatttcaggctcaaatagcttttctttcattgagagcccaggcaaag

SEQ ID NO: 5651 - DNA, 80 bp, synthetic construct
  misc_feature 1..80: note = Synthetic: >NC_014396.1-cand-2720-2799
  source 1..80: mol_type = other DNA
gcttttctttcattgagagcccaggcaaagggtatgcaattgttgatgagccattctcagaaattcctcggcaagggttc

SEQ ID NO: 5652 - DNA, 80 bp, synthetic construct
  misc_feature 1..80: note = Synthetic: >NC_014396.1-cand-2820-2899
  source 1..80: mol_type = other DNA
ttcagagtcctcagtcctgagtgctcatgaatcatgccttagggcaccaaaccttatctcatacaagcccatgatagatc

SEQ ID NO: 5653 - DNA, 80 bp, synthetic construct
  misc_feature 1..80: note = Synthetic: >NC_014396.1-cand-2870-2949
  source 1..80: mol_type = other DNA
accttatctcatacaagcccatgatagatcaattggagtgcacaacaaatctgattgatccctttgttgtctttgagagg

SEQ ID NO: 5654 - DNA, 80 bp, synthetic construct
  misc_feature 1..80: note = Synthetic: >NC_014396.1-cand-2980-3059
  source 1..80: mol_type = other DNA
acctttgcagcttcaaaaggaaatagaggtgttcaagctttctctaagggctctgtacaagctgatctaactctgatgtt

SEQ ID NO: 5655 - DNA, 80 bp, synthetic construct
  misc_feature 1..80: note = Synthetic: >NC_014396.1-cand-3060-3139
  source 1..80: mol_type = other DNA
tgacaattttgaggtggactttgtgggagcagccgtatcttgtgatgccgccttcttaaatttgacaggttgctattctt

SEQ ID NO: 5656 - DNA, 80 bp, synthetic construct
  misc_feature 1..80: note = Synthetic: >NC_014396.1-cand-3150-3229
  source 1..80: mol_type = other DNA
ggccagggtctgcctgtctatcacatccacaggaactggatctctctctgcccacaataaggatgggtctctgcatatag

SEQ ID NO: 5657 - DNA, 80 bp, synthetic construct
  misc_feature 1..80: note = Synthetic: >NC_014396.1-cand-3220-3299
  source 1..80: mol_type = other DNA
ctgcatatagtccttccatcagagaatggaacaaaagaccagtgtcagatactacacttcactgtgcctgaagtagagga

SEQ ID NO: 5658 - DNA, 80 bp, synthetic construct
  misc_feature 1..80: note = Synthetic: >NC_014396.1-cand-3270-3349
  source 1..80: mol_type = other DNA
actacacttcactgtgcctgaagtagaggaggagtttatgtactcttgtgatggagatgagcggcctctgttggtgaagg

SEQ ID NO: 5659 - DNA, 80 bp, synthetic construct
  misc_feature 1..80: note = Synthetic: >NC_014396.1-cand-3400-3479
  source 1..80: mol_type = other DNA
gaatcaacagttgtgaatccaaaatctggatcttggaatttctttgactggttttctggactcatgagttggtttggagg

SEQ ID NO: 5660 - DNA, 80 bp, synthetic construct
  misc_feature 1..80: note = Synthetic: >NC_021545.1-cand-320-399
  source 1..80: mol_type = other DNA
ttattcagtatatatccctaatgaaacgacgaaattgactcctgtgtcaattgatgcaagaccaatccagacttaccatc

SEQ ID NO: 5661 - DNA, 80 bp, synthetic construct
  misc_feature 1..80: note = Synthetic: >NC_021545.1-cand-400-479
  source 1..80: mol_type = other DNA
ctaaagctttgatgtacaaagacactgcgattcttccctctcatagagatgagatatcagatcaatatggtactgatgag

SEQ ID NO: 5662 - DNA, 80 bp, synthetic construct
  misc_feature 1..80: note = Synthetic: >NC_021545.1-cand-480-559
  source 1..80: mol_type = other DNA
atattatttgattctcacatgttcaatgatatcagtcaagctcaaatacgagattttgacacgtacatattagataaatc

SEQ ID NO: 5663 - DNA, 80 bp, synthetic construct
  misc_feature 1..80: note = Synthetic: >NC_021545.1-cand-570-649
  source 1..80: mol_type = other DNA
caaaacacgctaccaaatttagagtttatttccgcactggaaaaagaagtgaaccctttcaatatacacaacacactatg

SEQ ID NO: 5664 - DNA, 80 bp, synthetic construct
  misc_feature 1..80: note = Synthetic: >NC_021545.1-cand-650-729
  source 1..80: mol_type = other DNA
tcttaatttcggtcaaaaagagtattacaacataattgcagatcgtacgaatctttctttccaacagaggagacattcag

SEQ ID NO: 5665 - DNA, 80 bp, synthetic construct
  misc_feature 1..80: note = Synthetic: >NC_021545.1-cand-730-809
  source 1..80: mol_type = other DNA
ttcaatttgacaatgttgtcgttgacggagtggctagaactgccagggtttcactacgacttcatccatttgacagccaa

SEQ ID NO: 5666 - DNA, 80 bp, synthetic construct
  misc_feature 1..80: note = Synthetic: >NC_021545.1-cand-810-889
  source 1..80: mol_type = other DNA
ctgttagacatagtaagatttaacgttatccaagaccagcccttggctgacattttaatggaatatcaattagtggcagc

SEQ ID NO: 5667 - DNA, 80 bp, synthetic construct
  misc_feature 1..80: note = Synthetic: >NC_021545.1-cand-890-969
  source 1..80: mol_type = other DNA
agatggatttgtcgccactccaaaatttcgtgttgaccgtgacgccagactaatcgcagatgtaagatctccagtcatgg

SEQ ID NO: 5668 - DNA, 80 bp, synthetic construct
  misc_feature 1..80: note = Synthetic: >NC_021545.1-cand-970-1049
  source 1..80: mol_type = other DNA
ctagattgtgcgaattgtcgccatattttcatagaacacgaatattgtcttcaatgaccgattttacaccactatggaaa

SEQ ID NO: 5669 - DNA, 80 bp, synthetic construct
  misc_feature 1..80: note = Synthetic: >NC_021545.1-cand-1060-1139
  source 1..80: mol_type = other DNA
tctcaagttctatagataacgctaaagatgcaatttatcgcatggctgaaatttcttttaccgtcgcagacgccacaacg

SEQ ID NO: 5670 - DNA, 80 bp, synthetic construct
  misc_feature 1..80: note = Synthetic: >NC_021545.1-cand-1150-1229
  source 1..80: mol_type = other DNA
cgtctgtgaatgtagcctccgctcagcagactcttttgacattactgaatttgtccctttttcgtttcgaaattgatccg

SEQ ID NO: 5671 - DNA, 80 bp, synthetic construct
  misc_feature 1..80: note = Synthetic: >NC_021545.1-cand-1240-1319
  source 1..80: mol_type = other DNA
aatcaaatttcggctccgctgtctctgcagctctaatgctgatcgtatttccaactgatgagcaatcaatgtctaatatc

SEQ ID NO: 5672 - DNA, 80 bp, synthetic construct
  misc_feature 1..80: note = Synthetic: >NC_021545.1-cand-1320-1399
  source 1..80: mol_type = other DNA
acttttgacaatttgtgtaatttggtattcaatgagttgattgcttggaccgttgatcggccgacattcgtcaagagaac

SEQ ID NO: 5673 - DNA, 80 bp, synthetic construct
  misc_feature 1..80: note = Synthetic: >NC_021545.1-cand-1400-1479
  source 1..80: mol_type = other DNA
tggtatgacaaacgctttcgaagcgaatgtgaatattggtggtggtaatatgactagagacataattgcgtacatgaggt

SEQ ID NO: 5674 - DNA, 80 bp, synthetic construct
  misc_feature 1..80: note = Synthetic: >NC_021545.1-cand-1480-1559
  source 1..80: mol_type = other DNA
ttgtgttactacgcagaccatgggctgtttttcaacgggcgtatgatgatagatacgtgtctgacattatggtgccaaat

SEQ ID NO: 5675 - DNA, 80 bp, synthetic construct
  misc_feature 1..80: note = Synthetic: >NC_021545.1-cand-1560-1639
  source 1..80: mol_type = other DNA
atcgatgaagccaacgtcaatgatcaatgctacgtcgccattaacaacctgtttaatggattgatacaagcagcacaaag

SEQ ID NO: 5676 - DNA, 80 bp, synthetic construct
  misc_feature 1..80: note = Synthetic: >NC_026438.1-cand-1260-1339
  source 1..80: mol_type = other DNA
atagggcaaaccagcgactgaaccccatgcaccaactcttgaggcatttccaaaaagatgcaaaagtgcttttccagaac

SEQ ID NO: 5677 - DNA, 80 bp, synthetic construct
  misc_feature 1..80: note = Synthetic: >NC_026438.1-cand-1380-1459
  source 1..80: mol_type = other DNA
gaatactgcccgacatgaccccaagcacggagatgtcgctgagagggataagagtcagcaaaatgggagtagatgaatac

SEQ ID NO: 5678 - DNA, 80 bp, synthetic construct
  misc_feature 1..80: note = Synthetic: >NC_026438.1-cand-1460-1539
  source 1..80: mol_type = other DNA
tccagcacggagagagtggtagtgagtattgaccgatttttaagggttagagatcaaagagggaacgtactattgtctcc

SEQ ID NO: 5679 - DNA, 80 bp, synthetic construct
  misc_feature 1..80: note = Synthetic: >NC_026438.1-cand-1540-1619
  source 1..80: mol_type = other DNA
cgaagaagtcagtgaaacgcaaggaactgagaagttgacaataacttattcgtcatcaatgatgtgggagatcaatggcc

SEQ ID NO: 5680 - DNA, 80 bp, synthetic construct
  misc_feature 1..80: note = Synthetic: >NC_026438.1-cand-1620-1699
  source 1..80: mol_type = other DNA
ctgagtcagtgctagtcaacacttatcaatggataatcaggaactgggaaattgtgaaaattcaatggtcacaagatccc

SEQ ID NO: 5681 - DNA, 80 bp, synthetic construct
  misc_feature 1..80: note = Synthetic: >NC_026438.1-cand-1700-1779
  source 1..80: mol_type = other DNA
acaatgttatacaacaaaatggaatttgaaccatttcagtctcttgtccctaaggcaaccagaagccggtacagtggatt

SEQ ID NO: 5682 - DNA, 80 bp, synthetic construct
  misc_feature 1..80: note = Synthetic: >NC_026438.1-cand-1780-1859
  source 1..80: mol_type = other DNA
cgtaaggacactgttccagcaaatgcgggatgtgcttgggacatttgacactgtccaaataataaaacttctcccctttg

SEQ ID NO: 5683 - DNA, 80 bp, synthetic construct
  misc_feature 1..80: note = Synthetic: >NC_026438.1-cand-1870-1949
  source 1..80: mol_type = other DNA
accagaacagagtaggatgcaattttcctcattgactgtgaatgtgagaggatcagggttgaggatactggtaagaggca

SEQ ID NO: 5684 - DNA, 80 bp, synthetic construct
  misc_feature 1..80: note = Synthetic: >NC_026438.1-cand-1950-2029
  source 1..80: mol_type = other DNA
attctccagtattcaattacaacaaggcaaccaaacgacttacagttcttggaaaggatgcaggtgcattgactgaagat

SEQ ID NO: 5685 - DNA, 80 bp, synthetic construct
  misc_feature 1..80: note = Synthetic: >NC_026438.1-cand-2050-2129
  source 1..80: mol_type = other DNA
ggtggagtctgctgtcctgagaggatttctcattttgggcaaagaagacaagagatatggcccagcattaagcatcaatg

SEQ ID NO: 5686 - DNA, 80 bp, synthetic construct
  misc_feature 1..80: note = Synthetic: >NC_026438.1-cand-2100-2179
  source 1..80: mol_type = other DNA
agagatatggcccagcattaagcatcaatgaactgagcaatcttgcaaaaggagagaaggctaatgtgctaattgggcaa

SEQ ID NO: 5687 - DNA, 80 bp, synthetic construct
  misc_feature 1..80: note = Synthetic: >NC_027026.1-cand-10-89
  source 1..80: mol_type = other DNA
atggcttccaagccattccaagttgagtcttgcgacttcatgtttgaagtccatgttctccacatgtgctacctcagggt

SEQ ID NO: 5688 - DNA, 80 bp, synthetic construct
  misc_feature 1..80: note = Synthetic: >NC_027026.1-cand-90-169
  source 1..80: mol_type = other DNA
agcaccgagagaacagtttcttgatgactgtactataagtgcagttaccaaatattatttgcaccacgtgcccctacata

SEQ ID NO: 5689 - DNA, 80 bp, synthetic construct
  misc_feature 1..80: note = Synthetic: >NC_027026.1-cand-210-289
  source 1..80: mol_type = other DNA
gctgtcccggttattcgggacggccggttccccctcactggattcgcagtccgctttcaaggagcttttcggctttgaca

SEQ ID NO: 5690 - DNA, 80 bp, synthetic construct
  misc_feature 1..80: note = Synthetic: >NC_027026.1-cand-250-329
  source 1..80: mol_type = other DNA
gattcgcagtccgctttcaaggagcttttcggctttgacaccgatgagcaaatgccattgtcccttgaagaattggccaa

SEQ ID NO: 5691 - DNA, 80 bp, synthetic construct
  misc_feature 1..80: note = Synthetic: >NC_027026.1-cand-330-409
  source 1..80: mol_type = other DNA
attgcaaggcgaaatcaccgcctcgcttcaaatgaacaataaccaattcgttgctaaacatggtaaggccaaggtgcagg

SEQ ID NO: 5692 - DNA, 80 bp, synthetic construct
  misc_feature 1..80: note = Synthetic: >NC_035889.1-cand-5980-6059
  source 1..80: mol_type = other DNA
gggcgcataggcaggaatcccaacaaacctggagatgagtatctgtatggaggtgggtgcgcagagactgacgaagacca

SEQ ID NO: 5693 - DNA, 80 bp, synthetic construct
  misc_feature 1..80: note = Synthetic: >NC_035889.1-cand-6040-6119
  source 1..80: mol_type = other DNA
gcagagactgacgaagaccatgcacactggcttgaagcaagaatgctccttgacaatatttacctccaagatggcctcat

SEQ ID NO: 5694 - DNA, 80 bp, synthetic construct
  misc_feature 1..80: note = Synthetic: >NC_035889.1-cand-6130-6209
  source 1..80: mol_type = other DNA
tatcgacctgaggccgacaaagtagcagccattgagggagagttcaagcttaggacggagcaaaggaagacctttgtgga

SEQ ID NO: 5695 - DNA, 80 bp, synthetic construct
  misc_feature 1..80: note = Synthetic: >NC_035889.1-cand-6210-6289
  source 1..80: mol_type = other DNA
actcatgaaaagaggagatcttcctgtttggctggcctatcaggttgcatctgccggaataacctacacagatagaagat

SEQ ID NO: 5696 - DNA, 80 bp, synthetic construct
  misc_feature 1..80: note = Synthetic: >NC_035889.1-cand-6290-6369
  source 1..80: mol_type = other DNA
ggtgctttgatggcacgaccaacaacaccataatggaagacagtgtgccggcagaggtgtggaccagacacggagagaaa

SEQ ID NO: 5697 - DNA, 80 bp, synthetic construct
  misc_feature 1..80: note = Synthetic: >NC_035889.1-cand-6370-6449
  source 1..80: mol_type = other DNA
agagtgctcaaaccgaggtggatggacgccagagtttgttcagatcatgcggccctgaagtcattcaaggagtttgccgc

SEQ ID NO: 5698 - DNA, 80 bp, synthetic construct
  misc_feature 1..80: note = Synthetic: >NC_035889.1-cand-6450-6529
  source 1..80: mol_type = other DNA
tgggaaaagaggagcggcttttggagtgatggaagccctgggaacactgccaggacacatgacagagagattccaggaag

SEQ ID NO: 5699 - DNA, 80 bp, synthetic construct
  misc_feature 1..80: note = Synthetic: >NC_035889.1-cand-6530-6609
  source 1..80: mol_type = other DNA
ccattgacaacctcgctgtgctcatgcgggcagagactggaagcaggccttacaaagccgcggcggcccaattgccggag

SEQ ID NO: 5700 - DNA, 80 bp, synthetic construct
  misc_feature 1..80: note = Synthetic: >NC_035889.1-cand-6640-6719
  source 1..80: mol_type = other DNA
ctgggaacagtctcgctgggaatctttttcgtcttgatgaggaacaagggcatagggaagatgggctttggaatggtgac

SEQ ID NO: 5701 - DNA, 80 bp, synthetic construct
  misc_feature 1..80: note = Synthetic: >NC_035889.1-cand-6730-6809
  source 1..80: mol_type = other DNA
agcgcatggctcatgtggctctcggaaattgagccagccagaattgcatgtgtcctcattgttgtgttcctattgctggt

SEQ ID NO: 5702 - DNA, 80 bp, synthetic construct
  misc_feature 1..80: note = Synthetic: >NC_035889.1-cand-6770-6849
  source 1..80: mol_type = other DNA
gaattgcatgtgtcctcattgttgtgttcctattgctggtggtgctcatacctgagccagaaaagcaaagatctccccag

SEQ ID NO: 5703 - DNA, 80 bp, synthetic construct
  misc_feature 1..80: note = Synthetic: >NC_035889.1-cand-6850-6929
  source 1..80: mol_type = other DNA
gacaaccaaatggcaatcatcatcatggtagcagtaggtcttctgggcttgattaccgccaatgaactcggatggttgga

SEQ ID NO: 5704 - DNA, 80 bp, synthetic construct
  misc_feature 1..80: note = Synthetic: >NC_035889.1-cand-6930-7009
  source 1..80: mol_type = other DNA
gagaacaaagagtgacctaagccatctaatgggaaggagagaggagggagcaaccataggattctcaatggacattgacc

SEQ ID NO: 5705 - DNA, 80 bp, synthetic construct
  misc_feature 1..80: note = Synthetic: >NC_035889.1-cand-7010-7089
  source 1..80: mol_type = other DNA
tgcggccagcctcagcttgggccatctatgctgccttgacaactttcattaccccagccgtccaacatgcagtgaccact

SEQ ID NO: 5706 - DNA, 80 bp, synthetic construct
  misc_feature 1..80: note = Synthetic: >NC_035889.1-cand-7090-7169
  source 1..80: mol_type = other DNA
tcatacaacaactactccttaatggcgatggccacgcaagctggagtgttgtttggtatgggcaaagggatgccattcta

SEQ ID NO: 5707 - DNA, 80 bp, synthetic construct
  misc_feature 1..80: note = Synthetic: >NC_035889.1-cand-7180-7259
  source 1..80: mol_type = other DNA
tttggagtcccgctgctaatgataggttgctactcacaattaacacccctgaccctaatagtggccatcattttgctcgt

SEQ ID NO: 5708 - DNA, 80 bp, synthetic construct
  misc_feature 1..80: note = Synthetic: >NC_038299.1-cand-2490-2569
  source 1..80: mol_type = other DNA
atttcagtcaagtacgaaatattagcttaaaagggatgtctggttctttgcaggaagatgggcatctatcctcaagtgta

SEQ ID NO: 5709 - DNA, 80 bp, synthetic construct
  misc_feature 1..80: note = Synthetic: >NC_038299.1-cand-2570-2649
  source 1..80: mol_type = other DNA
acactcatagaagccatacgatttctgaacttttcacaagtgaaccccaatgttattgatatgtatgagcagactaaaca

SEQ ID NO: 5710 - DNA, 80 bp, synthetic construct
  misc_feature 1..80: note = Synthetic: >NC_038299.1-cand-2650-2729
  source 1..80: mol_type = other DNA
tcaaaaggcacaggctagaattgtaagaaagtaccagaggacagaggctgaccgaggctttttcattacaacactcccaa

SEQ ID NO: 5711 - DNA, 80 bp, synthetic construct
  misc_feature 1..80: note = Synthetic: >NC_038299.1-cand-2730-2809
  source 1..80: mol_type = other DNA
ctagagtacggctagagatcatagaggattattttgatgcaattgctaaggttgtccctgaagaatatatctcttacggt

SEQ ID NO: 5712 - DNA, 80 bp, synthetic construct
  misc_feature 1..80: note = Synthetic: >NC_038299.1-cand-2810-2889
  source 1..80: mol_type = other DNA
ggtgatagaaaagtattaaatattcagtcggcattagaaaaagctttacggtgggcatctggaatttctgagatagtaac

SEQ ID NO: 5713 - DNA, 80 bp, synthetic construct
  misc_feature 1..80: note = Synthetic: >NC_038299.1-cand-2890-2969
  source 1..80: mol_type = other DNA
aagtacaggaaagaagataaggtttaaacgaaagctaatgtatgtgagtgcagatgccacaaagtggtcacctggtgata

SEQ ID NO: 5714 - DNA, 80 bp, synthetic construct
  misc_feature 1..80: note = Synthetic: >NC_038299.1-cand-2970-3049
  source 1..80: mol_type = other DNA
actctgcgaagtttaggcgattcacacaggcaatttacgatgggcttagtgataacaaactaaaatgctgtgtagttgat

SEQ ID NO: 5715 - DNA, 80 bp, synthetic construct
  misc_feature 1..80: note = Synthetic: >NC_038299.1-cand-3050-3129
  source 1..80: mol_type = other DNA
gcattgaagaacatatatgaaacagagttcttcatgtcacgaaaattgcaccgttatatcgataatatggagtccaagtc

SEQ ID NO: 5716 - DNA, 80 bp, synthetic construct
  misc_feature 1..80: note = Synthetic: >NC_038299.1-cand-3170-3249
  source 1..80: mol_type = other DNA
gtttctgcccctgttaagggcaattggttgcagggcaatctgaacaaatgttcatccttatttggtgttgcagtatcact

SEQ ID NO: 5717 - DNA, 80 bp, synthetic construct
  misc_feature 1..80: note = Synthetic: >NC_038299.1-cand-3210-3289
  source 1..80: mol_type = other DNA
tgaacaaatgttcatccttatttggtgttgcagtatcacttttatttaaacgtgtatggttggaattattcccagacctt

SEQ ID NO: 5718 - DNA, 80 bp, synthetic construct
  misc_feature 1..80: note = Synthetic: >NC_038299.1-cand-3290-3369
  source 1..80: mol_type = other DNA
gaatgcttttttgagtttgcccaccattctgatgatgcactttttatatatggatatctggaaccggaagatgatggtac

SEQ ID NO: 5719 - DNA, 80 bp, synthetic construct
  misc_feature 1..80: note = Synthetic: >NC_038299.1-cand-3370-3449
  source 1..80: mol_type = other DNA
tgactggttcatgtatgtgtcgcagcagatacaagcagggcaatatcattggcatgcagtcaaccaggaaatgtggaaaa

SEQ ID NO: 5720 - DNA, 80 bp, synthetic construct
  misc_feature 1..80: note = Synthetic: >NC_038299.1-cand-3450-3529
  source 1..80: mol_type = other DNA
gtatgtttaatttacatgaacatctcctcctaatgggttccattaaggtatcaccaaagaaaacaacagtgtcacctact

SEQ ID NO: 5721 - DNA, 80 bp, synthetic construct
  misc_feature 1..80: note = Synthetic: >NC_038299.1-cand-3530-3609
  source 1..80: mol_type = other DNA
aatgccgagttcttgtcaacattttttgaaggttgtgcagtttcagttccctttgtcaagatcctcttaggttccttatc

SEQ ID NO: 5722 - DNA, 80 bp, synthetic construct
  misc_feature 1..80: note = Synthetic: >NC_038299.1-cand-3600-3679
  source 1..80: mol_type = other DNA
gttccttatcagacctacccggtcttggtttttttgatgacttggctgcagcacaaagcaggtgtgtgaaggccctagac

SEQ ID NO: 5723 - DNA, 80 bp, synthetic construct
  misc_feature 1..80: note = Synthetic: >NC_038299.1-cand-3690-3769
  source 1..80: mol_type = other DNA
gcccacaactagctcaactagctattgtgctatgtacaagtaaagttgaaagactatatggaacagctgatggtatgata

SEQ ID NO: 5724 - DNA, 80 bp, synthetic construct
  misc_feature 1..80: note = Synthetic: >NC_038311.1-cand-5210-5289
  source 1..80: mol_type = other DNA
gtgtgattactacaggtaatggaaaatttacaggtcttggtatacatgacagaattctaatcatcccaacacatgctgat

SEQ ID NO: 5725 - DNA, 80 bp, synthetic construct
  misc_feature 1..80: note = Synthetic: >NC_038311.1-cand-5290-5369
  source 1..80: mol_type = other DNA
ccaggtagagaggtccaagttaatggtgtccacactaaggttctagactcatatgatctttataatagagatggagttaa

SEQ ID NO: 5726 - DNA, 80 bp, synthetic construct
  misc_feature 1..80: note = Synthetic: >NC_038311.1-cand-5370-5449
  source 1..80: mol_type = other DNA
acttgaaataacggtcatacaattagatagaaatgaaaaatttagggacattagaaagtatatacctgaaacagaagacg

SEQ ID NO: 5727 - DNA, 80 bp, synthetic construct
  misc_feature 1..80: note = Synthetic: >NC_038311.1-cand-5450-5529
  source 1..80: mol_type = other DNA
attatccagaatgcaatttggcactttcagctaatcaagatgaaccaactataattaaagtaggagatgtagtgtcctat

SEQ ID NO: 5728 - DNA, 80 bp, synthetic construct
  misc_feature 1..80: note = Synthetic: >NC_038311.1-cand-5530-5609
  source 1..80: mol_type = other DNA
ggcaatattttgcttagtggaaatcaaacagccagaatgcttaaatataattaccccacaaaatcagggtattgtggagg

SEQ ID NO: 5729 - DNA, 80 bp, synthetic construct
  misc_feature 1..80: note = Synthetic: >NC_038311.1-cand-5610-5689
  source 1..80: mol_type = other DNA
ggtactatataaaattggtcaaattctaggtattcatgtgggtggaaatggaagggatggtttttcagctatgttactta

SEQ ID NO: 5730 - DNA, 80 bp, synthetic construct
  misc_feature 1..80: note = Synthetic: >NC_038311.1-cand-5690-5769
  source 1..80: mol_type = other DNA
gatcatactttacagatactcagggccaaattaaagtcaataagcatgctactgaatgtggtcttccaactatacacact

SEQ ID NO: 5731 - DNA, 80 bp, synthetic construct
  misc_feature 1..80: note = Synthetic: >NC_038311.1-cand-5770-5849
  source 1..80: mol_type = other DNA
cctagcaaaaccaaacttcagcctagtgtattttatgatgtcttcccaggctctaaggaaccagctgtgctcacagataa

SEQ ID NO: 5732 - DNA, 80 bp, synthetic construct
  misc_feature 1..80: note = Synthetic: >NC_038311.1-cand-5850-5929
  source 1..80: mol_type = other DNA
tgaccctagattggaagttaattttaaagaagctttattttctaaatataaaggtaatgtggaatgtaatttgaatgaac

SEQ ID NO: 5733 - DNA, 80 bp, synthetic construct
  misc_feature 1..80: note = Synthetic: >NC_038311.1-cand-5940-6019
  source 1..80: mol_type = other DNA
tgctattgcccattactcagcacaattaatgacactagatattgattccaggccaatagcattggaagatagcgtgtttg

SEQ ID NO: 5734 - DNA, 80 bp, synthetic construct
  misc_feature 1..80: note = Synthetic: >NC_038311.1-cand-6020-6099
  source 1..80: mol_type = other DNA
ggatagaaggacttgaggctttagatctaaacaccagtgcagggtttccttatgtcacaatgggtattaaaaagagagat

SEQ ID NO: 5735 - DNA, 80 bp, synthetic construct
  misc_feature 1..80: note = Synthetic: >NC_038311.1-cand-6110-6189
  source 1..80: mol_type = other DNA
acaaaacaaaagatatatccaggcttaaagaggctctagataaatatggagttgacttacccatgatcactttcttaaaa

SEQ ID NO: 5736 - DNA, 80 bp, synthetic construct
  misc_feature 1..80: note = Synthetic: >NC_038311.1-cand-6190-6269
  source 1..80: mol_type = other DNA
gacgagcttaggaaaaaggagaaaatttcaacaggtaaaactagagttatagaagcaagtagtataaatgacacaatatt

SEQ ID NO: 5737 - DNA, 80 bp, synthetic construct
  misc_feature 1..80: note = Synthetic: >NC_038311.1-cand-6270-6349
  source 1..80: mol_type = other DNA
atttagaactacttttggcaatttgttctctaagtttcatttaaacccaggcgttgttactggctctgcagtagggtgtg

SEQ ID NO: 5738 - DNA, 80 bp, synthetic construct
  misc_feature 1..80: note = Synthetic: >NC_038311.1-cand-6350-6429
  source 1..80: mol_type = other DNA
accctgagactttctggtctaaaatcccagttatgcttgatggagattgtataatggcttttgactatacaaattatgat

SEQ ID NO: 5739 - DNA, 80 bp, synthetic construct
  misc_feature 1..80: note = Synthetic: >NC_038311.1-cand-6430-6509
  source 1..80: mol_type = other DNA
ggtagtatacaccctgtctggtttcaagctctgaaaaaagttcttgaaaatttatctttccaatctaatttaattgatag

SEQ ID NO: 5740 - DNA, 80 bp, synthetic construct
  misc_feature 1..80: note = Synthetic: >NC_038374.1-cand-3180-3259
  source 1..80: mol_type = other DNA
taagtgctgtcatgacactgattgttcgaatgaaggtttacttgcatctgcaccacatctagaaagggtaacaggtttta

SEQ ID NO: 5741 - DNA, 80 bp, synthetic construct
  misc_feature 1..80: note = Synthetic: >NC_038374.1-cand-3260-3339
  source 1..80: mol_type = other DNA
atcaaattgactcagataaggtatatgatgatggtgctcctccttgtacagttaaatgttggtttgcaaaatctggagaa

SEQ ID NO: 5742 - DNA, 80 bp, synthetic construct
  misc_feature 1..80: note = Synthetic: >NC_038374.1-cand-3340-3419
  source 1..80: mol_type = other DNA
tggcttttcgggatattaaatggcaattggattgtggtagcagtacttgttgtcatcttgatcatttcgatcatactctt

SEQ ID NO: 5743 - DNA, 80 bp, synthetic construct
  misc_feature 1..80: note = Synthetic: >NC_038374.1-cand-3430-3509
  source 1..80: mol_type = other DNA
tgtcctcgtagggttcataagaaaagtgtgtaagtaaatatgggatttggctacacttgtaataccttaagtgcttaaat

SEQ ID NO: 5744 - DNA, 80 bp, synthetic construct
  misc_feature 1..80: note = Synthetic: >NC_038374.1-cand-3510-3589
  source 1..80: mol_type = other DNA
atatacaagctttgtttatatatatgctgactgagtgtttaacacctaataactatattaatatattcttttatatacta

SEQ ID NO: 5745 - DNA, 80 bp, synthetic construct
  misc_feature 1..80: note = Synthetic: >NC_038374.1-cand-3590-3669
  source 1..80: mol_type = other DNA
acccttaattgtgaaaaaaaacaaaatcttcactaacatataattcagttttctcttaccgaggcttttgttcctgcgga

SEQ ID NO: 5746 - DNA, 80 bp, synthetic construct
  misc_feature 1..80: note = Synthetic: >NC_038505.1-cand-0-79
  source 1..80: mol_type = other DNA
agtagactccttgagaagctactattacataagctgtgatgagcaacctccaagaagtacaggaaggtatcactcttcat

SEQ ID NO: 5747 - DNA, 80 bp, synthetic construct
  misc_feature 1..80: note = Synthetic: >NC_038505.1-cand-180-259
  source 1..80: mol_type = other DNA
gggcagctgtgtctgcattggagaataaactcgcagaactcaagaggcagttggcagatttggttgcagctcaaaaattg

SEQ ID NO: 5748 - DNA, 80 bp, synthetic construct
  misc_feature 1..80: note = Synthetic: >NC_038505.1-cand-350-429
  source 1..80: mol_type = other DNA
aatgctattgaccttgaagaaccgagtggccaaactgccgattggaaggctattggagcctatattctaggatttgtaat

SEQ ID NO: 5749 - DNA, 80 bp, synthetic construct
  misc_feature 1..80: note = Synthetic: >NC_038505.1-cand-430-509
  source 1..80: mol_type = other DNA
accaattatcctaaaggcattatatatgctttcaacaagagggaggcagactgttaaagagaacaaagggaccaggattc

SEQ ID NO: 5750 - DNA, 80 bp, synthetic construct
  misc_feature 1..80: note = Synthetic: >NC_038505.1-cand-510-589
  source 1..80: mol_type = other DNA
gattcaaggatgattcatcatttgaagaagtcaatggcatccgaaaacctaaacacttgtatgtgtcaatgcctactgca

SEQ ID NO: 5751 - DNA, 80 bp, synthetic construct
  misc_feature 1..80: note = Synthetic: >NC_038505.1-cand-630-709
  source 1..80: mol_type = other DNA
ttaggacaattgcatgtggcttatttcctgctcaaatcaaagctcggaacattataagtccagtcatgggtgtcattggc

SEQ ID NO: 5752 - DNA, 80 bp, synthetic construct
  misc_feature 1..80: note = Synthetic: >NC_038505.1-cand-680-759
  source 1..80: mol_type = other DNA
attataagtccagtcatgggtgtcattggctttggtcactttgtgaaggactggatggaaaggattgacaactttctagg

SEQ ID NO: 5753 - DNA, 80 bp, synthetic construct
  misc_feature 1..80: note = Synthetic: >NC_038505.1-cand-760-839
  source 1..80: mol_type = other DNA
agaagattgcccatttcttccaaaggctagggttcaatcagaggcattcatgtcaacgaatagggcatattttctaaaca

SEQ ID NO: 5754 - DNA, 80 bp, synthetic construct
  misc_feature 1..80: note = Synthetic: >NC_038505.1-cand-850-929
  source 1..80: mol_type = other DNA
agtggatgagtcgagaatacaggacattgtggatttaatacaagcagcagaggcaagttcagctacactattcaatgaca

SEQ ID NO: 5755 - DNA, 80 bp, synthetic construct
  misc_feature 1..80: note = Synthetic: >NC_038505.1-cand-920-999
  source 1..80: mol_type = other DNA
ttcaatgacattgcaacaccacattctgcatgggtttttgcatgtgccccagataggtgtcctccaactgcattatatgt

SEQ ID NO: 5756 - DNA, 80 bp, synthetic construct
  misc_feature 1..80: note = Synthetic: >NC_044932.1-cand-1530-1609
  source 1..80: mol_type = other DNA
gctaagaagatggcagcaaccctctcaggtgaccagagagtgggccttgtaccaagaaacggtgtcgatcactgggatgc

SEQ ID NO: 5757 - DNA, 80 bp, synthetic construct
  misc_feature 1..80: note = Synthetic: >NC_044932.1-cand-1610-1689
  source 1..80: mol_type = other DNA
atacaaaggagagagaatcgtgctctgggatgattatggcatgagcaaccccgtgtctgatgccctacggctccaagaac

SEQ ID NO: 5758 - DNA, 80 bp, synthetic construct
  misc_feature 1..80: note = Synthetic: >NC_044932.1-cand-1690-1769
  source 1..80: mol_type = other DNA
ttgccgacacatgccccctaacacttaattgtgacaggatagagaacaaagggaaagtctttgatagtgataccataatc

SEQ ID NO: 5759 - DNA, 80 bp, synthetic construct
  misc_feature 1..80: note = Synthetic: >NC_044932.1-cand-1770-1849
  source 1..80: mol_type = other DNA
ataacaaccaatctgtcaaacccagctccacttgattatgtaaactttgaagcttgctcccgccgcattgacttcctcgt

SEQ ID NO: 5760 - DNA, 80 bp, synthetic construct
  misc_feature 1..80: note = Synthetic: >NC_044932.1-cand-1850-1929
  source 1..80: mol_type = other DNA
ctatgcggattcccctgcagttgacaaagcaaagagggatttccctggtcaaccagacatgtggaaggatgcattcaaat

SEQ ID NO: 5761 - DNA, 80 bp, synthetic construct
  misc_feature 1..80: note = Synthetic: >NC_044932.1-cand-1930-2009
  source 1..80: mol_type = other DNA
cagacttctcccacataaaattacaattggcaccacaaggaggtttcgacaaaaatggcaacaccccacatggtaaagga

SEQ ID NO: 5762 - DNA, 80 bp, synthetic construct
  misc_feature 1..80: note = Synthetic: >NC_044932.1-cand-2010-2089
  source 1..80: mol_type = other DNA
gtcatgaagaccctaaccacacactctctcatagccagggctactggtttgttgcatgagagactggatgaatttgatct

SEQ ID NO: 5763 - DNA, 80 bp, synthetic construct
  misc_feature 1..80: note = Synthetic: >NC_044932.1-cand-2090-2169
  source 1..80: mol_type = other DNA
acaaggtccagaattgcccatatacaattttgaccagaacaaggtggcttcctttaggaagctggctgcagacaacaagt

SEQ ID NO: 5764 - DNA, 80 bp, synthetic construct
  misc_feature 1..80: note = Synthetic: >NC_044932.1-cand-2170-2249
  source 1..80: mol_type = other DNA
atggtctcatggaaaccataaaagcaggtaacaagttgaaggaagtcaagacactggatcaattcaaagaggccgtgagg

SEQ ID NO: 5765 - DNA, 80 bp, synthetic construct
  misc_feature 1..80: note = Synthetic: >NC_044932.1-cand-2260-2339
  source 1..80: mol_type = other DNA
taaagccttgcagaataatctacaattccacagcttatgacctggagtctaacggctcagggaaggtcactgtcaagaaa

SEQ ID NO: 5766 - DNA, 80 bp, synthetic construct
  misc_feature 1..80: note = Synthetic: >NC_044932.1-cand-2350-2429
  source 1..80: mol_type = other DNA
aaaaagtccaagccaacaatgagctctactctgccctcaacaacctgcgtagagccaggattagatactatgtcaagtgt

SEQ ID NO: 5767 - DNA, 80 bp, synthetic construct
  misc_feature 1..80: note = Synthetic: >NC_044932.1-cand-2430-2509
  source 1..80: mol_type = other DNA
ttccaagaaatgatctactcactcctccaaatagccggtgcggcttttgtcacatcgagaatgacacaaaggatgaatgt

SEQ ID NO: 5768 - DNA, 80 bp, synthetic construct
  misc_feature 1..80: note = Synthetic: >NC_044932.1-cand-2510-2589
  source 1..80: mol_type = other DNA
tggcaagctgtggaccaagccggagagaactatgaaggcccccacggagccccctgctcctccaattgatgattggacca

SEQ ID NO: 5769 - DNA, 80 bp, synthetic construct
  misc_feature 1..80: note = Synthetic: >NC_044932.1-cand-2590-2669
  source 1..80: mol_type = other DNA
taaacccagttgacacaattccggaaggtaagaaaggcaagaacaaaagtggtagagggaagaaacacactgccttctcc

SEQ ID NO: 5770 - DNA, 80 bp, synthetic construct
  misc_feature 1..80: note = Synthetic: >NC_044932.1-cand-2670-2749
  source 1..80: mol_type = other DNA
agcaaaggtctcagtgatgaggagtacgatgaatacaagaggatcagagaggaacgtcaaggaaggtactccatagaaga

SEQ ID NO: 5771 - DNA, 80 bp, synthetic construct
  misc_feature 1..80: note = Synthetic: >NC_044932.1-cand-2750-2829
  source 1..80: mol_type = other DNA
atacttgcaggacagagaccgctattatgaagaattggctatagccaaagcaacagaggaaaatttctgtgaagaggaag

SEQ ID NO: 5772 - DNA, 80 bp, synthetic construct
  misc_feature 1..80: note = Synthetic: >NC_003466.1-cand-280-359
  source 1..80: mol_type = other DNA
aacagggcttgagcctgatgatcatctaaaggaaaaatcatctctgagatatgggaatgtcctggatgttaattcaattg

SEQ ID NO: 5773 - DNA, 80 bp, synthetic construct
  misc_feature 1..80: note = Synthetic: >NC_004907.1-cand-500-579
  source 1..80: mol_type = other DNA
aacatcggtcccacaggcagatggcgactaccaccaacccactaatcaggcatgagaacagaatggtactagccagcact

SEQ ID NO: 5774 - DNA, 80 bp, synthetic construct
  misc_feature 1..80: note = Synthetic: >HCV.A24-cand-7180-7259
  source 1..80: mol_type = other DNA
tacatccagtcatgccaatgaaagaaattcatgaatcaattagatggaccaaggatcctaggaacacccaggatcatgtt

SEQ ID NO: 5775 - DNA, 80 bp, synthetic construct
  misc_feature 1..80: note = Synthetic: >HCV.A13-cand-7120-7199
  source 1..80: mol_type = other DNA
aacattcttgaaaagattcttcagagcagatgagaagtacccattcttggtacatccagtaatgccaatgaaagaaattc

SEQ ID NO: 5776 - DNA, 80 bp, synthetic construct
  misc_feature 1..80: note = Synthetic: >EVB88-cand-4820-4899
  source 1..80: mol_type = other DNA
aacattgaagtcatctcaatgtacagccagaatggtaaaattaacatgccaatgtcagtgaagacttgtgatgaagagtg

SEQ ID NO: 5777 - DNA, 80 bp, synthetic construct
  misc_feature 1..80: note = Synthetic: >AdVE4-cand-320-399
  source 1..80: mol_type = other DNA
tgtctgagtcattttgcggttatgacagggtggagtatttgccgagggccgagtagactttgaccgtttacgtggaggtt

SEQ ID NO: 5778 - DNA, 80 bp, synthetic construct
  misc_feature 1..80: note = Synthetic: >NC_004907.1-cand-320-399
  source 1..80: mol_type = other DNA
aactatacaagaagctgaagagggaaatgacattccatggagcaaaggaagttgcactcagttactcaactggtgcgctt

SEQ ID NO: 5779 - DNA, 80 bp, synthetic construct
  misc_feature 1..80: note = Synthetic: >NC_001611.1-cand-181220-181299
  source 1..80: mol_type = other DNA
ggatggactcacttctcttcattactactgtaaacacatatccgcattccacgaaagtaattattacaagtcaaagagtt

SEQ ID NO: 5780 - DNA, 80 bp, synthetic construct
  misc_feature 1..80: note = Synthetic: >EVA89-cand-6720-6799
  source 1..80: mol_type = other DNA
aagatgctatttccttaattgagggaatcaatcactcccatcacatttacagaaatcaaacatactgtgtaatgggtggg

SEQ ID NO: 5781 - DNA, 80 bp, synthetic construct
  misc_feature 1..80: note = Synthetic: >NC_007369.1-cand-720-799
  source 1..80: mol_type = other DNA
aaggaaaatttcaaacagctgcacaaagagcaatggtggatcaagtgagagaaagtcggaacccaggaaatgctgagatc

SEQ ID NO: 5782 - DNA, 80 bp, synthetic construct
  misc_feature 1..80: note = Synthetic: >HCV.B5-cand-6020-6099
  source 1..80: mol_type = other DNA
aaggaaccagcagtgctcagaaatggagacccacgactcaaggccaactttgaggaggccatcttctcaaagtacattgg

SEQ ID NO: 5783 - DNA, 80 bp, synthetic construct
  misc_feature 1..80: note = Synthetic: >EVB100-cand-7100-7179
  source 1..80: mol_type = other DNA
gtgatgcctatgaaagatatacatgaatcaatcaggtggactaaagaccccaaaaacacccaggatcatgtgcgttcctt

SEQ ID NO: 5784 - DNA, 80 bp, synthetic construct
  misc_feature 1..80: note = Synthetic: >NC_007371.1-cand-670-749
  source 1..80: mol_type = other DNA
aagtctcccaccgaaattctcctgccttgagaattttagagcctatgtggatggattcgaaccgaacggctgcattgagg

SEQ ID NO: 5785 - DNA, 80 bp, synthetic construct
  misc_feature 1..80: note = Synthetic: >AdVB7-cand-35430-35509
  source 1..80: mol_type = other DNA
gccaatcaccacacagcgcgcacttttttaaattacctcatttgcatattggcaccattccatctataaggtatattatt

SEQ ID NO: 5786 - DNA, 80 bp, synthetic construct
  misc_feature 1..80: note = Synthetic: >EVA91-cand-7090-7169
  source 1..80: mol_type = other DNA
aatatccattcctcatccacccaaccatgccaatgaaggagatacatgagtccattcgttggactaaggacccacgtaat

SEQ ID NO: 5787 - DNA, 80 bp, synthetic construct
  misc_feature 1..80: note = Synthetic: >NC_003310.1-cand-195310-195389
  source 1..80: mol_type = other DNA
aatcctcatcctcgtgtactgaagaagaaaacaaacatcatatgggaatcgatgttattatcaaagtcacaaagcaagac

SEQ ID NO: 5788 - DNA, 80 bp, synthetic construct
  misc_feature 1..80: note = Synthetic: >NC_001611.1-cand-122170-122249
  source 1..80: mol_type = other DNA
atagaaattagcaatgttaaagtgactcctccagattactcacctataatcgcgagtattaaaggtaagagttatgacgc

SEQ ID NO: 5789 - DNA, 80 bp, synthetic construct
  misc_feature 1..80: note = Synthetic: >NC_001611.1-cand-142600-142679
  source 1..80: mol_type = other DNA
ctaaatagaattctcttcatatcattcttgcacgtgtacatttttagcatccatcttggaatcctagatccttgttctat

SEQ ID NO: 5790 - DNA, 80 bp, synthetic construct
  misc_feature 1..80: note = Synthetic: >NC_001611.1-cand-23300-23379
  source 1..80: mol_type = other DNA
atatcctcttccagttccaaaaagtgtttggcaataaagtctttagtatgacataagagattggatagtccgtattctat

SEQ ID NO: 5791 - DNA, 80 bp, synthetic construct
  misc_feature 1..80: note = Synthetic: >NC_001611.1-cand-56630-56709
  source 1..80: mol_type = other DNA
atagaatgctcttaaataatgtcatttttttatccgctaaaaatttaaagaatgtataaaccttttttagagatttgaaa

SEQ ID NO: 5792 - DNA, 80 bp, synthetic construct
  misc_feature 1..80: note = Synthetic: >NC_001611.1-cand-93010-93089
  source 1..80: mol_type = other DNA
attaatgttttaccctttgacattaaaaagctgttgtatctaaaatttaagactaaagaaacgaatagaatatactctat

SEQ ID NO: 5793 - DNA, 80 bp, synthetic construct
  misc_feature 1..80: note = Synthetic: >NC_003310.1-cand-85720-85799
  source 1..80: mol_type = other DNA
taggtaatacgctcatcaagtacgcagccaattataccaaaattctaggctcagtatgtaaacctgtagatcttatctat

SEQ ID NO: 5794 - DNA, 80 bp, synthetic construct
  misc_feature 1..80: note = Synthetic: >NC_003310.1-cand-79210-79289
  source 1..80: mol_type = other DNA
ttttttgcaggaagtatatctgagtatgatgatttacaaatggttattgctggtgcaaaatccaaatttccaagatctat

SEQ ID NO: 5795 - DNA, 80 bp, synthetic construct
  misc_feature 1..80: note = Synthetic: >NC_003310.1-cand-143060-143139
  source 1..80: mol_type = other DNA
tcactactatctatgattaccatgtccgcgtttctcatagtgcgccaaaatcaatgcatgtctgctaacgaggctgctat

SEQ ID NO: 5796 - DNA, 80 bp, synthetic construct
  misc_feature 1..80: note = Synthetic: >NC_001611.1-cand-128320-128399
  source 1..80: mol_type = other DNA
atagcgaatacctcatcgtcatcatccgtatcttctgaaacaccatcatatgacatttcatgaagtctaacgtattgata

SEQ ID NO: 5797 - DNA, 80 bp, synthetic construct
  misc_feature 1..80: note = Synthetic: >NC_003310.1-cand-59440-59519
  source 1..80: mol_type = other DNA
tcaacaagttctcaataccccaatagataatagaatatcacccaatgcgtccatgttgtctatttccaacaggtcgctat

SEQ ID NO: 5798 - DNA, 80 bp, synthetic construct
  misc_feature 1..80: note = Synthetic: >NC_001611.1-cand-12190-12269
  source 1..80: mol_type = other DNA
ataggtcccattttttgctttctgtatccaggtagacatagatattctatagtgtctcctatgttgtaattagcattagc

SEQ ID NO: 5799 - DNA, 80 bp, synthetic construct
  misc_feature 1..80: note = Synthetic: >NC_012532.1-cand-10460-10539
  source 1..80: mol_type = other DNA
atagtcaggccgagaacgccatggcacggaagaagccatgctgcctgtgagcccctcagaggacactgagtcaaaaaacc

SEQ ID NO: 5800 - DNA, 80 bp, synthetic construct
  misc_feature 1..80: note = Synthetic: >NC_001611.1-cand-58940-59019
  source 1..80: mol_type = other DNA
atagtctttgtggcatccgttgcacagtgtcacgaatataaatcatatttagaaaaaagattaccgtatgatatgtatat

SEQ ID NO: 5801 - DNA, 80 bp, synthetic construct
  misc_feature 1..80: note = Synthetic: >NC_003310.1-cand-87690-87769
  source 1..80: mol_type = other DNA
atagtgggagatttggctctgtgcatatctccagttgaacgtagtagtaagtatttatacaaacttttcttatccattta

SEQ ID NO: 5802 - DNA, 80 bp, synthetic construct
  misc_feature 1..80: note = Synthetic: >NC_003310.1-cand-12260-12339
  source 1..80: mol_type = other DNA
atagtttttatctatagaagacggcttgattccgtgattaattagacatttaacaacttccggacgcacatatgctctcg

SEQ ID NO: 5803 - DNA, 80 bp, synthetic construct
  misc_feature 1..80: note = Synthetic: >NC_003310.1-cand-69460-69539
  source 1..80: mol_type = other DNA
cgcagctggttttgatctactatactttaaaaacgaatcagattccataattgcctgtatatcatcagctgaaaaactat

SEQ ID NO: 5804 - DNA, 80 bp, synthetic construct
  misc_feature 1..80: note = Synthetic: >NC_001430.1-cand-6740-6819
  source 1..80: mol_type = other DNA
ttgtacaaagacagaaaatacatagtgaacggtggaatgccatcaggctcatctggcaccagtatcttcaacactatgat

SEQ ID NO: 5805 - DNA, 80 bp, synthetic construct
  misc_feature 1..80: note = Synthetic: >NC_001611.1-cand-163340-163419
  source 1..80: mol_type = other DNA
atcatccgttgttatataccggatgagcaaaaaaccatcagagagatttcggccatcatcggactttgtgcatatgctgc

SEQ ID NO: 5806 - DNA, 80 bp, synthetic construct
  misc_feature 1..80: note = Synthetic: >NC_001611.1-cand-121370-121449
  source 1..80: mol_type = other DNA
atcattaatcactctatagtaacgcgtggaaaaagctccatattacaaactatagaaattatttttactaatagaacatg

SEQ ID NO: 5807 - DNA, 80 bp, synthetic construct
  misc_feature 1..80: note = Synthetic: >NC_003310.1-cand-83460-83539
  source 1..80: mol_type = other DNA
atcattagtcatattaaaaatgacgacgatatcggtaccgttaaagatggtagactaggtgctatggatggggcattatg

SEQ ID NO: 5808 - DNA, 80 bp, synthetic construct
  misc_feature 1..80: note = Synthetic: >NC_001611.1-cand-46340-46419
  source 1..80: mol_type = other DNA
tagtatcgtcaccgatgaacgtcatttctctaactcctctatttaatactttacccatgcaactaaacgcgttcttggat

SEQ ID NO: 5809 - DNA, 80 bp, synthetic construct
  misc_feature 1..80: note = Synthetic: >NC_001611.1-cand-21600-21679
  source 1..80: mol_type = other DNA
atggtcccgttccgttgatagataatcgagtatgttagtggacttgttaaatctatataccatattttctggaagtggat

SEQ ID NO: 5810 - DNA, 80 bp, synthetic construct
  misc_feature 1..80: note = Synthetic: >AdVB3-cand-33200-33279
  source 1..80: mol_type = other DNA
ttgagactgaaaaatatctatagtagcacaacaaagacataaatgcatgcatcttttcataatttttaactcctctggat

SEQ ID NO: 5811 - DNA, 80 bp, synthetic construct
  misc_feature 1..80: note = Synthetic: >NC_003310.1-cand-66480-66559
  source 1..80: mol_type = other DNA
atccaggctcctctctcaggctctattttcatcttgacgacctttggattttcaccagtatgtattcctttacgtgataa

SEQ ID NO: 5812 - DNA, 80 bp, synthetic construct
  misc_feature 1..80: note = Synthetic: >AdVB7-cand-16640-16719
  source 1..80: mol_type = other DNA
ccggaaccactgtggtttttacacctggcgagcgttccagcactacttttaaacggtcctatgatgaggtgtacggggat

SEQ ID NO: 5813 - DNA, 80 bp, synthetic construct
  misc_feature 1..80: note = Synthetic: >AdVB7-cand-19810-19889
  source 1..80: mol_type = other DNA
atcccgatgttcgtattattgaaaatcatggcgtcgaggatgaactgcctaattactgttttcctctggatggcatagga

SEQ ID NO: 5814 - DNA, 80 bp, synthetic construct
  misc_feature 1..80: note = Synthetic: >NC_044856.1-cand-80-159
  source 1..80: mol_type = other DNA
atcccgccttatggcgaggatccgtgggcgtataggcccacaacgtggtgaaacaaccacaaagatcaaggatgccaaca

SEQ ID NO: 5815 - DNA, 80 bp, synthetic construct
  misc_feature 1..80: note = Synthetic: >NC_001611.1-cand-124410-124489
  source 1..80: mol_type = other DNA
atccggagacgctatggcacgaaatatctcatcaagaactcttgaagatgattttgctagagataatcagattagctttg

SEQ ID NO: 5816 - DNA, 80 bp, synthetic construct
  misc_feature 1..80: note = Synthetic: >AdVB7-cand-7750-7829
  source 1..80: mol_type = other DNA
gattagctgcttgccaaaggaccccatccaggtgtaggtttccacatcgtaggtgaggaagagcctttctgtgcgaggat

SEQ ID NO: 5817 - DNA, 80 bp, synthetic construct
  misc_feature 1..80: note = Synthetic: >AdVB7-cand-9850-9929
  source 1..80: mol_type = other DNA
ctgccatgcatgcgagtgatcccaaacccgcgcatgggctggacaagtgccaggtccgctacaaccctttcggcgaggat

SEQ ID NO: 5818 - DNA, 80 bp, synthetic construct
  misc_feature 1..80: note = Synthetic: >NC_006573.1-cand-2020-2099
  source 1..80: mol_type = other DNA
atcctgcttgaactgctttaaatcagtaggttcacggaagaagtgtatgtagcagcctgaacttggttgatagagggcaa

SEQ ID NO: 5819 - DNA, 80 bp, synthetic construct
  misc_feature 1..80: note = Synthetic: >EVB87-cand-6900-6979
  source 1..80: mol_type = other DNA
gatagcatatggtgatgatgtcattgcgtcatacccacatcctattgatgccgcgctgctggcagaagcagggaaaggat

SEQ ID NO: 5820 - DNA, 80 bp, synthetic construct
  misc_feature 1..80: note = Synthetic: >NC_039476.1-cand-4350-4429
  source 1..80: mol_type = other DNA
atggtcagattctctgcagaaccacaattggcacaaatagtcgctgaggatctgctggcccctagtgtagtagatgtagg

SEQ ID NO: 5821 - DNA, 80 bp, synthetic construct
  misc_feature 1..80: note = Synthetic: >NC_006573.1-cand-1850-1929
  source 1..80: mol_type = other DNA
tcaattagtttaatgtcttttcttccttgtgattcaaggagtttccttatgtcatcggacccctgacaggtaatgaccat

SEQ ID NO: 5822 - DNA, 80 bp, synthetic construct
  misc_feature 1..80: note = Synthetic: >NC_001611.1-cand-65570-65649
  source 1..80: mol_type = other DNA
tttctgccgcatacaataacttgttagataaaatcagggttatcaaagtgtttagcgtggctagaatagtgggcttacat

SEQ ID NO: 5823 - DNA, 80 bp, synthetic construct
  misc_feature 1..80: note = Synthetic: >NC_001611.1-cand-87920-87999
  source 1..80: mol_type = other DNA
tagttttcagcacggtggtagatatatagaggtggaggaatttatagatgatggaagacaagttagatggtgttctacat

SEQ ID NO: 5824 - DNA, 80 bp, synthetic construct
  misc_feature 1..80: note = Synthetic: >NC_001611.1-cand-32340-32419
  source 1..80: mol_type = other DNA
cagtggtggataatcagaatatacacctaacgttttaattgtatgtatagatcctccagtaaatgacgcgtttcctacat

SEQ ID NO: 5825 - DNA, 80 bp, synthetic construct
  misc_feature 1..80: note = Synthetic: >AdVB7-cand-7190-7269
  source 1..80: mol_type = other DNA
atgtcatcacaggccccctgttcccagagttggaagtccacccgcttcttgtaggcggggttgggcaaagcgaaagtaac

SEQ ID NO: 5826 - DNA, 80 bp, synthetic construct
  misc_feature 1..80: note = Synthetic: >NC_003310.1-cand-146670-146749
  source 1..80: mol_type = other DNA
atgtcatcatcaacaatccaataatatgcctgagagtaaacattgacggataaaacaaaaatgccccgcataactctatc

SEQ ID NO: 5827 - DNA, 80 bp, synthetic construct
  misc_feature 1..80: note = Synthetic: >NC_003310.1-cand-71870-71949
  source 1..80: mol_type = other DNA
atgtccacaaatgccatttgttttgtctgtggattgtatttgaaaatggaaacgatgtagttagatagatgcgctgcgaa

SEQ ID NO: 5828 - DNA, 80 bp, synthetic construct
  misc_feature 1..80: note = Synthetic: >NC_001611.1-cand-115690-115769
  source 1..80: mol_type = other DNA
tcaggacgaataattctaataaactcagaacaatatctcgcatccatatgtttggagcaaatatcggaataagtagacat

SEQ ID NO: 5829 - DNA, 80 bp, synthetic construct
  misc_feature 1..80: note = Synthetic: >HCV.A1-cand-4820-4899
  source 1..80: mol_type = other DNA
atgtctgaatataccacaaaaggaaaattgaacatggcattggccacccaattgtgcaaagactgccacaaaccagcaaa

SEQ ID NO: 5830 - DNA, 80 bp, synthetic construct
  misc_feature 1..80: note = Synthetic: >NC_004296.1-cand-650-729
  source 1..80: mol_type = other DNA
atgtctgacaaaacaggggcaggttgacttgaatgatgcagtacaagcattgacagatttgggtttgatctacacagcaa

SEQ ID NO: 5831 - DNA, 80 bp, synthetic construct
  misc_feature 1..80: note = Synthetic: >HCV.B3-cand-7150-7229
  source 1..80: mol_type = other DNA
atgtgcgatccttgtgcctattggcttggcacaacggagagcacgaatatgaggagttcatccgcaaaatcagaagcgtc

SEQ ID NO: 5832 - DNA, 80 bp, synthetic construct
  misc_feature 1..80: note = Synthetic: >NC_003310.1-cand-130680-130759
  source 1..80: mol_type = other DNA
atgtgtgaaaatattcaaggattctactatgcacattattctatccaaggacaaggatgaaaagggatgtataaacatga

SEQ ID NO: 5833 - DNA, 80 bp, synthetic construct
  misc_feature 1..80: note = Synthetic: >NC_001611.1-cand-145530-145609
  source 1..80: mol_type = other DNA
tttactaaaatgtctcgcggggcattaatcgtttttgaaggattggacaaatctggaaaaacaacacaatgtatgaacat

SEQ ID NO: 5834 - DNA, 80 bp, synthetic construct
  misc_feature 1..80: note = Synthetic: >AdVB7-cand-3100-3179
  source 1..80: mol_type = other DNA
atgtttatgccttaccagtgtaacatgaatcatgtgaaggtaatgttggaaccagatgccttttccagagtgagcttaac

SEQ ID NO: 5835 - DNA, 80 bp, synthetic construct
  misc_feature 1..80: note = Synthetic: >NC_001611.1-cand-92770-92849
  source 1..80: mol_type = other DNA
atgtttttgttttcgtcaaacattatgtccgaatcctatactctgaaagaggtaaggcatatttggtttatgactatccc

SEQ ID NO: 5836 - DNA, 80 bp, synthetic construct
  misc_feature 1..80: note = Synthetic: >NC_007359.1-cand-560-639
  source 1..80: mol_type = other DNA
gaaatggccagtaggggtttatgggattcctttcgtcagtccgagagaggcgaagagacagttgaagaaagatttgaaat

SEQ ID NO: 5837 - DNA, 80 bp, synthetic construct
  misc_feature 1..80: note = Synthetic: >AdVB7-cand-27780-27859
  source 1..80: mol_type = other DNA
ccatcgaagggggaatagactctcgcctgcatcgaatcttctcccagcgacccgtgctgattgagcgcgaccagggaaat

SEQ ID NO: 5838 - DNA, 80 bp, synthetic construct
  misc_feature 1..80: note = Synthetic: >NC_001611.1-cand-27040-27119
  source 1..80: mol_type = other DNA
atttcctcagcgatagctcttctatccttttccggaagcaatgaaatcacttcaataaatgattcaaccatgagtgtgaa

SEQ ID NO: 5839 - DNA, 80 bp, synthetic construct
  misc_feature 1..80: note = Synthetic: >NC_001611.1-cand-134810-134889
  source 1..80: mol_type = other DNA
atttctgcattacaaagaagaactgatgcctagtgcttgcgccaatggatggatacaatacgataaacattgttatttag

SEQ ID NO: 5840 - DNA, 80 bp, synthetic construct
  misc_feature 1..80: note = Synthetic: >AdVB7-cand-9190-9269
  source 1..80: mol_type = other DNA
atttcttcctcaatctcttcttcttccactaacatctcttcctcttcaggtggggctgcaggaggagggggaacgcggcg

SEQ ID NO: 5841 - DNA, 80 bp, synthetic construct
  misc_feature 1..80: note = Synthetic: >NC_003310.1-cand-71710-71789
  source 1..80: mol_type = other DNA
atttgataaaggaagcggaacaataaacaaaatactcaggaagatattttattcggtaacaggtggccaaactccatagg

SEQ ID NO: 5842 - DNA, 80 bp, synthetic construct
  misc_feature 1..80: note = Synthetic: >AdVB7-cand-4150-4229
  source 1..80: mol_type = other DNA
ggagtgcatggtgttgcacaatatcttttaggagcagactaattgcaacggggaggcccttagtgtaggtgtttacaaat

SEQ ID NO: 5843 - DNA, 80 bp, synthetic construct
  misc_feature 1..80: note = Synthetic: >NC_001611.1-cand-85820-85899
  source 1..80: mol_type = other DNA
atttgtgatcggatagtattcaagtcaaagaaatacgaaggtccttttactacaactagtgaagtcgttgatatgttatc

SEQ ID NO: 5844 - DNA, 80 bp, synthetic construct
  misc_feature 1..80: note = Synthetic: >NC_001430.1-cand-2340-2419
  source 1..80: mol_type = other DNA
attttaatcttagattgatgagggattcaccagacattggacagtcagctatactacctgaacaagctgcaacaacacaa

SEQ ID NO: 5845 - DNA, 80 bp, synthetic construct
  misc_feature 1..80: note = Synthetic: >NC_001611.1-cand-38680-38759
  source 1..80: mol_type = other DNA
cattatttttagcatctcgtttagattttccatcggccttatcgaatactctcccgtcgatgtctacacaggcataaaat

SEQ ID NO: 5846 - DNA, 80 bp, synthetic construct
  misc_feature 1..80: note = Synthetic: >AdVB7-cand-1420-1499
  source 1..80: mol_type = other DNA
ggaccttagtacccggaaactaccaaggcaataagtgccctgcagctgtgtttatttaatgtgacgtcatgtaataaaat

SEQ ID NO: 5847 - DNA, 80 bp, synthetic construct
  misc_feature 1..80: note = Synthetic: >AdVB3-cand-33920-33999
  source 1..80: mol_type = other DNA
attttcaaggtgctcaacggtggcttccaacaaagcctccacgcgcacatccaaaaacaaaagaataccaaaagaaggag

SEQ ID NO: 5848 - DNA, 80 bp, synthetic construct
  misc_feature 1..80: note = Synthetic: >EVB74-cand-4360-4439
  source 1..80: mol_type = other DNA
caactacatacagttcaagtccaaatgccgtattgaacctgtgtgtctcttgctccatggaagtcccggtgccggaaaat

SEQ ID NO: 5849 - DNA, 80 bp, synthetic construct
  misc_feature 1..80: note = Synthetic: >NC_003310.1-cand-155130-155209
  source 1..80: mol_type = other DNA
ggtacgtgcttaacgctattagtcctcatgcctatgatgtttttagaaaatctaataacttgaaagagataatagaaaat

SEQ ID NO: 5850 - DNA, 80 bp, synthetic construct
  misc_feature 1..80: note = Synthetic: >NC_003310.1-cand-129560-129639
  source 1..80: mol_type = other DNA
tgatataggtgcaaaaaatcctgccagaactgttttagaagtcaaggataactccgttagggtattggatatatcaaaat

SEQ ID NO: 5851 - DNA, 80 bp, synthetic construct
  misc_feature 1..80: note = Synthetic: >AdVB3-cand-30250-30329
  source 1..80: mol_type = other DNA
ttaattttttccaactggtagactggatctttgtgcgaattgcctacctacgtcaccatcccgaataccgcaatcaaaat

SEQ ID NO: 5852 - DNA, 80 bp, synthetic construct
  misc_feature 1..80: note = Synthetic: >AdVB3-cand-15280-15359
  source 1..80: mol_type = other DNA
cagcagctccgacagaccacttcgctcacgcacgtcttcaaccgcttccctgagaaccagatcctcatccgcccgccggc

SEQ ID NO: 5853 - DNA, 80 bp, synthetic construct
  misc_feature 1..80: note = Synthetic: >NC_003310.1-cand-84020-84099
  source 1..80: mol_type = other DNA
gatagatagtatacccaaagagacaaatgaattaacttacttattaggtatgatcgttaagaattgtaacttgaatgctg

SEQ ID NO: 5854 - DNA, 80 bp, synthetic construct
  misc_feature 1..80: note = Synthetic: >NC_026436.1-cand-270-349
  source 1..80: mol_type = other DNA
caggaggacccatatatagaagagtagacggaaagtggatgagagaactcatcctttatgacaaagragaaataaggaga

SEQ ID NO: 5855 - DNA, 80 bp, synthetic construct
  misc_feature 1..80: note = Synthetic: >AdVB3-cand-3260-3339
  source 1..80: mol_type = other DNA
ggaggcaagcatgctagattccagccggtgtgcgtggatgtgactgaagacctgagacccgatcatttggtgcttgcctg

SEQ ID NO: 5856 - DNA, 80 bp, synthetic construct
  misc_feature 1..80: note = Synthetic: >AdVB7-cand-7830-7909
  source 1..80: mol_type = other DNA
gagagccaatcgggaagaactggatctcctgccaccagttggaggaatggctgttgatgtgatggaagtagaactccctg

SEQ ID NO: 5857 - DNA, 80 bp, synthetic construct
  misc_feature 1..80: note = Synthetic: >AdVB3-cand-12320-12399
  source 1..80: mol_type = other DNA
ccgatgaggccgggctggtatacaatgctctcttggagcgcgtggcccgttacaacagcagcaacgtgcagaccaacctg

SEQ ID NO: 5858 - DNA, 80 bp, synthetic construct
  misc_feature 1..80: note = Synthetic: >NC_001430.1-cand-4570-4649
  source 1..80: mol_type = other DNA
gacagtggtcctgatggatgacttaatgcaaaatccagatggtaatgatattgctatgttttgtcagatggtatctactg

SEQ ID NO: 5859 - DNA, 80 bp, synthetic construct
  misc_feature 1..80: note = Synthetic: >NC_003310.1-cand-118460-118539
  source 1..80: mol_type = other DNA
cagtctggaaactatcacgtttatgattttgaaccgtattactctacagtagctctggctattcgagatgaacattcatc

SEQ ID NO: 5860 - DNA, 80 bp, synthetic construct
  misc_feature 1..80: note = Synthetic: >NC_004296.1-cand-0-79
  source 1..80: mol_type = other DNA
cagtggatcctaggctattggattgcgctttgcttttgtcattttggcagatagtctcagttctttgttgcgtgcataca

SEQ ID NO: 5861 - DNA, 80 bp, synthetic construct
  misc_feature 1..80: note = Synthetic: >EF571895.1-cand-270-349
  source 1..80: mol_type = other DNA
cagttgatccaacagggattgagcctgatgaccatctaaaggaaaaatcgtcactgagatatgggaatgtgctggatgtc

SEQ ID NO: 5862 - DNA, 80 bp, synthetic construct
  misc_feature 1..80: note = Synthetic: >AdVB3-cand-33680-33759
  source 1..80: mol_type = other DNA
ttaaaactccatcatatttaattgttctaaggaaatcatccacggtagcatatgcaaatcccaaccaagcaatgcaactg

SEQ ID NO: 5863 - DNA, 80 bp, synthetic construct
  misc_feature 1..80: note = Synthetic: >NC_003310.1-cand-158890-158969
  source 1..80: mol_type = other DNA
gactgctggagatgccggtacttatatatgtgcattctttatgacatcgactacaaatgatactgataaagtagattatg

SEQ ID NO: 5864 - DNA, 80 bp, synthetic construct
  misc_feature 1..80: note = Synthetic: >NC_001611.1-cand-53100-53179
  source 1..80: mol_type = other DNA
cataattttctctcggttaaaactctaaggagatgcggattaactacttgaaattctccagacaatactctccgagtgta

SEQ ID NO: 5865 - DNA, 80 bp, synthetic construct
  misc_feature 1..80: note = Synthetic: >NC_003310.1-cand-152640-152719
  source 1..80: mol_type = other DNA
ctgtaacacaatgaaggagtctcatagatatatagaggtcagatactggtttgataaactttttattccacatgagtatg

SEQ ID NO: 5866 - DNA, 80 bp, synthetic construct
  misc_feature 1..80: note = Synthetic: >AdVB7-cand-23160-23239
  source 1..80: mol_type = other DNA
catactggtggcagatacgcttgtactgctcgtgctgctctggcatcagcttgaaagaggttctcaggtcattatccagc

SEQ ID NO: 5867 - DNA, 80 bp, synthetic construct
  misc_feature 1..80: note = Synthetic: >NC_039476.1-cand-1220-1299
  source 1..80: mol_type = other DNA
catagaggatgctgtactagaccttgaggcaatagaaaataaccacatgacaaccctgttgaaagacaaagacagcttag

SEQ ID NO: 5868 - DNA, 80 bp, synthetic construct
  misc_feature 1..80: note = Synthetic: >AdVB7-cand-19650-19729
  source 1..80: mol_type = other DNA
actggaaatatgggagttttggccggccaagcatcacaactgaatgcagtggttgacttgcaggacagaaacactgaact

SEQ ID NO: 5869 - DNA, 80 bp, synthetic construct
  misc_feature 1..80: note = Synthetic: >AdVB7-cand-19890-19969
  source 1..80: mol_type = other DNA
ccagggaacaaatatcaaggcattaaacctagagacactgcatgggaaaaagatactaaagtttctacagctaatgaaat

SEQ ID NO: 5870 - DNA, 80 bp, synthetic construct
  misc_feature 1..80: note = Synthetic: >AdVB7-cand-19970-20049
  source 1..80: mol_type = other DNA
agccataggcaacaatcaggctatggaaattaatatccaagctaatctttggagaagttttctgtactccaatgtggctt

SEQ ID NO: 5871 - DNA, 80 bp, synthetic construct
  misc_feature 1..80: note = Synthetic: >AdVB7-cand-20130-20209
  source 1..80: mol_type = other DNA
gggcgagtggtttccccatctctggtcgattcatacatcaacattggcgccaggtggtctcttgacccaatggacaatgt

SEQ ID NO: 5872 - DNA, 80 bp, synthetic construct
  misc_feature 1..80: note = Synthetic: >AdVB7-cand-20210-20289
  source 1..80: mol_type = other DNA
gaatccatttaaccaccaccgcaatgctggcctacgctaccggtccatgcttctgggcaatggccgttatgtgcctttcc

SEQ ID NO: 5873 - DNA, 80 bp, synthetic construct
  misc_feature 1..80: note = Synthetic: >AdVB7-cand-20450-20529
  source 1..80: mol_type = other DNA
cattaacctctatgccaccttcttccccatggctcacaacaccgcttcaactcttgaagccatgctgcgcaacgatacca

SEQ ID NO: 5874 - DNA, 80 bp, synthetic construct
  misc_feature 1..80: note = Synthetic: >AdVB7-cand-20530-20609
  source 1..80: mol_type = other DNA
atgatcagtcattcaacgactacctctctgcagctaacatgctttaccccatccctgccaatgcaaccaacattccaatt

SEQ ID NO: 5875 - DNA, 80 bp, synthetic construct
  misc_feature 1..80: note = Synthetic: >AdVB7-cand-20650-20729
  source 1..80: mol_type = other DNA
ccttcaccagactcaaaaccaaggagactccatctcttggatcagggttcgatccctacttcgtttattctggatctatt

SEQ ID NO: 5876 - DNA, 80 bp, synthetic construct
  misc_feature 1..80: note = Synthetic: >AdVB7-cand-20690-20769
  source 1..80: mol_type = other DNA
atcagggttcgatccctacttcgtttattctggatctattccctacctggatggcactttttaccttaaccacactttca

SEQ ID NO: 5877 - DNA, 80 bp, synthetic construct
  misc_feature 1..80: note = Synthetic: >AdVB7-cand-20870-20949
  source 1..80: mol_type = other DNA
aggatacaatgtggcccaatgcaacatgaccaaagactggttcctggttcagatgcttgccaactacaacattggctacc

SEQ ID NO: 5878 - DNA, 80 bp, synthetic construct
  misc_feature 1..80: note = Synthetic: >AdVB7-cand-21050-21129
  source 1..80: mol_type = other DNA
tgactacaaagccgtcaccttaccatatcaacacaacaactctggctttgtaggataccttgcgcctactatgagacaag

SEQ ID NO: 5879 - DNA, 80 bp, synthetic construct
  misc_feature 1..80: note = Synthetic: >AdVB7-cand-21160-21239
  source 1..80: mol_type = other DNA
cgctcatcggaactactgccgttaaaagtgttacccaaaaaaagttcctgtgcgacaggaccatgtggcgcataccgttc

SEQ ID NO: 5880 - DNA, 80 bp, synthetic construct
  misc_feature 1..80: note = Synthetic: >AdVB7-cand-21240-21319
  source 1..80: mol_type = other DNA
tccagcaacttcatgtccatgggagcccttacggacctgggacagaacctgctctatgccaactcggcccatgcgctgga

SEQ ID NO: 5881 - DNA, 80 bp, synthetic construct
  misc_feature 1..80: note = Synthetic: >AdVB7-cand-21540-21619
  source 1..80: mol_type = other DNA
gagcaagagctcaaagccatcgtccgagacctgggttgcggaccctatttcctgggaacatttgacaagcgtttcccggg

SEQ ID NO: 5882 - DNA, 80 bp, synthetic construct
  misc_feature 1..80: note = Synthetic: >AdVB7-cand-21680-21759
  source 1..80: mol_type = other DNA
gggagagcactggctggcttttggttggaacccgcgctccaacacctgctacctttttgatccttttgggttctcggatg

SEQ ID NO: 5883 - DNA, 80 bp, synthetic construct
  misc_feature 1..80: note = Synthetic: >AdVB7-cand-21710-21789
  source 1..80: mol_type = other DNA
cccgcgctccaacacctgctacctttttgatccttttgggttctcggatgagcgactcaaacagatttaccagtttgagt

SEQ ID NO: 5884 - DNA, 80 bp, synthetic construct
  misc_feature 1..80: note = Synthetic: >AdVE4-cand-15240-15319
  source 1..80: mol_type = other DNA
cttcacctcgctcacgcacgtcttcaaccgcttccccgagaaccagatcctcgtccgcccgcccgcgcccaccattacca

SEQ ID NO: 5885 - DNA, 80 bp, synthetic construct
  misc_feature 1..80: note = Synthetic: >AdVE4-cand-15300-15379
  source 1..80: mol_type = other DNA
gcccgcgcccaccattaccaccgtcagtgaaaacgttcctgctctcacagatcacgggaccctgccgctgcgcagcagta

SEQ ID NO: 5886 - DNA, 80 bp, synthetic construct
  misc_feature 1..80: note = Synthetic: >AdVE4-cand-15400-15479
  source 1..80: mol_type = other DNA
accgttactgacgccagacgccgcacctgcccctacgtctacaaggccctgggcatagtcgcgccgcgcgtcctctcgag

SEQ ID NO: 5887 - DNA, 80 bp, synthetic construct
  misc_feature 1..80: note = Synthetic: >AdVE4-cand-15450-15529
  source 1..80: mol_type = other DNA
gggcatagtcgcgccgcgcgtcctctcgagccgcaccttctaaaaaatgtccattctcatctcgcccagtaataacaccg

SEQ ID NO: 5888 - DNA, 80 bp, synthetic construct
  misc_feature 1..80: note = Synthetic: >AdVE4-cand-15540-15619
  source 1..80: mol_type = other DNA
gcacgcgcccagcaagatgtacggaggcgctcgccaacgctccacgcaacaccctgtgcgcgtgcgcgggcacttccgcg

SEQ ID NO: 5889 - DNA, 80 bp, synthetic construct
  misc_feature 1..80: note = Synthetic: >AdVE4-cand-15640-15719
  source 1..80: mol_type = other DNA
ggccgcgtgcggtcgcgcaccaccgtcgacgacgtgatcgaccaggtggtggccgacgctcgcaactacacccccgccgc

SEQ ID NO: 5890 - DNA, 80 bp, synthetic construct
  misc_feature 1..80: note = Synthetic: >AdVE4-cand-15720-15799
  source 1..80: mol_type = other DNA
cgcgcccgtctccaccgtggacgccgtcattgacagcgtggtggccgatgcgcgccggtacgcccgcgccaagagccggc

SEQ ID NO: 5891 - DNA, 80 bp, synthetic construct
  misc_feature 1..80: note = Synthetic: >AdVE4-cand-15800-15879
  source 1..80: mol_type = other DNA
ggcggcgcatcgcccggcggcaccgaagcaccaccgccatgcgcgcggcgcaagcattgctgcgcagggccaggcgcacg

SEQ ID NO: 5892 - DNA, 80 bp, synthetic construct
  misc_feature 1..80: note = Synthetic: >AdVE4-cand-15880-15959
  source 1..80: mol_type = other DNA
ggacgcagggccatgctcagggcggccagacgcgcggcttcaggcgccagcgccggcagaacccggagacgagcggccac

SEQ ID NO: 5893 - DNA, 80 bp, synthetic construct
  misc_feature 1..80: note = Synthetic: >AdVE4-cand-15960-16039
  source 1..80: mol_type = other DNA
ggcggcggcagcggccatcgccagcatgtcccgcccgcggcgagggaacgtgtactgggtgcgcgacgccgccaccggtg

SEQ ID NO: 5894 - DNA, 80 bp, synthetic construct
  misc_feature 1..80: note = Synthetic: >AdVE4-cand-16040-16119
  source 1..80: mol_type = other DNA
tgcgcgtgcccgtgcgcacccgcccccctcgcacttgaagatgtttacttggcgatgttgatgtgtcccagcggcgagga

SEQ ID NO: 5895 - DNA, 80 bp, synthetic construct
  misc_feature 1..80: note = Synthetic: >AdVE4-cand-16120-16199
  source 1..80: mol_type = other DNA
gaaggatgtccaagcgcagattcaaggaagagatgctccaggtcatcgcgcctgagatctacggtcccgcggcggcggtg

SEQ ID NO: 5896 - DNA, 80 bp, synthetic construct
  misc_feature 1..80: note = Synthetic: >AdVE4-cand-16200-16279
  source 1..80: mol_type = other DNA
aaggatgaaagaaatccccgcaaaatcaagcgggtcaaaaaggacaaaaaggaagaagataatgtggacgatatggtgaa

SEQ ID NO: 5897 - DNA, 80 bp, synthetic construct
  misc_feature 1..80: note = Synthetic: >AdVE4-cand-16280-16359
  source 1..80: mol_type = other DNA
gtttgtgcgcgagttcgccccccggcggcgcgtgcagtggcgcgggcggaaagtgcgtccggtgctaagacccggcacca

SEQ ID NO: 5898 - DNA, 80 bp, synthetic construct
  misc_feature 1..80: note = Synthetic: >AdVE4-cand-16340-16419
  source 1..80: mol_type = other DNA
ggtgctaagacccggcaccacggtggttttcgcgcccggcgagcggtccggcactacctccaagcgctcctacgacgagg

SEQ ID NO: 5899 - DNA, 80 bp, synthetic construct
  misc_feature 1..80: note = Synthetic: >AdVE4-cand-16440-16519
  source 1..80: mol_type = other DNA
ctcgagcaggcggccgagcgcctgggcgagtttgcttacggaaagcgcaaccgccttgcgcccctaaaggaagaggtggt

SEQ ID NO: 5900 - DNA, 80 bp, synthetic construct
  misc_feature 1..80: note = Synthetic: >EU711054.1-cand-2500-2579
  source 1..80: mol_type = other DNA
cagggctttccagattttttaggctacactttagacaaagaagggttagaaacccatatactataaatttgctttataag

SEQ ID NO: 5901 - DNA, 80 bp, synthetic construct
  misc_feature 1..80: note = Synthetic: >EU711054.1-cand-2580-2659
  source 1..80: mol_type = other DNA
caagtgtttaataagccagctgatgacattagtgggcaactgcaggttacagaggttactatgactgaagaaacagggcc

SEQ ID NO: 5902 - DNA, 80 bp, synthetic construct
  misc_feature 1..80: note = Synthetic: >EU711054.1-cand-2660-2739
  source 1..80: mol_type = other DNA
cttgcctcccacagtagagggaaatgttggtgtacccacaaccagtaatttgtctcatttgcctgcaactgtaactttac

SEQ ID NO: 5903 - DNA, 80 bp, synthetic construct
  misc_feature 1..80: note = Synthetic: >EU711054.1-cand-2740-2819
  source 1..80: mol_type = other DNA
aagccacaggcccaatactaaacacacaaggataatgtaataaatgcagtttattaataaagcaattttaagcattgtgt

SEQ ID NO: 5904 - DNA, 80 bp, synthetic construct
  misc_feature 1..80: note = Synthetic: >EU711054.1-cand-2820-2899
  source 1..80: mol_type = other DNA
ttttcaagtatgttgcatccatttgttacattcatttgcatgtcagcaaattcagtaaggcctatatatttgtctaacag

SEQ ID NO: 5905 - DNA, 80 bp, synthetic construct
  misc_feature 1..80: note = Synthetic: >EU711054.1-cand-2900-2979
  source 1..80: mol_type = other DNA
ttctttccaatacacaactttagcttgtatacatgggtgaaaatcactaacaggcctgcaccatattaacataagtaaaa

SEQ ID NO: 5906 - DNA, 80 bp, synthetic construct
  misc_feature 1..80: note = Synthetic: >EU711054.1-cand-2980-3059
  source 1..80: mol_type = other DNA
tacacattccactttgtaaaactctttttaccattagttctggagttttatccagactttcttttaagtgtcttttgggt

SEQ ID NO: 5907 - DNA, 80 bp, synthetic construct
  misc_feature 1..80: note = Synthetic: >EU711054.1-cand-3060-3139
  source 1..80: mol_type = other DNA
gtaaaaagtacagttttatgaaatctaggagccaaagtagcagggactaaatattcattcattgttacaatacctggagg

SEQ ID NO: 5908 - DNA, 80 bp, synthetic construct
  misc_feature 1..80: note = Synthetic: >EU711054.1-cand-3140-3219
  source 1..80: mol_type = other DNA
aaaaatttgtgaccttttatttaaatgttttttttctaaattaactttaacacttccatctaaatagtctcttaaattat

SEQ ID NO: 5909 - DNA, 80 bp, synthetic construct
  misc_feature 1..80: note = Synthetic: >EU711054.1-cand-3220-3299
  source 1..80: mol_type = other DNA
ctaagttactcattccatttccagatggtaacagtttattatctcctacttgaccttttacatcttcaaatactactgta

SEQ ID NO: 5910 - DNA, 80 bp, synthetic construct
  misc_feature 1..80: note = Synthetic: >EU711054.1-cand-3300-3379
  source 1..80: mol_type = other DNA
aattgatctattgcaactcctaactcaaagtttaatctatcagctggaatattaatatttaaggcctttcctccacaaag

SEQ ID NO: 5911 - DNA, 80 bp, synthetic construct
  misc_feature 1..80: note = Synthetic: >EU711054.1-cand-3380-3459
  source 1..80: mol_type = other DNA
gtcaagtaaagcagcagcaacagttgttttaccactgtttataggccccttaaaaacccaatacctttttttaggtacat

SEQ ID NO: 5912 - DNA, 80 bp, synthetic construct
  misc_feature 1..80: note = Synthetic: >EU711054.1-cand-3460-3539
  source 1..80: mol_type = other DNA
tttcaactataacttttaggtacctgtatacaagctcatctattttaccatttaggcctaaataccaggctacaccagcc

SEQ ID NO: 5913 - DNA, 80 bp, synthetic construct
  misc_feature 1..80: note = Synthetic: >EU711054.1-cand-3540-3619
  source 1..80: mol_type = other DNA
atatataataaaacatcttgctcacctttaatagttttatccattttgtccagtattttttcaaatcttctagctaataa

SEQ ID NO: 5914 - DNA, 80 bp, synthetic construct
  misc_feature 1..80: note = Synthetic: >EU711054.1-cand-3620-3699
  source 1..80: mol_type = other DNA
atcttctctggacatatttaaactatctacccttctttttgcaataaccacatcaatagcctgttgacacacattttttt

SEQ ID NO: 5915 - DNA, 80 bp, synthetic construct
  misc_feature 1..80: note = Synthetic: >EU711054.1-cand-3700-3779
  source 1..80: mol_type = other DNA
gacttttactgtctgaaaatagtaaagcatttttttgatgttccatatgaagtctattatgagttgcatcttcattacta

SEQ ID NO: 5916 - DNA, 80 bp, synthetic construct
  misc_feature 1..80: note = Synthetic: >EVA91-cand-7330-7409
  source 1..80: mol_type = other DNA
tgacaatttgaattaatgttaattggcaaaacctttggtgtaccctgggcttgacaaagtcaccaaaggttaattaccct

SEQ ID NO: 5917 - DNA, 80 bp, synthetic construct
  misc_feature 1..80: note = Synthetic: >EVB100-cand-50-129
  source 1..80: mol_type = other DNA
ctggtatctcggtacctttgtgcgcctgttttatccaccctaaaccccgttgtaacttagaagatgagcaacactgatca

SEQ ID NO: 5918 - DNA, 80 bp, synthetic construct
  misc_feature 1..80: note = Synthetic: >EVB100-cand-210-289
  source 1..80: mol_type = other DNA
ggctgaaggagaaaacgttcgttatccggccagttacttcgagaaacctagtaacatcatggaggttgcgcagtgtttcg

SEQ ID NO: 5919 - DNA, 80 bp, synthetic construct
  misc_feature 1..80: note = Synthetic: >EVB100-cand-610-689
  source 1..80: mol_type = other DNA
taccatatagctattggattggccatccggtgtcaaacagagcaatcatttatttgtttgttggttttatacctctgaac

SEQ ID NO: 5920 - DNA, 80 bp, synthetic construct
  misc_feature 1..80: note = Synthetic: >EVB100-cand-690-769
  source 1..80: mol_type = other DNA
tttaaagtgctaaagactctcaattttatattatatctcaacaaatcaggatgggcgcacaggtatccacgcagaagact

SEQ ID NO: 5921 - DNA, 80 bp, synthetic construct
  misc_feature 1..80: note = Synthetic: >EVB100-cand-780-859
  source 1..80: mol_type = other DNA
agaccggtttgaacgccagtaataattcggttatacactatacaaatattaattactacagggatgctgcctccaattca

SEQ ID NO: 5922 - DNA, 80 bp, synthetic construct
  misc_feature 1..80: note = Synthetic: >EVB100-cand-850-929
  source 1..80: mol_type = other DNA
ctccaattcatcaaaccggcaggatttctcgcaagatcccagtaagtttaccgaaccggtaaaggatatcatgttaaaaa

SEQ ID NO: 5923 - DNA, 80 bp, synthetic construct
  misc_feature 1..80: note = Synthetic: >EVB100-cand-910-989
  source 1..80: mol_type = other DNA
aaaggatatcatgttaaaaactctaccagcgctgaattcaccaaaagcagaggagtgtgggtatagtgacagagttcgat

SEQ ID NO: 5924 - DNA, 80 bp, synthetic construct
  misc_feature 1..80: note = Synthetic: >EVB100-cand-990-1069
  source 1..80: mol_type = other DNA
caataaccttaggcaactccacaatcaccactcaggaatgtgcaaatgtggtagttggatacggtgtgtggccatcatac

SEQ ID NO: 5925 - DNA, 80 bp, synthetic construct
  misc_feature 1..80: note = Synthetic: >EVB100-cand-1070-1149
  source 1..80: mol_type = other DNA
ttagatgatgacgaggccacagccgaggatcaaccgacacaacccgacgtggccacgtgtagattttacacactcgaatc

SEQ ID NO: 5926 - DNA, 80 bp, synthetic construct
  misc_feature 1..80: note = Synthetic: >EVB100-cand-1150-1229
  source 1..80: mol_type = other DNA
cgtgcaatgggagactgggtctgatgggtggtggtggaagttcccggacatgctgaagaacatgggcctgttcgggcaga

SEQ ID NO: 5927 - DNA, 80 bp, synthetic construct
  misc_feature 1..80: note = Synthetic: >EVB100-cand-1230-1309
  source 1..80: mol_type = other DNA
atatgcactaccattatctcggcagatcagggtatacaatacacgtacaatgcaatgcttcaaagttccaccagggatgc

SEQ ID NO: 5928 - DNA, 80 bp, synthetic construct
  misc_feature 1..80: note = Synthetic: >EVB100-cand-1350-1429
  source 1..80: mol_type = other DNA
ctcaaacggattccacattcgagcacacagagttgaccaaacaagaagaaccgttcaaatttacctccacacctacgtcg

SEQ ID NO: 5929 - DNA, 80 bp, synthetic construct
  misc_feature 1..80: note = Synthetic: >EVB100-cand-1390-1469
  source 1..80: mol_type = other DNA
acaagaagaaccgttcaaatttacctccacacctacgtcgggaaaagtggtacaagctgcagtttgcaacgctgctatgg

SEQ ID NO: 5930 - DNA, 80 bp, synthetic construct
  misc_feature 1..80: note = Synthetic: >EVB100-cand-1470-1549
  source 1..80: mol_type = other DNA
gggttggagttggcaatctcacaatatttccccaccagtggataaacctaaggaccaacaacagtgccaccatcgtgatg

SEQ ID NO: 5931 - DNA, 80 bp, synthetic construct
  misc_feature 1..80: note = Synthetic: >EVB100-cand-1550-1629
  source 1..80: mol_type = other DNA
ccgtacatcaacagtgttcccatggataacatgttcagacattacaactttacccttatgataatcccatttgcaccatt

SEQ ID NO: 5932 - DNA, 80 bp, synthetic construct
  misc_feature 1..80: note = Synthetic: >EVB74-cand-6090-6169
  source 1..80: mol_type = other DNA
tcggcaatgtcaacactcacgtggatgagtatatgcaagaggccgttgaccactatgccgggcagctggccacactcgat

SEQ ID NO: 5933 - DNA, 80 bp, synthetic construct
  misc_feature 1..80: note = Synthetic: >EVB74-cand-6170-6249
  source 1..80: mol_type = other DNA
attagcactgagcctatgaaactggaagatgctgtgtatggtactgagggattggaagcactagacttaaccaccagcgc

SEQ ID NO: 5934 - DNA, 80 bp, synthetic construct
  misc_feature 1..80: note = Synthetic: >EVB74-cand-6250-6329
  source 1..80: mol_type = other DNA
aggctacccttacgtggccctaggcatcaagaaaagggacattctttcaaagaaaaccaaggacctcaccaagttaaagg

SEQ ID NO: 5935 - DNA, 80 bp, synthetic construct
  misc_feature 1..80: note = Synthetic: >EVB74-cand-6330-6409
  source 1..80: mol_type = other DNA
aatgcatggacaagtatggcctaaatttaccaaatggtgacctacgtcaaagaaccgagttgagatctgctgagaaggta

SEQ ID NO: 5936 - DNA, 80 bp, synthetic construct
  misc_feature 1..80: note = Synthetic: >EVB74-cand-6420-6499
  source 1..80: mol_type = other DNA
agtccagacttattgaggcttctagcctcaacgactcagtggccatgagacagacatttgggaacctgtacaagactttc

SEQ ID NO: 5937 - DNA, 80 bp, synthetic construct
  misc_feature 1..80: note = Synthetic: >EVB74-cand-6540-6619
  source 1..80: mol_type = other DNA
gtgacccggacgtgttttggagcaaaattcctgttatgcttgacggacacctcatagcgtttgactactcaagttatgat

SEQ ID NO: 5938 - DNA, 80 bp, synthetic construct
  misc_feature 1..80: note = Synthetic: >EVB74-cand-6590-6669
  source 1..80: mol_type = other DNA
ctcatagcgtttgactactcaagttatgatgccagtttaagcccggtgtggtttgcatgcctgaagcttcttttagagaa

SEQ ID NO: 5939 - DNA, 80 bp, synthetic construct
  misc_feature 1..80: note = Synthetic: >EVB74-cand-6670-6749
  source 1..80: mol_type = other DNA
gttgggctacaccaacaaggaaacaaactacatagatttcctgtgcaactcacaccacctgtacagggataagcactact

SEQ ID NO: 5940 - DNA, 80 bp, synthetic construct
  misc_feature 1..80: note = Synthetic: >EVB74-cand-6760-6839
  source 1..80: mol_type = other DNA
tgggatgccatcagggtgttcaggcaccagcatattcaattccatgattaacaacattataattaggaccctcatgttaa

SEQ ID NO: 5941 - DNA, 80 bp, synthetic construct
  misc_feature 1..80: note = Synthetic: >EVB74-cand-6830-6909
  source 1..80: mol_type = other DNA
ctcatgttaaaagtatacaaagggattgacttggaccaatttaggatgatcgcctacggagatgatgtgattgcatccta

SEQ ID NO: 5942 - DNA, 80 bp, synthetic construct
  misc_feature 1..80: note = Synthetic: >EVB74-cand-6910-6989
  source 1..80: mol_type = other DNA
tccatggcccatcgacgcttcgctgctggccgaagcaggaaaggaatacggtctgattatgaccccagctgacaagggtg

SEQ ID NO: 5943 - DNA, 80 bp, synthetic construct
  misc_feature 1..80: note = Synthetic: >EVB74-cand-6990-7069
  source 1..80: mol_type = other DNA
aatgcttcaacgaggttacatggacaaacgtgacctttttgaagaggtatttcagggccgacgaacagtatcctttccta

SEQ ID NO: 5944 - DNA, 80 bp, synthetic construct
  misc_feature 1..80: note = Synthetic: >EVB74-cand-7070-7149
  source 1..80: mol_type = other DNA
gtccatcctgtcatgcccatgaaagacatccatgagtccatcagatggactaaagaccccaaaaacacgcaagaccacgt

SEQ ID NO: 5945 - DNA, 80 bp, synthetic construct
  misc_feature 1..80: note = Synthetic: >EVB74-cand-7150-7229
  source 1..80: mol_type = other DNA
gcgttcgctatgcctactggcttggcataatggcgagcacgaatatgaggagttcattcgtaagatcagaagcgtgcctg

SEQ ID NO: 5946 - DNA, 80 bp, synthetic construct
  misc_feature 1..80: note = Synthetic: >EVB74-cand-7230-7309
  source 1..80: mol_type = other DNA
ttgggcgctgtctaacccttcccgcattctcaacattacgcaggaggtggctggactccttctaaaattagagtacaatt

SEQ ID NO: 5947 - DNA, 80 bp, synthetic construct
  misc_feature 1..80: note = Synthetic: >EVB74-cand-7290-7369
  source 1..80: mol_type = other DNA
tctaaaattagagtacaattaactacggatctcaaatggcttaaccctaccgcataaaccgaacttgataaaagtgcggt

SEQ ID NO: 5948 - DNA, 80 bp, synthetic construct
  misc_feature 1..80: note = Synthetic: >EVB82-cand-2060-2139
  source 1..80: mol_type = other DNA
ccattggtccggaagcatgaagttaacattcatgttttgcgggtctgccatggcaacaggcaaacttctattagcctact

SEQ ID NO: 5949 - DNA, 80 bp, synthetic construct
  misc_feature 1..80: note = Synthetic: >EVB82-cand-2140-2219
  source 1..80: mol_type = other DNA
cccctccaggagcatcagtcccgaagagcagaagggacgctatgctgggcacacatgtgatctgggacgttggccttcaa

SEQ ID NO: 5950 - DNA, 80 bp, synthetic construct
  misc_feature 1..80: note = Synthetic: >EVB82-cand-2220-2299
  source 1..80: mol_type = other DNA
tctagttgtgtcctctgtgtgccgtggatcagccagactcattatcgcctggtatcacaagacgaatacaccgcagccgg

SEQ ID NO: 5951 - DNA, 80 bp, synthetic construct
  misc_feature 1..80: note = Synthetic: >EVB82-cand-2300-2379
  source 1..80: mol_type = other DNA
gtatattacttgttggtatcagaccaacatagttgtaccaccagacactccgtcgagctgcgtggttctgtgttttgtgt

SEQ ID NO: 5952 - DNA, 80 bp, synthetic construct
  misc_feature 1..80: note = Synthetic: >EVB82-cand-2360-2439
  source 1..80: mol_type = other DNA
cgtggttctgtgttttgtgtcggcgtgcaatgattttagtgtcagaatgcttaaagactctcccttcattgaacaaaaag

SEQ ID NO: 5953 - DNA, 80 bp, synthetic construct
  misc_feature 1..80: note = Synthetic: >EVB82-cand-2470-2549
  source 1..80: mol_type = other DNA
tggacaacgctgttgtgcgagtggcggacaccattaggagcggcccctctaactcagaagcaatccctgcattgacagct

SEQ ID NO: 5954 - DNA, 80 bp, synthetic construct
  misc_feature 1..80: note = Synthetic: >EVB82-cand-2550-2629
  source 1..80: mol_type = other DNA
gccgaaaccgggcacacctcccaggtaactcctagtgacacaatgcagaccagacatgtgcgcaactaccactcgcgctc

SEQ ID NO: 5955 - DNA, 80 bp, synthetic construct
  misc_feature 1..80: note = Synthetic: >EVB82-cand-2630-2709
  source 1..80: mol_type = other DNA
agagtcgtcattagaaaatttcctgtgtagagcagcatgtgtgcacatagctaagtatgaagccaagagcacacaagatc

SEQ ID NO: 5956 - DNA, 80 bp, synthetic construct
  misc_feature 1..80: note = Synthetic: >EVB82-cand-2710-2789
  source 1..80: mol_type = other DNA
ccacggaccggtttgatagctgggaaataagaactagagacatggtgcagttgaggagaaaattcgagatgttcacgtat

SEQ ID NO: 5957 - DNA, 80 bp, synthetic construct
  misc_feature 1..80: note = Synthetic: >EVB82-cand-2790-2869
  source 1..80: mol_type = other DNA
ctacggttcgatatggaggtcacttttgtcatcaccagctatcaacatcagagcacaatctcgcaggatataccaccgct

SEQ ID NO: 5958 - DNA, 80 bp, synthetic construct
  misc_feature 1..80: note = Synthetic: >EVB82-cand-2870-2949
  source 1..80: mol_type = other DNA
gacacaccaaatcatgtatataccaccaggtggccctataccaacagctgttgacagctatgagtggcaaacttcgacca

SEQ ID NO: 5959 - DNA, 80 bp, synthetic construct
  misc_feature 1..80: note = Synthetic: >EVB82-cand-2950-3029
  source 1..80: mol_type = other DNA
atcccagcattttctggacagaagggaacgcaccgccacgcatgtccatccccttcattagtataggcaatgcatatagc

SEQ ID NO: 5960 - DNA, 80 bp, synthetic construct
  misc_feature 1..80: note = Synthetic: >EVB82-cand-2980-3059
  source 1..80: mol_type = other DNA
caccgccacgcatgtccatccccttcattagtataggcaatgcatatagcagcttttatgatgggtggtcacacttcgat

SEQ ID NO: 5961 - DNA, 80 bp, synthetic construct
  misc_feature 1..80: note = Synthetic: >EVB82-cand-3110-3189
  source 1..80: mol_type = other DNA
cgttcggcatgtaaataaagagaccccggcggatgttaccagctacgtgagagtgtattttaaacccaaacacgtaaaag

SEQ ID NO: 5962 - DNA, 80 bp, synthetic construct
  misc_feature 1..80: note = Synthetic: >EVB82-cand-3220-3299
  source 1..80: mol_type = other DNA
agtacaagaataaagcggacgtgaattttgaacccgaaccagtaaccaagacccgagcagacataaaccacgtgccttca

SEQ ID NO: 5963 - DNA, 80 bp, synthetic construct
  misc_feature 1..80: note = Synthetic: >EVB82-cand-3300-3379
  source 1..80: mol_type = other DNA
tcgacacactcgttaactaaccatggtgcatttggccaacaatcgggagctatatacgttggaaactatagagtcatcaa

SEQ ID NO: 5964 - DNA, 80 bp, synthetic construct
  misc_feature 1..80: note = Synthetic: >EVB85-cand-4490-4569
  source 1..80: mol_type = other DNA
cgctcacttgcagagaaacttaatagctcagtgtactccctaccaccagaccccgaccactttgatggttacaaacaaca

SEQ ID NO: 5965 - DNA, 80 bp, synthetic construct
  misc_feature 1..80: note = Synthetic: >EVB85-cand-4570-4649
  source 1..80: mol_type = other DNA
ggctgttgtaatcatggacgacttatgccaaaaccccgatggaaaagatgtgtctttattttgtcagatggtctctagtg

SEQ ID NO: 5966 - DNA, 80 bp, synthetic construct
  misc_feature 1..80: note = Synthetic: >EVB85-cand-4650-4729
  source 1..80: mol_type = other DNA
tcgacttcgttccaccaatggcagcactcgaagaaaaaggcattctctttacgtcaccatttgtcctcgcttccaccaat

SEQ ID NO: 5967 - DNA, 80 bp, synthetic construct
  misc_feature 1..80: note = Synthetic: >EVB85-cand-4730-4809
  source 1..80: mol_type = other DNA
gcagggtccattaacgcacccactgtgtcagacagtagagcgctcgccaggaggttccacttcgacatgaacatagaggt

SEQ ID NO: 5968 - DNA, 80 bp, synthetic construct
  misc_feature 1..80: note = Synthetic: >EVB85-cand-4810-4889
  source 1..80: mol_type = other DNA
catctctatgtacagccaaaatggtaagatcaacatgccaatgtcagtgaaaacatgtgacgaggagtgttgccctgtca

SEQ ID NO: 5969 - DNA, 80 bp, synthetic construct
  misc_feature 1..80: note = Synthetic: >EVB85-cand-4890-4969
  source 1..80: mol_type = other DNA
atttcaagaagtgttgcccacttgtatgtggtaaagccatccagttcattgacagaagaactcaggtgaggtactctttg

SEQ ID NO: 5970 - DNA, 80 bp, synthetic construct
  misc_feature 1..80: note = Synthetic: >EVB85-cand-4970-5049
  source 1..80: mol_type = other DNA
gacatgcttgtaacagagatgtttagggagtacaatcacagacatagtgtgggagcaacacttgaggctcttttccaagg

SEQ ID NO: 5971 - DNA, 80 bp, synthetic construct
  misc_feature 1..80: note = Synthetic: >EVB85-cand-5050-5129
  source 1..80: mol_type = other DNA
tccaccagtgtatagagaaatcaagatcagcgttgctccggagattcccccaccaccagccattgcagacctgttaaagt

SEQ ID NO: 5972 - DNA, 80 bp, synthetic construct
  misc_feature 1..80: note = Synthetic: >EVB85-cand-5130-5209
  source 1..80: mol_type = other DNA
cagtggatagtgaagctgttagggagtactgcaaggaaaagggatggttagtgcccgagattaactctaccttacaaatt

SEQ ID NO: 5973 - DNA, 80 bp, synthetic construct
  misc_feature 1..80: note = Synthetic: >EVB85-cand-5200-5279
  source 1..80: mol_type = other DNA
cttacaaattgaaaaacacgtgagtagggctttcatatgcctgcaagcactcactacctttgtctctgtggcagggatca

SEQ ID NO: 5974 - DNA, 80 bp, synthetic construct
  misc_feature 1..80: note = Synthetic: >EVB85-cand-5280-5359
  source 1..80: mol_type = other DNA
tttacatcatatacaagctgtttgcaggattccagggagcctacactggcatgcccaatcaaaagcccaaagttccgacc

SEQ ID NO: 5975 - DNA, 80 bp, synthetic construct
  misc_feature 1..80: note = Synthetic: >EVB85-cand-5360-5439
  source 1..80: mol_type = other DNA
ttgagacaagcaaaagttcagggtcccgcctttgaattcgccgtggctatgatgaagagaaatgctagtacagtaaaaac

SEQ ID NO: 5976 - DNA, 80 bp, synthetic construct
  misc_feature 1..80: note = Synthetic: >EVB85-cand-5430-5509
  source 1..80: mol_type = other DNA
cagtaaaaacagagtacggtgaattcacaatgcttggaatctatgatagatgggctgtattgccccgccacgccaaacca

SEQ ID NO: 5977 - DNA, 80 bp, synthetic construct
  misc_feature 1..80: note = Synthetic: >EVB85-cand-5510-5589
  source 1..80: mol_type = other DNA
gggcctaccatcctaatgaatgaacaagaagtgggtgtggttgatgcaaaagaattggtggataaggatggtaccaacct

SEQ ID NO: 5978 - DNA, 80 bp, synthetic construct
  misc_feature 1..80: note = Synthetic: >EVB85-cand-5590-5669
  source 1..80: mol_type = other DNA
agagctgacactcctaaaactcaacaggaatgagaaatttagggatatccgaggctttttaacaagagaggaggctgagg

SEQ ID NO: 5979 - DNA, 80 bp, synthetic construct
  misc_feature 1..80: note = Synthetic: >EVB85-cand-5670-5749
  source 1..80: mol_type = other DNA
tcaatgaggccgtacttgccatcaacactagcaaatttccaaacatgtacatccccgttggtcaagtaacagattatggt

SEQ ID NO: 5980 - DNA, 80 bp, synthetic construct
  misc_feature 1..80: note = Synthetic: >EVB88-cand-4980-5059
  source 1..80: mol_type = other DNA
ggtattcactagacatgctcgtgactgagatgttcagagagtacaaccacaggcacagtgtgggagcaacacttgaggca

SEQ ID NO: 5981 - DNA, 80 bp, synthetic construct
  misc_feature 1..80: note = Synthetic: >EVB88-cand-5140-5219
  source 1..80: mol_type = other DNA
cttattgaaatcagtggatagtgaagcggtcagagagtactgcaaagaaaagggatggttggtgcccgagatcaactcca

SEQ ID NO: 5982 - DNA, 80 bp, synthetic construct
  misc_feature 1..80: note = Synthetic: >EVB88-cand-5220-5299
  source 1..80: mol_type = other DNA
ctctgcaaattgagaagcacgtgagcagggccttcatctgcctgcaagcactcaccacgtttgtctctgtggcagggata

SEQ ID NO: 5983 - DNA, 80 bp, synthetic construct
  misc_feature 1..80: note = Synthetic: >EVB88-cand-5340-5419
  source 1..80: mol_type = other DNA
cctacactggcatgcccaatcaaaaacccaaagtaccaaccttgagacaggccaaggtgcaaggaccagcatttgaattc

SEQ ID NO: 5984 - DNA, 80 bp, synthetic construct
  misc_feature 1..80: note = Synthetic: >EVB88-cand-5380-5459
  source 1..80: mol_type = other DNA
cttgagacaggccaaggtgcaaggaccagcatttgaattcgcagtggcaatgatgagaagaaatgccagcactgtgaaga

SEQ ID NO: 5985 - DNA, 80 bp, synthetic construct
  misc_feature 1..80: note = Synthetic: >EVB88-cand-5460-5539
  source 1..80: mol_type = other DNA
ctgagtacggtgagttcacgatgcttggaatttatgacagatgggcagtgctaccccgacacgctaaacctggacccacc

SEQ ID NO: 5986 - DNA, 80 bp, synthetic construct
  misc_feature 1..80: note = Synthetic: >EVB88-cand-5540-5619
  source 1..80: mol_type = other DNA
atcctaatgaatgatcaggaagtgggtgtagtggacgccaaggagctagtagacaaagatggcaccaacctagaactgac

SEQ ID NO: 5987 - DNA, 80 bp, synthetic construct
  misc_feature 1..80: note = Synthetic: >EVB88-cand-5580-5659
  source 1..80: mol_type = other DNA
aggagctagtagacaaagatggcaccaacctagaactgacacttttgaagctcaacagaaatgaaaagtttagagacatc

SEQ ID NO: 5988 - DNA, 80 bp, synthetic construct
  misc_feature 1..80: note = Synthetic: >EVB88-cand-5700-5779
  source 1..80: mol_type = other DNA
ctgtgctcgccattaacaccagcaagttcccaaacatgtacattccagttggtcaagtaacagactatggcttcctcaac

SEQ ID NO: 5989 - DNA, 80 bp, synthetic construct
  misc_feature 1..80: note = Synthetic: >EVB88-cand-5780-5859
  source 1..80: mol_type = other DNA
ttgggtggcacccccaccaagcgcatgctaatgtacaacttcccaactcgtgcagggcaatgtggaggtgtcctaatgtc

SEQ ID NO: 5990 - DNA, 80 bp, synthetic construct
  misc_feature 1..80: note = Synthetic: >EVB88-cand-5860-5939
  source 1..80: mol_type = other DNA
aacaggcaaggtcctcggaatacatgtcggtggaaatggacaccaaggattctcagcagccctgctacgccactatttta

SEQ ID NO: 5991 - DNA, 80 bp, synthetic construct
  misc_feature 1..80: note = Synthetic: >EVB88-cand-5940-6019
  source 1..80: mol_type = other DNA
atgatgagcagggtgaaattgagttcatcgaaagctccaaggaggctggcttcccaatcatcaatacccccagcaaaaca

SEQ ID NO: 5992 - DNA, 80 bp, synthetic construct
  misc_feature 1..80: note = Synthetic: >EVB88-cand-5970-6049
  source 1..80: mol_type = other DNA
aaagctccaaggaggctggcttcccaatcatcaatacccccagcaaaacaaagcttgaacccagtgtgttccatcacgtc

SEQ ID NO: 5993 - DNA, 80 bp, synthetic construct
  misc_feature 1..80: note = Synthetic: >EVB88-cand-6180-6259
  source 1..80: mol_type = other DNA
cagttgatcactatgcaggacaactggcaaccctggacattagcacagaacccatgaagttggaggatgcagtttatggc

SEQ ID NO: 5994 - DNA, 80 bp, synthetic construct
  misc_feature 1..80: note = Synthetic: >EVB88-cand-6260-6339
  source 1..80: mol_type = other DNA
actgagggcttagaagcgctagatctgaccacaagtgcagggtacccctatgttgcccttggcatcaagaagagagacat

SEQ ID NO: 5995 - DNA, 80 bp, synthetic construct
  misc_feature 1..80: note = Synthetic: >EVB88-cand-6340-6419
  source 1..80: mol_type = other DNA
cctatccaagaagaccaaggacttaacaaagctaaaggagtgcatggacaagtatgggctgaaccttcccatggtcactt

SEQ ID NO: 5996 - DNA, 80 bp, synthetic construct
  misc_feature 1..80: note = Synthetic: >HCV.A15-cand-6090-6169
  source 1..80: mol_type = other DNA
tgttaaggagccagctgtccttaccaaaaatgatcccagattgaaagcagattttgaagaggctatcttttcaaagtatg

SEQ ID NO: 5997 - DNA, 80 bp, synthetic construct
  misc_feature 1..80: note = Synthetic: >HCV.A15-cand-6180-6259
  source 1..80: mol_type = other DNA
gatcactgaagttgatgagtacatgaaagaggcagtggaccactacgcaggacaactcatgtcgctggacatcaacacag

SEQ ID NO: 5998 - DNA, 80 bp, synthetic construct
  misc_feature 1..80: note = Synthetic: >HCV.A15-cand-6270-6349
  source 1..80: mol_type = other DNA
tcttgaggatgccatgtatggaaccgatggtcttgaagccctggacctcagtactagtgcaggatatccttatgttgcca

SEQ ID NO: 5999 - DNA, 80 bp, synthetic construct
  misc_feature 1..80: note = Synthetic: >HCV.A15-cand-6350-6429
  source 1..80: mol_type = other DNA
tgggaaagaagaaaagagacatcttaaataaacagaccagggacactaaagaaatgcagaggttactggacacctacggt

SEQ ID NO: 6000 - DNA, 80 bp, synthetic construct
  misc_feature 1..80: note = Synthetic: >HCV.A15-cand-6430-6509
  source 1..80: mol_type = other DNA
atcaatttacctctagttacctatgttaaagatgaactcaggtccaaaaccaaagtggagcagggcaaatccaggttgat

SEQ ID NO: 6001 - DNA, 80 bp, synthetic construct
  misc_feature 1..80: note = Synthetic: >HCV.A15-cand-6510-6589
  source 1..80: mol_type = other DNA
agaagcctcaagtttgaatgactcggtggcaatgagaatggcatttggtaacttgtatgcagctttccacaagaatccag

SEQ ID NO: 6002 - DNA, 80 bp, synthetic construct
  misc_feature 1..80: note = Synthetic: >HCV.A15-cand-6600-6679
  source 1..80: mol_type = other DNA
aggatccgccgttggttgtgacccagacttgttttggagcaagataccagtcctgatggaagataagctctttgcatttg

SEQ ID NO: 6003 - DNA, 80 bp, synthetic construct
  misc_feature 1..80: note = Synthetic: >HCV.A15-cand-6680-6759
  source 1..80: mol_type = other DNA
attacacaggatatgatgcatcactcagtcccgcttggtttgaggctctcaaaatggtattagagaagattggatttggt

SEQ ID NO: 6004 - DNA, 80 bp, synthetic construct
  misc_feature 1..80: note = Synthetic: >HCV.A15-cand-6760-6839
  source 1..80: mol_type = other DNA
gatagggtggactacatagattatctaaatcactctcaccacctctacaaaaacaaaacctattgtgtcaagggcggcat

SEQ ID NO: 6005 - DNA, 80 bp, synthetic construct
  misc_feature 1..80: note = Synthetic: >HCV.A15-cand-6840-6919
  source 1..80: mol_type = other DNA
gccatctggctgttcaggcacttccatttttaattcaatgattaataatttgatcatcaggacacttttactgaaaacct

SEQ ID NO: 6006 - DNA, 80 bp, synthetic construct
  misc_feature 1..80: note = Synthetic: >HCV.A15-cand-7090-7169
  source 1..80: mol_type = other DNA
aatgtaacattcttgaaaagattctttagagcagatgagaagtatccatttctggtgcacccagtaatgccaatgaaaga

SEQ ID NO: 6007 - DNA, 80 bp, synthetic construct
  misc_feature 1..80: note = Synthetic: >HCV.A15-cand-7250-7329
  source 1..80: mol_type = other DNA
acaatggtgaggaagaatataacaaatttctagctaaaataagaagtgtgccaatcggaagagcattattgctcccagag

SEQ ID NO: 6008 - DNA, 80 bp, synthetic construct
  misc_feature 1..80: note = Synthetic: >HCV.A16-cand-80-159
  source 1..80: mol_type = other DNA
tttataacccttccccctaagcagtaacttagaagctttgcacaatcacgaccaatagtgggcgtggcgcgccagtcacg

SEQ ID NO: 6009 - DNA, 80 bp, synthetic construct
  misc_feature 1..80: note = Synthetic: >HCV.A16-cand-300-379
  source 1..80: mol_type = other DNA
acttcccccgtgtagatcaggtcgatgagtcactgtaaaccccacgggcgaccgtgacagtggctgcgttggcggcctgc

SEQ ID NO: 6010 - DNA, 80 bp, synthetic construct
  misc_feature 1..80: note = Synthetic: >HCV.A16-cand-510-589
  source 1..80: mol_type = other DNA
ggcgcgtcgtaatgggtaactctgcagcggaaccgactactttgggtgtccgtgtttccttttattcttatattggctgc

SEQ ID NO: 6011 - DNA, 80 bp, synthetic construct
  misc_feature 1..80: note = Synthetic: >HCV.A16-cand-640-719
  source 1..80: mol_type = other DNA
ccggtgtctaacagagctattgtttacctatttattggatacgtccctcttaatctcaaggccattcaaactcttgatta

SEQ ID NO: 6012 - DNA, 80 bp, synthetic construct
  misc_feature 1..80: note = Synthetic: >HCV.A19-cand-4520-4599
  source 1..80: mol_type = other DNA
gagcaattgcaaagcaagcaaacaccagtacttactctttgcctccagatccttcacatttcgatggctacaagcaacag

SEQ ID NO: 6013 - DNA, 80 bp, synthetic construct
  misc_feature 1..80: note = Synthetic: >HCV.A19-cand-4640-4719
  source 1..80: mol_type = other DNA
gggaggatatgaaattgttctgtcaaatggtttccacagtggaatttataccaccaatggccagtttagaggaaaaggga

SEQ ID NO: 6014 - DNA, 80 bp, synthetic construct
  misc_feature 1..80: note = Synthetic: >HCV.A19-cand-4680-4759
  source 1..80: mol_type = other DNA
ggaatttataccaccaatggccagtttagaggaaaagggaatattgttcacctcagattatgtgcttgcttccaccaact

SEQ ID NO: 6015 - DNA, 80 bp, synthetic construct
  misc_feature 1..80: note = Synthetic: >HCV.A19-cand-4760-4839
  source 1..80: mol_type = other DNA
ccaacacaataacacctcccacagtatcagcatctgatgcattatctagaagatttgcttttgacatggacatataccca

SEQ ID NO: 6016 - DNA, 80 bp, synthetic construct
  misc_feature 1..80: note = Synthetic: >HCV.A19-cand-4920-4999
  source 1..80: mol_type = other DNA
cttctctacatgctgccccctggtgtgtgggaaagctattcaattgatggacaaaaataccaggatgagatactctctag

SEQ ID NO: 6017 - DNA, 80 bp, synthetic construct
  misc_feature 1..80: note = Synthetic: >HCV.A19-cand-5000-5079
  source 1..80: mol_type = other DNA
accagattaccactatgatgatcaacgagagaaacagaaggtacaacattggaggctgcttagaggcactgttccaaggc

SEQ ID NO: 6018 - DNA, 80 bp, synthetic construct
  misc_feature 1..80: note = Synthetic: >HCV.A19-cand-5080-5159
  source 1..80: mol_type = other DNA
ccaattgaatttaaagatcttaagattgatgtggtttccacaccaccgccctcagcaatatcagacctgctcaaatcagt

SEQ ID NO: 6019 - DNA, 80 bp, synthetic construct
  misc_feature 1..80: note = Synthetic: >HCV.A19-cand-5160-5239
  source 1..80: mol_type = other DNA
ggataatcaggaagttagggattattgcaaacaacagggctgggtggtggagatcccttcaaattctgtcaccattgaaa

SEQ ID NO: 6020 - DNA, 80 bp, synthetic construct
  misc_feature 1..80: note = Synthetic: >HCV.A19-cand-5240-5319
  source 1..80: mol_type = other DNA
gacacatttcccgtgcaactagtattctacaatcactctccacttttgcagtggtggcgggtatggtctatgtagtttac

SEQ ID NO: 6021 - DNA, 80 bp, synthetic construct
  misc_feature 1..80: note = Synthetic: >HCV.A19-cand-5320-5399
  source 1..80: mol_type = other DNA
aagctttttgcaggatttcagggcgcatacacaggactccctaatgcaaaaccaaaagtccctacaattagagcagctaa

SEQ ID NO: 6022 - DNA, 80 bp, synthetic construct
  misc_feature 1..80: note = Synthetic: >HCV.A19-cand-5400-5479
  source 1..80: mol_type = other DNA
agttcaaggacctgtatttgattatgcagttgccatggctaagaagaacatactcactgccaccacagagaagggtgagt

SEQ ID NO: 6023 - DNA, 80 bp, synthetic construct
  misc_feature 1..80: note = Synthetic: >HCV.A19-cand-5480-5559
  source 1..80: mol_type = other DNA
tcacaatgctgggtgtctatgacagggtagctgtgctccccactcactcaaacccaggcgaaaccatagttatatcagga

SEQ ID NO: 6024 - DNA, 80 bp, synthetic construct
  misc_feature 1..80: note = Synthetic: >HCV.A19-cand-5560-5639
  source 1..80: mol_type = other DNA
aaggaagtgaagatcttggatgctaaaagattagttgataatgatgaagttaatcttgaaattactattgtaaccttaga

SEQ ID NO: 6025 - DNA, 80 bp, synthetic construct
  misc_feature 1..80: note = Synthetic: >HCV.A19-cand-5640-5719
  source 1..80: mol_type = other DNA
tagaaatgaaaaatttagggatattagaactcacttaccaacccaaatccatgagactaatgatgcagtccttgctgtga

SEQ ID NO: 6026 - DNA, 80 bp, synthetic construct
  misc_feature 1..80: note = Synthetic: >HCV.A19-cand-5710-5789
  source 1..80: mol_type = other DNA
cttgctgtgaacacctccaaatttcctaacatgtacattccagttggatcagttgttgaacagggcatgttgaatcttgg

SEQ ID NO: 6027 - DNA, 80 bp, synthetic construct
  misc_feature 1..80: note = Synthetic: >HCV.A19-cand-5800-5879
  source 1..80: mol_type = other DNA
acaaacagaaccttcgatgtacaacttcccaaccaaagcaggacagtgtggtggtgttttgatggcaactggcaaggtga

SEQ ID NO: 6028 - DNA, 80 bp, synthetic construct
  misc_feature 1..80: note = Synthetic: >HCV.B2-cand-3530-3609
  source 1..80: mol_type = other DNA
gccgggcttggcggaggtccaggagagtgagtattacccaaggaggtaccaatctcatgtactacttgctgcagggtttt

SEQ ID NO: 6029 - DNA, 80 bp, synthetic construct
  misc_feature 1..80: note = Synthetic: >HCV.B2-cand-3570-3649
  source 1..80: mol_type = other DNA
aggaggtaccaatctcatgtactacttgctgcagggttttctgaaccaggtgactgtggcgggattctcagatgtgagca

SEQ ID NO: 6030 - DNA, 80 bp, synthetic construct
  misc_feature 1..80: note = Synthetic: >HCV.B2-cand-3650-3729
  source 1..80: mol_type = other DNA
tggagttattggtctggtgactatgggaggtgaaggcatagttggctttgctgatgtgcgtgaccttctatggttggaag

SEQ ID NO: 6031 - DNA, 80 bp, synthetic construct
  misc_feature 1..80: note = Synthetic: >HCV.B2-cand-3730-3809
  source 1..80: mol_type = other DNA
acgatgcaatggaacagggtgtgaaagattatgtcgaacagctagggaatgcctttggctcaggcttcacaaatcagatt

SEQ ID NO: 6032 - DNA, 80 bp, synthetic construct
  misc_feature 1..80: note = Synthetic: >HCV.B2-cand-3810-3889
  source 1..80: mol_type = other DNA
tgtgagcaggttaacctccttaaagaatccctagttgggcaagattccatcttagagaagtccctcaaggccctagtaag

SEQ ID NO: 6033 - DNA, 80 bp, synthetic construct
  misc_feature 1..80: note = Synthetic: >HCV.B2-cand-3890-3969
  source 1..80: mol_type = other DNA
aatcatatcagctctagtgattgtagtgagaaatcatgatgacctcatcacagtgactgccacgcttgcactcattggct

SEQ ID NO: 6034 - DNA, 80 bp, synthetic construct
  misc_feature 1..80: note = Synthetic: >HCV.B2-cand-3970-4049
  source 1..80: mol_type = other DNA
gcacctcatccccttggcggtggctcaaacaaaaagtctcccagtattacggaattcccatggcagaaagacaaaacaac

SEQ ID NO: 6035 - DNA, 80 bp, synthetic construct
  misc_feature 1..80: note = Synthetic: >HCV.B2-cand-4050-4129
  source 1..80: mol_type = other DNA
agctggttgaagaagttcacagagatgaccaacgcctgtaaaggcatggaatggatagctgtcaaaatccagaagttcat

SEQ ID NO: 6036 - DNA, 80 bp, synthetic construct
  misc_feature 1..80: note = Synthetic: >HCV.B2-cand-4130-4209
  source 1..80: mol_type = other DNA
agaatggctaaagattaagatcctaccggaggtaaaggagaagcatgagtttctgaacaggctaaaacagttgcccctgc

SEQ ID NO: 6037 - DNA, 80 bp, synthetic construct
  misc_feature 1..80: note = Synthetic: >HCV.B2-cand-4210-4289
  source 1..80: mol_type = other DNA
tggagagccagattgctaccattgagcagagtgcaccctcgcaaagtgaccaagaacaactgttctccaatgtccagtac

SEQ ID NO: 6038 - DNA, 80 bp, synthetic construct
  misc_feature 1..80: note = Synthetic: >HCV.B2-cand-4290-4369
  source 1..80: mol_type = other DNA
ttcgcacattactgcaggaagtatgctcccctgtatgccgctgaagcaaagagagtattttcactagaaaagaaaatgag

SEQ ID NO: 6039 - DNA, 80 bp, synthetic construct
  misc_feature 1..80: note = Synthetic: >HCV.B2-cand-4370-4449
  source 1..80: mol_type = other DNA
caattacatacagttcaagtccaaatgccgtattgagcctgtatgccttctgctccatggaagtcctggtgctggtaaat

SEQ ID NO: 6040 - DNA, 80 bp, synthetic construct
  misc_feature 1..80: note = Synthetic: >HCV.B2-cand-4460-4539
  source 1..80: mol_type = other DNA
taatttgattgggcgctcattggcagaaaaactcaatagctcagtgtactccctcccacctgatcctgaccactttgacg

SEQ ID NO: 6041 - DNA, 80 bp, synthetic construct
  misc_feature 1..80: note = Synthetic: >HCV.B2-cand-4540-4619
  source 1..80: mol_type = other DNA
gctacaagcaacaggctgtcgtgatcatggatgacctgtgccaaaaccctgacgggaaggatgtatctctgttctgccag

SEQ ID NO: 6042 - DNA, 80 bp, synthetic construct
  misc_feature 1..80: note = Synthetic: >HCV.B2-cand-4620-4699
  source 1..80: mol_type = other DNA
atggtgtccagtgttgactttgttccaccaatggcagcacttgaggaaaagggcattcttttcacatcaccttttgtcct

SEQ ID NO: 6043 - DNA, 80 bp, synthetic construct
  misc_feature 1..80: note = Synthetic: >HCV.B2-cand-4710-4789
  source 1..80: mol_type = other DNA
aacgcagggtccattaatgcacccactgtgtccgatagtagagctcttgctaggaggttccactttgacatgaatattga

SEQ ID NO: 6044 - DNA, 80 bp, synthetic construct
  misc_feature 1..80: note = Synthetic: >HCV.B4-cand-6530-6609
  source 1..80: mol_type = other DNA
agttgggtgtgaccccgacctattctggagcaagatcccagtcatgctcgatggccacctcattgcttttgactacagtg

SEQ ID NO: 6045 - DNA, 80 bp, synthetic construct
  misc_feature 1..80: note = Synthetic: >HCV.B4-cand-6590-6669
  source 1..80: mol_type = other DNA
cattgcttttgactacagtgggtatgatgctagcctgagcccagtgtggtttgcttgcctgaaactgctgttggagaaac

SEQ ID NO: 6046 - DNA, 80 bp, synthetic construct
  misc_feature 1..80: note = Synthetic: >HCV.B4-cand-6690-6769
  source 1..80: mol_type = other DNA
accaactacatagattacctgtgcaactcccaccacctgtacagagacaaacactactttgtaagaggcggaatgccatc

SEQ ID NO: 6047 - DNA, 80 bp, synthetic construct
  misc_feature 1..80: note = Synthetic: >HCV.B4-cand-6770-6849
  source 1..80: mol_type = other DNA
tgggtgttctggaaccagcatcttcaactcaatgattaacaacataatcatcagaacactaatgttgaaggtgtacaagg

SEQ ID NO: 6048 - DNA, 80 bp, synthetic construct
  misc_feature 1..80: note = Synthetic: >HCV.B4-cand-6900-6979
  source 1..80: mol_type = other DNA
gcgtcatacccacatcccattgatgcctcactgctagctgaagctggcaaagggtatggtctgatcatgacaccagcaga

SEQ ID NO: 6049 - DNA, 80 bp, synthetic construct
  misc_feature 1..80: note = Synthetic: >HCV.B4-cand-7100-7179
  source 1..80: mol_type = other DNA
tgaatctatcaggtggaccaaagatcccaaaaacactcaagaccatgtgcgatccttgtgcttattggcctggcacaatg

SEQ ID NO: 6050 - DNA, 80 bp, synthetic construct
  misc_feature 1..80: note = Synthetic: >HCV.B4-cand-7260-7339
  source 1..80: mol_type = other DNA
actctacgcaggaagtggttggactccttttaaaattagagcacaatttgatattaatttcaattggcttaaccctacca

SEQ ID NO: 6051 - DNA, 80 bp, synthetic construct
  misc_feature 1..80: note = Synthetic: >HCV.B5-cand-60-139
  source 1..80: mol_type = other DNA
ggtacctttgtgcgcctgttttatccaccccctccccaattgtaacgtagaagcacaaaccaagtggtcaatagatggct

SEQ ID NO: 6052 - DNA, 80 bp, synthetic construct
  misc_feature 1..80: note = Synthetic: >HCV.B5-cand-220-299
  source 1..80: mol_type = other DNA
gaaaacgttcgttacccggccaactacttcgagaagcccagtaccaccatgaaggttgcgcagtgtttcgttcagcacaa

SEQ ID NO: 6053 - DNA, 80 bp, synthetic construct
  misc_feature 1..80: note = Synthetic: >HCV.B5-cand-390-469
  source 1..80: mol_type = other DNA
atgggacgcttcaattccgacatggtgcgaagagtctattgagctagttggtagtcctccggcccctgaatgcggctaat

SEQ ID NO: 6054 - DNA, 80 bp, synthetic construct
  misc_feature 1..80: note = Synthetic: >HCV.B5-cand-460-539
  source 1..80: mol_type = other DNA
tgcggctaatcccaactgcggagcagacacccacaaaccagtgggcagtttgtcgtaacgggcaactctgcagcggaacc

SEQ ID NO: 6055 - DNA, 80 bp, synthetic construct
  misc_feature 1..80: note = Synthetic: >HCV.B5-cand-620-699
  source 1..80: mol_type = other DNA
ctattggattggccatccggtgacaaacagagctattatttacctttttgttggctttgtaccattgaatttcaaagtta

SEQ ID NO: 6056 - DNA, 80 bp, synthetic construct
  misc_feature 1..80: note = Synthetic: >HCV.B5-cand-700-779
  source 1..80: mol_type = other DNA
taaaaaccataaacttcatcttgacactcaacacagcaaaatgggagctcaagtatcaacacaaaagactggagcacacg

SEQ ID NO: 6057 - DNA, 80 bp, synthetic construct
  misc_feature 1..80: note = Synthetic: >HCV.B5-cand-780-859
  source 1..80: mol_type = other DNA
aaaccggtttgagtgctagtggtaactccatcatccactacacaaatataaattattataaggatgccgcctcgaactca

SEQ ID NO: 6058 - DNA, 80 bp, synthetic construct
  misc_feature 1..80: note = Synthetic: >HCV.B5-cand-860-939
  source 1..80: mol_type = other DNA
gcaaatagacaggatttcactcaagatccagggaagttcacagaacctgtgaaggacattatgatcaagtcgatgcctgc

SEQ ID NO: 6059 - DNA, 80 bp, synthetic construct
  misc_feature 1..80: note = Synthetic: >HCV.B5-cand-940-1019
  source 1..80: mol_type = other DNA
tctcaactctccgtcagcagaggagtgtggttacagtgatagggtaaggtccatcaccttgggtaactcaactataacaa

SEQ ID NO: 6060 - DNA, 80 bp, synthetic construct
  misc_feature 1..80: note = Synthetic: >LR861845.1-cand-3170-3249
  source 1..80: mol_type = other DNA
actatgtagtatgggacagtatatattatataactgagacagggatatgggaaaaaacagcagcatgtgttagctattgg

SEQ ID NO: 6061 - DNA, 80 bp, synthetic construct
  misc_feature 1..80: note = Synthetic: >LR861845.1-cand-3260-3339
  source 1..80: mol_type = other DNA
atataaaagatggagataccacatattatgtacaatttaaaagcgaatgtgagaaatatggaaatagtaatacgtgggaa

SEQ ID NO: 6062 - DNA, 80 bp, synthetic construct
  misc_feature 1..80: note = Synthetic: >LR861845.1-cand-3360-3439
  source 1..80: mol_type = other DNA
aattgattgtaatgactctatgtgcagtaccagtgacgacacggtatccgctactcagattgttagacagctacaacacg

SEQ ID NO: 6063 - DNA, 80 bp, synthetic construct
  misc_feature 1..80: note = Synthetic: >LR861845.1-cand-3420-3499
  source 1..80: mol_type = other DNA
tgttagacagctacaacacgcctccacgtcgacccccaaaaccgcatccgtgggcaccccaaaaccccacatccagacgc

SEQ ID NO: 6064 - DNA, 80 bp, synthetic construct
  misc_feature 1..80: note = Synthetic: >LR861845.1-cand-3500-3579
  source 1..80: mol_type = other DNA
cggctactaagcgacctagacagtgtggactcacagagcagcaccacggacttgtcaacacccacgtgcacaacccgctc

SEQ ID NO: 6065 - DNA, 80 bp, synthetic construct
  misc_feature 1..80: note = Synthetic: >LR861845.1-cand-3580-3659
  source 1..80: mol_type = other DNA
ctgtgttcaagtacaagtaacaacaaaagaaggaaagtgtgtagtggtaacactacgcctataatacacttaaaaggtga

SEQ ID NO: 6066 - DNA, 80 bp, synthetic construct
  misc_feature 1..80: note = Synthetic: >LR861845.1-cand-3660-3739
  source 1..80: mol_type = other DNA
caaaaacagtttgaaatgtttaagatataggctacgcaaatatgcagaccattactcagaaatatcctccacctggcatt

SEQ ID NO: 6067 - DNA, 80 bp, synthetic construct
  misc_feature 1..80: note = Synthetic: >LR861845.1-cand-3730-3809
  source 1..80: mol_type = other DNA
acctggcattggacaggttgtaataaaaacactggtatattaactgtaacatataatagtgaggtacaaagaaatacctt

SEQ ID NO: 6068 - DNA, 80 bp, synthetic construct
  misc_feature 1..80: note = Synthetic: >LR861845.1-cand-3810-3889
  source 1..80: mol_type = other DNA
tttggatgtagttactattcctaacagtgtacaaatctcggtgggatacatgactatatgaatctgtatattgtatacag

SEQ ID NO: 6069 - DNA, 80 bp, synthetic construct
  misc_feature 1..80: note = Synthetic: >LR861845.1-cand-3890-3969
  source 1..80: mol_type = other DNA
tatgtaacattactatgctatctttagtgtttttattgtgcttttctgtgtgcctttatgtgtgctgcaatgtcccgctt

SEQ ID NO: 6070 - DNA, 80 bp, synthetic construct
  misc_feature 1..80: note = Synthetic: >LR861845.1-cand-3970-4049
  source 1..80: mol_type = other DNA
gtgcagtctgtctatgtgtgtgctttcgcttggttgttggtgtttctttttatagttgttattacatccccattaacagc

SEQ ID NO: 6071 - DNA, 80 bp, synthetic construct
  misc_feature 1..80: note = Synthetic: >LR861845.1-cand-4040-4119
  source 1..80: mol_type = other DNA
cattaacagcatttgctgtatacatttgttgctatttactacctatgtttgtattacatatgcatgctttacacaccata

SEQ ID NO: 6072 - DNA, 80 bp, synthetic construct
  misc_feature 1..80: note = Synthetic: >LR861845.1-cand-4120-4199
  source 1..80: mol_type = other DNA
caataattactataatgtacagtacagtgtaacatacctgtgatgtgcatgttgttgtatttttgtatttttgtattttt

SEQ ID NO: 6073 - DNA, 80 bp, synthetic construct
  misc_feature 1..80: note = Synthetic: >LR861845.1-cand-4200-4279
  source 1..80: mol_type = other DNA
gtatttttgtatttttgtattttatatgtttaataaaccatggtatcccaccgtgcagcacgtcgcaagcgggcctctgc

SEQ ID NO: 6074 - DNA, 80 bp, synthetic construct
  misc_feature 1..80: note = Synthetic: >LR861845.1-cand-4280-4359
  source 1..80: mol_type = other DNA
aactgacttatatagaacatgtaagcaatccggtacgtgcccccctgatgttattaacaaagtggaaggcacaaccttag

SEQ ID NO: 6075 - DNA, 80 bp, synthetic construct
  misc_feature 1..80: note = Synthetic: >LR861845.1-cand-4360-4439
  source 1..80: mol_type = other DNA
ctgataaaattttacagtggtctagccttgggatatttttgggtggccttggcattggtaccggcagtggttctggaggc

SEQ ID NO: 6076 - DNA, 80 bp, synthetic construct
  misc_feature 1..80: note = Synthetic: >LR862007.1-cand-650-729
  source 1..80: mol_type = other DNA
tgaaaaagatgaaccagatggagttaatcatcctttgctactagctagacgagctgaaccacagcgtcacaacattgtgt

SEQ ID NO: 6077 - DNA, 80 bp, synthetic construct
  misc_feature 1..80: note = Synthetic: >LR862007.1-cand-730-809
  source 1..80: mol_type = other DNA
gtgtgtgttgtaagtgtaataatcaacttcagctagtagtagaaacctcgcaagacggattgcgagccttacagcagctg

SEQ ID NO: 6078 - DNA, 80 bp, synthetic construct
  misc_feature 1..80: note = Synthetic: >LR862007.1-cand-810-889
  source 1..80: mol_type = other DNA
tttatggacacactatcctttgtgtgtcctttgtgtgcagcaaaccagtaacctgcaatggccgattcggaaggtacaga

SEQ ID NO: 6079 - DNA, 80 bp, synthetic construct
  misc_feature 1..80: note = Synthetic: >LR862007.1-cand-910-989
  source 1..80: mol_type = other DNA
atggatggttttttgtgcaggcaatagtagataaaaaaacaggtgacaaaatttcagatgacgaggatgaaaatgcaaca

SEQ ID NO: 6080 - DNA, 80 bp, synthetic construct
  misc_feature 1..80: note = Synthetic: >LR862007.1-cand-970-1049
  source 1..80: mol_type = other DNA
acgaggatgaaaatgcaacagatacaggttcagacttggtagattttattgatgataccacaacaatttgtgtacaggca

SEQ ID NO: 6081 - DNA, 80 bp, synthetic construct
  misc_feature 1..80: note = Synthetic: >LR862007.1-cand-1050-1129
  source 1..80: mol_type = other DNA
gagcgcgagacagcacaggccttgtttaatgtgcaggaagcccaaagggatgcacgggaaatgcatgttttaaaacgaaa

SEQ ID NO: 6082 - DNA, 80 bp, synthetic construct
  misc_feature 1..80: note = Synthetic: >LR862007.1-cand-1130-1209
  source 1..80: mol_type = other DNA
gtttgggtgcagtatagaaaacagtagtgagaaagcggcggcaggaaaaaaagctaagtcaccattacaagaaatatcag

SEQ ID NO: 6083 - DNA, 80 bp, synthetic construct
  misc_feature 1..80: note = Synthetic: >LR862007.1-cand-1210-1289
  source 1..80: mol_type = other DNA
taaatgttaaccacccaaaagtaaaaagaaggttactaacagtgccagacagcggctatggctattctgaagtggaaatg

SEQ ID NO: 6084 - DNA, 80 bp, synthetic construct
  misc_feature 1..80: note = Synthetic: >LR862007.1-cand-1330-1409
  source 1..80: mol_type = other DNA
atagcaatggcagtgtttgtagcgacagtcaaatagactgtagcgacagcagtaacatggatgttgaaaacatagttcca

SEQ ID NO: 6085 - DNA, 80 bp, synthetic construct
  misc_feature 1..80: note = Synthetic: >LR862007.1-cand-1370-1449
  source 1..80: mol_type = other DNA
tagcgacagcagtaacatggatgttgaaaacatagttccaacatcccccactaatcaattgttacagttattacatagca

SEQ ID NO: 6086 - DNA, 80 bp, synthetic construct
  misc_feature 1..80: note = Synthetic: >LR862007.1-cand-1460-1539
  source 1..80: mol_type = other DNA
agcagctatgtatgcaaaatttaaagaattgtatgggttatcatttcaagatttggttaggacatttaaaagtgacagaa

SEQ ID NO: 6087 - DNA, 80 bp, synthetic construct
  misc_feature 1..80: note = Synthetic: >LR862007.1-cand-1540-1619
  source 1..80: mol_type = other DNA
ctacctgtagcgattgggtaaccgccatttttggtgtcaatccaactgtagcagaaggatttaaaacattaatacaaccc

SEQ ID NO: 6088 - DNA, 80 bp, synthetic construct
  misc_feature 1..80: note = Synthetic: >LR862007.1-cand-1580-1659
  source 1..80: mol_type = other DNA
tccaactgtagcagaaggatttaaaacattaatacaaccctatgtgctatatgcacatatacaatgcttagattgtgcat

SEQ ID NO: 6089 - DNA, 80 bp, synthetic construct
  misc_feature 1..80: note = Synthetic: >LR862007.1-cand-1700-1779
  source 1..80: mol_type = other DNA
aaaaaatagaataacagttgcaaaaggacttagcacattactacatgtaccagatacgtgcatgttaattgaaccaccca

SEQ ID NO: 6090 - DNA, 80 bp, synthetic construct
  misc_feature 1..80: note = Synthetic: >LR862007.1-cand-1770-1849
  source 1..80: mol_type = other DNA
gaaccacccaaattgcgtagtggtgttgcagcactatattggtacagaacaggaatgtccaatattagtgaagttatagg

SEQ ID NO: 6091 - DNA, 80 bp, synthetic construct
  misc_feature 1..80: note = Synthetic: >LR862007.1-cand-1860-1939
  source 1..80: mol_type = other DNA
gaatggatacaaagactaacaattatacaacatggagttgatgatagcgtgtttgacctgtcagaaatgatacaatgggc

SEQ ID NO: 6092 - DNA, 80 bp, synthetic construct
  misc_feature 1..80: note = Synthetic: >MG717391.1-cand-640-719
  source 1..80: mol_type = other DNA
tgcatgtggattgttccctgcacaagtgaaggctaggaatattatcagtccagtcatgggtgtgataggatttaactttt

SEQ ID NO: 6093 - DNA, 80 bp, synthetic construct
  misc_feature 1..80: note = Synthetic: >MG717391.1-cand-710-789
  source 1..80: mol_type = other DNA
tttaacttttttgttaaggactggatggacaggattgatgattttctagctgagcggtgcccattcctacctgagccaag

SEQ ID NO: 6094 - DNA, 80 bp, synthetic construct
  misc_feature 1..80: note = Synthetic: >MG717391.1-cand-790-869
  source 1..80: mol_type = other DNA
agaccctaaggatgctgcatcaggaacaaatagagcctattttataacacgtcaggcacaagtagatgaatcaaaggttg

SEQ ID NO: 6095 - DNA, 80 bp, synthetic construct
  misc_feature 1..80: note = Synthetic: >MG717391.1-cand-870-949
  source 1..80: mol_type = other DNA
ttgacattgaggaactgattgttgatgcaagagcagagtctgcaactcttttcacagacattgcaacgccccattcagtc

SEQ ID NO: 6096 - DNA, 80 bp, synthetic construct
  misc_feature 1..80: note = Synthetic: >MG717391.1-cand-960-1039
  source 1..80: mol_type = other DNA
catgtgcacctgataggtgtccccctacagcattatatgtcgctggaatgcctgaacttggtgcattttttgccatactt

SEQ ID NO: 6097 - DNA, 80 bp, synthetic construct
  misc_feature 1..80: note = Synthetic: >MG717391.1-cand-1040-1119
  source 1..80: mol_type = other DNA
caggacatgagaaatacaataatggcatcaaaatctgtagggactgctgaggagaaattaaagaaaaaatcggcattcta

SEQ ID NO: 6098 - DNA, 80 bp, synthetic construct
  misc_feature 1..80: note = Synthetic: >MG717391.1-cand-1120-1199
  source 1..80: mol_type = other DNA
ccaatcttaccttagacgaactcagtcaatgggaattcaactggatcaaaagataatcatcctttacatgattcattggg

SEQ ID NO: 6099 - DNA, 80 bp, synthetic construct
  misc_feature 1..80: note = Synthetic: >MG717391.1-cand-1210-1289
  source 1..80: mol_type = other DNA
tgttaatcactttcaccttggtgatgatatggacccggagttgagagagttagcacaggcccttgttgatgctaaagtca

SEQ ID NO: 6100 - DNA, 80 bp, synthetic construct
  misc_feature 1..80: note = Synthetic: >MG717391.1-cand-1290-1369
  source 1..80: mol_type = other DNA
aagagatttccaaccaggagccgcttaaactgtaagtgactgggccattcatttactcagggcattatattatcagggtt

SEQ ID NO: 6101 - DNA, 80 bp, synthetic construct
  misc_feature 1..80: note = Synthetic: >MG717391.1-cand-1370-1449
  source 1..80: mol_type = other DNA
atgggcactaattagggattattgcactagggtgggtttaagggccaattattctctaactttatgtaattgtagttaag

SEQ ID NO: 6102 - DNA, 80 bp, synthetic construct
  misc_feature 1..80: note = Synthetic: >MG717391.1-cand-1460-1539
  source 1..80: mol_type = other DNA
gttctatgttaacatgttaagtttgagtttaatgttagtatctgttaagtttaagttcaagtttaagtttaagtttaagt

SEQ ID NO: 6103 - DNA, 80 bp, synthetic construct
  misc_feature 1..80: note = Synthetic: >MG717391.1-cand-1540-1619
  source 1..80: mol_type = other DNA
ttactgttagttttgttaagtttgacctatgtgtaagattgtggtaataatcgtccagttaatcatctctataggtagtg

SEQ ID NO: 6104 - DNA, 80 bp, synthetic construct
  misc_feature 1..80: note = Synthetic: >MG717391.1-cand-1620-1699
  source 1..80: mol_type = other DNA
tcattatgtgatcaattcttagatgtctagttgaaattatatatgttaagttgattagtatattgggtcttaattatata

SEQ ID NO: 6105 - DNA, 80 bp, synthetic construct
  misc_feature 1..80: note = Synthetic: >MG717391.1-cand-1710-1789
  source 1..80: mol_type = other DNA
agtcaggtaatcgttataggtcagtacatgttatgattatatgttgtcaattcaattatctttcattctgccttattcat

SEQ ID NO: 6106 - DNA, 80 bp, synthetic construct
  misc_feature 1..80: note = Synthetic: >MG717391.1-cand-1800-1879
  source 1..80: mol_type = other DNA
agggtattatctcaggtctatccctatattggaagtttgtttgattactatgttgactggaactaacactatgattccat

SEQ ID NO: 6107 - DNA, 80 bp, synthetic construct
  misc_feature 1..80: note = Synthetic: >MG717391.1-cand-1890-1969
  source 1..80: mol_type = other DNA
gtatatttgggtgtaaatttcattctatcaatagtatacatagcactaatgcctgctttgctactaactgattattccta

SEQ ID NO: 6108 - DNA, 80 bp, synthetic construct
  misc_feature 1..80: note = Synthetic: >MG717393.1-cand-360-439
  source 1..80: mol_type = other DNA
agtgacagtgacagctgatgttgctaaaggaattcgtgagaagaaattaaaatatgaaagtggtcttcagtacattgagc

SEQ ID NO: 6109 - DNA, 80 bp, synthetic construct
  misc_feature 1..80: note = Synthetic: >MG717393.1-cand-440-519
  source 1..80: mol_type = other DNA
tgttattggaccaggaacataagaagggtaatctaaatcaggcgtataggatcacatttgatgttgtggctgtcaagaca

SEQ ID NO: 6110 - DNA, 80 bp, synthetic construct
  misc_feature 1..80: note = Synthetic: >MG717393.1-cand-570-649
  source 1..80: mol_type = other DNA
agttcagcacatgaggttaatacaggctgatattaattatgttagagagcatcttatcaagtcagatgagcgtgcttcat

SEQ ID NO: 6111 - DNA, 80 bp, synthetic construct
  misc_feature 1..80: note = Synthetic: >MG717393.1-cand-610-689
  source 1..80: mol_type = other DNA
gttagagagcatcttatcaagtcagatgagcgtgcttcattagaggctatgtttaacttaaaattccatattggtggtcc

SEQ ID NO: 6112 - DNA, 80 bp, synthetic construct
  misc_feature 1..80: note = Synthetic: >MG717393.1-cand-680-759
  source 1..80: mol_type = other DNA
ttggtggtcctaaactaagatatttcaatataccagattataagccacaaccattatgccacccagatattagtaagttg

SEQ ID NO: 6113 - DNA, 80 bp, synthetic construct
  misc_feature 1..80: note = Synthetic: >MG717393.1-cand-760-839
  source 1..80: mol_type = other DNA
ttatggtattgcaagcattggctcacagaagatcatgattttgtatttaaggaagtcacaggcagtaatgtgatgaatac

SEQ ID NO: 6114 - DNA, 80 bp, synthetic construct
  misc_feature 1..80: note = Synthetic: >MG717393.1-cand-840-919
  source 1..80: mol_type = other DNA
attcgagaataatgaggagttatatatgtctaggtatagggaatcccgcaagccaagaaactttttactaatgcagggct

SEQ ID NO: 6115 - DNA, 80 bp, synthetic construct
  misc_feature 1..80: note = Synthetic: >MG717393.1-cand-920-999
  source 1..80: mol_type = other DNA
ctattcaaggcccttatcttccatctactattagttcagatcagtgtgatactagaattgggtgtttagagattttaaag

SEQ ID NO: 6116 - DNA, 80 bp, synthetic construct
  misc_feature 1..80: note = Synthetic: >MG717393.1-cand-1000-1079
  source 1..80: mol_type = other DNA
gtcaatcctgagacacctgtacaggcaattgcaattgatatggcatttaagtatatggagcttaataaggaagaaattat

SEQ ID NO: 6117 - DNA, 80 bp, synthetic construct
  misc_feature 1..80: note = Synthetic: >MG717393.1-cand-1070-1149
  source 1..80: mol_type = other DNA
aagaaattataaactattataatccaagagttcattttcagccaacacagtctgtgaaggaaccaggaacattcaaactg

SEQ ID NO: 6118 - DNA, 80 bp, synthetic construct
  misc_feature 1..80: note = Synthetic: >MG717393.1-cand-1160-1239
  source 1..80: mol_type = other DNA
aactgaatcctatgtctaaatcaatattagatcaggttggtaagcataaatccgagaaaggtttatttggtgagcctttg

SEQ ID NO: 6119 - DNA, 80 bp, synthetic construct
  misc_feature 1..80: note = Synthetic: >MG717393.1-cand-1240-1319
  source 1..80: mol_type = other DNA
gaaagcatcaatattgctagtcagatccagcaaaatgaatgctcttgcatcattgagtcaattctttcaaatttagaggt

SEQ ID NO: 6120 - DNA, 80 bp, synthetic construct
  misc_feature 1..80: note = Synthetic: >MG717393.1-cand-1330-1409
  source 1..80: mol_type = other DNA
gaggtgacaatgaacttagcacaacctaggaaaacaacaggtgttgatgagttactgggtaaattttacgagaatgaact

SEQ ID NO: 6121 - DNA, 80 bp, synthetic construct
  misc_feature 1..80: note = Synthetic: >MG717393.1-cand-1420-1499
  source 1..80: mol_type = other DNA
atgattagtattttgaggaagactgcagcctggcatttagggcatttgataagagatataacagaaagccttattgccca

SEQ ID NO: 6122 - DNA, 80 bp, synthetic construct
  misc_feature 1..80: note = Synthetic: >MG717393.1-cand-1500-1579
  source 1..80: mol_type = other DNA
tgctgggttgaagagatcaaagtattggtctatccatgcatatgatcatggtggagtcattttgtttattcttccatcaa

SEQ ID NO: 6123 - DNA, 80 bp, synthetic construct
  misc_feature 1..80: note = Synthetic: >MG717393.1-cand-1580-1659
  source 1..80: mol_type = other DNA
aatccttagaagttgttggctcatacatccggtatttcactgtctttaaagacggtatcggattgatagatggagataac

SEQ ID NO: 6124 - DNA, 80 bp, synthetic construct
  misc_feature 1..80: note = Synthetic: >NC_001611.1-cand-14270-14349
  source 1..80: mol_type = other DNA
ctgacaagatccgttagtttaatatccttagtcatcttgtctagaatggcgtatctaactgcgggtttaggctttagttt

SEQ ID NO: 6125 - DNA, 80 bp, synthetic construct
  misc_feature 1..80: note = Synthetic: >NC_001611.1-cand-14350-14429
  source 1..80: mol_type = other DNA
agtttctatatctatatctacatctatgtctttatccaacactaaaaatataatagctaatattttattacaatcatccg

SEQ ID NO: 6126 - DNA, 80 bp, synthetic construct
  misc_feature 1..80: note = Synthetic: >NC_001611.1-cand-14510-14589
  source 1..80: mol_type = other DNA
gatgattgatgaataatacatttaaatttatcatctgtaagatttttgagatatctcattaaaatattattagggtcagt

SEQ ID NO: 6127 - DNA, 80 bp, synthetic construct
  misc_feature 1..80: note = Synthetic: >NC_001611.1-cand-14590-14669
  source 1..80: mol_type = other DNA
actcattatcatatattggcagcagctattacttattttattttatttttctttattttattatttttcaccatatagat

SEQ ID NO: 6128 - DNA, 80 bp, synthetic construct
  misc_feature 1..80: note = Synthetic: >NC_001611.1-cand-14670-14749
  source 1..80: mol_type = other DNA
caatcattagatcatcaaaatatgtttcaatcatcctaaagagtatggtaaatgactcttcccatctaatttctggacgt

SEQ ID NO: 6129 - DNA, 80 bp, synthetic construct
  misc_feature 1..80: note = Synthetic: >NC_001611.1-cand-14750-14829
  source 1..80: mol_type = other DNA
tcaccaatgtctctagccactttggcactaatagcgatcattcgcttaacatcttctacattattaactggttgatttaa

SEQ ID NO: 6130 - DNA, 80 bp, synthetic construct
  misc_feature 1..80: note = Synthetic: >NC_001611.1-cand-14830-14909
  source 1..80: mol_type = other DNA
tctatctagcaatggaccgtcggacagtgtcattctcatgttcttaatcaatgtacatacatcactgtcatctaccaatt

SEQ ID NO: 6131 - DNA, 80 bp, synthetic construct
  misc_feature 1..80: note = Synthetic: >NC_001611.1-cand-14910-14989
  source 1..80: mol_type = other DNA
catccaacaacataagcttttcaaaatcatcattataatatgatggatcgccatcatttctccaaagaatatatctaata

SEQ ID NO: 6132 - DNA, 80 bp, synthetic construct
  misc_feature 1..80: note = Synthetic: >NC_001611.1-cand-15070-15149
  source 1..80: mol_type = other DNA
taatacttattcatattttagtttttaggattgataatcaacataaaaattaatacatcatcaattttgaaaatacttag

SEQ ID NO: 6133 - DNA, 80 bp, synthetic construct
  misc_feature 1..80: note = Synthetic: >NC_001611.1-cand-15280-15359
  source 1..80: mol_type = other DNA
atccactttaaaagtgtcataccgggttctttttatttttttaaacagatcaatggtgtgatgttgattaggtcttttac

SEQ ID NO: 6134 - DNA, 80 bp, synthetic construct
  misc_feature 1..80: note = Synthetic: >NC_001611.1-cand-15440-15519
  source 1..80: mol_type = other DNA
atatggcactgtgtattatttagttcatccttgttcatcattaggaatctatccaatatggcaattatactagaactata

SEQ ID NO: 6135 - DNA, 80 bp, synthetic construct
  misc_feature 1..80: note = Synthetic: >NC_001611.1-cand-15520-15599
  source 1..80: mol_type = other DNA
agtgtgttgtaaacacatattgatgtgtctgtttatacaattaatgatatttggatccatgctactaccttcgggtaaaa

SEQ ID NO: 6136 - DNA, 80 bp, synthetic construct
  misc_feature 1..80: note = Synthetic: >NC_001611.1-cand-15600-15679
  source 1..80: mol_type = other DNA
ttggagaatcgtataccatttctagtactttaggttcattgttatccattgtagaggatgacatgctcgaatcatacaaa

SEQ ID NO: 6137 - DNA, 80 bp, synthetic construct
  misc_feature 1..80: note = Synthetic: >NC_001611.1-cand-15850-15929
  source 1..80: mol_type = other DNA
gatttatctagtttatctttttctatcgctttcatagttagatacatagtctcggaagtcggattatgtaacatcaactt

SEQ ID NO: 6138 - DNA, 80 bp, synthetic construct
  misc_feature 1..80: note = Synthetic: >NC_001611.1-cand-15930-16009
  source 1..80: mol_type = other DNA
cgataaaattactgggttatttagtcttacgcattcactcatacatgtattaccgttaactacagagtctacactaaaat

SEQ ID NO: 6139 - DNA, 80 bp, synthetic construct
  misc_feature 1..80: note = Synthetic: >NC_001611.1-cand-16170-16249
  source 1..80: mol_type = other DNA
tttatcattaataatttctagaatatcatctctatcataaaagatacaaatattaactgtttgatccgtaataacattac

SEQ ID NO: 6140 - DNA, 80 bp, synthetic construct
  misc_feature 1..80: note = Synthetic: >NC_001611.1-cand-43250-43329
  source 1..80: mol_type = other DNA
atgataatcaaacacatctacgaacaatatcttatttcggtatctgaagtacttattaaaacctatgatatccatgggtg

SEQ ID NO: 6141 - DNA, 80 bp, synthetic construct
  misc_feature 1..80: note = Synthetic: >NC_001611.1-cand-43400-43479
  source 1..80: mol_type = other DNA
caatctccacgtatggaactcatgtagcataggtaatgtaacgcgtatattttatacattttttagttatctgatgaaag

SEQ ID NO: 6142 - DNA, 80 bp, synthetic construct
  misc_feature 1..80: note = Synthetic: >NC_001611.1-cand-43480-43559
  source 1..80: mol_type = other DNA
ataaactagatatataaataatcccattctaatactttaacatgtgtattacatgcatcttattagaatattaacctaac

SEQ ID NO: 6143 - DNA, 80 bp, synthetic construct
  misc_feature 1..80: note = Synthetic: >NC_001611.1-cand-43560-43639
  source 1..80: mol_type = other DNA
taaaagacataatataaaaacttattacatagttgataaaaagcggtaggctataaatattatggcagcagtcgttccgc

SEQ ID NO: 6144 - DNA, 80 bp, synthetic construct
  misc_feature 1..80: note = Synthetic: >NC_001611.1-cand-43710-43789
  source 1..80: mol_type = other DNA
aggtagaccgttaatgaagaacacatatttgtttgataattacgcgtatggatggataccagaaacggcaatttggagta

SEQ ID NO: 6145 - DNA, 80 bp, synthetic construct
  misc_feature 1..80: note = Synthetic: >NC_001611.1-cand-43790-43869
  source 1..80: mol_type = other DNA
gtcgatacgcaaacctagatgcaagtgactattatcccatttcgttgggattacttaaaaagtttaagtttctcatgtct

SEQ ID NO: 6146 - DNA, 80 bp, synthetic construct
  misc_feature 1..80: note = Synthetic: >NC_001611.1-cand-43870-43949
  source 1..80: mol_type = other DNA
ctatataaaggtcctattccagtatacgaagaaaaagtaaatactgaattcatagccaatggatcgttctctggtagata

SEQ ID NO: 6147 - DNA, 80 bp, synthetic construct
  misc_feature 1..80: note = Synthetic: >NC_001611.1-cand-43950-44029
  source 1..80: mol_type = other DNA
cgtatcatatcttcgaaagttttctgctcttccaacaaacgagtttattagttttttgttactgacttccattccaatct

SEQ ID NO: 6148 - DNA, 80 bp, synthetic construct
  misc_feature 1..80: note = Synthetic: >NC_001611.1-cand-44430-44509
  source 1..80: mol_type = other DNA
acaactgttgtgaatattttatgcttcgtaaaatgtaggtcttgaaccaaacattctttcaaagaatgagatacataaaa

SEQ ID NO: 6149 - DNA, 80 bp, synthetic construct
  misc_feature 1..80: note = Synthetic: >NC_001611.1-cand-44670-44749
  source 1..80: mol_type = other DNA
aatatatgcaaaataatatcgttctccaagttctatagtctctggattatttttattatattcagtaaccaaatacatat

SEQ ID NO: 6150 - DNA, 80 bp, synthetic construct
  misc_feature 1..80: note = Synthetic: >NC_001611.1-cand-45060-45139
  source 1..80: mol_type = other DNA
cttcgattgcataatcagattcttatataccgcctcaaactctattttaaaattattaaacaatactctactattaatca

SEQ ID NO: 6151 - DNA, 80 bp, synthetic construct
  misc_feature 1..80: note = Synthetic: >NC_001611.1-cand-45300-45379
  source 1..80: mol_type = other DNA
ataaaatggattacttaatggattggcaaaccgtaacataccgttagataactctgctccatttagtaccgattctagat

SEQ ID NO: 6152 - DNA, 80 bp, synthetic construct
  misc_feature 1..80: note = Synthetic: >NC_001611.1-cand-46020-46099
  source 1..80: mol_type = other DNA
cgcacccgcgtctgtttttgtttctactccataatactcccacaaatactgacacaagcaagcatcatgaatacagtatc

SEQ ID NO: 6153 - DNA, 80 bp, synthetic construct
  misc_feature 1..80: note = Synthetic: >NC_001611.1-cand-46180-46259
  source 1..80: mol_type = other DNA
ttatacgtatcatttgttaaagtgggacatgatagtacaactttgaatccattttcccaaatatctttatgaattacttt

SEQ ID NO: 6154 - DNA, 80 bp, synthetic construct
  misc_feature 1..80: note = Synthetic: >NC_001611.1-cand-46260-46339
  source 1..80: mol_type = other DNA
acatataatatcatcaaccgtcacataattacctgtggttaaaacctttgcaaatacagcggctttgcctttagcgtccg

SEQ ID NO: 6155 - DNA, 80 bp, synthetic construct
  misc_feature 1..80: note = Synthetic: >NC_001611.1-cand-46660-46739
  source 1..80: mol_type = other DNA
agatcaaagttatgtccgttaaaggtaacaatatagtcgaacgttagttccaacaattgtttagctatttgtagcaaaac

SEQ ID NO: 6156 - DNA, 80 bp, synthetic construct
  misc_feature 1..80: note = Synthetic: >NC_001796.2-cand-8760-8839
  source 1..80: mol_type = other DNA
gccttatgatatggatgacgactcaatactagttatcactagacagaaaataaaactcaataaattagataaaagacaac

SEQ ID NO: 6157 - DNA, 80 bp, synthetic construct
  misc_feature 1..80: note = Synthetic: >NC_001796.2-cand-8840-8919
  source 1..80: mol_type = other DNA
gatctattagaagattaaaattaatattaactgagaaagtgaatgacttaggaaaatacacatttatcagatatccagaa

SEQ ID NO: 6158 - DNA, 80 bp, synthetic construct
  misc_feature 1..80: note = Synthetic: >NC_001796.2-cand-8920-8999
  source 1..80: mol_type = other DNA
atgtcaaaagaaatgttcaaattatatatacctggtattaacagtaaagtgactgaattattacttaaagcagatagaac

SEQ ID NO: 6159 - DNA, 80 bp, synthetic construct
  misc_feature 1..80: note = Synthetic: >NC_001796.2-cand-9000-9079
  source 1..80: mol_type = other DNA
atatagtcaaatgactgatggattaagagatctatggattaacgtgctatcaaaattagcctcaaaaaatgatggaagca

SEQ ID NO: 6160 - DNA, 80 bp, synthetic construct
  misc_feature 1..80: note = Synthetic: >NC_001796.2-cand-9080-9159
  source 1..80: mol_type = other DNA
attatgatcttaatgaagaaattaataatatatcaaaagttcacacaacttataaatcagataaatggtataatccattc

SEQ ID NO: 6161 - DNA, 80 bp, synthetic construct
  misc_feature 1..80: note = Synthetic: >NC_001796.2-cand-9160-9239
  source 1..80: mol_type = other DNA
aaaacatggtttactatcaagtatgatatgagaagattacaaaaagctcgaaatgagatcacttttaatgttgggaaaga

SEQ ID NO: 6162 - DNA, 80 bp, synthetic construct
  misc_feature 1..80: note = Synthetic: >NC_001796.2-cand-9240-9319
  source 1..80: mol_type = other DNA
ttataacttgttagaagaccagaagaatttcttattgatacatccagaattggttttgatattagataaacaaaactata

SEQ ID NO: 6163 - DNA, 80 bp, synthetic construct
  misc_feature 1..80: note = Synthetic: >NC_001796.2-cand-9320-9399
  source 1..80: mol_type = other DNA
atggttatctaattactcctgaattagtactgatgtattgtgacgtagtcgaaggccgatggaatataagtgcatgtgct

SEQ ID NO: 6164 - DNA, 80 bp, synthetic construct
  misc_feature 1..80: note = Synthetic: >NC_001796.2-cand-9400-9479
  source 1..80: mol_type = other DNA
aagctagatccaaaattacaatctatgtatcaaaaaggtaataacctatgggaagtgatagataaattgtttccaattat

SEQ ID NO: 6165 - DNA, 80 bp, synthetic construct
  misc_feature 1..80: note = Synthetic: >NC_001796.2-cand-9480-9559
  source 1..80: mol_type = other DNA
gggagaaaagacatttgatgtgatatcattattagaaccacttgcattatccttaattcaaactcatgatcctgttaaac

SEQ ID NO: 6166 - DNA, 80 bp, synthetic construct
  misc_feature 1..80: note = Synthetic: >NC_001796.2-cand-9560-9639
  source 1..80: mol_type = other DNA
aactaagaggagcttttttaaatcatgtgttatccgaaatggaattgatatttgaatctggagaatcgattagggaattt

SEQ ID NO: 6167 - DNA, 80 bp, synthetic construct
  misc_feature 1..80: note = Synthetic: >NC_001796.2-cand-9640-9719
  source 1..80: mol_type = other DNA
ctgagtgtagattacattgataaaatcttagatatttttaatgaatctacaatagatgaaatagcagagattttctcttt

SEQ ID NO: 6168 - DNA, 80 bp, synthetic construct
  misc_feature 1..80: note = Synthetic: >NC_001796.2-cand-9720-9799
  source 1..80: mol_type = other DNA
ttttagaacatttgggcatcctccattagaggctagtattgcagcagaaaaggttagaaaatatatgtatattgagaaac

SEQ ID NO: 6169 - DNA, 80 bp, synthetic construct
  misc_feature 1..80: note = Synthetic: >NC_001796.2-cand-9810-9889
  source 1..80: mol_type = other DNA
tgacactgttaataaatgccatgctatcttctgtacaataataattaacggatatagagagaggcatggtggacagtggc

SEQ ID NO: 6170 - DNA, 80 bp, synthetic construct
  misc_feature 1..80: note = Synthetic: >NC_001796.2-cand-9890-9969
  source 1..80: mol_type = other DNA
ctcctgtgacattacctgaccatgcacacgaattcatcataaatgcttacggttcaaactctgcgatatcatatgaaaac

SEQ ID NO: 6171 - DNA, 80 bp, synthetic construct
  misc_feature 1..80: note = Synthetic: >NC_001796.2-cand-9970-10049
  source 1..80: mol_type = other DNA
gctgttgattattaccagagcttcataggaataaaatttaataaattcatagagcctcagttagatgaggatttgacaat

SEQ ID NO: 6172 - DNA, 80 bp, synthetic construct
  misc_feature 1..80: note = Synthetic: >NC_001796.2-cand-13900-13979
  source 1..80: mol_type = other DNA
ctagatgctagtacaagtggtttgacacttcctcaaggagggaattatctatcgcatcaattgagattattcggaatcaa

SEQ ID NO: 6173 - DNA, 80 bp, synthetic construct
  misc_feature 1..80: note = Synthetic: >NC_001796.2-cand-13980-14059
  source 1..80: mol_type = other DNA
cagcactagttgtttgaaagctcttgagttatcacaaattttaatgaaggaagttaataaagacaaggacaggctcttcc

SEQ ID NO: 6174 - DNA, 80 bp, synthetic construct
  misc_feature 1..80: note = Synthetic: >NC_001796.2-cand-14060-14139
  source 1..80: mol_type = other DNA
tgggagaaggagcaggagctatgctagcatgttatgatgccacattaggacctgcaattaattattataattcaggtttg

SEQ ID NO: 6175 - DNA, 80 bp, synthetic construct
  misc_feature 1..80: note = Synthetic: >NC_001796.2-cand-14150-14229
  source 1..80: mol_type = other DNA
atgtaattggtcaacgagaattgaaaatattcccttcagaggtatcattagtaggtaaaaaattaggaaatgtgacacag

SEQ ID NO: 6176 - DNA, 80 bp, synthetic construct
  misc_feature 1..80: note = Synthetic: >NC_001796.2-cand-14230-14309
  source 1..80: mol_type = other DNA
attcttaacagggttaaagtactgttcaatgggaatcccaattcaacatggataggaaatatggaatgtgagagcttaat

SEQ ID NO: 6177 - DNA, 80 bp, synthetic construct
  misc_feature 1..80: note = Synthetic: >NC_001796.2-cand-14310-14389
  source 1..80: mol_type = other DNA
atggagtgaattaaatgataagtctattggattagtacattgtgatatggaaggagctatcggtaaatcagaagaaactg

SEQ ID NO: 6178 - DNA, 80 bp, synthetic construct
  misc_feature 1..80: note = Synthetic: >NC_001796.2-cand-14390-14469
  source 1..80: mol_type = other DNA
ttctacatgaacattatagtgttataagaattacatacttgattggagatgatgatgttgttttagtttccaaaattata

SEQ ID NO: 6179 - DNA, 80 bp, synthetic construct
  misc_feature 1..80: note = Synthetic: >NC_001796.2-cand-14470-14549
  source 1..80: mol_type = other DNA
cctacaatcactccgaattggtctagaatactttatctatataaattatattggaaagatgtaagtataatatcacttaa

SEQ ID NO: 6180 - DNA, 80 bp, synthetic construct
  misc_feature 1..80: note = Synthetic: >NC_001796.2-cand-14550-14629
  source 1..80: mol_type = other DNA
aacttctaatcctgcatcaacagaattatatctaatttcgaaagatgcatattgtactataatggaacctagtgaagttg

SEQ ID NO: 6181 - DNA, 80 bp, synthetic construct
  misc_feature 1..80: note = Synthetic: >NC_001796.2-cand-14640-14719
  source 1..80: mol_type = other DNA
acttaaaagattgtcactcttggaagaaaataatctattaaaatggatcattttatcaaagaagaggaataatgaatggt

SEQ ID NO: 6182 - DNA, 80 bp, synthetic construct
  misc_feature 1..80: note = Synthetic: >NC_001796.2-cand-14720-14799
  source 1..80: mol_type = other DNA
tacatcatgaaatcaaagaaggagaaagagattatggagttatgagaccatatcatatggcattacaaatctttggattt

SEQ ID NO: 6183 - DNA, 80 bp, synthetic construct
  misc_feature 1..80: note = Synthetic: >NC_001796.2-cand-14800-14879
  source 1..80: mol_type = other DNA
caaatcaacttaaatcatctggcgaaagaatttttatcaactccagatctgaccaatatcaacaatataatccaaagttt

SEQ ID NO: 6184 - DNA, 80 bp, synthetic construct
  misc_feature 1..80: note = Synthetic: >NC_001796.2-cand-14880-14959
  source 1..80: mol_type = other DNA
tcagcgaacaatcaaagatgtcttgtttgaatggattaatataactcatgatgacaagagacataaattaggcgggagat

SEQ ID NO: 6185 - DNA, 80 bp, synthetic construct
  misc_feature 1..80: note = Synthetic: >NC_001796.2-cand-14970-15049
  source 1..80: mol_type = other DNA
cccactaaaaaataagggaaagttaagactgttatcgagaagactagtattaagttggatttcattatcattatcgactc

SEQ ID NO: 6186 - DNA, 80 bp, synthetic construct
  misc_feature 1..80: note = Synthetic: >NC_001796.2-cand-15050-15129
  source 1..80: mol_type = other DNA
gattgcttacaggccgctttcctgatgaaaaatttgaacatagagcacagactggatatgtatcattagctgatactgat

SEQ ID NO: 6187 - DNA, 80 bp, synthetic construct
  misc_feature 1..80: note = Synthetic: >NC_001796.2-cand-15130-15209
  source 1..80: mol_type = other DNA
ttagaatcattaaaattattgtcgaaaaacatcattaagaattatagagagtgtataggatcaatatcatattggtttct

SEQ ID NO: 6188 - DNA, 80 bp, synthetic construct
  misc_feature 1..80: note = Synthetic: >NC_001802.1-cand-2370-2449
  source 1..80: mol_type = other DNA
ataccacatcccgcagggttaaaaaagaaaaaatcagtaacagtactggatgtgggtgatgcatatttttcagttccctt

SEQ ID NO: 6189 - DNA, 80 bp, synthetic construct
  misc_feature 1..80: note = Synthetic: >NC_001802.1-cand-2450-2529
  source 1..80: mol_type = other DNA
agatgaagacttcaggaagtatactgcatttaccatacctagtataaacaatgagacaccagggattagatatcagtaca

SEQ ID NO: 6190 - DNA, 80 bp, synthetic construct
  misc_feature 1..80: note = Synthetic: >NC_001802.1-cand-2530-2609
  source 1..80: mol_type = other DNA
atgtgcttccacagggatggaaaggatcaccagcaatattccaaagtagcatgacaaaaatcttagagccttttagaaaa

SEQ ID NO: 6191 - DNA, 80 bp, synthetic construct
  misc_feature 1..80: note = Synthetic: >NC_001802.1-cand-2610-2689
  source 1..80: mol_type = other DNA
caaaatccagacatagttatctatcaatacatggatgatttgtatgtaggatctgacttagaaatagggcagcatagaac

SEQ ID NO: 6192 - DNA, 80 bp, synthetic construct
  misc_feature 1..80: note = Synthetic: >NC_001802.1-cand-2730-2809
  source 1..80: mol_type = other DNA
cttaccacaccagacaaaaaacatcagaaagaacctccattcctttggatgggttatgaactccatcctgataaatggac

SEQ ID NO: 6193 - DNA, 80 bp, synthetic construct
  misc_feature 1..80: note = Synthetic: >NC_001802.1-cand-2770-2849
  source 1..80: mol_type = other DNA
tcctttggatgggttatgaactccatcctgataaatggacagtacagcctatagtgctgccagaaaaagacagctggact

SEQ ID NO: 6194 - DNA, 80 bp, synthetic construct
  misc_feature 1..80: note = Synthetic: >NC_001802.1-cand-2880-2959
  source 1..80: mol_type = other DNA
ttgaattgggcaagtcagatttacccagggattaaagtaaggcaattatgtaaactccttagaggaaccaaagcactaac

SEQ ID NO: 6195 - DNA, 80 bp, synthetic construct
  misc_feature 1..80: note = Synthetic: >NC_001802.1-cand-2930-3009
  source 1..80: mol_type = other DNA
taaactccttagaggaaccaaagcactaacagaagtaataccactaacagaagaagcagagctagaactggcagaaaaca

SEQ ID NO: 6196 - DNA, 80 bp, synthetic construct
  misc_feature 1..80: note = Synthetic: >NC_001802.1-cand-3000-3079
  source 1..80: mol_type = other DNA
gcagaaaacagagagattctaaaagaaccagtacatggagtgtattatgacccatcaaaagacttaatagcagaaataca

SEQ ID NO: 6197 - DNA, 80 bp, synthetic construct
  misc_feature 1..80: note = Synthetic: >NC_001802.1-cand-3090-3169
  source 1..80: mol_type = other DNA
caaggccaatggacatatcaaatttatcaagagccatttaaaaatctgaaaacaggaaaatatgcaagaatgaggggtgc

SEQ ID NO: 6198 - DNA, 80 bp, synthetic construct
  misc_feature 1..80: note = Synthetic: >NC_001802.1-cand-3240-3319
  source 1..80: mol_type = other DNA
ggaaagactcctaaatttaaactgcccatacaaaaggaaacatgggaaacatggtggacagagtattggcaagccacctg

SEQ ID NO: 6199 - DNA, 80 bp, synthetic construct
  misc_feature 1..80: note = Synthetic: >NC_001802.1-cand-3250-3329
  source 1..80: mol_type = other DNA
ctaaatttaaactgcccatacaaaaggaaacatgggaaacatggtggacagagtattggcaagccacctggattcctgag

SEQ ID NO: 6200 - DNA, 80 bp, synthetic construct
  misc_feature 1..80: note = Synthetic: >NC_001802.1-cand-3330-3409
  source 1..80: mol_type = other DNA
tgggagtttgttaatacccctcccttagtgaaattatggtaccagttagagaaagaacccatagtaggagcagaaacctt

SEQ ID NO: 6201 - DNA, 80 bp, synthetic construct
  misc_feature 1..80: note = Synthetic: >NC_001802.1-cand-3430-3509
  source 1..80: mol_type = other DNA
acagggagactaaattaggaaaagcaggatatgttactaatagaggaagacaaaaagttgtcaccctaactgacacaaca

SEQ ID NO: 6202 - DNA, 80 bp, synthetic construct
  misc_feature 1..80: note = Synthetic: >NC_001802.1-cand-3490-3569
  source 1..80: mol_type = other DNA
tcaccctaactgacacaacaaatcagaagactgagttacaagcaatttatctagctttgcaggattcgggattagaagta

SEQ ID NO: 6203 - DNA, 80 bp, synthetic construct
  misc_feature 1..80: note = Synthetic: >NC_001802.1-cand-3580-3659
  source 1..80: mol_type = other DNA
cagactcacaatatgcattaggaatcattcaagcacaaccagatcaaagtgaatcagagttagtcaatcaaataatagag

SEQ ID NO: 6204 - DNA, 80 bp, synthetic construct
  misc_feature 1..80: note = Synthetic: >NC_001802.1-cand-6300-6379
  source 1..80: mol_type = other DNA
cttgatataataccaatagataatgatactaccagctataagttgacaagttgtaacacctcagtcattacacaggcctg

SEQ ID NO: 6205 - DNA, 80 bp, synthetic construct
  misc_feature 1..80: note = Synthetic: >NC_001802.1-cand-6380-6459
  source 1..80: mol_type = other DNA
tccaaaggtatcctttgagccaattcccatacattattgtgccccggctggttttgcgattctaaaatgtaataataaga

SEQ ID NO: 6206 - DNA, 80 bp, synthetic construct
  misc_feature 1..80: note = Synthetic: >NC_001802.1-cand-6460-6539
  source 1..80: mol_type = other DNA
cgttcaatggaacaggaccatgtacaaatgtcagcacagtacaatgtacacatggaattaggccagtagtatcaactcaa

SEQ ID NO: 6207 - DNA, 80 bp, synthetic construct
  misc_feature 1..80: note = Synthetic: >NC_001802.1-cand-6540-6619
  source 1..80: mol_type = other DNA
ctgctgttaaatggcagtctagcagaagaagaggtagtaattagatctgtcaatttcacggacaatgctaaaaccataat

SEQ ID NO: 6208 - DNA, 80 bp, synthetic construct
  misc_feature 1..80: note = Synthetic: >NC_001802.1-cand-6620-6699
  source 1..80: mol_type = other DNA
agtacagctgaacacatctgtagaaattaattgtacaagacccaacaacaatacaagaaaaagaatccgtatccagagag

SEQ ID NO: 6209 - DNA, 80 bp, synthetic construct
  misc_feature 1..80: note = Synthetic: >NC_001802.1-cand-6700-6779
  source 1..80: mol_type = other DNA
gaccagggagagcatttgttacaataggaaaaataggaaatatgagacaagcacattgtaacattagtagagcaaaatgg

SEQ ID NO: 6210 - DNA, 80 bp, synthetic construct
  misc_feature 1..80: note = Synthetic: >NC_001802.1-cand-6780-6859
  source 1..80: mol_type = other DNA
aataacactttaaaacagatagctagcaaattaagagaacaatttggaaataataaaacaataatctttaagcaatcctc

SEQ ID NO: 6211 - DNA, 80 bp, synthetic construct
  misc_feature 1..80: note = Synthetic: >NC_001802.1-cand-6910-6989
  source 1..80: mol_type = other DNA
ttttctactgtaattcaacacaactgtttaatagtacttggtttaatagtacttggagtactgaagggtcaaataacact

SEQ ID NO: 6212 - DNA, 80 bp, synthetic construct
  misc_feature 1..80: note = Synthetic: >NC_001802.1-cand-6940-7019
  source 1..80: mol_type = other DNA
atagtacttggtttaatagtacttggagtactgaagggtcaaataacactgaaggaagtgacacaatcaccctcccatgc

SEQ ID NO: 6213 - DNA, 80 bp, synthetic construct
  misc_feature 1..80: note = Synthetic: >NC_001802.1-cand-6990-7069
  source 1..80: mol_type = other DNA
gaaggaagtgacacaatcaccctcccatgcagaataaaacaaattataaacatgtggcagaaagtaggaaaagcaatgta

SEQ ID NO: 6214 - DNA, 80 bp, synthetic construct
  misc_feature 1..80: note = Synthetic: >NC_001802.1-cand-7070-7149
  source 1..80: mol_type = other DNA
tgcccctcccatcagtggacaaattagatgttcatcaaatattacagggctgctattaacaagagatggtggtaatagca

SEQ ID NO: 6215 - DNA, 80 bp, synthetic construct
  misc_feature 1..80: note = Synthetic: >NC_001802.1-cand-7150-7229
  source 1..80: mol_type = other DNA
acaatgagtccgagatcttcagacctggaggaggagatatgagggacaattggagaagtgaattatataaatataaagta

SEQ ID NO: 6216 - DNA, 80 bp, synthetic construct
  misc_feature 1..80: note = Synthetic: >NC_001802.1-cand-7230-7309
  source 1..80: mol_type = other DNA
gtaaaaattgaaccattaggagtagcacccaccaaggcaaagagaagagtggtgcagagagaaaaaagagcagtgggaat

SEQ ID NO: 6217 - DNA, 80 bp, synthetic construct
  misc_feature 1..80: note = Synthetic: >NC_001802.1-cand-7310-7389
  source 1..80: mol_type = other DNA
aggagctttgttccttgggttcttgggagcagcaggaagcactatgggcgcagcctcaatgacgctgacggtacaggcca

SEQ ID NO: 6218 - DNA, 80 bp, synthetic construct
  misc_feature 1..80: note = Synthetic: >NC_001802.1-cand-7390-7469
  source 1..80: mol_type = other DNA
gacaattattgtctggtatagtgcagcagcagaacaatttgctgagggctattgaggcgcaacagcatctgttgcaactc

SEQ ID NO: 6219 - DNA, 80 bp, synthetic construct
  misc_feature 1..80: note = Synthetic: >NC_001802.1-cand-7400-7479
  source 1..80: mol_type = other DNA
gtctggtatagtgcagcagcagaacaatttgctgagggctattgaggcgcaacagcatctgttgcaactcacagtctggg

SEQ ID NO: 6220 - DNA, 80 bp, synthetic construct
  misc_feature 1..80: note = Synthetic: >NC_001803.1-cand-1040-1119
  source 1..80: mol_type = other DNA
gcataaccacactccatagttcaaatggagcctgaaaattatagtaatttaaaattaaggagagacataagatgaaagat

SEQ ID NO: 6221 - DNA, 80 bp, synthetic construct
  misc_feature 1..80: note = Synthetic: >NC_001803.1-cand-1130-1209
  source 1..80: mol_type = other DNA
caaaaatggctcttagcaaagtcaagttgaatgatacactcaacaaagatcaacttctgtcatccagcaaatacaccatc

SEQ ID NO: 6222 - DNA, 80 bp, synthetic construct
  misc_feature 1..80: note = Synthetic: >NC_001803.1-cand-1210-1289
  source 1..80: mol_type = other DNA
caacggagcacaggagatagtattgatactcctaattatgatgtgcagaaacacatcaataagttatgtggcatgttatt

SEQ ID NO: 6223 - DNA, 80 bp, synthetic construct
  misc_feature 1..80: note = Synthetic: >NC_001803.1-cand-1290-1369
  source 1..80: mol_type = other DNA
aatcacagaagatgctaatcataaattcactgggttaataggtatgttatatgctatgtctagattaggaagagaagaca

SEQ ID NO: 6224 - DNA, 80 bp, synthetic construct
  misc_feature 1..80: note = Synthetic: >NC_001803.1-cand-1370-1449
  source 1..80: mol_type = other DNA
ccataaaaatactcagagatgcgggatatcatgtaaaagcaaatggagtggatgtaacaacacatcgtcaagatattaat

SEQ ID NO: 6225 - DNA, 80 bp, synthetic construct
  misc_feature 1..80: note = Synthetic: >NC_001803.1-cand-1450-1529
  source 1..80: mol_type = other DNA
gggaaagaaatgaaatttgaagtgttaacattgtcaagcttaacaactgaaattcaaatcaacattgagatagaatctag

SEQ ID NO: 6226 - DNA, 80 bp, synthetic construct
  misc_feature 1..80: note = Synthetic: >NC_001803.1-cand-1530-1609
  source 1..80: mol_type = other DNA
aaaatcctacaaaaaaatgctaaaagaaatgggagaggtagctccagaatacaggcatgactctcctgattgtgggatga

SEQ ID NO: 6227 - DNA, 80 bp, synthetic construct
  misc_feature 1..80: note = Synthetic: >NC_001803.1-cand-1570-1649
  source 1..80: mol_type = other DNA
gctccagaatacaggcatgactctcctgattgtgggatgataatattatgtatagcggcattagtaataaccaaattagc

SEQ ID NO: 6228 - DNA, 80 bp, synthetic construct
  misc_feature 1..80: note = Synthetic: >NC_001803.1-cand-1690-1769
  source 1..80: mol_type = other DNA
gctaataatgtcctaaaaaatgaaatgaaacgttataaaggcttactacccaaggatatagccaacagcttctatgaagt

SEQ ID NO: 6229 - DNA, 80 bp, synthetic construct
  misc_feature 1..80: note = Synthetic: >NC_001803.1-cand-1780-1859
  source 1..80: mol_type = other DNA
tatcctcactttatagatgtttttgttcattttggtatagcacaatcttctaccagaggtggcagtagagttgaagggat

SEQ ID NO: 6230 - DNA, 80 bp, synthetic construct
  misc_feature 1..80: note = Synthetic: >NC_001803.1-cand-1830-1909
  source 1..80: mol_type = other DNA
taccagaggtggcagtagagttgaagggatttttgctggattgtttatgaatgcctatggtgcagggcaagtgatgttac

SEQ ID NO: 6231 - DNA, 80 bp, synthetic construct
  misc_feature 1..80: note = Synthetic: >NC_001803.1-cand-1940-2019
  source 1..80: mol_type = other DNA
atattatgctaggacacgctagtgtgcaagcagaaatggaacaagttgtggaggtttatgaatatgcccaaaaattgggt

SEQ ID NO: 6232 - DNA, 80 bp, synthetic construct
  misc_feature 1..80: note = Synthetic: >NC_001803.1-cand-2020-2099
  source 1..80: mol_type = other DNA
ggagaagcagggttctaccatatattgaacaacccaaaagcatcattattgtctttgactcaatttcctcacttctccag

SEQ ID NO: 6233 - DNA, 80 bp, synthetic construct
  misc_feature 1..80: note = Synthetic: >NC_001803.1-cand-2100-2179
  source 1..80: mol_type = other DNA
tgtagtattaggcaatgctgctggcctaggcataatgggagaatacagaggtacaccaaggaatcaagatctatatgatg

SEQ ID NO: 6234 - DNA, 80 bp, synthetic construct
  misc_feature 1..80: note = Synthetic: >NC_001803.1-cand-2180-2259
  source 1..80: mol_type = other DNA
ctgcaaaagcatatgctgaacaactcaaagaaaatggtgtgattaactacagtgtattagacttgacagcagaagaacta

SEQ ID NO: 6235 - DNA, 80 bp, synthetic construct
  misc_feature 1..80: note = Synthetic: >NC_001803.1-cand-2240-2319
  source 1..80: mol_type = other DNA
acttgacagcagaagaactagaggctatcaaacatcagcttaatccaaaagataatgatgtagagctttgagttaataaa

SEQ ID NO: 6236 - DNA, 80 bp, synthetic construct
  misc_feature 1..80: note = Synthetic: >NC_001803.1-cand-4930-5009
  source 1..80: mol_type = other DNA
cagaatccccagcttggaatcagcttctccaatctgtctgaaactacatcacaaaccaccaccatactagcttcaacaac

SEQ ID NO: 6237 - DNA, 80 bp, synthetic construct
  misc_feature 1..80: note = Synthetic: >NC_001803.1-cand-5010-5089
  source 1..80: mol_type = other DNA
accaagtgtcaagtcaaccctgcaatccacaacagtcaagaccaaaaacacaacaacaaccaaaatacaacccagcaagc

SEQ ID NO: 6238 - DNA, 80 bp, synthetic construct
  misc_feature 1..80: note = Synthetic: >NC_001803.1-cand-5090-5169
  source 1..80: mol_type = other DNA
ccaccacaaaacaacgccaaaacaaaccaccaaacaaacccaataatgattttcactttgaagtgttcaactttgtacct

SEQ ID NO: 6239 - DNA, 80 bp, synthetic construct
  misc_feature 1..80: note = Synthetic: >NC_001803.1-cand-5170-5249
  source 1..80: mol_type = other DNA
tgcagcatatgcagcaacaatccaacctgctgggctatctgtaaaagaataccaaacaaaaaacctggaaagaaaaccac

SEQ ID NO: 6240 - DNA, 80 bp, synthetic construct
  misc_feature 1..80: note = Synthetic: >NC_001803.1-cand-5250-5329
  source 1..80: mol_type = other DNA
caccaagcccacaaaaaaaccaaccatcaagacaaccaaaaaagatctcaaacctcaaaccacaaaaccaaaggaagtac

SEQ ID NO: 6241 - DNA, 80 bp, synthetic construct
  misc_feature 1..80: note = Synthetic: >NC_001803.1-cand-5330-5409
  source 1..80: mol_type = other DNA
ctaccaccaagcccacagaaaagccaaccatcaacaccaccaaaacaaacatcagaactacactgctcaccaacaatacc

SEQ ID NO: 6242 - DNA, 80 bp, synthetic construct
  misc_feature 1..80: note = Synthetic: >NC_001803.1-cand-5410-5489
  source 1..80: mol_type = other DNA
acaggaaatccagaacacacaagtcaaaagggaaccctccactcaacctcctccgatggcaatccaagcccttcacaagt

SEQ ID NO: 6243 - DNA, 80 bp, synthetic construct
  misc_feature 1..80: note = Synthetic: >NC_001803.1-cand-5490-5569
  source 1..80: mol_type = other DNA
ctatacaacatccgagtacctatcacaacctccatctccatccaacacaacaaaccagtagtcattaaaaagcgtattat

SEQ ID NO: 6244 - DNA, 80 bp, synthetic construct
  misc_feature 1..80: note = Synthetic: >NC_001803.1-cand-5530-5609
  source 1..80: mol_type = other DNA
tccaacacaacaaaccagtagtcattaaaaagcgtattattgcaaaaagccatgaccaaatcaaccagaatcaaaatcaa

SEQ ID NO: 6245 - DNA, 80 bp, synthetic construct
  misc_feature 1..80: note = Synthetic: >NC_001803.1-cand-5650-5729
  source 1..80: mol_type = other DNA
aaatgcaattaccgcaatccttgctgcagtcacactctgttttgcttccagtcaaaacatcactgaagaattttatcaaa

SEQ ID NO: 6246 - DNA, 80 bp, synthetic construct
  misc_feature 1..80: note = Synthetic: >NC_001803.1-cand-5730-5809
  source 1..80: mol_type = other DNA
caacatgcagtgcagtcagcaaaggctatcttagtgctctaagaactggttggtatactagtgttataactatagaatta

SEQ ID NO: 6247 - DNA, 80 bp, synthetic construct
  misc_feature 1..80: note = Synthetic: >NC_001803.1-cand-5840-5919
  source 1..80: mol_type = other DNA
acagacgctaaggtaaaattgataaaacaagaattagataaatataaaagtgctgtaacagaattgcagttgctcatgca

SEQ ID NO: 6248 - DNA, 80 bp, synthetic construct
  misc_feature 1..80: note = Synthetic: >NC_001803.1-cand-5920-5999
  source 1..80: mol_type = other DNA
aagcacaccggcaaccaacaatcgagccagaagagaactaccaaggtttatgaattatacactcaacaataccaaaaata

SEQ ID NO: 6249 - DNA, 80 bp, synthetic construct
  misc_feature 1..80: note = Synthetic: >NC_001803.1-cand-6000-6079
  source 1..80: mol_type = other DNA
ccaatgtaacattaagcaagaaaaggaaaagaagatttcttggctttttgttaggtgttggatctgcaatcgccagtggc

SEQ ID NO: 6250 - DNA, 80 bp, synthetic construct
  misc_feature 1..80: note = Synthetic: >NC_001803.1-cand-6120-6199
  source 1..80: mol_type = other DNA
acaaaatcaaaagtgctctactatccacaaacaaggctgtagtcagcttatcaaatggagttagtgtcttaaccagcaaa

SEQ ID NO: 6251 - DNA, 80 bp, synthetic construct
  misc_feature 1..80: note = Synthetic: >NC_001803.1-cand-6150-6229
  source 1..80: mol_type = other DNA
acaaggctgtagtcagcttatcaaatggagttagtgtcttaaccagcaaagtgttagacctcaaaaactatatagataaa

SEQ ID NO: 6252 - DNA, 80 bp, synthetic construct
  misc_feature 1..80: note = Synthetic: >NC_002645.1-cand-5980-6059
  source 1..80: mol_type = other DNA
gttatgttgcacctgttaatacagtgaaacctaaaccagtcattaatcaacttgatgaaaaggcacagaagttctttgat

SEQ ID NO: 6253 - DNA, 80 bp, synthetic construct
  misc_feature 1..80: note = Synthetic: >NC_002645.1-cand-6060-6139
  source 1..80: mol_type = other DNA
tttggtgattttttgattcataattttgttatttttttcacatggttattgagtatgtttactttgtgtaaaactgcagt

SEQ ID NO: 6254 - DNA, 80 bp, synthetic construct
  misc_feature 1..80: note = Synthetic: >NC_002645.1-cand-6140-6219
  source 1..80: mol_type = other DNA
aactacaggtgatgttaaaataatggccaaagcaccacaaaggacgggtgttgttttaaaacgtagtcttaaatataact

SEQ ID NO: 6255 - DNA, 80 bp, synthetic construct
  misc_feature 1..80: note = Synthetic: >NC_002645.1-cand-6220-6299
  source 1..80: mol_type = other DNA
taaaagcgtcagcagctgttcttaaatctaagtggtggctgcttgctaagtttacgaaactactgttactcatatataca

SEQ ID NO: 6256 - DNA, 80 bp, synthetic construct
  misc_feature 1..80: note = Synthetic: >NC_002645.1-cand-6300-6379
  source 1..80: mol_type = other DNA
ttgtactcagtagttttgctttgtgtacgttttggaccgtttaatttttgtagtgagactgttaatggttatgctaagtc

SEQ ID NO: 6257 - DNA, 80 bp, synthetic construct
  misc_feature 1..80: note = Synthetic: >NC_002645.1-cand-6380-6459
  source 1..80: mol_type = other DNA
aaactttgtcaaggatgattactgtgatggttcattgggctgcaagatgtgtctttttggttaccaagagttaagtcaat

SEQ ID NO: 6258 - DNA, 80 bp, synthetic construct
  misc_feature 1..80: note = Synthetic: >NC_002645.1-cand-6460-6539
  source 1..80: mol_type = other DNA
ttagccatttggatgttgtgtggaagcatataacagaccctttgtttagtaatatgcaacctttcattgtcatggttttg

SEQ ID NO: 6259 - DNA, 80 bp, synthetic construct
  misc_feature 1..80: note = Synthetic: >NC_002645.1-cand-6540-6619
  source 1..80: mol_type = other DNA
ctgcttatatttggtgacaattatttgagatgcttcttgctgtattttgttgctcagatgataagcacagttggtgtttt

SEQ ID NO: 6260 - DNA, 80 bp, synthetic construct
  misc_feature 1..80: note = Synthetic: >NC_002645.1-cand-6620-6699
  source 1..80: mol_type = other DNA
tctaggttacaaggaaacaaattggttcttgcactttattccatttgatgttatttgtgatgaactgcttgtcactgtta

SEQ ID NO: 6261 - DNA, 80 bp, synthetic construct
  misc_feature 1..80: note = Synthetic: >NC_002645.1-cand-6700-6779
  source 1..80: mol_type = other DNA
ttgttattaaggttatttcttttgtcagacatgtgctttttggttgtgaaaacccagattgtattgcgtgttctaagagt

SEQ ID NO: 6262 - DNA, 80 bp, synthetic construct
  misc_feature 1..80: note = Synthetic: >NC_002645.1-cand-6780-6859
  source 1..80: mol_type = other DNA
gctagacttaagagattccctgttaacacaattgtcaatggtgtgcaacgttcattttatgttaatgcaaatggtggtag

SEQ ID NO: 6263 - DNA, 80 bp, synthetic construct
  misc_feature 1..80: note = Synthetic: >NC_002645.1-cand-6860-6939
  source 1..80: mol_type = other DNA
taagttttgtaagaaacatagatttttctgtgttgattgtgactcttatggttatggcagcacgtttataacacccgaag

SEQ ID NO: 6264 - DNA, 80 bp, synthetic construct
  misc_feature 1..80: note = Synthetic: >NC_002645.1-cand-6940-7019
  source 1..80: mol_type = other DNA
tttctagagaacttggtaacattaccaaaacaaatgtgcaaccaacagggccggcctatgtcatgattgacaaagtggag

SEQ ID NO: 6265 - DNA, 80 bp, synthetic construct
  misc_feature 1..80: note = Synthetic: >NC_002645.1-cand-7020-7099
  source 1..80: mol_type = other DNA
tttgaaaatggtttttacagattgtattcctgtgaaacattttggcgttacaactttgatataactgaaagcaagtattc

SEQ ID NO: 6266 - DNA, 80 bp, synthetic construct
  misc_feature 1..80: note = Synthetic: >NC_002645.1-cand-7100-7179
  source 1..80: mol_type = other DNA
ttgcaaagaggtttttaaaaattgtaatgttttggatgatttcatcgtgtttaacaataatgggaccaatgtaacgcagg

SEQ ID NO: 6267 - DNA, 80 bp, synthetic construct
  misc_feature 1..80: note = Synthetic: >NC_002645.1-cand-7170-7249
  source 1..80: mol_type = other DNA
gtaacgcaggttaaaaatgctagtgtttacttttcacagttgttgtgtaggcccattaaattagttgacagtgaactttt

SEQ ID NO: 6268 - DNA, 80 bp, synthetic construct
  misc_feature 1..80: note = Synthetic: >NC_002728.1-cand-540-619
  source 1..80: mol_type = other DNA
tttgttgacagccgagcttacggcctacggataacagacatgagcaccctggtctctgcagttatcaccatcgaggccca

SEQ ID NO: 6269 - DNA, 80 bp, synthetic construct
  misc_feature 1..80: note = Synthetic: >NC_002728.1-cand-620-699
  source 1..80: mol_type = other DNA
gatctggatactgatcgctaaagcagttacagctcccgacactgccgaggaaagtgaaactagaagatgggctaaatacg

SEQ ID NO: 6270 - DNA, 80 bp, synthetic construct
  misc_feature 1..80: note = Synthetic: >NC_002728.1-cand-700-779
  source 1..80: mol_type = other DNA
tccaacaaaagagagtcaatccgttctttgctctaactcagcaatggctaacagaaatgaggaatctgctctcccagagt

SEQ ID NO: 6271 - DNA, 80 bp, synthetic construct
  misc_feature 1..80: note = Synthetic: >NC_002728.1-cand-780-859
  source 1..80: mol_type = other DNA
ctatcagtaaggaagttcatggttgagatcctcatagaagtcaagaaaggaggatctgctaaaggcagagcagtagaaat

SEQ ID NO: 6272 - DNA, 80 bp, synthetic construct
  misc_feature 1..80: note = Synthetic: >NC_002728.1-cand-860-939
  source 1..80: mol_type = other DNA
aatctcagacatcggaaactatgtcgaggaaactggtatggcaggattcttcgcaaccatcagattcgggttggagacaa

SEQ ID NO: 6273 - DNA, 80 bp, synthetic construct
  misc_feature 1..80: note = Synthetic: >NC_002728.1-cand-940-1019
  source 1..80: mol_type = other DNA
ggtatccagcacttgcactcaacgaattccagagtgacctcaacaccatcaaaagcttgatgctactctacagagaaatt

SEQ ID NO: 6274 - DNA, 80 bp, synthetic construct
  misc_feature 1..80: note = Synthetic: >NC_002728.1-cand-1020-1099
  source 1..80: mol_type = other DNA
ggcccaagagccccttatatggtgcttcttgaagaatcaattcagactaaatttgcccctggaggttacccattattgtg

SEQ ID NO: 6275 - DNA, 80 bp, synthetic construct
  misc_feature 1..80: note = Synthetic: >NC_002728.1-cand-1060-1139
  source 1..80: mol_type = other DNA
ttcagactaaatttgcccctggaggttacccattattgtggagctttgccatgggtgtggctactactattgacaggtct

SEQ ID NO: 6276 - DNA, 80 bp, synthetic construct
  misc_feature 1..80: note = Synthetic: >NC_002728.1-cand-1180-1259
  source 1..80: mol_type = other DNA
tgtatttcagactaggccaaaaatcagcacgtcaccatgctggaggaattgatcagaacatggcaaatagactgggacta

SEQ ID NO: 6277 - DNA, 80 bp, synthetic construct
  misc_feature 1..80: note = Synthetic: >NC_002728.1-cand-1260-1339
  source 1..80: mol_type = other DNA
agttcagatcaagttgcagaactcgctgctgcagttcaggaaacatcagcaggaaggcaagagagtaatgttcaggctag

SEQ ID NO: 6278 - DNA, 80 bp, synthetic construct
  misc_feature 1..80: note = Synthetic: >NC_002728.1-cand-1320-1399
  source 1..80: mol_type = other DNA
gagagtaatgttcaggctagagaggcaaaatttgctgcaggaggtgtgctcattggaggcagtgatcaagatatcgatga

SEQ ID NO: 6279 - DNA, 80 bp, synthetic construct
  misc_feature 1..80: note = Synthetic: >NC_002728.1-cand-1420-1499
  source 1..80: mol_type = other DNA
agagtggcagacagtcagttaccttcaaaagggagatgagtatttcatcccttgctaacagtgtgccgagcagttctgtg

SEQ ID NO: 6280 - DNA, 80 bp, synthetic construct
  misc_feature 1..80: note = Synthetic: >NC_002728.1-cand-1500-1579
  source 1..80: mol_type = other DNA
agcacatccggtgggaccagattgactaattcattactaaacctcagatcaagactggctgcaaaagcagcaaaagaagc

SEQ ID NO: 6281 - DNA, 80 bp, synthetic construct
  misc_feature 1..80: note = Synthetic: >NC_002728.1-cand-1550-1629
  source 1..80: mol_type = other DNA
aagactggctgcaaaagcagcaaaagaagccgcctcatccaatgcaacagatgatccagcaatcagcaacagaactcaag

SEQ ID NO: 6282 - DNA, 80 bp, synthetic construct
  misc_feature 1..80: note = Synthetic: >NC_002728.1-cand-1660-1739
  source 1..80: mol_type = other DNA
tcaaacctgctcaaaatgaccttgatttcgtcagagctgatgtgtgacgtctatttccaatattctacagtatccaaaaa

SEQ ID NO: 6283 - DNA, 80 bp, synthetic construct
  misc_feature 1..80: note = Synthetic: >NC_002728.1-cand-1740-1819
  source 1..80: mol_type = other DNA
tctttctatagtacactatcataatacgacactaagggatcaaccatatcaaagttacgaatcgttttaattatattaat

SEQ ID NO: 6284 - DNA, 80 bp, synthetic construct
  misc_feature 1..80: note = Synthetic: >NC_003310.1-cand-160970-161049
  source 1..80: mol_type = other DNA
tggatattgtatgattagatggttgggaggtatcttgccatggactaagatatctgaaacaaagaattctgcattagtaa

SEQ ID NO: 6285 - DNA, 80 bp, synthetic construct
  misc_feature 1..80: note = Synthetic: >NC_003310.1-cand-161050-161129
  source 1..80: mol_type = other DNA
gtgctgcaaaacagaaatatgttaacaatactgcgactttgttaatgaccagtttgcaatatgcacctagagaattgctg

SEQ ID NO: 6286 - DNA, 80 bp, synthetic construct
  misc_feature 1..80: note = Synthetic: >NC_003310.1-cand-161140-161219
  source 1..80: mol_type = other DNA
ccatggtaaactctttgacatattttgaggaacccaattacgacgagtttcgtcgagtattaatgaatggagttatgtaa

SEQ ID NO: 6287 - DNA, 80 bp, synthetic construct
  misc_feature 1..80: note = Synthetic: >NC_003310.1-cand-161230-161309
  source 1..80: mol_type = other DNA
gataaaaaaattaaaaaaataacttagttattatcactctcgcgagtgcaatagaaacacggcgatgttttacgcacacg

SEQ ID NO: 6288 - DNA, 80 bp, synthetic construct
  misc_feature 1..80: note = Synthetic: >NC_003310.1-cand-161310-161389
  source 1..80: mol_type = other DNA
ctttcggtgggtacgacgagaaccttcatgcatttcctagaatatcatcgacggttgccaatgatgtcaggaaatattct

SEQ ID NO: 6289 - DNA, 80 bp, synthetic construct
  misc_feature 1..80: note = Synthetic: >NC_003310.1-cand-161390-161469
  source 1..80: mol_type = other DNA
gttgtgtcagtttataataaaaagtataacattgtaaaaaacaaatatatgtggtgtaacagtcaagtgaacaagagata

SEQ ID NO: 6290 - DNA, 80 bp, synthetic construct
  misc_feature 1..80: note = Synthetic: >NC_003310.1-cand-161550-161629
  source 1..80: mol_type = other DNA
aaatctctattgtcacatatcgccacaaaaactactatgctctaagtggaattgggtacgagagtctagacttgtgtttg

SEQ ID NO: 6291 - DNA, 80 bp, synthetic construct
  misc_feature 1..80: note = Synthetic: >NC_003310.1-cand-161630-161709
  source 1..80: mol_type = other DNA
gaaggagtagggattcatcatcacgtacttgaaacaggaaacgcggtatatggaaaagttcaacatgagtattctactat

SEQ ID NO: 6292 - DNA, 80 bp, synthetic construct
  misc_feature 1..80: note = Synthetic: >NC_003310.1-cand-161710-161789
  source 1..80: mol_type = other DNA
caaagagaaggccaaagaaatgaatgcactcaaaccaggacctatcatcgattaccacgtctggataggagattgtgtct

SEQ ID NO: 6293 - DNA, 80 bp, synthetic construct
  misc_feature 1..80: note = Synthetic: >NC_003310.1-cand-161770-161849
  source 1..80: mol_type = other DNA
ctggataggagattgtgtctgccaagttactactgtagacgtgcatggaaaggaaattatgagaatgagattcaaaaggg

SEQ ID NO: 6294 - DNA, 80 bp, synthetic construct
  misc_feature 1..80: note = Synthetic: >NC_003310.1-cand-161900-161979
  source 1..80: mol_type = other DNA
aatgatacaataaatctttccacttccatatcagctctcctgaattccggtggcggcaccatcgaggtaacatctaagga

SEQ ID NO: 6295 - DNA, 80 bp, synthetic construct
  misc_feature 1..80: note = Synthetic: >NC_003310.1-cand-161950-162029
  source 1..80: mol_type = other DNA
tggcggcaccatcgaggtaacatctaaggaagaacgtgtggattatgtactcatgaaacgtttggaatctatacatcatc

SEQ ID NO: 6296 - DNA, 80 bp, synthetic construct
  misc_feature 1..80: note = Synthetic: >NC_003310.1-cand-162030-162109
  source 1..80: mol_type = other DNA
tgtggtctgtagtgtatgatcatcttaatgttgtgaatggcgaagaacgatgctatatacatatgcattcatctcatcaa

SEQ ID NO: 6297 - DNA, 80 bp, synthetic construct
  misc_feature 1..80: note = Synthetic: >NC_003310.1-cand-162110-162189
  source 1..80: mol_type = other DNA
agtcctatgctgagtactgtaaaaacaaatttgtatatgaagactatgggagcatgtcttcaaatggactccatggaagc

SEQ ID NO: 6298 - DNA, 80 bp, synthetic construct
  misc_feature 1..80: note = Synthetic: >NC_003310.1-cand-162190-162269
  source 1..80: mol_type = other DNA
tctagagtatcttagtgaactgaaggaatcaggtgggcggagtcccagaccagaattgcagaaatttgaatatccagatg

SEQ ID NO: 6299 - DNA, 80 bp, synthetic construct
  misc_feature 1..80: note = Synthetic: >NC_003310.1-cand-162270-162349
  source 1..80: mol_type = other DNA
gagtgaaagacactgaatcaattgagagattggcagaggagttcttcaatagatcagaacttcaggctggtgaatcagtc

SEQ ID NO: 6300 - DNA, 80 bp, synthetic construct
  misc_feature 1..80: note = Synthetic: >NC_003310.1-cand-171970-172049
  source 1..80: mol_type = other DNA
gtcgtcgtatgcataccgcaacaggcaatgcgctggacaactgtatggcacactcctctcttttaaagatgatgcggaat

SEQ ID NO: 6301 - DNA, 80 bp, synthetic construct
  misc_feature 1..80: note = Synthetic: >NC_003310.1-cand-172050-172129
  source 1..80: mol_type = other DNA
cagtgttcatcgacgttcgtgagctggtaaaaaatatgccgtgggataatgttaaggattgtacagagatcatccgttgt

SEQ ID NO: 6302 - DNA, 80 bp, synthetic construct
  misc_feature 1..80: note = Synthetic: >NC_003310.1-cand-172120-172199
  source 1..80: mol_type = other DNA
catccgttgttatataccggatgagcaaaaaaccatcagagagatttcggccatcattggactttgtgcatatgctgcta

SEQ ID NO: 6303 - DNA, 80 bp, synthetic construct
  misc_feature 1..80: note = Synthetic: >NC_003310.1-cand-172210-172289
  source 1..80: mol_type = other DNA
aggtgaagaccatcccactagtaacagtctgaacgcattgtttgtgatgcttgggatgctcaattacatggattatacca

SEQ ID NO: 6304 - DNA, 80 bp, synthetic construct
  misc_feature 1..80: note = Synthetic: >NC_003310.1-cand-172290-172369
  source 1..80: mol_type = other DNA
tcatattctggcgtatgaattgatgagttacagcttgacatttcttctttcctccctcttcttctacttttcccagaaac

SEQ ID NO: 6305 - DNA, 80 bp, synthetic construct
  misc_feature 1..80: note = Synthetic: >NC_003310.1-cand-172370-172449
  source 1..80: mol_type = other DNA
aaactttttttacctactataaaataaaatgagtatactacctgttatatttcttcctatatttttttattctccattcg

SEQ ID NO: 6306 - DNA, 80 bp, synthetic construct
  misc_feature 1..80: note = Synthetic: >NC_003310.1-cand-172450-172529
  source 1..80: mol_type = other DNA
ttcagacttttaacgtgcctgaatgtatcgacaaagggcaatattttgcatcattcatggagttagaaaacgagccagta

SEQ ID NO: 6307 - DNA, 80 bp, synthetic construct
  misc_feature 1..80: note = Synthetic: >NC_003310.1-cand-172530-172609
  source 1..80: mol_type = other DNA
atcttaccatgtcctcaaataaatacgctatcatccggatataatatattagatattttatgggaaaaacgaggagcgga

SEQ ID NO: 6308 - DNA, 80 bp, synthetic construct
  misc_feature 1..80: note = Synthetic: >NC_003310.1-cand-172600-172679
  source 1..80: mol_type = other DNA
gaggagcggataatgatagaattatacagatagataatggtagcaatatgctaattctgaacccgacacaatcagactct

SEQ ID NO: 6309 - DNA, 80 bp, synthetic construct
  misc_feature 1..80: note = Synthetic: >NC_003310.1-cand-172680-172759
  source 1..80: mol_type = other DNA
ggtatttatatatgcattaccacgaacgaaacctactgtgacatgatgtcgttaaatttgacaatcgtgtctgtctcaga

SEQ ID NO: 6310 - DNA, 80 bp, synthetic construct
  misc_feature 1..80: note = Synthetic: >NC_003310.1-cand-172760-172839
  source 1..80: mol_type = other DNA
atcaaatatagatcttatctcgtatccacaaatagtaaatgagagatctactggtgaaatggtatgtcccaatattaatg

SEQ ID NO: 6311 - DNA, 80 bp, synthetic construct
  misc_feature 1..80: note = Synthetic: >NC_003310.1-cand-172840-172919
  source 1..80: mol_type = other DNA
catttatttctagtaacgtaaacgcagatattatatggagcggacatcgacgccttagaaataagagacttaaacaacgg

SEQ ID NO: 6312 - DNA, 80 bp, synthetic construct
  misc_feature 1..80: note = Synthetic: >NC_003310.1-cand-172920-172999
  source 1..80: mol_type = other DNA
acacctggaattattaccatagaagatgttagaaaaaatgatgctggttattatacatgtgttttagaatatatatatat

SEQ ID NO: 6313 - DNA, 80 bp, synthetic construct
  misc_feature 1..80: note = Synthetic: >NC_003310.1-cand-173000-173079
  source 1..80: mol_type = other DNA
gggcaaaacatataacgtaaccagaattataaaattagaggtacgtgatagaataatacctcctactatgaaattaccag

SEQ ID NO: 6314 - DNA, 80 bp, synthetic construct
  misc_feature 1..80: note = Synthetic: >NC_003310.1-cand-173080-173159
  source 1..80: mol_type = other DNA
aaggagtagtaacttcaataggtagtaatttgactattacatgcagagtatcgttgagacttcccacaacggacgctgac

SEQ ID NO: 6315 - DNA, 80 bp, synthetic construct
  misc_feature 1..80: note = Synthetic: >NC_003310.1-cand-173160-173239
  source 1..80: mol_type = other DNA
gtcttttggataagtaatggtatgtattacgaagaagaagacgaggacggagacggtagaataagtgtagcaaataaaat

SEQ ID NO: 6316 - DNA, 80 bp, synthetic construct
  misc_feature 1..80: note = Synthetic: >NC_003310.1-cand-179790-179869
  source 1..80: mol_type = other DNA
gatattatgcagattttagtaagatgtgtaatgaaactatcactgtagaaaaatttctacatacggcgtttatagatgtt

SEQ ID NO: 6317 - DNA, 80 bp, synthetic construct
  misc_feature 1..80: note = Synthetic: >NC_003310.1-cand-179870-179949
  source 1..80: mol_type = other DNA
aatgaggagtatacagaagcatcggccgttacaggagtattcatgactaacttttcgatggtatatcgtatgaaggtcta

SEQ ID NO: 6318 - DNA, 80 bp, synthetic construct
  misc_feature 1..80: note = Synthetic: >NC_003310.1-cand-180030-180109
  source 1..80: mol_type = other DNA
aaatataaacaatagacttttatcacgttatctcatgtataaaatattacaaatagtatagcataaactaaagtcgatac

SEQ ID NO: 6319 - DNA, 80 bp, synthetic construct
  misc_feature 1..80: note = Synthetic: >NC_003310.1-cand-180110-180189
  source 1..80: mol_type = other DNA
atacattaaaacttaaaaaataatgtaatttacaattaatagtataaactaaaaaaattaaaaaattaaaaacaatatca

SEQ ID NO: 6320 - DNA, 80 bp, synthetic construct
  misc_feature 1..80: note = Synthetic: >NC_003310.1-cand-180190-180269
  source 1..80: mol_type = other DNA
ttattataagtaatatcaaaatgacgatatacggattaatagcgtatcttgtattcgtgacttcatccatcgctagtcca

SEQ ID NO: 6321 - DNA, 80 bp, synthetic construct
  misc_feature 1..80: note = Synthetic: >NC_003310.1-cand-180270-180349
  source 1..80: mol_type = other DNA
ttttacattcccgttattccgcccatttcggaagataaatcgttcaatagtgtagaggtattagtttctttgtttcccga

SEQ ID NO: 6322 - DNA, 80 bp, synthetic construct
  misc_feature 1..80: note = Synthetic: >NC_003310.1-cand-180350-180429
  source 1..80: mol_type = other DNA
tgaccaaaaagactatacagtaacttctcagttcaataactacactatcggtaccaaagactggactatcaacgtactat

SEQ ID NO: 6323 - DNA, 80 bp, synthetic construct
  misc_feature 1..80: note = Synthetic: >NC_003310.1-cand-180430-180509
  source 1..80: mol_type = other DNA
ccacacctgatggtctggacataccattgactaatataacttattggtcacggtttactataggtcgtgcattgttcaaa

SEQ ID NO: 6324 - DNA, 80 bp, synthetic construct
  misc_feature 1..80: note = Synthetic: >NC_003310.1-cand-180510-180589
  source 1..80: mol_type = other DNA
tcagagtctgaggatattttccaaaagaaaatgagtattctaggtgtttctatagaatgtaagaagccgtcgacattact

SEQ ID NO: 6325 - DNA, 80 bp, synthetic construct
  misc_feature 1..80: note = Synthetic: >NC_003310.1-cand-180590-180669
  source 1..80: mol_type = other DNA
tacttttttaaccgtgcgtaaaatgactcgagtatttaatagatttccagatatggcttattatcgaggagactgtctag

SEQ ID NO: 6326 - DNA, 80 bp, synthetic construct
  misc_feature 1..80: note = Synthetic: >NC_003310.1-cand-180660-180739
  source 1..80: mol_type = other DNA
gactgtctagaagccgtttatgtaacaatgacttataaaaatactaaaactggagagactgattacacgtacctctctaa

SEQ ID NO: 6327 - DNA, 80 bp, synthetic construct
  misc_feature 1..80: note = Synthetic: >NC_003310.1-cand-180770-180849
  source 1..80: mol_type = other DNA
ggtcgatggttgattattgattagtatattccttattctttttattcacacaaaaagaacatttttataaacatgaaacc

SEQ ID NO: 6328 - DNA, 80 bp, synthetic construct
  misc_feature 1..80: note = Synthetic: >NC_003310.1-cand-180830-180909
  source 1..80: mol_type = other DNA
atttttataaacatgaaaccactgtctaaatgtaattatgatcttgatttatagatgatgatcagccttcagaggatttt

SEQ ID NO: 6329 - DNA, 80 bp, synthetic construct
  misc_feature 1..80: note = Synthetic: >NC_003310.1-cand-180910-180989
  source 1..80: mol_type = other DNA
gaccagcatgtttaatatgaaaaaaaacataactattaagcgctattgcgctattgtgcttaattattttgctctataaa

SEQ ID NO: 6330 - DNA, 80 bp, synthetic construct
  misc_feature 1..80: note = Synthetic: >NC_003310.1-cand-180990-181069
  source 1..80: mol_type = other DNA
ctgaatatatatagccacaattattgacgggcttgtttgtgaccggtaatcatgaatttacagaaattatctctggctat

SEQ ID NO: 6331 - DNA, 80 bp, synthetic construct
  misc_feature 1..80: note = Synthetic: >NC_003310.1-cand-181070-181149
  source 1..80: mol_type = other DNA
atatcttacggtgacatgttcgtggtgttatgaaacatgtatgagaaaaactgcgttgtatcatgacattcaattggagc

SEQ ID NO: 6332 - DNA, 80 bp, synthetic construct
  misc_feature 1..80: note = Synthetic: >NC_004297.1-cand-5950-6029
  source 1..80: mol_type = other DNA
ccctctttgttgcctccaaagaaactagtctatctttaactcttaagaagcaagaccccaaccacccttttaaacacttt

SEQ ID NO: 6333 - DNA, 80 bp, synthetic construct
  misc_feature 1..80: note = Synthetic: >NC_004297.1-cand-6040-6119
  source 1..80: mol_type = other DNA
ggtcatgcttacttgcaaggagaattagtgcatcaaaaattaatagaagtttcctccttgtgttcaatatcctcaaagat

SEQ ID NO: 6334 - DNA, 80 bp, synthetic construct
  misc_feature 1..80: note = Synthetic: >NC_004297.1-cand-6130-6209
  source 1..80: mol_type = other DNA
ttaggaatgatctccagcattgaacctgacattctccaatagtttggtttccccttttttcattcccctcatcaacattt

SEQ ID NO: 6335 - DNA, 80 bp, synthetic construct
  misc_feature 1..80: note = Synthetic: >NC_004297.1-cand-6210-6289
  source 1..80: mol_type = other DNA
gcatacaaaaatctcaatattggtgatgctctcttgaactggtaaattaagtgttcgatattgtcttctgcaactacctt

SEQ ID NO: 6336 - DNA, 80 bp, synthetic construct
  misc_feature 1..80: note = Synthetic: >NC_004297.1-cand-6290-6369
  source 1..80: mol_type = other DNA
atcagcgtacaaattgttaagctcattaagtaactggctcttatcaacctttaaaaactgaccttctatctctcctttcc

SEQ ID NO: 6337 - DNA, 80 bp, synthetic construct
  misc_feature 1..80: note = Synthetic: >NC_004297.1-cand-6370-6449
  source 1..80: mol_type = other DNA
tcaatctgttcctaaacacttgatactcctcttcgatctgcagctttacctcatgagctgttaatttattattgatgccc

SEQ ID NO: 6338 - DNA, 80 bp, synthetic construct
  misc_feature 1..80: note = Synthetic: >NC_004297.1-cand-6450-6529
  source 1..80: mol_type = other DNA
tggtggcatgaggcaatcacttcctcataatgattagagcgattgtccatcagaacatttaaactctccacccctgataa

SEQ ID NO: 6339 - DNA, 80 bp, synthetic construct
  misc_feature 1..80: note = Synthetic: >NC_004297.1-cand-6530-6609
  source 1..80: mol_type = other DNA
tctacccgaagtcatgaataaagattcacagagtctgctatactctgactcttcaaaaagtgaattactctcctgtgcat

SEQ ID NO: 6340 - DNA, 80 bp, synthetic construct
  misc_feature 1..80: note = Synthetic: >NC_004297.1-cand-6610-6689
  source 1..80: mol_type = other DNA
actttaaaagtgagaagagcgtatccctcaacttatcattgacccagtcaggtatttgttcattgtagaatgatgttctc

SEQ ID NO: 6341 - DNA, 80 bp, synthetic construct
  misc_feature 1..80: note = Synthetic: >NC_004297.1-cand-6690-6769
  source 1..80: mol_type = other DNA
ccgtctataagtggtattaaattgatgtcgacactcttcaggtcttctttcagctgctctaattttttgaagtcctcaat

SEQ ID NO: 6342 - DNA, 80 bp, synthetic construct
  misc_feature 1..80: note = Synthetic: >NC_004297.1-cand-6770-6849
  source 1..80: mol_type = other DNA
gtacttctgctcaaagttagcaggagatgatctaacaaaacactccagcagtattagaacattgcccgtcagtttgtaac

SEQ ID NO: 6343 - DNA, 80 bp, synthetic construct
  misc_feature 1..80: note = Synthetic: >NC_004297.1-cand-6860-6939
  source 1..80: mol_type = other DNA
ccacaaacatagtgaaggtgtcaagattccatggtcatggagaattctttccacagatttgtcctcactgttatgctcgc

SEQ ID NO: 6344 - DNA, 80 bp, synthetic construct
  misc_feature 1..80: note = Synthetic: >NC_004297.1-cand-6940-7019
  source 1..80: mol_type = other DNA
aaccatttgcgttgcaagaatcaacctcaatacagagggacaagagtttcaacccttccattaatagcatcctaggctct

SEQ ID NO: 6345 - DNA, 80 bp, synthetic construct
  misc_feature 1..80: note = Synthetic: >NC_004297.1-cand-7020-7099
  source 1..80: mol_type = other DNA
gtctgcacaagaaatgctaacttctgtcttgacaatctctcgttgtccactaggtattttgatactaagtctttgacaca

SEQ ID NO: 6346 - DNA, 80 bp, synthetic construct
  misc_feature 1..80: note = Synthetic: >NC_004297.1-cand-7100-7179
  source 1..80: mol_type = other DNA
ggctatgtcttcctccatgtttagctgcaggtatgatgttcagaaccctcagaacatgtggtctgctagagcaacagttc

SEQ ID NO: 6347 - DNA, 80 bp, synthetic construct
  misc_feature 1..80: note = Synthetic: >NC_004297.1-cand-7120-7199
  source 1..80: mol_type = other DNA
ttagctgcaggtatgatgttcagaaccctcagaacatgtggtctgctagagcaacagttcgctatgggatagggtcccgt

SEQ ID NO: 6348 - DNA, 80 bp, synthetic construct
  misc_feature 1..80: note = Synthetic: >NC_004907.1-cand-410-489
  source 1..80: mol_type = other DNA
tgggtctcatatacaaccggatgggaacagtgaccacagaagtggctcttggcctagtatgtgccacttgtgaacagatt

SEQ ID NO: 6349 - DNA, 80 bp, synthetic construct
  misc_feature 1..80: note = Synthetic: >NC_004907.1-cand-590-669
  source 1..80: mol_type = other DNA
ccatggagcagatggctggatcaagtgagcaggcagcagaagccatggaagtcgcaagtcaggctaggcaaatggtgcag

SEQ ID NO: 6350 - DNA, 80 bp, synthetic construct
  misc_feature 1..80: note = Synthetic: >NC_004907.1-cand-680-759
  source 1..80: mol_type = other DNA
caattgggactcaccctagttccagtgcaggtctaaaagatgatcttattgaaaatttgcaggcttaccagaaacggatg

SEQ ID NO: 6351 - DNA, 80 bp, synthetic construct
  misc_feature 1..80: note = Synthetic: >NC_004907.1-cand-770-849
  source 1..80: mol_type = other DNA
tgcagagattcaagtgatcctctcgttgttgcagcaagtatcattgggatattgcacttgatattgtggattcttgatcg

SEQ ID NO: 6352 - DNA, 80 bp, synthetic construct
  misc_feature 1..80: note = Synthetic: >NC_004908.1-cand-10-89
  source 1..80: mol_type = other DNA
attacttaactagcaaaatggaaacaatatcactaataactatactactagtagtaacagcaagcaatgcagataaaatc

SEQ ID NO: 6353 - DNA, 80 bp, synthetic construct
  misc_feature 1..80: note = Synthetic: >NC_004908.1-cand-40-119
  source 1..80: mol_type = other DNA
cactaataactatactactagtagtaacagcaagcaatgcagataaaatctgcatcggccaccagtcaacaaactccaca

SEQ ID NO: 6354 - DNA, 80 bp, synthetic construct
  misc_feature 1..80: note = Synthetic: >NC_004908.1-cand-120-199
  source 1..80: mol_type = other DNA
gaaactgtggacacgctaacagaaaccaatgttcctgtgacacatgccaaagaattgctccacacagagcataatggaat

SEQ ID NO: 6355 - DNA, 80 bp, synthetic construct
  misc_feature 1..80: note = Synthetic: >NC_004908.1-cand-210-289
  source 1..80: mol_type = other DNA
acaagcctgggacatcccctcattctagacacatgcactattgaaggactagtctatggcaacccttcttgtgacctgct

SEQ ID NO: 6356 - DNA, 80 bp, synthetic construct
  misc_feature 1..80: note = Synthetic: >NC_004908.1-cand-300-379
  source 1..80: mol_type = other DNA
agagaatggtcctacatcgtcgaaagatcatcagctgtaaatggaacgtgttaccctgggaatgtagaaaacctagagga

SEQ ID NO: 6357 - DNA, 80 bp, synthetic construct
  misc_feature 1..80: note = Synthetic: >NC_004908.1-cand-380-459
  source 1..80: mol_type = other DNA
actcaggacactttttagttccgctagttcctaccaaagaatccaaatcttcccagacacaacctggaatgtgacttaca

SEQ ID NO: 6358 - DNA, 80 bp, synthetic construct
  misc_feature 1..80: note = Synthetic: >NC_004908.1-cand-460-539
  source 1..80: mol_type = other DNA
ctggaacaagcagagcatgttcaggttcattctacaggagtatgagatggctgactcaaaagagcggtttttaccctgtt

SEQ ID NO: 6359 - DNA, 80 bp, synthetic construct
  misc_feature 1..80: note = Synthetic: >NC_004908.1-cand-590-669
  source 1..80: mol_type = other DNA
gggcatacatcacccacccacctataccgagcaaacaaatttgtacataagaaacgacacaacaacaagcgtgacaacag

SEQ ID NO: 6360 - DNA, 80 bp, synthetic construct
  misc_feature 1..80: note = Synthetic: >NC_004908.1-cand-630-709
  source 1..80: mol_type = other DNA
ttgtacataagaaacgacacaacaacaagcgtgacaacagaagatttgaataggaccttcaaaccagtgatagggccaag

SEQ ID NO: 6361 - DNA, 80 bp, synthetic construct
  misc_feature 1..80: note = Synthetic: >NC_004908.1-cand-720-799
  source 1..80: mol_type = other DNA
aatggtctgcagggaagaattgattattattggtcggtactaaaaccaggccaaacattgcgagtacgatccaatgggaa

SEQ ID NO: 6362 - DNA, 80 bp, synthetic construct
  misc_feature 1..80: note = Synthetic: >NC_004908.1-cand-800-879
  source 1..80: mol_type = other DNA
tctaattgctccatggtatggacacgttctttcaggagggagccatggaagaatcctgaagactgatttaaaaggtggta

SEQ ID NO: 6363 - DNA, 80 bp, synthetic construct
  misc_feature 1..80: note = Synthetic: >NC_004908.1-cand-890-969
  source 1..80: mol_type = other DNA
gcaatgtcagactgaaaaaggtggcttaaacagtacattgccattccacaatatcagtaaatatgcatttggaacctgcc

SEQ ID NO: 6364 - DNA, 80 bp, synthetic construct
  misc_feature 1..80: note = Synthetic: >NC_005236.1-cand-970-1049
  source 1..80: mol_type = other DNA
ccctgataggtgtccaccaacatgcttgtttgttggagggatggctgagttaggtgccttcttttctatacttcaggata

SEQ ID NO: 6365 - DNA, 80 bp, synthetic construct
  misc_feature 1..80: note = Synthetic: >NC_005236.1-cand-1050-1129
  source 1..80: mol_type = other DNA
tgaggaacacaatcatggcttcaaaaactgtgggcacagctgatgaaaagcttcgaaagaaatcatcattctatcaatca

SEQ ID NO: 6366 - DNA, 80 bp, synthetic construct
  misc_feature 1..80: note = Synthetic: >NC_005236.1-cand-1120-1199
  source 1..80: mol_type = other DNA
ctatcaatcatacctcagacgcacacaatcaatgggaatacaactggaccagaggataattgttatgtttatggttgcct

SEQ ID NO: 6367 - DNA, 80 bp, synthetic construct
  misc_feature 1..80: note = Synthetic: >NC_005236.1-cand-1220-1299
  source 1..80: mol_type = other DNA
aacttccatctcggtgatgacatggatccagagcttcgtagcctggctcagatcttgattgaccagaaagtgaaggaaat

SEQ ID NO: 6368 - DNA, 80 bp, synthetic construct
  misc_feature 1..80: note = Synthetic: >NC_005236.1-cand-1300-1379
  source 1..80: mol_type = other DNA
ctcgaaccaggagcctatgaaattataagcacataaatatgtaatcaatactaactataggttaagaaatactaatcatt

SEQ ID NO: 6369 - DNA, 80 bp, synthetic construct
  misc_feature 1..80: note = Synthetic: >NC_005236.1-cand-1390-1469
  source 1..80: mol_type = other DNA
aatacagatttattgaataatcatattaaataattaggtaagttaaatattatttagttaagttagctaattgatttata

SEQ ID NO: 6370 - DNA, 80 bp, synthetic construct
  misc_feature 1..80: note = Synthetic: >NC_005236.1-cand-1470-1549
  source 1..80: mol_type = other DNA
tgattatcacaattgaatgtaatcataagcacaatcactgccatgtataatcacgggtatacgggtggttttcatatggg

SEQ ID NO: 6371 - DNA, 80 bp, synthetic construct
  misc_feature 1..80: note = Synthetic: >NC_005236.1-cand-1570-1649
  source 1..80: mol_type = other DNA
caggtcaccttaagtgacctttttttgtatatatggatgtagatttcaattgatcgaatactaatcctactgtcctcttt

SEQ ID NO: 6372 - DNA, 80 bp, synthetic construct
  misc_feature 1..80: note = Synthetic: >NC_005236.1-cand-1660-1739
  source 1..80: mol_type = other DNA
tctccttctttactaacaacaacaaactacctcacaaccttctacctcaatatatactacctcattaagttgtttccttt

SEQ ID NO: 6373 - DNA, 80 bp, synthetic construct
  misc_feature 1..80: note = Synthetic: >NC_005237.1-cand-0-79
  source 1..80: mol_type = other DNA
agtagactccgcaagaaacagcagttaaataacagcaggatcatgtggagtttgctattactggccgctttagttggcca

SEQ ID NO: 6374 - DNA, 80 bp, synthetic construct
  misc_feature 1..80: note = Synthetic: >NC_005237.1-cand-60-139
  source 1..80: mol_type = other DNA
ctggccgctttagttggccaaggctttgcattaaaaaatgtgtttgacatgagaattcagtgcccccactcagtcaaatt

SEQ ID NO: 6375 - DNA, 80 bp, synthetic construct
  misc_feature 1..80: note = Synthetic: >NC_005237.1-cand-180-259
  source 1..80: mol_type = other DNA
ctctcattacaggaggcagaacagctggtgccagagagctcatgcaacatggacaaccaccaatcactctcaacaataaa

SEQ ID NO: 6376 - DNA, 80 bp, synthetic construct
  misc_feature 1..80: note = Synthetic: >NC_005237.1-cand-260-339
  source 1..80: mol_type = other DNA
taaattaaccaaggtcatatggcggaaaaaggcaaatcaggaatcagcaaaccagaattcatttgaacttatggagagtg

SEQ ID NO: 6377 - DNA, 80 bp, synthetic construct
  misc_feature 1..80: note = Synthetic: >NC_005237.1-cand-340-419
  source 1..80: mol_type = other DNA
aagtcagctttaaagggttgtgtatgttaaagcatagaatggttgaagaatcctacagaaataggagatcagtaatctgt

SEQ ID NO: 6378 - DNA, 80 bp, synthetic construct
  misc_feature 1..80: note = Synthetic: >NC_005237.1-cand-420-499
  source 1..80: mol_type = other DNA
tatgatctagcctgtaatagtacattctgtaagccaactgtctacatgattgttcctatacatgcatgcaacatgatgaa

SEQ ID NO: 6379 - DNA, 80 bp, synthetic construct
  misc_feature 1..80: note = Synthetic: >NC_005237.1-cand-500-579
  source 1..80: mol_type = other DNA
aagctgtttgattggtcttggtccttacagagtccaggtcgtttatgaaaggacatactgcactacgggtatattgacag

SEQ ID NO: 6380 - DNA, 80 bp, synthetic construct
  misc_feature 1..80: note = Synthetic: >NC_005238.1-cand-5960-6039
  source 1..80: mol_type = other DNA
gagatggatgatgagttcacaatagacctacaggatgtagattttgaaaatattgatatagaagctgatgtagagcattt

SEQ ID NO: 6381 - DNA, 80 bp, synthetic construct
  misc_feature 1..80: note = Synthetic: >NC_005238.1-cand-6040-6119
  source 1..80: mol_type = other DNA
cttacaggatgagagtgcttatacaggtgatctattgattatgtcagaagaaacagaagtaaaaaagatgagagggataa

SEQ ID NO: 6382 - DNA, 80 bp, synthetic construct
  misc_feature 1..80: note = Synthetic: >NC_005238.1-cand-6080-6159
  source 1..80: mol_type = other DNA
atgtcagaagaaacagaagtaaaaaagatgagagggataattaagcttttagaacctgtaaagttaataaagagctgggt

SEQ ID NO: 6383 - DNA, 80 bp, synthetic construct
  misc_feature 1..80: note = Synthetic: >NC_005238.1-cand-6200-6279
  source 1..80: mol_type = other DNA
aacatcatactaatgactaggtatatatcaaaaaactttaacttttcaggcaagcaggtatccttattagacccatatga

SEQ ID NO: 6384 - DNA, 80 bp, synthetic construct
  misc_feature 1..80: note = Synthetic: >NC_005238.1-cand-6320-6399
  source 1..80: mol_type = other DNA
tctgttgtggatcagtttgattcccttgacttagaagcccagaatctagttcaaaagcagggtattgtacctgaggatgt

SEQ ID NO: 6385 - DNA, 80 bp, synthetic construct
  misc_feature 1..80: note = Synthetic: >NC_005238.1-cand-6360-6439
  source 1..80: mol_type = other DNA
agaatctagttcaaaagcagggtattgtacctgaggatgtgattccagactcgttgttttcctttagacatactatggtc

SEQ ID NO: 6386 - DNA, 80 bp, synthetic construct
  misc_feature 1..80: note = Synthetic: >NC_005238.1-cand-6440-6519
  source 1..80: mol_type = other DNA
ctattacgccggctgtttggacaggattcagtttctacattctattaatcattcacttcattttcattttgcggagtcta

SEQ ID NO: 6387 - DNA, 80 bp, synthetic construct
  misc_feature 1..80: note = Synthetic: >NC_005300.2-cand-0-79
  source 1..80: mol_type = other DNA
aaagaaatacttgcggcacgtcagtacgtaagtgttaactttgaggaagtggattgagcatcttaattgcagcatacctg

SEQ ID NO: 6388 - DNA, 80 bp, synthetic construct
  misc_feature 1..80: note = Synthetic: >NC_005300.2-cand-70-149
  source 1..80: mol_type = other DNA
agcatacctgctaacatcatgcatatatcattaatgtatgcaatcctttgcctacagctgtgtggtctgggagagactca

SEQ ID NO: 6389 - DNA, 80 bp, synthetic construct
  misc_feature 1..80: note = Synthetic: >NC_005300.2-cand-150-229
  source 1..80: mol_type = other DNA
tggatcacacaatgaaactagacacaataaaacagacaccatgacaacacccggtgataacccgagctctgaaccgccag

SEQ ID NO: 6390 - DNA, 80 bp, synthetic construct
  misc_feature 1..80: note = Synthetic: >NC_005300.2-cand-230-309
  source 1..80: mol_type = other DNA
tgagcacggccttgtctattacacttgacccctccactgtcacacccacaacaccagccagtggattagaaggctcaggg

SEQ ID NO: 6391 - DNA, 80 bp, synthetic construct
  misc_feature 1..80: note = Synthetic: >NC_005300.2-cand-310-389
  source 1..80: mol_type = other DNA
gaagtctacacatcccctccgatcaccaccgggagcttgcccctgtcggagacaacaccagaactccctgttacaaccgg

SEQ ID NO: 6392 - DNA, 80 bp, synthetic construct
  misc_feature 1..80: note = Synthetic: >NC_005300.2-cand-390-469
  source 1..80: mol_type = other DNA
cacagacaccttaagcgcaggtgatgtcgatcccagcacgcagacagccggaggcacctccgcaccaacagtccgcacaa

SEQ ID NO: 6393 - DNA, 80 bp, synthetic construct
  misc_feature 1..80: note = Synthetic: >NC_005300.2-cand-470-549
  source 1..80: mol_type = other DNA
gtctacccaacagccctagcacaccatctacaccacaagacacacaccatcctgtgagaaatctactttcagtcacgagt

SEQ ID NO: 6394 - DNA, 80 bp, synthetic construct
  misc_feature 1..80: note = Synthetic: >NC_005300.2-cand-550-629
  source 1..80: mol_type = other DNA
cctgggccagatgaaacatcaacaccctcgggaacaggcaaagagagctcagcaaccagtagccctcatccagtctccaa

SEQ ID NO: 6395 - DNA, 80 bp, synthetic construct
  misc_feature 1..80: note = Synthetic: >NC_005300.2-cand-630-709
  source 1..80: mol_type = other DNA
cagaccaccaacccctcctgcaacagcccagggacccactgaaaatgacagtcacaacgccactgaacaccctgagtccc

SEQ ID NO: 6396 - DNA, 80 bp, synthetic construct
  misc_feature 1..80: note = Synthetic: >NC_005301.3-cand-1800-1879
  source 1..80: mol_type = other DNA
gctttacaagaagattctgaagtggagccgatagccataatttgtgatggcatagaaagcaacatgaaacagttatttgc

SEQ ID NO: 6397 - DNA, 80 bp, synthetic construct
  misc_feature 1..80: note = Synthetic: >NC_005301.3-cand-1880-1959
  source 1..80: mol_type = other DNA
tatattgcctcctgactgtgcaagagagtgtgaagtcctcttcgatgacataagaaattctccaacacacagcacagcct

SEQ ID NO: 6398 - DNA, 80 bp, synthetic construct
  misc_feature 1..80: note = Synthetic: >NC_005301.3-cand-1960-2039
  source 1..80: mol_type = other DNA
ggaagcatgcactccgattaaaagggactgcatacgaaggtctgtttgcaaattgttacggctggcaatacattccggaa

SEQ ID NO: 6399 - DNA, 80 bp, synthetic construct
  misc_feature 1..80: note = Synthetic: >NC_005301.3-cand-2040-2119
  source 1..80: mol_type = other DNA
gacattaaaccaagcctgaccatgttgatacagactttgtttcctgacaagttcgaagatttcctggatcgaacccagtt

SEQ ID NO: 6400 - DNA, 80 bp, synthetic construct
  misc_feature 1..80: note = Synthetic: >NC_005301.3-cand-2120-2199
  source 1..80: mol_type = other DNA
gcatccggagttcagagacctgactcccgacttttcgctcacacaaaaggttcactttaaaagaaatcagatacccagtg

SEQ ID NO: 6401 - DNA, 80 bp, synthetic construct
  misc_feature 1..80: note = Synthetic: >NC_005301.3-cand-2200-2279
  source 1..80: mol_type = other DNA
tcgaaaatgtgcaaatctccattgatgcgacgttgcctgaatctgtggaagcagtaccagtgacagaaagaaagatgttc

SEQ ID NO: 6402 - DNA, 80 bp, synthetic construct
  misc_feature 1..80: note = Synthetic: >NC_005301.3-cand-2280-2359
  source 1..80: mol_type = other DNA
ccccttcctgagactccgctaagtgaggtgcattcaatagagcgtataatggaaaactttactcgcctcatgcatggagg

SEQ ID NO: 6403 - DNA, 80 bp, synthetic construct
  misc_feature 1..80: note = Synthetic: >NC_005301.3-cand-2360-2439
  source 1..80: mol_type = other DNA
aagactttcgaccaagaaaagagatggagatccggcggaacagggcaaccagcagagtatcactgaacacgagagttcca

SEQ ID NO: 6404 - DNA, 80 bp, synthetic construct
  misc_feature 1..80: note = Synthetic: >NC_005301.3-cand-2440-2519
  source 1..80: mol_type = other DNA
gcatctctgcctttaaagactacggagagagagggatagtcgaggaaaatcacatgaagtttagtggagaagatcagcta

SEQ ID NO: 6405 - DNA, 80 bp, synthetic construct
  misc_feature 1..80: note = Synthetic: >NC_005301.3-cand-2520-2599
  source 1..80: mol_type = other DNA
gagacaaggcagctgttgttggtggaagttggttttcaaactgacatcgatgggaaaataaggacagaccacaagaagtg

SEQ ID NO: 6406 - DNA, 80 bp, synthetic construct
  misc_feature 1..80: note = Synthetic: >NC_005301.3-cand-2600-2679
  source 1..80: mol_type = other DNA
gaaagacatattaaagctattagagctactaggaatcaagtgctcattcattgcctgtgcagattgctcatccacaccac

SEQ ID NO: 6407 - DNA, 80 bp, synthetic construct
  misc_feature 1..80: note = Synthetic: >NC_005301.3-cand-2680-2759
  source 1..80: mol_type = other DNA
cagacagatggtggattacggaggacagagtgcgagtcctaaaaaattcagtcagcttcttgttcaataaactctccaga

SEQ ID NO: 6408 - DNA, 80 bp, synthetic construct
  misc_feature 1..80: note = Synthetic: >NC_005301.3-cand-2760-2839
  source 1..80: mol_type = other DNA
aactcacctacagaagtaactgacatagttgttggagctataagtactcaaaaggttagaagttatctaaaggcaggaac

SEQ ID NO: 6409 - DNA, 80 bp, synthetic construct
  misc_feature 1..80: note = Synthetic: >NC_005301.3-cand-2840-2919
  source 1..80: mol_type = other DNA
tgcaacaaaaacccctgtgtcgactaaagacgttctggagacttgggaaaagatgaaggagcacatactcaacagaccaa

SEQ ID NO: 6410 - DNA, 80 bp, synthetic construct
  misc_feature 1..80: note = Synthetic: >NC_005301.3-cand-2940-3019
  source 1..80: mol_type = other DNA
agtttggaacaggcaatgcgcaaaggactggtcgaaggtgtggtcatctccaaggaaggttctgagtcatgtatcaatat

SEQ ID NO: 6411 - DNA, 80 bp, synthetic construct
  misc_feature 1..80: note = Synthetic: >NC_005301.3-cand-3020-3099
  source 1..80: mol_type = other DNA
gttgaaggaaaatttggaccgaataactgacgaattcgagcgaacaaaatttaaacatgaacttactcagaatattacca

SEQ ID NO: 6412 - DNA, 80 bp, synthetic construct
  misc_feature 1..80: note = Synthetic: >NC_006573.1-cand-250-329
  source 1..80: mol_type = other DNA
agcttcagactctggaactaaacatggagacactcaatatgaccatgcctctctcctgcacaaagaacaacagtcatcat

SEQ ID NO: 6413 - DNA, 80 bp, synthetic construct
  misc_feature 1..80: note = Synthetic: >NC_006573.1-cand-440-519
  source 1..80: mol_type = other DNA
ccacgctcttatgagcataatctcaactttccacttgtccatccccaacttcaatcagtatgaggcaatgagctgcgatt

SEQ ID NO: 6414 - DNA, 80 bp, synthetic construct
  misc_feature 1..80: note = Synthetic: >NC_006573.1-cand-640-719
  source 1..80: mol_type = other DNA
gtgggagctacattgctcttgactcaggccgtggcaactgggactgtattatgactagttatcaatatctgataatccaa

SEQ ID NO: 6415 - DNA, 80 bp, synthetic construct
  misc_feature 1..80: note = Synthetic: >NC_006573.1-cand-790-869
  source 1..80: mol_type = other DNA
aaaggactagagatatttatattagtagaagattgctaggcacattcacatggacactgtcagattctgaaggtgaagac

SEQ ID NO: 6416 - DNA, 80 bp, synthetic construct
  misc_feature 1..80: note = Synthetic: >NC_006573.1-cand-1320-1399
  source 1..80: mol_type = other DNA
gggaagacaccattgggtctagttgacctctttgtgttcagcacaagtttctatcttattagcatcttccttcacctagt

SEQ ID NO: 6417 - DNA, 80 bp, synthetic construct
  misc_feature 1..80: note = Synthetic: >NC_006573.1-cand-1490-1569
  source 1..80: mol_type = other DNA
caaacagcctggtgtgcctgtgaaatggaagagatgagacccttgtcagggcccccgtgacccaccgcctattggcggtg

SEQ ID NO: 6418 - DNA, 80 bp, synthetic construct
  misc_feature 1..80: note = Synthetic: >NC_006573.1-cand-1720-1799
  source 1..80: mol_type = other DNA
ggttatttcctctttaccgcctcttttcttcttttcaacaacgacacctgtgtgcatgtggcataagtctttatactggt

SEQ ID NO: 6419 - DNA, 80 bp, synthetic construct
  misc_feature 1..80: note = Synthetic: >NC_006573.1-cand-2330-2409
  source 1..80: mol_type = other DNA
cttgatgcaatatatggccatccatctcctgacaaacaaatcttgtagagtatgttttcataaggattcctttcaccagg

SEQ ID NO: 6420 - DNA, 80 bp, synthetic construct
  misc_feature 1..80: note = Synthetic: >NC_006577.2-cand-0-79
  source 1..80: mol_type = other DNA
ttgagcgattgacgttcgtaccgtctatcagcttacgatctcttgtcagatctcattaaatctaaactttttaaacaaga

SEQ ID NO: 6421 - DNA, 80 bp, synthetic construct
  misc_feature 1..80: note = Synthetic: >NC_006577.2-cand-80-159
  source 1..80: mol_type = other DNA
ttccctgttatccatgcttgtgagtgtggtttaatcataatcttgtattttactttccacacttttcatctctctgccag

SEQ ID NO: 6422 - DNA, 80 bp, synthetic construct
  misc_feature 1..80: note = Synthetic: >NC_006577.2-cand-160-239
  source 1..80: mol_type = other DNA
tgacgtgttggttgtcctcagcgtccctcccataggtcgcaatgattaaaaccagcaaatacggtctcggcttcaagtgg

SEQ ID NO: 6423 - DNA, 80 bp, synthetic construct
  misc_feature 1..80: note = Synthetic: >NC_006577.2-cand-240-319
  source 1..80: mol_type = other DNA
gcgccagaatttcgttggctgcttccggatgcagcggaggagttggctagtcctatgaagtcagatgagggtgggttatg

SEQ ID NO: 6424 - DNA, 80 bp, synthetic construct
  misc_feature 1..80: note = Synthetic: >NC_006577.2-cand-320-399
  source 1..80: mol_type = other DNA
cccctctactggtcaagcgatggaaagtgttggattcgtttatgataatcatgtgaagatagattgtcgctgcattcttg

SEQ ID NO: 6425 - DNA, 80 bp, synthetic construct
  misc_feature 1..80: note = Synthetic: >NC_006577.2-cand-400-479
  source 1..80: mol_type = other DNA
gacaagaatggcatgtgcagtcaaatcttatccgtgatatttttgttcatgaagatctacatgttgtagaagttctaact

SEQ ID NO: 6426 - DNA, 80 bp, synthetic construct
  misc_feature 1..80: note = Synthetic: >NC_006577.2-cand-480-559
  source 1..80: mol_type = other DNA
aaaacagccgtaaagtccggtacggcaattttaattaaatcacctttgcatagcttgggtggttttcctaaagggtatgt

SEQ ID NO: 6427 - DNA, 80 bp, synthetic construct
  misc_feature 1..80: note = Synthetic: >NC_006577.2-cand-560-639
  source 1..80: mol_type = other DNA
tatgggcttgttccgttcatacaagactaaacgttatgttgtacatcatctttctatgactacatctactactaattttg

SEQ ID NO: 6428 - DNA, 80 bp, synthetic construct
  misc_feature 1..80: note = Synthetic: >NC_007361.1-cand-530-609
  source 1..80: mol_type = other DNA
caaggtttgagtctgttgcttggtcggcaagtgcttgccatgatggcaccagttggttgacaattggaatttctggccca

SEQ ID NO: 6429 - DNA, 80 bp, synthetic construct
  misc_feature 1..80: note = Synthetic: >NC_007361.1-cand-720-799
  source 1..80: mol_type = other DNA
tggctcttgctttactgtaatgactgacggaccaagtaatgggcaggcctcatataagatcttcaaaatggaaaaaggga

SEQ ID NO: 6430 - DNA, 80 bp, synthetic construct
  misc_feature 1..80: note = Synthetic: >NC_007361.1-cand-800-879
  source 1..80: mol_type = other DNA
aagtagttaaatcagtcgaattgaatgcccctaattatcactatgaggagtgctcctgttatcctgatgctggcgaaatc

SEQ ID NO: 6431 - DNA, 80 bp, synthetic construct
  misc_feature 1..80: note = Synthetic: >NC_007361.1-cand-880-959
  source 1..80: mol_type = other DNA
acatgtgtgtgcagggataattggcatggctcaaatcggccatgggtatctttcaatcaaaatttggagtatcaaatagg

SEQ ID NO: 6432 - DNA, 80 bp, synthetic construct
  misc_feature 1..80: note = Synthetic: >NC_007361.1-cand-950-1029
  source 1..80: mol_type = other DNA
atcaaataggatatatatgcagtggagttttcggagacaatccacgccccaatgatggaacaggcagttgtggtccggtg

SEQ ID NO: 6433 - DNA, 80 bp, synthetic construct
  misc_feature 1..80: note = Synthetic: >NC_007361.1-cand-1040-1119
  source 1..80: mol_type = other DNA
gggcatatggagtaaaagggttttcatttaaatacggcaatggtgtttggatcgggagaaccaaaagcactaattccagg

SEQ ID NO: 6434 - DNA, 80 bp, synthetic construct
  misc_feature 1..80: note = Synthetic: >NC_007361.1-cand-1130-1209
  source 1..80: mol_type = other DNA
aaatgatttgggatccaaatgggtggactggaacggacagtagcttctcggtgaaacaagatatcgtagcaataactgat

SEQ ID NO: 6435 - DNA, 80 bp, synthetic construct
  misc_feature 1..80: note = Synthetic: >NC_007361.1-cand-1210-1289
  source 1..80: mol_type = other DNA
tggtcaggatatagcgggagttttgtccagcatccagaactgacaggattagattgcataagaccttgtttctgggttga

SEQ ID NO: 6436 - DNA, 80 bp, synthetic construct
  misc_feature 1..80: note = Synthetic: >NC_007361.1-cand-1290-1369
  source 1..80: mol_type = other DNA
gctaatcagagggcggcccaaagagagcacaatttggactagtgggagcagcatatctttttgtggtgtaaatagtgaca

SEQ ID NO: 6437 - DNA, 80 bp, synthetic construct
  misc_feature 1..80: note = Synthetic: >NC_007361.1-cand-1360-1439
  source 1..80: mol_type = other DNA
aatagtgacactgtgggttggtcttggccagacgatgccgagttgccattcaccattgacaagtagtttgttcaaaaaac

SEQ ID NO: 6438 - DNA, 80 bp, synthetic construct
  misc_feature 1..80: note = Synthetic: >NC_007362.1-cand-0-79
  source 1..80: mol_type = other DNA
gggtataatctgtcaaaatggagaaaatagtgcttcttcttgcaatagtcagtcttgtcaaaagtgatcagatttgcatt

SEQ ID NO: 6439 - DNA, 80 bp, synthetic construct
  misc_feature 1..80: note = Synthetic: >NC_007362.1-cand-70-149
  source 1..80: mol_type = other DNA
gatttgcattggttaccatgcaaacaactcgacagagcaggttgacacaataatggaaaagaacgttactgttacacatg

SEQ ID NO: 6440 - DNA, 80 bp, synthetic construct
  misc_feature 1..80: note = Synthetic: >NC_007362.1-cand-150-229
  source 1..80: mol_type = other DNA
cccaagacatactggaaaagacacacaatgggaagctctgcgatctaaatggagtgaagcctctcattttgagagattgt

SEQ ID NO: 6441 - DNA, 80 bp, synthetic construct
  misc_feature 1..80: note = Synthetic: >NC_007362.1-cand-230-309
  source 1..80: mol_type = other DNA
agtgtagctggatggctcctcggaaaccctatgtgtgacgaattcatcaatgtgccggaatggtcttacatagtggagaa

SEQ ID NO: 6442 - DNA, 80 bp, synthetic construct
  misc_feature 1..80: note = Synthetic: >NC_007362.1-cand-350-429
  source 1..80: mol_type = other DNA
aacgactatgaagaactgaaacacctattgagcagaacaaaccattttgagaaaattcagatcatccccaaaagttcttg

SEQ ID NO: 6443 - DNA, 80 bp, synthetic construct
  misc_feature 1..80: note = Synthetic: >NC_007362.1-cand-370-449
  source 1..80: mol_type = other DNA
acacctattgagcagaacaaaccattttgagaaaattcagatcatccccaaaagttcttggtccaatcatgatgcctcat

SEQ ID NO: 6444 - DNA, 80 bp, synthetic construct
  misc_feature 1..80: note = Synthetic: >NC_009825.1-cand-510-589
  source 1..80: mol_type = other DNA
caggatatccatggcctctttacggtaatgagggttgtgggtgggcaggatggctcttgtccccccgtggctctcgaccg

SEQ ID NO: 6445 - DNA, 80 bp, synthetic construct
  misc_feature 1..80: note = Synthetic: >NC_009825.1-cand-600-679
  source 1..80: mol_type = other DNA
caaatgatccccgcgggaggtcccgcaatttgggtaaggtcatcgataccctaacctgcggcttcgccgacctcatggga

SEQ ID NO: 6446 - DNA, 80 bp, synthetic construct
  misc_feature 1..80: note = Synthetic: >NC_009825.1-cand-670-749
  source 1..80: mol_type = other DNA
cctcatgggatacatcccgctcgtaggcgcccccgtgggtagcgtcgccagggccctggcacatggtgtcagggctttgg

SEQ ID NO: 6447 - DNA, 80 bp, synthetic construct
  misc_feature 1..80: note = Synthetic: >NC_009825.1-cand-750-829
  source 1..80: mol_type = other DNA
aggacgggatcaattatgcaacagggaatctccccggttgctccttttctatcttcctcttggcacttctttcgtgcctg

SEQ ID NO: 6448 - DNA, 80 bp, synthetic construct
  misc_feature 1..80: note = Synthetic: >NC_009825.1-cand-830-909
  source 1..80: mol_type = other DNA
actgtccccgcttcggccgttaactatcgcaatgtctcaggcatctaccatgtcaccaatgactgcccgaattcaagcat

SEQ ID NO: 6449 - DNA, 80 bp, synthetic construct
  misc_feature 1..80: note = Synthetic: >NC_009825.1-cand-890-969
  source 1..80: mol_type = other DNA
gactgcccgaattcaagcatagtgtatgaggccgaccatcacatcatgcaccttccaggttgcgtgccctgcgtgagaga

SEQ ID NO: 6450 - DNA, 80 bp, synthetic construct
  misc_feature 1..80: note = Synthetic: >NC_009825.1-cand-990-1069
  source 1..80: mol_type = other DNA
gggtggcccttactcctaccgtcgcagcgccatacatcggcgcaccgcttgagtccttacggagtcatgtggatttgatg

SEQ ID NO: 6451 - DNA, 80 bp, synthetic construct
  misc_feature 1..80: note = Synthetic: >NC_009825.1-cand-1110-1189
  source 1..80: mol_type = other DNA
acctgtgtggcggcttgttcctagttggccagatgttttcattccgaccacggcgccactggaccacccaggattgcaat

SEQ ID NO: 6452 - DNA, 80 bp, synthetic construct
  misc_feature 1..80: note = Synthetic: >NC_009825.1-cand-1150-1229
  source 1..80: mol_type = other DNA
attccgaccacggcgccactggaccacccaggattgcaattgttccatctacacagggcacattacaggccacagaatgg

SEQ ID NO: 6453 - DNA, 80 bp, synthetic construct
  misc_feature 1..80: note = Synthetic: >NC_009825.1-cand-1230-1309
  source 1..80: mol_type = other DNA
cctgggacatgatgatgaactggagtccaacaaccaccttagttctcgcccaggtcatgaggatcccaaccactctggta

SEQ ID NO: 6454 - DNA, 80 bp, synthetic construct
  misc_feature 1..80: note = Synthetic: >NC_009825.1-cand-1250-1329
  source 1..80: mol_type = other DNA
tggagtccaacaaccaccttagttctcgcccaggtcatgaggatcccaaccactctggtagacttactctctggaggcca

SEQ ID NO: 6455 - DNA, 80 bp, synthetic construct
  misc_feature 1..80: note = Synthetic: >NC_009825.1-cand-1440-1519
  source 1..80: mol_type = other DNA
gggcagcagtcggccggagtaccgccggcttggctaacctcttttcttctgggtctaagcagaatttacagctcatcaac

SEQ ID NO: 6456 - DNA, 80 bp, synthetic construct
  misc_feature 1..80: note = Synthetic: >NC_009825.1-cand-1470-1549
  source 1..80: mol_type = other DNA
tggctaacctcttttcttctgggtctaagcagaatttacagctcatcaacagcaatgggagctggcatataaataggact

SEQ ID NO: 6457 - DNA, 80 bp, synthetic construct
  misc_feature 1..80: note = Synthetic: >NC_009825.1-cand-1550-1629
  source 1..80: mol_type = other DNA
gcccttaactgcaatgacagcttaaacactgggttcttggctagcttgttctacacccacaagtttaacagctcagggtg

SEQ ID NO: 6458 - DNA, 80 bp, synthetic construct
  misc_feature 1..80: note = Synthetic: >NC_009825.1-cand-1600-1679
  source 1..80: mol_type = other DNA
ctacacccacaagtttaacagctcagggtgttccgaacggctcgcgtgctgcaagagccttgacagctacggccaaggct

SEQ ID NO: 6459 - DNA, 80 bp, synthetic construct
  misc_feature 1..80: note = Synthetic: >NC_009825.1-cand-1710-1789
  source 1..80: mol_type = other DNA
gctcgtctgatgacaggccttattgctggcactacgcgcctcggccatgcgggattgtgccagcatccagtgtgtgtggc

SEQ ID NO: 6460 - DNA, 80 bp, synthetic construct
  misc_feature 1..80: note = Synthetic: >NC_009942.1-cand-10210-10289
  source 1..80: mol_type = other DNA
aaaacgagaggacatctggtgtggcagcctgattggcacaagagcccgagccacgtgggcagaaaacatccaggtggcta

SEQ ID NO: 6461 - DNA, 80 bp, synthetic construct
  misc_feature 1..80: note = Synthetic: >NC_009942.1-cand-10290-10369
  source 1..80: mol_type = other DNA
tcaaccaagtcagagcaatcatcggagatgagaagtatgtggactacatgagttcactaaagagatatgaagacacaact

SEQ ID NO: 6462 - DNA, 80 bp, synthetic construct
  misc_feature 1..80: note = Synthetic: >NC_009942.1-cand-10370-10449
  source 1..80: mol_type = other DNA
ttggttgaggacacagtactgtagatatttaatcaattgtaaatagacaatataagtatgcataaaagtgtagttttata

SEQ ID NO: 6463 - DNA, 80 bp, synthetic construct
  misc_feature 1..80: note = Synthetic: >NC_009942.1-cand-10450-10529
  source 1..80: mol_type = other DNA
gtagtatttagtggtgttagtgtaaatagttaagaaaattttgaggagaaagtcaggccgggaagttcccgccaccggaa

SEQ ID NO: 6464 - DNA, 80 bp, synthetic construct
  misc_feature 1..80: note = Synthetic: >NC_009942.1-cand-10530-10609
  source 1..80: mol_type = other DNA
gttgagtagacggtgctgcctgcgactcaaccccaggaggactgggtgaacaaagccgcgaagtgatccatgtaagccct

SEQ ID NO: 6465 - DNA, 80 bp, synthetic construct
  misc_feature 1..80: note = Synthetic: >NC_009942.1-cand-10610-10689
  source 1..80: mol_type = other DNA
cagaaccgtctcggaaggaggaccccacatgttgtaacttcaaagcccaatgtcagaccacgctacggcgtgctactctg

SEQ ID NO: 6466 - DNA, 80 bp, synthetic construct
  misc_feature 1..80: note = Synthetic: >NC_009942.1-cand-10690-10769
  source 1..80: mol_type = other DNA
cggagagtgcagtctgcgatagtgccccaggaggactgggttaacaaaggcaaaccaacgccccacgcggccctagcccc

SEQ ID NO: 6467 - DNA, 80 bp, synthetic construct
  misc_feature 1..80: note = Synthetic: >NC_009942.1-cand-10770-10849
  source 1..80: mol_type = other DNA
ggtaatggtgttaaccagggcgaaaggactagaggttagaggagaccccgcggtttaaagtgcacggcccagcctggctg

SEQ ID NO: 6468 - DNA, 80 bp, synthetic construct
  misc_feature 1..80: note = Synthetic: >NC_009942.1-cand-10870-10949
  source 1..80: mol_type = other DNA
gactagaggttagtggagaccccgtgccacaaaacaccacaacaaaacagcatattgacacctgggatagactaggagat

SEQ ID NO: 6469 - DNA, 80 bp, synthetic construct
  misc_feature 1..80: note = Synthetic: >NC_009942.1-cand-10930-11009
  source 1..80: mol_type = other DNA
cctgggatagactaggagatcttctgctctgcacaaccagccacacggcacagtgcgccgacaatggtggctggtggtgc

SEQ ID NO: 6470 - DNA, 80 bp, synthetic construct
  misc_feature 1..80: note = Synthetic: >NC_009996.1-cand-60-139
  source 1..80: mol_type = other DNA
gtacacttgcacgccagtttgcctctccttaccccgtaacatatctagaagaatgtgcataacggaccaataggtggtgg

SEQ ID NO: 6471 - DNA, 80 bp, synthetic construct
  misc_feature 1..80: note = Synthetic: >NC_009996.1-cand-140-219
  source 1..80: mol_type = other DNA
caacccatgccactgacggtcaagtacttctgtttccccggtgtgatgtggaatagactctctcagggttgaagccataa

SEQ ID NO: 6472 - DNA, 80 bp, synthetic construct
  misc_feature 1..80: note = Synthetic: >NC_009996.1-cand-220-299
  source 1..80: mol_type = other DNA
gcatcgttatccgctacgtgcctacgcaaaacctagtagcattttgaagcttacttggttggccgctcagccactaaccc

SEQ ID NO: 6473 - DNA, 80 bp, synthetic construct
  misc_feature 1..80: note = Synthetic: >NC_009996.1-cand-300-379
  source 1..80: mol_type = other DNA
gtggtaggcctggcagatgaggctgggcgcaccccactggcgacagtggcccagcctgcgtggctgcctgcccctctttg

SEQ ID NO: 6474 - DNA, 80 bp, synthetic construct
  misc_feature 1..80: note = Synthetic: >NC_009996.1-cand-390-469
  source 1..80: mol_type = other DNA
atttaagtgacaaggtgtgaagagtctcgtgtgctccacgtagaatccttccggcccctgaatgtggctaatcctaaccc

SEQ ID NO: 6475 - DNA, 80 bp, synthetic construct
  misc_feature 1..80: note = Synthetic: >NC_009996.1-cand-460-539
  source 1..80: mol_type = other DNA
atcctaaccccgcagctattgcacacaatccagtgtgttgatagtcgtaatgggcaactgtgggatggaaccaactactt

SEQ ID NO: 6476 - DNA, 80 bp, synthetic construct
  misc_feature 1..80: note = Synthetic: >NC_009996.1-cand-3080-3159
  source 1..80: mol_type = other DNA
cagaaacactttattaaccacaggactgatataaaaactgcaggcccaagtgatctctttgtccatacagccactatgat

SEQ ID NO: 6477 - DNA, 80 bp, synthetic construct
  misc_feature 1..80: note = Synthetic: >NC_009996.1-cand-3160-3239
  source 1..80: mol_type = other DNA
ttacaggaatgcgcacttaaccagcttgaatgacaaaaccgttctactggctctcagtgcagatctccaggtggacgcag

SEQ ID NO: 6478 - DNA, 80 bp, synthetic construct
  misc_feature 1..80: note = Synthetic: >NC_009996.1-cand-3240-3319
  source 1..80: mol_type = other DNA
ctgaccagccaggcccagataccatcccacaatgtgactgcttggagggctgctactatagcaaaagtttagatagatat

SEQ ID NO: 6479 - DNA, 80 bp, synthetic construct
  misc_feature 1..80: note = Synthetic: >NC_009996.1-cand-3310-3389
  source 1..80: mol_type = other DNA
agatagatatataccagttaaattagaagcacacgactggtatcagatagaggaaacctgttattacccacagcacatcc

SEQ ID NO: 6480 - DNA, 80 bp, synthetic construct
  misc_feature 1..80: note = Synthetic: >NC_009996.1-cand-3390-3469
  source 1..80: mol_type = other DNA
agtataatataatgattggtgaaggacattgtcagcctggagactgcggagggaagttactgtgcactcatggtgtgatt

SEQ ID NO: 6481 - DNA, 80 bp, synthetic construct
  misc_feature 1..80: note = Synthetic: >NC_009996.1-cand-3470-3549
  source 1..80: mol_type = other DNA
ggcatcatcacagctggtggagacaatcatgtagctttcacagatctaagaccctattcatgtttagacactcaccaagg

SEQ ID NO: 6482 - DNA, 80 bp, synthetic construct
  misc_feature 1..80: note = Synthetic: >NC_009996.1-cand-3550-3629
  source 1..80: mol_type = other DNA
tcctattcaggactatgtgacacaattagggagtgcctttggtagcggtttcactgacacacttaaagaccaattgacag

SEQ ID NO: 6483 - DNA, 80 bp, synthetic construct
  misc_feature 1..80: note = Synthetic: >NC_009996.1-cand-3630-3709
  source 1..80: mol_type = other DNA
atgtgagtgcccatattaaagacaaaattacttcaaaggtagttaaatggctagtacgtatcatcagtgcacttaccata

SEQ ID NO: 6484 - DNA, 80 bp, synthetic construct
  misc_feature 1..80: note = Synthetic: >NC_009996.1-cand-3710-3789
  source 1..80: mol_type = other DNA
atgatacgtaacagtactgacacacccactgtacttgcaacccttgctcttttaggctgtcacaagtcaccatggtcatt

SEQ ID NO: 6485 - DNA, 80 bp, synthetic construct
  misc_feature 1..80: note = Synthetic: >NC_009996.1-cand-3790-3869
  source 1..80: mol_type = other DNA
tctcaaggaccggttatgtcagtggttaaacatcactagaccgccaagccgacaaggtgatggctggttgaagaaattca

SEQ ID NO: 6486 - DNA, 80 bp, synthetic construct
  misc_feature 1..80: note = Synthetic: >NC_009996.1-cand-3870-3949
  source 1..80: mol_type = other DNA
ctgaatgctgcaacgccgctaagggccttgagtggattggcattaagatcagtaaatttatagaatggcttaaaaataga

SEQ ID NO: 6487 - DNA, 80 bp, synthetic construct
  misc_feature 1..80: note = Synthetic: >NC_009996.1-cand-3950-4029
  source 1..80: mol_type = other DNA
ctgcttcctaccttacaacacaaaaaagaaatcttagatgaatgcaagaaaatagatctttatcaagaacaggttaaagg

SEQ ID NO: 6488 - DNA, 80 bp, synthetic construct
  misc_feature 1..80: note = Synthetic: >NC_009996.1-cand-4030-4109
  source 1..80: mol_type = other DNA
attttccaaagttgatgaaccagctcagcaggaactactaattaaagttgaaaaactgaagaaaggtttagacagcctag

SEQ ID NO: 6489 - DNA, 80 bp, synthetic construct
  misc_feature 1..80: note = Synthetic: >NC_009996.1-cand-4100-4179
  source 1..80: mol_type = other DNA
gacagcctagcacctctgtatgcagttgaaaacaaaagagttacaaacatctataaagaactcaaagcattgtctgcata

SEQ ID NO: 6490 - DNA, 80 bp, synthetic construct
  misc_feature 1..80: note = Synthetic: >NC_009996.1-cand-4180-4259
  source 1..80: mol_type = other DNA
taaaacaacacagagaactgaaccagtatgcatactgatcagaggagctcctgggtgtgggaaatctttggttacttcaa

SEQ ID NO: 6491 - DNA, 80 bp, synthetic construct
  misc_feature 1..80: note = Synthetic: >NC_009996.1-cand-4260-4339
  source 1..80: mol_type = other DNA
taatagccagaggtttaaccaaaccaggtgacatttactcccttcctccagaccctaaacattttgatgggtatgatcaa

SEQ ID NO: 6492 - DNA, 80 bp, synthetic construct
  misc_feature 1..80: note = Synthetic: >NC_014397.1-cand-3480-3559
  source 1..80: mol_type = other DNA
cagctatatgcttccgcatgaagaaggagctgggagtgtaccttgccatttacccctcagagaagtccacagcaaacaca

SEQ ID NO: 6493 - DNA, 80 bp, synthetic construct
  misc_feature 1..80: note = Synthetic: >NC_014397.1-cand-3560-3639
  source 1..80: mol_type = other DNA
gattttgtgatggagtacaattctgaattttatttccacacccagcatgttagaccaacgatcaggtggattgcagcttg

SEQ ID NO: 6494 - DNA, 80 bp, synthetic construct
  misc_feature 1..80: note = Synthetic: >NC_014397.1-cand-3640-3719
  source 1..80: mol_type = other DNA
ttgcagcctgccagaagtggaaacactagtagcccgccaggaagaggcctctaacctaatgacttcagttactgagggag

SEQ ID NO: 6495 - DNA, 80 bp, synthetic construct
  misc_feature 1..80: note = Synthetic: >NC_014397.1-cand-3720-3799
  source 1..80: mol_type = other DNA
gtgggtcattctccttagctgcaatgattcagcaagctcagtgtactctccattacatgctgatgggcatgggagtgtct

SEQ ID NO: 6496 - DNA, 80 bp, synthetic construct
  misc_feature 1..80: note = Synthetic: >NC_014397.1-cand-3800-3879
  source 1..80: mol_type = other DNA
gagctattcttagagtataagaaggcagtgctgaagtggaatgaccctggcctgggtttcttcctgcttgacaatcctta

SEQ ID NO: 6497 - DNA, 80 bp, synthetic construct
  misc_feature 1..80: note = Synthetic: >NC_014397.1-cand-3880-3959
  source 1..80: mol_type = other DNA
tgcgtgcggattgggaggtttcagatttaatctcttcaaagctatcaccagaactgatttgcagaagctatatgctttct

SEQ ID NO: 6498 - DNA, 80 bp, synthetic construct
  misc_feature 1..80: note = Synthetic: >NC_014397.1-cand-3960-4039
  source 1..80: mol_type = other DNA
tcatgaagaaggtcaagggctcagctgctagggactgggcagatgaagatgtcaccatcccagaaacgtgtagcgtgagc

SEQ ID NO: 6499 - DNA, 80 bp, synthetic construct
  misc_feature 1..80: note = Synthetic: >NC_014397.1-cand-4080-4159
  source 1..80: mol_type = other DNA
gatctaggaagaagtttcagaaattgagagaccgtttgaacataccagagaactggattgaactaataaatgagaatcca

SEQ ID NO: 6500 - DNA, 80 bp, synthetic construct
  misc_feature 1..80: note = Synthetic: >NC_014397.1-cand-4140-4219
  source 1..80: mol_type = other DNA
aactaataaatgagaatccagaggtgctctatcgggctcccagaacaggcccagaaatattgttgcgcattgcagagaaa

SEQ ID NO: 6501 - DNA, 80 bp, synthetic construct
  misc_feature 1..80: note = Synthetic: >NC_014397.1-cand-4220-4299
  source 1..80: mol_type = other DNA
gtccatagcccaggtgttgtgtcatcattgtcttctggcaatgcagtttgtaaagtcatggcctcagctgtatacttctt

SEQ ID NO: 6502 - DNA, 80 bp, synthetic construct
  misc_feature 1..80: note = Synthetic: >NC_014397.1-cand-4300-4379
  source 1..80: mol_type = other DNA
atcagcaacaatttttgaggacactggacgtcctgagttcaacttcttggaggattctaagtacagcttgctacaaaaga

SEQ ID NO: 6503 - DNA, 80 bp, synthetic construct
  misc_feature 1..80: note = Synthetic: >NC_014397.1-cand-4380-4459
  source 1..80: mol_type = other DNA
tggctgcatattctggctttcatggtttcaatgatatggagccagaagatatattattcttattcccgaatattgaggaa

SEQ ID NO: 6504 - DNA, 80 bp, synthetic construct
  misc_feature 1..80: note = Synthetic: >NC_014397.1-cand-4460-4539
  source 1..80: mol_type = other DNA
ttagaatcactggattctatagtttacaacaagggagaaatagacatcatcccaagagtcaacatcagggatgcaaccca

SEQ ID NO: 6505 - DNA, 80 bp, synthetic construct
  misc_feature 1..80: note = Synthetic: >NC_014397.1-cand-4550-4629
  source 1..80: mol_type = other DNA
actatctttaatgagcagaagaccctccggacatctccagagaagttggtgtcagacaagtggtttgggactcagaagag

SEQ ID NO: 6506 - DNA, 80 bp, synthetic construct
  misc_feature 1..80: note = Synthetic: >NC_014397.1-cand-4630-4709
  source 1..80: mol_type = other DNA
taggataggcaaaacaaccttcctggctgaatgggaaaagctaaagaaaattgtaaagtggttggaagacactccagaag

SEQ ID NO: 6507 - DNA, 80 bp, synthetic construct
  misc_feature 1..80: note = Synthetic: >NC_014397.1-cand-4710-4789
  source 1..80: mol_type = other DNA
caactctagctcacaccccactgaataaccatattcaagttaggaatttctttgctagaatggaaagcaagcctagaaca

SEQ ID NO: 6508 - DNA, 80 bp, synthetic construct
  misc_feature 1..80: note = Synthetic: >NC_014406.1-cand-2230-2309
  source 1..80: mol_type = other DNA
aatgctgtccaagaagtagtaatggaacaaatgcagccaagcatacttccaactactctggagggtgctattgggtactc

SEQ ID NO: 6509 - DNA, 80 bp, synthetic construct
  misc_feature 1..80: note = Synthetic: >NC_014406.1-cand-2340-2419
  source 1..80: mol_type = other DNA
ggaacttatatacccttctagtacagtagcagcaggtgctgcaaatttgtttgggcctccagtagagaaacagacaagca

SEQ ID NO: 6510 - DNA, 80 bp, synthetic construct
  misc_feature 1..80: note = Synthetic: >NC_014406.1-cand-2390-2469
  source 1..80: mol_type = other DNA
ttgggcctccagtagagaaacagacaagcaaggaacctagtaagggtgagctgtaaacccctctttctgtgaaagacaaa

SEQ ID NO: 6511 - DNA, 80 bp, synthetic construct
  misc_feature 1..80: note = Synthetic: >NC_014406.1-cand-2470-2549
  source 1..80: mol_type = other DNA
gcatatgctgggtaattgttaaacaatgaattctttattgtatcaataaatcttacatggaatgcatggagccaatgcca

SEQ ID NO: 6512 - DNA, 80 bp, synthetic construct
  misc_feature 1..80: note = Synthetic: >NC_014406.1-cand-2530-2609
  source 1..80: mol_type = other DNA
aatgcatggagccaatgccagattcttgagtactgtcatttgtttcatcattttcctgtggctgtacaaaagattcatct

SEQ ID NO: 6513 - DNA, 80 bp, synthetic construct
  misc_feature 1..80: note = Synthetic: >NC_014406.1-cand-2610-2689
  source 1..80: mol_type = other DNA
accagtacatttgtaaaagggtcaatgccagctaaaatattttctttcatagtttggtacattccaaagctaacccatct

SEQ ID NO: 6514 - DNA, 80 bp, synthetic construct
  misc_feature 1..80: note = Synthetic: >NC_014406.1-cand-2690-2769
  source 1..80: mol_type = other DNA
ttcaaaagtttgcttccagttaacaacatcttcctgcagttcttccataaagtcctccactggctcccaccaaattagag

SEQ ID NO: 6515 - DNA, 80 bp, synthetic construct
  misc_feature 1..80: note = Synthetic: >NC_014406.1-cand-2770-2849
  source 1..80: mol_type = other DNA
ctgccaacaaggtggtccccttttgtaacagccttttggacattaatacacaatctttcaaacatttttgcaaacatggc

SEQ ID NO: 6516 - DNA, 80 bp, synthetic construct
  misc_feature 1..80: note = Synthetic: >NC_014406.1-cand-2860-2939
  source 1..80: mol_type = other DNA
aataatatcctctggcaattctggcctttacagtacatggaattatatagtcattacaggtgatcacagatggaggaaac

SEQ ID NO: 6517 - DNA, 80 bp, synthetic construct
  misc_feature 1..80: note = Synthetic: >NC_014406.1-cand-2940-3019
  source 1..80: mol_type = other DNA
agctgggacaccttgtttagatgcttcctctccatatttactggcacacatccatctaaataatccctaaggttatctag

SEQ ID NO: 6518 - DNA, 80 bp, synthetic construct
  misc_feature 1..80: note = Synthetic: >NC_014406.1-cand-3020-3099
  source 1..80: mol_type = other DNA
gtttgtcatcccacacccttgtgtaagattggtattagccataggtgttccctttacatcctcaatgacacacatgaatt

SEQ ID NO: 6519 - DNA, 80 bp, synthetic construct
  misc_feature 1..80: note = Synthetic: >NC_014406.1-cand-3100-3179
  source 1..80: mol_type = other DNA
tgtcaatggcacatcccagttcaaagtttatcttatctggagtacaatttacattcaaagacacaccccctacaagatcc

SEQ ID NO: 6520 - DNA, 80 bp, synthetic construct
  misc_feature 1..80: note = Synthetic: >NC_014406.1-cand-3140-3219
  source 1..80: mol_type = other DNA
agtacaatttacattcaaagacacaccccctacaagatccaatattgcagcagccaatgttgttttgccactatttatgg

SEQ ID NO: 6521 - DNA, 80 bp, synthetic construct
  misc_feature 1..80: note = Synthetic: >NC_014406.1-cand-3270-3349
  source 1..80: mol_type = other DNA
cttagtatttcctttagtttagtagtaaagctaggctgcaaacaatctaaccaggccacagcccccagtaattgagtaat

SEQ ID NO: 6522 - DNA, 80 bp, synthetic construct
  misc_feature 1..80: note = Synthetic: >NC_014406.1-cand-3360-3439
  source 1..80: mol_type = other DNA
cctgcatattgctcagctaggattgtaaattgcttcttaaaggcctgtaataccagatcctgtctagttgattccaacat

SEQ ID NO: 6523 - DNA, 80 bp, synthetic construct
  misc_feature 1..80: note = Synthetic: >NC_014406.1-cand-3440-3519
  source 1..80: mol_type = other DNA
taacacccttctttgtgctgctactctgtcacaggcctgctgagcaatagatttctggtttttagctgctttgaataatt

SEQ ID NO: 6524 - DNA, 80 bp, synthetic construct
  misc_feature 1..80: note = Synthetic: >NC_019843.3-cand-24890-24969
  source 1..80: mol_type = other DNA
ttgaggttgtttctgcttatggtctttgcgatgcagctaaccctactaattgtatagcccctgttaatggctactttatt

SEQ ID NO: 6525 - DNA, 80 bp, synthetic construct
  misc_feature 1..80: note = Synthetic: >NC_019843.3-cand-24970-25049
  source 1..80: mol_type = other DNA
aaaactaataacactaggattgttgatgagtggtcatatactggctcgtccttctatgcacctgagcccattacctccct

SEQ ID NO: 6526 - DNA, 80 bp, synthetic construct
  misc_feature 1..80: note = Synthetic: >NC_019843.3-cand-25050-25129
  source 1..80: mol_type = other DNA
taatactaagtatgttgcaccacaggtgacataccaaaacatttctactaacctccctcctcctcttctcggcaattcca

SEQ ID NO: 6527 - DNA, 80 bp, synthetic construct
  misc_feature 1..80: note = Synthetic: >NC_019843.3-cand-25130-25209
  source 1..80: mol_type = other DNA
ccgggattgacttccaagatgagttggatgagtttttcaaaaatgttagcaccagtatacctaattttggttccctaaca

SEQ ID NO: 6528 - DNA, 80 bp, synthetic construct
  misc_feature 1..80: note = Synthetic: >NC_019843.3-cand-25210-25289
  source 1..80: mol_type = other DNA
cagattaatactacattactcgatcttacctacgagatgttgtctcttcaacaagttgttaaagcccttaatgagtctta

SEQ ID NO: 6529 - DNA, 80 bp, synthetic construct
  misc_feature 1..80: note = Synthetic: >NC_019843.3-cand-25290-25369
  source 1..80: mol_type = other DNA
catagaccttaaagagcttggcaattatacttattacaacaaatggccgtggtacatttggcttggtttcattgctgggc

SEQ ID NO: 6530 - DNA, 80 bp, synthetic construct
  misc_feature 1..80: note = Synthetic: >NC_019843.3-cand-25370-25449
  source 1..80: mol_type = other DNA
ttgttgccttagctctatgcgtcttcttcatactgtgctgcactggttgtggcacaaactgtatgggaaaacttaagtgt

SEQ ID NO: 6531 - DNA, 80 bp, synthetic construct
  misc_feature 1..80: note = Synthetic: >NC_019843.3-cand-25450-25529
  source 1..80: mol_type = other DNA
aatcgttgttgtgatagatacgaggaatacgacctcgagccgcataaggttcatgttcactaattaacgaactattaatg

SEQ ID NO: 6532 - DNA, 80 bp, synthetic construct
  misc_feature 1..80: note = Synthetic: >NC_019843.3-cand-25530-25609
  source 1..80: mol_type = other DNA
agagttcaaagaccacccactctcttgttagtgttttcactctctcttttggtcactgcatcctcaaaacctctctatgt

SEQ ID NO: 6533 - DNA, 80 bp, synthetic construct
  misc_feature 1..80: note = Synthetic: >NC_019843.3-cand-25610-25689
  source 1..80: mol_type = other DNA
acctgagcattgtcagaattattctggttgcatgcttagggcttgtattaaaactgcccaagctgatacagctggtcttt

SEQ ID NO: 6534 - DNA, 80 bp, synthetic construct
  misc_feature 1..80: note = Synthetic: >NC_019843.3-cand-25690-25769
  source 1..80: mol_type = other DNA
atacaaattttcgaattgacgtcccatctgcagaatcaactggtactcaatcagtttctgtcgatcttgagtcaacttca

SEQ ID NO: 6535 - DNA, 80 bp, synthetic construct
  misc_feature 1..80: note = Synthetic: >NC_019843.3-cand-25770-25849
  source 1..80: mol_type = other DNA
actcatgatggtcctaccgaacatgttactagtgtgaatctttttgacgttggttactcagttaattaacgaactctatg

SEQ ID NO: 6536 - DNA, 80 bp, synthetic construct
  misc_feature 1..80: note = Synthetic: >NC_019843.3-cand-25850-25929
  source 1..80: mol_type = other DNA
gattacgtgtctctgcttaatcaaatttggcagaagtaccttaactcaccgtatactacttgtttgtacatccctaaacc

SEQ ID NO: 6537 - DNA, 80 bp, synthetic construct
  misc_feature 1..80: note = Synthetic: >NC_019843.3-cand-25930-26009
  source 1..80: mol_type = other DNA
cacagctaagtatacacctttagttggcacttcattgcaccctgtgctgtggaactgtcagctatcctttgctggttata

SEQ ID NO: 6538 - DNA, 80 bp, synthetic construct
  misc_feature 1..80: note = Synthetic: >NC_019843.3-cand-26010-26089
  source 1..80: mol_type = other DNA
ctgaatctgctgttaattctacaaaagctttggccaaacaggacgcagctcagcgaatcgcttggttgctacataaggat

SEQ ID NO: 6539 - DNA, 80 bp, synthetic construct
  misc_feature 1..80: note = Synthetic: >NC_019843.3-cand-26090-26169
  source 1..80: mol_type = other DNA
ggaggaatccctgatggatgttccctctacctccggcactcaagtttattcgcgcaaagcgaggaagaggagccattctc

SEQ ID NO: 6540 - DNA, 80 bp, synthetic construct
  misc_feature 1..80: note = Synthetic: >NC_021541.1-cand-2620-2699
  source 1..80: mol_type = other DNA
cgtacaagcgtcatgatcaaaagtatgcaaatgaagttacacactgaagctgcagcattgtcaagaataatgattgataa

SEQ ID NO: 6541 - DNA, 80 bp, synthetic construct
  misc_feature 1..80: note = Synthetic: >NC_021541.1-cand-2710-2789
  source 1..80: mol_type = other DNA
aaaacattaggagtgccaaatgttcagagtcaaaagaatagaagtcagatattaaaggcaattaacattctcggtgttcc

SEQ ID NO: 6542 - DNA, 80 bp, synthetic construct
  misc_feature 1..80: note = Synthetic: >NC_021541.1-cand-2790-2869
  source 1..80: mol_type = other DNA
agaacagagtggtatatccccgaaagggtattacccagaagaactctattctctcgttgtcaaacattcaaccatcaaat

SEQ ID NO: 6543 - DNA, 80 bp, synthetic construct
  misc_feature 1..80: note = Synthetic: >NC_021541.1-cand-2860-2939
  source 1..80: mol_type = other DNA
accatcaaatttattgattatcaacagccaatcgacatatatcgtgtaaataacaaagctgtagagttattacgtgccca

SEQ ID NO: 6544 - DNA, 80 bp, synthetic construct
  misc_feature 1..80: note = Synthetic: >NC_021541.1-cand-2950-3029
  source 1..80: mol_type = other DNA
aggatatctgactcaaaaccaatcgccaaaccatccaatcatttgtatgatatagttagttctatttctccaatcaaact

SEQ ID NO: 6545 - DNA, 80 bp, synthetic construct
  misc_feature 1..80: note = Synthetic: >NC_021541.1-cand-3010-3089
  source 1..80: mol_type = other DNA
tctatttctccaatcaaactgtcacctagcgatttgttaaaacaatccagaaaatatgatttgtccacgtacaaaggtaa

SEQ ID NO: 6546 - DNA, 80 bp, synthetic construct
  misc_feature 1..80: note = Synthetic: >NC_021541.1-cand-3090-3169
  source 1..80: mol_type = other DNA
gagaacatatctgcttgatctaggtctcacaggaaatacactgaagacttatctcgcttcaaaattactttttagagatc

SEQ ID NO: 6547 - DNA, 80 bp, synthetic construct
  misc_feature 1..80: note = Synthetic: >NC_021541.1-cand-3170-3249
  source 1..80: mol_type = other DNA
ttttactatccaaatatgacgagctatattcgacgccaggatttggtgccacacaactaacgacaatcccgttaaatgtc

SEQ ID NO: 6548 - DNA, 80 bp, synthetic construct
  misc_feature 1..80: note = Synthetic: >NC_021541.1-cand-3250-3329
  source 1..80: mol_type = other DNA
tcttcggctgaaaaagtcttttccataagattgaatttaccttctcatttgtatgagattgtcatgttgttattgttata

SEQ ID NO: 6549 - DNA, 80 bp, synthetic construct
  misc_feature 1..80: note = Synthetic: >NC_021541.1-cand-3330-3409
  source 1..80: mol_type = other DNA
tgaatatgtacactatgtattcatgtcccacaaaacttttaccgctacaatgcatgcttcaagtcaagaagaatctgcgc

SEQ ID NO: 6550 - DNA, 80 bp, synthetic construct
  misc_feature 1..80: note = Synthetic: >NC_021541.1-cand-3410-3489
  source 1..80: mol_type = other DNA
gattaactaaactcgtgctacatatgttagatgatatacaactggatcaagtgtcattttcagatgacgcttggtagatc

SEQ ID NO: 6551 - DNA, 80 bp, synthetic construct
  misc_feature 1..80: note = Synthetic: >NC_021542.1-cand-0-79
  source 1..80: mol_type = other DNA
ataaaatggcttcattgccgcttctcgtccttgctgctgcggtcaatgctcaactcaacattgttccttctgtacatcct

SEQ ID NO: 6552 - DNA, 80 bp, synthetic construct
  misc_feature 1..80: note = Synthetic: >NC_021542.1-cand-80-159
  source 1..80: mol_type = other DNA
gaagtgtgtgtgctttatgctgatgaccatcaatctgatgcgaataagtttaatggtaattttactcaaatattccattc

SEQ ID NO: 6553 - DNA, 80 bp, synthetic construct
  misc_feature 1..80: note = Synthetic: >NC_021542.1-cand-170-249
  source 1..80: mol_type = other DNA
ataacgctatcattcatgagctattcttcttcatcttatgatgtaattgacataatgtctagatatgatctcagttcttg

SEQ ID NO: 6554 - DNA, 80 bp, synthetic construct
  misc_feature 1..80: note = Synthetic: >NC_021542.1-cand-260-339
  source 1..80: mol_type = other DNA
gctatcgatgtatttgacgcctctatggattttaatgttttccttcagtccactaacaattgttcaaaatataacgctaa

SEQ ID NO: 6555 - DNA, 80 bp, synthetic construct
  misc_feature 1..80: note = Synthetic: >NC_021542.1-cand-340-419
  source 1..80: mol_type = other DNA
taagattcaccatatcaaattgcctcgtggagaagagtggttttcatattcaaagaatctaaagttttgtcctttgtccg

SEQ ID NO: 6556 - DNA, 80 bp, synthetic construct
  misc_feature 1..80: note = Synthetic: >NC_021545.1-cand-1640-1719
  source 1..80: mol_type = other DNA
aaatcccaacccaggacggcagatagctgccacttcttttaggaaattgctgaaatctatgaaggattcatgttgtaata

SEQ ID NO: 6557 - DNA, 80 bp, synthetic construct
  misc_feature 1..80: note = Synthetic: >NC_021545.1-cand-1720-1799
  source 1..80: mol_type = other DNA
ggatgataccattaatcagattattaaagtataacattgagagaatcgcccgtgtatacaggttttttccatatacagct

SEQ ID NO: 6558 - DNA, 80 bp, synthetic construct
  misc_feature 1..80: note = Synthetic: >NC_021545.1-cand-1810-1889
  source 1..80: mol_type = other DNA
acatcattcctgcttttagagatgagagactaagagtgaaagttccagtgtctggaatgttgtctatagctctcggaatt

SEQ ID NO: 6559 - DNA, 80 bp, synthetic construct
  misc_feature 1..80: note = Synthetic: >NC_021545.1-cand-1890-1969
  source 1..80: mol_type = other DNA
aacaaagctccagattccttcgattggtacaatttgcttaaatttgctgatgttgtaagaactaagaacttcgcggaacg

SEQ ID NO: 6560 - DNA, 80 bp, synthetic construct
  misc_feature 1..80: note = Synthetic: >NC_021545.1-cand-1970-2049
  source 1..80: mol_type = other DNA
acaatctctagaatcaattatggtgcacgcactgatcagaaatgacataaatcccgcgcgatcaaaaaaagactatatac

SEQ ID NO: 6561 - DNA, 80 bp, synthetic construct
  misc_feature 1..80: note = Synthetic: >NC_021545.1-cand-2050-2129
  source 1..80: mol_type = other DNA
agcaaaatatcaaaccagcaacgaacgttgtcgcatcactgtctaaattgccatcagcaacattcacaacaattctcgcg

SEQ ID NO: 6562 - DNA, 80 bp, synthetic construct
  misc_feature 1..80: note = Synthetic: >NC_021545.1-cand-2130-2209
  source 1..80: mol_type = other DNA
gatcggatgcttaataatgagataaggcgaactcagagctatgtggttacaaatcgtattcgtgatgctgtcagagctgc

SEQ ID NO: 6563 - DNA, 80 bp, synthetic construct
  misc_feature 1..80: note = Synthetic: >NC_021545.1-cand-2210-2289
  source 1..80: mol_type = other DNA
atttgaacacgtgccaacagctgaacatgggatcgccaagggtgctcttttattaccatatccgcaaaattttcaacgat

SEQ ID NO: 6564 - DNA, 80 bp, synthetic construct
  misc_feature 1..80: note = Synthetic: >NC_021545.1-cand-2290-2369
  source 1..80: mol_type = other DNA
cctcagtgtatgttaggaaagataacatattgtacgatcctccagttggagttgatagattcaatctaagtgacctactg

SEQ ID NO: 6565 - DNA, 80 bp, synthetic construct
  misc_feature 1..80: note = Synthetic: >NC_021545.1-cand-2370-2449
  source 1..80: mol_type = other DNA
gatggtagattctatcaaggattgattaaccgagtgcaaaacatggcgccgtttgttatatcgggaccattgcaagtaaa

SEQ ID NO: 6566 - DNA, 80 bp, synthetic construct
  misc_feature 1..80: note = Synthetic: >NC_021545.1-cand-2460-2539
  source 1..80: mol_type = other DNA
gcatctgcgattgaatctgttacatctgcctaccttacaatgtcctctccttacgacgcttgcgtgagaccagaggattt

SEQ ID NO: 6567 - DNA, 80 bp, synthetic construct
  misc_feature 1..80: note = Synthetic: >NC_021545.1-cand-2540-2619
  source 1..80: mol_type = other DNA
acgacataaccgagttgtccacccacctaccgttgattattttagtgatgctagtattgctagacctaatacacaatttg

SEQ ID NO: 6568 - DNA, 80 bp, synthetic construct
  misc_feature 1..80: note = Synthetic: >NC_021545.1-cand-2620-2699
  source 1..80: mol_type = other DNA
agcagctgatgtcaaaaacgtcagtatttgttattgacgctccaagacttatagttcaaaatgacgctactgtatacaca

SEQ ID NO: 6569 - DNA, 80 bp, synthetic construct
  misc_feature 1..80: note = Synthetic: >NC_021545.1-cand-2700-2779
  source 1..80: mol_type = other DNA
ttcgactacaaagacattcaactcacaacatccgtcgtagataaattagaatttacctcagttaaaacgccagacgttac

SEQ ID NO: 6570 - DNA, 80 bp, synthetic construct
  misc_feature 1..80: note = Synthetic: >NC_021545.1-cand-2750-2829
  source 1..80: mol_type = other DNA
atttacctcagttaaaacgccagacgttactctatttaatggaatgttggtttatgaagattaagtagttgtgacatgat

SEQ ID NO: 6571 - DNA, 80 bp, synthetic construct
  misc_feature 1..80: note = Synthetic: >NC_021546.1-cand-0-79
  source 1..80: mol_type = other DNA
taattagattgtcagtatccaggttcgggaaacctatgggaaacagacagtctagtgctcagttgaattcgcatttaact

SEQ ID NO: 6572 - DNA, 80 bp, synthetic construct
  misc_feature 1..80: note = Synthetic: >NC_021928.1-cand-1510-1589
  source 1..80: mol_type = other DNA
caaccaactcagatcacaacgaactacagatgccagaatttgaaaatgacatcaatcctttcaatcatccaaggttcaca

SEQ ID NO: 6573 - DNA, 80 bp, synthetic construct
  misc_feature 1..80: note = Synthetic: >NC_021928.1-cand-1590-1669
  source 1..80: mol_type = other DNA
gccagagcaccactcatcccagaaatctcacaccagactccaaccatcagaatgaacagaaatgtaaacataagagatag

SEQ ID NO: 6574 - DNA, 80 bp, synthetic construct
  misc_feature 1..80: note = Synthetic: >NC_021928.1-cand-1670-1749
  source 1..80: mol_type = other DNA
caccagagacgaccgtcaagatgccaacgaggaccgaagcagcaacattccagatgatattcttggagatctagataatt

SEQ ID NO: 6575 - DNA, 80 bp, synthetic construct
  misc_feature 1..80: note = Synthetic: >NC_021928.1-cand-1750-1829
  source 1..80: mol_type = other DNA
aaaacatcaacagcccagtcataatcacacaacaaccataatccaaaaaaatccccaatacccgcaatcgcacacacaca

SEQ ID NO: 6576 - DNA, 80 bp, synthetic construct
  misc_feature 1..80: note = Synthetic: >NC_021928.1-cand-1830-1909
  source 1..80: mol_type = other DNA
atgggcacaatcaatcccacactacaacataactcaaaactctcaccaaatacgccatcacaactgaccaatcattgatg

SEQ ID NO: 6577 - DNA, 80 bp, synthetic construct
  misc_feature 1..80: note = Synthetic: >NC_021928.1-cand-1910-1989
  source 1..80: mol_type = other DNA
caagacagcatacaagaatctaatcactatgatttaagaaaaaactacgataggctgaacggttgcattcaggtcactca

SEQ ID NO: 6578 - DNA, 80 bp, synthetic construct
  misc_feature 1..80: note = Synthetic: >NC_021928.1-cand-1990-2069
  source 1..80: mol_type = other DNA
atcgttcaggctactataatttctaattccggacaaaaccgacaaaatgagctttgaaataagtgtagaggaaattgaag

SEQ ID NO: 6579 - DNA, 80 bp, synthetic construct
  misc_feature 1..80: note = Synthetic: >NC_021928.1-cand-2070-2149
  source 1..80: mol_type = other DNA
agctcattgagactggcaatctcaacatagaccatgcactaaaagaattaggtgcaaccagtcaatcatcactaaacaaa

SEQ ID NO: 6580 - DNA, 80 bp, synthetic construct
  misc_feature 1..80: note = Synthetic: >NC_021928.1-cand-2150-2229
  source 1..80: mol_type = other DNA
cctccatcccaaagtagcagaacagaaggaaatgatggtggaaccaagatttcaagaaatccggctcctgtagaggcacc

SEQ ID NO: 6581 - DNA, 80 bp, synthetic construct
  misc_feature 1..80: note = Synthetic: >NC_021928.1-cand-2230-2309
  source 1..80: mol_type = other DNA
tgcccatacatccacagcacaacggtcacacaatgaagagaatgaatcaggaagacaaaatctagacagcctttccatga

SEQ ID NO: 6582 - DNA, 80 bp, synthetic construct
  misc_feature 1..80: note = Synthetic: >NC_021928.1-cand-2310-2389
  source 1..80: mol_type = other DNA
tatccaataaaccccagacaggcacgctgcttatgggatcagacacacaacttccaagtccatcaaagacttatcaagga

SEQ ID NO: 6583 - DNA, 80 bp, synthetic construct
  misc_feature 1..80: note = Synthetic: >NC_021928.1-cand-2390-2469
  source 1..80: mol_type = other DNA
ctcattcttgatgcaaaaaagagagcactaaatgagccaagaagggatcaaaagataacaaatgaacatggcagtatgaa

SEQ ID NO: 6584 - DNA, 80 bp, synthetic construct
  misc_feature 1..80: note = Synthetic: >NC_021928.1-cand-2500-2579
  source 1..80: mol_type = other DNA
tagataccaggaaagaggcttgggttacacagaatcagagatcaagaacacaacccccactccaagacatcgaagagagt

SEQ ID NO: 6585 - DNA, 80 bp, synthetic construct
  misc_feature 1..80: note = Synthetic: >NC_021928.1-cand-2550-2629
  source 1..80: mol_type = other DNA
caacccccactccaagacatcgaagagagtactcgatttcatgggttaacggaagaaccacaatatccgagtggtgcaat

SEQ ID NO: 6586 - DNA, 80 bp, synthetic construct
  misc_feature 1..80: note = Synthetic: >NC_021928.1-cand-2630-2709
  source 1..80: mol_type = other DNA
ccatgctgcgcaccagtcaaatcaactgcctctgtcgaaaaatgcacatgtggaagatgtcccaaaatttgcgaactatg

SEQ ID NO: 6587 - DNA, 80 bp, synthetic construct
  misc_feature 1..80: note = Synthetic: >NC_021928.1-cand-2680-2759
  source 1..80: mol_type = other DNA
tggaagatgtcccaaaatttgcgaactatgcatcagagatccttgatgcaattaaggcattagaagtgagactagacagg

SEQ ID NO: 6588 - DNA, 80 bp, synthetic construct
  misc_feature 1..80: note = Synthetic: >NC_026433.1-cand-1290-1369
  source 1..80: mol_type = other DNA
tcctggacatttggacttacaatgccgaactgttggttctattggaaaatgaaagaactttggactaccacgattcaaat

SEQ ID NO: 6589 - DNA, 80 bp, synthetic construct
  misc_feature 1..80: note = Synthetic: >NC_026433.1-cand-1370-1449
  source 1..80: mol_type = other DNA
gtgaagaacttatatgaaaaggtaagaagccagctaaaaaacaatgccaaggaaattggaaacggctgctttgaatttta

SEQ ID NO: 6590 - DNA, 80 bp, synthetic construct
  misc_feature 1..80: note = Synthetic: >NC_026433.1-cand-1450-1529
  source 1..80: mol_type = other DNA
ccacaaatgcgataacacgtgcatggaaagtgtcaaaaatgggacttatgactacccaaaatactcagaggaagcaaaat

SEQ ID NO: 6591 - DNA, 80 bp, synthetic construct
  misc_feature 1..80: note = Synthetic: >NC_026433.1-cand-1470-1549
  source 1..80: mol_type = other DNA
gcatggaaagtgtcaaaaatgggacttatgactacccaaaatactcagaggaagcaaaattaaacagagaagaaatagat

SEQ ID NO: 6592 - DNA, 80 bp, synthetic construct
  misc_feature 1..80: note = Synthetic: >NC_026433.1-cand-1610-1689
  source 1..80: mol_type = other DNA
agttcattggtactggtagtctccctgggggcaatcagtttctggatgtgctctaatgggtctctacagtgtagaatatg

SEQ ID NO: 6593 - DNA, 80 bp, synthetic construct
  misc_feature 1..80: note = Synthetic: >NC_026434.1-cand-0-79
  source 1..80: mol_type = other DNA
atccaaaccaaaagataataaccattggttcggtctgtatgacaattggaatggctaacttaatattacaaattggaaac

SEQ ID NO: 6594 - DNA, 80 bp, synthetic construct
  misc_feature 1..80: note = Synthetic: >NC_026434.1-cand-80-159
  source 1..80: mol_type = other DNA
ataatctcaatatggattagccactcaattcaacttgggaatcaaaatcagattgaaacatgcaatcaaagcgtcattac

SEQ ID NO: 6595 - DNA, 80 bp, synthetic construct
  misc_feature 1..80: note = Synthetic: >NC_026434.1-cand-160-239
  source 1..80: mol_type = other DNA
ttatgaaaacaacacttgggtaaatcagacatatgttaacatcagcaacaccaactttgctgctggacagtcagtggttt

SEQ ID NO: 6596 - DNA, 80 bp, synthetic construct
  misc_feature 1..80: note = Synthetic: >NC_026434.1-cand-240-319
  source 1..80: mol_type = other DNA
ccgtgaaattagcgggcaattcctctctctgccctgttagtggatgggctatatacagtaaagacaacagtgtaagaatc

SEQ ID NO: 6597 - DNA, 80 bp, synthetic construct
  misc_feature 1..80: note = Synthetic: >NC_026434.1-cand-250-329
  source 1..80: mol_type = other DNA
agcgggcaattcctctctctgccctgttagtggatgggctatatacagtaaagacaacagtgtaagaatcggttccaagg

SEQ ID NO: 6598 - DNA, 80 bp, synthetic construct
  misc_feature 1..80: note = Synthetic: >NC_026434.1-cand-410-489
  source 1..80: mol_type = other DNA
ttgctaaatgacaaacattccaatggaaccattaaagacaggagcccatatcgaaccctaatgagctgtcctattggtga

SEQ ID NO: 6599 - DNA, 80 bp, synthetic construct
  misc_feature 1..80: note = Synthetic: >NC_026434.1-cand-500-579
  source 1..80: mol_type = other DNA
ccatacaactcaagatttgagtcagtcgcttggtcagcaagtgcttgtcatgatggcatcaattggctaacaattggaat

SEQ ID NO: 6600 - DNA, 80 bp, synthetic construct
  misc_feature 1..80: note = Synthetic: >NC_026434.1-cand-600-679
  source 1..80: mol_type = other DNA
cagtggctgtgttaaagtacaacggcataataacagacactatcaagagttggagaaacaatatattgagaacacaagag

SEQ ID NO: 6601 - DNA, 80 bp, synthetic construct
  misc_feature 1..80: note = Synthetic: >NC_026434.1-cand-800-879
  source 1..80: mol_type = other DNA
atgaatgcccctaattatcactatgaggaatgctcctgttatcctgattctagtgaaatcacatgtgtgtgcagggataa

SEQ ID NO: 6602 - DNA, 80 bp, synthetic construct
  misc_feature 1..80: note = Synthetic: >NC_026434.1-cand-890-969
  source 1..80: mol_type = other DNA
tcgaatcgaccgtgggtgtctttcaaccagaatctggaatatcagataggatacatatgcagtgggattttcggagacaa

SEQ ID NO: 6603 - DNA, 80 bp, synthetic construct
  misc_feature 1..80: note = Synthetic: >NC_026434.1-cand-980-1059
  source 1..80: mol_type = other DNA
aatgataagacaggcagttgtggtccagtatcgtctaatggagcaaatggagtaaaagggttttcattcaaatacggcaa

SEQ ID NO: 6604 - DNA, 80 bp, synthetic construct
  misc_feature 1..80: note = Synthetic: >NC_038299.1-cand-6320-6399
  source 1..80: mol_type = other DNA
actgtaaatgaaagatttccagaaattgaccaggaggcacaaattcttgtgagagagcaaaatatacagccagaagacat

SEQ ID NO: 6605 - DNA, 80 bp, synthetic construct
  misc_feature 1..80: note = Synthetic: >NC_038299.1-cand-6390-6469
  source 1..80: mol_type = other DNA
cagaagacatattgccagattctttattctcttttagacatgttgatgtcctactaaaaaggctattcccacgtgacccc

SEQ ID NO: 6606 - DNA, 80 bp, synthetic construct
  misc_feature 1..80: note = Synthetic: >NC_038300.1-cand-0-79
  source 1..80: mol_type = other DNA
agtagactccgcaagaagaagcaagacaaaaagaaactgagagcaatatgggcaggttttgtctgatggtgcttggagtc

SEQ ID NO: 6607 - DNA, 80 bp, synthetic construct
  misc_feature 1..80: note = Synthetic: >NC_038300.1-cand-80-159
  source 1..80: mol_type = other DNA
ttactaactgctgtagctggatttcctcggagtgttcatgagcttaagattgaatgtccacacacagtagtgctagggca

SEQ ID NO: 6608 - DNA, 80 bp, synthetic construct
  misc_feature 1..80: note = Synthetic: >NC_038300.1-cand-160-239
  source 1..80: mol_type = other DNA
aggttatgttgcaggttcagtcgaggtcaatttagtgacacttgatcaaataactgagctgaaaattgagagctcttgca

SEQ ID NO: 6609 - DNA, 80 bp, synthetic construct
  misc_feature 1..80: note = Synthetic: >NC_038300.1-cand-240-319
  source 1..80: mol_type = other DNA
attttgatcatcatgcccctcctacaacagcacagacattcacgcagctaagctggtcaaaaactgcgagcacaacagat

SEQ ID NO: 6610 - DNA, 80 bp, synthetic construct
  misc_feature 1..80: note = Synthetic: >NC_038300.1-cand-300-379
  source 1..80: mol_type = other DNA
aaactgcgagcacaacagatacaacaaatgctggtgagaatacttttgagactaaatctgcagaaattcatctgaaaggg

SEQ ID NO: 6611 - DNA, 80 bp, synthetic construct
  misc_feature 1..80: note = Synthetic: >NC_038300.1-cand-400-479
  source 1..80: mol_type = other DNA
tgtcttcgatacaacatacaaagttgtgactgggagaaagactgttatttgttatgatctggcctgtaaccaaacccact

SEQ ID NO: 6612 - DNA, 80 bp, synthetic construct
  misc_feature 1..80: note = Synthetic: >NC_038300.1-cand-490-569
  source 1..80: mol_type = other DNA
agtgcatctacttgctcctatacagacatgcatgtctgtcaggaattgtatgatcagcttgctaactaacaggatccagg

SEQ ID NO: 6613 - DNA, 80 bp, synthetic construct
  misc_feature 1..80: note = Synthetic: >NC_038300.1-cand-570-649
  source 1..80: mol_type = other DNA
tagtgtatgaaaagacatactgtgtttcagggcagctaatagagggtttatgttttaatcctgtcccggctcttgcactg

SEQ ID NO: 6614 - DNA, 80 bp, synthetic construct
  misc_feature 1..80: note = Synthetic: >NC_038300.1-cand-650-729
  source 1..80: mol_type = other DNA
acacaacctgggcatacatatgatacaattacactaccagtgacctgctttctcattgcaaaaaaaggtgtaagcctaaa

SEQ ID NO: 6615 - DNA, 80 bp, synthetic construct
  misc_feature 1..80: note = Synthetic: >NC_038300.1-cand-730-809
  source 1..80: mol_type = other DNA
aattgctgtagagcttgaaaagttgacaacgaaaactggctgcactgaggatgcactccaggcctattatgtctgtttta

SEQ ID NO: 6616 - DNA, 80 bp, synthetic construct
  misc_feature 1..80: note = Synthetic: >NC_038300.1-cand-810-889
  source 1..80: mol_type = other DNA
taggtcaacattcagagcctttagtggtgcctgctttggaagacttccgttcagcagaaatctttacaaggatgttaatg

SEQ ID NO: 6617 - DNA, 80 bp, synthetic construct
  misc_feature 1..80: note = Synthetic: >NC_038300.1-cand-880-959
  source 1..80: mol_type = other DNA
gatgttaatgaacccaaaaggtgaagaccatgatatggatcaatcatcccagggagcactgcggatagtaggcccgataa

SEQ ID NO: 6618 - DNA, 80 bp, synthetic construct
  misc_feature 1..80: note = Synthetic: >NC_038300.1-cand-980-1059
  source 1..80: mol_type = other DNA
gaaacaacagagactgtactcgggattgcctttgccggcttgcctatgtatagctccttttcaagcttagtaagaaaggc

SEQ ID NO: 6619 - DNA, 80 bp, synthetic construct
  misc_feature 1..80: note = Synthetic: >NC_038300.1-cand-1060-1139
  source 1..80: mol_type = other DNA
tgaccctgagtatattttttctccaggaatcattgcagactcaaatcatagtagttgtgataaaaagacgctgcccctga

SEQ ID NO: 6620 - DNA, 80 bp, synthetic construct
  misc_feature 1..80: note = Synthetic: >NC_039199.1-cand-8360-8439
  source 1..80: mol_type = other DNA
tcatattaaggattatcaaaggatttgtagacaacaacaaaagatggcccaaaattaaaaacttaaaagtgcttagtaag

SEQ ID NO: 6621 - DNA, 80 bp, synthetic construct
  misc_feature 1..80: note = Synthetic: >NC_039199.1-cand-8400-8479
  source 1..80: mol_type = other DNA
aagatggcccaaaattaaaaacttaaaagtgcttagtaagagatggactatgtacttcaaagcaaaaagttaccccagtc

SEQ ID NO: 6622 - DNA, 80 bp, synthetic construct
  misc_feature 1..80: note = Synthetic: >NC_039199.1-cand-8480-8559
  source 1..80: mol_type = other DNA
aacttgaattaagcgaacaagattttttagagcttgctgcaatacagtttgaacaagagttttctgtccctgaaaaaacc

SEQ ID NO: 6623 - DNA, 80 bp, synthetic construct
  misc_feature 1..80: note = Synthetic: >NC_039199.1-cand-8560-8639
  source 1..80: mol_type = other DNA
aaccttgagatggtattaaatgataaagctatatcacctcctaaaagattaatatggtctgtgtatccaaaaaattactt

SEQ ID NO: 6624 - DNA, 80 bp, synthetic construct
  misc_feature 1..80: note = Synthetic: >NC_039199.1-cand-8640-8719
  source 1..80: mol_type = other DNA
acctgagaaaataaaaaatcgatatctagaagagactttcaatgcaagtgatagtctcaaaacaagaagagtactagagt

SEQ ID NO: 6625 - DNA, 80 bp, synthetic construct
  misc_feature 1..80: note = Synthetic: >NC_039199.1-cand-8720-8799
  source 1..80: mol_type = other DNA
actatttgaaagataataaattcgaccaaaaagaacttaaaagttatgttgttaaacaagaatatttaaatgataaggat

SEQ ID NO: 6626 - DNA, 80 bp, synthetic construct
  misc_feature 1..80: note = Synthetic: >NC_039199.1-cand-8800-8879
  source 1..80: mol_type = other DNA
catattgtctcgctaactggaaaagaaagagaattaagtgtaggtagaatgtttgctatgcaaccaggaaaacagcgaca

SEQ ID NO: 6627 - DNA, 80 bp, synthetic construct
  misc_feature 1..80: note = Synthetic: >NC_039199.1-cand-8880-8959
  source 1..80: mol_type = other DNA
aatacaaatattggctgaaaaattgttagctgataatattgtaccttttttcccagaaaccttaacaaagtatggtgatc

SEQ ID NO: 6628 - DNA, 80 bp, synthetic construct
  misc_feature 1..80: note = Synthetic: >NC_039199.1-cand-8960-9039
  source 1..80: mol_type = other DNA
tagatcttcagagaataatggaaatcaaatcggaactttcttctattaaaactagaagaaatgatagttataataattac

SEQ ID NO: 6629 - DNA, 80 bp, synthetic construct
  misc_feature 1..80: note = Synthetic: >NC_039199.1-cand-9040-9119
  source 1..80: mol_type = other DNA
attgcaagagcatccatagtaacagatttaagtaagttcaaccaagcctttaggtatgaaactacagcgatctgtgcgga

SEQ ID NO: 6630 - DNA, 80 bp, synthetic construct
  misc_feature 1..80: note = Synthetic: >NC_039199.1-cand-9120-9199
  source 1..80: mol_type = other DNA
tgtagcagatgaactacatggaacacaaagcctattctgttggttacatcttatcgtccctatgacaacaatgatatgtg

SEQ ID NO: 6631 - DNA, 80 bp, synthetic construct
  misc_feature 1..80: note = Synthetic: >NC_039199.1-cand-9200-9279
  source 1..80: mol_type = other DNA
cctatagacatgcaccaccagaaacaaaaggtgaatatgatatagataagatagaagagcaaagtggtttatatagatat

SEQ ID NO: 6632 - DNA, 80 bp, synthetic construct
  misc_feature 1..80: note = Synthetic: >NC_039199.1-cand-9280-9359
  source 1..80: mol_type = other DNA
catatgggtggtattgaaggatggtgtcaaaaactctggacaatggaagctatatctctattagatgttgtatctgtaaa

SEQ ID NO: 6633 - DNA, 80 bp, synthetic construct
  misc_feature 1..80: note = Synthetic: >NC_039199.1-cand-9360-9439
  source 1..80: mol_type = other DNA
aacacgatgtcaaatgacatctttattaaacggtgacaaccaatcaatagatgtaagtaaaccagttaagttatctgagg

SEQ ID NO: 6634 - DNA, 80 bp, synthetic construct
  misc_feature 1..80: note = Synthetic: >NC_039199.1-cand-9440-9519
  source 1..80: mol_type = other DNA
gtttagatgaagtgaaagcagattatagcttggctgtaaaaatgttaaaagaaataagagatgcatacagaaatataggc

SEQ ID NO: 6635 - DNA, 80 bp, synthetic construct
  misc_feature 1..80: note = Synthetic: >NC_039199.1-cand-9540-9619
  source 1..80: mol_type = other DNA
aacatatatatcaagagatcttcagtttataagtaaggtgattcaatctgaaggagtaatgcatcctacccctataaaaa

SEQ ID NO: 6636 - DNA, 80 bp, synthetic construct
  misc_feature 1..80: note = Synthetic: >NC_044854.1-cand-6470-6549
  source 1..80: mol_type = other DNA
atgcaggtgacatcataggcagccttggctggatttcagccccgtctgacaatacacaacttaatgtctggacaatacca

SEQ ID NO: 6637 - DNA, 80 bp, synthetic construct
  misc_feature 1..80: note = Synthetic: >NC_044854.1-cand-6520-6599
  source 1..80: mol_type = other DNA
aatacacaacttaatgtctggacaataccaaagtatgggtctagtctcccagatgtcactcaccttgcacctgctgtgtt

SEQ ID NO: 6638 - DNA, 80 bp, synthetic construct
  misc_feature 1..80: note = Synthetic: >NC_044854.1-cand-6620-6699
  source 1..80: mol_type = other DNA
tgattctgtacttctactctacattcccaggttctggacaacctagtcagcttcaagtgccatgcctgttgcctcaggag

SEQ ID NO: 6639 - DNA, 80 bp, synthetic construct
  misc_feature 1..80: note = Synthetic: >NC_044854.1-cand-6660-6739
  source 1..80: mol_type = other DNA
acctagtcagcttcaagtgccatgcctgttgcctcaggagttcatcacccacttctgcaatgaacaggctcccatcgctg

SEQ ID NO: 6640 - DNA, 80 bp, synthetic construct
  misc_feature 1..80: note = Synthetic: >NC_044854.1-cand-6800-6879
  source 1..80: mol_type = other DNA
aactctatcctgatgggttcatgacctgtgtccccaatagtgttagtagtggccctcaaacccttcctatcaatggagtc

SEQ ID NO: 6641 - DNA, 80 bp, synthetic construct
  misc_feature 1..80: note = Synthetic: >NC_044854.1-cand-6850-6929
  source 1..80: mol_type = other DNA
ggccctcaaacccttcctatcaatggagtctttgtctttgtttcatgggtatccagattttatcaactcaagcctgtggg

SEQ ID NO: 6642 - DNA, 80 bp, synthetic construct
  misc_feature 1..80: note = Synthetic: >NC_044854.1-cand-6930-7009
  source 1..80: mol_type = other DNA
aacggcctcagcggctagaaggcttggactgcggcgcatataatggcccaagctgtcatcggtgccatagccgcatctgc

SEQ ID NO: 6643 - DNA, 80 bp, synthetic construct
  misc_feature 1..80: note = Synthetic: >NC_044854.1-cand-7030-7109
  source 1..80: mol_type = other DNA
caggcatacaggctggtgctgaggctggtctccaggctcaacggtaccagcaagacttgcaattgcagcaaaactctttc

SEQ ID NO: 6644 - DNA, 80 bp, synthetic construct
  misc_feature 1..80: note = Synthetic: >NC_044854.1-cand-7090-7169
  source 1..80: mol_type = other DNA
aattgcagcaaaactctttcaagcatgatagggaaatgttaggttatcaggttcaggctagtaatgctcttttagctaag

SEQ ID NO: 6645 - DNA, 80 bp, synthetic construct
  misc_feature 1..80: note = Synthetic: >NC_044854.1-cand-7210-7289
  source 1..80: mol_type = other DNA
tgtctagtgctgatgctgctcgggcagtggctggtgctcctgtcacccgtatagtggactggaatggcacgcggattgca

SEQ ID NO: 6646 - DNA, 80 bp, synthetic construct
  misc_feature 1..80: note = Synthetic: >NC_044854.1-cand-7250-7329
  source 1..80: mol_type = other DNA
tgtcacccgtatagtggactggaatggcacgcggattgcagcgccaacctcgagcaccactacacttagatctggtggtt

SEQ ID NO: 6647 - DNA, 80 bp, synthetic construct
  misc_feature 1..80: note = Synthetic: >NC_044854.1-cand-7330-7409
  source 1..80: mol_type = other DNA
ttatggctgtccctataccattgtcttcaaagaccaagcaaccagtgatgtctgggcaggataatccaaattatgctgct

SEQ ID NO: 6648 - DNA, 80 bp, synthetic construct
  misc_feature 1..80: note = Synthetic: >NC_044854.1-cand-7410-7489
  source 1..80: mol_type = other DNA
tcttctatctctagaactgcttcatgggtacaatctcaaaattctatgagatctgtttctccttttcacagtgatgctct

SEQ ID NO: 6649 - DNA, 80 bp, synthetic construct
  misc_feature 1..80: note = Synthetic: >NC_044854.1-cand-7490-7569
  source 1..80: mol_type = other DNA
gagaaccgtgtgggtcacaccaccaggttcgtcatcaacttcatctgtgcaatctagtttttatggtgtttttaatacag

SEQ ID NO: 6650 - DNA, 80 bp, synthetic construct
  misc_feature 1..80: note = Synthetic: >NC_044854.1-cand-7570-7649
  source 1..80: mol_type = other DNA
ataggttgcctctgttcgcaaacagaaggtgatatttttgtaataggatgccggtgggcaccatattcagatttaatttt

SEQ ID NO: 6651 - DNA, 80 bp, synthetic construct
  misc_feature 1..80: note = Synthetic: >NC_044856.1-cand-170-249
  source 1..80: mol_type = other DNA
tttgttgcgccggtcacaaacaccctctccgtcccgacaggacagcccccccaagagtcaaagagaccgacctccacgaa

SEQ ID NO: 6652 - DNA, 80 bp, synthetic construct
  misc_feature 1..80: note = Synthetic: >U31794.1-cand-7180-7259
  source 1..80: mol_type = other DNA
tatggttgtgcttgtactgtatgtttttgtgtatgtttatgtattttataattgtgtatgtgctatgtgtatgtatgact

SEQ ID NO: 6653 - DNA, 80 bp, synthetic construct
  misc_feature 1..80: note = Synthetic: >U31794.1-cand-7260-7339
  source 1..80: mol_type = other DNA
gtatgtatgtgtaatgttttgtgtgtatgtaataaacatgcatggttacttttacgcgtggttgcataaactaaggtgcg

SEQ ID NO: 6654 - DNA, 80 bp, synthetic construct
  misc_feature 1..80: note = Synthetic: >U31794.1-cand-7330-7409
  source 1..80: mol_type = other DNA
ctaaggtgcggtagtatccttgggcagtgtgtgtcaggttaggtggtgttccttactgtttaatgttatattaaataggt

SEQ ID NO: 6655 - DNA, 80 bp, synthetic construct
  misc_feature 1..80: note = Synthetic: >U31794.1-cand-7410-7489
  source 1..80: mol_type = other DNA
tgtttgtatgcactatagtaacacaccaaactccattttagtgctgtacgccattttatgcatgcaaccgaattcggttg

SEQ ID NO: 6656 - DNA, 80 bp, synthetic construct
  misc_feature 1..80: note = Synthetic: >U31794.1-cand-7490-7569
  source 1..80: mol_type = other DNA
cctagccttttgtccttatttaaacccaaaacgacttttcagcaaaacagttaatcctttggcatattgccgtttcctgt

SEQ ID NO: 6657 - DNA, 80 bp, synthetic construct
  misc_feature 1..80: note = Synthetic: >U31794.1-cand-7570-7649
  source 1..80: mol_type = other DNA
tgtatgattcaggtatgtacactgccttaccctgtattactcacctgtatttctgtgccaactatgcttttatctgcata

SEQ ID NO: 6658 - DNA, 80 bp, synthetic construct
  misc_feature 1..80: note = Synthetic: >U31794.1-cand-7650-7729
  source 1..80: mol_type = other DNA
ctttggcgctgttgggcatatgtttttatgcaggtgtttgcaatatattttgttggcgtgtagcccttattgtataagcc

SEQ ID NO: 6659 - DNA, 80 bp, synthetic construct
  misc_feature 1..80: note = Synthetic: >U31794.1-cand-7730-7809
  source 1..80: mol_type = other DNA
aagtatctgtcttgcaaatatgtaaccatatacttactcattttacaaaaccgtttacggtcgtgctaaaacaggtttct

SEQ ID NO: 6660 - DNA, 80 bp, synthetic construct
  misc_feature 1..80: note = Synthetic: >HCV.A2-cand-360-439
  source 1..80: mol_type = other DNA
cgttggcggcctgcctatggggcaacccataggacgctctaatacagacatggtgcgaagagcctattgagctaattggt

SEQ ID NO: 6661 - DNA, 80 bp, synthetic construct
  misc_feature 1..80: note = Synthetic: >HCV.B4-cand-470-549
  source 1..80: mol_type = other DNA
tcctaactgcggagcagatgcccacactccagtgggtagtctgtcgtaacgggtaactctgcagcggaaccgactacttt

SEQ ID NO: 6662 - DNA, 80 bp, synthetic construct
  misc_feature 1..80: note = Synthetic: >EVB87-cand-320-399
  source 1..80: mol_type = other DNA
tgagtcaccgcgttccccacgggcgaccgtggcggtggctgcgttggcggcctgcccatggggtaacccatgggacgctt

SEQ ID NO: 6663 - DNA, 80 bp, synthetic construct
  misc_feature 1..80: note = Synthetic: >HCV.A9-cand-530-609
  source 1..80: mol_type = other DNA
agcggaaccgactactttgggtgtccgtgtttccttttattcttgaactggctgcttatggtgacaattgaaagattgtt

SEQ ID NO: 6664 - DNA, 80 bp, synthetic construct
  misc_feature 1..80: note = Synthetic: >HCV.A7-cand-0-79
  source 1..80: mol_type = other DNA
aaacagcctgtgggttgtacccacccacagggcccactgggcgccagcactctggttctacggaacctttgtgcgcctgt

SEQ ID NO: 6665 - DNA, 80 bp, synthetic construct
  misc_feature 1..80: note = Synthetic: >HCV.A13-cand-0-79
  source 1..80: mol_type = other DNA
aacagcccgtgggttgttcccaccccagaggcccacgtggcggctagtactccggtatcacggtacccttgtacgcctgt

SEQ ID NO: 6666 - DNA, 80 bp, synthetic construct
  misc_feature 1..80: note = Synthetic: >HCV.B1-cand-200-279
  source 1..80: mol_type = other DNA
gcggctgaaggagaaaacgttcgttacccggccaattacttcgagaaacctagtaccaccatgaaagttgcgcagcgttt

SEQ ID NO: 6667 - DNA, 80 bp, synthetic construct
  misc_feature 1..80: note = Synthetic: >NC_007359.1-cand-2060-2139
  source 1..80: mol_type = other DNA
ttcgatcttggggggctatatgaagcaattgaggagtgcctgattaatgatccctgggttttgcttaatgcatcttggtt

SEQ ID NO: 6668 - DNA, 80 bp, synthetic construct
  misc_feature 1..80: note = Synthetic: >NC_021547.1-cand-780-859
  source 1..80: mol_type = other DNA
ttgactccataggaaaagaactggatcatagcaataaaattatacgaggactggccaatagagctggactagttgtcgat

SEQ ID NO: 6669 - DNA, 80 bp, synthetic construct
  misc_feature 1..80: note = Synthetic: >NC_001611.1-cand-55100-55179
  source 1..80: mol_type = other DNA
gatgtacgtagcgtacaaaattatcgttcctggtatatagataaagagtcctatatatttgaaaatcgttacggctcgat

SEQ ID NO: 6670 - DNA, 80 bp, synthetic construct
  misc_feature 1..80: note = Synthetic: >EVB100-cand-6460-6539
  source 1..80: mol_type = other DNA
atcgagtctaaatgactcagtggccatgaggcagacctttgggaacctgtacaagacattccacttgaacccaggtatag

SEQ ID NO: 6671 - DNA, 80 bp, synthetic construct
  misc_feature 1..80: note = Synthetic: >NC_001611.1-cand-90930-91009
  source 1..80: mol_type = other DNA
atcgatactaattacaaacctgtctttgataggatagataacgcattaatgagaagaatcgccgttgtgcgattcagaac

SEQ ID NO: 6672 - DNA, 80 bp, synthetic construct
  misc_feature 1..80: note = Synthetic: >NC_003310.1-cand-48810-48889
  source 1..80: mol_type = other DNA
atcgattgcgttgtaacattaagattgcgaaatgctctaaatttgggaggcttaaagtgttgtttacaatctctacacgc

SEQ ID NO: 6673 - DNA, 80 bp, synthetic construct
  misc_feature 1..80: note = Synthetic: >AdVB7-cand-16320-16399
  source 1..80: mol_type = other DNA
gcgtgatgccactaccggccagcgcgtgcccgtgcgcacccgcccccctcgcacttagaagatactgagcagtctccgat

SEQ ID NO: 6674 - DNA, 80 bp, synthetic construct
  misc_feature 1..80: note = Synthetic: >AdVB7-cand-15920-15999
  source 1..80: mol_type = other DNA
gcgctccatggggcgcactcaagggtcgtacccgcactcggaccacggtcgatgatgtgatcgaccaggtggtcgccgat

SEQ ID NO: 6675 - DNA, 80 bp, synthetic construct
  misc_feature 1..80: note = Synthetic: >NC_001611.1-cand-35140-35219
  source 1..80: mol_type = other DNA
atttgtaacactctcgaaatcacacgatgtgtctgcgttaagatctaatatatcactcgataacacattttcatctagat

SEQ ID NO: 6676 - DNA, 80 bp, synthetic construct
  misc_feature 1..80: note = Synthetic: >NC_003310.1-cand-61760-61839
  source 1..80: mol_type = other DNA
cgatacattttgcattagatttactaatcgattttgcatactctataacacccgcacaagtctgtagagaatcgctagat

SEQ ID NO: 6677 - DNA, 80 bp, synthetic construct
  misc_feature 1..80: note = Synthetic: >NC_001611.1-cand-85020-85099
  source 1..80: mol_type = other DNA
tcaaaattagaactaagattccattatctaaggtacatggtctagatgtaaaaaatgtacagttagtagatgctatagat

SEQ ID NO: 6678 - DNA, 80 bp, synthetic construct
  misc_feature 1..80: note = Synthetic: >NC_003310.1-cand-128590-128669
  source 1..80: mol_type = other DNA
gattcgaagtgcgtgtaacaaagtattagatagtgataacggaatagactttctgagatttgttttgttaaacaatagat

SEQ ID NO: 6679 - DNA, 80 bp, synthetic construct
  misc_feature 1..80: note = Synthetic: >AdVB7-cand-24800-24879
  source 1..80: mol_type = other DNA
cagacgcctcggacgagggcaagccggtagtcagtgacgagcagctatctcgctggctgggtaccaactccccccgagat

SEQ ID NO: 6680 - DNA, 80 bp, synthetic construct
  misc_feature 1..80: note = Synthetic: >NC_001611.1-cand-140320-140399
  source 1..80: mol_type = other DNA
atctcttagtgttggaatggaatgctgtttaatgtttccacactcatcgtatattttgacgtatgcagttacatcgttta

SEQ ID NO: 6681 - DNA, 80 bp, synthetic construct
  misc_feature 1..80: note = Synthetic: >NC_002022.1-cand-90-169
  source 1..80: mol_type = other DNA
atggggaggacctgaaaatcgaaacaaacaaatttgcagcaatatgcactcacttggaagtatgcttcatgtattcagat

SEQ ID NO: 6682 - DNA, 80 bp, synthetic construct
  misc_feature 1..80: note = Synthetic: >NC_001611.1-cand-135660-135739
  source 1..80: mol_type = other DNA
atctgatcatcaatccttcagataatctgaaaatgaaattgtagtttaattcttcattctgcatatcaaacggcaatgga

SEQ ID NO: 6683 - DNA, 80 bp, synthetic construct
  misc_feature 1..80: note = Synthetic: >NC_001611.1-cand-109400-109479
  source 1..80: mol_type = other DNA
atctgatcttgttcaatggagtgctagtacgggcgctgtaattaatcaaatggtaaatactgtattgattacagtgtatg

SEQ ID NO: 6684 - DNA, 80 bp, synthetic construct
  misc_feature 1..80: note = Synthetic: >NC_003310.1-cand-101010-101089
  source 1..80: mol_type = other DNA
catagctgagaatatctttattcattccacaacaagtttttattctcttaattataacgataacgtcattaattataacg

SEQ ID NO: 6685 - DNA, 80 bp, synthetic construct
  misc_feature 1..80: note = Synthetic: >NC_003310.1-cand-184010-184089
  source 1..80: mol_type = other DNA
gtatcaactaaaggtggcttgccccataggaacattaagatctgtagatgtggacataactgcgtatacaatattatatg

SEQ ID NO: 6686 - DNA, 80 bp, synthetic construct
  misc_feature 1..80: note = Synthetic: >NC_003310.1-cand-116860-116939
  source 1..80: mol_type = other DNA
catatcctagaccagtaaacagtttccactttggtaaaatcagaagacttttgaacgctattaaacatggcattaatggc

SEQ ID NO: 6687 - DNA, 80 bp, synthetic construct
  misc_feature 1..80: note = Synthetic: >NC_003310.1-cand-127150-127229
  source 1..80: mol_type = other DNA
ttcttgataccctggtagaagaattcaagtcaggaactattaatagaattttagttattactaaactacgtgaacatatg

SEQ ID NO: 6688 - DNA, 80 bp, synthetic construct
  misc_feature 1..80: note = Synthetic: >NC_001611.1-cand-16330-16409
  source 1..80: mol_type = other DNA
ttttgtttattaacatccgttgatggaagtaaaagatttataatgtctacattcttgactgttttagagcatacaatatg

SEQ ID NO: 6689 - DNA, 80 bp, synthetic construct
  misc_feature 1..80: note = Synthetic: >AdVB3-cand-23650-23729
  source 1..80: mol_type = other DNA
cctcgcccccagcagcgacgaggaggagagcttaaccaccccaccacccagtcccgctaccaccacctctacccttgatg

SEQ ID NO: 6690 - DNA, 80 bp, synthetic construct
  misc_feature 1..80: note = Synthetic: >NC_005062.1-cand-10680-10759
  source 1..80: mol_type = other DNA
ccctcatctgagggggggcggttcttgttctccctgagccaccatcacccagacacaggcagtctaacaaggaggtgatg

SEQ ID NO: 6691 - DNA, 80 bp, synthetic construct
  misc_feature 1..80: note = Synthetic: >NC_006573.1-cand-890-969
  source 1..80: mol_type = other DNA
gaccaggtggatgctaattgaggctgaactaaaatgcttcgggaacacagctgtggcaaaatgtaatgagaagcatgatg

SEQ ID NO: 6692 - DNA, 80 bp, synthetic construct
  misc_feature 1..80: note = Synthetic: >NC_003310.1-cand-54130-54209
  source 1..80: mol_type = other DNA
catccgtccttcagacaacatctcagacagtctggtcttgtatgtcttaatcatattcttatgaaacttggaaacatctc

SEQ ID NO: 6693 - DNA, 80 bp, synthetic construct
  misc_feature 1..80: note = Synthetic: >NC_003310.1-cand-160-239
  source 1..80: mol_type = other DNA
catcgaagagagaaaggataaaaactttttacgactccatcagaaagaggtttaatatttttgtgagacccatcgacgag

SEQ ID NO: 6694 - DNA, 80 bp, synthetic construct
  misc_feature 1..80: note = Synthetic: >NC_004296.1-cand-1780-1859
  source 1..80: mol_type = other DNA
catcgacacctagagtcgttctgtaaatggacgcccccgtgacccaccgccaataggcggtgggtcacgggggccctgac

SEQ ID NO: 6695 - DNA, 80 bp, synthetic construct
  misc_feature 1..80: note = Synthetic: >NC_026422.1-cand-1590-1669
  source 1..80: mol_type = other DNA
catcgtccatgatgtgggagatcaatggtccggaatcagtgctagttaacacatatcaatggatcattagaaattgggaa

SEQ ID NO: 6696 - DNA, 80 bp, synthetic construct
  misc_feature 1..80: note = Synthetic: >NC_001611.1-cand-120890-120969
  source 1..80: mol_type = other DNA
catctaataagttgcgatgaaataggagatatatatggtcttatgaaagaacgcatttcctcagaggatatgtttgataa

SEQ ID NO: 6697 - DNA, 80 bp, synthetic construct
  misc_feature 1..80: note = Synthetic: >NC_003310.1-cand-66880-66959
  source 1..80: mol_type = other DNA
catctatattgctacataatccagctagtgaatatatatgacataataaattggtaaatcctagttctggtattttacta

SEQ ID NO: 6698 - DNA, 80 bp, synthetic construct
  misc_feature 1..80: note = Synthetic: >NC_003310.1-cand-132680-132759
  source 1..80: mol_type = other DNA
cattacaaatatactaacgtctgagtatttggatttggaaaagaaaatttgtgagtatatcagatcatattataaagatg

SEQ ID NO: 6699 - DNA, 80 bp, synthetic construct
  misc_feature 1..80: note = Synthetic: >NC_001611.1-cand-81580-81659
  source 1..80: mol_type = other DNA
tgcgtttaataaacacgggttcgtctttcgcaatgaggtctgtatagtaactatgtaaatgataactagatagaaagatg

SEQ ID NO: 6700 - DNA, 80 bp, synthetic construct
  misc_feature 1..80: note = Synthetic: >AF307326.1-cand-1190-1269
  source 1..80: mol_type = other DNA
aaatagagatgtatcattccaagacttaagtgacaatccatgtaaggttgacctacacactcaagcaattgaaggagctt

SEQ ID NO: 6701 - DNA, 80 bp, synthetic construct
  misc_feature 1..80: note = Synthetic: >AF307326.1-cand-1280-1359
  source 1..80: mol_type = other DNA
agtaggttttacactcacatgtgttgtagggttgacagaatgcccaacattcattacctcaatcaaggcatgtgaccttg

SEQ ID NO: 6702 - DNA, 80 bp, synthetic construct
  misc_feature 1..80: note = Synthetic: >AF307326.1-cand-1360-1439
  source 1..80: mol_type = other DNA
caatgtgttatggctcaactgtaactaacttggctagaggttcaaatactataaaggttgttggtaaaggtgggcactcc

SEQ ID NO: 6703 - DNA, 80 bp, synthetic construct
  misc_feature 1..80: note = Synthetic: >AF307326.1-cand-1400-1479
  source 1..80: mol_type = other DNA
ttcaaatactataaaggttgttggtaaaggtgggcactccgggtcttctttcaaatgttgtcatgacacagattgctcat

SEQ ID NO: 6704 - DNA, 80 bp, synthetic construct
  misc_feature 1..80: note = Synthetic: >AF307326.1-cand-1520-1599
  source 1..80: mol_type = other DNA
tacaggatttaatcagattgattcagacaaagtttatgatgacggtgcccccccatgtacattcaagtgctggttcacta

SEQ ID NO: 6705 - DNA, 80 bp, synthetic construct
  misc_feature 1..80: note = Synthetic: >AF307326.1-cand-1610-1689
  source 1..80: mol_type = other DNA
atggctgttcgggatcttgaatggtaattggatagttgttattgtccttgttgtaatcctaattgtttctattattctgt

SEQ ID NO: 6706 - DNA, 80 bp, synthetic construct
  misc_feature 1..80: note = Synthetic: >AF307326.1-cand-1690-1769
  source 1..80: mol_type = other DNA
ttagcatcttatgtcctcgacgaggacataagaagaatgtgtaagcattcgttcactaactacttcattgtataactgtg

SEQ ID NO: 6707 - DNA, 80 bp, synthetic construct
  misc_feature 1..80: note = Synthetic: >AF307326.1-cand-1780-1859
  source 1..80: mol_type = other DNA
aacaataccatgtttatttactttatccttactaacaatataaccttatgttagttactgttatataaccgttagctaaa

SEQ ID NO: 6708 - DNA, 80 bp, synthetic construct
  misc_feature 1..80: note = Synthetic: >AF307327.1-cand-0-79
  source 1..80: mol_type = other DNA
gaatcacataggcagagctgtctcaatgggcaatgtccttattgtatgacaataacagaagcaactgaaagtgcactgca

SEQ ID NO: 6709 - DNA, 80 bp, synthetic construct
  misc_feature 1..80: note = Synthetic: >AF307327.1-cand-70-149
  source 1..80: mol_type = other DNA
gtgcactgcaagcgcattactctatctgtaaattaaccaaccgatttcaggaagctctaaagaagtcactaaaaaagcct

SEQ ID NO: 6710 - DNA, 80 bp, synthetic construct
  misc_feature 1..80: note = Synthetic: >AF307327.1-cand-190-269
  source 1..80: mol_type = other DNA
gatataaaagtagatgttatgtaggactagtatggtgcctccttttaactcttgaattaattgtttgggcagtaagtgct

SEQ ID NO: 6711 - DNA, 80 bp, synthetic construct
  misc_feature 1..80: note = Synthetic: >AF307327.1-cand-230-309
  source 1..80: mol_type = other DNA
ccttttaactcttgaattaattgtttgggcagtaagtgctgaaactcctctccttgaagctggatggtcagatactgcac

SEQ ID NO: 6712 - DNA, 80 bp, synthetic construct
  misc_feature 1..80: note = Synthetic: >AF307327.1-cand-310-389
  source 1..80: mol_type = other DNA
atggagttggagaacttccaatgaaaactgatttggaattagacttttccctcccttcatcttcttcttatagctacaga

SEQ ID NO: 6713 - DNA, 80 bp, synthetic construct
  misc_feature 1..80: note = Synthetic: >AF307327.1-cand-390-469
  source 1..80: mol_type = other DNA
aggaaattaacaaatcctgctaataaagatgaatctatcccctttcatttccagatggagaaacagatcatacatgctga

SEQ ID NO: 6714 - DNA, 80 bp, synthetic construct
  misc_feature 1..80: note = Synthetic: >AF307327.1-cand-480-559
  source 1..80: mol_type = other DNA
ttaggtcactggatggatgctgtgcttaacataaaaacagcttttcactgctatggagcatgccagaaatattcttaccc

SEQ ID NO: 6715 - DNA, 80 bp, synthetic construct
  misc_feature 1..80: note = Synthetic: >AF307327.1-cand-530-609
  source 1..80: mol_type = other DNA
ctatggagcatgccagaaatattcttacccatggcaaactgctaaatgtttttttgaaaaagattatcaatatgaaaccg

SEQ ID NO: 6716 - DNA, 80 bp, synthetic construct
  misc_feature 1..80: note = Synthetic: >AdVB7-cand-5300-5379
  source 1..80: mol_type = other DNA
cagtttaccatgagttcgtagttgagcgcctcggccgcgtggcctttggcacggagcttacctttggaagttttatggca

SEQ ID NO: 6717 - DNA, 80 bp, synthetic construct
  misc_feature 1..80: note = Synthetic: >AdVB7-cand-5520-5599
  source 1..80: mol_type = other DNA
aaacaagttttccgccatgttttttgatgcgtttcttacctttggtttccatgaggtcgtgtccccgctgggtgacaaag

SEQ ID NO: 6718 - DNA, 80 bp, synthetic construct
  misc_feature 1..80: note = Synthetic: >AdVB7-cand-5660-5739
  source 1..80: mol_type = other DNA
tcctcttcgtagaggaacccagcccactctgatacaaaagcgcgtgtccaggccagcacaaaggaggccacgtgggaggg

SEQ ID NO: 6719 - DNA, 80 bp, synthetic construct
  misc_feature 1..80: note = Synthetic: >AdVB7-cand-5770-5849
  source 1..80: mol_type = other DNA
cttctctacggtatgtaaacacatgtccccctcctccacatccaagaatgtgattggcttgtaagtgtaggccacgtgac

SEQ ID NO: 6720 - DNA, 80 bp, synthetic construct
  misc_feature 1..80: note = Synthetic: >AdVB7-cand-5950-6029
  source 1..80: mol_type = other DNA
ttccctctcgaaggcgggcatgacctctgcactcaggttgtcagtttctaggaacgaggaggatttgatattgacagtac

SEQ ID NO: 6721 - DNA, 80 bp, synthetic construct
  misc_feature 1..80: note = Synthetic: >AdVB7-cand-6250-6329
  source 1..80: mol_type = other DNA
cagttcatccggaactattctgactcgccatcccctattgtgcagggttatcagatccacactggtggccacctcgcctc

SEQ ID NO: 6722 - DNA, 80 bp, synthetic construct
  misc_feature 1..80: note = Synthetic: >AdVB7-cand-6420-6499
  source 1..80: mol_type = other DNA
catctatggtaaatattcccggtaacaaatctttgtcaaaatagctaatggtggtgggatcatccaaggtcatctgccat

SEQ ID NO: 6723 - DNA, 80 bp, synthetic construct
  misc_feature 1..80: note = Synthetic: >AdVB7-cand-6440-6519
  source 1..80: mol_type = other DNA
ggtaacaaatctttgtcaaaatagctaatggtggtgggatcatccaaggtcatctgccattctcgaactgccagcgcgcg

SEQ ID NO: 6724 - DNA, 80 bp, synthetic construct
  misc_feature 1..80: note = Synthetic: >AdVB7-cand-6610-6689
  source 1..80: mol_type = other DNA
ttcgaggatgccgatgtaagtgggataacagcgcccccctctgatgcttgctcgcacatagtcatagagttcatgtgagg

SEQ ID NO: 6725 - DNA, 80 bp, synthetic construct
  misc_feature 1..80: note = Synthetic: >AdVB7-cand-6870-6949
  source 1..80: mol_type = other DNA
ccagctcggcggtgacgagtacatccagggcacagtagtcgagagtttcctggatgatgtcataacgcggttggcttttc

SEQ ID NO: 6726 - DNA, 80 bp, synthetic construct
  misc_feature 1..80: note = Synthetic: >AdVB7-cand-6930-7009
  source 1..80: mol_type = other DNA
cataacgcggttggcttttcttttcccacagctcgcggttgagaaggtattcttcgcgatccttccagtactcttcgagg

SEQ ID NO: 6727 - DNA, 80 bp, synthetic construct
  misc_feature 1..80: note = Synthetic: >AdVB7-cand-7160-7239
  source 1..80: mol_type = other DNA
atgactttgaggaattgatacttgaagtccatgtcatcacaggccccctgttcccagagttggaagtccacccgcttctt

SEQ ID NO: 6728 - DNA, 80 bp, synthetic construct
  misc_feature 1..80: note = Synthetic: >AdVB7-cand-7510-7589
  source 1..80: mol_type = other DNA
ccattcgtgcacgtgagggttcgctttgaggaaggaggaccagaggtccactgccagtgctgtttgtaactggtcccggt

SEQ ID NO: 6729 - DNA, 80 bp, synthetic construct
  misc_feature 1..80: note = Synthetic: >AdVB7-cand-7540-7619
  source 1..80: mol_type = other DNA
gaaggaggaccagaggtccactgccagtgctgtttgtaactggtcccggtattgacgaaaatgctgcccgactgccattt

SEQ ID NO: 6730 - DNA, 80 bp, synthetic construct
  misc_feature 1..80: note = Synthetic: >AdVE4-cand-25500-25579
  source 1..80: mol_type = other DNA
cggcttcccccaggatgcccagaggaagcagcaagaagctgaaagtggagctgccgcccgtgaaggatttggaggaaaac

SEQ ID NO: 6731 - DNA, 80 bp, synthetic construct
  misc_feature 1..80: note = Synthetic: >AdVE4-cand-25580-25659
  source 1..80: mol_type = other DNA
tgggaaagcagtcaggcagaggaggaggagatggaagactgggacagcactcaggcagaggaggacagcctgcaagacag

SEQ ID NO: 6732 - DNA, 80 bp, synthetic construct
  misc_feature 1..80: note = Synthetic: >AdVE4-cand-25660-25739
  source 1..80: mol_type = other DNA
tctggaagacgaggaggaggcagaggaggtggaagaagcagtcgccgccgccagaccgtcgtccttggcggagaaagcaa

SEQ ID NO: 6733 - DNA, 80 bp, synthetic construct
  misc_feature 1..80: note = Synthetic: >AdVE4-cand-25780-25859
  source 1..80: mol_type = other DNA
tcgaccccacagtagatgggacgaaaccgggcgatttccgaaccccaccacccagaccggtaagaaggagcggcagggat

SEQ ID NO: 6734 - DNA, 80 bp, synthetic construct
  misc_feature 1..80: note = Synthetic: >AdVE4-cand-25790-25869
  source 1..80: mol_type = other DNA
agtagatgggacgaaaccgggcgatttccgaaccccaccacccagaccggtaagaaggagcggcagggatacaagtcctg

SEQ ID NO: 6735 - DNA, 80 bp, synthetic construct
  misc_feature 1..80: note = Synthetic: >AdVE4-cand-25960-26039
  source 1..80: mol_type = other DNA
ggtgaacttcccccgcaacgtcttgcattactaccgtcacctccacagcccctactactttcaagaagaggcagaagaag

SEQ ID NO: 6736 - DNA, 80 bp, synthetic construct
  misc_feature 1..80: note = Synthetic: >AdVE4-cand-25980-26059
  source 1..80: mol_type = other DNA
tcttgcattactaccgtcacctccacagcccctactactttcaagaagaggcagaagaagacaaaaccagcagctagaaa

SEQ ID NO: 6737 - DNA, 80 bp, synthetic construct
  misc_feature 1..80: note = Synthetic: >AdVE4-cand-26060-26139
  source 1..80: mol_type = other DNA
attcacagcggcggcggcggcagcggcaggtggactgaggatcgcggcgaacgagccggtgcagacccgggagctgagga

SEQ ID NO: 6738 - DNA, 80 bp, synthetic construct
  misc_feature 1..80: note = Synthetic: >AdVE4-cand-26100-26179
  source 1..80: mol_type = other DNA
atcgcggcgaacgagccggtgcagacccgggagctgaggaaccggatttttcccaccctttatgccatcttccaacagag

SEQ ID NO: 6739 - DNA, 80 bp, synthetic construct
  misc_feature 1..80: note = Synthetic: >AdVE4-cand-26300-26379
  source 1..80: mol_type = other DNA
cttcaacaagtactgcgcgctcactcttaaagagtagcccgcgcccgcccacacacgaaaaaaggcgggaaatacgtcac

SEQ ID NO: 6740 - DNA, 80 bp, synthetic construct
  misc_feature 1..80: note = Synthetic: >AdVE4-cand-26380-26459
  source 1..80: mol_type = other DNA
ctgtgcacccccacccagcaccgctatgagtaaagagattcccacgccttacatgtggagctaccagccccaaatgggcc

SEQ ID NO: 6741 - DNA, 80 bp, synthetic construct
  misc_feature 1..80: note = Synthetic: >AdVE4-cand-26460-26539
  source 1..80: mol_type = other DNA
tggccgccggcgccgcccaggactactccacccgcatgaattggctcagcgccgggcccgggatgatctcacgggtaaat

SEQ ID NO: 6742 - DNA, 80 bp, synthetic construct
  misc_feature 1..80: note = Synthetic: >AdVE4-cand-26540-26619
  source 1..80: mol_type = other DNA
gacatccgcgcccaccgaaaccagatactcctaaaacagtcagcgctcaccgccacgccccgcaatcacctcaatccgcg

SEQ ID NO: 6743 - DNA, 80 bp, synthetic construct
  misc_feature 1..80: note = Synthetic: >AdVE4-cand-26620-26699
  source 1..80: mol_type = other DNA
taattggcccgccaccctagtgtaccaggaaattccccaacccaccaccgtactacttcctcgagacgcccaggccgaag

SEQ ID NO: 6744 - DNA, 80 bp, synthetic construct
  misc_feature 1..80: note = Synthetic: >AdVE4-cand-26700-26779
  source 1..80: mol_type = other DNA
tccagctgactaactcaggtgtccagctggcgggcggcgccaccctatgtcgtcaccacccccctcagggtataaagcgg

SEQ ID NO: 6745 - DNA, 80 bp, synthetic construct
  misc_feature 1..80: note = Synthetic: >AdVE4-cand-26800-26879
  source 1..80: mol_type = other DNA
cacacagcttaacgacgaggtggtaagctcttcactgggtctgcgacctgacggagtctttcaaatcgccggatcgggaa

SEQ ID NO: 6746 - DNA, 80 bp, synthetic construct
  misc_feature 1..80: note = Synthetic: >EF177176.1-cand-5670-5749
  source 1..80: mol_type = other DNA
ctatgtgaaacgcactagtatattttatcatgcaggcagttcacgattgcttgccgtaggacatccctattactctgtga

SEQ ID NO: 6747 - DNA, 80 bp, synthetic construct
  misc_feature 1..80: note = Synthetic: >EF177176.1-cand-5750-5829
  source 1..80: mol_type = other DNA
ctaaggacaataccaaaacaaacattcccaaagttagtgcatatcaatatagggtatttagggtgcggttgcccgaccct

SEQ ID NO: 6748 - DNA, 80 bp, synthetic construct
  misc_feature 1..80: note = Synthetic: >EF177176.1-cand-5830-5909
  source 1..80: mol_type = other DNA
aataagtttggacttccagatactaatatttataatccggaccaggaacggttagtgtgggcatgtgtaggtttggaggt

SEQ ID NO: 6749 - DNA, 80 bp, synthetic construct
  misc_feature 1..80: note = Synthetic: >EF177176.1-cand-5920-5999
  source 1..80: mol_type = other DNA
cagcctttgggtgctgggctaagtggccatccattgtttaataggctggatgatactgaaagttccaatttagcaaataa

SEQ ID NO: 6750 - DNA, 80 bp, synthetic construct
  misc_feature 1..80: note = Synthetic: >EF177176.1-cand-6000-6079
  source 1..80: mol_type = other DNA
taatgttatagaagatagtagggacaatatatcagttgatggcaagcaaacacagttgtgtattgttggatgtactcccg

SEQ ID NO: 6751 - DNA, 80 bp, synthetic construct
  misc_feature 1..80: note = Synthetic: >EF177176.1-cand-6050-6129
  source 1..80: mol_type = other DNA
cacagttgtgtattgttggatgtactcccgctatgggtgaacattggactaaaggtgctgtgtgtaagtccacacaagtt

SEQ ID NO: 6752 - DNA, 80 bp, synthetic construct
  misc_feature 1..80: note = Synthetic: >EF177176.1-cand-6190-6269
  source 1..80: mol_type = other DNA
atagacacaggatttggcgctatggactttaaggtgttgcaggaatctaaggctgaggtacctttagacattgtacaatc

SEQ ID NO: 6753 - DNA, 80 bp, synthetic construct
  misc_feature 1..80: note = Synthetic: >EF177176.1-cand-6240-6319
  source 1..80: mol_type = other DNA
ggctgaggtacctttagacattgtacaatccacctgtaaatatcctgactatttaaaaatgtctgcagatgcctatggtg

SEQ ID NO: 6754 - DNA, 80 bp, synthetic construct
  misc_feature 1..80: note = Synthetic: >EF177176.1-cand-6310-6389
  source 1..80: mol_type = other DNA
gcctatggtgattctatgtggttttacttacgcagggaacaattatttgccagacattattttaatagggctggtaaagt

SEQ ID NO: 6755 - DNA, 80 bp, synthetic construct
  misc_feature 1..80: note = Synthetic: >EF177176.1-cand-6400-6479
  source 1..80: mol_type = other DNA
atacctgcagagttatatttaaagggtagcaatggtagagaaccccctcctagttctgtatatgtggctacgcctagtgg

SEQ ID NO: 6756 - DNA, 80 bp, synthetic construct
  misc_feature 1..80: note = Synthetic: >EF177176.1-cand-6480-6559
  source 1..80: mol_type = other DNA
gtctatgattacgtctgaggcacagttatttaataaaccttattggttgcaacgtgcccaaggccataataatggcattt

SEQ ID NO: 6757 - DNA, 80 bp, synthetic construct
  misc_feature 1..80: note = Synthetic: >EF177176.1-cand-6570-6649
  source 1..80: mol_type = other DNA
tcaattatttgttactgtagtagatactactagaagtactaacatgactattagtactgctacagaacagttaagtaaat

SEQ ID NO: 6758 - DNA, 80 bp, synthetic construct
  misc_feature 1..80: note = Synthetic: >EF177176.1-cand-6650-6729
  source 1..80: mol_type = other DNA
atgatgcacgaaaaattaatcagtaccttagacatgtggaggaatatgaattacaatttgtttttcaattatgcaaaatt

SEQ ID NO: 6759 - DNA, 80 bp, synthetic construct
  misc_feature 1..80: note = Synthetic: >EF177176.1-cand-6730-6809
  source 1..80: mol_type = other DNA
actttgtctgcagaggttatggcatatttacataatatgaatgctaacctactggaggactggaatattgggttatcccc

SEQ ID NO: 6760 - DNA, 80 bp, synthetic construct
  misc_feature 1..80: note = Synthetic: >EF177176.1-cand-6810-6889
  source 1..80: mol_type = other DNA
gccagtggccactagcctagaagataaatatagatatgttagaagcacagctataacatgtcaacgagaacagccaccaa

SEQ ID NO: 6761 - DNA, 80 bp, synthetic construct
  misc_feature 1..80: note = Synthetic: >EF177176.1-cand-6890-6969
  source 1..80: mol_type = other DNA
cagaaaaacaggacccattagctaaatataaattttgggatgttaacttacaggacagtttttctacagacctggatcaa

SEQ ID NO: 6762 - DNA, 80 bp, synthetic construct
  misc_feature 1..80: note = Synthetic: >EVB101-cand-2350-2429
  source 1..80: mol_type = other DNA
gcaccattttatgttttgtgtcggcatgcaatgacttctccgtgcgtttgctgaaagatacgccatttatagatcagaag

SEQ ID NO: 6763 - DNA, 80 bp, synthetic construct
  misc_feature 1..80: note = Synthetic: >EVB101-cand-2420-2499
  source 1..80: mol_type = other DNA
agatcagaaggccattttgcaaaacgacccagcacaggcaatcgagactgcagtggtcagagtggctgacactatccaaa

SEQ ID NO: 6764 - DNA, 80 bp, synthetic construct
  misc_feature 1..80: note = Synthetic: >EVB101-cand-2510-2589
  source 1..80: mol_type = other DNA
caattcggaacagatacctgcgctcacggcggtagaaactggccacacctcacaagtggtacccggtgacaccatgcaga

SEQ ID NO: 6765 - DNA, 80 bp, synthetic construct
  misc_feature 1..80: note = Synthetic: >EVB101-cand-2590-2669
  source 1..80: mol_type = other DNA
ccagacatgtaaagaatttccacacccgttcggaatctagtgtcgaaaatttcttgagccgatcagcctgtgtatacatc

SEQ ID NO: 6766 - DNA, 80 bp, synthetic construct
  misc_feature 1..80: note = Synthetic: >EVB101-cand-2670-2749
  source 1..80: mol_type = other DNA
ggtaattacagtagaaacaacgaaaagcctgaggataagtacatgagttgggtgatcaacacgcggcagatggtgcagct

SEQ ID NO: 6767 - DNA, 80 bp, synthetic construct
  misc_feature 1..80: note = Synthetic: >EVB101-cand-2750-2829
  source 1..80: mol_type = other DNA
acgacgtaagtttgaaatgttcacctacatgagatttgatatggagatcacagtggtaataacgtcccatcaaggcacgg

SEQ ID NO: 6768 - DNA, 80 bp, synthetic construct
  misc_feature 1..80: note = Synthetic: >EVB101-cand-2830-2909
  source 1..80: mol_type = other DNA
ccaccaactattcacaagatgctccagtgtttactcaccagatcatgtacgtgcctccaggaggtccagtacccaacagt

SEQ ID NO: 6769 - DNA, 80 bp, synthetic construct
  misc_feature 1..80: note = Synthetic: >EVB101-cand-2910-2989
  source 1..80: mol_type = other DNA
gtggatgatttttcctggcaaacatcaacgaaccccagcgtcttctggactgaagggaatgctccaccccggatgacggt

SEQ ID NO: 6770 - DNA, 80 bp, synthetic construct
  misc_feature 1..80: note = Synthetic: >EVB101-cand-2980-3059
  source 1..80: mol_type = other DNA
ggatgacggtgccattcatcagcattggtaatgcttacagtaacttttatgatggctggtcacatttctcacaaaatggg

SEQ ID NO: 6771 - DNA, 80 bp, synthetic construct
  misc_feature 1..80: note = Synthetic: >EVB101-cand-3070-3149
  source 1..80: mol_type = other DNA
acaacaccttaaacaatatgggcaagatttatattagacaggtgaacgagccagcacatgttcctgtcatcagtgtggca

SEQ ID NO: 6772 - DNA, 80 bp, synthetic construct
  misc_feature 1..80: note = Synthetic: >EVB101-cand-3150-3229
  source 1..80: mol_type = other DNA
cgcatatacttcaaaccaaagcatattaaagtctgggtgcctaggccaccgcggctctgtgcatacaagaaatcatctaa

SEQ ID NO: 6773 - DNA, 80 bp, synthetic construct
  misc_feature 1..80: note = Synthetic: >EVB101-cand-3230-3309
  source 1..80: mol_type = other DNA
tgtgaacttcgaaccagagaacgtcactgaagtcagagcagacattaatcacatccccctcactttccataaccaagcag

SEQ ID NO: 6774 - DNA, 80 bp, synthetic construct
  misc_feature 1..80: note = Synthetic: >EVB101-cand-3310-3389
  source 1..80: mol_type = other DNA
gtgagaccagcttattgagaactgctggagcttacggtcaacaatctggagcggtgtatgtgggcaattatagaatagtc

SEQ ID NO: 6775 - DNA, 80 bp, synthetic construct
  misc_feature 1..80: note = Synthetic: >EVB101-cand-3390-3469
  source 1..80: mol_type = other DNA
aacaggcacttggccacgcacactgactgggagaactgcgtgtgggatgattacaacagggacctgctggtgtgcaccac

SEQ ID NO: 6776 - DNA, 80 bp, synthetic construct
  misc_feature 1..80: note = Synthetic: >EVB101-cand-3470-3549
  source 1..80: mol_type = other DNA
caccgcacacgggtgcgatgtcatcgctagatgccaatgtacaacgggtgtgtacttctgcgcgtctagaaacaagcact

SEQ ID NO: 6777 - DNA, 80 bp, synthetic construct
  misc_feature 1..80: note = Synthetic: >EVB101-cand-3550-3629
  source 1..80: mol_type = other DNA
acccgatctcttttgagggtccaggcattgtggaggtgcaagaaagtgaatattatcccaggaggtaccagacacacgtg

SEQ ID NO: 6778 - DNA, 80 bp, synthetic construct
  misc_feature 1..80: note = Synthetic: >EVB77-cand-5170-5249
  source 1..80: mol_type = other DNA
ggatggttggtaccagaggttaattccaccttgcaaattgagaagcatgtcagcagagcctttatttgcctgcaagcagt

SEQ ID NO: 6779 - DNA, 80 bp, synthetic construct
  misc_feature 1..80: note = Synthetic: >EVB77-cand-5230-5309
  source 1..80: mol_type = other DNA
tttatttgcctgcaagcagtgaccaccttcgtttcagtggcagggatcatctacataatctacaaactctttgcgggttt

SEQ ID NO: 6780 - DNA, 80 bp, synthetic construct
  misc_feature 1..80: note = Synthetic: >EVB77-cand-5300-5379
  source 1..80: mol_type = other DNA
ttgcgggtttccaaggagcttacacaggaatgcccaatcagaagcccaaggtccccactctgaggcaggcaaaagtgcag

SEQ ID NO: 6781 - DNA, 80 bp, synthetic construct
  misc_feature 1..80: note = Synthetic: >EVB77-cand-5390-5469
  source 1..80: mol_type = other DNA
ttgaattcgctgtagccatgatgaagagaaattcaagtacagtgaagactgaatatggcgagttcaccatgttgggtatc

SEQ ID NO: 6782 - DNA, 80 bp, synthetic construct
  misc_feature 1..80: note = Synthetic: >EVB77-cand-5470-5549
  source 1..80: mol_type = other DNA
tatgataaatgggctgttttgccacgccatgccaagcccgggccaactattttaatgaatgaccaagaagttggcgtgct

SEQ ID NO: 6783 - DNA, 80 bp, synthetic construct
  misc_feature 1..80: note = Synthetic: >EVB77-cand-5560-5639
  source 1..80: mol_type = other DNA
gagctagtggataaggatggcaccaacttggaattaacgctgctcaagttgaaccgaaacgagaaattcagggatatcag

SEQ ID NO: 6784 - DNA, 80 bp, synthetic construct
  misc_feature 1..80: note = Synthetic: >EVB77-cand-5640-5719
  source 1..80: mol_type = other DNA
gggtttcctggccaaggaagaggtggaagtcaatgaggctgtgctagcaatcaacaccagcaagttcccaaacatgtaca

SEQ ID NO: 6785 - DNA, 80 bp, synthetic construct
  misc_feature 1..80: note = Synthetic: >EVB77-cand-5730-5809
  source 1..80: mol_type = other DNA
gcaggtgatagattatggctttttgaacttgggtggtacacccactaaacgaatgctcatgtataactttcccactaggg

SEQ ID NO: 6786 - DNA, 80 bp, synthetic construct
  misc_feature 1..80: note = Synthetic: >EVB77-cand-5770-5849
  source 1..80: mol_type = other DNA
cccactaaacgaatgctcatgtataactttcccactagggctgggcagtgtggtggtgtgcttatgtctaccggtaaggt

SEQ ID NO: 6787 - DNA, 80 bp, synthetic construct
  misc_feature 1..80: note = Synthetic: >EVB77-cand-5880-5959
  source 1..80: mol_type = other DNA
ccagggcttctctgccgcccttctcaagcactactttaatgatgagcaaggagaaattgaattcattgaaaactcaaagg

SEQ ID NO: 6788 - DNA, 80 bp, synthetic construct
  misc_feature 1..80: note = Synthetic: >EVB77-cand-5960-6039
  source 1..80: mol_type = other DNA
aggtgggattcccggtcatcaacacacctagtaaaaccaagttggaacccagcgtctttcatcaagtgtttgaaggcaac

SEQ ID NO: 6789 - DNA, 80 bp, synthetic construct
  misc_feature 1..80: note = Synthetic: >EVB77-cand-6040-6119
  source 1..80: mol_type = other DNA
aaggaaccagcagtcctcagaaacggcgacccacgccttaaggccaacttcgaagaggccatattctccaaatacattgg

SEQ ID NO: 6790 - DNA, 80 bp, synthetic construct
  misc_feature 1..80: note = Synthetic: >EVB77-cand-6120-6199
  source 1..80: mol_type = other DNA
aaatgttaatacacatgtggatgattacatgttggaggcagttgacccctacgctgggcaattagccaccctggatatca

SEQ ID NO: 6791 - DNA, 80 bp, synthetic construct
  misc_feature 1..80: note = Synthetic: >EVB77-cand-6200-6279
  source 1..80: mol_type = other DNA
gcactgaaccaatgaagctagaagacgcagtgtatgggactgaaggccttgaagcccttgacctaacgacaagtgcaggc

SEQ ID NO: 6792 - DNA, 80 bp, synthetic construct
  misc_feature 1..80: note = Synthetic: >EVB77-cand-6280-6359
  source 1..80: mol_type = other DNA
tacccctatgtcgcgctgggcatcaagaagagagatatcctttcaaagaaaacaaaggacctgaccaaactaaaggagtg

SEQ ID NO: 6793 - DNA, 80 bp, synthetic construct
  misc_feature 1..80: note = Synthetic: >EVB77-cand-6360-6439
  source 1..80: mol_type = other DNA
tatggataagtatggtttaaacttaccaatggtgacctatgtgaaggatgagctcagatctgctgagaaggtagcaaagg

SEQ ID NO: 6794 - DNA, 80 bp, synthetic construct
  misc_feature 1..80: note = Synthetic: >EVB83-cand-2770-2849
  source 1..80: mol_type = other DNA
cgtttgtcatcacgagcacgcaagcggatgggactaaccaagccgcagataatgctgtgttaacacaccaaattatgtac

SEQ ID NO: 6795 - DNA, 80 bp, synthetic construct
  misc_feature 1..80: note = Synthetic: >EVB83-cand-2850-2929
  source 1..80: mol_type = other DNA
gtgccaccgggtggcccaattccaaacaaagtggatgactactgctggcagacctcaaccaatccgagtgtcttctggtc

SEQ ID NO: 6796 - DNA, 80 bp, synthetic construct
  misc_feature 1..80: note = Synthetic: >EVB83-cand-2930-3009
  source 1..80: mol_type = other DNA
agaaggtagtgcaccaccgcgcatgtccattccattcattagcatagggaatgcatacagcatgttctatgacgggtggt

SEQ ID NO: 6797 - DNA, 80 bp, synthetic construct
  misc_feature 1..80: note = Synthetic: >EVB83-cand-2980-3059
  source 1..80: mol_type = other DNA
atgcatacagcatgttctatgacgggtggtcacatttctcacaaacagggttgtatgggtatacttcccttaacaacatg

SEQ ID NO: 6798 - DNA, 80 bp, synthetic construct
  misc_feature 1..80: note = Synthetic: >EVB83-cand-3090-3169
  source 1..80: mol_type = other DNA
gctacagtgcataactactctagtgtagtgcggatttatttcaaaccaaagcacataaaggcatgggtgccccgtccacc

SEQ ID NO: 6799 - DNA, 80 bp, synthetic construct
  misc_feature 1..80: note = Synthetic: >EVB83-cand-3170-3249
  source 1..80: mol_type = other DNA
acgtttgtgcgactacatgtacaaggctaatgtggacttcaagacacaggcagttaccgaccagcgaggcgatcataggc

SEQ ID NO: 6800 - DNA, 80 bp, synthetic construct
  misc_feature 1..80: note = Synthetic: >EVB83-cand-3230-3309
  source 1..80: mol_type = other DNA
ccagcgaggcgatcataggctgagtaaggatgatcatctacccgagatgcacactaacggtgctttcgggcaacaatcag

SEQ ID NO: 6801 - DNA, 80 bp, synthetic construct
  misc_feature 1..80: note = Synthetic: >EVB83-cand-3330-3409
  source 1..80: mol_type = other DNA
tatagagtggtcaataggcatctcgccacgcacaatgattggcaaaactgtgtatgggaggattacaacagagaccttct

SEQ ID NO: 6802 - DNA, 80 bp, synthetic construct
  misc_feature 1..80: note = Synthetic: >EVB83-cand-3410-3489
  source 1..80: mol_type = other DNA
cgtgagcactacaacagcccatgggtgtgatattatcgctagatgtcaatgcacgactggtgtgtacttttgcgcatcga

SEQ ID NO: 6803 - DNA, 80 bp, synthetic construct
  misc_feature 1..80: note = Synthetic: >EVB83-cand-3490-3569
  source 1..80: mol_type = other DNA
ggaacaagcattatcccgtcagctttgagggcccaggcctggtggaagtacaagagagtgaatactaccctaagagatat

SEQ ID NO: 6804 - DNA, 80 bp, synthetic construct
  misc_feature 1..80: note = Synthetic: >EVB83-cand-3570-3649
  source 1..80: mol_type = other DNA
cagtcccatgtgttgctagcagcagggttttcagagccaggagattgcggtggaatcctcaggtgcgaacacggcgtgat

SEQ ID NO: 6805 - DNA, 80 bp, synthetic construct
  misc_feature 1..80: note = Synthetic: >EVB83-cand-3650-3729
  source 1..80: mol_type = other DNA
cgggctagtcaccatgggtggtgagggagtcgtcgggtttgccgacgtccgtgacctactatggttggaggatgacgcca

SEQ ID NO: 6806 - DNA, 80 bp, synthetic construct
  misc_feature 1..80: note = Synthetic: >EVB83-cand-3730-3809
  source 1..80: mol_type = other DNA
tggaacagggagtgagaaactatgtcgaacaacttggcaacgcctttggttcgggattcaccaaccagatatgtgaacag

SEQ ID NO: 6807 - DNA, 80 bp, synthetic construct
  misc_feature 1..80: note = Synthetic: >EVB83-cand-3810-3889
  source 1..80: mol_type = other DNA
gtcaatctccttaaggagtcactagtaggtcaggattccattctagagaagtcactcaaggcactcgtaaaaatcatttc

SEQ ID NO: 6808 - DNA, 80 bp, synthetic construct
  misc_feature 1..80: note = Synthetic: >EVB83-cand-3890-3969
  source 1..80: mol_type = other DNA
agcactggtgattgtggtgagaaaccatgatgacttaataacggtgactgccaccctcgccctcattggatgcacctcat

SEQ ID NO: 6809 - DNA, 80 bp, synthetic construct
  misc_feature 1..80: note = Synthetic: >EVB83-cand-3980-4059
  source 1..80: mol_type = other DNA
ctggcttaaacagaaggtatcgcagtactatggcatacccatggctgagcgccaaaacaacgggtggctaaagaaattta

SEQ ID NO: 6810 - DNA, 80 bp, synthetic construct
  misc_feature 1..80: note = Synthetic: >HCV.A10-cand-4350-4429
  source 1..80: mol_type = other DNA
cagccactctatgcaactgaagcgaagagagtgtacgccttagagaagagaatgaataattacatgcagttcaagagcaa

SEQ ID NO: 6811 - DNA, 80 bp, synthetic construct
  misc_feature 1..80: note = Synthetic: >HCV.A10-cand-4470-4549
  source 1..80: mol_type = other DNA
ccaggaactggcaagtcactggccacaggtataatagcaagagccattgctgacaaatatcactctagtgtgtactccct

SEQ ID NO: 6812 - DNA, 80 bp, synthetic construct
  misc_feature 1..80: note = Synthetic: >HCV.A10-cand-4510-4589
  source 1..80: mol_type = other DNA
gagccattgctgacaaatatcactctagtgtgtactcccttccaccagacccagatcactttgatggatacaagcaacaa

SEQ ID NO: 6813 - DNA, 80 bp, synthetic construct
  misc_feature 1..80: note = Synthetic: >HCV.A10-cand-4590-4669
  source 1..80: mol_type = other DNA
gtggtgacagtcatggatgatttgtgtcaaaacccagatggcaaagatatgtcattgttttgtcaaatggtatccactgt

SEQ ID NO: 6814 - DNA, 80 bp, synthetic construct
  misc_feature 1..80: note = Synthetic: >HCV.A10-cand-4680-4759
  source 1..80: mol_type = other DNA
cccccaatggcttcactggaagagaaaggtgtatccttcacatctaaatttgttattgcttcaactaatgctagcaacat

SEQ ID NO: 6815 - DNA, 80 bp, synthetic construct
  misc_feature 1..80: note = Synthetic: >HCV.A10-cand-4760-4839
  source 1..80: mol_type = other DNA
cattgtccccacggtctcagactctgacgctattcgtaggagatttttcatggattgtgatatcgaagtgactgactctt

SEQ ID NO: 6816 - DNA, 80 bp, synthetic construct
  misc_feature 1..80: note = Synthetic: >HCV.A10-cand-4840-4919
  source 1..80: mol_type = other DNA
acaagacagacttaggccgcttagatgcaggtagggccgcaaagctctgctcagagaacaacactgccaatttcaagagg

SEQ ID NO: 6817 - DNA, 80 bp, synthetic construct
  misc_feature 1..80: note = Synthetic: >HCV.A10-cand-4930-5009
  source 1..80: mol_type = other DNA
tagtgtgcggtaaagccatccaactgagagataggaagtccaaagtcaggtatagcgtagacactgtggtatcagaattg

SEQ ID NO: 6818 - DNA, 80 bp, synthetic construct
  misc_feature 1..80: note = Synthetic: >HCV.A10-cand-5010-5089
  source 1..80: mol_type = other DNA
gttagggagtataataacaggtctgctataggaaacactatagaagctttattccaagggcctcctaaatttaggcctat

SEQ ID NO: 6819 - DNA, 80 bp, synthetic construct
  misc_feature 1..80: note = Synthetic: >HCV.A10-cand-5090-5169
  source 1..80: mol_type = other DNA
aagaattagtcttgatgagaaacccgctccagatgctattagtgacctgcttgctagtgttgatagtgaagaggtgcggc

SEQ ID NO: 6820 - DNA, 80 bp, synthetic construct
  misc_feature 1..80: note = Synthetic: >HCV.A10-cand-5170-5249
  source 1..80: mol_type = other DNA
agtactgcagagatcaaggatggataatacctgaaacgccaaccaacgtggagcggcatctcaatagggcagtattagtg

SEQ ID NO: 6821 - DNA, 80 bp, synthetic construct
  misc_feature 1..80: note = Synthetic: >HCV.A10-cand-5250-5329
  source 1..80: mol_type = other DNA
atgcaatccatcgctactgtagtcgcagttgtctcccttgtttatgttatctacaagctatttgctggtttccaaggcgc

SEQ ID NO: 6822 - DNA, 80 bp, synthetic construct
  misc_feature 1..80: note = Synthetic: >HCV.A10-cand-5330-5409
  source 1..80: mol_type = other DNA
atattctggagcgcccaagcaagctctcaagaaacctgtgttgaggacagccactgttcaagggcccagcttagattttg

SEQ ID NO: 6823 - DNA, 80 bp, synthetic construct
  misc_feature 1..80: note = Synthetic: >HCV.A10-cand-5390-5469
  source 1..80: mol_type = other DNA
agggcccagcttagattttgccctgtctctcctgcgacgtaacatcaggcaggtgcaaaccgaccaagggcacttcacca

SEQ ID NO: 6824 - DNA, 80 bp, synthetic construct
  misc_feature 1..80: note = Synthetic: >HCV.A10-cand-5490-5569
  source 1..80: mol_type = other DNA
cttgctatcttacctcgtcactcacaaccagggaagaccatctgggttgagcacaagttggtcaatgtgcttgatgctgt

SEQ ID NO: 6825 - DNA, 80 bp, synthetic construct
  misc_feature 1..80: note = Synthetic: >HCV.A10-cand-5570-5649
  source 1..80: mol_type = other DNA
tgagctagtggatgaacaaggtgttaatttggagcttacactagtaaccctagacaccaatgagaagtttagagatgtca

SEQ ID NO: 6826 - DNA, 80 bp, synthetic construct
  misc_feature 1..80: note = Synthetic: >HCV.A5-cand-2830-2909
  source 1..80: mol_type = other DNA
cgcagaattcacctttatcactgcggaaaggaacggtaacaccagtccgatacccgtccaatacatgtacgttccacccg

SEQ ID NO: 6827 - DNA, 80 bp, synthetic construct
  misc_feature 1..80: note = Synthetic: >HCV.A5-cand-2940-3019
  source 1..80: mol_type = other DNA
ttcagtggcaaacagcaacaaacccatcagtgatttcgaagatgacagacccgccagctcaagtgtcagtaccattcatg

SEQ ID NO: 6828 - DNA, 80 bp, synthetic construct
  misc_feature 1..80: note = Synthetic: >HCV.A5-cand-2990-3069
  source 1..80: mol_type = other DNA
ccgccagctcaagtgtcagtaccattcatgagtccagctagcacttaccaatggttttatgatggttatcctacgttcgg

SEQ ID NO: 6829 - DNA, 80 bp, synthetic construct
  misc_feature 1..80: note = Synthetic: >HCV.A5-cand-3090-3169
  source 1..80: mol_type = other DNA
atctaaattacgggcagtgccccaacaataaaatgggtactttttgcattcgcatggtgtcaggagtatcaacgggcaaa

SEQ ID NO: 6830 - DNA, 80 bp, synthetic construct
  misc_feature 1..80: note = Synthetic: >HCV.A5-cand-3170-3249
  source 1..80: mol_type = other DNA
gatgtcacggtgcgcattttcatgaagctgaagcacgtgcgcgcttgggtacctagacccatcaggagtcagccctactt

SEQ ID NO: 6831 - DNA, 80 bp, synthetic construct
  misc_feature 1..80: note = Synthetic: >HCV.A5-cand-3250-3329
  source 1..80: mol_type = other DNA
gttgaagaactacccaaattttgataaggcaaatattgcagacgcttcgtccaataggactagcataaccaccactggga

SEQ ID NO: 6832 - DNA, 80 bp, synthetic construct
  misc_feature 1..80: note = Synthetic: >HCV.A5-cand-3330-3409
  source 1..80: mol_type = other DNA
aatttggacaacagtcaggagctatatatgtgggaaattacagagtggtcaatcgccacttggccacacacaatgattgg

SEQ ID NO: 6833 - DNA, 80 bp, synthetic construct
  misc_feature 1..80: note = Synthetic: >HCV.A5-cand-3390-3469
  source 1..80: mol_type = other DNA
tggccacacacaatgattgggctaatttggtgtgggaagatagttcaagagacctgctagtctcctccaccaccgcacag

SEQ ID NO: 6834 - DNA, 80 bp, synthetic construct
  misc_feature 1..80: note = Synthetic: >HCV.A5-cand-3490-3569
  source 1..80: mol_type = other DNA
gtgtaattgccaaaccggagtgtactactgcagttctaagagaaagcactacccggttagtttctcaaaacccagcctca

SEQ ID NO: 6835 - DNA, 80 bp, synthetic construct
  misc_feature 1..80: note = Synthetic: >HCV.A5-cand-3570-3649
  source 1..80: mol_type = other DNA
tcttcgtggaggccaatgagtactaccctgccaggtatcaatcccacctcatgcttgcagaaggtcactctgaaccagga

SEQ ID NO: 6836 - DNA, 80 bp, synthetic construct
  misc_feature 1..80: note = Synthetic: >HCV.A5-cand-3660-3739
  source 1..80: mol_type = other DNA
gcattctcaggtgccaacacggagttgttgggatagtgtcaactggtggcaatggcctagtagggtttgccagcgttaga

SEQ ID NO: 6837 - DNA, 80 bp, synthetic construct
  misc_feature 1..80: note = Synthetic: >HCV.A5-cand-3730-3809
  source 1..80: mol_type = other DNA
cagcgttagagatctcctatggttagatgaggaagccatggaacagggcgtgaccgattacatcaagggactaggcgatg

SEQ ID NO: 6838 - DNA, 80 bp, synthetic construct
  misc_feature 1..80: note = Synthetic: >HCV.A5-cand-3810-3889
  source 1..80: mol_type = other DNA
cctttggcacgggctttaccgatgctgtatctagagaagtggaagctctaaagaattacttaattggctcggaaggtgca

SEQ ID NO: 6839 - DNA, 80 bp, synthetic construct
  misc_feature 1..80: note = Synthetic: >HCV.A5-cand-3890-3969
  source 1..80: mol_type = other DNA
gtggagaaaattctaaagaatttggtaaagctcatttcagctctagtcatagttattaggagcgactacgatatggtcac

SEQ ID NO: 6840 - DNA, 80 bp, synthetic construct
  misc_feature 1..80: note = Synthetic: >HCV.A5-cand-3970-4049
  source 1..80: mol_type = other DNA
tcttactgcaactcttgccctgattgggtgtcacggaagtccatgggcatggattaagtcaaaaacagcatccatcctgg

SEQ ID NO: 6841 - DNA, 80 bp, synthetic construct
  misc_feature 1..80: note = Synthetic: >HCV.A5-cand-4050-4129
  source 1..80: mol_type = other DNA
gtattcccatggcacagaaacagagtgcatcttggttgaagaagttcaatgacatggcaaacgctgcaaaaggattggaa

SEQ ID NO: 6842 - DNA, 80 bp, synthetic construct
  misc_feature 1..80: note = Synthetic: >KC470236.1-cand-960-1039
  source 1..80: mol_type = other DNA
gatgtaacggatggtttctagtacaggcaatagtagataaacaaacaggcgacacagtgtcggaggatgaggatgaaaat

SEQ ID NO: 6843 - DNA, 80 bp, synthetic construct
  misc_feature 1..80: note = Synthetic: >KC470236.1-cand-1040-1119
  source 1..80: mol_type = other DNA
gcaacagatacaggttcagacttggcagactttattgatgattccacagatatttgtgtacaggcagagcgtgagacagc

SEQ ID NO: 6844 - DNA, 80 bp, synthetic construct
  misc_feature 1..80: note = Synthetic: >KC470236.1-cand-1120-1199
  source 1..80: mol_type = other DNA
acaggtacttttacatatgcaagaggcccaaagggatgcacaagcagtgcgtgccttaaaacgaaagtatacagacagca

SEQ ID NO: 6845 - DNA, 80 bp, synthetic construct
  misc_feature 1..80: note = Synthetic: >KC470236.1-cand-1160-1239
  source 1..80: mol_type = other DNA
caagcagtgcgtgccttaaaacgaaagtatacagacagcagtggcgacactagaccgtatggaaaaaaagtaggcaggaa

SEQ ID NO: 6846 - DNA, 80 bp, synthetic construct
  misc_feature 1..80: note = Synthetic: >KC470236.1-cand-1260-1339
  source 1..80: mol_type = other DNA
aaatttcattaaatgtaagcagtacgcaggcaacacaaacggtgtattccgtgccagacagcggatatggcaatatggaa

SEQ ID NO: 6847 - DNA, 80 bp, synthetic construct
  misc_feature 1..80: note = Synthetic: >KC470236.1-cand-1310-1389
  source 1..80: mol_type = other DNA
gtgccagacagcggatatggcaatatggaagtggaaacagctgaagtggaggaggtaactgtagcaactaatacaaatgg

SEQ ID NO: 6848 - DNA, 80 bp, synthetic construct
  misc_feature 1..80: note = Synthetic: >KC470236.1-cand-1420-1499
  source 1..80: mol_type = other DNA
acgggaggagtgcagtagtgtggatagtgctatagatagtgaaaaccaggatcccaaatctccaactgcacaaattaaat

SEQ ID NO: 6849 - DNA, 80 bp, synthetic construct
  misc_feature 1..80: note = Synthetic: >KC470236.1-cand-1510-1589
  source 1..80: mol_type = other DNA
atccaataacaaaaaggctgcaatgctaacacaatttaaagaaacatatggactatcctttactgacctggtacgtacgt

SEQ ID NO: 6850 - DNA, 80 bp, synthetic construct
  misc_feature 1..80: note = Synthetic: >KC470236.1-cand-1600-1679
  source 1..80: mol_type = other DNA
taaaacaacatgtacagactgggtggcagccatatttggagtacatccaactattgcagaaggatttaaaacattaatca

SEQ ID NO: 6851 - DNA, 80 bp, synthetic construct
  misc_feature 1..80: note = Synthetic: >KC470236.1-cand-1680-1759
  source 1..80: mol_type = other DNA
acaaatatgccttatatacacatatacaaagcttagacacaaaacaaggagtactaattttaatgctaataagatataca

SEQ ID NO: 6852 - DNA, 80 bp, synthetic construct
  misc_feature 1..80: note = Synthetic: >KC470236.1-cand-1760-1839
  source 1..80: mol_type = other DNA
tgtggaaaaaatagggttactgtaggaaagggattaagtacattgttacatgttccagaaagttgtatgcttctggagcc

SEQ ID NO: 6853 - DNA, 80 bp, synthetic construct
  misc_feature 1..80: note = Synthetic: >KC470236.1-cand-1830-1909
  source 1..80: mol_type = other DNA
ttctggagcctcctaaactgcgcagccctgtagcagcactatattggtatcgcacaggtatatccaatattagtgtggta

SEQ ID NO: 6854 - DNA, 80 bp, synthetic construct
  misc_feature 1..80: note = Synthetic: >KC470236.1-cand-1920-1999
  source 1..80: mol_type = other DNA
cgccagaatggatacaacgattaactgttatacaacatggaatagatgatagtgtatttgacctatcggacatggtacaa

SEQ ID NO: 6855 - DNA, 80 bp, synthetic construct
  misc_feature 1..80: note = Synthetic: >KC470236.1-cand-2000-2079
  source 1..80: mol_type = other DNA
tgggcatttgacaatgaatatactgatgaaagtgacatagcatttaattatgcaatgttagcagattgtaacagtaatgc

SEQ ID NO: 6856 - DNA, 80 bp, synthetic construct
  misc_feature 1..80: note = Synthetic: >KC470236.1-cand-2080-2159
  source 1..80: mol_type = other DNA
tgcagcctttttaaaaagtaactgccaggcaaaatatgtaaaagattgtgcaacaatgtgtaaacattacaagcgagcac

SEQ ID NO: 6857 - DNA, 80 bp, synthetic construct
  misc_feature 1..80: note = Synthetic: >KC470236.1-cand-2140-2219
  source 1..80: mol_type = other DNA
taaacattacaagcgagcacaaaaaaggcaaatgtccatgtctcaatggataaaatttaggtgtagtaaatgtgatgaag

SEQ ID NO: 6858 - DNA, 80 bp, synthetic construct
  misc_feature 1..80: note = Synthetic: >NC_001489.1-cand-2270-2349
  source 1..80: mol_type = other DNA
ttggtataacaaccatgaaagatttgaaaggaaaagctaacagagggaaaatggatgtttcaggagtacaagcacctgtg

SEQ ID NO: 6859 - DNA, 80 bp, synthetic construct
  misc_feature 1..80: note = Synthetic: >NC_001489.1-cand-2350-2429
  source 1..80: mol_type = other DNA
ggagctatcacaacaattgaggatccagttttagcaaagaaagtacctgagacatttcctgaattgaaacctggagaatc

SEQ ID NO: 6860 - DNA, 80 bp, synthetic construct
  misc_feature 1..80: note = Synthetic: >NC_001489.1-cand-2430-2509
  source 1..80: mol_type = other DNA
cagacatacatcagatcatatgtccatctacaagtttatgggaaggtctcatttcttgtgcacttttacattcaattcaa

SEQ ID NO: 6861 - DNA, 80 bp, synthetic construct
  misc_feature 1..80: note = Synthetic: >NC_001489.1-cand-2510-2589
  source 1..80: mol_type = other DNA
ataataaagagtacacatttcctataaccttgtcttcaacctctaatcctcctcatggtttgccatcaacactgaggtgg

SEQ ID NO: 6862 - DNA, 80 bp, synthetic construct
  misc_feature 1..80: note = Synthetic: >NC_001489.1-cand-2590-2669
  source 1..80: mol_type = other DNA
tttttcaacttgtttcagttgtatagagggcctttagatctgacaattattattacaggagcaactgatgtagatggcat

SEQ ID NO: 6863 - DNA, 80 bp, synthetic construct
  misc_feature 1..80: note = Synthetic: >NC_001489.1-cand-2670-2749
  source 1..80: mol_type = other DNA
ggcctggttcactccagtaggtcttgccgttgatactccttgggtagagaaggagtcagctttgtctattgactacaaaa

SEQ ID NO: 6864 - DNA, 80 bp, synthetic construct
  misc_feature 1..80: note = Synthetic: >NC_001489.1-cand-2750-2829
  source 1..80: mol_type = other DNA
ctgctcttggagctgtcagatttaacacaaggagaacagggaacattcagattagattaccatggtattcttatttatat

SEQ ID NO: 6865 - DNA, 80 bp, synthetic construct
  misc_feature 1..80: note = Synthetic: >NC_001489.1-cand-2830-2909
  source 1..80: mol_type = other DNA
gctgtgtctggagcactggatggtttgggtgacaagacagattctacatttggattggtttctattcagattgcaaatta

SEQ ID NO: 6866 - DNA, 80 bp, synthetic construct
  misc_feature 1..80: note = Synthetic: >NC_001489.1-cand-2910-2989
  source 1..80: mol_type = other DNA
caatcattctgatgaatacttgtcttttagttgttatttgtctgtcacagaacaatcagagttttattttcccagagctc

SEQ ID NO: 6867 - DNA, 80 bp, synthetic construct
  misc_feature 1..80: note = Synthetic: >NC_001489.1-cand-2990-3069
  source 1..80: mol_type = other DNA
cattgaactcaaatgccatgttatccactgaatcaatgatgagcagaattgcagctggagacttggagtcatcagtggat

SEQ ID NO: 6868 - DNA, 80 bp, synthetic construct
  misc_feature 1..80: note = Synthetic: >NC_001489.1-cand-3060-3139
  source 1..80: mol_type = other DNA
atcagtggatgatcctagatcagaggaagataaaagatttgagagtcatatagaatgcaggaagccatataaagaactga

SEQ ID NO: 6869 - DNA, 80 bp, synthetic construct
  misc_feature 1..80: note = Synthetic: >NC_001489.1-cand-3140-3219
  source 1..80: mol_type = other DNA
gattagaagttgggaaacaaagactcaagtatgctcaggaagaattgtcaaatgaagtacttccaccccctaggaaaatg

SEQ ID NO: 6870 - DNA, 80 bp, synthetic construct
  misc_feature 1..80: note = Synthetic: >NC_001489.1-cand-3220-3299
  source 1..80: mol_type = other DNA
aagggactgttttcacaagccaaaatttctcttttttatactgaggagcatgaaataatgaagttttcctggagaggtgt

SEQ ID NO: 6871 - DNA, 80 bp, synthetic construct
  misc_feature 1..80: note = Synthetic: >NC_001489.1-cand-3300-3379
  source 1..80: mol_type = other DNA
gactgctgatactagagctttaaggaggtttggattctctttggccgcaggcagaagtgtgtggactcttgaaatggatg

SEQ ID NO: 6872 - DNA, 80 bp, synthetic construct
  misc_feature 1..80: note = Synthetic: >NC_001489.1-cand-3390-3469
  source 1..80: mol_type = other DNA
tactgggagactgattagattgaatgatgagaaatggacagaaatgaaggatgacaagattgtttcattgattgaaaagt

SEQ ID NO: 6873 - DNA, 80 bp, synthetic construct
  misc_feature 1..80: note = Synthetic: >NC_001489.1-cand-3460-3539
  source 1..80: mol_type = other DNA
attgaaaagtttacaagtaacaaatattggtccaaagtgaatttcccacatgggatgttggatcttgaagaaattgctgc

SEQ ID NO: 6874 - DNA, 80 bp, synthetic construct
  misc_feature 1..80: note = Synthetic: >NC_001611.1-cand-172380-172459
  source 1..80: mol_type = other DNA
tggagcagctggttctacagctgaacaactatcaaaatatatagagaatgtgaatgaaaatacacccgatgataagaagg

SEQ ID NO: 6875 - DNA, 80 bp, synthetic construct
  misc_feature 1..80: note = Synthetic: >NC_001611.1-cand-172460-172539
  source 1..80: mol_type = other DNA
atgacaataatgacatggacgtagatgttccgtattgtgcgacactagctattgcaaataaaatatactgtagcgatagt

SEQ ID NO: 6876 - DNA, 80 bp, synthetic construct
  misc_feature 1..80: note = Synthetic: >NC_001611.1-cand-172540-172619
  source 1..80: mol_type = other DNA
atcgagttccacgcctccttcctacaaaaaataaaagatgattttcaaactgtaaactttaataatgctaaccaaacaaa

SEQ ID NO: 6877 - DNA, 80 bp, synthetic construct
  misc_feature 1..80: note = Synthetic: >NC_001611.1-cand-172620-172699
  source 1..80: mol_type = other DNA
ggaactaatcaatgaatgggttaagacgatgacaaatggtaaaattaattccttattgactagtccactgcccattaata

SEQ ID NO: 6878 - DNA, 80 bp, synthetic construct
  misc_feature 1..80: note = Synthetic: >NC_001611.1-cand-172780-172859
  source 1..80: mol_type = other DNA
aagttttatatttctaaaaatatagttaccagcgttgatatgatggtgagcactgaaaacgacttacaatatgtacatat

SEQ ID NO: 6879 - DNA, 80 bp, synthetic construct
  misc_feature 1..80: note = Synthetic: >NC_001611.1-cand-172940-173019
  source 1..80: mol_type = other DNA
acatagaaggtttatataacatagaaaaacacataactgaagaaaattttaaaaaatggtgtggtaagttatacactaaa

SEQ ID NO: 6880 - DNA, 80 bp, synthetic construct
  misc_feature 1..80: note = Synthetic: >NC_001611.1-cand-173020-173099
  source 1..80: mol_type = other DNA
agtatagacttgtatatgccaaagtttaaactgaaaatgacagaatcgtataatctggtacctattctagaaaatttagg

SEQ ID NO: 6881 - DNA, 80 bp, synthetic construct
  misc_feature 1..80: note = Synthetic: >NC_001611.1-cand-173100-173179
  source 1..80: mol_type = other DNA
acttactaatatattcggatattatgcagattttagcaagatgtgtaatgaaactatcactgtagaaaaatttctacaca

SEQ ID NO: 6882 - DNA, 80 bp, synthetic construct
  misc_feature 1..80: note = Synthetic: >NC_001611.1-cand-173180-173259
  source 1..80: mol_type = other DNA
agacgtttatagatgttaatgaggagtatacagaagcatcggctattacaggagtatttatgactaacttttcgatggta

SEQ ID NO: 6883 - DNA, 80 bp, synthetic construct
  misc_feature 1..80: note = Synthetic: >NC_001611.1-cand-173340-173419
  source 1..80: mol_type = other DNA
atactgttatccacaataaatataaacaaatagactttttatctcatgtctaagaattacaaagtaatatagttagtata

SEQ ID NO: 6884 - DNA, 80 bp, synthetic construct
  misc_feature 1..80: note = Synthetic: >NC_001611.1-cand-173420-173499
  source 1..80: mol_type = other DNA
actaaagttaatactacattaaaacttaaaaaaaataataatatcactattacaattaataagtataaactataaactaa

SEQ ID NO: 6885 - DNA, 80 bp, synthetic construct
  misc_feature 1..80: note = Synthetic: >NC_001611.1-cand-173500-173579
  source 1..80: mol_type = other DNA
aaattaaacaatatcgttattatataagtaataccaaaatgatgatatacgattaatagcctgtcttatattcgtgactt

SEQ ID NO: 6886 - DNA, 80 bp, synthetic construct
  misc_feature 1..80: note = Synthetic: >NC_001611.1-cand-173580-173659
  source 1..80: mol_type = other DNA
tatccattgctagtcactttacattcccgttattcctcccattacggaagataaatcgtttaatagtgtagaggtattag

SEQ ID NO: 6887 - DNA, 80 bp, synthetic construct
  misc_feature 1..80: note = Synthetic: >NC_001611.1-cand-173660-173739
  source 1..80: mol_type = other DNA
tttccttgtttagagatgatcaaaaagactatacggtaacttctcagttcaataactacacatcgacaccaacgactgga

SEQ ID NO: 6888 - DNA, 80 bp, synthetic construct
  misc_feature 1..80: note = Synthetic: >NC_001611.1-cand-173740-173819
  source 1..80: mol_type = other DNA
ctataaatgtactatccgatggtctggatataccattgactaatataacttattggtcacggtttactataggtcgtgta

SEQ ID NO: 6889 - DNA, 80 bp, synthetic construct
  misc_feature 1..80: note = Synthetic: >NC_001611.1-cand-173820-173899
  source 1..80: mol_type = other DNA
ttgttcaaatcagagtctgaggatattttccaaaagaacatgagtattctaggtgtctctattgaatgtaagaagccgtc

SEQ ID NO: 6890 - DNA, 80 bp, synthetic construct
  misc_feature 1..80: note = Synthetic: >NC_001611.1-cand-176660-176739
  source 1..80: mol_type = other DNA
ttgtatctcctagacggtgtagaagatcaacctctggagtcgtatgtggtatgatacaatcaagaccaaacgatgataca

SEQ ID NO: 6891 - DNA, 80 bp, synthetic construct
  misc_feature 1..80: note = Synthetic: >NC_001611.1-cand-176740-176819
  source 1..80: mol_type = other DNA
tattcacttcttcaactaccaaaaattgaaccagaatatgcggaggtaggtaatggcttacccaagaacaatgttcctgt

SEQ ID NO: 6892 - DNA, 80 bp, synthetic construct
  misc_feature 1..80: note = Synthetic: >NC_001611.1-cand-176820-176899
  source 1..80: mol_type = other DNA
gataggcaataaacatagtaaaaaatatacatcgtcgatgtcaaaaatatcaacaaaatttgataaatctatggcatttg

SEQ ID NO: 6893 - DNA, 80 bp, synthetic construct
  misc_feature 1..80: note = Synthetic: >NC_001611.1-cand-176900-176979
  source 1..80: mol_type = other DNA
gaacagcaatgttactaactggtcaacaggctattaaccaacaggatagatcaactgcgttgattaaaaaagatcaaatg

SEQ ID NO: 6894 - DNA, 80 bp, synthetic construct
  misc_feature 1..80: note = Synthetic: >NC_001611.1-cand-176980-177059
  source 1..80: mol_type = other DNA
agcaaggacgaaaaaatattcgaagcagttacaatgactctatcaactataggttcaacgttgacaactgcaggtatgat

SEQ ID NO: 6895 - DNA, 80 bp, synthetic construct
  misc_feature 1..80: note = Synthetic: >NC_001611.1-cand-177060-177139
  source 1..80: mol_type = other DNA
agctccaccactaatgattgctggaataggtatatcgcttatatcaggtataatagatacggcaaaagatatatattacc

SEQ ID NO: 6896 - DNA, 80 bp, synthetic construct
  misc_feature 1..80: note = Synthetic: >NC_001611.1-cand-177140-177219
  source 1..80: mol_type = other DNA
tattttcaggacaggagaagccagtagatccagttattaagttttttaacacatacgctggattagtatccgatagtagt

SEQ ID NO: 6897 - DNA, 80 bp, synthetic construct
  misc_feature 1..80: note = Synthetic: >NC_001611.1-cand-177220-177299
  source 1..80: mol_type = other DNA
aaaatgggtgtaaggaaatgtttgacgcctggagaagacacacttatttacatcgcatacaaaaacgattccagttttaa

SEQ ID NO: 6898 - DNA, 80 bp, synthetic construct
  misc_feature 1..80: note = Synthetic: >NC_001611.1-cand-177700-177779
  source 1..80: mol_type = other DNA
ttggctggtggttgtccatatgatacatctcaaacttttattgtacatactacttgcagtattttactaagaacagctac

SEQ ID NO: 6899 - DNA, 80 bp, synthetic construct
  misc_feature 1..80: note = Synthetic: >NC_001611.1-cand-177770-177849
  source 1..80: mol_type = other DNA
gaacagctacatgggatcagtttagaaacagatgggtgttacaaaatccatttaggcaagaagggacatataagcaactg

SEQ ID NO: 6900 - DNA, 80 bp, synthetic construct
  misc_feature 1..80: note = Synthetic: >NC_001611.1-cand-178010-178089
  source 1..80: mol_type = other DNA
tatacgtaaaactgggaatatttaatactgaagggtttaatagttttgtactaaactgtccaactgggtctacgccaaca

SEQ ID NO: 6901 - DNA, 80 bp, synthetic construct
  misc_feature 1..80: note = Synthetic: >NC_001611.1-cand-178090-178169
  source 1..80: mol_type = other DNA
tacatcaaagataaaaatacggacagtaacaatgttatcatagagctacctgtaggtgattacggcactgccaaattgta

SEQ ID NO: 6902 - DNA, 80 bp, synthetic construct
  misc_feature 1..80: note = Synthetic: >NC_001611.1-cand-178260-178339
  source 1..80: mol_type = other DNA
tagtatcagtggtattccattttcgagcatatacacaggaagtgtgaacggtagaaatagactgttcaccacattgtcta

SEQ ID NO: 6903 - DNA, 80 bp, synthetic construct
  misc_feature 1..80: note = Synthetic: >NC_001611.1-cand-178340-178419
  source 1..80: mol_type = other DNA
aaggaatgccatatagatcaatgtattgcgataacagacgaccaggttgttattatgcaggaataccatttaatgaaaat

SEQ ID NO: 6904 - DNA, 80 bp, synthetic construct
  misc_feature 1..80: note = Synthetic: >NC_001611.1-cand-178420-178499
  source 1..80: mol_type = other DNA
agtgtagaatcagatctgcattatggaccagaaataatgcttaaggaaacatatgacacaaacagtattgatccacaagt

SEQ ID NO: 6905 - DNA, 80 bp, synthetic construct
  misc_feature 1..80: note = Synthetic: >NC_001611.1-cand-178500-178579
  source 1..80: mol_type = other DNA
tataacaaagtcaaaaacacactttcctactccaataagtgtaaaatttacggttgacaatttaggaaatgggtataaca

SEQ ID NO: 6906 - DNA, 80 bp, synthetic construct
  misc_feature 1..80: note = Synthetic: >NC_001959.2-cand-4310-4389
  source 1..80: mol_type = other DNA
gaaacccatttacactgcagccttaaaagatgaactagtcaagccagaaaagatttatcaaaaagtcaagaagcgtctac

SEQ ID NO: 6907 - DNA, 80 bp, synthetic construct
  misc_feature 1..80: note = Synthetic: >NC_001959.2-cand-4410-4489
  source 1..80: mol_type = other DNA
acagtggtcagggccgcccgggcttttggcccattttgtgacgctataaaatcacatgtcatcaaattgccaataaaagt

SEQ ID NO: 6908 - DNA, 80 bp, synthetic construct
  misc_feature 1..80: note = Synthetic: >NC_001959.2-cand-4490-4569
  source 1..80: mol_type = other DNA
tggcatgaacacaatagaagatggccccctcatctatgctgagcatgctaaatataagaatcattttgatgcagattata

SEQ ID NO: 6909 - DNA, 80 bp, synthetic construct
  misc_feature 1..80: note = Synthetic: >NC_001959.2-cand-4570-4649
  source 1..80: mol_type = other DNA
cagcatgggactcaacacaaaatagacaaattatgacagaatccttctccattatgtcgcgccttacggcctcaccagaa

SEQ ID NO: 6910 - DNA, 80 bp, synthetic construct
  misc_feature 1..80: note = Synthetic: >NC_001959.2-cand-4650-4729
  source 1..80: mol_type = other DNA
ttggccgaggttgtggcccaagatttgctagcaccatctgagatggatgtaggtgattatgtcatcagggtcaaagaggg

SEQ ID NO: 6911 - DNA, 80 bp, synthetic construct
  misc_feature 1..80: note = Synthetic: >NC_001959.2-cand-4730-4809
  source 1..80: mol_type = other DNA
gctgccatctggattcccatgtacttcccaggtgaacagcataaatcactggataattactctctgtgcactgtctgagg

SEQ ID NO: 6912 - DNA, 80 bp, synthetic construct
  misc_feature 1..80: note = Synthetic: >NC_001959.2-cand-4810-4889
  source 1..80: mol_type = other DNA
ccactggtttatcacctgatgtggtgcaatccatgtcatatttctcattttatggtgatgatgagattgtgtcaactgac

SEQ ID NO: 6913 - DNA, 80 bp, synthetic construct
  misc_feature 1..80: note = Synthetic: >NC_001959.2-cand-4890-4969
  source 1..80: mol_type = other DNA
atagattttgacccagcccgcctcactcaaattctcaaggaatatggcctcaaaccaacaaggcctgacaaaacagaagg

SEQ ID NO: 6914 - DNA, 80 bp, synthetic construct
  misc_feature 1..80: note = Synthetic: >NC_001959.2-cand-4970-5049
  source 1..80: mol_type = other DNA
accaatacaagtgaggaaaaatgtggatggactggtcttcttgcggcgcaccatttcccgtgatgcggcagggttccaag

SEQ ID NO: 6915 - DNA, 80 bp, synthetic construct
  misc_feature 1..80: note = Synthetic: >NC_001959.2-cand-5050-5129
  source 1..80: mol_type = other DNA
gcaggttagatagggcttcgattgaacgccaaatcttctggacccgcgggcccaatcattcagatccatcagagactcta

SEQ ID NO: 6916 - DNA, 80 bp, synthetic construct
  misc_feature 1..80: note = Synthetic: >NC_001959.2-cand-5090-5169
  source 1..80: mol_type = other DNA
gacccgcgggcccaatcattcagatccatcagagactctagtgccacacactcaaagaaaaatacagttgatttcacttc

SEQ ID NO: 6917 - DNA, 80 bp, synthetic construct
  misc_feature 1..80: note = Synthetic: >NC_001959.2-cand-5210-5289
  source 1..80: mol_type = other DNA
gatttccagcaaggtcatacatgaaatcaagactggtggattggaaatgtatgtcccaggatggcaggccatgttccgct

SEQ ID NO: 6918 - DNA, 80 bp, synthetic construct
  misc_feature 1..80: note = Synthetic: >NC_001959.2-cand-5290-5369
  source 1..80: mol_type = other DNA
ggatgcgcttccatgacctcggattgtggacaggagatcgcgatcttctgcccgaattcgtaaatgatgatggcgtctaa

SEQ ID NO: 6919 - DNA, 80 bp, synthetic construct
  misc_feature 1..80: note = Synthetic: >NC_001959.2-cand-5370-5449
  source 1..80: mol_type = other DNA
ggacgctacatcaagcgtggatggcgctagtggcgctggtcagttggtaccggaggttaatgcttctgaccctcttgcaa

SEQ ID NO: 6920 - DNA, 80 bp, synthetic construct
  misc_feature 1..80: note = Synthetic: >NC_001959.2-cand-5450-5529
  source 1..80: mol_type = other DNA
tggatcctgtagcaggttcttcgacagcagtcgcgactgctggacaagttaatcctattgatccctggataattaataat

SEQ ID NO: 6921 - DNA, 80 bp, synthetic construct
  misc_feature 1..80: note = Synthetic: >NC_001959.2-cand-5530-5609
  source 1..80: mol_type = other DNA
tttgtgcaagccccccaaggtgaatttactatttccccaaataatacccccggtgatgttttgtttgatttgagtttggg

SEQ ID NO: 6922 - DNA, 80 bp, synthetic construct
  misc_feature 1..80: note = Synthetic: >NC_002017.1-cand-10-89
  source 1..80: mol_type = other DNA
aaaataaaaacaaccaaaatgaaggcaaacctactggtcctgttatgtgcacttgcagctgcagatgcagacacaatatg

SEQ ID NO: 6923 - DNA, 80 bp, synthetic construct
  misc_feature 1..80: note = Synthetic: >NC_002017.1-cand-80-159
  source 1..80: mol_type = other DNA
acacaatatgtataggctaccatgcgaacaattcaaccgacactgttgacacagtgctcgagaagaatgtgacagtgaca

SEQ ID NO: 6924 - DNA, 80 bp, synthetic construct
  misc_feature 1..80: note = Synthetic: >NC_002017.1-cand-150-229
  source 1..80: mol_type = other DNA
gacagtgacacactctgttaacctgctcgaagacagccacaacggaaaactatgtagattaaaaggaatagccccactac

SEQ ID NO: 6925 - DNA, 80 bp, synthetic construct
  misc_feature 1..80: note = Synthetic: >NC_002017.1-cand-240-319
  source 1..80: mol_type = other DNA
atgtaacatcgccggatggctcttgggaaacccagaatgcgacccactgcttccagtgagatcatggtcctacattgtag

SEQ ID NO: 6926 - DNA, 80 bp, synthetic construct
  misc_feature 1..80: note = Synthetic: >NC_002017.1-cand-280-359
  source 1..80: mol_type = other DNA
gacccactgcttccagtgagatcatggtcctacattgtagaaacaccaaactctgagaatggaatatgttatccaggaga

SEQ ID NO: 6927 - DNA, 80 bp, synthetic construct
  misc_feature 1..80: note = Synthetic: >NC_002017.1-cand-360-439
  source 1..80: mol_type = other DNA
tttcatcgactatgaggagctgagggagcaattgagctcagtgtcatcattcgaaagattcgaaatatttcccaaagaaa

SEQ ID NO: 6928 - DNA, 80 bp, synthetic construct
  misc_feature 1..80: note = Synthetic: >NC_002017.1-cand-410-489
  source 1..80: mol_type = other DNA
tcgaaagattcgaaatatttcccaaagaaagctcatggcccaaccacaacacaaccaaaggagtaacggcagcatgctcc

SEQ ID NO: 6929 - DNA, 80 bp, synthetic construct
  misc_feature 1..80: note = Synthetic: >NC_002017.1-cand-520-599
  source 1..80: mol_type = other DNA
ttgctatggctgacggagaaggagggctcatacccaaagctgaaaaattcttatgtgaacaagaaagggaaagaagtcct

SEQ ID NO: 6930 - DNA, 80 bp, synthetic construct
  misc_feature 1..80: note = Synthetic: >NC_002017.1-cand-610-689
  source 1..80: mol_type = other DNA
ggtattcatcacccgtctaacagtaaggatcaacagaatatctatcagaatgaaaatgcttatgtctctgtagtgacttc

SEQ ID NO: 6931 - DNA, 80 bp, synthetic construct
  misc_feature 1..80: note = Synthetic: >NC_002017.1-cand-680-759
  source 1..80: mol_type = other DNA
tagtgacttcaaattataacaggagatttaccccggaaatagcagaaagacccaaagtaagagatcaagctgggaggatg

SEQ ID NO: 6932 - DNA, 80 bp, synthetic construct
  misc_feature 1..80: note = Synthetic: >NC_002017.1-cand-760-839
  source 1..80: mol_type = other DNA
aactattactggaccttgctaaaacccggagacacaataatatttgaggcaaatggaaatctaatagcaccaaggtatgc

SEQ ID NO: 6933 - DNA, 80 bp, synthetic construct
  misc_feature 1..80: note = Synthetic: >NC_002017.1-cand-840-919
  source 1..80: mol_type = other DNA
tttcgcactgagtagaggctttgggtccggcatcatcacctcaaacgcatcaatgcatgagtgtaacacgaagtgtcaaa

SEQ ID NO: 6934 - DNA, 80 bp, synthetic construct
  misc_feature 1..80: note = Synthetic: >NC_002017.1-cand-930-1009
  source 1..80: mol_type = other DNA
agctataaacagcagtctccctttccagaatatacacccagtcacaataggagagtgcccaaaatacgtcaggagtgcca

SEQ ID NO: 6935 - DNA, 80 bp, synthetic construct
  misc_feature 1..80: note = Synthetic: >NC_002017.1-cand-1010-1089
  source 1..80: mol_type = other DNA
aattgaggatggttacaggactaaggaacattccgtccattcaatccagaggtctatttggagccattgccggttttatt

SEQ ID NO: 6936 - DNA, 80 bp, synthetic construct
  misc_feature 1..80: note = Synthetic: >NC_002017.1-cand-1100-1179
  source 1..80: mol_type = other DNA
ggactggaatgatagatggatggtacggttatcatcatcagaatgaacagggatcaggctatgcagcggatcaaaaaagc

SEQ ID NO: 6937 - DNA, 80 bp, synthetic construct
  misc_feature 1..80: note = Synthetic: >NC_002017.1-cand-1180-1259
  source 1..80: mol_type = other DNA
acacaaaatgccattaacgggattacaaacaaggtgaactctgttatcgagaaaatgaacattcaattcacagctgtggg

SEQ ID NO: 6938 - DNA, 80 bp, synthetic construct
  misc_feature 1..80: note = Synthetic: >NC_003310.1-cand-57840-57919
  source 1..80: mol_type = other DNA
ctcgttaaacagaatttctgtcaatggaccccaacatcgttgacctattaagttttgattgatttttccgtgtaaggcgt

SEQ ID NO: 6939 - DNA, 80 bp, synthetic construct
  misc_feature 1..80: note = Synthetic: >NC_003310.1-cand-57920-57999
  source 1..80: mol_type = other DNA
atctagtcagatcgtatagcctatccaataatccatcgtctgtgcgtagatcacatcgtacactttttaattttctatag

SEQ ID NO: 6940 - DNA, 80 bp, synthetic construct
  misc_feature 1..80: note = Synthetic: >NC_003310.1-cand-58000-58079
  source 1..80: mol_type = other DNA
aagagtgacagacatctggagcaattacagacagcaatttctttattctctacagatgtaagatacttgaagacattcct

SEQ ID NO: 6941 - DNA, 80 bp, synthetic construct
  misc_feature 1..80: note = Synthetic: >NC_003310.1-cand-58080-58159
  source 1..80: mol_type = other DNA
atgatgatgcagaattttggataacacggtattgatggtatctgttaccataattcctttgactgatagtgtcaaagtac

SEQ ID NO: 6942 - DNA, 80 bp, synthetic construct
  misc_feature 1..80: note = Synthetic: >NC_003310.1-cand-58160-58239
  source 1..80: mol_type = other DNA
aagatttccaatcttttgcaattttcagtaccattatctttgttttgatatctatatcagacagcatggtacgtctgaca

SEQ ID NO: 6943 - DNA, 80 bp, synthetic construct
  misc_feature 1..80: note = Synthetic: >NC_003310.1-cand-58240-58319
  source 1..80: mol_type = other DNA
acacagggattaagacggaaagatgaaatgattctctcaacatcttcaatagataccttgctattttttttggcattatc

SEQ ID NO: 6944 - DNA, 80 bp, synthetic construct
  misc_feature 1..80: note = Synthetic: >NC_003310.1-cand-58400-58479
  source 1..80: mol_type = other DNA
ttcttattctatcaccagattgcatggtgatttgtcttctttcttttatcatgatgtaatctctaaattcatcggcaaat

SEQ ID NO: 6945 - DNA, 80 bp, synthetic construct
  misc_feature 1..80: note = Synthetic: >NC_003310.1-cand-58560-58639
  source 1..80: mol_type = other DNA
tttgtattccaaattaaacatggcaacggatttaattttatattcctctattaagtcctcgtcgataataacagaatgta

SEQ ID NO: 6946 - DNA, 80 bp, synthetic construct
  misc_feature 1..80: note = Synthetic: >NC_003310.1-cand-58640-58719
  source 1..80: mol_type = other DNA
gataatcatttaatccatcgtacattgttggaagatgctcgttgacaaaatctttaattgtcttgatgaaggtgggacta

SEQ ID NO: 6947 - DNA, 80 bp, synthetic construct
  misc_feature 1..80: note = Synthetic: >NC_003310.1-cand-59200-59279
  source 1..80: mol_type = other DNA
atttcaggaggaaagaacctaacattgagaatatctgaattaatagcttccagatacagtgattttggcaatagtccgtg

SEQ ID NO: 6948 - DNA, 80 bp, synthetic construct
  misc_feature 1..80: note = Synthetic: >NC_003310.1-cand-59360-59439
  source 1..80: mol_type = other DNA
aagccttcctcgcaaattccggatacatgaacatgtcgccaacatgattaagtattgtttttcattatttttatattttc

SEQ ID NO: 6949 - DNA, 80 bp, synthetic construct
  misc_feature 1..80: note = Synthetic: >NC_003310.1-cand-59680-59759
  source 1..80: mol_type = other DNA
tgcgtttctacaaaaaggacacgtaaacttgacaaaaattgtcactttgttattggccaacctttgttgtacaaattcct

SEQ ID NO: 6950 - DNA, 80 bp, synthetic construct
  misc_feature 1..80: note = Synthetic: >NC_003310.1-cand-59760-59839
  source 1..80: mol_type = other DNA
cggccatttttaatatttaagtgatacaaaactatctcgacttatttaactctttagtcgagatatatggacacagatag

SEQ ID NO: 6951 - DNA, 80 bp, synthetic construct
  misc_feature 1..80: note = Synthetic: >NC_003310.1-cand-59840-59919
  source 1..80: mol_type = other DNA
ttatatgataaccaactacagaagacaaacgctataaaaaacataattacaacgagcatatttataaatatttttattca

SEQ ID NO: 6952 - DNA, 80 bp, synthetic construct
  misc_feature 1..80: note = Synthetic: >NC_003310.1-cand-59920-59999
  source 1..80: mol_type = other DNA
gtattacttgatatagtaatattaggtacagtcaaacattcaaccactctagatacattaactctctcattttctttaac

SEQ ID NO: 6953 - DNA, 80 bp, synthetic construct
  misc_feature 1..80: note = Synthetic: >NC_003310.1-cand-60320-60399
  source 1..80: mol_type = other DNA
taatagaactcttttcatccagttgaatggattcgtccttaaccaactgattaatgagatcttctattttatcattttcc

SEQ ID NO: 6954 - DNA, 80 bp, synthetic construct
  misc_feature 1..80: note = Synthetic: >NC_003310.1-cand-65920-65999
  source 1..80: mol_type = other DNA
atgtataaacttttttcaaagatttaaaacttttaggtggagttctggtacacaatatcataaacaaactaataaacatc

SEQ ID NO: 6955 - DNA, 80 bp, synthetic construct
  misc_feature 1..80: note = Synthetic: >NC_003310.1-cand-66560-66639
  source 1..80: mol_type = other DNA
atcatcgattttcaaatccatttgtgagaagtctatcgccttagatactttttcccgtagttgaggtttaaagaaatacg

SEQ ID NO: 6956 - DNA, 80 bp, synthetic construct
  misc_feature 1..80: note = Synthetic: >NC_003310.1-cand-66640-66719
  source 1..80: mol_type = other DNA
ctaacggtatactagtaggtaactcaaagacatcatatatagaatggtaacgcgtcgttaactcgtcggttaactctttc

SEQ ID NO: 6957 - DNA, 80 bp, synthetic construct
  misc_feature 1..80: note = Synthetic: >NC_003310.1-cand-66720-66799
  source 1..80: mol_type = other DNA
ttttgatcgagttcgtcgctactattgggtctgctcaggtgccccgactctactagttccaacatcataccgataggaat

SEQ ID NO: 6958 - DNA, 80 bp, synthetic construct
  misc_feature 1..80: note = Synthetic: >NC_003310.1-cand-67050-67129
  source 1..80: mol_type = other DNA
caaatattcacaagatgaattcagtaatatgagtaaaacggaacgtgataatttctcattggctgtgtttccagtgataa

SEQ ID NO: 6959 - DNA, 80 bp, synthetic construct
  misc_feature 1..80: note = Synthetic: >NC_003310.1-cand-67210-67289
  source 1..80: mol_type = other DNA
tctcctccatcactaggaaaacccgcacatataaacctaatgtcgaagcaatatatatatagtgagtatgcaataagctt

SEQ ID NO: 6960 - DNA, 80 bp, synthetic construct
  misc_feature 1..80: note = Synthetic: >NC_003310.1-cand-68090-68169
  source 1..80: mol_type = other DNA
catcttccagaatggcatatatagaagaagaaaagagaaatttagttaccgctatacagatgtatactcctcctgatgga

SEQ ID NO: 6961 - DNA, 80 bp, synthetic construct
  misc_feature 1..80: note = Synthetic: >NC_003310.1-cand-68250-68329
  source 1..80: mol_type = other DNA
tatgtatattattcatggtaaggtcttagatatagacgaaatattagaaaaagtgtattcatcacctaatgtatcgataa

SEQ ID NO: 6962 - DNA, 80 bp, synthetic construct
  misc_feature 1..80: note = Synthetic: >NC_003310.1-cand-68330-68409
  source 1..80: mol_type = other DNA
ttatttctactccttatttggaatccagcgttactatacgcaatgttacacacatttatgatatgggtagagtttttgtc

SEQ ID NO: 6963 - DNA, 80 bp, synthetic construct
  misc_feature 1..80: note = Synthetic: >NC_003310.1-cand-68490-68569
  source 1..80: mol_type = other DNA
tcctggaacatacgtatatttctatgatctgtcttatatgaagtctatacagcgaatagattcagaatttctacataatt

SEQ ID NO: 6964 - DNA, 80 bp, synthetic construct
  misc_feature 1..80: note = Synthetic: >NC_003310.1-cand-69060-69139
  source 1..80: mol_type = other DNA
aaaaattttccacatctccttttgtagacacgactaaacattttgcagaaaaaagtttattattatttagataatcgtat

SEQ ID NO: 6965 - DNA, 80 bp, synthetic construct
  misc_feature 1..80: note = Synthetic: >NC_003310.1-cand-69220-69299
  source 1..80: mol_type = other DNA
taatcctttcttcttgagatcccacatcatttcaaccaaagacgttttatccaatgatttacctcgtactataccacata

SEQ ID NO: 6966 - DNA, 80 bp, synthetic construct
  misc_feature 1..80: note = Synthetic: >NC_003310.1-cand-69300-69379
  source 1..80: mol_type = other DNA
caaaactagattttgcagtgatgtcgtacctggtattcctaccaaacaaaattttacttttagttcttttagaaaattct

SEQ ID NO: 6967 - DNA, 80 bp, synthetic construct
  misc_feature 1..80: note = Synthetic: >NC_003310.1-cand-69590-69669
  source 1..80: mol_type = other DNA
gacaatgataaagttatcatgtccatgggagatgcgtctccgtatcgtataaatatttcattagatgttagacgcttcat

SEQ ID NO: 6968 - DNA, 80 bp, synthetic construct
  misc_feature 1..80: note = Synthetic: >NC_003310.1-cand-69780-69859
  source 1..80: mol_type = other DNA
ttgggtaaataactatgatatctctattaattatagatgcatatatttcattcgtcaaggatattaatatcgacttacta

SEQ ID NO: 6969 - DNA, 80 bp, synthetic construct
  misc_feature 1..80: note = Synthetic: >NC_003310.1-cand-70100-70179
  source 1..80: mol_type = other DNA
tacagaatccctaaaatattatctaatgtgggattaatccttaccataactgtataaaatggagccggagtcataactat

SEQ ID NO: 6970 - DNA, 80 bp, synthetic construct
  misc_feature 1..80: note = Synthetic: >NC_003310.1-cand-79760-79839
  source 1..80: mol_type = other DNA
gattcaccaataaaaataaactagagaaacttagtactaataaggaactagaatcgtatagttctagccctcttcaagaa

SEQ ID NO: 6971 - DNA, 80 bp, synthetic construct
  misc_feature 1..80: note = Synthetic: >NC_003310.1-cand-80720-80799
  source 1..80: mol_type = other DNA
aaagttgaacaataattaattctttattgttatcatgaacggcggacatattcagttgataatcggccccatgctttcag

SEQ ID NO: 6972 - DNA, 80 bp, synthetic construct
  misc_feature 1..80: note = Synthetic: >NC_003310.1-cand-81200-81279
  source 1..80: mol_type = other DNA
acgattaggtgcagaaaccgagatagaaataataggaggtaatgatatgtatcaatctgtgtgtagaaagtgttacatcg

SEQ ID NO: 6973 - DNA, 80 bp, synthetic construct
  misc_feature 1..80: note = Synthetic: >NC_003310.1-cand-81680-81759
  source 1..80: mol_type = other DNA
actctagtgactcggtttgttgatgaggaatatctacgatccatcaaaaaacaactacatccttctaagattattttaat

SEQ ID NO: 6974 - DNA, 80 bp, synthetic construct
  misc_feature 1..80: note = Synthetic: >NC_003310.1-cand-81760-81839
  source 1..80: mol_type = other DNA
ttctgatgtgagatccaaacgaggaggaaatgaacctagtactgcggatttactaagtaattatgctctacaaaatgtca

SEQ ID NO: 6975 - DNA, 80 bp, synthetic construct
  misc_feature 1..80: note = Synthetic: >NC_003310.1-cand-81840-81919
  source 1..80: mol_type = other DNA
tgattagtattttaaaccccgtggcgtctagtcttaaatggagatgcccgtttccagatcaatggatcaaggacttttat

SEQ ID NO: 6976 - DNA, 80 bp, synthetic construct
  misc_feature 1..80: note = Synthetic: >NC_003310.1-cand-82240-82319
  source 1..80: mol_type = other DNA
tccaacgacatcaactgaaaaagttagtcatgaaccaatacaacgtaaaatatctagcaaagattctatgtctaaaaaca

SEQ ID NO: 6977 - DNA, 80 bp, synthetic construct
  misc_feature 1..80: note = Synthetic: >NC_003310.1-cand-82580-82659
  source 1..80: mol_type = other DNA
ggtaatatctgacttatttcctagctttgttagactagatactacagaaactaatatagttaatagtgtactacaaacag

SEQ ID NO: 6978 - DNA, 80 bp, synthetic construct
  misc_feature 1..80: note = Synthetic: >NC_003310.1-cand-82820-82899
  source 1..80: mol_type = other DNA
tgattaatcaattagtagagatgagataagaacattataataatcaataatatatcttatatctgtttagaaaaatgcta

SEQ ID NO: 6979 - DNA, 80 bp, synthetic construct
  misc_feature 1..80: note = Synthetic: >NC_003310.1-cand-83140-83219
  source 1..80: mol_type = other DNA
cgcttcgtttacatggctcgtaccaacaataatagggtaatcttgtatctattcctatccgtactatacttttatcagga

SEQ ID NO: 6980 - DNA, 80 bp, synthetic construct
  misc_feature 1..80: note = Synthetic: >NC_003310.1-cand-83450-83529
  source 1..80: mol_type = other DNA
tacagatattatcattagtcatattaaaaatgacgacgatatcggtaccgttaaagatggtagactaggtgctatggatg

SEQ ID NO: 6981 - DNA, 80 bp, synthetic construct
  misc_feature 1..80: note = Synthetic: >NC_003310.1-cand-83590-83669
  source 1..80: mol_type = other DNA
taagtatttataaaactcatatagttaagcctgaatttatttcagaaattattcgtttactgaatcatatatgtattcat

SEQ ID NO: 6982 - DNA, 80 bp, synthetic construct
  misc_feature 1..80: note = Synthetic: >NC_003310.1-cand-84180-84259
  source 1..80: mol_type = other DNA
tcatatatcacatccggcaaaaataatatgattagaagttatatcgtcgctcggcgaaagatcagaccagctagatctgt

SEQ ID NO: 6983 - DNA, 80 bp, synthetic construct
  misc_feature 1..80: note = Synthetic: >NC_003310.1-cand-84260-84339
  source 1..80: mol_type = other DNA
aattggtcccagtacatctatcaccgttaatgaggtaggaatgcccacatatattagaaatacacttacagaaaagatat

SEQ ID NO: 6984 - DNA, 80 bp, synthetic construct
  misc_feature 1..80: note = Synthetic: >NC_003310.1-cand-84340-84419
  source 1..80: mol_type = other DNA
ttgttaatgcctttacagtggataaagttaaacaactattagcatcaaaccaagttaaattttactttaataaacgatta

SEQ ID NO: 6985 - DNA, 80 bp, synthetic construct
  misc_feature 1..80: note = Synthetic: >NC_003310.1-cand-84670-84749
  source 1..80: mol_type = other DNA
agcaaaatcctaaagtcgtagttgaacaaagtattcttatgtatccgacgacgttactcaaacacgatattcatggagcc

SEQ ID NO: 6986 - DNA, 80 bp, synthetic construct
  misc_feature 1..80: note = Synthetic: >NC_003461.1-cand-8350-8429
  source 1..80: mol_type = other DNA
tctcctgatgcagtcaatgttgctacaaccacactgtacgcaaacacatcacgtgttaatcccaccataatgtactcaaa

SEQ ID NO: 6987 - DNA, 80 bp, synthetic construct
  misc_feature 1..80: note = Synthetic: >NC_003461.1-cand-8430-8509
  source 1..80: mol_type = other DNA
tacctcagaaattatcaacatgctaagactcaagaatgtacaactagaggcagcatacactactacatcatgtatcactc

SEQ ID NO: 6988 - DNA, 80 bp, synthetic construct
  misc_feature 1..80: note = Synthetic: >NC_003461.1-cand-8510-8589
  source 1..80: mol_type = other DNA
atttcgggaagggctactgcttccacattgttgaaatcaaccaagccagccttaataccttacaacctatgttgttcaag

SEQ ID NO: 6989 - DNA, 80 bp, synthetic construct
  misc_feature 1..80: note = Synthetic: >NC_003461.1-cand-8590-8669
  source 1..80: mol_type = other DNA
acaagtatccctaaaatatgtaaaatcacatcttgagcagatcaagacccaacactatatcaattatgtgaaaaccagat

SEQ ID NO: 6990 - DNA, 80 bp, synthetic construct
  misc_feature 1..80: note = Synthetic: >NC_003461.1-cand-8670-8749
  source 1..80: mol_type = other DNA
atgatgtataaaaatttaaaaacaaagcatgaatagacatttatatgacaaatagaataagaaaaacttagggttaatgc

SEQ ID NO: 6991 - DNA, 80 bp, synthetic construct
  misc_feature 1..80: note = Synthetic: >NC_003461.1-cand-8750-8829
  source 1..80: mol_type = other DNA
ctgcctatttgtcaaatatggataaacaggagtcaactcagaattcctcagacatcttatatccagaatgtcacttgaac

SEQ ID NO: 6992 - DNA, 80 bp, synthetic construct
  misc_feature 1..80: note = Synthetic: >NC_003461.1-cand-8830-8909
  source 1..80: mol_type = other DNA
tctccgattgtaaaaagcaagattgctcaacttcacgttttgctagatatcaatcaaccctatgatttaaaagataacag

SEQ ID NO: 6993 - DNA, 80 bp, synthetic construct
  misc_feature 1..80: note = Synthetic: >NC_003461.1-cand-8910-8989
  source 1..80: mol_type = other DNA
tataataaatatcaccaaatacaaaatcagaaatggaggtttatcgccccggcagatcaaaatcagatcgctaggcaaaa

SEQ ID NO: 6994 - DNA, 80 bp, synthetic construct
  misc_feature 1..80: note = Synthetic: >NC_003461.1-cand-8990-9069
  source 1..80: mol_type = other DNA
tccttaaacaagaaattaaggatattgatcgttacacttttgaaccttatccgattttctcattagagttactcagactg

SEQ ID NO: 6995 - DNA, 80 bp, synthetic construct
  misc_feature 1..80: note = Synthetic: >NC_003461.1-cand-9070-9149
  source 1..80: mol_type = other DNA
gatatcccagaaatatgtgacaaaataagatccattttttcagtctctgatagattaataagagaactatcatctggatt

SEQ ID NO: 6996 - DNA, 80 bp, synthetic construct
  misc_feature 1..80: note = Synthetic: >NC_003461.1-cand-9150-9229
  source 1..80: mol_type = other DNA
tcaagaattgtggttaaatattcttagacaattaggctgtgttgaagggaaagagggatttgactcattaaaggatgtag

SEQ ID NO: 6997 - DNA, 80 bp, synthetic construct
  misc_feature 1..80: note = Synthetic: >NC_003461.1-cand-9230-9309
  source 1..80: mol_type = other DNA
atatcatcccagatataactgataaatataataaaaacacatggtatcgcccattcttaacatggtttagcatcaaatat

SEQ ID NO: 6998 - DNA, 80 bp, synthetic construct
  misc_feature 1..80: note = Synthetic: >NC_003461.1-cand-9340-9419
  source 1..80: mol_type = other DNA
gggaaccatttagatgtctcaaattctcacaattttcttgactgtaaatcatatattttgattatatatagagatttagt

SEQ ID NO: 6999 - DNA, 80 bp, synthetic construct
  misc_feature 1..80: note = Synthetic: >NC_003461.1-cand-9390-9469
  source 1..80: mol_type = other DNA
atatattttgattatatatagagatttagtgataataataaataaattaaaattaaccggttatgtccttacacctgaat

SEQ ID NO: 7000 - DNA, 80 bp, synthetic construct
  misc_feature 1..80: note = Synthetic: >NC_003461.1-cand-9470-9549
  source 1..80: mol_type = other DNA
tagtattaatgtattgtgatgttgtcgaaggaagatggaatatgtcttcagctggacgactcgataaaaggtcatcaaaa

SEQ ID NO: 7001 - DNA, 80 bp, synthetic construct
  misc_feature 1..80: note = Synthetic: >NC_003461.1-cand-9570-9649
  source 1..80: mol_type = other DNA
attatgggagcttatcgactctttatttcccaatcttggtgaggatgtatataatattatatcactactagaacctttat

SEQ ID NO: 7002 - DNA, 80 bp, synthetic construct
  misc_feature 1..80: note = Synthetic: >NC_003899.1-cand-10650-10729
  source 1..80: mol_type = other DNA
ctacaacgaccccaggctggtatcgtgcacacacctttcacccaggcgccctccggcttcgaacgatggaaaagggacaa

SEQ ID NO: 7003 - DNA, 80 bp, synthetic construct
  misc_feature 1..80: note = Synthetic: >NC_003899.1-cand-10740-10819
  source 1..80: mol_type = other DNA
ttgaacgacgtagccccgtttggctgttcgattgccctggagccgctccgtgcagaaaattgtgcagtgggaagcatccc

SEQ ID NO: 7004 - DNA, 80 bp, synthetic construct
  misc_feature 1..80: note = Synthetic: >NC_003899.1-cand-10820-10899
  source 1..80: mol_type = other DNA
tatatctatagatatacccgatgcggcttttaccagaatatctgaaacaccgacagtctcagacctggaatgcaaaatta

SEQ ID NO: 7005 - DNA, 80 bp, synthetic construct
  misc_feature 1..80: note = Synthetic: >NC_003899.1-cand-10910-10989
  source 1..80: mol_type = other DNA
ttatgcctccgatttcggtggtatagccaccgttgcctacaaatccagtaaagcaggaaactgtccaattcattctccat

SEQ ID NO: 7006 - DNA, 80 bp, synthetic construct
  misc_feature 1..80: note = Synthetic: >NC_003899.1-cand-10990-11069
  source 1..80: mol_type = other DNA
caggtgttgcagttattaaagagaatgacgtcactcttgctgagagcggatcatttacattccacttctccactgcaaac

SEQ ID NO: 7007 - DNA, 80 bp, synthetic construct
  misc_feature 1..80: note = Synthetic: >NC_003899.1-cand-11070-11149
  source 1..80: mol_type = other DNA
atccatcctgcttttaagctgcaggtctgcactagtgcagttacctgcaaaggagattgtaagccaccgaaagaccacat

SEQ ID NO: 7008 - DNA, 80 bp, synthetic construct
  misc_feature 1..80: note = Synthetic: >NC_003899.1-cand-11150-11229
  source 1..80: mol_type = other DNA
cgtcgattatccagcacaacatactgaatcctttacgtcggcgatatccgccactgcgtggtcgtggctaaaagtgctgg

SEQ ID NO: 7009 - DNA, 80 bp, synthetic construct
  misc_feature 1..80: note = Synthetic: >NC_003899.1-cand-11260-11339
  source 1..80: mol_type = other DNA
ggcttattgctacagcagtggttgccctagttctgttcttccatagacattaacatcttgtcaaccacataacactatag

SEQ ID NO: 7010 - DNA, 80 bp, synthetic construct
  misc_feature 1..80: note = Synthetic: >NC_003899.1-cand-11310-11389
  source 1..80: mol_type = other DNA
taacatcttgtcaaccacataacactataggcagtgtataaggctgtcttactaaacactaaattcaccctagttcgatg

SEQ ID NO: 7011 - DNA, 80 bp, synthetic construct
  misc_feature 1..80: note = Synthetic: >NC_003899.1-cand-11390-11469
  source 1..80: mol_type = other DNA
tacttccgagctatggtgacggtggtgcataacgccgccgatgcagtgcataaggctgctatattaccacattataacac

SEQ ID NO: 7012 - DNA, 80 bp, synthetic construct
  misc_feature 1..80: note = Synthetic: >NC_003899.1-cand-11470-11549
  source 1..80: mol_type = other DNA
taagggcagtgcataatgctgctcctaagtaatttaatacacactttataatcaggcataattgccgcatatacaattac

SEQ ID NO: 7013 - DNA, 80 bp, synthetic construct
  misc_feature 1..80: note = Synthetic: >NC_003899.1-cand-11550-11629
  source 1..80: mol_type = other DNA
actacaggtaatataccgcctcctataaacactacaggcagcgcataatgctgtcttttatatcaatttacaaaatcata

SEQ ID NO: 7014 - DNA, 80 bp, synthetic construct
  misc_feature 1..80: note = Synthetic: >NC_003908.1-cand-0-79
  source 1..80: mol_type = other DNA
tacaaactaatcgatccaatatggaaagaattcacgttgacttagatgctgacagcccgtatgtcaagtcgttacagcgg

SEQ ID NO: 7015 - DNA, 80 bp, synthetic construct
  misc_feature 1..80: note = Synthetic: >NC_003908.1-cand-80-159
  source 1..80: mol_type = other DNA
acgtttccacaatttgagatcgaagcaaggcaggtcactgacaatgaccatgccaatgccagagcgttttcgcatgtggc

SEQ ID NO: 7016 - DNA, 80 bp, synthetic construct
  misc_feature 1..80: note = Synthetic: >NC_003908.1-cand-160-239
  source 1..80: mol_type = other DNA
aacaaagctcattgagagcgaagtcgaccgggaccaagttatcttggacattggaagtgcgcccgtcagacatgcacatt

SEQ ID NO: 7017 - DNA, 80 bp, synthetic construct
  misc_feature 1..80: note = Synthetic: >NC_003908.1-cand-250-329
  source 1..80: mol_type = other DNA
ctatcattgtatctgccctatgataagcgctgaagacccggacagactacaacggtatgcagaaagacttaagaaaagtg

SEQ ID NO: 7018 - DNA, 80 bp, synthetic construct
  misc_feature 1..80: note = Synthetic: >NC_003908.1-cand-5450-5529
  source 1..80: mol_type = other DNA
cctagatcgacggcttccgcacctccagttccaaagccacgcaggactaagtaccaacaaccaccaggagtcgctagagc

SEQ ID NO: 7019 - DNA, 80 bp, synthetic construct
  misc_feature 1..80: note = Synthetic: >NC_003908.1-cand-5530-5609
  source 1..80: mol_type = other DNA
gatctcagaagcggagttggacgagtacatccgtcaacactccaactgacggtatgaagcgggagcgtatattttctcat

SEQ ID NO: 7020 - DNA, 80 bp, synthetic construct
  misc_feature 1..80: note = Synthetic: >NC_003908.1-cand-5610-5689
  source 1..80: mol_type = other DNA
cggaaacaggccaaggtcaccttcaacagaaatcagtacgtcaatgtaaactacaagaacctatattggatcgggccgtc

SEQ ID NO: 7021 - DNA, 80 bp, synthetic construct
  misc_feature 1..80: note = Synthetic: >NC_003908.1-cand-5690-5769
  source 1..80: mol_type = other DNA
catgagaagtattacgccccgcgcctcgatctcgaaagagagaaaatgttacagaagaaactgcaattatgcgcctctga

SEQ ID NO: 7022 - DNA, 80 bp, synthetic construct
  misc_feature 1..80: note = Synthetic: >NC_003908.1-cand-5770-5849
  source 1..80: mol_type = other DNA
aggaaatagaagcaggtatcaatcacgaaaagtagaaaatatgaaagcaattacagcggagcgactcatttctggattgg

SEQ ID NO: 7023 - DNA, 80 bp, synthetic construct
  misc_feature 1..80: note = Synthetic: >NC_003908.1-cand-5850-5929
  source 1..80: mol_type = other DNA
gcacatatctatcatcagaagtgaatcctgtcgagtgttacagagtcaattatcctgtaccaatctactcgtcaacggta

SEQ ID NO: 7024 - DNA, 80 bp, synthetic construct
  misc_feature 1..80: note = Synthetic: >NC_003908.1-cand-5930-6009
  source 1..80: mol_type = other DNA
attaacaggtttacatctgcagaggtcgcggttaaaacgtgcaacttagttatccaagagaattaccctacagtagccag

SEQ ID NO: 7025 - DNA, 80 bp, synthetic construct
  misc_feature 1..80: note = Synthetic: >NC_003908.1-cand-6010-6089
  source 1..80: mol_type = other DNA
ttattgtataacagatgaatacgatgcgtatcttgacatggtggacggcgcatcgtgctgtctagatacagccacttttt

SEQ ID NO: 7026 - DNA, 80 bp, synthetic construct
  misc_feature 1..80: note = Synthetic: >NC_003908.1-cand-6100-6179
  source 1..80: mol_type = other DNA
actgagaagctacccaaagaagcatagctatttgcagccagagataagatcagccgtcccatcgcctatacagaatacat

SEQ ID NO: 7027 - DNA, 80 bp, synthetic construct
  misc_feature 1..80: note = Synthetic: >NC_003908.1-cand-6180-6259
  source 1..80: mol_type = other DNA
tacaaaatgtattggctgcagctactaaaaggaattgcaacgttacccaaatgcgagaattacctgtcttagattcggcg

SEQ ID NO: 7028 - DNA, 80 bp, synthetic construct
  misc_feature 1..80: note = Synthetic: >NC_003908.1-cand-6260-6339
  source 1..80: mol_type = other DNA
gcatttaatgttgattgtttcaagaaatacgcatgcaatgatgagtactgggatacctttcgcgataaccctattcggct

SEQ ID NO: 7029 - DNA, 80 bp, synthetic construct
  misc_feature 1..80: note = Synthetic: >NC_003908.1-cand-6340-6419
  source 1..80: mol_type = other DNA
aactacagagaacgttacgcaatatgtgacaaagctgaaagggccgaaagcagcagcattgtttgcgaatactcataatc

SEQ ID NO: 7030 - DNA, 80 bp, synthetic construct
  misc_feature 1..80: note = Synthetic: >NC_003908.1-cand-6420-6499
  source 1..80: mol_type = other DNA
taaaaccgttgcaggagataccaatggatcaattcgtcatggatctaaagagagatgtcaaagttactcccggcacgaaa

SEQ ID NO: 7031 - DNA, 80 bp, synthetic construct
  misc_feature 1..80: note = Synthetic: >NC_003908.1-cand-6500-6579
  source 1..80: mol_type = other DNA
catacagaggagcggcctaaggtgcaggttattcaggctgcagatccccttgctaccgcttacctttgcgggatccatcg

SEQ ID NO: 7032 - DNA, 80 bp, synthetic construct
  misc_feature 1..80: note = Synthetic: >NC_003908.1-cand-6580-6659
  source 1..80: mol_type = other DNA
ggaattagtccgtagactgaatgcggtgcttctgccaaatatccatactctcttcgacatgtcagcggaagattttgatg

SEQ ID NO: 7033 - DNA, 80 bp, synthetic construct
  misc_feature 1..80: note = Synthetic: >NC_003908.1-cand-6660-6739
  source 1..80: mol_type = other DNA
cgattattgctgaacatttccaccacggcgacccagtattggaaacggacatcgcgtcgtttgataaaagcgaagacgac

SEQ ID NO: 7034 - DNA, 80 bp, synthetic construct
  misc_feature 1..80: note = Synthetic: >NC_005082.1-cand-40-119
  source 1..80: mol_type = other DNA
gattttcacaacttgaacccatttacaaacatgggcaattcaaaatctaaatccaacccatccagttcctcagagtctca

SEQ ID NO: 7035 - DNA, 80 bp, synthetic construct
  misc_feature 1..80: note = Synthetic: >NC_005082.1-cand-160-239
  source 1..80: mol_type = other DNA
attcacagtctctatgggaggtacaactgcaagtgttgctggtttgctgacaagaatctgattaaatgctctgatcatta

SEQ ID NO: 7036 - DNA, 80 bp, synthetic construct
  misc_feature 1..80: note = Synthetic: >NC_005082.1-cand-250-329
  source 1..80: mol_type = other DNA
aggtgtttaaatgtcatgctgaaaaactctgatctttgcaacatttgttgggagcagctgcccacatgcatcacagttcc

SEQ ID NO: 7037 - DNA, 80 bp, synthetic construct
  misc_feature 1..80: note = Synthetic: >NC_005082.1-cand-310-389
  source 1..80: mol_type = other DNA
cccacatgcatcacagttccggaggagccaagcgctccaccggaatgaatgcgggtggcgtagatcatcactcccacccc

SEQ ID NO: 7038 - DNA, 80 bp, synthetic construct
  misc_feature 1..80: note = Synthetic: >NC_005082.1-cand-430-509
  source 1..80: mol_type = other DNA
tgttgctggtcctctgtggcctactcaatttcggtgactgaatttgacagattgatgggtttacaggtgatgcctttgag

SEQ ID NO: 7039 - DNA, 80 bp, synthetic construct
  misc_feature 1..80: note = Synthetic: >NC_005082.1-cand-520-599
  source 1..80: mol_type = other DNA
ccggagctgtctgatatcaccaagtcccttaaagatttgctatagcagacactaaagtccacaaactcgcaccattcgct

SEQ ID NO: 7040 - DNA, 80 bp, synthetic construct
  misc_feature 1..80: note = Synthetic: >NC_005082.1-cand-600-679
  source 1..80: mol_type = other DNA
gaagacctcaagagattttaacaatgattccctgtgcatctcatacattaaaaggaagtcctcctgagccatcttcactt

SEQ ID NO: 7041 - DNA, 80 bp, synthetic construct
  misc_feature 1..80: note = Synthetic: >NC_005082.1-cand-680-759
  source 1..80: mol_type = other DNA
ttagattgtttattctaatgaatggccacaaccctgtcagcaggctttgcacttccttttctgattctagggcccctaat

SEQ ID NO: 7042 - DNA, 80 bp, synthetic construct
  misc_feature 1..80: note = Synthetic: >NC_005082.1-cand-760-839
  source 1..80: mol_type = other DNA
gcctttaggatgacatccccagtgagttcgacttttatgctggaaagctttttgccatcagctaagatagagcctccatc

SEQ ID NO: 7043 - DNA, 80 bp, synthetic construct
  misc_feature 1..80: note = Synthetic: >NC_005082.1-cand-860-939
  source 1..80: mol_type = other DNA
aacactcaggccccacaatttcataagcatatctgtcgtcaatatgttcataaaatgtaccaaagtttagaagaattgat

SEQ ID NO: 7044 - DNA, 80 bp, synthetic construct
  misc_feature 1..80: note = Synthetic: >NC_005082.1-cand-920-999
  source 1..80: mol_type = other DNA
caaagtttagaagaattgatcccactgcatcgccctctttgtatgtttctgtgatttctgagtcagccagcagctcactt

SEQ ID NO: 7045 - DNA, 80 bp, synthetic construct
  misc_feature 1..80: note = Synthetic: >NC_005082.1-cand-1000-1079
  source 1..80: mol_type = other DNA
aggtttatgacttttttccctgtgaatataggctgggaagcaacaaggttaacaccatctaaaaattgatggccctcgat

SEQ ID NO: 7046 - DNA, 80 bp, synthetic construct
  misc_feature 1..80: note = Synthetic: >NC_005082.1-cand-1080-1159
  source 1..80: mol_type = other DNA
ggatccagatgctctcagcaccacattctttacagttgctaagcttggttctttctcaatgtcagtgatgttagtctcac

SEQ ID NO: 7047 - DNA, 80 bp, synthetic construct
  misc_feature 1..80: note = Synthetic: >NC_005082.1-cand-1160-1239
  source 1..80: mol_type = other DNA
attcaactgtgtaagaataaacaactgttcttgataaatggtactttgttgaatgccttttgtgctcaagttggatgtgc

SEQ ID NO: 7048 - DNA, 80 bp, synthetic construct
  misc_feature 1..80: note = Synthetic: >NC_005082.1-cand-1240-1319
  source 1..80: mol_type = other DNA
agcactatggaatacatatcttccacttgttctccatgaagcatttcagagttttgttcacccacaattgaatttgagtt

SEQ ID NO: 7049 - DNA, 80 bp, synthetic construct
  misc_feature 1..80: note = Synthetic: >NC_005082.1-cand-1320-1399
  source 1..80: mol_type = other DNA
tcttttaagtgaaactaaatgtatggtgggctcactaattgttgacaccacataacccattgttaaatcatccagcatca

SEQ ID NO: 7050 - DNA, 80 bp, synthetic construct
  misc_feature 1..80: note = Synthetic: >NC_005215.1-cand-720-799
  source 1..80: mol_type = other DNA
ttaagctggctgttgagttagagaaactgattactggtgtaagttgcacagaaaacagctttcaaggttactacatctgt

SEQ ID NO: 7051 - DNA, 80 bp, synthetic construct
  misc_feature 1..80: note = Synthetic: >NC_005215.1-cand-800-879
  source 1..80: mol_type = other DNA
tttatcgggaaacattcagagcccttatttgtgccaacaatggaggattataggtcagctgagttatttacccgtatggt

SEQ ID NO: 7052 - DNA, 80 bp, synthetic construct
  misc_feature 1..80: note = Synthetic: >NC_005215.1-cand-880-959
  source 1..80: mol_type = other DNA
tttaaatccgagaggtgaagatcatgaccctgatcaaaatggacaaggtttaatgagaatagctgggcctgttacagcta

SEQ ID NO: 7053 - DNA, 80 bp, synthetic construct
  misc_feature 1..80: note = Synthetic: >NC_005215.1-cand-950-1029
  source 1..80: mol_type = other DNA
gttacagctaaggtgccatctacagaaacaactgaaacaatgcaaggaattgcatttgctggagcaccaatgtatagctc

SEQ ID NO: 7054 - DNA, 80 bp, synthetic construct
  misc_feature 1..80: note = Synthetic: >NC_005215.1-cand-1030-1109
  source 1..80: mol_type = other DNA
tttctcaaccctcgtgaggaaggctgatcctgagtatgtcttctcaccaggtataattgcagaatcaaatcatagtgttt

SEQ ID NO: 7055 - DNA, 80 bp, synthetic construct
  misc_feature 1..80: note = Synthetic: >NC_005215.1-cand-1110-1189
  source 1..80: mol_type = other DNA
gtgataaaaaaacagtaccccttacatggacagggtttttggcagtttctggagagatagagaaaataacaggctgtaca

SEQ ID NO: 7056 - DNA, 80 bp, synthetic construct
  misc_feature 1..80: note = Synthetic: >NC_005215.1-cand-1180-1259
  source 1..80: mol_type = other DNA
aggctgtacagtcttctgtacattggctggacctggtgctagttgtgaagcatactcagaaacaggaatctttaatataa

SEQ ID NO: 7057 - DNA, 80 bp, synthetic construct
  misc_feature 1..80: note = Synthetic: >NC_005215.1-cand-1260-1339
  source 1..80: mol_type = other DNA
gttctcctacttgtctagtgaataaagttcaaaaattcagaggctcagaacagaggattaacttcatgtgccaaagagtt

SEQ ID NO: 7058 - DNA, 80 bp, synthetic construct
  misc_feature 1..80: note = Synthetic: >NC_005215.1-cand-1340-1419
  source 1..80: mol_type = other DNA
gatcaagatgtagttgtctattgtaatggacaaaagaaagtcattcttaccaaaactctggtcataggccaatgcattta

SEQ ID NO: 7059 - DNA, 80 bp, synthetic construct
  misc_feature 1..80: note = Synthetic: >NC_005215.1-cand-1420-1499
  source 1..80: mol_type = other DNA
tacattcactagtttattctcactaatcccaggagttgcccattctcttgctgtagagctatgtgttccaggccttcatg

SEQ ID NO: 7060 - DNA, 80 bp, synthetic construct
  misc_feature 1..80: note = Synthetic: >NC_005215.1-cand-1500-1579
  source 1..80: mol_type = other DNA
gctgggctacaacggcattactgattactttttgctttggctggctccttataccggcagtcaccttaattatactgaag

SEQ ID NO: 7061 - DNA, 80 bp, synthetic construct
  misc_feature 1..80: note = Synthetic: >NC_005215.1-cand-1580-1659
  source 1..80: mol_type = other DNA
atcctgaggttgctcactttctcatgctcacattattccacagaatcaaaattcaaagttatcttagaaagggttaaggt

SEQ ID NO: 7062 - DNA, 80 bp, synthetic construct
  misc_feature 1..80: note = Synthetic: >NC_005215.1-cand-1660-1739
  source 1..80: mol_type = other DNA
tgaatatcagaaaacaatgggctctatggtgtgtgatatttgccaccacgaatgcgaaacagcaaaagaacttgaaacac

SEQ ID NO: 7063 - DNA, 80 bp, synthetic construct
  misc_feature 1..80: note = Synthetic: >NC_005215.1-cand-1740-1819
  source 1..80: mol_type = other DNA
ataagaaaagctgtccagaaggtcaatgcccgtattgtatgacaataactgaatccactgagagtgctctccaagcccat

SEQ ID NO: 7064 - DNA, 80 bp, synthetic construct
  misc_feature 1..80: note = Synthetic: >NC_005215.1-cand-1820-1899
  source 1..80: mol_type = other DNA
tttgcaatctgtaagctaacaaacaggtttcaggaaaacttaaaaaagtcattgaaacgcccagaagtacggaaaggttg

SEQ ID NO: 7065 - DNA, 80 bp, synthetic construct
  misc_feature 1..80: note = Synthetic: >NC_005215.1-cand-1870-1949
  source 1..80: mol_type = other DNA
attgaaacgcccagaagtacggaaaggttgttacaggacactgggagtttttagatacaagagcagatgttatgttggtt

SEQ ID NO: 7066 - DNA, 80 bp, synthetic construct
  misc_feature 1..80: note = Synthetic: >NC_005217.1-cand-3090-3169
  source 1..80: mol_type = other DNA
gtccagaaaacttcatcgctatatagattctatggatgagcattctgaggctgtccaagatttcctcgatttttttaagg

SEQ ID NO: 7067 - DNA, 80 bp, synthetic construct
  misc_feature 1..80: note = Synthetic: >NC_005217.1-cand-3160-3239
  source 1..80: mol_type = other DNA
ttttttaagggtggagtgtctgctacagtcaaaggtaattggctccaaggtaacttgaacaaatgttcttcattgtttgg

SEQ ID NO: 7068 - DNA, 80 bp, synthetic construct
  misc_feature 1..80: note = Synthetic: >NC_005217.1-cand-3250-3329
  source 1..80: mol_type = other DNA
tcactgctgtttaggcgtatttgggcagagttatttccagaattagaatgcttttttgagtttgcacatcactcagatga

SEQ ID NO: 7069 - DNA, 80 bp, synthetic construct
  misc_feature 1..80: note = Synthetic: >NC_005217.1-cand-3330-3409
  source 1..80: mol_type = other DNA
tgccctctttatttatggttatttagagccagaagatgatggaactgattggtttttatatgtatctcaacagatacagg

SEQ ID NO: 7070 - DNA, 80 bp, synthetic construct
  misc_feature 1..80: note = Synthetic: >NC_005217.1-cand-3410-3489
  source 1..80: mol_type = other DNA
ctggtaattatcactggcatgctgttaaccaagagatgtggaagagcatgtttaatttgcatgagcatttactgctgatg

SEQ ID NO: 7071 - DNA, 80 bp, synthetic construct
  misc_feature 1..80: note = Synthetic: >NC_005217.1-cand-3500-3579
  source 1..80: mol_type = other DNA
aggtatccccaaaaaagacaacagtttctcctacaaatgcagaatttctttccacattttttgaaggttgtgcggtgtca

SEQ ID NO: 7072 - DNA, 80 bp, synthetic construct
  misc_feature 1..80: note = Synthetic: >NC_005217.1-cand-3580-3659
  source 1..80: mol_type = other DNA
atcccttttataaaaatactgcttggatcgttatcagatttaccaggattaggattctttgatgatctggctgctgcaca

SEQ ID NO: 7073 - DNA, 80 bp, synthetic construct
  misc_feature 1..80: note = Synthetic: >NC_005217.1-cand-3690-3769
  source 1..80: mol_type = other DNA
ggcatccccacagttggcacaattagctgttgttatttgcactagtaaagttgagagattatacggcactgcagatggga

SEQ ID NO: 7074 - DNA, 80 bp, synthetic construct
  misc_feature 1..80: note = Synthetic: >NC_005217.1-cand-3740-3819
  source 1..80: mol_type = other DNA
ttgagagattatacggcactgcagatgggatggttaatagtccagtggcatttttaaaggtaacgaaggcccatgtaccc

SEQ ID NO: 7075 - DNA, 80 bp, synthetic construct
  misc_feature 1..80: note = Synthetic: >NC_005217.1-cand-3820-3899
  source 1..80: mol_type = other DNA
atacctttaggaggtgatggctcaatgtctattatggagcttgccacagcaggtataggtatggctgataaaaatattct

SEQ ID NO: 7076 - DNA, 80 bp, synthetic construct
  misc_feature 1..80: note = Synthetic: >NC_005217.1-cand-3860-3939
  source 1..80: mol_type = other DNA
ttgccacagcaggtataggtatggctgataaaaatattctcaagcaagcattttattcttacaagcatacaagacgtgat

SEQ ID NO: 7077 - DNA, 80 bp, synthetic construct
  misc_feature 1..80: note = Synthetic: >NC_005217.1-cand-3980-4059
  source 1..80: mol_type = other DNA
ctcttagtgaagatgtttttcagcatgatagactaggtgagtttagttttgttggtaaagttcagtggaaggtattcaca

SEQ ID NO: 7078 - DNA, 80 bp, synthetic construct
  misc_feature 1..80: note = Synthetic: >NC_005217.1-cand-4060-4139
  source 1..80: mol_type = other DNA
cctaaaaatgagtttgaattctttgatcaattttcacagtcctacttaaagagttggacaaatcaacacccagtatatga

SEQ ID NO: 7079 - DNA, 80 bp, synthetic construct
  misc_feature 1..80: note = Synthetic: >NC_005217.1-cand-4150-4229
  source 1..80: mol_type = other DNA
cctagaggtagggataatcttttagtctatttagtcagaaaattaaatgaccctagtattgtcacagctatgacaatgca

SEQ ID NO: 7080 - DNA, 80 bp, synthetic construct
  misc_feature 1..80: note = Synthetic: >NC_005217.1-cand-4210-4289
  source 1..80: mol_type = other DNA
gtcacagctatgacaatgcaatctccattacaacttagattcaggatgcaggcaaagcagcacatgaaagtgtgtaagct

SEQ ID NO: 7081 - DNA, 80 bp, synthetic construct
  misc_feature 1..80: note = Synthetic: >NC_005217.1-cand-4310-4389
  source 1..80: mol_type = other DNA
tcagagaagttttagctgcagcagacagttttgcaactaagtacaatcccacagaaaaggacttagatctgtttaataca

SEQ ID NO: 7082 - DNA, 80 bp, synthetic construct
  misc_feature 1..80: note = Synthetic: >NC_005219.1-cand-1310-1389
  source 1..80: mol_type = other DNA
gcgagtggacatggacattgttgtgtactgcaacgggcagaggaaagtaatattaacaaaaactctagttattggacagt

SEQ ID NO: 7083 - DNA, 80 bp, synthetic construct
  misc_feature 1..80: note = Synthetic: >NC_005219.1-cand-1390-1469
  source 1..80: mol_type = other DNA
gtatatatactataacaagcttattctcattactacctggagtagcacattctattgctgttgaattgtgtgtacctggg

SEQ ID NO: 7084 - DNA, 80 bp, synthetic construct
  misc_feature 1..80: note = Synthetic: >NC_005219.1-cand-1470-1549
  source 1..80: mol_type = other DNA
ttccatggttgggccacagctgctctgcttgttacattctgtttcggatgggttcttataccagcaattacatttatcat

SEQ ID NO: 7085 - DNA, 80 bp, synthetic construct
  misc_feature 1..80: note = Synthetic: >NC_005219.1-cand-1550-1629
  source 1..80: mol_type = other DNA
actaacagtcctaaagttcattgctaatatttttcacacaagtaatcaagagaataggctaaaatcagtacttagaaaga

SEQ ID NO: 7086 - DNA, 80 bp, synthetic construct
  misc_feature 1..80: note = Synthetic: >NC_005219.1-cand-1620-1699
  source 1..80: mol_type = other DNA
cttagaaagataaaggaagagtttgaaaaaacaaaaggctcaatggtatgtgatgtctgcaagtatgagtgtgaaaccta

SEQ ID NO: 7087 - DNA, 80 bp, synthetic construct
  misc_feature 1..80: note = Synthetic: >NC_005219.1-cand-1720-1799
  source 1..80: mol_type = other DNA
gggtatcatgcccccaatctcaatgtccttactgttttactcattgtgaacccacagaagcagcattccaagctcattac

SEQ ID NO: 7088 - DNA, 80 bp, synthetic construct
  misc_feature 1..80: note = Synthetic: >NC_005219.1-cand-1780-1859
  source 1..80: mol_type = other DNA
cagcattccaagctcattacaaggtatgccaagttactcacagattcagggatgatctaaagaaaactgttactcctcaa

SEQ ID NO: 7089 - DNA, 80 bp, synthetic construct
  misc_feature 1..80: note = Synthetic: >NC_005219.1-cand-1860-1939
  source 1..80: mol_type = other DNA
aattttacaccaggatgttaccggacactaaatttatttagatacaaaagcaggtgctacatctttacaatgtggatatt

SEQ ID NO: 7090 - DNA, 80 bp, synthetic construct
  misc_feature 1..80: note = Synthetic: >NC_005219.1-cand-1940-2019
  source 1..80: mol_type = other DNA
tcttcttgtcttagaatccatactgtgggctgcaagtgcatcagagacaccattaactcctgtctggaatgacaatgccc

SEQ ID NO: 7091 - DNA, 80 bp, synthetic construct
  misc_feature 1..80: note = Synthetic: >NC_005219.1-cand-2030-2109
  source 1..80: mol_type = other DNA
ttctgttcctatgcatacagatttagagcttgatttctctttaacatccagttccaagtatacataccgtaggaagttaa

SEQ ID NO: 7092 - DNA, 80 bp, synthetic construct
  misc_feature 1..80: note = Synthetic: >NC_005219.1-cand-2110-2189
  source 1..80: mol_type = other DNA
caaacccacttgaggaagcacaatccattgacctacatattgaaatagaagaacagacaattggtgttgatgtgcatgct

SEQ ID NO: 7093 - DNA, 80 bp, synthetic construct
  misc_feature 1..80: note = Synthetic: >NC_005219.1-cand-2190-2269
  source 1..80: mol_type = other DNA
ctaggacactggtttgatggtcgtcttaaccttaaaacatcctttcactgttatggtgcttgtacaaagtatgaataccc

SEQ ID NO: 7094 - DNA, 80 bp, synthetic construct
  misc_feature 1..80: note = Synthetic: >NC_005219.1-cand-2240-2319
  source 1..80: mol_type = other DNA
ttatggtgcttgtacaaagtatgaatacccttggcatactgcaaagtgccattatgaaagagattaccaatatgagacga

SEQ ID NO: 7095 - DNA, 80 bp, synthetic construct
  misc_feature 1..80: note = Synthetic: >NC_005219.1-cand-2350-2429
  source 1..80: mol_type = other DNA
gggtgggcacaggctgtacagcatgtggtttatacctagatcaactgaaaccagttggtagtgcttataaaattatcaca

SEQ ID NO: 7096 - DNA, 80 bp, synthetic construct
  misc_feature 1..80: note = Synthetic: >NC_005219.1-cand-2470-2549
  source 1..80: mol_type = other DNA
aaaacctttgtaagataatagacatgaatgattgttttgtatctaggcatgttaaggtctgcataattggtacagtatct

SEQ ID NO: 7097 - DNA, 80 bp, synthetic construct
  misc_feature 1..80: note = Synthetic: >NC_005219.1-cand-2510-2589
  source 1..80: mol_type = other DNA
atctaggcatgttaaggtctgcataattggtacagtatctaaattctctcagggtgataccttattgttttttggaccgc

SEQ ID NO: 7098 - DNA, 80 bp, synthetic construct
  misc_feature 1..80: note = Synthetic: >NC_005222.1-cand-4080-4159
  source 1..80: mol_type = other DNA
gctgatatgtacacatcaaaatttttagagttatggagtagtcaacatgtaacttatgattatattattccgaagggcag

SEQ ID NO: 7099 - DNA, 80 bp, synthetic construct
  misc_feature 1..80: note = Synthetic: >NC_005222.1-cand-4160-4239
  source 1..80: mol_type = other DNA
agacaatcttctcatttatttagtccgaaagctcaatgatccaagtattgttacagcaatgaccatgcagtcacctttgc

SEQ ID NO: 7100 - DNA, 80 bp, synthetic construct
  misc_feature 1..80: note = Synthetic: >NC_005222.1-cand-4240-4319
  source 1..80: mol_type = other DNA
agctccgatttagaatgcaagctaagcagcacatgaaggtgtgtagattggatggagaatgggttactttcagggaagtt

SEQ ID NO: 7101 - DNA, 80 bp, synthetic construct
  misc_feature 1..80: note = Synthetic: >NC_005222.1-cand-4320-4399
  source 1..80: mol_type = other DNA
ctggcagctgcaaacagttttgcggagaattatagtgctactagccaagatatggatctatttcaaacgttaacaagttg

SEQ ID NO: 7102 - DNA, 80 bp, synthetic construct
  misc_feature 1..80: note = Synthetic: >NC_005222.1-cand-4400-4479
  source 1..80: mol_type = other DNA
tacattttctaaagagtatgcttggaaagatttcctgaatggaattcactgtgatgttatcccgacaaaacaggttcaaa

SEQ ID NO: 7103 - DNA, 80 bp, synthetic construct
  misc_feature 1..80: note = Synthetic: >NC_005222.1-cand-4480-4559
  source 1..80: mol_type = other DNA
gggccaaagttgcacgaacattcacagtcagagaaaaggatcagatcatacaaaatagtattcctgctgtcattgggtac

SEQ ID NO: 7104 - DNA, 80 bp, synthetic construct
  misc_feature 1..80: note = Synthetic: >NC_005222.1-cand-4560-4639
  source 1..80: mol_type = other DNA
aaatttgctgtaactgtagaggaaatgtcagatgtactggacacagccaagttcccagactctctatctgttgacctaaa

SEQ ID NO: 7105 - DNA, 80 bp, synthetic construct
  misc_feature 1..80: note = Synthetic: >NC_005222.1-cand-4640-4719
  source 1..80: mol_type = other DNA
gacaatgaaagacggagtttatcgtgagttagggttggacatatccttacctgatgttatgaaaagaattgcacctatgc

SEQ ID NO: 7106 - DNA, 80 bp, synthetic construct
  misc_feature 1..80: note = Synthetic: >NC_005222.1-cand-4710-4789
  source 1..80: mol_type = other DNA
gcacctatgctctataaatcttctaaatcaagggtagtcattgtccaagggaatgttgaagggacagctgaggctatatg

SEQ ID NO: 7107 - DNA, 80 bp, synthetic construct
  misc_feature 1..80: note = Synthetic: >NC_005222.1-cand-4790-4869
  source 1..80: mol_type = other DNA
tcgctactggctaaaatcaatgtcattggtaaagactataagagtgaagcctcataaagaagtccttcaagcagtttcta

SEQ ID NO: 7108 - DNA, 80 bp, synthetic construct
  misc_feature 1..80: note = Synthetic: >NC_005222.1-cand-4870-4949
  source 1..80: mol_type = other DNA
tttttaatcgcaaagaagatataggacaacagaaagacttagctgctcttaaactgtgcatagaagtttggagatggtgt

SEQ ID NO: 7109 - DNA, 80 bp, synthetic construct
  misc_feature 1..80: note = Synthetic: >NC_005222.1-cand-4950-5029
  source 1..80: mol_type = other DNA
aaagcaaatagtgctccatatagagattggttccaggctctatggttcgaggataaaaccttttcagagtggttagatag

SEQ ID NO: 7110 - DNA, 80 bp, synthetic construct
  misc_feature 1..80: note = Synthetic: >NC_005222.1-cand-5030-5109
  source 1..80: mol_type = other DNA
gttttgtagggttggagttccaccaattgatccagagatccagtgtgcagcattaatgatagctgatataaagggtgatt

SEQ ID NO: 7111 - DNA, 80 bp, synthetic construct
  misc_feature 1..80: note = Synthetic: >NC_005222.1-cand-5110-5189
  source 1..80: mol_type = other DNA
actcagtcttgcagttacaagcgaataggcgagcatattcaggtaagcaatatgatgcatattgtgtacaaacatataat

SEQ ID NO: 7112 - DNA, 80 bp, synthetic construct
  misc_feature 1..80: note = Synthetic: >NC_005222.1-cand-5190-5269
  source 1..80: mol_type = other DNA
gaagtgacaaagctttatgagggagacctaagggtaacatttaattttggtcttgactgtgcaaggcttgagatcttttg

SEQ ID NO: 7113 - DNA, 80 bp, synthetic construct
  misc_feature 1..80: note = Synthetic: >NC_005222.1-cand-5270-5349
  source 1..80: mol_type = other DNA
ggataaaaaggcatatatattagaaacatcgattacacaaaagcatgtattgaagatcatgatggatgaggtttcgaaag

SEQ ID NO: 7114 - DNA, 80 bp, synthetic construct
  misc_feature 1..80: note = Synthetic: >NC_005831.2-cand-15090-15169
  source 1..80: mol_type = other DNA
ttcttgaatctttttctgttacacttcttgataatcaagaagataagttttggtgtgaagatttttatgctagtatgtat

SEQ ID NO: 7115 - DNA, 80 bp, synthetic construct
  misc_feature 1..80: note = Synthetic: >NC_005831.2-cand-15170-15249
  source 1..80: mol_type = other DNA
gaaaattctacaatattgcaagctgctggtttatgtgttgtttgtggttcacaaactgtacttcgttgtggtgattgtct

SEQ ID NO: 7116 - DNA, 80 bp, synthetic construct
  misc_feature 1..80: note = Synthetic: >NC_005831.2-cand-15250-15329
  source 1..80: mol_type = other DNA
gcgtaagcctatgttgtgcactaaatgcgcatatgatcatgtatttggtaccgaccacaagtttattttggctataacac

SEQ ID NO: 7117 - DNA, 80 bp, synthetic construct
  misc_feature 1..80: note = Synthetic: >NC_005831.2-cand-15330-15409
  source 1..80: mol_type = other DNA
cgtatgtatgtaatgcatcaggttgtggtgttagtgatgtcaaaaaattgtatcttggtggtttgaattactattgtaca

SEQ ID NO: 7118 - DNA, 80 bp, synthetic construct
  misc_feature 1..80: note = Synthetic: >NC_005831.2-cand-15410-15489
  source 1..80: mol_type = other DNA
aatcataaaccacagttgtcttttccattatgttcagctggtaatatatttggtttatataaaaattcagcaactggttc

SEQ ID NO: 7119 - DNA, 80 bp, synthetic construct
  misc_feature 1..80: note = Synthetic: >NC_005831.2-cand-15490-15569
  source 1..80: mol_type = other DNA
cttagatgttgaagtttttaataggcttgcaacgtctgattggactgatgttagggactataaacttgctaatgatgtta

SEQ ID NO: 7120 - DNA, 80 bp, synthetic construct
  misc_feature 1..80: note = Synthetic: >NC_005831.2-cand-15570-15649
  source 1..80: mol_type = other DNA
aagatacacttagactctttgcggctgaaactattaaagctaaagaagagagtgttaagtcttcttatgcttttgcaact

SEQ ID NO: 7121 - DNA, 80 bp, synthetic construct
  misc_feature 1..80: note = Synthetic: >NC_005831.2-cand-15650-15729
  source 1..80: mol_type = other DNA
cttaaagaggttgttggacctaaagaattgcttcttagttgggaaagtggtaaagttaaaccacctttgaatcgtaattc

SEQ ID NO: 7122 - DNA, 80 bp, synthetic construct
  misc_feature 1..80: note = Synthetic: >NC_005831.2-cand-15730-15809
  source 1..80: mol_type = other DNA
tgttttcacttgttttcaaataagtaaggactcaaaattccaaataggtgagttcatctttgagaaggttgaatatggtt

SEQ ID NO: 7123 - DNA, 80 bp, synthetic construct
  misc_feature 1..80: note = Synthetic: >NC_005831.2-cand-15810-15889
  source 1..80: mol_type = other DNA
ctgatactgttacgtataagtctactgtaactactaagttagttcctggtatgatttttgtcttaacatctcacaatgtc

SEQ ID NO: 7124 - DNA, 80 bp, synthetic construct
  misc_feature 1..80: note = Synthetic: >NC_005831.2-cand-15890-15969
  source 1..80: mol_type = other DNA
caacctttacgtgcaccaactattgcaaaccaagagaagtattctagcatttataaattgcaccctgcttttaatgtcag

SEQ ID NO: 7125 - DNA, 80 bp, synthetic construct
  misc_feature 1..80: note = Synthetic: >NC_005831.2-cand-15970-16049
  source 1..80: mol_type = other DNA
tgatgcatatgctaatttggttccatattaccaacttattggtaaacaaaagataactacaatacagggtcctcctggta

SEQ ID NO: 7126 - DNA, 80 bp, synthetic construct
  misc_feature 1..80: note = Synthetic: >NC_005831.2-cand-16050-16129
  source 1..80: mol_type = other DNA
gtggtaagtcacattgttccattggacttggattgtactacccaggtgcgcgtattgtttttgttgcttgtgcccatgct

SEQ ID NO: 7127 - DNA, 80 bp, synthetic construct
  misc_feature 1..80: note = Synthetic: >NC_005831.2-cand-16130-16209
  source 1..80: mol_type = other DNA
gctgttgattccttatgtgcaaaagctatgactgtttatagcattgataagtgtactaggattatacctgcaagagctcg

SEQ ID NO: 7128 - DNA, 80 bp, synthetic construct
  misc_feature 1..80: note = Synthetic: >NC_005831.2-cand-16210-16289
  source 1..80: mol_type = other DNA
ggttgagtgttatagtggctttaaaccaaataacactagtgcacaatacatatttagcactgttaacgcattacctgagt

SEQ ID NO: 7129 - DNA, 80 bp, synthetic construct
  misc_feature 1..80: note = Synthetic: >NC_005831.2-cand-16290-16369
  source 1..80: mol_type = other DNA
gtaatgctgatatcgttgttgtagatgaagtttcaatgtgtacaaattatgacctttctgttattaaccagcgtttatca

SEQ ID NO: 7130 - DNA, 80 bp, synthetic construct
  misc_feature 1..80: note = Synthetic: >NC_006213.1-cand-9280-9359
  source 1..80: mol_type = other DNA
tttttggcattgactgctagttccattgctggtgctatactcgctgtaattgttgttttggtgttttattacctaataaa

SEQ ID NO: 7131 - DNA, 80 bp, synthetic construct
  misc_feature 1..80: note = Synthetic: >NC_006213.1-cand-9360-9439
  source 1..80: mol_type = other DNA
gcttaaacgtgcttttggtgattacaccagtgttgtttttgttaacgtgattgtgtggtgtgtaaattttatgatgcttt

SEQ ID NO: 7132 - DNA, 80 bp, synthetic construct
  misc_feature 1..80: note = Synthetic: >NC_006213.1-cand-9440-9519
  source 1..80: mol_type = other DNA
ttgtgtttcaagtttaccccatactttcttgtgtatatgctatttgttatttttatgccacgctttatttcccttcggag

SEQ ID NO: 7133 - DNA, 80 bp, synthetic construct
  misc_feature 1..80: note = Synthetic: >NC_006213.1-cand-9520-9599
  source 1..80: mol_type = other DNA
ataagtgtgataatgcacttacaatggctagttatgtatggcactattatgcctttatggttttgtttgctatatatagc

SEQ ID NO: 7134 - DNA, 80 bp, synthetic construct
  misc_feature 1..80: note = Synthetic: >NC_006213.1-cand-9600-9679
  source 1..80: mol_type = other DNA
tgttgttgtttcaaatcatgctttttgggtattttcttactgcagaaagcttggtacttctgttcgtagtgatggtacat

SEQ ID NO: 7135 - DNA, 80 bp, synthetic construct
  misc_feature 1..80: note = Synthetic: >NC_006213.1-cand-9680-9759
  source 1..80: mol_type = other DNA
ttgaagaaatggctctcactacttttatgattacaaaagattcttattgtaagcttaagaattctttgtctgatgttgct

SEQ ID NO: 7136 - DNA, 80 bp, synthetic construct
  misc_feature 1..80: note = Synthetic: >NC_006213.1-cand-9770-9849
  source 1..80: mol_type = other DNA
atttgagtttgtataataaatataggtattacagcggtaaaatggatactgctgcatatagggaggctgcttgctctcag

SEQ ID NO: 7137 - DNA, 80 bp, synthetic construct
  misc_feature 1..80: note = Synthetic: >NC_006213.1-cand-9850-9929
  source 1..80: mol_type = other DNA
ttggctaaagcaatggacacatttaccaataataatggtagtgatgtgctttaccaaccgcctactgcttccgtctcaac

SEQ ID NO: 7138 - DNA, 80 bp, synthetic construct
  misc_feature 1..80: note = Synthetic: >NC_006213.1-cand-9930-10009
  source 1..80: mol_type = other DNA
ttcattcttgcaatctggtattgtgaaaatggtaaatcctacttctaaggtagaaccatgtgttgtcagtgttacctatg

SEQ ID NO: 7139 - DNA, 80 bp, synthetic construct
  misc_feature 1..80: note = Synthetic: >NC_006213.1-cand-10010-10089
  source 1..80: mol_type = other DNA
gtaatatgacattgaatggtttatggttggatgacaaggtctactgtcccagacatgtaatatgttctgcttcagatatg

SEQ ID NO: 7140 - DNA, 80 bp, synthetic construct
  misc_feature 1..80: note = Synthetic: >NC_006213.1-cand-10090-10169
  source 1..80: mol_type = other DNA
actaatccagattatacaaatttgttgtgtagagtaacatcaagtgattttactgtattgtttgatcgtctaagccttac

SEQ ID NO: 7141 - DNA, 80 bp, synthetic construct
  misc_feature 1..80: note = Synthetic: >NC_006213.1-cand-10200-10279
  source 1..80: mol_type = other DNA
gcttgttcttacagtgaccctgcaaaattctcgtacgccaaaatatacatttggtgtggttaaacctggtgagactttta

SEQ ID NO: 7142 - DNA, 80 bp, synthetic construct
  misc_feature 1..80: note = Synthetic: >NC_006213.1-cand-10250-10329
  source 1..80: mol_type = other DNA
ttggtgtggttaaacctggtgagacttttactgttttagctgcttataacggcaaaccacaaggagcctttcatgtaact

SEQ ID NO: 7143 - DNA, 80 bp, synthetic construct
  misc_feature 1..80: note = Synthetic: >NC_006213.1-cand-10330-10409
  source 1..80: mol_type = other DNA
atgcgtagtagttataccattaagggttcctttttatgcggatcttgtggatctgttggttatgtaataatgggtgattg

SEQ ID NO: 7144 - DNA, 80 bp, synthetic construct
  misc_feature 1..80: note = Synthetic: >NC_006213.1-cand-10400-10479
  source 1..80: mol_type = other DNA
tgggtgattgtgttaaatttgtttatatgcatcaattggagcttagtactggttgtcatactggtactgacttcaatggg

SEQ ID NO: 7145 - DNA, 80 bp, synthetic construct
  misc_feature 1..80: note = Synthetic: >NC_006213.1-cand-10500-10579
  source 1..80: mol_type = other DNA
ggatgctcaggttgttcagttgctcattcaggattatatacaatctgttaattttgtagcatggctttatgctgctatac

SEQ ID NO: 7146 - DNA, 80 bp, synthetic construct
  misc_feature 1..80: note = Synthetic: >NC_007547.1-cand-80-159
  source 1..80: mol_type = other DNA
ttgaaaatgtaacttatcaaaataattacttcgccacagataaatttaaaaaagacatagagcaatatcttaaatcaatc

SEQ ID NO: 7147 - DNA, 80 bp, synthetic construct
  misc_feature 1..80: note = Synthetic: >NC_007547.1-cand-160-239
  source 1..80: mol_type = other DNA
catgatggagaaaagattacacagtctaagattgatgaaaaggaaaaaatactgttagatagagtgcctgctgaagaaag

SEQ ID NO: 7148 - DNA, 80 bp, synthetic construct
  misc_feature 1..80: note = Synthetic: >NC_007547.1-cand-240-319
  source 1..80: mol_type = other DNA
atgtttaatttcaaaattagtattcgcatatggaaaacatggaaatgtagaaaataaactagtaaaatatggagtaaaag

SEQ ID NO: 7149 - DNA, 80 bp, synthetic construct
  misc_feature 1..80: note = Synthetic: >NC_007547.1-cand-320-399
  source 1..80: mol_type = other DNA
atgcgttatcgcatgcacctcaaaaagacgctaaaccttatgaaaacaacataattacgtctgaaatttttaaagaaaaa

SEQ ID NO: 7150 - DNA, 80 bp, synthetic construct
  misc_feature 1..80: note = Synthetic: >NC_007547.1-cand-400-479
  source 1..80: mol_type = other DNA
tcagaatacactgatatatacatggacccatcaattaatacatcctgtcaatcaaattgtcaagctatgatgttcacaat

SEQ ID NO: 7151 - DNA, 80 bp, synthetic construct
  misc_feature 1..80: note = Synthetic: >NC_007547.1-cand-480-559
  source 1..80: mol_type = other DNA
ttctgaaatgaaattaaataatattaaaaatgctgctagattagaaaaactatttacgattattgctgctacaattaata

SEQ ID NO: 7152 - DNA, 80 bp, synthetic construct
  misc_feature 1..80: note = Synthetic: >NC_007547.1-cand-560-639
  source 1..80: mol_type = other DNA
aatatggaatgcctagacataatactcgatatagatatgaatgggaaacgatgaaaaataaaccatatcatttagcggcg

SEQ ID NO: 7153 - DNA, 80 bp, synthetic construct
  misc_feature 1..80: note = Synthetic: >NC_007547.1-cand-630-709
  source 1..80: mol_type = other DNA
tttagcggcgtggataaattcaagcatcgaaatgattgcatgtgttgttgatcatcacacttatatgatagccagagaat

SEQ ID NO: 7154 - DNA, 80 bp, synthetic construct
  misc_feature 1..80: note = Synthetic: >NC_007547.1-cand-710-789
  source 1..80: mol_type = other DNA
taattgtaaagtcatttacaaacagaacatcattagcgaaattagtatcatcaccaatgacagtactgacagccatgtta

SEQ ID NO: 7155 - DNA, 80 bp, synthetic construct
  misc_feature 1..80: note = Synthetic: >NC_007547.1-cand-790-869
  source 1..80: mol_type = other DNA
ccgatacgaggtacatttataactacagagaatttagaactggaatattctaataaatcaattaactatttaatatcaaa

SEQ ID NO: 7156 - DNA, 80 bp, synthetic construct
  misc_feature 1..80: note = Synthetic: >NC_007547.1-cand-870-949
  source 1..80: mol_type = other DNA
agagatggctgaagattttatgcaagcaataaagcaattaagagatgaaggtttggaatatataccagattattatgaga

SEQ ID NO: 7157 - DNA, 80 bp, synthetic construct
  misc_feature 1..80: note = Synthetic: >NC_007547.1-cand-950-1029
  source 1..80: mol_type = other DNA
agtggtttaaatctccagatcctttaacttttccaaatatagccttaatatactcattcagttttcatgttggttataga

SEQ ID NO: 7158 - DNA, 80 bp, synthetic construct
  misc_feature 1..80: note = Synthetic: >NC_007547.1-cand-1030-1109
  source 1..80: mol_type = other DNA
aagcaagcgttgtcagatgctgtatatgatcagattactgtaacgtatagcgataatgtcaatatggaaatgtataaaga

SEQ ID NO: 7159 - DNA, 80 bp, synthetic construct
  misc_feature 1..80: note = Synthetic: >NC_007547.1-cand-1110-1189
  source 1..80: mol_type = other DNA
atattctgaacgtatagagaatgaaatatttaccattttaaaagataaaataatacatgaagataaaagattagaagaat

SEQ ID NO: 7160 - DNA, 80 bp, synthetic construct
  misc_feature 1..80: note = Synthetic: >NC_007547.1-cand-1190-1269
  source 1..80: mol_type = other DNA
acgaattatcagcgttactatcaatgtcatctgcatcaaatggaatactaagagagataaattttggaggacaaaaagtt

SEQ ID NO: 7161 - DNA, 80 bp, synthetic construct
  misc_feature 1..80: note = Synthetic: >NC_007547.1-cand-1270-1349
  source 1..80: mol_type = other DNA
agatcaacgaaaaagaacatgcatgtgattgatgatatctatcataaaaaatatacaacagatataccacctgtggatgc

SEQ ID NO: 7162 - DNA, 80 bp, synthetic construct
  misc_feature 1..80: note = Synthetic: >NC_007548.1-cand-670-749
  source 1..80: mol_type = other DNA
tggttatcttgaaattctaccaaataggaaatggtcacattcattagctgatctacgagaaaataaatcaataatgatgt

SEQ ID NO: 7163 - DNA, 80 bp, synthetic construct
  misc_feature 1..80: note = Synthetic: >NC_007548.1-cand-750-829
  source 1..80: mol_type = other DNA
attctgctaaaattatacatgcttcttgtgcgatgatttcaatattgcatgctgttccaatcgactactttttccttgca

SEQ ID NO: 7164 - DNA, 80 bp, synthetic construct
  misc_feature 1..80: note = Synthetic: >NC_007548.1-cand-830-909
  source 1..80: mol_type = other DNA
caaatcatcgcgtcattttccgaaatacccgcccatgctgctaaacatctttcttctccgatgactttatacattggaat

SEQ ID NO: 7165 - DNA, 80 bp, synthetic construct
  misc_feature 1..80: note = Synthetic: >NC_007548.1-cand-910-989
  source 1..80: mol_type = other DNA
tgcacagcttcgttctaatattgttgtatcaactaaaatcgcggctgaaagtgttgcaacagaaagcccgaatatttcta

SEQ ID NO: 7166 - DNA, 80 bp, synthetic construct
  misc_feature 1..80: note = Synthetic: >NC_007548.1-cand-990-1069
  source 1..80: mol_type = other DNA
gattagaagaaagccaaatacgtgaatgggagcaagagatgagtgaatatccatttcaatcttctaggatggtaagaatg

SEQ ID NO: 7167 - DNA, 80 bp, synthetic construct
  misc_feature 1..80: note = Synthetic: >NC_007548.1-cand-1070-1149
  source 1..80: mol_type = other DNA
atgaaaaaaaatatatttgacgtttctgttgatatgttttatgcaatttttaattgcttttcagccacattccacgttgg

SEQ ID NO: 7168 - DNA, 80 bp, synthetic construct
  misc_feature 1..80: note = Synthetic: >NC_007548.1-cand-1150-1229
  source 1..80: mol_type = other DNA
ccatagaatagacaatccacaagatgctattgaagcccaagttaaagttgaatatacatctgatgtagataaagaaatgt

SEQ ID NO: 7169 - DNA, 80 bp, synthetic construct
  misc_feature 1..80: note = Synthetic: >NC_007548.1-cand-1230-1309
  source 1..80: mol_type = other DNA
atgatcaatattattttctcttaaaacgaatgttaactgaccaacttgccgaatatgctgaagaaatgtatttcaaatat

SEQ ID NO: 7170 - DNA, 80 bp, synthetic construct
  misc_feature 1..80: note = Synthetic: >NC_007548.1-cand-1310-1389
  source 1..80: mol_type = other DNA
aactctgacgttacagctgaatctttagcggcaatggcaaattcatcaaatggttattcaagatctgtcactttccttga

SEQ ID NO: 7171 - DNA, 80 bp, synthetic construct
  misc_feature 1..80: note = Synthetic: >NC_007548.1-cand-1390-1469
  source 1..80: mol_type = other DNA
cagagaaattaaaactacaaagaagatgttgcatttggatgacgatttatcaaagaatcttaatttcacaaatattggtg

SEQ ID NO: 7172 - DNA, 80 bp, synthetic construct
  misc_feature 1..80: note = Synthetic: >NC_007548.1-cand-1470-1549
  source 1..80: mol_type = other DNA
accagataaaaaagggtattccaatgggaacaagaaatgtaccagcgagacaaactagaggtatatttatactaagctgg

SEQ ID NO: 7173 - DNA, 80 bp, synthetic construct
  misc_feature 1..80: note = Synthetic: >NC_007548.1-cand-1550-1629
  source 1..80: mol_type = other DNA
caagtcgctgcaatacaacacaccattgccgagtttttatacaaaaaagctaaaaaaggtggttttggtgctacttttgc

SEQ ID NO: 7174 - DNA, 80 bp, synthetic construct
  misc_feature 1..80: note = Synthetic: >NC_007548.1-cand-1630-1709
  source 1..80: mol_type = other DNA
ggaagcctacgtagccaaagctgctacattgacttatggaattctagctgaggcaacgtcaaaagcagatcaattaattt

SEQ ID NO: 7175 - DNA, 80 bp, synthetic construct
  misc_feature 1..80: note = Synthetic: >NC_007548.1-cand-1710-1789
  source 1..80: mol_type = other DNA
tatatactgatgtatcccaatgggacgcctcgcaacataacactgagccttatcgttcagcttggattaatgcaattaaa

SEQ ID NO: 7176 - DNA, 80 bp, synthetic construct
  misc_feature 1..80: note = Synthetic: >NC_007548.1-cand-1790-1869
  source 1..80: mol_type = other DNA
gaagctagaactaaatataaaataaattacaatcaagaacctgtcgttcttggaatgaatgtgttggataaaatgattga

SEQ ID NO: 7177 - DNA, 80 bp, synthetic construct
  misc_feature 1..80: note = Synthetic: >NC_007548.1-cand-1870-1949
  source 1..80: mol_type = other DNA
aatccaagaagcacttttaaattcaaatttaatagttgagtcacaaggatcaaaaagacagccattgcgcatcaaatatc

SEQ ID NO: 7178 - DNA, 80 bp, synthetic construct
  misc_feature 1..80: note = Synthetic: >NC_007551.1-cand-2020-2099
  source 1..80: mol_type = other DNA
ttgttaactaaaaataaaatgagggataaatttaaaataggtgatggtcaacctcacacgcgtgaagagtttgaaaatac

SEQ ID NO: 7179 - DNA, 80 bp, synthetic construct
  misc_feature 1..80: note = Synthetic: >NC_007551.1-cand-2110-2189
  source 1..80: mol_type = other DNA
ctcaaaatcaatagattagtaaacagtacatttcgttctttactgttggactaggtcataagtaacttaatgagttgctg

SEQ ID NO: 7180 - DNA, 80 bp, synthetic construct
  misc_feature 1..80: note = Synthetic: >NC_007552.1-cand-0-79
  source 1..80: mol_type = other DNA
ttttagtggtttctctgattacattgtctggcttctaggacagttagaaagatgatgtctattcaaagagctgctcaaat

SEQ ID NO: 7181 - DNA, 80 bp, synthetic construct
  misc_feature 1..80: note = Synthetic: >NC_007552.1-cand-80-159
  source 1..80: mol_type = other DNA
taaccgacaatttgactacatgtcaattaaagaactgtggatggcgaaatttccattgcataaacccggtgattgtttgg

SEQ ID NO: 7182 - DNA, 80 bp, synthetic construct
  misc_feature 1..80: note = Synthetic: >NC_007552.1-cand-130-209
  source 1..80: mol_type = other DNA
ttccattgcataaacccggtgattgtttggatatgtttaaaaatggtgattacactggaccaacaatgggatgtatccaa

SEQ ID NO: 7183 - DNA, 80 bp, synthetic construct
  misc_feature 1..80: note = Synthetic: >NC_007552.1-cand-220-299
  source 1..80: mol_type = other DNA
cttcaaagaaaaatacaattttccacatcaagtctgactttaattccactgaatatgacgaacctccaattagcggattt

SEQ ID NO: 7184 - DNA, 80 bp, synthetic construct
  misc_feature 1..80: note = Synthetic: >NC_007552.1-cand-310-389
  source 1..80: mol_type = other DNA
ctcaacattgctgccaacgtatagatgaacatttctgtggagcccttcaccctgtgattagtaatattgaatttgagcat

SEQ ID NO: 7185 - DNA, 80 bp, synthetic construct
  misc_feature 1..80: note = Synthetic: >NC_007552.1-cand-400-479
  source 1..80: mol_type = other DNA
aaactagaccacaagtggcatcagagcttaatctgttcattccatgtggaattaaaaatttaaaaatagaaagtggagaa

SEQ ID NO: 7186 - DNA, 80 bp, synthetic construct
  misc_feature 1..80: note = Synthetic: >NC_007552.1-cand-490-569
  source 1..80: mol_type = other DNA
ggattgttggaacaaaatttcgaaagtgtatgtgtttgaaaccagtgatagtggcagcaacaataattggaacaccaata

SEQ ID NO: 7187 - DNA, 80 bp, synthetic construct
  misc_feature 1..80: note = Synthetic: >NC_007552.1-cand-580-659
  source 1..80: mol_type = other DNA
tgatcacattttgttcatctgactatattcaagttatagttaatagaaatagagaaggatcatgtggtatatgtatggga

SEQ ID NO: 7188 - DNA, 80 bp, synthetic construct
  misc_feature 1..80: note = Synthetic: >NC_007552.1-cand-620-699
  source 1..80: mol_type = other DNA
taatagaaatagagaaggatcatgtggtatatgtatgggaaatgtttcaacatatgaagcttgtggaaattggactaacg

SEQ ID NO: 7189 - DNA, 80 bp, synthetic construct
  misc_feature 1..80: note = Synthetic: >NC_007552.1-cand-740-819
  source 1..80: mol_type = other DNA
ttataagtgcacgcccgttgcatttatattttcattaatgatgagtaccggacataaaccatacgtcagtaagaaacaat

SEQ ID NO: 7190 - DNA, 80 bp, synthetic construct
  misc_feature 1..80: note = Synthetic: >NC_007552.1-cand-830-909
  source 1..80: mol_type = other DNA
tagaagaaagtgggaaagagtcttaaattacaaaatctgtaaagaaaatcttgactcacatttagcttgtgctaaccacg

SEQ ID NO: 7191 - DNA, 80 bp, synthetic construct
  misc_feature 1..80: note = Synthetic: >NC_007552.1-cand-900-979
  source 1..80: mol_type = other DNA
gctaaccacgaaaatgtttataaatcaataaaaaaatatgagttcttcgattcggtttgggtgtaccacttggcaaacag

SEQ ID NO: 7192 - DNA, 80 bp, synthetic construct
  misc_feature 1..80: note = Synthetic: >NC_007552.1-cand-980-1059
  source 1..80: mol_type = other DNA
ctcttgggttcgagatttaactagagaatgcattgaatctaaccctggaccaaactatatacagctcctcaatgagcatt

SEQ ID NO: 7193 - DNA, 80 bp, synthetic construct
  misc_feature 1..80: note = Synthetic: >NC_007552.1-cand-1060-1139
  source 1..80: mol_type = other DNA
ctcaaagatatggatttgtacagcctacatatgagataatagctgtggttagtgacggacatcattcttaccaatgcaca

SEQ ID NO: 7194 - DNA, 80 bp, synthetic construct
  misc_feature 1..80: note = Synthetic: >NC_007569.1-cand-190-269
  source 1..80: mol_type = other DNA
catgttcgaatgatttagaaattaaacattctattataacagaggcagtagtatgcgatgaatctgcgcatgtgtcggca

SEQ ID NO: 7195 - DNA, 80 bp, synthetic construct
  misc_feature 1..80: note = Synthetic: >NC_007569.1-cand-390-469
  source 1..80: mol_type = other DNA
agtaagttgaaagaaacagaaaatgagattactgaaatgaaatcaaagacaaatttattagttaacgcttcagtaggtat

SEQ ID NO: 7196 - DNA, 80 bp, synthetic construct
  misc_feature 1..80: note = Synthetic: >NC_007569.1-cand-480-559
  source 1..80: mol_type = other DNA
gtaggagcatttaatccaattaatcaaacaataaaaacagaagcagtatcggatatgttcgaagatgaagatattgaggg

SEQ ID NO: 7197 - DNA, 80 bp, synthetic construct
  misc_feature 1..80: note = Synthetic: >NC_007569.1-cand-530-609
  source 1..80: mol_type = other DNA
ggatatgttcgaagatgaagatattgagggatgcatctgtaaaaattgtccatatagagaaaagtaccgaaaactccgaa

SEQ ID NO: 7198 - DNA, 80 bp, synthetic construct
  misc_feature 1..80: note = Synthetic: >NC_007569.1-cand-620-699
  source 1..80: mol_type = other DNA
aaacgtattaattgatatgatcaatgaaatgtagtcgagtacttgcccgtactgcatcaggtgactgaaatcagcattga

SEQ ID NO: 7199 - DNA, 80 bp, synthetic construct
  misc_feature 1..80: note = Synthetic: >NC_007570.1-cand-0-79
  source 1..80: mol_type = other DNA
tttaaaatctcattcacaatggatgtacttttttctatagcgaaaactgtgtcagatcttaaaaagaaagttgtggttgg

SEQ ID NO: 7200 - DNA, 80 bp, synthetic construct
  misc_feature 1..80: note = Synthetic: >NC_007570.1-cand-90-169
  source 1..80: mol_type = other DNA
actaatgtagaagatgttgtacaacagacgaatgaattgattagaactttaaatggaaatatttttcatactggtggcat

SEQ ID NO: 7201 - DNA, 80 bp, synthetic construct
  misc_feature 1..80: note = Synthetic: >NC_007570.1-cand-160-239
  source 1..80: mol_type = other DNA
ctggtggcattggaacacagcctcagaaagagtggaattttcagctgccacaattgggtacaactttattaaatttagat

SEQ ID NO: 7202 - DNA, 80 bp, synthetic construct
  misc_feature 1..80: note = Synthetic: >NC_007570.1-cand-250-329
  source 1..80: mol_type = other DNA
ttcaatcaactagaggcataatcgattttttatcatcttttatagaagctgtatgtgatgatgaaattgttagagaagct

SEQ ID NO: 7203 - DNA, 80 bp, synthetic construct
  misc_feature 1..80: note = Synthetic: >NC_007570.1-cand-340-419
  source 1..80: mol_type = other DNA
gtatgcaacctcaatcaccagctcttatattattatcttcatcaaaatttaaaacaattaattttaataatagttctcaa

SEQ ID NO: 7204 - DNA, 80 bp, synthetic construct
  misc_feature 1..80: note = Synthetic: >NC_007570.1-cand-430-509
  source 1..80: mol_type = other DNA
attggaatgctcaatcaagacgtgagaatcctgtatatgagtataaaaatccaatgttgtttgaatataaaaattcgtat

SEQ ID NO: 7205 - DNA, 80 bp, synthetic construct
  misc_feature 1..80: note = Synthetic: >NC_007570.1-cand-520-599
  source 1..80: mol_type = other DNA
gcgcaaatccacaatttggaagcgtcatgggtttaagatattatacaacaagtaatacttgtcaaattgcagcatttgat

SEQ ID NO: 7206 - DNA, 80 bp, synthetic construct
  misc_feature 1..80: note = Synthetic: >NC_007570.1-cand-600-679
  source 1..80: mol_type = other DNA
tccaccctagctgaaaatgcaccaaacaatacacaacgcttcgtttataatggcagactaaaaagacccatatcaaacgt

SEQ ID NO: 7207 - DNA, 80 bp, synthetic construct
  misc_feature 1..80: note = Synthetic: >NC_007570.1-cand-690-769
  source 1..80: mol_type = other DNA
atagaagctggtgctccaaatataagcaacccaactattttacctgatcctaataatcaaacaacttggctttttaatcc

SEQ ID NO: 7208 - DNA, 80 bp, synthetic construct
  misc_feature 1..80: note = Synthetic: >NC_007570.1-cand-780-859
  source 1..80: mol_type = other DNA
atgaatggaacatttaccattgaattctataataatggtcaactaattgatatggttcgaaatatgggaatagttactgt

SEQ ID NO: 7209 - DNA, 80 bp, synthetic construct
  misc_feature 1..80: note = Synthetic: >NC_007570.1-cand-990-1069
  source 1..80: mol_type = other DNA
atattagatgctaccacagagtccgttctatgtgattctcattcagtggaatattcaatagtagcaaacgttagaagaga

SEQ ID NO: 7210 - DNA, 80 bp, synthetic construct
  misc_feature 1..80: note = Synthetic: >NC_007574.1-cand-80-159
  source 1..80: mol_type = other DNA
aataacttgaatttcgcagatacctacgtatatacatggaaccaacagtactcgtatcatgaaaatgcattcctaatttc

SEQ ID NO: 7211 - DNA, 80 bp, synthetic construct
  misc_feature 1..80: note = Synthetic: >NC_007574.1-cand-170-249
  source 1..80: mol_type = other DNA
gctacgacaatcatattatatctggatggtataaacataaatgaagtcaataaagcatttgaattattgaactcaaatgg

SEQ ID NO: 7212 - DNA, 80 bp, synthetic construct
  misc_feature 1..80: note = Synthetic: >NC_007574.1-cand-250-329
  source 1..80: mol_type = other DNA
tataccagcacttattataaaaccagatcatattggaatatttacgtcatcaaactttacatatgattggcaatacaaaa

SEQ ID NO: 7213 - DNA, 80 bp, synthetic construct
  misc_feature 1..80: note = Synthetic: >NC_007574.1-cand-340-419
  source 1..80: mol_type = other DNA
tcatgagtatacatattacaaaaataatgaatttattgtgagtgatgaattctggttatatactaatataaatgaattat

SEQ ID NO: 7214 - DNA, 80 bp, synthetic construct
  misc_feature 1..80: note = Synthetic: >NC_007574.1-cand-430-509
  source 1..80: mol_type = other DNA
aatactttattatgaacgaggaatgagagaattatatgctggtagagaatatacattgtataatacagcaacagatgacg

SEQ ID NO: 7215 - DNA, 80 bp, synthetic construct
  misc_feature 1..80: note = Synthetic: >NC_007574.1-cand-520-599
  source 1..80: mol_type = other DNA
taaatatatctatgaaaaagattcgattatgaatggtactgactataaaaaattatatgacactaattctgttaaaaact

SEQ ID NO: 7216 - DNA, 80 bp, synthetic construct
  misc_feature 1..80: note = Synthetic: >NC_007574.1-cand-600-679
  source 1..80: mol_type = other DNA
ttgtacattttatgagattattacgaatgagatttgcagttccatttgatcaattatcaaatagaattactagatctcgt

SEQ ID NO: 7217 - DNA, 80 bp, synthetic construct
  misc_feature 1..80: note = Synthetic: >NC_007574.1-cand-680-759
  source 1..80: mol_type = other DNA
gttttctctaaaagcagaattcatattggattacgtaatgaatcaataccacaggctttggataatatacactcacagtg

SEQ ID NO: 7218 - DNA, 80 bp, synthetic construct
  misc_feature 1..80: note = Synthetic: >NC_007574.1-cand-770-849
  source 1..80: mol_type = other DNA
tctgcaaatggaatagtaatttcagaattaaaaggattagggagttactctgaaaaaaagataagtgaatttggtattgg

SEQ ID NO: 7219 - DNA, 80 bp, synthetic construct
  misc_feature 1..80: note = Synthetic: >NC_007574.1-cand-850-929
  source 1..80: mol_type = other DNA
acaatttaaaaattatatgaattttcttactttaatgttttatattaaaaatatgaaaaagaaaccatcgtgtacaataa

SEQ ID NO: 7220 - DNA, 80 bp, synthetic construct
  misc_feature 1..80: note = Synthetic: >NC_007574.1-cand-930-1009
  source 1..80: mol_type = other DNA
ttggtgcagcgcctggttattggatttcatcaatgaaaaaatattttaccatagtaacatacgacaacaaggaagtcgat

SEQ ID NO: 7221 - DNA, 80 bp, synthetic construct
  misc_feature 1..80: note = Synthetic: >NC_007574.1-cand-1010-1089
  source 1..80: mol_type = other DNA
agtacagaacatcataatagatacttcacagatgatgatatcgttaacgtgaaaacaaatggtgtttatattgatgtgag

SEQ ID NO: 7222 - DNA, 80 bp, synthetic construct
  misc_feature 1..80: note = Synthetic: >NC_007574.1-cand-1100-1179
  source 1..80: mol_type = other DNA
aaaacaaatgactggcgacaaagaagaaagttaatagaagaagaaacgataaaatggttggaaatttcttataaattact

SEQ ID NO: 7223 - DNA, 80 bp, synthetic construct
  misc_feature 1..80: note = Synthetic: >NC_007574.1-cand-1300-1379
  source 1..80: mol_type = other DNA
tgataaacatatcattaaaagacaaaaaataaaagttactaaatccttaatgtataatgccataaatactatatactcag

SEQ ID NO: 7224 - DNA, 80 bp, synthetic construct
  misc_feature 1..80: note = Synthetic: >NC_007574.1-cand-1420-1499
  source 1..80: mol_type = other DNA
aactgaaggagtattagctttatactgtttatcgaatacaataaatcaaaaagagaaggtgatacagtacgcgaattcat

SEQ ID NO: 7225 - DNA, 80 bp, synthetic construct
  misc_feature 1..80: note = Synthetic: >NC_007574.1-cand-1480-1559
  source 1..80: mol_type = other DNA
gatacagtacgcgaattcattttcaggaacatgtatgactgtaagattaaataatacatatgaagttgacaaaataatag

SEQ ID NO: 7226 - DNA, 80 bp, synthetic construct
  misc_feature 1..80: note = Synthetic: >NC_009238.1-cand-3300-3379
  source 1..80: mol_type = other DNA
tgttgtctacaattagctttaaaaatctaacaactaattcatctatttttttatttagtccagtataccaggctattgaa

SEQ ID NO: 7227 - DNA, 80 bp, synthetic construct
  misc_feature 1..80: note = Synthetic: >NC_009238.1-cand-3380-3459
  source 1..80: mol_type = other DNA
gccatataaagcagtatttttctttctccaacaacaattttatccatttcattaaaaagctttttaaaccttttagttag

SEQ ID NO: 7228 - DNA, 80 bp, synthetic construct
  misc_feature 1..80: note = Synthetic: >NC_009238.1-cand-3460-3539
  source 1..80: mol_type = other DNA
tagctttttcctagttaaggttaaacagttatatcttctttctgctataactctatcaatggcttgtgtgcaagcatttt

SEQ ID NO: 7229 - DNA, 80 bp, synthetic construct
  misc_feature 1..80: note = Synthetic: >NC_009238.1-cand-3540-3619
  source 1..80: mol_type = other DNA
tttggcttttactttcttgcaaaagcacagcattttcatgattttgcacatgtacccttttatgggtagcatcatcattt

SEQ ID NO: 7230 - DNA, 80 bp, synthetic construct
  misc_feature 1..80: note = Synthetic: >NC_009238.1-cand-3620-3699
  source 1..80: mol_type = other DNA
ttactgcatttttcacactcttcaggcttagtagcaaaccttatatatgaccccagtaagtaatacacatcatctatgtc

SEQ ID NO: 7231 - DNA, 80 bp, synthetic construct
  misc_feature 1..80: note = Synthetic: >NC_009238.1-cand-3700-3779
  source 1..80: mol_type = other DNA
aaattccagagcaaagttagctatttgattccagcttaatgagggttccttaggttccccaaataaatcttctggattaa

SEQ ID NO: 7232 - DNA, 80 bp, synthetic construct
  misc_feature 1..80: note = Synthetic: >NC_009238.1-cand-3790-3869
  source 1..80: mol_type = other DNA
ttttaaccctccaggaatattttcttcacacaaattaaatggttgtctacacatcctactatacagaccataagggttat

SEQ ID NO: 7233 - DNA, 80 bp, synthetic construct
  misc_feature 1..80: note = Synthetic: >NC_009238.1-cand-3880-3959
  source 1..80: mol_type = other DNA
acagaataaaaagctaacagtacaatgacctttgcagaagttattaatagcactaactctatgcttgtgaggagttaaga

SEQ ID NO: 7234 - DNA, 80 bp, synthetic construct
  misc_feature 1..80: note = Synthetic: >NC_009238.1-cand-3960-4039
  source 1..80: mol_type = other DNA
aaaatattaaaacagtattataaaatgcatgcttacttataaagctacattgatacttttgaagtaactttttataaagt

SEQ ID NO: 7235 - DNA, 80 bp, synthetic construct
  misc_feature 1..80: note = Synthetic: >NC_009238.1-cand-4040-4119
  source 1..80: mol_type = other DNA
acttcccctttttctctagtagtatgtactacaaagcacgttatacacttattactaaatacagcatgtgaaacaaactc

SEQ ID NO: 7236 - DNA, 80 bp, synthetic construct
  misc_feature 1..80: note = Synthetic: >NC_009238.1-cand-4090-4169
  source 1..80: mol_type = other DNA
attactaaatacagcatgtgaaacaaactctaacaactctttaggaaattctaaagaagcatcaaatgcatgttttttct

SEQ ID NO: 7237 - DNA, 80 bp, synthetic construct
  misc_feature 1..80: note = Synthetic: >NC_009238.1-cand-4200-4279
  source 1..80: mol_type = other DNA
cctcttctggtgcacttctttttggagaagatggcatggattcattacatcttaactcttcttcccagtaggtgttgaac

SEQ ID NO: 7238 - DNA, 80 bp, synthetic construct
  misc_feature 1..80: note = Synthetic: >NC_009238.1-cand-4280-4359
  source 1..80: mol_type = other DNA
tgtgaccaccactcatcccagtcaggtgtaccgtatgtaggtatctatacaacaaaaatatacatttaatattacacaaa

SEQ ID NO: 7239 - DNA, 80 bp, synthetic construct
  misc_feature 1..80: note = Synthetic: >NC_009238.1-cand-4370-4449
  source 1..80: mol_type = other DNA
aaaacattattttatgcttaccgtaataatggttgaactgctcgtatttcagtattaaaaataatcactttccaaaagaa

SEQ ID NO: 7240 - DNA, 80 bp, synthetic construct
  misc_feature 1..80: note = Synthetic: >NC_009238.1-cand-4450-4529
  source 1..80: mol_type = other DNA
aaatgtttgcattgaaattggaaaaaaaaaccactccctgtagcacttatagcagtagcactctatccacacaggtggtt

SEQ ID NO: 7241 - DNA, 80 bp, synthetic construct
  misc_feature 1..80: note = Synthetic: >NC_009238.1-cand-4540-4619
  source 1..80: mol_type = other DNA
tttgtacttttctttatgatatttgcttaaaatacagtgaatgcattggcattcgtgattgtagccatgaatgcatacat

SEQ ID NO: 7242 - DNA, 80 bp, synthetic construct
  misc_feature 1..80: note = Synthetic: >NC_010563.1-cand-1460-1539
  source 1..80: mol_type = other DNA
atcatcttcctcaatgcttaaaacctcattaaaccaaaagaaagacctcaaagttgaagtggacacaatgagagggttaa

SEQ ID NO: 7243 - DNA, 80 bp, synthetic construct
  misc_feature 1..80: note = Synthetic: >NC_010563.1-cand-1540-1619
  source 1..80: mol_type = other DNA
tcattgaggaaagcaaaaattggaccttaaaattgtaacaaatttgctgtgggcttaaacccagatcttggtcaacataa

SEQ ID NO: 7244 - DNA, 80 bp, synthetic construct
  misc_feature 1..80: note = Synthetic: >NC_010563.1-cand-1620-1699
  source 1..80: mol_type = other DNA
tcagcttgtcgtacatgagcaccagcacactcactttgtttaacaatgtatatggtgttatttctccctctcaggaggtg

SEQ ID NO: 7245 - DNA, 80 bp, synthetic construct
  misc_feature 1..80: note = Synthetic: >NC_010563.1-cand-1700-1779
  source 1..80: mol_type = other DNA
accaattatccccaagttctcatttaccatatccaatgccacacaaatgtcaagaaactttatcttcgatggatttatca

SEQ ID NO: 7246 - DNA, 80 bp, synthetic construct
  misc_feature 1..80: note = Synthetic: >NC_010563.1-cand-1780-1859
  source 1..80: mol_type = other DNA
tctgatttgattgaagatcactcataaatggagccagatgttcctcaaacaattgaggataattcttctttatcgaatgt

SEQ ID NO: 7247 - DNA, 80 bp, synthetic construct
  misc_feature 1..80: note = Synthetic: >NC_010563.1-cand-1850-1929
  source 1..80: mol_type = other DNA
tatcgaatgtagtatatgattcaaaccaagcctatcctctatgtgtttgtgtgttctgggttttattgcccagaaaagat

SEQ ID NO: 7248 - DNA, 80 bp, synthetic construct
  misc_feature 1..80: note = Synthetic: >NC_010563.1-cand-1940-2019
  source 1..80: mol_type = other DNA
caaaatggtagccttagttggaagttttacgcttgagaaaacccattcacccaactcacaggcattggttaaaacaagtg

SEQ ID NO: 7249 - DNA, 80 bp, synthetic construct
  misc_feature 1..80: note = Synthetic: >NC_010563.1-cand-2020-2099
  source 1..80: mol_type = other DNA
tgaaataatcccacataattgaccttgtaaactggaagatcttttccactgatttctcacagtacacaacacccctccac

SEQ ID NO: 7250 - DNA, 80 bp, synthetic construct
  misc_feature 1..80: note = Synthetic: >NC_010563.1-cand-2100-2179
  source 1..80: mol_type = other DNA
actgaacaatgtttacattcgcacgtagtgatcttcttgtaaatgtctttcaagtagatgaaaccaccacttccatccct

SEQ ID NO: 7251 - DNA, 80 bp, synthetic construct
  misc_feature 1..80: note = Synthetic: >NC_010563.1-cand-2180-2259
  source 1..80: mol_type = other DNA
tacacacttgcttcccatactcttgcagaatcctataaaccctgaggccactgatgattgaaaagcagatttatttatag

SEQ ID NO: 7252 - DNA, 80 bp, synthetic construct
  misc_feature 1..80: note = Synthetic: >NC_010563.1-cand-2260-2339
  source 1..80: mol_type = other DNA
actccgctaatatcttctttgcccctttcgtaaagttttttgacattcttgattgtaaagtcttcactagactcgggatg

SEQ ID NO: 7253 - DNA, 80 bp, synthetic construct
  misc_feature 1..80: note = Synthetic: >NC_010563.1-cand-2330-2409
  source 1..80: mol_type = other DNA
actcgggatgctttccctctctaaaactcttttacttgacattatcttggtccttaagactaacctcagatcaccaaatg

SEQ ID NO: 7254 - DNA, 80 bp, synthetic construct
  misc_feature 1..80: note = Synthetic: >NC_010563.1-cand-2410-2489
  source 1..80: mol_type = other DNA
ttgatgtgttcacccatctgtatctcaatgcgttctcaatctcatccttatccacttcagcatataaaagaaaacctcgc

SEQ ID NO: 7255 - DNA, 80 bp, synthetic construct
  misc_feature 1..80: note = Synthetic: >NC_010563.1-cand-2490-2569
  source 1..80: mol_type = other DNA
aaggcctcatcacctcccctacctatcaagccaattaagttctcttcaaagatacgtccattttttattcctagaaacac

SEQ ID NO: 7256 - DNA, 80 bp, synthetic construct
  misc_feature 1..80: note = Synthetic: >NC_010563.1-cand-2570-2649
  source 1..80: mol_type = other DNA
tttcctagcaccttttctcatcacttctaaaattttagaatctctgagggagttctctatattcctctgcaaacgatagc

SEQ ID NO: 7257 - DNA, 80 bp, synthetic construct
  misc_feature 1..80: note = Synthetic: >NC_010563.1-cand-2650-2729
  source 1..80: mol_type = other DNA
ctctagaaccatcagaccaatcttttacatcttgtttcaccaccgaaaggaatggtgtttctccaaagcctgaatactta

SEQ ID NO: 7258 - DNA, 80 bp, synthetic construct
  misc_feature 1..80: note = Synthetic: >NC_011502.2-cand-960-1039
  source 1..80: mol_type = other DNA
agaaaaatggacgaagtttctcaagttggcgtttaattcgctatcaatttgaggatgatgatggcttagcaagaatagaa

SEQ ID NO: 7259 - DNA, 80 bp, synthetic construct
  misc_feature 1..80: note = Synthetic: >NC_011503.2-cand-0-79
  source 1..80: mol_type = other DNA
ttaaaagagagaatttccgtttggctagcggttagctccttttaatgtatggtattgaatataccacagttctaaccttt

SEQ ID NO: 7260 - DNA, 80 bp, synthetic construct
  misc_feature 1..80: note = Synthetic: >NC_011503.2-cand-90-169
  source 1..80: mol_type = other DNA
ttattctactaaattacatacttaaatcattaactagaataatggactttataatttatagatttctttttataattgtg

SEQ ID NO: 7261 - DNA, 80 bp, synthetic construct
  misc_feature 1..80: note = Synthetic: >NC_011503.2-cand-280-359
  source 1..80: mol_type = other DNA
tacactttgcctatattatccgactgaggctgcgactgaaataaacgataattcatggaaagacacactgtcacaactat

SEQ ID NO: 7262 - DNA, 80 bp, synthetic construct
  misc_feature 1..80: note = Synthetic: >NC_011503.2-cand-370-449
  source 1..80: mol_type = other DNA
agggtggccaactggatccgtatattttaaagaatatactaacattgcatcgttttctgttgatccgcagttgtattgtg

SEQ ID NO: 7263 - DNA, 80 bp, synthetic construct
  misc_feature 1..80: note = Synthetic: >NC_011503.2-cand-460-539
  source 1..80: mol_type = other DNA
agtactaatgaaatatgacgcgacgttgcaattggatatgtcagaacttgcggatctaatattaaacgaatggttgtgta

SEQ ID NO: 7264 - DNA, 80 bp, synthetic construct
  misc_feature 1..80: note = Synthetic: >NC_011503.2-cand-540-619
  source 1..80: mol_type = other DNA
atccaatggatattactctgtattattatcagcaaactgacgaagcgaataaatggatatcaatgggctcatcatgtaca

SEQ ID NO: 7265 - DNA, 80 bp, synthetic construct
  misc_feature 1..80: note = Synthetic: >NC_011503.2-cand-630-709
  source 1..80: mol_type = other DNA
gtccacttaatacacaaactcttggaattggatgcttgacaactgatgctacaacttttgaagaagttgcgacagctgaa

SEQ ID NO: 7266 - DNA, 80 bp, synthetic construct
  misc_feature 1..80: note = Synthetic: >NC_011503.2-cand-710-789
  source 1..80: mol_type = other DNA
aagttggtaattactgacgtggttgatggcgttaatcataagctggatgtcacaacagcaacgtgtactattagaaactg

SEQ ID NO: 7267 - DNA, 80 bp, synthetic construct
  misc_feature 1..80: note = Synthetic: >NC_011503.2-cand-790-869
  source 1..80: mol_type = other DNA
taagaaattgggaccaagagaaaacgtagccgttatacaagttggtggttctgacatcctcgatataactgctgatccaa

SEQ ID NO: 7268 - DNA, 80 bp, synthetic construct
  misc_feature 1..80: note = Synthetic: >NC_011503.2-cand-880-959
  source 1..80: mol_type = other DNA
acagacagaacggatgatgcgaattaactggaaaaaatggtggcaagttttttatactgtagtagactatgtagatcaga

SEQ ID NO: 7269 - DNA, 80 bp, synthetic construct
  misc_feature 1..80: note = Synthetic: >NC_011503.2-cand-970-1049
  source 1..80: mol_type = other DNA
tatgtccaaaagatcaagatcactaaattcagcagcattttattacagagtgtaggtataacttaggttagaattgtatg

SEQ ID NO: 7270 - DNA, 80 bp, synthetic construct
  misc_feature 1..80: note = Synthetic: >NC_011504.2-cand-120-199
  source 1..80: mol_type = other DNA
aggaatggcgtattttccttatatagcatctgtcttaacagttttgtttgcgctacataaagcatccattccaacaatga

SEQ ID NO: 7271 - DNA, 80 bp, synthetic construct
  misc_feature 1..80: note = Synthetic: >NC_011504.2-cand-210-289
  source 1..80: mol_type = other DNA
gaaaacgtcaaaatgttcatataaagtggtgaaatattgtattgtaacaatttttaatacgttgttaaaattggcaggtt

SEQ ID NO: 7272 - DNA, 80 bp, synthetic construct
  misc_feature 1..80: note = Synthetic: >NC_011504.2-cand-300-379
  source 1..80: mol_type = other DNA
gataactactaaagatgagatagaaaagcaaatggacagagtagtcaaagaaatgagacgccagctagaaatgattgaca

SEQ ID NO: 7273 - DNA, 80 bp, synthetic construct
  misc_feature 1..80: note = Synthetic: >NC_011504.2-cand-390-469
  source 1..80: mol_type = other DNA
acgtgaaattgaacaagtagagttgcttaaacgcatttacgataaattgacggtgcaaacgacaggcgaaatagatatga

SEQ ID NO: 7274 - DNA, 80 bp, synthetic construct
  misc_feature 1..80: note = Synthetic: >NC_011507.2-cand-3040-3119
  source 1..80: mol_type = other DNA
caattcaccggacttggagaagctgataagaataccatttaagggaaaaataccagctgttacattcatattacacttat

SEQ ID NO: 7275 - DNA, 80 bp, synthetic construct
  misc_feature 1..80: note = Synthetic: >NC_011507.2-cand-3120-3199
  source 1..80: mol_type = other DNA
atgcaaagctagaagttataaactacgctataaaaaatggttcatggataagcctattttgcaattaccctaaatcagaa

SEQ ID NO: 7276 - DNA, 80 bp, synthetic construct
  misc_feature 1..80: note = Synthetic: >NC_011507.2-cand-3200-3279
  source 1..80: mol_type = other DNA
atgataaaattatggaagaagatgtggaacatcacgtcattacgttcgccgtacactaacgcgaacttctttcaagatta

SEQ ID NO: 7277 - DNA, 80 bp, synthetic construct
  misc_feature 1..80: note = Synthetic: >NC_011508.2-cand-0-79
  source 1..80: mol_type = other DNA
tttaaagcagtaccagtagtgtgttttacctctgatggtgtaaacatgaaagtactagctttaagacacagtgtggctca

SEQ ID NO: 7278 - DNA, 80 bp, synthetic construct
  misc_feature 1..80: note = Synthetic: >NC_011508.2-cand-60-139
  source 1..80: mol_type = other DNA
ttaagacacagtgtggctcaagtgtatgcagacactcaagtctacgttcatgatgatacaaaagatagttatgaaaacgc

SEQ ID NO: 7279 - DNA, 80 bp, synthetic construct
  misc_feature 1..80: note = Synthetic: >NC_011508.2-cand-140-219
  source 1..80: mol_type = other DNA
ttttttaatctctaatcttacgacccataatattttatacttaaattatagcattaaaacattagaaatattaaataagt

SEQ ID NO: 7280 - DNA, 80 bp, synthetic construct
  misc_feature 1..80: note = Synthetic: >NC_011508.2-cand-220-299
  source 1..80: mol_type = other DNA
caggaatagctgcaattgctttacaatcacttgaagaattattcacattaataaggtgtaatttcacttatgattatgaa

SEQ ID NO: 7281 - DNA, 80 bp, synthetic construct
  misc_feature 1..80: note = Synthetic: >NC_011508.2-cand-300-379
  source 1..80: mol_type = other DNA
cttgatataatatatttacatgattattcatattataccaataatgaaattagaacagaccaacattggataacaaaaac

SEQ ID NO: 7282 - DNA, 80 bp, synthetic construct
  misc_feature 1..80: note = Synthetic: >NC_011508.2-cand-380-459
  source 1..80: mol_type = other DNA
aaatattgaagaatatttactacctggatggaaattaacatatgttggttataatggaagtgaaactagaggacattata

SEQ ID NO: 7283 - DNA, 80 bp, synthetic construct
  misc_feature 1..80: note = Synthetic: >NC_011508.2-cand-460-539
  source 1..80: mol_type = other DNA
acttttcatttaaatgtcaaaacgctgcaacagatgatgatctaataattgaatacatttattcagaagcgttggacttc

SEQ ID NO: 7284 - DNA, 80 bp, synthetic construct
  misc_feature 1..80: note = Synthetic: >NC_011508.2-cand-530-609
  source 1..80: mol_type = other DNA
gttggacttccaaaattttatgttaaaaaagataaaggaaagaatgactacatcgttgcctatagctagattatctaaca

SEQ ID NO: 7285 - DNA, 80 bp, synthetic construct
  misc_feature 1..80: note = Synthetic: >NC_011508.2-cand-610-689
  source 1..80: mol_type = other DNA
gagtatttagggataagttattcccatcattattgaaagaacataagaatgtagtgaacgttggtccgcgtaatgaatct

SEQ ID NO: 7286 - DNA, 80 bp, synthetic construct
  misc_feature 1..80: note = Synthetic: >NC_011508.2-cand-690-769
  source 1..80: mol_type = other DNA
atgtttacatttttaaattatccaactataaaacaattttcaaatggtgcgtatttagtaaaagatactataaaattaaa

SEQ ID NO: 7287 - DNA, 80 bp, synthetic construct
  misc_feature 1..80: note = Synthetic: >NC_011508.2-cand-770-849
  source 1..80: mol_type = other DNA
acaagaacgatggttaggtaaaaggatatctcagtttgatattggtcagtataaaaatatgctgaatgttcttacagcaa

SEQ ID NO: 7288 - DNA, 80 bp, synthetic construct
  misc_feature 1..80: note = Synthetic: >NC_011508.2-cand-850-929
  source 1..80: mol_type = other DNA
tttattattactataatttatataaaagtaaaccaattatatatatgatcggatctgctccatcttattggatatatgac

SEQ ID NO: 7289 - DNA, 80 bp, synthetic construct
  misc_feature 1..80: note = Synthetic: >NC_011508.2-cand-930-1009
  source 1..80: mol_type = other DNA
gttaggcattattccgattttttctttgaaacttgggatccattggacacaccatattcatcaatccatcacaaagaatt

SEQ ID NO: 7290 - DNA, 80 bp, synthetic construct
  misc_feature 1..80: note = Synthetic: >NC_012532.1-cand-4190-4269
  source 1..80: mol_type = other DNA
aaggagtgggaagcggagctggccccctagtgaagttctcacagccgttggcctgatatgtgcactggccggagggtttg

SEQ ID NO: 7291 - DNA, 80 bp, synthetic construct
  misc_feature 1..80: note = Synthetic: >NC_012532.1-cand-4270-4349
  source 1..80: mol_type = other DNA
ccaaggcagacattgagatggctggacccatggctgcagtaggcttgctaattgtcagctatgtggtctcgggaaagagt

SEQ ID NO: 7292 - DNA, 80 bp, synthetic construct
  misc_feature 1..80: note = Synthetic: >NC_012532.1-cand-4350-4429
  source 1..80: mol_type = other DNA
gtggacatgtacattgaaagagcaggtgacatcacatgggaaaaggacgcggaagtcactggaaacagtcctcggcttga

SEQ ID NO: 7293 - DNA, 80 bp, synthetic construct
  misc_feature 1..80: note = Synthetic: >NC_012532.1-cand-4440-4519
  source 1..80: mol_type = other DNA
gatgagagtggtgacttctccttggtagaggaagatggtccacccatgagagagatcatactcaaggtggtcctgatggc

SEQ ID NO: 7294 - DNA, 80 bp, synthetic construct
  misc_feature 1..80: note = Synthetic: >NC_012532.1-cand-4520-4599
  source 1..80: mol_type = other DNA
catctgtggcatgaacccaatagctataccttttgctgcaggagcgtggtatgtgtatgtgaagactgggaaaaggagtg

SEQ ID NO: 7295 - DNA, 80 bp, synthetic construct
  misc_feature 1..80: note = Synthetic: >NC_012532.1-cand-4600-4679
  source 1..80: mol_type = other DNA
gcgccctctgggacgtgcctgctcccaaagaagtgaagaaaggagagaccacagatggagtgtacagagtgatgactcgc

SEQ ID NO: 7296 - DNA, 80 bp, synthetic construct
  misc_feature 1..80: note = Synthetic: >NC_012532.1-cand-4680-4759
  source 1..80: mol_type = other DNA
agactgctaggttcaacacaggttggagtgggagtcatgcaagagggagtcttccacaccatgtggcacgttacaaaagg

SEQ ID NO: 7297 - DNA, 80 bp, synthetic construct
  misc_feature 1..80: note = Synthetic: >NC_012532.1-cand-4720-4799
  source 1..80: mol_type = other DNA
aagagggagtcttccacaccatgtggcacgttacaaaaggagccgcactgaggagcggtgagggaagacttgatccatac

SEQ ID NO: 7298 - DNA, 80 bp, synthetic construct
  misc_feature 1..80: note = Synthetic: >NC_012532.1-cand-4840-4919
  source 1..80: mol_type = other DNA
cttggaagttggatgcagcttgggatggactcagcgaggtacagcttttggccgtacctcccggagagagggccagaaac

SEQ ID NO: 7299 - DNA, 80 bp, synthetic construct
  misc_feature 1..80: note = Synthetic: >NC_012532.1-cand-4960-5039
  source 1..80: mol_type = other DNA
acatcggagcagttgctctggactaccctgcagggacctcaggatctccgatcctagacaaatgtggaagagtgatagga

SEQ ID NO: 7300 - DNA, 80 bp, synthetic construct
  misc_feature 1..80: note = Synthetic: >NC_012532.1-cand-4970-5049
  source 1..80: mol_type = other DNA
agttgctctggactaccctgcagggacctcaggatctccgatcctagacaaatgtggaagagtgataggactctatggca

SEQ ID NO: 7301 - DNA, 80 bp, synthetic construct
  misc_feature 1..80: note = Synthetic: >NC_012532.1-cand-5080-5159
  source 1..80: mol_type = other DNA
ttagtgctataacccagggaaagagggaggaggagactccggttgaatgtttcgaaccctcgatgctgaagaagaagcag

SEQ ID NO: 7302 - DNA, 80 bp, synthetic construct
  misc_feature 1..80: note = Synthetic: >NC_012532.1-cand-5160-5239
  source 1..80: mol_type = other DNA
ctaactgtcttggatctgcatccaggagccggaaaaaccaggagagttcttcctgaaatagtccgtgaagccataaaaaa

SEQ ID NO: 7303 - DNA, 80 bp, synthetic construct
  misc_feature 1..80: note = Synthetic: >NC_012532.1-cand-5240-5319
  source 1..80: mol_type = other DNA
gagactccggacagtgatcttggcaccaactagggttgtcgctgctgagatggaggaggccttgagaggacttccggtgc

SEQ ID NO: 7304 - DNA, 80 bp, synthetic construct
  misc_feature 1..80: note = Synthetic: >NC_012532.1-cand-5320-5399
  source 1..80: mol_type = other DNA
gttacatgacaacagcagtcaacgtcacccattctgggacagaaatcgttgatttgatgtgccatgccactttcacttca

SEQ ID NO: 7305 - DNA, 80 bp, synthetic construct
  misc_feature 1..80: note = Synthetic: >NC_012532.1-cand-5400-5479
  source 1..80: mol_type = other DNA
cgcttactacaacccatcagagtccctaattacaatctcaacatcatggatgaagcccacttcacagacccctcaagtat

SEQ ID NO: 7306 - DNA, 80 bp, synthetic construct
  misc_feature 1..80: note = Synthetic: >NC_025114.1-cand-1110-1189
  source 1..80: mol_type = other DNA
ggtgccaacgggatgtcccttcccgttgccgtgggtgacatgcccactgcctcctcctctgaagcccctattggctcgaa

SEQ ID NO: 7307 - DNA, 80 bp, synthetic construct
  misc_feature 1..80: note = Synthetic: >NC_025114.1-cand-1200-1279
  source 1..80: mol_type = other DNA
tcctcctcctcccccaaatcctcgtccgatggcaatgtcgtgcgcggatcccgctactccaagtggtgggagcccgctgc

SEQ ID NO: 7308 - DNA, 80 bp, synthetic construct
  misc_feature 1..80: note = Synthetic: >NC_025114.1-cand-1280-1359
  source 1..80: mol_type = other DNA
cgcgcgtgccttggaccgtgcccttgaccatgcagttgacgcgacggactccgtcgccggcgctgtctcgggtggcatca

SEQ ID NO: 7309 - DNA, 80 bp, synthetic construct
  misc_feature 1..80: note = Synthetic: >NC_025114.1-cand-1360-1439
  source 1..80: mol_type = other DNA
aggctggtgctagaaagctcaccaacaagttttctggcgcccaaaccacacgccttctcgccctcccgggaaacatcgcc

SEQ ID NO: 7310 - DNA, 80 bp, synthetic construct
  misc_feature 1..80: note = Synthetic: >NC_025114.1-cand-1440-1519
  source 1..80: mol_type = other DNA
ggtggagctccatcctccgccgtcaatgcaaacaacaccaccatttcctcccaggctctcttgcctgttgttgaccctta

SEQ ID NO: 7311 - DNA, 80 bp, synthetic construct
  misc_feature 1..80: note = Synthetic: >NC_025114.1-cand-1520-1599
  source 1..80: mol_type = other DNA
cccggccacatccgctgtctctctccccaatccagatgctccaactgaggtcggccccgcggctgaccgccagtggctca

SEQ ID NO: 7312 - DNA, 80 bp, synthetic construct
  misc_feature 1..80: note = Synthetic: >NC_025114.1-cand-1600-1679
  source 1..80: mol_type = other DNA
tcgacaccctcacctggtctgaatcccagggcgcactccaagtgttctctgggcccaaggccctctctcctggtgtctac

SEQ ID NO: 7313 - DNA, 80 bp, synthetic construct
  misc_feature 1..80: note = Synthetic: >NC_025114.1-cand-1680-1759
  source 1..80: mol_type = other DNA
ccccccactcttgaacccaacactggtgtttaccccttgcccgctgctctgtgcactgcccaccctgactgtgtctttgc

SEQ ID NO: 7314 - DNA, 80 bp, synthetic construct
  misc_feature 1..80: note = Synthetic: >NC_025114.1-cand-1760-1839
  source 1..80: mol_type = other DNA
tgccgcttacaacacccacgcctacttcaactgtggctttgacgtcacggtcgtcgtgaatgcttcccagtttcacggcg

SEQ ID NO: 7315 - DNA, 80 bp, synthetic construct
  misc_feature 1..80: note = Synthetic: >NC_025114.1-cand-1870-1949
  source 1..80: mol_type = other DNA
ggctgggtgacatcacccctgctgactcctccacttggttcaacttcccccatgccattatcaacctggctaactctaac

SEQ ID NO: 7316 - DNA, 80 bp, synthetic construct
  misc_feature 1..80: note = Synthetic: >NC_025114.1-cand-1920-1999
  source 1..80: mol_type = other DNA
catgccattatcaacctggctaactctaactctgccactctcaaacttccctacattgggatcacccccaacacctcgac

SEQ ID NO: 7317 - DNA, 80 bp, synthetic construct
  misc_feature 1..80: note = Synthetic: >NC_025114.1-cand-2000-2079
  source 1..80: mol_type = other DNA
agaggctctccacaactactggactatcctctttgcccctctcaccccgctagctgtccccaccggcgcccccacctctg

SEQ ID NO: 7318 - DNA, 80 bp, synthetic construct
  misc_feature 1..80: note = Synthetic: >NC_025114.1-cand-2080-2159
  source 1..80: mol_type = other DNA
tcaaggtctctctctttgtggcccccagtgcatctgccttctatggtctcagattccctgtgccctaccccactccccag

SEQ ID NO: 7319 - DNA, 80 bp, synthetic construct
  misc_feature 1..80: note = Synthetic: >NC_025114.1-cand-2160-2239
  source 1..80: mol_type = other DNA
cactggaagacccgtgtggtccctggtgcctccacatacggctcggtcgtggctggccaggaaatccccctggtcggcta

SEQ ID NO: 7320 - DNA, 80 bp, synthetic construct
  misc_feature 1..80: note = Synthetic: >NC_025114.1-cand-2240-2319
  source 1..80: mol_type = other DNA
cgcacccgctgcccctccccgcaactacctccccgggcgcgtgcacaattggctcgagtacgctgcccgccactcctggg

SEQ ID NO: 7321 - DNA, 80 bp, synthetic construct
  misc_feature 1..80: note = Synthetic: >NC_025114.1-cand-2320-2399
  source 1..80: mol_type = other DNA
aaaggaacgtgttgtggaccgccgctgaagaagttggcgcccaactcgtgacctacccaatccaaccacaaaccattgct

SEQ ID NO: 7322 - DNA, 80 bp, synthetic construct
  misc_feature 1..80: note = Synthetic: >NC_025114.1-cand-7540-7619
  source 1..80: mol_type = other DNA
ttgtccctgatgacatccactcccatctcatccatcctgtgatggaccctgaaacccttaccaactcaatcatgtggttg

SEQ ID NO: 7323 - DNA, 80 bp, synthetic construct
  misc_feature 1..80: note = Synthetic: >NC_025114.1-cand-7650-7729
  source 1..80: mol_type = other DNA
tcgcttgagaccctggcctttcactccggaccgaagaactattcggactggtgtggcaagatcaaggctaaggtcaatga

SEQ ID NO: 7324 - DNA, 80 bp, synthetic construct
  misc_feature 1..80: note = Synthetic: >NC_025114.1-cand-7730-7809
  source 1..80: mol_type = other DNA
gaacggctgcgacgtcaccttcactccctactccgtactccagcgtggttgggtctcctcctgcatgactggaccctacc

SEQ ID NO: 7325 - DNA, 80 bp, synthetic construct
  misc_feature 1..80: note = Synthetic: >NC_025114.1-cand-7810-7889
  source 1..80: mol_type = other DNA
ctctcacagggtagccccttgaaacccccgccccaggttcagtctctcttcatccctctgtcctgcatggtgatacaaag

SEQ ID NO: 7326 - DNA, 80 bp, synthetic construct
  misc_feature 1..80: note = Synthetic: >NC_025114.1-cand-7890-7969
  source 1..80: mol_type = other DNA
accctttgtggaccctaagccatgtagttgctgctccctccttccagttgtgaatattggtttctgttaatcacaaaaaa

SEQ ID NO: 7327 - DNA, 80 bp, synthetic construct
  misc_feature 1..80: note = Synthetic: >NC_026422.1-cand-0-79
  source 1..80: mol_type = other DNA
aaagaataaaagaactaagagatttgatgtcacagtctcgcactcgcgagatactgacaaaaacaactgtggaccatatg

SEQ ID NO: 7328 - DNA, 80 bp, synthetic construct
  misc_feature 1..80: note = Synthetic: >NC_026422.1-cand-80-159
  source 1..80: mol_type = other DNA
gccataatcaagaaatatacatcaggaagacaggagaagaatcctgcccttaggatgaagtggatgatggcaatgaaata

SEQ ID NO: 7329 - DNA, 80 bp, synthetic construct
  misc_feature 1..80: note = Synthetic: >NC_026422.1-cand-150-229
  source 1..80: mol_type = other DNA
caatgaaatatccaattacggcagacaaaaggataatggagatgatcccggaaagaaatgagcaaggtcagaccctttgg

SEQ ID NO: 7330 - DNA, 80 bp, synthetic construct
  misc_feature 1..80: note = Synthetic: >NC_026422.1-cand-230-309
  source 1..80: mol_type = other DNA
agcaagacaaatgatgctggatcagacagagtgatggtgtcacctctggctgtgacgtggtggaacagaaatggaccaac

SEQ ID NO: 7331 - DNA, 80 bp, synthetic construct
  misc_feature 1..80: note = Synthetic: >NC_026422.1-cand-310-389
  source 1..80: mol_type = other DNA
gacaagcacagtccattatccaaaggtctataaaacctattttgaaaaggtcgaaaggctaaaacatggaaccttcggcc

SEQ ID NO: 7332 - DNA, 80 bp, synthetic construct
  misc_feature 1..80: note = Synthetic: >NC_026422.1-cand-390-469
  source 1..80: mol_type = other DNA
ccgttcacttcagaaaccaggttaaaatacgccgcagggtcgacataaacccgggccatgcagatcttagtgctaaagaa

SEQ ID NO: 7333 - DNA, 80 bp, synthetic construct
  misc_feature 1..80: note = Synthetic: >NC_026422.1-cand-460-539
  source 1..80: mol_type = other DNA
tgctaaagaagcacaggatgtcatcatggaggtcgtattcccaaacgaagttggagccagaatattgacatcagagtcac

SEQ ID NO: 7334 - DNA, 80 bp, synthetic construct
  misc_feature 1..80: note = Synthetic: >NC_026422.1-cand-540-619
  source 1..80: mol_type = other DNA
agttaacgattaccaaggaaaagaagaaggagcttcaggactgcaaaattgcccctttaatggtggcttacatgttggag

SEQ ID NO: 7335 - DNA, 80 bp, synthetic construct
  misc_feature 1..80: note = Synthetic: >NC_026422.1-cand-620-699
  source 1..80: mol_type = other DNA
agagaactggttcgcaaaacaagattcctaccagtagctggagggacaagcagcgtgtatatcgaggtgttgcatttgac

SEQ ID NO: 7336 - DNA, 80 bp, synthetic construct
  misc_feature 1..80: note = Synthetic: >NC_026422.1-cand-660-739
  source 1..80: mol_type = other DNA
gagggacaagcagcgtgtatatcgaggtgttgcatttgacccaagggacctgctgggagcaaatgtacacaccgggaggg

SEQ ID NO: 7337 - DNA, 80 bp, synthetic construct
  misc_feature 1..80: note = Synthetic: >NC_026422.1-cand-780-859
  source 1..80: mol_type = other DNA
ctgctagaaatattgttagaagagcaacagtatcagcagacccgttggcttcgcttttggagatgtgccatagtacacag

SEQ ID NO: 7338 - DNA, 80 bp, synthetic construct
  misc_feature 1..80: note = Synthetic: >NC_038374.1-cand-520-599
  source 1..80: mol_type = other DNA
cgaaattgcatggtaagcatcctcgagaatcgaattcaaatatcatatgagaagactcactgtgtcactggtcagctagt

SEQ ID NO: 7339 - DNA, 80 bp, synthetic construct
  misc_feature 1..80: note = Synthetic: >NC_038374.1-cand-640-719
  source 1..80: mol_type = other DNA
actcaacctgcacatacttatgacactgttacccttcctgtattatgtttcctttcagcaaaaaaatctgatcagatgaa

SEQ ID NO: 7340 - DNA, 80 bp, synthetic construct
  misc_feature 1..80: note = Synthetic: >NC_038374.1-cand-740-819
  source 1..80: mol_type = other DNA
ggatccttcaaaaaaatgactgcactacaaacaacttccaggattcttatgtttgctttatagggaagaattctgaacca

SEQ ID NO: 7341 - DNA, 80 bp, synthetic construct
  misc_feature 1..80: note = Synthetic: >NC_038374.1-cand-810-889
  source 1..80: mol_type = other DNA
ttctgaaccactaattgtcccagctctggaagatatcagatcagctgaaattgtaagtagaatcatcatgcacccgagag

SEQ ID NO: 7342 - DNA, 80 bp, synthetic construct
  misc_feature 1..80: note = Synthetic: >NC_038374.1-cand-890-969
  source 1..80: mol_type = other DNA
gggaagatcatgatccagacaaagctggacaaggcatactaaggatagcagggcctataaaggctaaagtcccacagact

SEQ ID NO: 7343 - DNA, 80 bp, synthetic construct
  misc_feature 1..80: note = Synthetic: >NC_038374.1-cand-970-1049
  source 1..80: mol_type = other DNA
gaaacaagtgaaactatgcaagggattgcttttgcaggtgtcccaatgtacagttctttatcgacgctagtaaaaaaggt

SEQ ID NO: 7344 - DNA, 80 bp, synthetic construct
  misc_feature 1..80: note = Synthetic: >NC_038374.1-cand-1040-1119
  source 1..80: mol_type = other DNA
taaaaaaggttgaacccgagtatgttttcagtcctgggatcctacctgagtcaaatcagagccagtgtgacaagaaaacc

SEQ ID NO: 7345 - DNA, 80 bp, synthetic construct
  misc_feature 1..80: note = Synthetic: >NC_038374.1-cand-1120-1199
  source 1..80: mol_type = other DNA
cttcccttaacatggactggatacctccctatatcaggtgagatggaaaaaatcacaggatgcactgtcttttgcacact

SEQ ID NO: 7346 - DNA, 80 bp, synthetic construct
  misc_feature 1..80: note = Synthetic: >NC_038374.1-cand-1200-1279
  source 1..80: mol_type = other DNA
ggcaggtccaggtgcaagctgtgaggcttattctgagaatgggatatttaacattagttcaccaacatgtcttgtgaata

SEQ ID NO: 7347 - DNA, 80 bp, synthetic construct
  misc_feature 1..80: note = Synthetic: >NC_038374.1-cand-1290-1369
  source 1..80: mol_type = other DNA
attcaaaggttcagaacagaaagttaactttatatgccaaagggtggatcaagatgttgttgtctattgtaatgggcaaa

SEQ ID NO: 7348 - DNA, 80 bp, synthetic construct
  misc_feature 1..80: note = Synthetic: >NC_038374.1-cand-1370-1449
  source 1..80: mol_type = other DNA
aaaaggtgattttaaccaagacacttgtaataggacaatgtatctatacattcactagtttattctccctcgcacccagt

SEQ ID NO: 7349 - DNA, 80 bp, synthetic construct
  misc_feature 1..80: note = Synthetic: >NC_038374.1-cand-1450-1529
  source 1..80: mol_type = other DNA
gtggcacattcattggctgtcgagctctgtgttcctggactacatggttgggcaactgttgcgctagttgtgacattttg

SEQ ID NO: 7350 - DNA, 80 bp, synthetic construct
  misc_feature 1..80: note = Synthetic: >NC_038374.1-cand-1530-1609
  source 1..80: mol_type = other DNA
ttttgggtggcttctgattccagcagtaacccttattatcttaaaaatcttaagggtttgtacatactcatgctcccatt

SEQ ID NO: 7351 - DNA, 80 bp, synthetic construct
  misc_feature 1..80: note = Synthetic: >NC_038374.1-cand-1620-1699
  source 1..80: mol_type = other DNA
atcaaagttcaagatcatactagaaaaggtgaaaattgaataccagaagaccatgggttcaatggtgtgtgatatctgtc

SEQ ID NO: 7352 - DNA, 80 bp, synthetic construct
  misc_feature 1..80: note = Synthetic: >NC_038374.1-cand-1700-1779
  source 1..80: mol_type = other DNA
accatgaatgtgaaacagtcaaggagcttgaaacccacaaaaaaagttgttgtgacgggcagtgcccatattgtatgact

SEQ ID NO: 7353 - DNA, 80 bp, synthetic construct
  misc_feature 1..80: note = Synthetic: >NC_038374.1-cand-1780-1859
  source 1..80: mol_type = other DNA
ttaacagaagccacggaaagtgcattgcaggctcactttgctgtctgtaagctaacgggcagatttcaagaggcattaaa

SEQ ID NO: 7354 - DNA, 80 bp, synthetic construct
  misc_feature 1..80: note = Synthetic: >NC_044932.1-cand-2830-2909
  source 1..80: mol_type = other DNA
aagtcaaaataaggcaaaggatcttcaggccaaccaagaaacaacgcagggaagaaagagccaccctgggactggtcaca

SEQ ID NO: 7355 - DNA, 80 bp, synthetic construct
  misc_feature 1..80: note = Synthetic: >NC_044932.1-cand-2910-2989
  source 1..80: mol_type = other DNA
ggcagtgaaatcaggaaaaggaacccagatgacttcaaaccaaagggaaagctgtgggctgatgatgaccgtagcgttaa

SEQ ID NO: 7356 - DNA, 80 bp, synthetic construct
  misc_feature 1..80: note = Synthetic: >NC_044932.1-cand-2980-3059
  source 1..80: mol_type = other DNA
gtagcgttaactacaatgaaaggatagattttgaagccccccctagtctatggtctagaatagttaattttggttcaggt

SEQ ID NO: 7357 - DNA, 80 bp, synthetic construct
  misc_feature 1..80: note = Synthetic: >NC_044932.1-cand-3070-3149
  source 1..80: mol_type = other DNA
gggtctcttccaacctcttcatcacctccacacatgttgttccaccaggcatgacggaggcttttggagtcccaacaagc

SEQ ID NO: 7358 - DNA, 80 bp, synthetic construct
  misc_feature 1..80: note = Synthetic: >NC_044932.1-cand-3180-3259
  source 1..80: mol_type = other DNA
tgcaagatgagattccccaaagccatcagacctgatgtctctggaatgattcttgaggaaggcgcacccgaagggacggt

SEQ ID NO: 7359 - DNA, 80 bp, synthetic construct
  misc_feature 1..80: note = Synthetic: >NC_044932.1-cand-3230-3309
  source 1..80: mol_type = other DNA
tcttgaggaaggcgcacccgaagggacggtggtgaccatactgatcaagagaaccactggagagctcatgccactggcag

SEQ ID NO: 7360 - DNA, 80 bp, synthetic construct
  misc_feature 1..80: note = Synthetic: >NC_044932.1-cand-3260-3339
  source 1..80: mol_type = other DNA
ggtgaccatactgatcaagagaaccactggagagctcatgccactggcagcccgtatgggcacccatgccaccatgaaga

SEQ ID NO: 7361 - DNA, 80 bp, synthetic construct
  misc_feature 1..80: note = Synthetic: >NC_044932.1-cand-3370-3449
  source 1..80: mol_type = other DNA
ggatgcttctcacagggtccaatgccaaaaatatggaccttggtaccgtccccggagattgtggctgtccttatgtctac

SEQ ID NO: 7362 - DNA, 80 bp, synthetic construct
  misc_feature 1..80: note = Synthetic: >NC_044932.1-cand-3500-3579
  source 1..80: mol_type = other DNA
gggtggcaacacggtgatatgtgcaactcagggaccagatggagaagccacacttgagggaggagacaatcacggtactt

SEQ ID NO: 7363 - DNA, 80 bp, synthetic construct
  misc_feature 1..80: note = Synthetic: >NC_044932.1-cand-3550-3629
  source 1..80: mol_type = other DNA
cacttgagggaggagacaatcacggtacttactgtggcgcaccaatcatgggaccaggaaatgccccaaaactcagcacc

SEQ ID NO: 7364 - DNA, 80 bp, synthetic construct
  misc_feature 1..80: note = Synthetic: >NC_044932.1-cand-3630-3709
  source 1..80: mol_type = other DNA
aaaaccaaattctggagatcttccaatgccccacttccccctggcacatatgaacctgcctatcttggtggtagagaccc

SEQ ID NO: 7365 - DNA, 80 bp, synthetic construct
  misc_feature 1..80: note = Synthetic: >NC_044932.1-cand-3710-3789
  source 1..80: mol_type = other DNA
cagggttaaaggtggcccatcactacaacaagtcatgagagaccaactcaaacccttcaccgctccccgtgggaagccgc

SEQ ID NO: 7366 - DNA, 80 bp, synthetic construct
  misc_feature 1..80: note = Synthetic: >NC_044932.1-cand-3790-3869
  source 1..80: mol_type = other DNA
caaggccggcagttctagaggccgctaaggagaccatctgtagcgtacttgagcaaaccatagaaccaccccaaaagtgg

SEQ ID NO: 7367 - DNA, 80 bp, synthetic construct
  misc_feature 1..80: note = Synthetic: >NC_044932.1-cand-3870-3949
  source 1..80: mol_type = other DNA
tcctatgcgcaagcctgtgcttccctggacaagacaacatcaagtggctacccccaccacaagaagaagaatgataactg

SEQ ID NO: 7368 - DNA, 80 bp, synthetic construct
  misc_feature 1..80: note = Synthetic: >NC_044932.1-cand-3950-4029
  source 1..80: mol_type = other DNA
gaatggagagtctttcactggcgtcctggctgaccaggcatcaaaagcaaatctcatgtttgagcaagggaaacacatgc

SEQ ID NO: 7369 - DNA, 80 bp, synthetic construct
  misc_feature 1..80: note = Synthetic: >NC_044932.1-cand-4030-4109
  source 1..80: mol_type = other DNA
agcctgtgtatacagctgcacttaaggatgaacttgtcaagaccagtaagatctatgaaaccatcaagaaaaggctcttg

SEQ ID NO: 7370 - DNA, 80 bp, synthetic construct
  misc_feature 1..80: note = Synthetic: >NC_001611.1-cand-35940-36019
  source 1..80: mol_type = other DNA
gagctttaatagtaagaactcctaatatgttcgtgtatgtggtcactaatacagattgtagttctataatcgtaaataat

SEQ ID NO: 7371 - DNA, 80 bp, synthetic construct
  misc_feature 1..80: note = Synthetic: >HCV.A6-cand-7340-7419
  source 1..80: mol_type = other DNA
attattttagaggttgaatacacctcaaccccaccaggaatctggtcgtgaatatgactggtgggggtaaatttgttata

SEQ ID NO: 7372 - DNA, 80 bp, synthetic construct
  misc_feature 1..80: note = Synthetic: >NC_026435.1-cand-1390-1469
  source 1..80: mol_type = other DNA
attctacaggacctgcaagttagtgggaatcaacatgagcaaaaagaagtcctatataaataagacagggacatttgaat

SEQ ID NO: 7373 - DNA, 80 bp, synthetic construct
  misc_feature 1..80: note = Synthetic: >NC_006573.1-cand-3060-3139
  source 1..80: mol_type = other DNA
attcaacaagattgttgaccgcttgatttaggtccctcaaccgtttcaaatcattgtcatcccttctctccttgcgcatc

SEQ ID NO: 7374 - DNA, 80 bp, synthetic construct
  misc_feature 1..80: note = Synthetic: >EVD70-cand-5140-5219
  source 1..80: mol_type = other DNA
attcacaagaggttagagattactgccagaagaagggatggatagtcatgcacccacccactgaactggtggtggagaag

SEQ ID NO: 7375 - DNA, 80 bp, synthetic construct
  misc_feature 1..80: note = Synthetic: >NC_001611.1-cand-67790-67869
  source 1..80: mol_type = other DNA
tattatctctcttggtaatatggatactaattgtagctatttaaatgggtgccgcggcaagcatacagacgacggtgaat

SEQ ID NO: 7376 - DNA, 80 bp, synthetic construct
  misc_feature 1..80: note = Synthetic: >EVD70-cand-4740-4819
  source 1..80: mol_type = other DNA
attcacgcacctacagtttcagattccaaagctttgacccgcagatttaaatttgacatggagattgagtcaatggaatc

SEQ ID NO: 7377 - DNA, 80 bp, synthetic construct
  misc_feature 1..80: note = Synthetic: >NC_006573.1-cand-1050-1129
  source 1..80: mol_type = other DNA
attcagttgatcaacaaagcagtaaatgctttgataaatgaccaacttataatgaagaaccatctacgggacatcatggg

SEQ ID NO: 7378 - DNA, 80 bp, synthetic construct
  misc_feature 1..80: note = Synthetic: >NC_003310.1-cand-68900-68979
  source 1..80: mol_type = other DNA
tttgtagaatattattcggcgtctataacggaacaaacgctactatatattatcatagacctctaacgggatatatgaat

SEQ ID NO: 7379 - DNA, 80 bp, synthetic construct
  misc_feature 1..80: note = Synthetic: >NC_001611.1-cand-60710-60789
  source 1..80: mol_type = other DNA
attcatattaatacgttgacattgactaatttgtaatatagcctcgccacgaagaaagctctcgtattcagtttcatcaa

SEQ ID NO: 7380 - DNA, 80 bp, synthetic construct
  misc_feature 1..80: note = Synthetic: >NC_003310.1-cand-132850-132929
  source 1..80: mol_type = other DNA
ctgactttagacgtagaaaacggatgggattcttcggtaacttggaggtaggtattactttagttagggatcacatgaat

SEQ ID NO: 7381 - DNA, 80 bp, synthetic construct
  misc_feature 1..80: note = Synthetic: >NC_001611.1-cand-56870-56949
  source 1..80: mol_type = other DNA
tatccaatacagaatgtctgtgattcgtgttaaaaccatcggagaaggaatagaaataaaaattattatagtggtggaat

SEQ ID NO: 7382 - DNA, 80 bp, synthetic construct
  misc_feature 1..80: note = Synthetic: >NC_039476.1-cand-4570-4649
  source 1..80: mol_type = other DNA
attccatgttctcattttacggtgatgacgagattgtcagcaccgacataaaattggaccctgaacagttaaccgccaaa

SEQ ID NO: 7383 - DNA, 80 bp, synthetic construct
  misc_feature 1..80: note = Synthetic: >AdVB3-cand-3020-3099
  source 1..80: mol_type = other DNA
catgcacgcaagaaatggcctgtatttgaacataatgtgattaccaagtgcaccatgcacataggtggtcgcaggggaat

SEQ ID NO: 7384 - DNA, 80 bp, synthetic construct
  misc_feature 1..80: note = Synthetic: >NC_003310.1-cand-80640-80719
  source 1..80: mol_type = other DNA
ccgcaatagatcctgttagatacatagatcctcgtcgtgatatcgcattttctaacgtgatggatatattaaagtcgaat

SEQ ID NO: 7385 - DNA, 80 bp, synthetic construct
  misc_feature 1..80: note = Synthetic: >NC_026435.1-cand-2080-2159
  source 1..80: mol_type = other DNA
attcgagaaatttttccctagcagttcatataggagaccggttggaatttctagcatggtggaggccatggtgtctaggg

SEQ ID NO: 7386 - DNA, 80 bp, synthetic construct
  misc_feature 1..80: note = Synthetic: >NC_001672.1-cand-160-239
  source 1..80: mol_type = other DNA
gggcggtccccctcgacgagtgtcgaaagagaccgcaacgaagacgcgtcaacccagagtccaaatgccaaatgggcttg

SEQ ID NO: 7387 - DNA, 80 bp, synthetic construct
  misc_feature 1..80: note = Synthetic: >NC_007382.1-cand-880-959
  source 1..80: mol_type = other DNA
gaaaggctctaataggcccgtcatagacataaatatggaagattatagcattgattccagttatgtgtgctcagggcttg

SEQ ID NO: 7388 - DNA, 80 bp, synthetic construct
  misc_feature 1..80: note = Synthetic: >AdVB7-cand-13610-13689
  source 1..80: mol_type = other DNA
gacactcttccgtgtcgctgtccacaacggctggtgctgccgcgaccgtgcccgaagctgcaagtcctttccctagcttg

SEQ ID NO: 7389 - DNA, 80 bp, synthetic construct
  misc_feature 1..80: note = Synthetic: >AdVB7-cand-28100-28179
  source 1..80: mol_type = other DNA
caagcttggatctcatctgcaacaccgcctttcacgaagccttctttctgccaatactaccactcccaaaaccggaggtg

SEQ ID NO: 7390 - DNA, 80 bp, synthetic construct
  misc_feature 1..80: note = Synthetic: >NC_006573.1-cand-2100-2179
  source 1..80: mol_type = other DNA
tttccactggatcttcaggtcttccttcaatgtccatccaggtcttagcatttgggtcaagttgcagcattgcatccttg

SEQ ID NO: 7391 - DNA, 80 bp, synthetic construct
  misc_feature 1..80: note = Synthetic: >NC_039477.1-cand-3340-3419
  source 1..80: mol_type = other DNA
ccatgaaaattcaaggccgcatggttggcggacagatgggtatgttgctcactggatcaaatgctaaaggaatggacttg

SEQ ID NO: 7392 - DNA, 80 bp, synthetic construct
  misc_feature 1..80: note = Synthetic: >NC_001611.1-cand-83820-83899
  source 1..80: mol_type = other DNA
caagtttgtaggaaaggacaaagtttcacatgaatttgttgttcataagtctaatagactatataaaccgctattgaaac

SEQ ID NO: 7393 - DNA, 80 bp, synthetic construct
  misc_feature 1..80: note = Synthetic: >NC_003310.1-cand-62400-62479
  source 1..80: mol_type = other DNA
caatactctccgagtgtaaatattactggtatacggttccaccgactcattatttcccaaaatttgagcagttgatgcag

SEQ ID NO: 7394 - DNA, 80 bp, synthetic construct
  misc_feature 1..80: note = Synthetic: >NC_001611.1-cand-50030-50109
  source 1..80: mol_type = other DNA
caatagtccgtgtaatccataatccagtaacacgagctggtgcttgctagacaccttttcaatgtttaatttttttgaaa

SEQ ID NO: 7395 - DNA, 80 bp, synthetic construct
  misc_feature 1..80: note = Synthetic: >NC_003310.1-cand-130200-130279
  source 1..80: mol_type = other DNA
caatatagtatataataaagatatacatcctgccattaagaaactagtttattgcgacatccaacttactaaacatatta

SEQ ID NO: 7396 - DNA, 80 bp, synthetic construct
  misc_feature 1..80: note = Synthetic: >NC_003310.1-cand-34060-34139
  source 1..80: mol_type = other DNA
tctttagatatatccacttcttccactgtccaaaatgatgcctctgcctttttatacatattccagatgtcatgatattg

SEQ ID NO: 7397 - DNA, 80 bp, synthetic construct
  misc_feature 1..80: note = Synthetic: >EVD70-cand-5780-5859
  source 1..80: mol_type = other DNA
ccacagaatattaatgtataacttccccacaagagcaggacaatgtggaggggtggtgaccaccactggtaaagtgattg

SEQ ID NO: 7398 - DNA, 80 bp, synthetic construct
  misc_feature 1..80: note = Synthetic: >HCV.A14-cand-6610-6689
  source 1..80: mol_type = other DNA
caatcttactccctggttcactctttgcctttgactactcaggttatgatgctagcctcagcccagtttggttcagggca

SEQ ID NO: 7399 - DNA, 80 bp, synthetic construct
  misc_feature 1..80: note = Synthetic: >NC_039476.1-cand-650-729
  source 1..80: mol_type = other DNA
caatgactcatggcttagcaggaggatggtacaaagaacaacgggcttcttcagaccttaccaagagtggaacagaaaac

SEQ ID NO: 7400 - DNA, 80 bp, synthetic construct
  misc_feature 1..80: note = Synthetic: >AdVB3-cand-26850-26929
  source 1..80: mol_type = other DNA
caatgatatcacgggttaatgatatacgagcttatcgaaaccagttactcctagaacagtcagctctcaccaccacaccc

SEQ ID NO: 7401 - DNA, 80 bp, synthetic construct
  misc_feature 1..80: note = Synthetic: >AdVB3-cand-30330-30409
  source 1..80: mol_type = other DNA
gttgcggcacttcttaggcttatttaaaaccatgcaggctatgctaccagtcattttaattctgctactaccctgcattg

SEQ ID NO: 7402 - DNA, 80 bp, synthetic construct
  misc_feature 1..80: note = Synthetic: >NC_003310.1-cand-96260-96339
  source 1..80: mol_type = other DNA
ggtatataatccatcaacaatgtctactccaatgactgaatacattatcaaaaagaacgatatagtcagagtgtttaatg

SEQ ID NO: 7403 - DNA, 80 bp, synthetic construct
  misc_feature 1..80: note = Synthetic: >NC_001611.1-cand-130570-130649
  source 1..80: mol_type = other DNA
tatgttttctactgatgcatgtatttgcttcgatttttttatcccatgtttcatctatcatagatttaaacgcagtaatg

SEQ ID NO: 7404 - DNA, 80 bp, synthetic construct
  misc_feature 1..80: note = Synthetic: >NC_001611.1-cand-94670-94749
  source 1..80: mol_type = other DNA
cttaaatatcctcctttaaaattaatccttactagttttccagtattctggatagtggttggtttcgactcattataatg

SEQ ID NO: 7405 - DNA, 80 bp, synthetic construct
  misc_feature 1..80: note = Synthetic: >NC_003310.1-cand-128910-128989
  source 1..80: mol_type = other DNA
cattcatgtatattgagtcaatcaaggtagatcgtataggagataatatttttattcctagcgttataacaaaatcagga

SEQ ID NO: 7406 - DNA, 80 bp, synthetic construct
  misc_feature 1..80: note = Synthetic: >NC_003310.1-cand-79440-79519
  source 1..80: mol_type = other DNA
cattgaaaactatttcttggatcctaacaatgaggttatgcctcttatcattaataatacggatatgactaccgtcattc

SEQ ID NO: 7407 - DNA, 80 bp, synthetic construct
  misc_feature 1..80: note = Synthetic: >HCV.B1-cand-4210-4289
  source 1..80: mol_type = other DNA
cattgagcagagtgcaccatcccaaagtgatcaagagcaactgttctccaacgtacagtactttgcacactactgcagaa

SEQ ID NO: 7408 - DNA, 80 bp, synthetic construct
  misc_feature 1..80: note = Synthetic: >NC_012532.1-cand-890-969
  source 1..80: mol_type = other DNA
cattgcctggcttttgggaagctcgacgagccaaaaagtcatatacttggtcatgatactgctgattgccccggcataca

SEQ ID NO: 7409 - DNA, 80 bp, synthetic construct
  misc_feature 1..80: note = Synthetic: >NC_001611.1-cand-60950-61029
  source 1..80: mol_type = other DNA
tgtacttactggaatagatgaaggaataatctccggacatgctggtaaagacccaaatgtctggttgaagaaatccaatg

SEQ ID NO: 7410 - DNA, 80 bp, synthetic construct
  misc_feature 1..80: note = Synthetic: >AdVB3-cand-23570-23649
  source 1..80: mol_type = other DNA
cattgtgttctcctaggcagagaaacaacagacatggaaactcagccatcactgccaacatcgctgcaagcaccatcaca

SEQ ID NO: 7411 - DNA, 80 bp, synthetic construct
  misc_feature 1..80: note = Synthetic: >NC_001611.1-cand-78530-78609
  source 1..80: mol_type = other DNA
catttataacgtacaaatggataaaactactttatcagtaaacgcgtgtaatttagaatacgttagagaaaaggctatag

SEQ ID NO: 7412 - DNA, 80 bp, synthetic construct
  misc_feature 1..80: note = Synthetic: >NC_003310.1-cand-136660-136739
  source 1..80: mol_type = other DNA
catttatctaaccattcaattagtttattaatgactagttggtaatcagcgattcctataaccgttcttgtatttgtggg

SEQ ID NO: 7413 - DNA, 80 bp, synthetic construct
  misc_feature 1..80: note = Synthetic: >NC_003310.1-cand-134290-134369
  source 1..80: mol_type = other DNA
gtagaggtaaaaagacgaagctcattagacaagcgaatgagggacgaaaacgtggaggaggtatcaagtttggagaaatg

SEQ ID NO: 7414 - DNA, 80 bp, synthetic construct
  misc_feature 1..80: note = Synthetic: >NC_003310.1-cand-125890-125969
  source 1..80: mol_type = other DNA
catttgagttactaagcaataggtaataactaagctagtaagaggcaatagaaaagatgagataaatatcatcaatatag

SEQ ID NO: 7415 - DNA, 80 bp, synthetic construct
  misc_feature 1..80: note = Synthetic: >NC_001611.1-cand-87760-87839
  source 1..80: mol_type = other DNA
ccaaagtagataacgacgataacgaagtatttatacttttaggaaatcacaatgactttatcagatcaaaattaacaaaa

SEQ ID NO: 7416 - DNA, 80 bp, synthetic construct
  misc_feature 1..80: note = Synthetic: >NC_003310.1-cand-98890-98969
  source 1..80: mol_type = other DNA
ccaaattgcgacactattcatgtaatgcaaccacctcatgataatatagaagattacctattcacttacgtggatatgaa

SEQ ID NO: 7417 - DNA, 80 bp, synthetic construct
  misc_feature 1..80: note = Synthetic: >HCV.B4-cand-240-319
  source 1..80: mol_type = other DNA
ccaactacttcgagaaacctagtaacaccatgaaagttgcgcagtgtttcgctcagcacatccccagtgtagatcaggtc

SEQ ID NO: 7418 - DNA, 80 bp, synthetic construct
  misc_feature 1..80: note = Synthetic: >AJ410618.2-cand-2640-2719
  source 1..80: mol_type = other DNA
gaggagactagaaagatcaaggcccaagcccgtatagtcagaaagtatcaaaggacagaggctgatagaggtttttttat

SEQ ID NO: 7419 - DNA, 80 bp, synthetic construct
  misc_feature 1..80: note = Synthetic: >AJ410618.2-cand-2720-2799
  source 1..80: mol_type = other DNA
cacaacacttccgacaaggtgtagattagaaataattgaagattattatgatgccatctcaaagaatgtggccgaagagt

SEQ ID NO: 7420 - DNA, 80 bp, synthetic construct
  misc_feature 1..80: note = Synthetic: >AJ410618.2-cand-2790-2869
  source 1..80: mol_type = other DNA
gccgaagagtacatttcttatggtggtgagagaaaaattctgtgcattcaatcagcactagaaaaggcacttagatgggc

SEQ ID NO: 7421 - DNA, 80 bp, synthetic construct
  misc_feature 1..80: note = Synthetic: >AJ410618.2-cand-2890-2969
  source 1..80: mol_type = other DNA
agcttagtaatggaaagtttattagaatgaagagaaagttgatgtatgtgagtgctgatgcaacaaagtggtcccctgga

SEQ ID NO: 7422 - DNA, 80 bp, synthetic construct
  misc_feature 1..80: note = Synthetic: >AJ410618.2-cand-2980-3059
  source 1..80: mol_type = other DNA
ctaaatttagaagatttactgcagctctacacaatggattgcctgatgaacgtctaaagaattgtgtaattgatgctctt

SEQ ID NO: 7423 - DNA, 80 bp, synthetic construct
  misc_feature 1..80: note = Synthetic: >AJ410618.2-cand-3070-3149
  source 1..80: mol_type = other DNA
acaaaacagacttttatctgtctaggaaattgagagcatatatagataatatgaatgggcatgagcctgctgtcaagaac

SEQ ID NO: 7424 - DNA, 80 bp, synthetic construct
  misc_feature 1..80: note = Synthetic: >AJ410618.2-cand-3100-3179
  source 1..80: mol_type = other DNA
tgagagcatatatagataatatgaatgggcatgagcctgctgtcaagaacttcttggagttctttcctgatggtcattgt

SEQ ID NO: 7425 - DNA, 80 bp, synthetic construct
  misc_feature 1..80: note = Synthetic: >AJ410618.2-cand-3230-3309
  source 1..80: mol_type = other DNA
tctttttggtgtaggaatgtcattgctcttcaagcagttgtggagtgaactattcccagagttagattgcttctttgagt

SEQ ID NO: 7426 - DNA, 80 bp, synthetic construct
  misc_feature 1..80: note = Synthetic: >AJ410618.2-cand-3310-3389
  source 1..80: mol_type = other DNA
ttgctcaccattcagatgacgcactgtttatatatggttatcttgagccaatcgatgatggaactgattggttcctttat

SEQ ID NO: 7427 - DNA, 80 bp, synthetic construct
  misc_feature 1..80: note = Synthetic: >AJ410618.2-cand-3390-3469
  source 1..80: mol_type = other DNA
gtttctcaacaaatccaagcaggtcatttgcactggttcagtgtgaacactgaaatgtggaaaagcatgtttaatcttca

SEQ ID NO: 7428 - DNA, 80 bp, synthetic construct
  misc_feature 1..80: note = Synthetic: >AJ410618.2-cand-3470-3549
  source 1..80: mol_type = other DNA
tgagcatgttctacttcttggatccatcaagatatctcccaaaaaaacaacattatcccctactaatgcagagtttctct

SEQ ID NO: 7429 - DNA, 80 bp, synthetic construct
  misc_feature 1..80: note = Synthetic: >AJ410618.2-cand-3550-3629
  source 1..80: mol_type = other DNA
ctactttctttgagggttgtgctgtatctatacccttcattaaaatcttattgggttctttatcagacttaccaggtctg

SEQ ID NO: 7430 - DNA, 80 bp, synthetic construct
  misc_feature 1..80: note = Synthetic: >AJ410618.2-cand-3630-3709
  source 1..80: mol_type = other DNA
ggttattttgatgatcttgcagcagcccagagtaggtgtgttaaggcaatggatcttggtgcatcaccacaggttgccca

SEQ ID NO: 7431 - DNA, 80 bp, synthetic construct
  misc_feature 1..80: note = Synthetic: >AJ410618.2-cand-3710-3789
  source 1..80: mol_type = other DNA
gcttgcagttgcactatgtacgaataaagttgagagattgtatggtacagctgttggtatgatcaatcatccatcaacat

SEQ ID NO: 7432 - DNA, 80 bp, synthetic construct
  misc_feature 1..80: note = Synthetic: >AJ410618.2-cand-3790-3869
  source 1..80: mol_type = other DNA
accttcaagtcaaacatagtgatacacctattcccttaggtgggagcggtgctatgtcaataatggagttagcaactgct

SEQ ID NO: 7433 - DNA, 80 bp, synthetic construct
  misc_feature 1..80: note = Synthetic: >AJ410618.2-cand-3870-3949
  source 1..80: mol_type = other DNA
ggtattggtatgtctgacaagaaccttttaaaacgagcccttttaggttatatacacaaaaggcaaaaaaacatggcata

SEQ ID NO: 7434 - DNA, 80 bp, synthetic construct
  misc_feature 1..80: note = Synthetic: >AdVE4-cand-8620-8699
  source 1..80: mol_type = other DNA
cgcctctgggtgaaggccacgggacccgtgagtttgaacctgaaagagagttcgacagaatcaatctcggtatcgttgac

SEQ ID NO: 7435 - DNA, 80 bp, synthetic construct
  misc_feature 1..80: note = Synthetic: >AdVE4-cand-8700-8779
  source 1..80: mol_type = other DNA
ggcggcctgccgcaggatctcttgcacgtcgcccgagttgtcctggtaggcaatctcggtcataaactgctcgatctcct

SEQ ID NO: 7436 - DNA, 80 bp, synthetic construct
  misc_feature 1..80: note = Synthetic: >AdVE4-cand-8780-8859
  source 1..80: mol_type = other DNA
cctcctgaaggtctccgcggccggcgcgctccacggtggccgcaaggtcgttggaaatgcggcccatgagttgcgagaag

SEQ ID NO: 7437 - DNA, 80 bp, synthetic construct
  misc_feature 1..80: note = Synthetic: >AdVE4-cand-8860-8939
  source 1..80: mol_type = other DNA
gcgttcatgcccgcctcgttccagacgcggctgtaaaccacggtgccctcgggatcgcgggcgcgcataaccacctgggc

SEQ ID NO: 7438 - DNA, 80 bp, synthetic construct
  misc_feature 1..80: note = Synthetic: >AdVE4-cand-8940-9019
  source 1..80: mol_type = other DNA
aaggttaagttccacgtggcgcgcaaagaccgcgtagttgcagaggcgctggtaaaggtagttcagcgtggtggcgatgt

SEQ ID NO: 7439 - DNA, 80 bp, synthetic construct
  misc_feature 1..80: note = Synthetic: >AdVE4-cand-9020-9099
  source 1..80: mol_type = other DNA
gctcggtgacaaagaagtacataatccagcggcgaagcggcatttcgctgacgtcgcccagggcttccaagcgctccatg

SEQ ID NO: 7440 - DNA, 80 bp, synthetic construct
  misc_feature 1..80: note = Synthetic: >AdVE4-cand-9100-9179
  source 1..80: mol_type = other DNA
gcctcgtaaaagtccacggcaaagttgaaaaactgggagttgcgtgccgagacggtcaactcctcctccagaagacggat

SEQ ID NO: 7441 - DNA, 80 bp, synthetic construct
  misc_feature 1..80: note = Synthetic: >AdVE4-cand-9180-9259
  source 1..80: mol_type = other DNA
gagctcggcgatggtggcgcgcacctcgcgctcaaaggcacccgggagttcctccacttcttcctcttcatccactaaca

SEQ ID NO: 7442 - DNA, 80 bp, synthetic construct
  misc_feature 1..80: note = Synthetic: >AdVE4-cand-9300-9379
  source 1..80: mol_type = other DNA
gggcctgcgtcgccggcggcgcacgggcaaacggtcgatgaaacgctcgatggtctcaccgcgccggcgtcgcatggtct

SEQ ID NO: 7443 - DNA, 80 bp, synthetic construct
  misc_feature 1..80: note = Synthetic: >AdVE4-cand-9320-9399
  source 1..80: mol_type = other DNA
gcacgggcaaacggtcgatgaaacgctcgatggtctcaccgcgccggcgtcgcatggtctcggtgacggcgcgtccgtcc

SEQ ID NO: 7444 - DNA, 80 bp, synthetic construct
  misc_feature 1..80: note = Synthetic: >AdVE4-cand-9460-9539
  source 1..80: mol_type = other DNA
ttgggcagggagagggcgctgacgatgcatcttatcaattgccccgtagggactccgcgcaaggacctaagcgtctctag

SEQ ID NO: 7445 - DNA, 80 bp, synthetic construct
  misc_feature 1..80: note = Synthetic: >AdVE4-cand-9500-9579
  source 1..80: mol_type = other DNA
gccccgtagggactccgcgcaaggacctaagcgtctctagatccactggatctgaaaaccgttgaacgaaggtttcgagc

SEQ ID NO: 7446 - DNA, 80 bp, synthetic construct
  misc_feature 1..80: note = Synthetic: >AdVE4-cand-9550-9629
  source 1..80: mol_type = other DNA
tctgaaaaccgttgaacgaaggtttcgagccagtcgcagtcgcaaggtaggctgagcacggtttcttctggcggcggtgg

SEQ ID NO: 7447 - DNA, 80 bp, synthetic construct
  misc_feature 1..80: note = Synthetic: >AdVE4-cand-9660-9739
  source 1..80: mol_type = other DNA
aaagttaaaataggcggttctaagacggcggatggtggcgaggagcaccaggtctttgggtccggcttgctggatgcgca

SEQ ID NO: 7448 - DNA, 80 bp, synthetic construct
  misc_feature 1..80: note = Synthetic: >AdVE4-cand-9740-9819
  source 1..80: mol_type = other DNA
gacggttggccatgccccaggcgtggtcctgacacctggccaggtccttgtagtagtcctgcatgagccgctccacgggc

SEQ ID NO: 7449 - DNA, 80 bp, synthetic construct
  misc_feature 1..80: note = Synthetic: >AdVE4-cand-9820-9899
  source 1..80: mol_type = other DNA
acctcctcctcgcccgcgcggccgtgcatgcgcgtgagcccgaacccgcgctgcggctggacaagcgccaggtcagcaac

SEQ ID NO: 7450 - DNA, 80 bp, synthetic construct
  misc_feature 1..80: note = Synthetic: >AiVC-cand-5950-6029
  source 1..80: mol_type = other DNA
aacccaaggcgcgtactctggcctccctaggctgaaacgccaggagaaaatgagaccatcacatcctcctcctcctcctc

SEQ ID NO: 7451 - DNA, 80 bp, synthetic construct
  misc_feature 1..80: note = Synthetic: >AiVC-cand-6030-6109
  source 1..80: mol_type = other DNA
cttctcaatctagatctgttgttcggcagtctctttctccagctctccctaagattgctgacaacgtctatcccatttct

SEQ ID NO: 7452 - DNA, 80 bp, synthetic construct
  misc_feature 1..80: note = Synthetic: >AiVC-cand-6110-6189
  source 1..80: mol_type = other DNA
actaaatcccctactcaaggtcgcaacgcaagctgtggcttctttctcttctctagattctttcttgcccctacccacat

SEQ ID NO: 7453 - DNA, 80 bp, synthetic construct
  misc_feature 1..80: note = Synthetic: >AiVC-cand-6190-6269
  source 1..80: mol_type = other DNA
cattccggatgatacggaccgaatctccataggtccggacacctttgactgggcgacactccaacaccgccgcctgggaa

SEQ ID NO: 7454 - DNA, 80 bp, synthetic construct
  misc_feature 1..80: note = Synthetic: >AiVC-cand-6270-6349
  source 1..80: mol_type = other DNA
aagaactcactatcatccatttccctaccattcgccaacatcgtgacctccgtcgctttattggctaccatccctatccc

SEQ ID NO: 7455 - DNA, 80 bp, synthetic construct
  misc_feature 1..80: note = Synthetic: >AiVC-cand-6350-6429
  source 1..80: mol_type = other DNA
actggacatcttatttccactctttctggtcctcctgtctacctgcggttctccaagaaccgtatggttactcttgacct

SEQ ID NO: 7456 - DNA, 80 bp, synthetic construct
  misc_feature 1..80: note = Synthetic: >AiVC-cand-6430-6509
  source 1..80: mol_type = other DNA
tcccggtgtcgtggaagaacctacagcttatggctacaaagcccccaccttccagggtctctgtggtgcacctctcatca

SEQ ID NO: 7457 - DNA, 80 bp, synthetic construct
  misc_feature 1..80: note = Synthetic: >AiVC-cand-6470-6549
  source 1..80: mol_type = other DNA
gcccccaccttccagggtctctgtggtgcacctctcatcacggatgatcctgcaggtgttaagctgttgggactccacgt

SEQ ID NO: 7458 - DNA, 80 bp, synthetic construct
  misc_feature 1..80: note = Synthetic: >AiVC-cand-6590-6669
  source 1..80: mol_type = other DNA
tctacctatcttcctgagatcgagcagtttgcgattgaccaacaatccatcatcattcctggacccaacatcgtccctgg

SEQ ID NO: 7459 - DNA, 80 bp, synthetic construct
  misc_feature 1..80: note = Synthetic: >AiVC-cand-6670-6749
  source 1..80: mol_type = other DNA
agtgaacgtcaaccgcaaatctaaactcggtcgctctcctgcttttggtgccttccctgtcaagaaacaaccagctgttc

SEQ ID NO: 7460 - DNA, 80 bp, synthetic construct
  misc_feature 1..80: note = Synthetic: >AiVC-cand-6750-6829
  source 1..80: mol_type = other DNA
tcactcagaaagacgatcgtctcgaagaaggaatccgcctggacgaccaactcttccttaaacacaacaagggagacatg

SEQ ID NO: 7461 - DNA, 80 bp, synthetic construct
  misc_feature 1..80: note = Synthetic: >AiVC-cand-6830-6909
  source 1..80: mol_type = other DNA
gacgaaccctggcccggactcgaggcggccgccgacctctacttctctaaatttcctactatgattcacactctgacaat

SEQ ID NO: 7462 - DNA, 80 bp, synthetic construct
  misc_feature 1..80: note = Synthetic: >AiVC-cand-6910-6989
  source 1..80: mol_type = other DNA
ggaagaggcaatcaatggaacacccaatctcgaaggcattgacatgaatcaggcagcaggctacccgtggaacaccatgg

SEQ ID NO: 7463 - DNA, 80 bp, synthetic construct
  misc_feature 1..80: note = Synthetic: >AiVC-cand-7000-7079
  source 1..80: mol_type = other DNA
ccgttcactctttgtccaacagaatgggatttggttgccacttcctgagttggaagttgaaatcaataaaactcttgaag

SEQ ID NO: 7464 - DNA, 80 bp, synthetic construct
  misc_feature 1..80: note = Synthetic: >AiVC-cand-7080-7159
  source 1..80: mol_type = other DNA
atccttactacttctactctactttccttaaagatgaacttagacccacctctaaagtcacattaggcctcacacgtgtg

SEQ ID NO: 7465 - DNA, 80 bp, synthetic construct
  misc_feature 1..80: note = Synthetic: >AiVC-cand-7160-7239
  source 1..80: mol_type = other DNA
gtcgaagctgctcccatccacgctatcattgctggtaggatgctgcttggtggactcattgagtacatgcaggcaaatcc

SEQ ID NO: 7466 - DNA, 80 bp, synthetic construct
  misc_feature 1..80: note = Synthetic: >EVA89-cand-3960-4039
  source 1..80: mol_type = other DNA
gtgattatgacctagtgacgttgactgccactctggcgcttatcgggtgtcatggaagcccgtggagatggctcaagcac

SEQ ID NO: 7467 - DNA, 80 bp, synthetic construct
  misc_feature 1..80: note = Synthetic: >EVA89-cand-4120-4199
  source 1..80: mol_type = other DNA
tgctgctagaggcttagaatggatctcaaacaaaattagcaaattcattgattggatcaaagacaagataatcccggctg

SEQ ID NO: 7468 - DNA, 80 bp, synthetic construct
  misc_feature 1..80: note = Synthetic: >EVA89-cand-4210-4289
  source 1..80: mol_type = other DNA
agtagaatttctaaataatctgaaacaactcacactcctcgagaatcagatttccaatattgagcaatctgctgccagtc

SEQ ID NO: 7469 - DNA, 80 bp, synthetic construct
  misc_feature 1..80: note = Synthetic: >EVA89-cand-4290-4369
  source 1..80: mol_type = other DNA
aaggtgacttggaacaactctttgggaacgtctcatatctagcccattactgtaggaaatttcaaccactgtatgctgcc

SEQ ID NO: 7470 - DNA, 80 bp, synthetic construct
  misc_feature 1..80: note = Synthetic: >EVA89-cand-4450-4529
  source 1..80: mol_type = other DNA
atgcttaattgtcagaggtgctcccgggactgggaaatcattagcaactggcatcatttcccgagccattgctgaaaaat

SEQ ID NO: 7471 - DNA, 80 bp, synthetic construct
  misc_feature 1..80: note = Synthetic: >EVA89-cand-4530-4609
  source 1..80: mol_type = other DNA
accactccagtgtgtactctctgccaccagatcccgaccattttgatggttacaaacaacaggtagttacagtcatggat

SEQ ID NO: 7472 - DNA, 80 bp, synthetic construct
  misc_feature 1..80: note = Synthetic: >EVA89-cand-4610-4689
  source 1..80: mol_type = other DNA
gacttgtgtcaaaacccagatggtaaagacatggccctattttgtcaaatggtttctacagttgactttatccccccaat

SEQ ID NO: 7473 - DNA, 80 bp, synthetic construct
  misc_feature 1..80: note = Synthetic: >EVA89-cand-4690-4769
  source 1..80: mol_type = other DNA
ggcatcattagaagaaaagggtgtctccttcacctctaaatttgtgattgcttccacgaacatgagcaacatcatagtcc

SEQ ID NO: 7474 - DNA, 80 bp, synthetic construct
  misc_feature 1..80: note = Synthetic: >EVA89-cand-4770-4849
  source 1..80: mol_type = other DNA
ccacagtgtcggatgctgacgctattagaaggagattttacatggattgtgacatagaagtcactgactcatacaaattg

SEQ ID NO: 7475 - DNA, 80 bp, synthetic construct
  misc_feature 1..80: note = Synthetic: >EVA89-cand-4850-4929
  source 1..80: mol_type = other DNA
gaatctggaaggcttgatgcaggtagggctgcaaaattgtgctcagagaataatactgccaactttaagaaatgcagtcc

SEQ ID NO: 7476 - DNA, 80 bp, synthetic construct
  misc_feature 1..80: note = Synthetic: >EVA89-cand-4930-5009
  source 1..80: mol_type = other DNA
tttagtctgcgggaaagcaatccaactcagggatagaaagacaaaggttagatatagcctagattcagtagtctccgagc

SEQ ID NO: 7477 - DNA, 80 bp, synthetic construct
  misc_feature 1..80: note = Synthetic: >EVA89-cand-5010-5089
  source 1..80: mol_type = other DNA
tcataagggagtacaacaatagatcagcaattggtaacaccattgaagctttgtttcaagggcccccagtctttaaacca

SEQ ID NO: 7478 - DNA, 80 bp, synthetic construct
  misc_feature 1..80: note = Synthetic: >EVA89-cand-5090-5169
  source 1..80: mol_type = other DNA
gttaggatctccttagaagaaaagccagcaccagatgccattagtgatcttttgaagagtgtggatagtgaagaggtgag

SEQ ID NO: 7479 - DNA, 80 bp, synthetic construct
  misc_feature 1..80: note = Synthetic: >EVA89-cand-5170-5249
  source 1..80: mol_type = other DNA
acaatactgcagggatcagggatggatagtgcctgttcaaccaactaatgtggagaagcatcttgggagagctgtgctaa

SEQ ID NO: 7480 - DNA, 80 bp, synthetic construct
  misc_feature 1..80: note = Synthetic: >EVA89-cand-5250-5329
  source 1..80: mol_type = other DNA
taatgcaatccattgctacagttgttgcagttgtgagtctagtgtatgtcatctataagctatttgctggattccaaggt

SEQ ID NO: 7481 - DNA, 80 bp, synthetic construct
  misc_feature 1..80: note = Synthetic: >EVA89-cand-5330-5409
  source 1..80: mol_type = other DNA
gcttactctggcatgccaaagcagaatgttaagaaaccaatcctcaggacagcaacagtgcagggaccgagtctagactt

SEQ ID NO: 7482 - DNA, 80 bp, synthetic construct
  misc_feature 1..80: note = Synthetic: >EVB69-cand-3120-3199
  source 1..80: mol_type = other DNA
tcaagagcaccattaggatatatatgaaacctaaacatgtgaaagcgtggatacctaggcccccacggttgtgcgactat

SEQ ID NO: 7483 - DNA, 80 bp, synthetic construct
  misc_feature 1..80: note = Synthetic: >EVB69-cand-3200-3279
  source 1..80: mol_type = other DNA
gtgaaatctggcaacgtcaactttgaaccaaaaggagtcaccgagagcagaccatctataaagttagaaaagacctcaag

SEQ ID NO: 7484 - DNA, 80 bp, synthetic construct
  misc_feature 1..80: note = Synthetic: >EVB69-cand-3240-3319
  source 1..80: mol_type = other DNA
ccgagagcagaccatctataaagttagaaaagacctcaagtgggcacaggctgacaacccacggtgcatttggacaccaa

SEQ ID NO: 7485 - DNA, 80 bp, synthetic construct
  misc_feature 1..80: note = Synthetic: >EVB69-cand-3360-3439
  source 1..80: mol_type = other DNA
ggcacctagctacccgcaccgactggaagaatctcgtgtgggaggactacaacagggacttgttagttagtacaaccaca

SEQ ID NO: 7486 - DNA, 80 bp, synthetic construct
  misc_feature 1..80: note = Synthetic: >EVB69-cand-3400-3479
  source 1..80: mol_type = other DNA
ggaggactacaacagggacttgttagttagtacaaccacagctcacgggtgcgatgttatagccaggtgccagtgcacaa

SEQ ID NO: 7487 - DNA, 80 bp, synthetic construct
  misc_feature 1..80: note = Synthetic: >EVB69-cand-3520-3599
  source 1..80: mol_type = other DNA
agtttcatttgaaggcccaggattggttgaggttcaagagagtgaatactaccccagaaggtatcagtctcatgtgctac

SEQ ID NO: 7488 - DNA, 80 bp, synthetic construct
  misc_feature 1..80: note = Synthetic: >EVB69-cand-3660-3739
  source 1..80: mol_type = other DNA
tcgttggcatagtgaccatgggcggtgagggtgttgtcggatttgccgatgtgcgagatctcttgtggttggaggatgat

SEQ ID NO: 7489 - DNA, 80 bp, synthetic construct
  misc_feature 1..80: note = Synthetic: >EVB69-cand-3680-3759
  source 1..80: mol_type = other DNA
ggcggtgagggtgttgtcggatttgccgatgtgcgagatctcttgtggttggaggatgatgccatggagcagggagtcaa

SEQ ID NO: 7490 - DNA, 80 bp, synthetic construct
  misc_feature 1..80: note = Synthetic: >EVB69-cand-3760-3839
  source 1..80: mol_type = other DNA
aggttatgtggagcagttgggaaacgcctttggttcgggtttctccaaccagatctgtgaacaggtcaatctcttgaaag

SEQ ID NO: 7491 - DNA, 80 bp, synthetic construct
  misc_feature 1..80: note = Synthetic: >EVB69-cand-3840-3919
  source 1..80: mol_type = other DNA
agtctttgataggacaagactctatcctagaaaaatcactgaaagctctagtcaaaattatatcagctttagtgattgtg

SEQ ID NO: 7492 - DNA, 80 bp, synthetic construct
  misc_feature 1..80: note = Synthetic: >EVB69-cand-3920-3999
  source 1..80: mol_type = other DNA
gtgagaaatcatgatgatttgatcacggtgactgccacactagccctcattggttgtacctcgtccccatggcgatggct

SEQ ID NO: 7493 - DNA, 80 bp, synthetic construct
  misc_feature 1..80: note = Synthetic: >EVB69-cand-4000-4079
  source 1..80: mol_type = other DNA
caaacagaaagtgtcccaatactacggaatacccatggctgaacgccaaaataacggctggcttaagaagttcactgaga

SEQ ID NO: 7494 - DNA, 80 bp, synthetic construct
  misc_feature 1..80: note = Synthetic: >EVB69-cand-4080-4159
  source 1..80: mol_type = other DNA
tgacaaatgcttgcaagggtatggaatggatagccaccaaaattcagaagttcattgagtggctaaaagtcaaaatcctg

SEQ ID NO: 7495 - DNA, 80 bp, synthetic construct
  misc_feature 1..80: note = Synthetic: >EVB69-cand-4160-4239
  source 1..80: mol_type = other DNA
ccagaggtcaaggaaaagcatgaattcctgaacagactcaagcaactccctctattagagagtcagatcgccacaattga

SEQ ID NO: 7496 - DNA, 80 bp, synthetic construct
  misc_feature 1..80: note = Synthetic: >EVB69-cand-4240-4319
  source 1..80: mol_type = other DNA
acagagcgcaccatcccagagtgatcaagagcaactgttctccaatgtccagtattttgctcattattgtagaaaatatg

SEQ ID NO: 7497 - DNA, 80 bp, synthetic construct
  misc_feature 1..80: note = Synthetic: >EVB69-cand-4310-4389
  source 1..80: mol_type = other DNA
agaaaatatgcccctctctatgctgcagaagcaaagagagtgttctcccttgaaaagaagatgagcaactacatacagtt

SEQ ID NO: 7498 - DNA, 80 bp, synthetic construct
  misc_feature 1..80: note = Synthetic: >EVB79-cand-4590-4669
  source 1..80: mol_type = other DNA
tcatggatgatctgtgccaaaatccagatggtaaggacgtatccttgttctgccaaatggtgtcaagcgtcgattttgtc

SEQ ID NO: 7499 - DNA, 80 bp, synthetic construct
  misc_feature 1..80: note = Synthetic: >EVB79-cand-4830-4909
  source 1..80: mol_type = other DNA
acagtcagaatggcaagatcaacatgccaatgtcagtgaagacttgtgatgatgagtgctgtccagttaacttcaagaag

SEQ ID NO: 7500 - DNA, 80 bp, synthetic construct
  misc_feature 1..80: note = Synthetic: >EVB79-cand-4910-4989
  source 1..80: mol_type = other DNA
tgttgcccgttagtgtgtggcaaagcaatccagttcattgacaggagaactcaagtgagatactcactggacatgctcgt

SEQ ID NO: 7501 - DNA, 80 bp, synthetic construct
  misc_feature 1..80: note = Synthetic: >EVB79-cand-4950-5029
  source 1..80: mol_type = other DNA
acaggagaactcaagtgagatactcactggacatgctcgtgaccgagatgttcagagagtacaaccacagacacagtgta

SEQ ID NO: 7502 - DNA, 80 bp, synthetic construct
  misc_feature 1..80: note = Synthetic: >EVB79-cand-5070-5149
  source 1..80: mol_type = other DNA
acagagagatcaaaatcagtgtagcaccggaaacaccacccccaccagccattgcagacttgttaaaatctgtagacagt

SEQ ID NO: 7503 - DNA, 80 bp, synthetic construct
  misc_feature 1..80: note = Synthetic: >EVB79-cand-5150-5229
  source 1..80: mol_type = other DNA
gaagctgtcagagagtactgcaaggaaaagggatggttggtaccagaggtcaactccactctgcaaattgaaaaacacgt

SEQ ID NO: 7504 - DNA, 80 bp, synthetic construct
  misc_feature 1..80: note = Synthetic: >EVB79-cand-5240-5319
  source 1..80: mol_type = other DNA
ttcatctgcctgcaagcactcaccacctttgtctcagtggcagggataatatacatcatctacaagctgtttgcaggctt

SEQ ID NO: 7505 - DNA, 80 bp, synthetic construct
  misc_feature 1..80: note = Synthetic: >EVB79-cand-5330-5409
  source 1..80: mol_type = other DNA
tacacaggcatgcccaaccaaaaacccaaagtaccaaccttgagacaggcaaaagtgcaagggccagcatttgagttcgc

SEQ ID NO: 7506 - DNA, 80 bp, synthetic construct
  misc_feature 1..80: note = Synthetic: >EVB79-cand-5410-5489
  source 1..80: mol_type = other DNA
agtggcaatgatgaagaggaatgccagcactgtgaaaactgagtacggcgagttcaccatgctcggaatctatgacagat

SEQ ID NO: 7507 - DNA, 80 bp, synthetic construct
  misc_feature 1..80: note = Synthetic: >EVB79-cand-5490-5569
  source 1..80: mol_type = other DNA
gggcagtgctgccccgccacgccaaacctggacccaccatcctaatgaatgaccaagaagtaggtgtggtggatgctaaa

SEQ ID NO: 7508 - DNA, 80 bp, synthetic construct
  misc_feature 1..80: note = Synthetic: >EVB79-cand-5570-5649
  source 1..80: mol_type = other DNA
gagctggtagacaaagatggtaccaacctggagctgacacttttaaaactcaacagaaatgaaaagttcagagacatccg

SEQ ID NO: 7509 - DNA, 80 bp, synthetic construct
  misc_feature 1..80: note = Synthetic: >EVB79-cand-5650-5729
  source 1..80: mol_type = other DNA
aggcttcttggcaagggaagaggcagaggtcaatgaggctgtgctagctatcaacaccagcaagttcccaaacatgtaca

SEQ ID NO: 7510 - DNA, 80 bp, synthetic construct
  misc_feature 1..80: note = Synthetic: >EVB79-cand-5730-5809
  source 1..80: mol_type = other DNA
ttccagtaggtcaggtgacagattatggcttcctcaacttgggtggaacccccaccaagcgaatgctcatgtataacttc

SEQ ID NO: 7511 - DNA, 80 bp, synthetic construct
  misc_feature 1..80: note = Synthetic: >EVB79-cand-5830-5909
  source 1..80: mol_type = other DNA
tggtggtgtcctaatgtcaacaggcaaggtcctcggaatacatgttggtgggaatggacaccaagggttctcagcagcac

SEQ ID NO: 7512 - DNA, 80 bp, synthetic construct
  misc_feature 1..80: note = Synthetic: >EVB79-cand-5890-5969
  source 1..80: mol_type = other DNA
ccaagggttctcagcagcactgctacgccactatttcaacgatgaacagggcgaaatcgagttcatcgagagctccaagg

SEQ ID NO: 7513 - DNA, 80 bp, synthetic construct
  misc_feature 1..80: note = Synthetic: >EVB79-cand-5970-6049
  source 1..80: mol_type = other DNA
aagcaggattcccagtcatcaacacacccagcaaaacaaagcttgagcccagtgtattccaccaagtctttgaaggaaac

SEQ ID NO: 7514 - DNA, 80 bp, synthetic construct
  misc_feature 1..80: note = Synthetic: >EVB84-cand-2480-2559
  source 1..80: mol_type = other DNA
acaagtgccaccgggccggcaaactccatgcaagtacccgctttgacggccgtcgaaactggccacacatcacaagtggt

SEQ ID NO: 7515 - DNA, 80 bp, synthetic construct
  misc_feature 1..80: note = Synthetic: >EVB84-cand-2560-2639
  source 1..80: mol_type = other DNA
acccggagacacaatacaaacacgacacgtggtcaacttccactctcgctcggaatcgaccttagaaaacttcatgggca

SEQ ID NO: 7516 - DNA, 80 bp, synthetic construct
  misc_feature 1..80: note = Synthetic: >EVB84-cand-2640-2719
  source 1..80: mol_type = other DNA
ggtcagcctgtgtggtaatgaaaacatacaaagcaatgggagaaaacacagacacagacagatatgctagctgggacata

SEQ ID NO: 7517 - DNA, 80 bp, synthetic construct
  misc_feature 1..80: note = Synthetic: >EVB84-cand-2720-2799
  source 1..80: mol_type = other DNA
aacatcagggagatggtgcaactgcgacgcaagtgcgagctgttcacatacctcaggtttgatatagaagtcacctttgt

SEQ ID NO: 7518 - DNA, 80 bp, synthetic construct
  misc_feature 1..80: note = Synthetic: >EVB84-cand-2800-2879
  source 1..80: mol_type = other DNA
gataaccagctgccaggaccctagcacccgattagaccaggacatgccagtgctaacccaccagatcatgtacatcccac

SEQ ID NO: 7519 - DNA, 80 bp, synthetic construct
  misc_feature 1..80: note = Synthetic: >EVB84-cand-2880-2959
  source 1..80: mol_type = other DNA
ctggtggacccgtgcccaacaaagtggatgggtacgagtggcagacatcaacaaaccctagtgtgttttggactgagggc

SEQ ID NO: 7520 - DNA, 80 bp, synthetic construct
  misc_feature 1..80: note = Synthetic: >EVB84-cand-2960-3039
  source 1..80: mol_type = other DNA
aatgctcctgcacgcatgtccataccattcatcagcgttggaaatgcatatagctcattttatgacggttggtcacactt

SEQ ID NO: 7521 - DNA, 80 bp, synthetic construct
  misc_feature 1..80: note = Synthetic: >EVB84-cand-3090-3169
  source 1..80: mol_type = other DNA
tatatgtgcgccatgtcaacgcaagcagtccaactcaaattactagtactgtaagggtgtactttaagccaaaacacgtc

SEQ ID NO: 7522 - DNA, 80 bp, synthetic construct
  misc_feature 1..80: note = Synthetic: >EVB84-cand-3120-3199
  source 1..80: mol_type = other DNA
caactcaaattactagtactgtaagggtgtactttaagccaaaacacgtcaaggcgtgggtgcccagaccgccacggttg

SEQ ID NO: 7523 - DNA, 80 bp, synthetic construct
  misc_feature 1..80: note = Synthetic: >EVB84-cand-3200-3279
  source 1..80: mol_type = other DNA
tgccagtataaaaagaaagccaatgtcaactttgaggtgaccaacgtcactgacgagcgcacagacatcaacaaggtacc

SEQ ID NO: 7524 - DNA, 80 bp, synthetic construct
  misc_feature 1..80: note = Synthetic: >EVB84-cand-3280-3359
  source 1..80: mol_type = other DNA
aacagaggagcacacaccacttatccggaccactggcgcttttggacaacagtcaggtgcagtgtatgtaggcaactaca

SEQ ID NO: 7525 - DNA, 80 bp, synthetic construct
  misc_feature 1..80: note = Synthetic: >EVB84-cand-3360-3439
  source 1..80: mol_type = other DNA
gactggtgaatagacacctagccacacgcacagactggcaaaactgtgtgtgggaagactacaacagagacctacttgtg

SEQ ID NO: 7526 - DNA, 80 bp, synthetic construct
  misc_feature 1..80: note = Synthetic: >EVB84-cand-3410-3489
  source 1..80: mol_type = other DNA
tgggaagactacaacagagacctacttgtgagcaccaccacagcccatgggtgtgacaccatagccagatgtcagtgcac

SEQ ID NO: 7527 - DNA, 80 bp, synthetic construct
  misc_feature 1..80: note = Synthetic: >EVB84-cand-3520-3599
  source 1..80: mol_type = other DNA
caagcattacccagtcagctttgaaggaccaggcctagttgaagtgcaggagagtgaatattaccccaagagataccaat

SEQ ID NO: 7528 - DNA, 80 bp, synthetic construct
  misc_feature 1..80: note = Synthetic: >EVB84-cand-3590-3669
  source 1..80: mol_type = other DNA
agataccaatcccacgtactacttgcagcagggttctcagaaccaggagactgtggtggcatactaaggtgtgagcatgg

SEQ ID NO: 7529 - DNA, 80 bp, synthetic construct
  misc_feature 1..80: note = Synthetic: >EVB84-cand-3670-3749
  source 1..80: mol_type = other DNA
tgtcattggactagtaaccatgggtggtgaaggagttgtcggtttcgctgacgtgcgagacctcctatggttggaggatg

SEQ ID NO: 7530 - DNA, 80 bp, synthetic construct
  misc_feature 1..80: note = Synthetic: >EVD68-cand-1770-1849
  source 1..80: mol_type = other DNA
ctccagaaatgcacattccagggcaaatccgcaacatgttggaaatgattcaagtggaatcaatgatggagattaacaat

SEQ ID NO: 7531 - DNA, 80 bp, synthetic construct
  misc_feature 1..80: note = Synthetic: >EVD68-cand-1850-1929
  source 1..80: mol_type = other DNA
acagacggcgcaaatggcatggagcgtctcagagttgacatatcagtacaagcagatcttgatcagttattatttaacat

SEQ ID NO: 7532 - DNA, 80 bp, synthetic construct
  misc_feature 1..80: note = Synthetic: >EVD68-cand-1930-2009
  source 1..80: mol_type = other DNA
tccactagatatacaactggatggaccacttagaaacactttagtagggaacatatccagatattatactcattggtctg

SEQ ID NO: 7533 - DNA, 80 bp, synthetic construct
  misc_feature 1..80: note = Synthetic: >EVD68-cand-2010-2089
  source 1..80: mol_type = other DNA
gatctctagaaatgacattcatgttttgcggtagttttatggcaacagggaaattgatcctatgttacacacctccaggt

SEQ ID NO: 7534 - DNA, 80 bp, synthetic construct
  misc_feature 1..80: note = Synthetic: >EVD68-cand-2090-2169
  source 1..80: mol_type = other DNA
ggatcatgcccaacaactagagaaactgccatgttaggcactcacatcgtctgggactttggattacaatctagtatcac

SEQ ID NO: 7535 - DNA, 80 bp, synthetic construct
  misc_feature 1..80: note = Synthetic: >EVD68-cand-2170-2249
  source 1..80: mol_type = other DNA
cttaataataccttggattagtggatcccactacaggatgttcaatagcgacgctaagtcaaccaatgctaatgttggct

SEQ ID NO: 7536 - DNA, 80 bp, synthetic construct
  misc_feature 1..80: note = Synthetic: >EVD68-cand-2250-2329
  source 1..80: mol_type = other DNA
atgtaacctgtttcatgcagaccaacctgatagtccccagtgagtcctctgatacttgttctttaataggattcatagca

SEQ ID NO: 7537 - DNA, 80 bp, synthetic construct
  misc_feature 1..80: note = Synthetic: >EVD68-cand-2330-2409
  source 1..80: mol_type = other DNA
gcaaaagatgacttttccctcaggttaatgagagatagtccagatattggacaatcaaaccacttacatggagcagaggc

SEQ ID NO: 7538 - DNA, 80 bp, synthetic construct
  misc_feature 1..80: note = Synthetic: >EVD68-cand-2410-2489
  source 1..80: mol_type = other DNA
agcctatcaggtggagagtatcatcaaaacagcaactgatactgtgaagagtgagattaacgccgaacttggtgtggtcc

SEQ ID NO: 7539 - DNA, 80 bp, synthetic construct
  misc_feature 1..80: note = Synthetic: >EVD68-cand-2490-2569
  source 1..80: mol_type = other DNA
ctagtctaaatgcagttgaaactggtgcaacttccaacactgaaccagaagaagccatacaaactcgcacagtaataaat

SEQ ID NO: 7540 - DNA, 80 bp, synthetic construct
  misc_feature 1..80: note = Synthetic: >EVD68-cand-2570-2649
  source 1..80: mol_type = other DNA
cagcatggtgtgtcggagacgttagtggagaattttcttggtagggcagccctagtgtcaaagaaaagttttgaatacaa

SEQ ID NO: 7541 - DNA, 80 bp, synthetic construct
  misc_feature 1..80: note = Synthetic: >EVD68-cand-2650-2729
  source 1..80: mol_type = other DNA
gaatcatgcctcatccagcgcagggacacacaaaaacttttttaaatggacaattaatactaagtcttttgtccagttaa

SEQ ID NO: 7542 - DNA, 80 bp, synthetic construct
  misc_feature 1..80: note = Synthetic: >EVD68-cand-2730-2809
  source 1..80: mol_type = other DNA
gaagaaagctggaattattcacataccttaggtttgatgctgaaatcaccatactcacaactgtggcagtaaatggtaat

SEQ ID NO: 7543 - DNA, 80 bp, synthetic construct
  misc_feature 1..80: note = Synthetic: >EVD68-cand-2810-2889
  source 1..80: mol_type = other DNA
aatgacagcacatacatgggtctccctgacttgacactccaagcaatgtttgtaccaactggtgctcttactccaaagga

SEQ ID NO: 7544 - DNA, 80 bp, synthetic construct
  misc_feature 1..80: note = Synthetic: >EVD68-cand-2890-2969
  source 1..80: mol_type = other DNA
gcaggattcatttcattggcaatcaggcagtaatgctagtgtgttctttaaaatttctgatcccccagctagaatgacta

SEQ ID NO: 7545 - DNA, 80 bp, synthetic construct
  misc_feature 1..80: note = Synthetic: >EVD68-cand-2980-3059
  source 1..80: mol_type = other DNA
gtgcatcaactcagcatattcagttttttatgatggctttgctggatttgagaaaaatggtctatatggaataaacccag

SEQ ID NO: 7546 - DNA, 80 bp, synthetic construct
  misc_feature 1..80: note = Synthetic: >HCV.A15-cand-3440-3519
  source 1..80: mol_type = other DNA
atctagcaacccaagaggacttgcaaaatgcagtgagtataatgtggaacagagatctcttggtcaccgaatccaaagct

SEQ ID NO: 7547 - DNA, 80 bp, synthetic construct
  misc_feature 1..80: note = Synthetic: >HCV.A15-cand-3520-3599
  source 1..80: mol_type = other DNA
caaggcactgactcaatagccagatgtacttgtaacgcaggtgtatattactgtgaatcaaggagaaaatactacccagt

SEQ ID NO: 7548 - DNA, 80 bp, synthetic construct
  misc_feature 1..80: note = Synthetic: >HCV.A15-cand-3600-3679
  source 1..80: mol_type = other DNA
gtccttcgtgggtcccactttccagtacatggaagccaatgattactacccagctaggtatcaatctcatatgctcattg

SEQ ID NO: 7549 - DNA, 80 bp, synthetic construct
  misc_feature 1..80: note = Synthetic: >HCV.A15-cand-3710-3789
  source 1..80: mol_type = other DNA
gcggcatcctcaggtgtcaacatggagtgataggaattattacagctggaggagagggactggttgcattttcagacatt

SEQ ID NO: 7550 - DNA, 80 bp, synthetic construct
  misc_feature 1..80: note = Synthetic: >HCV.A15-cand-3760-3839
  source 1..80: mol_type = other DNA
ggagagggactggttgcattttcagacattagagatctgtatgcacatgaagaggaggctatggaacaaggcatttccaa

SEQ ID NO: 7551 - DNA, 80 bp, synthetic construct
  misc_feature 1..80: note = Synthetic: >HCV.A15-cand-3900-3979
  source 1..80: mol_type = other DNA
gatctcagaactcaccagcatggtcacaagcactatcacagagaagctacttaagaacttgatcaaaataatttcctctc

SEQ ID NO: 7552 - DNA, 80 bp, synthetic construct
  misc_feature 1..80: note = Synthetic: >HCV.A15-cand-3920-3999
  source 1..80: mol_type = other DNA
tggtcacaagcactatcacagagaagctacttaagaacttgatcaaaataatttcctctcttgtcattatcaccagaaac

SEQ ID NO: 7553 - DNA, 80 bp, synthetic construct
  misc_feature 1..80: note = Synthetic: >HCV.A15-cand-4000-4079
  source 1..80: mol_type = other DNA
tatgaagacactacgacggttcttgcaacactagcactgcttggttgtgacatgtctccatggcagtggcttaaaaagaa

SEQ ID NO: 7554 - DNA, 80 bp, synthetic construct
  misc_feature 1..80: note = Synthetic: >HCV.A15-cand-4080-4159
  source 1..80: mol_type = other DNA
agcctgtgacatcttggaaatcccgtacgtggttagacaaggagatagttggttgaagaaatttacagaggcatgcaatg

SEQ ID NO: 7555 - DNA, 80 bp, synthetic construct
  misc_feature 1..80: note = Synthetic: >HCV.A15-cand-4160-4239
  source 1..80: mol_type = other DNA
ctgccaagggtttagaatgggtgtccaataagatttccaaatttatagattggcttaaagaaaagattataccgcaagct

SEQ ID NO: 7556 - DNA, 80 bp, synthetic construct
  misc_feature 1..80: note = Synthetic: >HCV.A15-cand-4250-4329
  source 1..80: mol_type = other DNA
tggaatttgtgaccaagctcaagcaattagaaatgttggaaaaccagatttctactatccatcaatcatgtccgagccag

SEQ ID NO: 7557 - DNA, 80 bp, synthetic construct
  misc_feature 1..80: note = Synthetic: >HCV.A15-cand-4330-4409
  source 1..80: mol_type = other DNA
gaacatcaggaaatcctattcaacaatgtgagatggctgtctattcagtcgaaaaggttcgcaccactttatgcagttga

SEQ ID NO: 7558 - DNA, 80 bp, synthetic construct
  misc_feature 1..80: note = Synthetic: >HCV.A15-cand-4410-4489
  source 1..80: mol_type = other DNA
ggcaaagagaatacaaaaattggagcacaccataaacaactacatacagttcaagagcaaacaccgtattgagccagtat

SEQ ID NO: 7559 - DNA, 80 bp, synthetic construct
  misc_feature 1..80: note = Synthetic: >HCV.A15-cand-4490-4569
  source 1..80: mol_type = other DNA
gtttattagtgcatggtagtcctggtactggaaaatcagtagccaccaacctaattgcaagggccattgcagagaaggag

SEQ ID NO: 7560 - DNA, 80 bp, synthetic construct
  misc_feature 1..80: note = Synthetic: >HCV.A15-cand-4570-4649
  source 1..80: mol_type = other DNA
aacacatcaacatactcgttgccccccgacccctcacacttcgatggatacaaacagcaaggagtagtgattatggatga

SEQ ID NO: 7561 - DNA, 80 bp, synthetic construct
  misc_feature 1..80: note = Synthetic: >HCV.A15-cand-4650-4729
  source 1..80: mol_type = other DNA
cttgaaccaaaacccagatggtgcggacatgaagctgttttgtcaaatggtgtcaacagtggaatttatacctcccatgg

SEQ ID NO: 7562 - DNA, 80 bp, synthetic construct
  misc_feature 1..80: note = Synthetic: >HCV.A19-cand-5880-5959
  source 1..80: mol_type = other DNA
ttggcatacacgttggtggcaacggatcacatggttttgctgccgctctcaagagaagttactttactgaggaacaagga

SEQ ID NO: 7563 - DNA, 80 bp, synthetic construct
  misc_feature 1..80: note = Synthetic: >HCV.A19-cand-5960-6039
  source 1..80: mol_type = other DNA
gagatccagtggatgagaccaagtaaagatgcaggttatcccatgattaatgcaccctcaaagacaaagttagaacctag

SEQ ID NO: 7564 - DNA, 80 bp, synthetic construct
  misc_feature 1..80: note = Synthetic: >HCV.A19-cand-6040-6119
  source 1..80: mol_type = other DNA
tgttttctttgatgtctttccaggagaaaaagaaccagctgctttaactaagaatgaccccagattgaaagttgatttcg

SEQ ID NO: 7565 - DNA, 80 bp, synthetic construct
  misc_feature 1..80: note = Synthetic: >HCV.A19-cand-6120-6199
  source 1..80: mol_type = other DNA
aagaggccgtcttctccaagtacattgggaacaaaatcacagaggtggatgagtatatgaaggaagctgtcgatcactat

SEQ ID NO: 7566 - DNA, 80 bp, synthetic construct
  misc_feature 1..80: note = Synthetic: >HCV.A19-cand-6200-6279
  source 1..80: mol_type = other DNA
gctggtcagttaatgtcccttgatatacccacagaacaaatgtgcttggaagatgccatgtatggtacagatggtcttga

SEQ ID NO: 7567 - DNA, 80 bp, synthetic construct
  misc_feature 1..80: note = Synthetic: >HCV.A19-cand-6280-6359
  source 1..80: mol_type = other DNA
agccctggatttaacaactagtgctgggtacccttatgtggctattggaaagaaaaagagagatattctcaacaaacaaa

SEQ ID NO: 7568 - DNA, 80 bp, synthetic construct
  misc_feature 1..80: note = Synthetic: >HCV.A19-cand-6360-6439
  source 1..80: mol_type = other DNA
caagagacaccaaagaaatgcagaaaatgttggataaatatggaataaatctaccattggtaacttatgtcaaggatgaa

SEQ ID NO: 7569 - DNA, 80 bp, synthetic construct
  misc_feature 1..80: note = Synthetic: >HCV.A19-cand-6440-6519
  source 1..80: mol_type = other DNA
ctcagatccaaatcaaaagtagaacagggcaaatctaggctgattgaagcaagctctttaaatgattcagttgctatgag

SEQ ID NO: 7570 - DNA, 80 bp, synthetic construct
  misc_feature 1..80: note = Synthetic: >HCV.A19-cand-6520-6599
  source 1..80: mol_type = other DNA
gcaagcttttggtcacctgtacgctaaattccatcagaatccaggaataataacaggttcagcagttggatgtgacccag

SEQ ID NO: 7571 - DNA, 80 bp, synthetic construct
  misc_feature 1..80: note = Synthetic: >HCV.A19-cand-6680-6759
  source 1..80: mol_type = other DNA
tccccagcttggtttgaagccttaaaaatggtattggaaaagattggttttggtgatcgtgttgatttcatagactactt

SEQ ID NO: 7572 - DNA, 80 bp, synthetic construct
  misc_feature 1..80: note = Synthetic: >HCV.A19-cand-6770-6849
  source 1..80: mol_type = other DNA
caccacttatacaggaataaattatactgtgttaaaggtggaatgccctcagggtgctctggcacctcaatctttaattc

SEQ ID NO: 7573 - DNA, 80 bp, synthetic construct
  misc_feature 1..80: note = Synthetic: >HCV.A19-cand-6820-6899
  source 1..80: mol_type = other DNA
agggtgctctggcacctcaatctttaattctatgattaataatctaataattaggacattaatgttaaaaacctacaaag

SEQ ID NO: 7574 - DNA, 80 bp, synthetic construct
  misc_feature 1..80: note = Synthetic: >HCV.A19-cand-7020-7099
  source 1..80: mol_type = other DNA
caccagcagacaagggtgctacttttacagatgtagattggagtaatgtgacatttctcaaaagattcttcagagcagat

SEQ ID NO: 7575 - DNA, 80 bp, synthetic construct
  misc_feature 1..80: note = Synthetic: >HCV.A19-cand-7100-7179
  source 1..80: mol_type = other DNA
gagcagtatcctttcctagttcacccagtgatgcccatgaaagacatttatgaatcaattaggtggaccaaagatccgcg

SEQ ID NO: 7576 - DNA, 80 bp, synthetic construct
  misc_feature 1..80: note = Synthetic: >HCV.A19-cand-7310-7389
  source 1..80: mol_type = other DNA
actcttcgcaggcgctggctcgattctttttagggtaaccctacctcacccgaattggcttgggttatggtgttgtaggg

SEQ ID NO: 7577 - DNA, 80 bp, synthetic construct
  misc_feature 1..80: note = Synthetic: >HCV.A2-cand-40-119
  source 1..80: mol_type = other DNA
cgctagcactctggtatcacgatacctttgtgcgcctgttttatatccccaccccgagtaaacgttagaagttacgcaac

SEQ ID NO: 7578 - DNA, 80 bp, synthetic construct
  misc_feature 1..80: note = Synthetic: >HCV.A2-cand-1550-1629
  source 1..80: mol_type = other DNA
gccctttgattctgcaataaatcactccaatttttcactggctgtcgtaccagtgtgcccgttaaagtataacactggtg

SEQ ID NO: 7579 - DNA, 80 bp, synthetic construct
  misc_feature 1..80: note = Synthetic: >HCV.A2-cand-1630-1709
  source 1..80: mol_type = other DNA
ccaccccttcgataccgatcacaattacagttgctccactgtgctctgaattcgctgggctgcgccaggcagtgaaacag

SEQ ID NO: 7580 - DNA, 80 bp, synthetic construct
  misc_feature 1..80: note = Synthetic: >HCV.A2-cand-1720-1799
  source 1..80: mol_type = other DNA
tggaaatgaagccaggtacaaatcaatttctaactactgatgatggaacttcagcgccaatactgccaggttttcacccc

SEQ ID NO: 7581 - DNA, 80 bp, synthetic construct
  misc_feature 1..80: note = Synthetic: >HCV.A2-cand-1830-1909
  source 1..80: mol_type = other DNA
cacagtttgctggagttatgccaggtggaaactatgttggaagttaataatacaactagagcagtggaactcgaccggtt

SEQ ID NO: 7582 - DNA, 80 bp, synthetic construct
  misc_feature 1..80: note = Synthetic: >HCV.A2-cand-1880-1959
  source 1..80: mol_type = other DNA
tacaactagagcagtggaactcgaccggttaaggatacctgtgtccgcccagagcgcagtggacaccttgtgtgcagcgt

SEQ ID NO: 7583 - DNA, 80 bp, synthetic construct
  misc_feature 1..80: note = Synthetic: >HCV.A2-cand-1960-2039
  source 1..80: mol_type = other DNA
ttagagtggatcccggtagggatggaccatggcagtccactatggtcgggcaattatgcaggtactacacacagtggtca

SEQ ID NO: 7584 - DNA, 80 bp, synthetic construct
  misc_feature 1..80: note = Synthetic: >HCV.A2-cand-2040-2119
  source 1..80: mol_type = other DNA
ggctccctgaagataacattcatgttcacaggctccttcatggctacaggaaagatgctggtcgcttacactcctccagg

SEQ ID NO: 7585 - DNA, 80 bp, synthetic construct
  misc_feature 1..80: note = Synthetic: >HCV.A2-cand-2130-2209
  source 1..80: mol_type = other DNA
ccagctactcgagaactcgctatgttgggcacacatgtgatctgggattttggcttacagtcatcagtgacactagtgat

SEQ ID NO: 7586 - DNA, 80 bp, synthetic construct
  misc_feature 1..80: note = Synthetic: >HCV.A2-cand-2170-2249
  source 1..80: mol_type = other DNA
tctgggattttggcttacagtcatcagtgacactagtgatcccttggataagcaacacacactatagggccgttgaaact

SEQ ID NO: 7587 - DNA, 80 bp, synthetic construct
  misc_feature 1..80: note = Synthetic: >HCV.A2-cand-2290-2369
  source 1..80: mol_type = other DNA
tatggtatcaaacaaattttgtggtccctcctgacactcccactagcgcttacatcttggcatttggagcgggtcagaag

SEQ ID NO: 7588 - DNA, 80 bp, synthetic construct
  misc_feature 1..80: note = Synthetic: >HCV.A2-cand-2370-2449
  source 1..80: mol_type = other DNA
aatttcactctcaagctgtgcaaagacactgacgagattacacaacaagcggtgttgcagggtgacggtatcgaagatgc

SEQ ID NO: 7589 - DNA, 80 bp, synthetic construct
  misc_feature 1..80: note = Synthetic: >HCV.A2-cand-2450-2529
  source 1..80: mol_type = other DNA
tataaccaacactgtaaatgccactataaacagagtgttggatcgaccgatttctcactcatccacagctgcaaacaccc

SEQ ID NO: 7590 - DNA, 80 bp, synthetic construct
  misc_feature 1..80: note = Synthetic: >HCV.A2-cand-2530-2609
  source 1..80: mol_type = other DNA
aggtgagtcaacactcaattgagacaggtcgcgtgcccgcacttcaagctgctgaaacgggtgcaacgtccaacgcatcc

SEQ ID NO: 7591 - DNA, 80 bp, synthetic construct
  misc_feature 1..80: note = Synthetic: >HCV.A2-cand-2610-2689
  source 1..80: mol_type = other DNA
gatgaaaatctaattgaaactaggtgtgtagtcaacaagaacagtgtggaggaagctagcttaaaccacttcttctcccg

SEQ ID NO: 7592 - DNA, 80 bp, synthetic construct
  misc_feature 1..80: note = Synthetic: >HCV.A2-cand-2690-2769
  source 1..80: mol_type = other DNA
tgctgcattagttggcaaagtggagctaaatgacacagggacggctgctacagggttcaccaattggaatattgacataa

SEQ ID NO: 7593 - DNA, 80 bp, synthetic construct
  misc_feature 1..80: note = Synthetic: >HCV.A2-cand-2780-2859
  source 1..80: mol_type = other DNA
gcagttgcggaggaaactagagatgttcacatacatgaggttcaatgctgaattcacttttgtggccaccactagggctg

SEQ ID NO: 7594 - DNA, 80 bp, synthetic construct
  misc_feature 1..80: note = Synthetic: >HCV.B2-cand-920-999
  source 1..80: mol_type = other DNA
gattaaatcaatgcccgcactaaattcaccatcggcagaggagtgtgggtatagtgacagggtgaggtccataacactgg

SEQ ID NO: 7595 - DNA, 80 bp, synthetic construct
  misc_feature 1..80: note = Synthetic: >HCV.B2-cand-1000-1079
  source 1..80: mol_type = other DNA
gcaattcaacaatcaccacccaagagtgtgccaatgtggttgtgggatatggtgtctggccacaatacttgagcgataaa

SEQ ID NO: 7596 - DNA, 80 bp, synthetic construct
  misc_feature 1..80: note = Synthetic: >HCV.B2-cand-1080-1159
  source 1..80: mol_type = other DNA
gaggccacagcggaagaccaaccaacgcagccagacgttgctacatgcaggttctatacactttcatccgtgcaatggca

SEQ ID NO: 7597 - DNA, 80 bp, synthetic construct
  misc_feature 1..80: note = Synthetic: >HCV.B2-cand-1160-1239
  source 1..80: mol_type = other DNA
gaaagagtccgccgggtggtggtggaagttcccagatgcactgtcagatatgggtttgtttgctcaaaacatgatgtacc

SEQ ID NO: 7598 - DNA, 80 bp, synthetic construct
  misc_feature 1..80: note = Synthetic: >HCV.B2-cand-1220-1299
  source 1..80: mol_type = other DNA
tgctcaaaacatgatgtaccactacctaggaagaactggatatacgatacatgttcagtgcaacgcatccaagtttcacc

SEQ ID NO: 7599 - DNA, 80 bp, synthetic construct
  misc_feature 1..80: note = Synthetic: >HCV.B2-cand-1350-1429
  source 1..80: mol_type = other DNA
aataaagagaacacccctttatttgagaaattgtgcggccaagacaatgccaaggagttttcacgtgatgggccaaccgt

SEQ ID NO: 7600 - DNA, 80 bp, synthetic construct
  misc_feature 1..80: note = Synthetic: >HCV.B2-cand-1400-1479
  source 1..80: mol_type = other DNA
caaggagttttcacgtgatgggccaaccgtttcggagggtgcgactgatgtccagaccgcagtgtgtaatgctggcatgg

SEQ ID NO: 7601 - DNA, 80 bp, synthetic construct
  misc_feature 1..80: note = Synthetic: >HCV.B2-cand-1480-1559
  source 1..80: mol_type = other DNA
gagttggagttgggaacttaacaattttcccacatcaatggattaacctgcgcaccaacaatagcgcaaccatagttatg

SEQ ID NO: 7602 - DNA, 80 bp, synthetic construct
  misc_feature 1..80: note = Synthetic: >HCV.B2-cand-1560-1639
  source 1..80: mol_type = other DNA
ccatacataaacagtgtgccaatggatagtatgattagacacaacaacttcacactgatgataatcccctttgtaccact

SEQ ID NO: 7603 - DNA, 80 bp, synthetic construct
  misc_feature 1..80: note = Synthetic: >HCV.B2-cand-1640-1719
  source 1..80: mol_type = other DNA
tgattatgtcaatggttcctccccttacatacccatcactgtaactgtagctccaatgtccgctgagtataatgggctgc

SEQ ID NO: 7604 - DNA, 80 bp, synthetic construct
  misc_feature 1..80: note = Synthetic: >HCV.B2-cand-1720-1799
  source 1..80: mol_type = other DNA
gacttgccagcacacagggcttgcccactatgttaacacctgggagcaaccagtttttgacttctgatgattttcaatca

SEQ ID NO: 7605 - DNA, 80 bp, synthetic construct
  misc_feature 1..80: note = Synthetic: >HCV.B2-cand-1810-1889
  source 1..80: mol_type = other DNA
tgccacagtttgatgtcacacctgagatggacatcccaggacaagtgcgcaatctaatggagatagcagaggtagattct

SEQ ID NO: 7606 - DNA, 80 bp, synthetic construct
  misc_feature 1..80: note = Synthetic: >HCV.B2-cand-1890-1969
  source 1..80: mol_type = other DNA
gtgataccactaaacaacatccaagacaacctcagaaaaatggacgtctaccgtgtacaagtatcctcccaaacaagcca

SEQ ID NO: 7607 - DNA, 80 bp, synthetic construct
  misc_feature 1..80: note = Synthetic: >HCV.B2-cand-1970-2049
  source 1..80: mol_type = other DNA
aggtgcacaagtgttcggtttttcactgcagccaggtgcatccagtgtgttacaacgcacactgctaggtgaaatcttga

SEQ ID NO: 7608 - DNA, 80 bp, synthetic construct
  misc_feature 1..80: note = Synthetic: >HCV.B2-cand-2050-2129
  source 1..80: mol_type = other DNA
attattacacacactggtctggcagtttgaagttaacatttgtgttctgtgggtccgcgatggcaactggaaagttcttg

SEQ ID NO: 7609 - DNA, 80 bp, synthetic construct
  misc_feature 1..80: note = Synthetic: >HCV.B2-cand-2070-2149
  source 1..80: mol_type = other DNA
ggcagtttgaagttaacatttgtgttctgtgggtccgcgatggcaactggaaagttcttgttagcttactcgccaccggg

SEQ ID NO: 7610 - DNA, 80 bp, synthetic construct
  misc_feature 1..80: note = Synthetic: >HCV.B5-cand-2280-2359
  source 1..80: mol_type = other DNA
atactgctggtgggtacataacatgttggtaccagacaaacattgtggtgcctgcagacactcaaagtgactgcaagatc

SEQ ID NO: 7611 - DNA, 80 bp, synthetic construct
  misc_feature 1..80: note = Synthetic: >HCV.B5-cand-2360-2439
  source 1..80: mol_type = other DNA
ttgtgctttgtgtcagcctgcaacgacttctctgtcaggatgctcaaggacacaccctttataaaacaggacaacttcta

SEQ ID NO: 7612 - DNA, 80 bp, synthetic construct
  misc_feature 1..80: note = Synthetic: >HCV.B5-cand-2430-2509
  source 1..80: mol_type = other DNA
acaacttctaccaagggcccccaggtgaggcagtggagagggccattgcacgcgtcgctgataccattgggagcggtcca

SEQ ID NO: 7613 - DNA, 80 bp, synthetic construct
  misc_feature 1..80: note = Synthetic: >HCV.B5-cand-2510-2589
  source 1..80: mol_type = other DNA
gtcaactcagagtcaattccagccttgactgccgcagaaacgggacacacgtcgcaggtggtgccagcagacactatgca

SEQ ID NO: 7614 - DNA, 80 bp, synthetic construct
  misc_feature 1..80: note = Synthetic: >HCV.B5-cand-2590-2669
  source 1..80: mol_type = other DNA
aaccaggcatgtgaaaaactatcactcaagatcggagtcgacagtggagaactttctgtgtagatcagcatgcgtctttt

SEQ ID NO: 7615 - DNA, 80 bp, synthetic construct
  misc_feature 1..80: note = Synthetic: >HCV.B5-cand-2670-2749
  source 1..80: mol_type = other DNA
acaccacgtacaaaaatcatggtactgatggtgacaactttggttattgggtgatcaacacgcgccaggtggctcaacta

SEQ ID NO: 7616 - DNA, 80 bp, synthetic construct
  misc_feature 1..80: note = Synthetic: >HCV.B5-cand-2750-2829
  source 1..80: mol_type = other DNA
cggcgcaaacttgagatgtttacatatgcgagatttgatcttgagctgacctttgtgatcacaagcactcaagaacaatc

SEQ ID NO: 7617 - DNA, 80 bp, synthetic construct
  misc_feature 1..80: note = Synthetic: >HCV.B5-cand-2830-2909
  source 1..80: mol_type = other DNA
caccatacaaggccaggattcaccagtgctcactcatcaaatcatgtatgtgcccccaggtggcccagtgcccacgaaag

SEQ ID NO: 7618 - DNA, 80 bp, synthetic construct
  misc_feature 1..80: note = Synthetic: >HCV.B5-cand-2910-2989
  source 1..80: mol_type = other DNA
tgaacagctacagctggcagacgtccaccaaccctagtgtgttctggacagaagggagtgcaccaccccgtatgtcaata

SEQ ID NO: 7619 - DNA, 80 bp, synthetic construct
  misc_feature 1..80: note = Synthetic: >HCV.B5-cand-2990-3069
  source 1..80: mol_type = other DNA
ccattcatcagcataggcaatgcatatagtatgttctatgatgggtgggctaggtttgacaagcaagggacatatggcat

SEQ ID NO: 7620 - DNA, 80 bp, synthetic construct
  misc_feature 1..80: note = Synthetic: >HCV.B5-cand-3090-3169
  source 1..80: mol_type = other DNA
ggacgctgtacatgagacacgtgaatgatggcagccccggcccaattgtgagtaccgtacgcatatatttcaaaccaaag

SEQ ID NO: 7621 - DNA, 80 bp, synthetic construct
  misc_feature 1..80: note = Synthetic: >HCV.B5-cand-3150-3229
  source 1..80: mol_type = other DNA
gcatatatttcaaaccaaagcacgtcaagacatgggtcccaagaccacccaggttatgccagtaccagaaggcaggcaat

SEQ ID NO: 7622 - DNA, 80 bp, synthetic construct
  misc_feature 1..80: note = Synthetic: >HCV.B5-cand-3230-3309
  source 1..80: mol_type = other DNA
gtgaattttgaacctactggcgtgactgagagtaggacagacataacaacaatgcagaccaccggtgcctatggacaaca

SEQ ID NO: 7623 - DNA, 80 bp, synthetic construct
  misc_feature 1..80: note = Synthetic: >HCV.B5-cand-3310-3389
  source 1..80: mol_type = other DNA
atcaggcgccgtgtacattggcaactacagaatggtgaacagacatcttgcaacccacactgattggcaaaactgcgtgt

SEQ ID NO: 7624 - DNA, 80 bp, synthetic construct
  misc_feature 1..80: note = Synthetic: >HCV.B5-cand-3390-3469
  source 1..80: mol_type = other DNA
gggaggattacaacagggacctactagtcagcacaaccacagcccatggctgtgacaccatagccagatgtcaatgcaca

SEQ ID NO: 7625 - DNA, 80 bp, synthetic construct
  misc_feature 1..80: note = Synthetic: >HCV.B5-cand-3480-3559
  source 1..80: mol_type = other DNA
atttttgtgcctcaaggaacaaacattacccagtcgtctttgaaggtccgggtctcgtggaagtccaagagagtgagtac

SEQ ID NO: 7626 - DNA, 80 bp, synthetic construct
  misc_feature 1..80: note = Synthetic: >HCV.B5-cand-5060-5139
  source 1..80: mol_type = other DNA
gttgcacctgaaacccccccaccaccagcaattgcagacctgctaaaatcagtggacagtgaggcggtgagggagtactg

SEQ ID NO: 7627 - DNA, 80 bp, synthetic construct
  misc_feature 1..80: note = Synthetic: >HCV.B5-cand-5140-5219
  source 1..80: mol_type = other DNA
caaggagaagggatggttagttcctgagattaactccactctccagattgaaaagcatgtcagcagggcattcatctgcc

SEQ ID NO: 7628 - DNA, 80 bp, synthetic construct
  misc_feature 1..80: note = Synthetic: >HCV.B5-cand-5220-5299
  source 1..80: mol_type = other DNA
tccaagcactaacaacctttgtttctgtggccgggataatatacatcatttacaagttgtttgcaggtttccagggtgca

SEQ ID NO: 7629 - DNA, 80 bp, synthetic construct
  misc_feature 1..80: note = Synthetic: >HCV.B5-cand-5300-5379
  source 1..80: mol_type = other DNA
tacacagggatgcccaaccaaaaacccaaagtgcccaccctaagacaagccaaggtgcaaggtcccgcttttgagtttgc

SEQ ID NO: 7630 - DNA, 80 bp, synthetic construct
  misc_feature 1..80: note = Synthetic: >HCV.B5-cand-5380-5459
  source 1..80: mol_type = other DNA
cgtggccatgatgaagagaaactccagcacggtgaaaacagaatacggtgagttcaccatgctgggcatctatgacaggt

SEQ ID NO: 7631 - DNA, 80 bp, synthetic construct
  misc_feature 1..80: note = Synthetic: >HCV.B5-cand-5460-5539
  source 1..80: mol_type = other DNA
gggcagtcctgccgcgccacgccaagcctggaccaaccatcctaatgaatgatcaagaagttggtgtgctggatgcaaaa

SEQ ID NO: 7632 - DNA, 80 bp, synthetic construct
  misc_feature 1..80: note = Synthetic: >HCV.B5-cand-5540-5619
  source 1..80: mol_type = other DNA
gagctggtggacaaggatggcacaaacctggagctgacactgctgaagctcaaccgaaatgagaagtttagagacatcag

SEQ ID NO: 7633 - DNA, 80 bp, synthetic construct
  misc_feature 1..80: note = Synthetic: >HCV.B5-cand-5620-5699
  source 1..80: mol_type = other DNA
aggcttcctggcaaaagaagaagtggaggtcaatgaggctgtcctggcaataaacaccagcaagttcccaaacatgtaca

SEQ ID NO: 7634 - DNA, 80 bp, synthetic construct
  misc_feature 1..80: note = Synthetic: >HCV.B5-cand-5780-5859
  source 1..80: mol_type = other DNA
ccaaccagagcaggtcagtgtggtggtgtcctcatgtccactggtaaggtgctgggaatacacgttggtggaaatggcca

SEQ ID NO: 7635 - DNA, 80 bp, synthetic construct
  misc_feature 1..80: note = Synthetic: >HCV.B5-cand-5860-5939
  source 1..80: mol_type = other DNA
ccaaggcttctcagcagctctcctcaagcactacttcaatgatgagcaaggtgagatagagttcatcgaaagctccaaag

SEQ ID NO: 7636 - DNA, 80 bp, synthetic construct
  misc_feature 1..80: note = Synthetic: >HCV.B5-cand-5940-6019
  source 1..80: mol_type = other DNA
atgcagggttccctgtcatcaacacaccaagcaaaacaaaactggaaccaagtgtgttccaccaggtgtttgagggcaac

SEQ ID NO: 7637 - DNA, 80 bp, synthetic construct
  misc_feature 1..80: note = Synthetic: >HCV.B5-cand-6180-6259
  source 1..80: mol_type = other DNA
gcacagaaccaatgaaactggaggatgctgtgtatggcactgaagggttggaggccctcgatctgaccaccagtgcaggg

SEQ ID NO: 7638 - DNA, 80 bp, synthetic construct
  misc_feature 1..80: note = Synthetic: >HCV.B5-cand-6260-6339
  source 1..80: mol_type = other DNA
tacccgtatgttgcactaggcatcaagaagagagacattctatccaagaagaccaaagacctaaccaaactgaaggagtg

SEQ ID NO: 7639 - DNA, 80 bp, synthetic construct
  misc_feature 1..80: note = Synthetic: >HCV.B5-cand-6340-6419
  source 1..80: mol_type = other DNA
catggacaagtatggtttgaacttaccaatggtgacctatgtgaaggatgagctcaggtcagcagagaaggtggcaaaag

SEQ ID NO: 7640 - DNA, 80 bp, synthetic construct
  misc_feature 1..80: note = Synthetic: >HCV.B5-cand-6420-6499
  source 1..80: mol_type = other DNA
ggaaatccaggcttattgaagcatctagcctgaatgactctgtggcaatgagacaaacatttggcaacctgtacaagaca

SEQ ID NO: 7641 - DNA, 80 bp, synthetic construct
  misc_feature 1..80: note = Synthetic: >HCV.B5-cand-6500-6579
  source 1..80: mol_type = other DNA
ttccatctgaacccaggaattgtgacaggcagcgctgttgggtgtgaccccgacctcttttggagtaaaataccagtaat

SEQ ID NO: 7642 - DNA, 80 bp, synthetic construct
  misc_feature 1..80: note = Synthetic: >LR861845.1-cand-510-589
  source 1..80: mol_type = other DNA
taatacatgttgtgaccaggcacggcaagaaagacttcgcagacgtagggaaacacaagtatagcaataagtatgcatgg

SEQ ID NO: 7643 - DNA, 80 bp, synthetic construct
  misc_feature 1..80: note = Synthetic: >LR861845.1-cand-590-669
  source 1..80: mol_type = other DNA
accccgggaaacactgcaagaaattgtattgcatttggaacctcagaatgaattagatcctgttgacctgttgtgttacg

SEQ ID NO: 7644 - DNA, 80 bp, synthetic construct
  misc_feature 1..80: note = Synthetic: >LR861845.1-cand-670-749
  source 1..80: mol_type = other DNA
agcaattaagcgagtcagaggaggaaaacgatgaagcagatggagttagtcatgcacaactaccagcccgacgagccgaa

SEQ ID NO: 7645 - DNA, 80 bp, synthetic construct
  misc_feature 1..80: note = Synthetic: >LR861845.1-cand-760-839
  source 1..80: mol_type = other DNA
acaaaattttgtgtgtatgttgtaagtgtgacggcagaattgagcttacagtagagagctcggcagaggaccttagaaca

SEQ ID NO: 7646 - DNA, 80 bp, synthetic construct
  misc_feature 1..80: note = Synthetic: >LR861845.1-cand-850-929
  source 1..80: mol_type = other DNA
tgtttttgagcaccttgtcctttgtgtgtccgtggtgtgcaactaaccaataatctacaatggcggatccagaaggtacc

SEQ ID NO: 7647 - DNA, 80 bp, synthetic construct
  misc_feature 1..80: note = Synthetic: >LR861845.1-cand-1000-1079
  source 1..80: mol_type = other DNA
taatatcagatgatgaggatgaaactgcaacagatacagggtcggatatggtagattttattgacacacaattatccatt

SEQ ID NO: 7648 - DNA, 80 bp, synthetic construct
  misc_feature 1..80: note = Synthetic: >LR861845.1-cand-1020-1099
  source 1..80: mol_type = other DNA
gaaactgcaacagatacagggtcggatatggtagattttattgacacacaattatccatttgtgaacaggcagagcaaga

SEQ ID NO: 7649 - DNA, 80 bp, synthetic construct
  misc_feature 1..80: note = Synthetic: >LR861845.1-cand-1100-1179
  source 1..80: mol_type = other DNA
gacagcacaggcattgttccatgcgcaggaagttcagaatgatgcacaggtgttgcatcttttaaaacgaaagtttgcag

SEQ ID NO: 7650 - DNA, 80 bp, synthetic construct
  misc_feature 1..80: note = Synthetic: >LR861845.1-cand-1210-1289
  source 1..80: mol_type = other DNA
agcagctaagtgtggatacggatctaagtccacggttacaagaaatttcattaaatagtgggcacaaaaaagcaaaacga

SEQ ID NO: 7651 - DNA, 80 bp, synthetic construct
  misc_feature 1..80: note = Synthetic: >LR861845.1-cand-1330-1409
  source 1..80: mol_type = other DNA
aagtggaagctgcagagactcaggtaactgtaaacactaatgcggaaaatggcggcagtgtacatagtacacaaagtagt

SEQ ID NO: 7652 - DNA, 80 bp, synthetic construct
  misc_feature 1..80: note = Synthetic: >LR861845.1-cand-1420-1499
  source 1..80: mol_type = other DNA
gtagtgacaatgcagaaaatgtagatccgcattgcagtattacagaactaaaggagctattacaagcaagtaacaaaaag

SEQ ID NO: 7653 - DNA, 80 bp, synthetic construct
  misc_feature 1..80: note = Synthetic: >LR861845.1-cand-1500-1579
  source 1..80: mol_type = other DNA
gctgcaatgctggcagtatttaaagacatatatgggctgtcatttacggatttggttagaaattttaaaagtgataaaac

SEQ ID NO: 7654 - DNA, 80 bp, synthetic construct
  misc_feature 1..80: note = Synthetic: >LR861845.1-cand-1580-1659
  source 1..80: mol_type = other DNA
aacatgtacagattgggtaatggctatatttggagttaatccaacggtagcagaaggctttaaaacattaattaaaccag

SEQ ID NO: 7655 - DNA, 80 bp, synthetic construct
  misc_feature 1..80: note = Synthetic: >LR861845.1-cand-1620-1699
  source 1..80: mol_type = other DNA
ccaacggtagcagaaggctttaaaacattaattaaaccagcaacgttatacgcccatatccaatgtttagattgtaaatg

SEQ ID NO: 7656 - DNA, 80 bp, synthetic construct
  misc_feature 1..80: note = Synthetic: >LR861845.1-cand-1740-1819
  source 1..80: mol_type = other DNA
aaaaatagactaactgttgcaaaaggcttaagcacattgttgcacgtacctgaaacatgtatgttaattgaaccaccaaa

SEQ ID NO: 7657 - DNA, 80 bp, synthetic construct
  misc_feature 1..80: note = Synthetic: >LR861845.1-cand-1820-1899
  source 1..80: mol_type = other DNA
attgcgaagtagtgttgcagcattatactggtatagaacaggtatatccaatattagtgaagtaagtggagacacacctg

SEQ ID NO: 7658 - DNA, 80 bp, synthetic construct
  misc_feature 1..80: note = Synthetic: >MG717393.1-cand-1660-1739
  source 1..80: mol_type = other DNA
ttggattcaaagtcagacatagacggagtgacatggtgtttttcaaaggtaatgagtattgatctaaacagacttctagc

SEQ ID NO: 7659 - DNA, 80 bp, synthetic construct
  misc_feature 1..80: note = Synthetic: >MG717393.1-cand-1740-1819
  source 1..80: mol_type = other DNA
gcttaatattgcctttgaaaaagcacttcttgcaactgcaacatggtttcaatactatgctgaagatcaaggacacttcc

SEQ ID NO: 7660 - DNA, 80 bp, synthetic construct
  misc_feature 1..80: note = Synthetic: >MG717393.1-cand-1820-1899
  source 1..80: mol_type = other DNA
cattgcagcatgctttacggtctgtcttcgcattccattttttattgtgtgtctctcaaaagatgaaagtatgtgcaatt

SEQ ID NO: 7661 - DNA, 80 bp, synthetic construct
  misc_feature 1..80: note = Synthetic: >MG717393.1-cand-1900-1979
  source 1..80: mol_type = other DNA
tttgataatcttcgttatctaataccagctgttacatctctgtattcaggctatgaattactgattgaaaagttttttga

SEQ ID NO: 7662 - DNA, 80 bp, synthetic construct
  misc_feature 1..80: note = Synthetic: >MG717393.1-cand-1980-2059
  source 1..80: mol_type = other DNA
aaggccttttaaaagtgcattagaagtttatttatacaacataataaaggccttgctaataagccttgcccaaaacaata

SEQ ID NO: 7663 - DNA, 80 bp, synthetic construct
  misc_feature 1..80: note = Synthetic: >MG717393.1-cand-2050-2129
  source 1..80: mol_type = other DNA
caaaacaataaagttagattttattctaaggtacggctacttgggctcactgtcgatcattcaactgttggtgccagtgg

SEQ ID NO: 7664 - DNA, 80 bp, synthetic construct
  misc_feature 1..80: note = Synthetic: >MG717393.1-cand-2140-2219
  source 1..80: mol_type = other DNA
tcgttaatgtcacgagttgtatataaacattataggagtctcatttctgaggcaacgacctgtttctttttgtttgagaa

SEQ ID NO: 7665 - DNA, 80 bp, synthetic construct
  misc_feature 1..80: note = Synthetic: >MG717393.1-cand-2220-2299
  source 1..80: mol_type = other DNA
aggtctgcatggaaatttaaatgaagaagcaaagatacaccttgaaacagtggaatgggccaggaaatttgaggaaaagg

SEQ ID NO: 7666 - DNA, 80 bp, synthetic construct
  misc_feature 1..80: note = Synthetic: >MG717393.1-cand-2310-2389
  source 1..80: mol_type = other DNA
tggagacataatgatgcgagaaggttatacaattgatgctattaatgttggtgatgtgcaagttgaacaacaactttttt

SEQ ID NO: 7667 - DNA, 80 bp, synthetic construct
  misc_feature 1..80: note = Synthetic: >MG717393.1-cand-2390-2469
  source 1..80: mol_type = other DNA
ctcaagaggttgttgagttaagtgctgatgaattaaataagtatttgcaggctaaaagtcaggtgctttcatccaatata

SEQ ID NO: 7668 - DNA, 80 bp, synthetic construct
  misc_feature 1..80: note = Synthetic: >MG717393.1-cand-2470-2549
  source 1..80: mol_type = other DNA
atgaacaaacactgggataaaccatattttagccagactagaaatataagtcttaaaggaatgtcaggtgctttgcaaga

SEQ ID NO: 7669 - DNA, 80 bp, synthetic construct
  misc_feature 1..80: note = Synthetic: >MG717393.1-cand-2550-2629
  source 1..80: mol_type = other DNA
agatggacatttagcggcaagtgtaactttaattgaagcaatcagattccttaatcggtcccaaaccaatccaaatgtta

SEQ ID NO: 7670 - DNA, 80 bp, synthetic construct
  misc_feature 1..80: note = Synthetic: >MG717393.1-cand-2630-2709
  source 1..80: mol_type = other DNA
ttgacatgtatgagcaaactaaacagcataaagcacaggcaaggattgtgaggaaatatcaaaggacagaagctgatagg

SEQ ID NO: 7671 - DNA, 80 bp, synthetic construct
  misc_feature 1..80: note = Synthetic: >MG717393.1-cand-2710-2789
  source 1..80: mol_type = other DNA
ggtttctttataacaactcttcctacaagggtgcggcttgaaatcattgaagattattatgatgcaattgctagagtagt

SEQ ID NO: 7672 - DNA, 80 bp, synthetic construct
  misc_feature 1..80: note = Synthetic: >MG717393.1-cand-2790-2869
  source 1..80: mol_type = other DNA
tccagaagagtacatatcttatggaggtgataagaaggttctaaatatacaagcagccttggaaaaggctttgcggtggg

SEQ ID NO: 7673 - DNA, 80 bp, synthetic construct
  misc_feature 1..80: note = Synthetic: >MG717393.1-cand-2870-2949
  source 1..80: mol_type = other DNA
catctgggtcatcagagataactacaagcactgggaagacaataaggtttaaacggcgcttgatgtatgtgagtgcagat

SEQ ID NO: 7674 - DNA, 80 bp, synthetic construct
  misc_feature 1..80: note = Synthetic: >NC_001611.1-cand-10340-10419
  source 1..80: mol_type = other DNA
ttgttaagatatttggctaaattatataattctattagatcattaacagaatcagtatatatttttctagatccaaagac

SEQ ID NO: 7675 - DNA, 80 bp, synthetic construct
  misc_feature 1..80: note = Synthetic: >NC_001611.1-cand-10420-10499
  source 1..80: mol_type = other DNA
gaactctttggcgtcctctataatattcccagaaaagatattttcgtgttttagtttatcgagatctaatctgttcatat

SEQ ID NO: 7676 - DNA, 80 bp, synthetic construct
  misc_feature 1..80: note = Synthetic: >NC_001611.1-cand-10500-10579
  source 1..80: mol_type = other DNA
acgtatccatgattgcgcggtacgttatgatagccgcataaaataaaatccattttcatttttaaccaatactatctcct

SEQ ID NO: 7677 - DNA, 80 bp, synthetic construct
  misc_feature 1..80: note = Synthetic: >NC_001611.1-cand-10580-10659
  source 1..80: mol_type = other DNA
ctattcataattgagattgatgtaatactttgttactttgaacgtaaaaacagtacacggatccgtatctccaacaagca

SEQ ID NO: 7678 - DNA, 80 bp, synthetic construct
  misc_feature 1..80: note = Synthetic: >NC_001611.1-cand-10740-10819
  source 1..80: mol_type = other DNA
ggaatccatgtattattaccactttccaacttatcattatcccaggctatgtttcgtccatcatcattgcgcagagtgaa

SEQ ID NO: 7679 - DNA, 80 bp, synthetic construct
  misc_feature 1..80: note = Synthetic: >NC_001611.1-cand-10820-10899
  source 1..80: mol_type = other DNA
taattcttctgtatccggcagttcaaatatatgatccatgcatagatcggcaaagctatcgtagatgtgatttttcctaa

SEQ ID NO: 7680 - DNA, 80 bp, synthetic construct
  misc_feature 1..80: note = Synthetic: >NC_001611.1-cand-10900-10979
  source 1..80: mol_type = other DNA
atcgagtataaaactcgtttactagcaaacactttcctgatttattgaccaagacacatatggtttctaagtctatcaag

SEQ ID NO: 7681 - DNA, 80 bp, synthetic construct
  misc_feature 1..80: note = Synthetic: >NC_001611.1-cand-10990-11069
  source 1..80: mol_type = other DNA
ccatagttatgacgcagtaacatagattattaccttcttgactgtcgctaatatctatatatttattgttatcgtattgg

SEQ ID NO: 7682 - DNA, 80 bp, synthetic construct
  misc_feature 1..80: note = Synthetic: >NC_001611.1-cand-11060-11139
  source 1..80: mol_type = other DNA
atcgtattggattctgcatatagatggcttgtatgtcaaagatatagaacacataaccaatttatagtcgcgctttacat

SEQ ID NO: 7683 - DNA, 80 bp, synthetic construct
  misc_feature 1..80: note = Synthetic: >NC_001611.1-cand-11140-11219
  source 1..80: mol_type = other DNA
tctcgaatctaaagttaagagatttagaaaacattatatcctcggatgatgttatcactgtttctggagtaggatatatt

SEQ ID NO: 7684 - DNA, 80 bp, synthetic construct
  misc_feature 1..80: note = Synthetic: >NC_001611.1-cand-11220-11299
  source 1..80: mol_type = other DNA
aaagtctttacagatttcatccgattcaaataaatcactaaataatatcccacattgtcatctgttagagtagtatcatt

SEQ ID NO: 7685 - DNA, 80 bp, synthetic construct
  misc_feature 1..80: note = Synthetic: >NC_001611.1-cand-11550-11629
  source 1..80: mol_type = other DNA
agtagctaacataaaccattgtataatttttatgttttatgtttattagcgtacacattttggaagttccggttgccatg

SEQ ID NO: 7686 - DNA, 80 bp, synthetic construct
  misc_feature 1..80: note = Synthetic: >NC_001611.1-cand-11710-11789
  source 1..80: mol_type = other DNA
tacgaatatgatcttttaaacccgctagacaagtatccgtttaatattgtaggatgtggacatttaacaatctgacacgt

SEQ ID NO: 7687 - DNA, 80 bp, synthetic construct
  misc_feature 1..80: note = Synthetic: >NC_001611.1-cand-11870-11949
  source 1..80: mol_type = other DNA
ttacaacgcttccatcggtataaaaatcattatatccgttatgtcttccgttggatatagatggaggtaattggcattta

SEQ ID NO: 7688 - DNA, 80 bp, synthetic construct
  misc_feature 1..80: note = Synthetic: >NC_001611.1-cand-11950-12029
  source 1..80: mol_type = other DNA
acagattcgcaaataggtgccttgggattccataccatagatccagtagatcctaatttacaatacgatttatattcacc

SEQ ID NO: 7689 - DNA, 80 bp, synthetic construct
  misc_feature 1..80: note = Synthetic: >NC_001611.1-cand-12030-12109
  source 1..80: mol_type = other DNA
aatcaaataatatccgctattacaagagtacgttatactagagccaaagtctactccgccaatatcaagatggccattat

SEQ ID NO: 7690 - DNA, 80 bp, synthetic construct
  misc_feature 1..80: note = Synthetic: >NC_001611.1-cand-54770-54849
  source 1..80: mol_type = other DNA
tagtttttttgtttctttgtgtagatttgatacggctattctagcggctagaatggcataatccggatgttgtgtagtac

SEQ ID NO: 7691 - DNA, 80 bp, synthetic construct
  misc_feature 1..80: note = Synthetic: >NC_001611.1-cand-54850-54929
  source 1..80: mol_type = other DNA
aagtggctgctatttcggctgtcagagtgtccaattctaccgttgttactccattatatattccttggataaccttcata

SEQ ID NO: 7692 - DNA, 80 bp, synthetic construct
  misc_feature 1..80: note = Synthetic: >NC_001611.1-cand-54940-55019
  source 1..80: mol_type = other DNA
taggatctatatgatcagtgtttaagccataacataattttctaatacgagatgtgattttatcaaacatgacattttcc

SEQ ID NO: 7693 - DNA, 80 bp, synthetic construct
  misc_feature 1..80: note = Synthetic: >NC_001611.1-cand-55270-55349
  source 1..80: mol_type = other DNA
atacagttataccgatcgcagttagaacggttatagcatccgccatttatatctaaaaattagatcaaagaatatgtgac

SEQ ID NO: 7694 - DNA, 80 bp, synthetic construct
  misc_feature 1..80: note = Synthetic: >NC_001611.1-cand-55350-55429
  source 1..80: mol_type = other DNA
aaagtcctagttgtatactgagaattaacgaaacaatgtttcttacatatttttttcttattagtaactgacttaatagt

SEQ ID NO: 7695 - DNA, 80 bp, synthetic construct
  misc_feature 1..80: note = Synthetic: >NC_001611.1-cand-55430-55509
  source 1..80: mol_type = other DNA
aggaactggaaagctagacttgattattctataagtataaatacccttccaaataatattctctttgataaaagttccag

SEQ ID NO: 7696 - DNA, 80 bp, synthetic construct
  misc_feature 1..80: note = Synthetic: >NC_001611.1-cand-55590-55669
  source 1..80: mol_type = other DNA
aaatccacaccgcctctagatatagcttttatttccacattagatggtaaatccaatagtgaaactatctttttaggaat

SEQ ID NO: 7697 - DNA, 80 bp, synthetic construct
  misc_feature 1..80: note = Synthetic: >NC_001611.1-cand-55670-55749
  source 1..80: mol_type = other DNA
gtatggactcgcgtttagaggagtgaacgtcttaggcgtcggaaaggatgattcatcaaacgaataaacaatttcacaaa

SEQ ID NO: 7698 - DNA, 80 bp, synthetic construct
  misc_feature 1..80: note = Synthetic: >NC_001611.1-cand-55830-55909
  source 1..80: mol_type = other DNA
tcagataacatgttaatttccgacatcaacggttttaatatttcgataatatacggtaatctctctttcggacttatata

SEQ ID NO: 7699 - DNA, 80 bp, synthetic construct
  misc_feature 1..80: note = Synthetic: >NC_001611.1-cand-56150-56229
  source 1..80: mol_type = other DNA
caccacgtgtgtttcaggatcgtcatcgatacccgtcaaccaaccaaacggagtaaaataaatatcattaatatatgctc

SEQ ID NO: 7700 - DNA, 80 bp, synthetic construct
  misc_feature 1..80: note = Synthetic: >NC_001611.1-cand-56390-56469
  source 1..80: mol_type = other DNA
gcattcgtttaaagatattacctcatctgacggagacaattttttggtaggttttagagactttgaagctacttgtttaa

SEQ ID NO: 7701 - DNA, 80 bp, synthetic construct
  misc_feature 1..80: note = Synthetic: >NC_001611.1-cand-56710-56789
  source 1..80: mol_type = other DNA
ctcttaggtggtgtcctagtacacaatatcataaacaaactaataaacattccacattcagattccaacagttgattaac

SEQ ID NO: 7702 - DNA, 80 bp, synthetic construct
  misc_feature 1..80: note = Synthetic: >NC_001611.1-cand-57350-57429
  source 1..80: mol_type = other DNA
agtctattgccttagatactttttcccgtagtcgaggtttaaagaaatacgctaacggtatactagtaggtaactcaaag

SEQ ID NO: 7703 - DNA, 80 bp, synthetic construct
  misc_feature 1..80: note = Synthetic: >NC_001611.1-cand-57430-57509
  source 1..80: mol_type = other DNA
acatcatatatagaatgataacgcgtctttaactcatcggttaactctttcttttgatcgagttcgtcgctactattggg

SEQ ID NO: 7704 - DNA, 80 bp, synthetic construct
  misc_feature 1..80: note = Synthetic: >NC_001611.1-cand-57510-57589
  source 1..80: mol_type = other DNA
tctgctcaggtgcctcgactctactagttccaacatcataccaataggaatacaagacactttgccagcggttgtagatt

SEQ ID NO: 7705 - DNA, 80 bp, synthetic construct
  misc_feature 1..80: note = Synthetic: >NC_001611.1-cand-57830-57909
  source 1..80: mol_type = other DNA
tttagtaatatgagtaacatggaacgtgatagtttctctttggcggtgtttccagttataaaacatagatggcataacgc

SEQ ID NO: 7706 - DNA, 80 bp, synthetic construct
  misc_feature 1..80: note = Synthetic: >NC_001796.2-cand-4950-5029
  source 1..80: mol_type = other DNA
aaataggagaaatcaaaacaaaaagtacagaacaccaaaacaacaaaaccaaaaaatctgatctattaaaaataaaaatc

SEQ ID NO: 7707 - DNA, 80 bp, synthetic construct
  misc_feature 1..80: note = Synthetic: >NC_001796.2-cand-5030-5109
  source 1..80: mol_type = other DNA
ccaaaagagactggcaacacagcaaacactaaacacaatgccaacttcaacactgctaattattacaaccataattatgg

SEQ ID NO: 7708 - DNA, 80 bp, synthetic construct
  misc_feature 1..80: note = Synthetic: >NC_001796.2-cand-5110-5189
  source 1..80: mol_type = other DNA
catctttctgccaaatagatatcacaaaactacagcatgtaggtgtattggtcaacagtcccaaagggatgaagatatca

SEQ ID NO: 7709 - DNA, 80 bp, synthetic construct
  misc_feature 1..80: note = Synthetic: >NC_001796.2-cand-5190-5269
  source 1..80: mol_type = other DNA
caaaacttcgaaacaagatatttaattttgagcctcataccaaaaatagaagactctaactcttgtggtgaccaacagat

SEQ ID NO: 7710 - DNA, 80 bp, synthetic construct
  misc_feature 1..80: note = Synthetic: >NC_001796.2-cand-5270-5349
  source 1..80: mol_type = other DNA
caagcaatacaagaggttattggatagactgatcatccctctatatgatgggttaagattacagaaagatgtgatagtaa

SEQ ID NO: 7711 - DNA, 80 bp, synthetic construct
  misc_feature 1..80: note = Synthetic: >NC_001796.2-cand-5320-5399
  source 1..80: mol_type = other DNA
ggttaagattacagaaagatgtgatagtaaccaatcaggaatccaatgaaaacactaatcccagaacaaaacgattcttt

SEQ ID NO: 7712 - DNA, 80 bp, synthetic construct
  misc_feature 1..80: note = Synthetic: >NC_001796.2-cand-5430-5509
  source 1..80: mol_type = other DNA
gtagcaacctcagcacaaatcacagcggcggttgctctggttgaagccaagcaggcaagatcagatattgagaaactcaa

SEQ ID NO: 7713 - DNA, 80 bp, synthetic construct
  misc_feature 1..80: note = Synthetic: >NC_001796.2-cand-5510-5589
  source 1..80: mol_type = other DNA
agaagcaatcagggacacaaacaaagcagtgcagtcagttcagagctccatagggaatctaatagtagcaatcaaatcag

SEQ ID NO: 7714 - DNA, 80 bp, synthetic construct
  misc_feature 1..80: note = Synthetic: >NC_001796.2-cand-5590-5669
  source 1..80: mol_type = other DNA
tccaagattatgtcaacaaagaaatcgtgccatcaattgcgaggctaggttgtgaagcagcaggacttcaattaggaatt

SEQ ID NO: 7715 - DNA, 80 bp, synthetic construct
  misc_feature 1..80: note = Synthetic: >NC_001796.2-cand-5670-5749
  source 1..80: mol_type = other DNA
gcattaacgcagcattactcagaattaacaaacatatttggtgataacataggatcattacaagaaaaaggaataaaatt

SEQ ID NO: 7716 - DNA, 80 bp, synthetic construct
  misc_feature 1..80: note = Synthetic: >NC_001796.2-cand-5750-5829
  source 1..80: mol_type = other DNA
acaaggtatagcatcattataccgcacaaatatcacagaaatattcacaacatcaacagttgataaatatgatatctatg

SEQ ID NO: 7717 - DNA, 80 bp, synthetic construct
  misc_feature 1..80: note = Synthetic: >NC_001796.2-cand-5830-5909
  source 1..80: mol_type = other DNA
atctattatttacagaatcaataaaggtgagagttatagatgttgatttgaatgattactcaatcaccctccaagtcaga

SEQ ID NO: 7718 - DNA, 80 bp, synthetic construct
  misc_feature 1..80: note = Synthetic: >NC_001796.2-cand-5910-5989
  source 1..80: mol_type = other DNA
ctccctttattaactaggctgctgaacactcagatctacaaagtagattccatatcatataatatccacaatagagaatg

SEQ ID NO: 7719 - DNA, 80 bp, synthetic construct
  misc_feature 1..80: note = Synthetic: >NC_001796.2-cand-6030-6109
  source 1..80: mol_type = other DNA
tttctaggtggagcagatgtcaaagaatgtatagaagcattcagcagttatatatgtccttctgatccaggatttgtact

SEQ ID NO: 7720 - DNA, 80 bp, synthetic construct
  misc_feature 1..80: note = Synthetic: >NC_001796.2-cand-6070-6149
  source 1..80: mol_type = other DNA
tcagcagttatatatgtccttctgatccaggatttgtactaaaccatgaaatggagagctgcttatcaggaaacatatcc

SEQ ID NO: 7721 - DNA, 80 bp, synthetic construct
  misc_feature 1..80: note = Synthetic: >NC_001796.2-cand-6150-6229
  source 1..80: mol_type = other DNA
caatgtccaagaaccacgatcacatcagacattgttccaagatatgcatttgtcaatggaggagtggttgcaaactgtat

SEQ ID NO: 7722 - DNA, 80 bp, synthetic construct
  misc_feature 1..80: note = Synthetic: >NC_001796.2-cand-10050-10129
  source 1..80: mol_type = other DNA
ttatatgaaagataaagcattatctccaaaaaaatcaaattgggacacagtttatcctgcatctaatttactgtaccgta

SEQ ID NO: 7723 - DNA, 80 bp, synthetic construct
  misc_feature 1..80: note = Synthetic: >NC_001796.2-cand-10130-10209
  source 1..80: mol_type = other DNA
ctaacgcatccaacgaatcacgaagattagttgaagtatttatagcagatagtaaatttgatcctcatcagatattggat

SEQ ID NO: 7724 - DNA, 80 bp, synthetic construct
  misc_feature 1..80: note = Synthetic: >NC_001796.2-cand-10230-10309
  source 1..80: mol_type = other DNA
gttagatgatccagagtttaatatttcttatagtctcaaagaaaaagagattaaacaagaaggtagactctttgcaaaaa

SEQ ID NO: 7725 - DNA, 80 bp, synthetic construct
  misc_feature 1..80: note = Synthetic: >NC_001796.2-cand-10290-10369
  source 1..80: mol_type = other DNA
aggtagactctttgcaaaaatgacatacaaaatgagagctacacaagttttatcagagacactacttgcaaataatatag

SEQ ID NO: 7726 - DNA, 80 bp, synthetic construct
  misc_feature 1..80: note = Synthetic: >NC_001796.2-cand-10370-10449
  source 1..80: mol_type = other DNA
gaaaattctttcaagagaatgggatggtgaagggagagattgaattacttaagagattaacgaccatatcaatatcagga

SEQ ID NO: 7727 - DNA, 80 bp, synthetic construct
  misc_feature 1..80: note = Synthetic: >NC_001796.2-cand-10450-10529
  source 1..80: mol_type = other DNA
gttccacggtataatgaagtgtacaataattctaaaagccatacagatgaccttaaaacctacaataaaataagtaatct

SEQ ID NO: 7728 - DNA, 80 bp, synthetic construct
  misc_feature 1..80: note = Synthetic: >NC_001796.2-cand-10530-10609
  source 1..80: mol_type = other DNA
taatttgtcttccaatcagaaatctaagaaatttgaattcaagtcaacggatatctacaatgatggatatgagactgtga

SEQ ID NO: 7729 - DNA, 80 bp, synthetic construct
  misc_feature 1..80: note = Synthetic: >NC_001796.2-cand-10610-10689
  source 1..80: mol_type = other DNA
gctgtttcctaacaacagatctcaaaaaatactgtcttaattggagatatgaatcaacagctctatttggagaaacttgc

SEQ ID NO: 7730 - DNA, 80 bp, synthetic construct
  misc_feature 1..80: note = Synthetic: >NC_001796.2-cand-10690-10769
  source 1..80: mol_type = other DNA
aaccaaatatttggattaaataaattgtttaattggttacaccctcgtcttgaaggaagtacaatctatgtaggtgatcc

SEQ ID NO: 7731 - DNA, 80 bp, synthetic construct
  misc_feature 1..80: note = Synthetic: >NC_001796.2-cand-10770-10849
  source 1..80: mol_type = other DNA
ttactgccctccatcagataaagaacatatatcattagaggatcaccctgattctggtttttatgttcataacccaagag

SEQ ID NO: 7732 - DNA, 80 bp, synthetic construct
  misc_feature 1..80: note = Synthetic: >NC_001796.2-cand-10860-10939
  source 1..80: mol_type = other DNA
aggattttgtcaaaaattatggacactcatatctataagtgcaatacatctagcagctgttagaataggcgtgagggtga

SEQ ID NO: 7733 - DNA, 80 bp, synthetic construct
  misc_feature 1..80: note = Synthetic: >NC_001796.2-cand-10930-11009
  source 1..80: mol_type = other DNA
gtgagggtgactgcaatggttcaaggagacaatcaagctatagctgtaaccacaagagtaccaaacaattatgattacag

SEQ ID NO: 7734 - DNA, 80 bp, synthetic construct
  misc_feature 1..80: note = Synthetic: >NC_001796.2-cand-11010-11089
  source 1..80: mol_type = other DNA
aattaagaaggagatagtttataaagatgtagtgagattttttgattcattaagagaggtgatggatgatctaggtcatg

SEQ ID NO: 7735 - DNA, 80 bp, synthetic construct
  misc_feature 1..80: note = Synthetic: >NC_001796.2-cand-11090-11169
  source 1..80: mol_type = other DNA
aacttaaattaaatgaaacgattataagtagcaagatgttcatatatagcaaaagaatctattatgatgggagaattctt

SEQ ID NO: 7736 - DNA, 80 bp, synthetic construct
  misc_feature 1..80: note = Synthetic: >NC_001796.2-cand-11170-11249
  source 1..80: mol_type = other DNA
cctcaagctctgaaagcattatctagatgtgtcttttggtcagagacagtaatagacgaaacaagatcagcatcttcaaa

SEQ ID NO: 7737 - DNA, 80 bp, synthetic construct
  misc_feature 1..80: note = Synthetic: >NC_001796.2-cand-11250-11329
  source 1..80: mol_type = other DNA
cttggcaacatcatttgcaaaagcaattgagaatggttattcacctgttctaggatatgcatgctcaatttttaagaata

SEQ ID NO: 7738 - DNA, 80 bp, synthetic construct
  misc_feature 1..80: note = Synthetic: >NC_001803.1-cand-8770-8849
  source 1..80: mol_type = other DNA
ttactaccactaatttacttaaaaagataataagaagagctatagaaattagtgatgtcaaagtctatgctatattgaat

SEQ ID NO: 7739 - DNA, 80 bp, synthetic construct
  misc_feature 1..80: note = Synthetic: >NC_001803.1-cand-8880-8959
  source 1..80: mol_type = other DNA
aaatccaacaatggacaagatgaagacaactcagttattacaaccataatcaaagatgatatacttttagctgttaagga

SEQ ID NO: 7740 - DNA, 80 bp, synthetic construct
  misc_feature 1..80: note = Synthetic: >NC_001803.1-cand-8960-9039
  source 1..80: mol_type = other DNA
taatcaatctcatcttaaagcagtcaaaaatcactctacaaaacaaaaagatacaatcaaaacaacactcttgaagaaat

SEQ ID NO: 7741 - DNA, 80 bp, synthetic construct
  misc_feature 1..80: note = Synthetic: >NC_001803.1-cand-9040-9119
  source 1..80: mol_type = other DNA
taatgtgttcaatgcaacatcctccatcatggttaatacattggtttaatttatacacaaaattaaacaacatattaaca

SEQ ID NO: 7742 - DNA, 80 bp, synthetic construct
  misc_feature 1..80: note = Synthetic: >NC_001803.1-cand-9120-9199
  source 1..80: mol_type = other DNA
cagtatcgatcaagtgaggtaaaaaaccatggttttatattgatagacaatcatactctcaatggattccaatttatttt

SEQ ID NO: 7743 - DNA, 80 bp, synthetic construct
  misc_feature 1..80: note = Synthetic: >NC_001803.1-cand-9200-9279
  source 1..80: mol_type = other DNA
gaatcaatatggttgtatagtttatcataaggaactcaaaagaattactgtgacaacctataatcaattcttgacatgga

SEQ ID NO: 7744 - DNA, 80 bp, synthetic construct
  misc_feature 1..80: note = Synthetic: >NC_001803.1-cand-9280-9359
  source 1..80: mol_type = other DNA
aaaatattagccttagtagattaaatgtttgtttaattacatggattagtaactgtttgaacacattaaataaaagctta

SEQ ID NO: 7745 - DNA, 80 bp, synthetic construct
  misc_feature 1..80: note = Synthetic: >NC_001803.1-cand-9360-9439
  source 1..80: mol_type = other DNA
ggcttaagatgcggattcaataatgttatcttgacacaactattcctctatggagattgtatactaaaactattccacaa

SEQ ID NO: 7746 - DNA, 80 bp, synthetic construct
  misc_feature 1..80: note = Synthetic: >NC_001803.1-cand-9450-9529
  source 1..80: mol_type = other DNA
tacataataaaagaggtagagggatttattatgtctctaattttaaatataacagaagaagatcaattcagaaaacggtt

SEQ ID NO: 7747 - DNA, 80 bp, synthetic construct
  misc_feature 1..80: note = Synthetic: >NC_001803.1-cand-9520-9599
  source 1..80: mol_type = other DNA
gaaaacggttttataatagtatgctcaacaacatcacagatgctgctaataaagctcagaaaaatctgctatcaagagta

SEQ ID NO: 7748 - DNA, 80 bp, synthetic construct
  misc_feature 1..80: note = Synthetic: >NC_001803.1-cand-9600-9679
  source 1..80: mol_type = other DNA
tgtcatacattattagataagacagtatccgataatataataaatggcagatggataattctattaagtaagttccttaa

SEQ ID NO: 7749 - DNA, 80 bp, synthetic construct
  misc_feature 1..80: note = Synthetic: >NC_001803.1-cand-9680-9759
  source 1..80: mol_type = other DNA
attaattaagcttgcaggtgacaataaccttaacaatctgagtgaattatattttttgttcagaatatttggacacccaa

SEQ ID NO: 7750 - DNA, 80 bp, synthetic construct
  misc_feature 1..80: note = Synthetic: >NC_001803.1-cand-9750-9829
  source 1..80: mol_type = other DNA
ggacacccaatggtagatgaaagacaagccatggatgctgttaaagttaattgcaacgagaccaaattttacttgttaag

SEQ ID NO: 7751 - DNA, 80 bp, synthetic construct
  misc_feature 1..80: note = Synthetic: >NC_001803.1-cand-9830-9909
  source 1..80: mol_type = other DNA
cagtttgagtatgttaagaggtgcctttatatatagaattataaaaggatttgtaaataattacaacagatggcctactt

SEQ ID NO: 7752 - DNA, 80 bp, synthetic construct
  misc_feature 1..80: note = Synthetic: >NC_001803.1-cand-9910-9989
  source 1..80: mol_type = other DNA
taaggaatgctattgttttacccttaagatggttaacttactataaactaaacacttatccttccttgttggaacttaca

SEQ ID NO: 7753 - DNA, 80 bp, synthetic construct
  misc_feature 1..80: note = Synthetic: >NC_001803.1-cand-9990-10069
  source 1..80: mol_type = other DNA
gaaagagatttgattgttttatcaggactacgtttctatcgtgagtttcggttgcctaaaaaagtggatcttgaaatgat

SEQ ID NO: 7754 - DNA, 80 bp, synthetic construct
  misc_feature 1..80: note = Synthetic: >NC_001803.1-cand-12630-12709
  source 1..80: mol_type = other DNA
agctttggccttagcttaatgtcagtagtagaacaatttactaatgtatgtcctaacagaattattcttatacctaagct

SEQ ID NO: 7755 - DNA, 80 bp, synthetic construct
  misc_feature 1..80: note = Synthetic: >NC_001803.1-cand-12710-12789
  source 1..80: mol_type = other DNA
taatgagatacatttaatgaaacctcccatattcacaggtgatgttgatattcacaagttaaaacaagtgatacaaaaac

SEQ ID NO: 7756 - DNA, 80 bp, synthetic construct
  misc_feature 1..80: note = Synthetic: >NC_001803.1-cand-12790-12869
  source 1..80: mol_type = other DNA
agcatatgtttttaccagacaaaataagtttgactcaatatgtggaattattcttaagtaataaaacactcaaatctgga

SEQ ID NO: 7757 - DNA, 80 bp, synthetic construct
  misc_feature 1..80: note = Synthetic: >NC_001803.1-cand-12870-12949
  source 1..80: mol_type = other DNA
tctcatgttaattctaatttaatattggcgcataagatatctgactattttcataatacttacattttaagtactaattt

SEQ ID NO: 7758 - DNA, 80 bp, synthetic construct
  misc_feature 1..80: note = Synthetic: >NC_001803.1-cand-12930-13009
  source 1..80: mol_type = other DNA
tacattttaagtactaatttagctggacattggattctgattatacaacttatgaaagattctaagggtatttttgaaaa

SEQ ID NO: 7759 - DNA, 80 bp, synthetic construct
  misc_feature 1..80: note = Synthetic: >NC_001803.1-cand-13030-13109
  source 1..80: mol_type = other DNA
taactgatcatatgttcattaatttgaaagttttcttcaatgcttataagacctatctcttgtgttttcataaaggttac

SEQ ID NO: 7760 - DNA, 80 bp, synthetic construct
  misc_feature 1..80: note = Synthetic: >NC_001803.1-cand-13110-13189
  source 1..80: mol_type = other DNA
ggcagagcaaagctggagtgtgatatgaatacttcagatctcctatgtgtattggaattaatagacagtagttattggaa

SEQ ID NO: 7761 - DNA, 80 bp, synthetic construct
  misc_feature 1..80: note = Synthetic: >NC_001803.1-cand-13190-13269
  source 1..80: mol_type = other DNA
gtctatgtctaaggtatttttagaacaaaaagttatcaaatacattcttagccaggatgcaagtttacatagagtaaaag

SEQ ID NO: 7762 - DNA, 80 bp, synthetic construct
  misc_feature 1..80: note = Synthetic: >NC_001803.1-cand-13270-13349
  source 1..80: mol_type = other DNA
gatgtcatagcttcaaactatggtttcttaaacgtcttaatgtagcagaattcacagtttgcccttgggttgttaacata

SEQ ID NO: 7763 - DNA, 80 bp, synthetic construct
  misc_feature 1..80: note = Synthetic: >NC_001803.1-cand-13350-13429
  source 1..80: mol_type = other DNA
gattatcatccaacacatatgaaagcaatattaacttatatagatcttgttagaatgggattgataaatatagataaaat

SEQ ID NO: 7764 - DNA, 80 bp, synthetic construct
  misc_feature 1..80: note = Synthetic: >NC_001803.1-cand-13430-13509
  source 1..80: mol_type = other DNA
atacattaaaaataaacacaaattcaatgatgaattttatacttctaatctcttttacattaattataacttctcagata

SEQ ID NO: 7765 - DNA, 80 bp, synthetic construct
  misc_feature 1..80: note = Synthetic: >NC_001803.1-cand-13510-13589
  source 1..80: mol_type = other DNA
atactcatctattaactaaacatataaggattgctaattctgaattagaaaataattacaacaaattatatcatcctaca

SEQ ID NO: 7766 - DNA, 80 bp, synthetic construct
  misc_feature 1..80: note = Synthetic: >NC_001803.1-cand-13590-13669
  source 1..80: mol_type = other DNA
ccagaaaccctagaaaatatactaaccaatccggttaaatgtaatgacaaaaagacactgaatgactattgtataggtaa

SEQ ID NO: 7767 - DNA, 80 bp, synthetic construct
  misc_feature 1..80: note = Synthetic: >NC_001803.1-cand-13670-13749
  source 1..80: mol_type = other DNA
aaatgttgactcaataatgttaccattgttatctaataagaagcttattaaatcgcctacaatgattagaaccaattaca

SEQ ID NO: 7768 - DNA, 80 bp, synthetic construct
  misc_feature 1..80: note = Synthetic: >NC_001803.1-cand-13750-13829
  source 1..80: mol_type = other DNA
gcaaacaagatttgtataatttatttcctacggttgtgattgataaaattatagatcattcaggtaatacagccaaatct

SEQ ID NO: 7769 - DNA, 80 bp, synthetic construct
  misc_feature 1..80: note = Synthetic: >NC_001803.1-cand-13830-13909
  source 1..80: mol_type = other DNA
aaccaactttacactactacttctcatcaaatacctttagtgcacaatagcacatcactttattgcatgcttccttggca

SEQ ID NO: 7770 - DNA, 80 bp, synthetic construct
  misc_feature 1..80: note = Synthetic: >NC_001897.1-cand-2590-2669
  source 1..80: mol_type = other DNA
gagacagggattggaatttccaaaggaagggcacggtgccctatcacttctgtttgcctactttactggtgaattaaaca

SEQ ID NO: 7771 - DNA, 80 bp, synthetic construct
  misc_feature 1..80: note = Synthetic: >NC_001897.1-cand-2700-2779
  source 1..80: mol_type = other DNA
ttctcagagttggacatacatatgacactgagacaaacagaaccaattttttatcatccagtggcataattacagtacca

SEQ ID NO: 7772 - DNA, 80 bp, synthetic construct
  misc_feature 1..80: note = Synthetic: >NC_001897.1-cand-2750-2829
  source 1..80: mol_type = other DNA
ttatcatccagtggcataattacagtaccagcaggagaacagatgacactatctgtcccctcttattccaacaagccatt

SEQ ID NO: 7773 - DNA, 80 bp, synthetic construct
  misc_feature 1..80: note = Synthetic: >NC_001897.1-cand-2830-2909
  source 1..80: mol_type = other DNA
acggacagttagatcatccaatgctttaggttatttactgtgtaaaccattgctaactggtaccagctctggtagaatag

SEQ ID NO: 7774 - DNA, 80 bp, synthetic construct
  misc_feature 1..80: note = Synthetic: >NC_001897.1-cand-2910-2989
  source 1..80: mol_type = other DNA
agatattccttagcttgagatgtccaaatttcttctttcccttaccagcaccaaaaccagcaacacgtaaatatagagga

SEQ ID NO: 7775 - DNA, 80 bp, synthetic construct
  misc_feature 1..80: note = Synthetic: >NC_001897.1-cand-2950-3029
  source 1..80: mol_type = other DNA
cttaccagcaccaaaaccagcaacacgtaaatatagaggagatttggcaacatggtctgaccaaagtccctatggtcgtc

SEQ ID NO: 7776 - DNA, 80 bp, synthetic construct
  misc_feature 1..80: note = Synthetic: >NC_001897.1-cand-3070-3149
  source 1..80: mol_type = other DNA
aggtttttacaagcactatggaattgttgtaggtgatgatgtttaccagttggattcggatgacatttttaagacagctt

SEQ ID NO: 7777 - DNA, 80 bp, synthetic construct
  misc_feature 1..80: note = Synthetic: >NC_001897.1-cand-3150-3229
  source 1..80: mol_type = other DNA
taactggtaaggccaaatttactaaaacaagattaacaccagattgggttgtggaggaagagtgtgaattagactatttc

SEQ ID NO: 7778 - DNA, 80 bp, synthetic construct
  misc_feature 1..80: note = Synthetic: >NC_001897.1-cand-3230-3309
  source 1..80: mol_type = other DNA
agaattaagtatttggaatcttctgtcaattctgaacacatcttttctgtagacaacaattgtgagaccatagcgaagga

SEQ ID NO: 7779 - DNA, 80 bp, synthetic construct
  misc_feature 1..80: note = Synthetic: >NC_001897.1-cand-3310-3389
  source 1..80: mol_type = other DNA
catatttggttcacattcattaagtcagcaccaacaaatagggttaatcggaacaatactcttaactgctggccttatgt

SEQ ID NO: 7780 - DNA, 80 bp, synthetic construct
  misc_feature 1..80: note = Synthetic: >NC_001897.1-cand-3390-3469
  source 1..80: mol_type = other DNA
caaccattaaaacaccagtaaatcctaccacaatcaaagagttctttaatcatgctatagaaggtgatgaacaaggattg

SEQ ID NO: 7781 - DNA, 80 bp, synthetic construct
  misc_feature 1..80: note = Synthetic: >NC_001897.1-cand-3470-3549
  source 1..80: mol_type = other DNA
tccttgcttgtgcaaaaatgtactacatttttctcatctgcagcaactgagttattggacaatgacttagtcaagtttat

SEQ ID NO: 7782 - DNA, 80 bp, synthetic construct
  misc_feature 1..80: note = Synthetic: >NC_001897.1-cand-3560-3639
  source 1..80: mol_type = other DNA
ttggttagaatactctgttatatggtactttactgccataagccaaacattttaacaactgcctgtctatccactctatt

SEQ ID NO: 7783 - DNA, 80 bp, synthetic construct
  misc_feature 1..80: note = Synthetic: >NC_001897.1-cand-3630-3709
  source 1..80: mol_type = other DNA
ccactctattagttatggatgttacatcatcttctgtgttatccccgtcatgtaaggccttgatgcaatgcctgatggat

SEQ ID NO: 7784 - DNA, 80 bp, synthetic construct
  misc_feature 1..80: note = Synthetic: >NC_001897.1-cand-3720-3799
  source 1..80: mol_type = other DNA
agaaattagctgaggtggttgcggagtcaatgtccaatacagacgatgatgagatcaaggaacagatttgtgacacagtg

SEQ ID NO: 7785 - DNA, 80 bp, synthetic construct
  misc_feature 1..80: note = Synthetic: >NC_001897.1-cand-3800-3879
  source 1..80: mol_type = other DNA
aaatatactaaacaaattctttccaaccaaggaccattcaaaggcttcaatgaaatatctactgctttcagacatattga

SEQ ID NO: 7786 - DNA, 80 bp, synthetic construct
  misc_feature 1..80: note = Synthetic: >NC_002640.1-cand-6300-6379
  source 1..80: mol_type = other DNA
atggttagatgcacgtgtatacgctgaccccatggctttgaaggatttcaaggagtttgccagtggaaggaagagtataa

SEQ ID NO: 7787 - DNA, 80 bp, synthetic construct
  misc_feature 1..80: note = Synthetic: >NC_002640.1-cand-6370-6449
  source 1..80: mol_type = other DNA
aagagtataactctcgacatcctaacagagattgccagtttgccaacttacctttcctctagggccaagctcgcccttga

SEQ ID NO: 7788 - DNA, 80 bp, synthetic construct
  misc_feature 1..80: note = Synthetic: >NC_002640.1-cand-6450-6529
  source 1..80: mol_type = other DNA
taacatagtcatgctccacacaacagaaagaggagggagggcctatcaacacgccctgaacgaacttccggagtcactgg

SEQ ID NO: 7789 - DNA, 80 bp, synthetic construct
  misc_feature 1..80: note = Synthetic: >NC_002640.1-cand-6530-6609
  source 1..80: mol_type = other DNA
aaacactcatgcttgtagctttactaggtgctatgacagcaggcatcttcctgtttttcatgcaagggaaaggaataggg

SEQ ID NO: 7790 - DNA, 80 bp, synthetic construct
  misc_feature 1..80: note = Synthetic: >NC_002640.1-cand-6610-6689
  source 1..80: mol_type = other DNA
aaattgtcaatgggtttgataaccattgcggtggctagtggcttgctctgggtagcagaaattcaaccccagtggatagc

SEQ ID NO: 7791 - DNA, 80 bp, synthetic construct
  misc_feature 1..80: note = Synthetic: >NC_002640.1-cand-6690-6769
  source 1..80: mol_type = other DNA
ggcctcaatcatactagagttttttctcatggtactgttgataccggaaccagaaaaacaaaggaccccacaagacaatc

SEQ ID NO: 7792 - DNA, 80 bp, synthetic construct
  misc_feature 1..80: note = Synthetic: >NC_002640.1-cand-6750-6829
  source 1..80: mol_type = other DNA
aaggaccccacaagacaatcaattgatctacgtcatattgaccattctcaccatcattggtctaatagcagccaacgaga

SEQ ID NO: 7793 - DNA, 80 bp, synthetic construct
  misc_feature 1..80: note = Synthetic: >NC_002640.1-cand-6850-6929
  source 1..80: mol_type = other DNA
aaaacggattttgggttttaccaggtaaaaacagaaaccaccatcctcgatgtggacttgagaccagcttcagcatggac

SEQ ID NO: 7794 - DNA, 80 bp, synthetic construct
  misc_feature 1..80: note = Synthetic: >NC_002640.1-cand-6930-7009
  source 1..80: mol_type = other DNA
gctctatgcagtagccaccacaattctgactcccatgctgagacacaccatagaaaacacgtcggccaacctatctctag

SEQ ID NO: 7795 - DNA, 80 bp, synthetic construct
  misc_feature 1..80: note = Synthetic: >NC_002640.1-cand-7050-7129
  source 1..80: mol_type = other DNA
aaaaggatggccgctccacagaatggacctcggtgtgccgctgttagcaatgggatgctattctcaagtgaacccaacaa

SEQ ID NO: 7796 - DNA, 80 bp, synthetic construct
  misc_feature 1..80: note = Synthetic: >NC_002640.1-cand-7090-7169
  source 1..80: mol_type = other DNA
ctgttagcaatgggatgctattctcaagtgaacccaacaaccttgacagcatccttagtcatgcttttagtccattatgc

SEQ ID NO: 7797 - DNA, 80 bp, synthetic construct
  misc_feature 1..80: note = Synthetic: >NC_002640.1-cand-7170-7249
  source 1..80: mol_type = other DNA
aataataggcccaggattgcaggcaaaagccacaagagaggcccagaaaaggacagctgctgggatcatgaaaaatccca

SEQ ID NO: 7798 - DNA, 80 bp, synthetic construct
  misc_feature 1..80: note = Synthetic: >NC_002640.1-cand-7250-7329
  source 1..80: mol_type = other DNA
cagtggacgggataacagtaatagatctagaaccaatatcctatgacccaaaatttgaaaagcaattagggcaggtcatg

SEQ ID NO: 7799 - DNA, 80 bp, synthetic construct
  misc_feature 1..80: note = Synthetic: >NC_002640.1-cand-7330-7409
  source 1..80: mol_type = other DNA
ctactagtcttgtgtgctggacaactactcttgatgagaacaacatgggctttctgtgaagtcttgactttggccacagg

SEQ ID NO: 7800 - DNA, 80 bp, synthetic construct
  misc_feature 1..80: note = Synthetic: >NC_002640.1-cand-7410-7489
  source 1..80: mol_type = other DNA
accaatcttgaccttgtgggagggcaacccgggaaggttttggaacacgaccatagccgtatccaccgccaacattttca

SEQ ID NO: 7801 - DNA, 80 bp, synthetic construct
  misc_feature 1..80: note = Synthetic: >NC_002640.1-cand-7560-7639
  source 1..80: mol_type = other DNA
aactgggaccacaggagagacactgggagagaagtggaagagacagctaaactcattagacagaaaagagtttgaagagt

SEQ ID NO: 7802 - DNA, 80 bp, synthetic construct
  misc_feature 1..80: note = Synthetic: >NC_002645.1-cand-890-969
  source 1..80: mol_type = other DNA
gacatctagtaaagttgtgttaagcgatgctcttgacaaactttacaaagtctttggttctcctgttatgacaaatggtt

SEQ ID NO: 7803 - DNA, 80 bp, synthetic construct
  misc_feature 1..80: note = Synthetic: >NC_002645.1-cand-970-1049
  source 1..80: mol_type = other DNA
ccaacatcctagaggcctttactaaacctgtgtttattagtgcattagttcaatgtacttgtggtaccaagtcttggtct

SEQ ID NO: 7804 - DNA, 80 bp, synthetic construct
  misc_feature 1..80: note = Synthetic: >NC_002645.1-cand-1050-1129
  source 1..80: mol_type = other DNA
gttggtgattggaccggttttaaatcctcttgttgcaacgtgatcagtaataaactgtgtgttgttcccggtaatgttaa

SEQ ID NO: 7805 - DNA, 80 bp, synthetic construct
  misc_feature 1..80: note = Synthetic: >NC_002645.1-cand-1130-1209
  source 1..80: mol_type = other DNA
acctggtgatgctgtgattaccactcagcaagctggtgctggtattaagtatttttgtggcatgactcttaagtttgttg

SEQ ID NO: 7806 - DNA, 80 bp, synthetic construct
  misc_feature 1..80: note = Synthetic: >NC_002645.1-cand-1210-1289
  source 1..80: mol_type = other DNA
caaatattgaaggtgtctctgtttggagagtgattgctcttcagagtgtggattgctttgttgcttcttccacttttgta

SEQ ID NO: 7807 - DNA, 80 bp, synthetic construct
  misc_feature 1..80: note = Synthetic: >NC_002645.1-cand-1290-1369
  source 1..80: mol_type = other DNA
gaagaggaacatgttaatagaatggatacattctgcttcaatgtacgcaatagtgttactgatgagtgtcgtctggccat

SEQ ID NO: 7808 - DNA, 80 bp, synthetic construct
  misc_feature 1..80: note = Synthetic: >NC_002645.1-cand-1370-1449
  source 1..80: mol_type = other DNA
gttgggtgctgaaatgactagtaatgtcagaagacaagttgcttcaggtgtcatagacattagtaccggttggtttgatg

SEQ ID NO: 7809 - DNA, 80 bp, synthetic construct
  misc_feature 1..80: note = Synthetic: >NC_002645.1-cand-1430-1509
  source 1..80: mol_type = other DNA
tagtaccggttggtttgatgtttatgatgacatctttgctgaaagcaaaccatggtttgttcgcaaggctgaagacattt

SEQ ID NO: 7810 - DNA, 80 bp, synthetic construct
  misc_feature 1..80: note = Synthetic: >NC_002645.1-cand-1510-1589
  source 1..80: mol_type = other DNA
ttggcccttgttggtccgctcttgcttctgcacttaaacaacttaaagtcactacaggtgaacttgtgagatttgttaag

SEQ ID NO: 7811 - DNA, 80 bp, synthetic construct
  misc_feature 1..80: note = Synthetic: >NC_002645.1-cand-1590-1669
  source 1..80: mol_type = other DNA
tctatttgcaattcagctgttgctgtcgtgggtggtactatacaaattctcgctagtgtgcctgagaagtttttgaatgc

SEQ ID NO: 7812 - DNA, 80 bp, synthetic construct
  misc_feature 1..80: note = Synthetic: >NC_002645.1-cand-1670-1749
  source 1..80: mol_type = other DNA
gtttgacgtgtttgtcacagctattcaaactgtctttgactgtgctgttgaaacttgtactattgccggtaaagcatttg

SEQ ID NO: 7813 - DNA, 80 bp, synthetic construct
  misc_feature 1..80: note = Synthetic: >NC_002645.1-cand-1750-1829
  source 1..80: mol_type = other DNA
acaaggtttttgactatgttttgcttgataatgcgcttgtaaaacttgtcaccacaaagcttaagggtgttcgtgaacgt

SEQ ID NO: 7814 - DNA, 80 bp, synthetic construct
  misc_feature 1..80: note = Synthetic: >NC_002645.1-cand-1830-1909
  source 1..80: mol_type = other DNA
ggccttaataaagttaagtatgcaacagttgttgttggttccactgaagaagttaaatcttcacgtgttgaacgtagcac

SEQ ID NO: 7815 - DNA, 80 bp, synthetic construct
  misc_feature 1..80: note = Synthetic: >NC_002645.1-cand-1910-1989
  source 1..80: mol_type = other DNA
tgctgtacttacaatcgccaacaattattccaaactttttgatgaagggtatactgttgtaattggcgatgtggcgtact

SEQ ID NO: 7816 - DNA, 80 bp, synthetic construct
  misc_feature 1..80: note = Synthetic: >NC_002645.1-cand-1990-2069
  source 1..80: mol_type = other DNA
ttgttagtgacggctacttccgtcttatggccagtccaaatagtgtgttgactactgcagtctataaaccattgtttgct

SEQ ID NO: 7817 - DNA, 80 bp, synthetic construct
  misc_feature 1..80: note = Synthetic: >NC_002645.1-cand-2070-2149
  source 1..80: mol_type = other DNA
tttaatgtgaatgttatgggtactagacctgaaaaatttccaaccactgtgacttgtgaaaatttagagtctgctgtttt

SEQ ID NO: 7818 - DNA, 80 bp, synthetic construct
  misc_feature 1..80: note = Synthetic: >NC_002728.1-cand-4370-4449
  source 1..80: mol_type = other DNA
atgattcatccagagatgttatcaagacattgataaggactcacattaaagatagagagttgagatcagaactgattggt

SEQ ID NO: 7819 - DNA, 80 bp, synthetic construct
  misc_feature 1..80: note = Synthetic: >NC_002728.1-cand-4450-4529
  source 1..80: mol_type = other DNA
tacctgaataaagcggaaaatgatgaggaaattcaggagatagcgaacactgtcaatgacatcattgacggtaatatttg

SEQ ID NO: 7820 - DNA, 80 bp, synthetic construct
  misc_feature 1..80: note = Synthetic: >NC_002728.1-cand-4530-4609
  source 1..80: mol_type = other DNA
atcactgaattgtcagcagaaatacaatgatctaacaacaatctcccacaagtagacaatggtttcaggtcaataataac

SEQ ID NO: 7821 - DNA, 80 bp, synthetic construct
  misc_feature 1..80: note = Synthetic: >NC_002728.1-cand-4610-4689
  source 1..80: mol_type = other DNA
aacctcaatactaatctttcacataagcattactcattccagccctcagacgataacacaatacttgatacatgtttatt

SEQ ID NO: 7822 - DNA, 80 bp, synthetic construct
  misc_feature 1..80: note = Synthetic: >NC_002728.1-cand-4690-4769
  source 1..80: mol_type = other DNA
gaagtgtatgtagcatgattgaactattcaataactgtatttctcactcttgctcttagttagtcattgtgtctaataat

SEQ ID NO: 7823 - DNA, 80 bp, synthetic construct
  misc_feature 1..80: note = Synthetic: >NC_002728.1-cand-4770-4849
  source 1..80: mol_type = other DNA
tattattacagtacaaggtattatgaattcaaagatacgcaataaatctgatatcagcatagagtagaaaattgttgttt

SEQ ID NO: 7824 - DNA, 80 bp, synthetic construct
  misc_feature 1..80: note = Synthetic: >NC_002728.1-cand-4850-4929
  source 1..80: mol_type = other DNA
ttgtcatgatcattcgaagatttaacaatgatgtcaactttcatacctaaacataataacataaaatggtcgatttgtat

SEQ ID NO: 7825 - DNA, 80 bp, synthetic construct
  misc_feature 1..80: note = Synthetic: >NC_002728.1-cand-4930-5009
  source 1..80: mol_type = other DNA
tgtagatctctcacgcattttagtgtcatgaattagtgtttcaaatcagttgcatatcaattaagaaaaacttaggagac

SEQ ID NO: 7826 - DNA, 80 bp, synthetic construct
  misc_feature 1..80: note = Synthetic: >NC_002728.1-cand-5010-5089
  source 1..80: mol_type = other DNA
aggtatagaacctctctttcagataactggtcaattaaggacagaaattctgtttctcaaatccgctagcctttgtcaaa

SEQ ID NO: 7827 - DNA, 80 bp, synthetic construct
  misc_feature 1..80: note = Synthetic: >NC_002728.1-cand-5090-5169
  source 1..80: mol_type = other DNA
gaggacacaagcaatggagccggacatcaagagtatttcaagtgagtcaatggaaggagtatctgatttcagccctagtt

SEQ ID NO: 7828 - DNA, 80 bp, synthetic construct
  misc_feature 1..80: note = Synthetic: >NC_002728.1-cand-5170-5249
  source 1..80: mol_type = other DNA
cttgggagcatggtgggtatcttgataaggttgaaccagaaattgatgaaaatggcagtatgattccaaaatacaagatc

SEQ ID NO: 7829 - DNA, 80 bp, synthetic construct
  misc_feature 1..80: note = Synthetic: >NC_002728.1-cand-5250-5329
  source 1..80: mol_type = other DNA
tataccccaggagctaacgagaggaaatacaacaactacatgtaccttatatgttacggctttgttgaagatgttgagag

SEQ ID NO: 7830 - DNA, 80 bp, synthetic construct
  misc_feature 1..80: note = Synthetic: >NC_002728.1-cand-5330-5409
  source 1..80: mol_type = other DNA
aaccccagagacagggaaacgcaagaagatcaggacaattgctgcctaccctctgggtgttggtaagagtgcctctcatc

SEQ ID NO: 7831 - DNA, 80 bp, synthetic construct
  misc_feature 1..80: note = Synthetic: >NC_002728.1-cand-5410-5489
  source 1..80: mol_type = other DNA
cccaagatcttctggaggaactctgttccctcaaagttactgtgagaagaacagctggatcaactgagaaaattgtgttt

SEQ ID NO: 7832 - DNA, 80 bp, synthetic construct
  misc_feature 1..80: note = Synthetic: >NC_002728.1-cand-5490-5569
  source 1..80: mol_type = other DNA
ggatcatctggccctctaaatcacctcgttccgtggaagaaagtactgactagtggttcaatttttaatgcagtcaaggt

SEQ ID NO: 7833 - DNA, 80 bp, synthetic construct
  misc_feature 1..80: note = Synthetic: >NC_002728.1-cand-5570-5649
  source 1..80: mol_type = other DNA
ttgtcggaacgttgatcagatacagcttgacaagcatcaagctctgagaatattttttctcagtatcacaaagctcaatg

SEQ ID NO: 7834 - DNA, 80 bp, synthetic construct
  misc_feature 1..80: note = Synthetic: >NC_002728.1-cand-9530-9609
  source 1..80: mol_type = other DNA
tgaagccaaagctgatttcatacactttacccgtagtcggtcaaagtggtacctgtatcacagacccattgctggctatg

SEQ ID NO: 7835 - DNA, 80 bp, synthetic construct
  misc_feature 1..80: note = Synthetic: >NC_002728.1-cand-9580-9659
  source 1..80: mol_type = other DNA
acctgtatcacagacccattgctggctatggacgagggctattttgcatatagccacctggaaagaatcggatcatgttc

SEQ ID NO: 7836 - DNA, 80 bp, synthetic construct
  misc_feature 1..80: note = Synthetic: >NC_002728.1-cand-9690-9769
  source 1..80: mol_type = other DNA
agttggagaggtactagacagaggtgatgaagttccttctttatttatgaccaatgtctggaccccaccaaatccaaaca

SEQ ID NO: 7837 - DNA, 80 bp, synthetic construct
  misc_feature 1..80: note = Synthetic: >NC_002728.1-cand-9770-9849
  source 1..80: mol_type = other DNA
ccgtttaccactgtagtgctgtatacaacaatgaattctattatgtactttgtgcagtgtcaactgttggagaccctatt

SEQ ID NO: 7838 - DNA, 80 bp, synthetic construct
  misc_feature 1..80: note = Synthetic: >NC_002728.1-cand-9840-9919
  source 1..80: mol_type = other DNA
agaccctattctgaatagcacctactggtccggatctctaatgatgacccgtctagctgtgaaacccaagagtaatggtg

SEQ ID NO: 7839 - DNA, 80 bp, synthetic construct
  misc_feature 1..80: note = Synthetic: >NC_002728.1-cand-9930-10009
  source 1..80: mol_type = other DNA
tcaacatcaacttgccctacgaagtatcgagaaagggaggtatgataaagttatgccgtatggaccttcaggcatcaaac

SEQ ID NO: 7840 - DNA, 80 bp, synthetic construct
  misc_feature 1..80: note = Synthetic: >NC_002728.1-cand-10000-10079
  source 1..80: mol_type = other DNA
ggcatcaaacagggtgacaccctgtattttcctgctgtaggatttttggtcaggacagagtttaaatacaatgattcaaa

SEQ ID NO: 7841 - DNA, 80 bp, synthetic construct
  misc_feature 1..80: note = Synthetic: >NC_002728.1-cand-10050-10129
  source 1..80: mol_type = other DNA
caggacagagtttaaatacaatgattcaaattgtcccatcacgaagtgtcaatacagtaaacctgaaaattgcaggctat

SEQ ID NO: 7842 - DNA, 80 bp, synthetic construct
  misc_feature 1..80: note = Synthetic: >NC_002728.1-cand-10200-10279
  source 1..80: mol_type = other DNA
ggagaaccccaaagttgtattcattgaaatatctgatcaaagattatctattggatctcctagcaaaatctatgattctt

SEQ ID NO: 7843 - DNA, 80 bp, synthetic construct
  misc_feature 1..80: note = Synthetic: >NC_002728.1-cand-10240-10319
  source 1..80: mol_type = other DNA
agattatctattggatctcctagcaaaatctatgattctttgggtcaacctgttttctaccaagcgtcattttcatggga

SEQ ID NO: 7844 - DNA, 80 bp, synthetic construct
  misc_feature 1..80: note = Synthetic: >NC_002728.1-cand-10320-10399
  source 1..80: mol_type = other DNA
tactatgattaaatttggagatgttctaacagtcaaccctctggttgtcaattggcgtaataacacggtaatatcaagac

SEQ ID NO: 7845 - DNA, 80 bp, synthetic construct
  misc_feature 1..80: note = Synthetic: >NC_002728.1-cand-10400-10479
  source 1..80: mol_type = other DNA
ccgggcaatcacaatgccctagattcaatacatgtccagagatctgctgggaaggagtttataatgatgcattcctaatt

SEQ ID NO: 7846 - DNA, 80 bp, synthetic construct
  misc_feature 1..80: note = Synthetic: >NC_002728.1-cand-10480-10559
  source 1..80: mol_type = other DNA
gacagaatcaattggataagcgcgggtgtattccttgacagcaatcagaccgcagaaaatcctgtttttactgtattcaa

SEQ ID NO: 7847 - DNA, 80 bp, synthetic construct
  misc_feature 1..80: note = Synthetic: >NC_002728.1-cand-10560-10639
  source 1..80: mol_type = other DNA
agataatgaaatactttatagggcacaactggcttctgaggacaccaatgcacaaaaaacaataactaattgttttctct

SEQ ID NO: 7848 - DNA, 80 bp, synthetic construct
  misc_feature 1..80: note = Synthetic: >NC_002728.1-cand-10640-10719
  source 1..80: mol_type = other DNA
tgaagaataagatttggtgcatatcattggttgagatatatgacacaggagacaatgtcataagacccaaactattcgcg

SEQ ID NO: 7849 - DNA, 80 bp, synthetic construct
  misc_feature 1..80: note = Synthetic: >NC_002728.1-cand-10720-10799
  source 1..80: mol_type = other DNA
gttaagataccagagcaatgtacataaaaatcaacctcataatttaatggattgatctaatataatgataataatcgtac

SEQ ID NO: 7850 - DNA, 80 bp, synthetic construct
  misc_feature 1..80: note = Synthetic: >NC_003310.1-cand-151070-151149
  source 1..80: mol_type = other DNA
caaagtcgtttatatcacattgtatatagtttataaccttaactttcgaggttattggttgtggatcttctacaatatct

SEQ ID NO: 7851 - DNA, 80 bp, synthetic construct
  misc_feature 1..80: note = Synthetic: >NC_003310.1-cand-151150-151229
  source 1..80: mol_type = other DNA
atgactcttatttcttgaacatcatctgcgctaattaaaagttttactatatacctgcctagaaatccggcaccgccagt

SEQ ID NO: 7852 - DNA, 80 bp, synthetic construct
  misc_feature 1..80: note = Synthetic: >NC_003310.1-cand-151230-151309
  source 1..80: mol_type = other DNA
aaccgcgtacacggccattgctgccactcataatatcagactacttattctattttactaaataatggctgtttgtataa

SEQ ID NO: 7853 - DNA, 80 bp, synthetic construct
  misc_feature 1..80: note = Synthetic: >NC_003310.1-cand-151390-151469
  source 1..80: mol_type = other DNA
ttaaaatccggaacgtatagtttgataattcatcgttacggagatattagtcgaggatgtgattccataggcagtccaga

SEQ ID NO: 7854 - DNA, 80 bp, synthetic construct
  misc_feature 1..80: note = Synthetic: >NC_003310.1-cand-151770-151849
  source 1..80: mol_type = other DNA
acactgtcgaatttgatagggacaaagtagttgatacgtttatttcatataatagacataatgactccatagagataaga

SEQ ID NO: 7855 - DNA, 80 bp, synthetic construct
  misc_feature 1..80: note = Synthetic: >NC_003310.1-cand-151860-151939
  source 1..80: mol_type = other DNA
cagaggaaactaatattggtcgcgtggttaatacgccggttagtatgacttacttgtataataagtatagttttaaaccg

SEQ ID NO: 7856 - DNA, 80 bp, synthetic construct
  misc_feature 1..80: note = Synthetic: >NC_003310.1-cand-151930-152009
  source 1..80: mol_type = other DNA
ttttaaaccgattttagcagaatatataagacacagaaatactatatccggcaatatttattcggcattgatgacactgg

SEQ ID NO: 7857 - DNA, 80 bp, synthetic construct
  misc_feature 1..80: note = Synthetic: >NC_003310.1-cand-152000-152079
  source 1..80: mol_type = other DNA
atgacactggatgatttggttattaaacagtatggagacattgatctattatttaatgagaaacttaaagtagactccga

SEQ ID NO: 7858 - DNA, 80 bp, synthetic construct
  misc_feature 1..80: note = Synthetic: >NC_003310.1-cand-152240-152319
  source 1..80: mol_type = other DNA
atatctgagctatctagactacgatacaatctatgtaagtatctacgcggacacaccgatagcatagaggatgaatttga

SEQ ID NO: 7859 - DNA, 80 bp, synthetic construct
  misc_feature 1..80: note = Synthetic: >NC_003310.1-cand-152320-152399
  source 1..80: mol_type = other DNA
tcattttgaagacgatgattcgtctacatgttctgccgtaaccgacagggaaacggatgtataatttttttatagtgtga

SEQ ID NO: 7860 - DNA, 80 bp, synthetic construct
  misc_feature 1..80: note = Synthetic: >NC_003310.1-cand-152400-152479
  source 1..80: mol_type = other DNA
tggatatgatggatatgatatatgatggatattatgatggatatgatggatattatgatggatatgatggatatgatgga

SEQ ID NO: 7861 - DNA, 80 bp, synthetic construct
  misc_feature 1..80: note = Synthetic: >NC_003310.1-cand-152480-152559
  source 1..80: mol_type = other DNA
tatgatggatatgataaatatgataaaaatataattgttgtatatgatggatatgatggatatgatggatatgatggata

SEQ ID NO: 7862 - DNA, 80 bp, synthetic construct
  misc_feature 1..80: note = Synthetic: >NC_003310.1-cand-152560-152639
  source 1..80: mol_type = other DNA
tgatggatatgatggatatgataaatatgataaaaatataattgttgtatccattcccattcaaatcaccttatatgatt

SEQ ID NO: 7863 - DNA, 80 bp, synthetic construct
  misc_feature 1..80: note = Synthetic: >NC_003310.1-cand-152720-152799
  source 1..80: mol_type = other DNA
tttgacttatggttagacacgcatactttaacaaatcactgaaaattggagttaggtattcctctcagaatcagttgccg

SEQ ID NO: 7864 - DNA, 80 bp, synthetic construct
  misc_feature 1..80: note = Synthetic: >NC_003310.1-cand-152800-152879
  source 1..80: mol_type = other DNA
ttctggaacattaaatgtattttttatgatatactccaacgcatttatgtgggtatacaacaagtcattaataatgagta

SEQ ID NO: 7865 - DNA, 80 bp, synthetic construct
  misc_feature 1..80: note = Synthetic: >NC_003310.1-cand-152880-152959
  source 1..80: mol_type = other DNA
tttccaagagttttagctgtctagtatttaacaagagaagagatttcatcagactgtttatgaactcgaataccgcctca

SEQ ID NO: 7866 - DNA, 80 bp, synthetic construct
  misc_feature 1..80: note = Synthetic: >NC_003310.1-cand-159690-159769
  source 1..80: mol_type = other DNA
cactagatttcctcgtcctatggaacgacgagaaggtgttgattaccattacttaacagagaggcaatctggaagggaat

SEQ ID NO: 7867 - DNA, 80 bp, synthetic construct
  misc_feature 1..80: note = Synthetic: >NC_003310.1-cand-159770-159849
  source 1..80: mol_type = other DNA
agccgccggaaactttctagaacatactgagtttttaggaaatatttacggaacttctaaaacagctgtaaatacagcgg

SEQ ID NO: 7868 - DNA, 80 bp, synthetic construct
  misc_feature 1..80: note = Synthetic: >NC_003310.1-cand-159850-159929
  source 1..80: mol_type = other DNA
ctattaataatcgtatttgcgcgatggatttaaacatcaacggtgttagaagtcttaaaaatacttacctaatgcattac

SEQ ID NO: 7869 - DNA, 80 bp, synthetic construct
  misc_feature 1..80: note = Synthetic: >NC_003310.1-cand-159930-160009
  source 1..80: mol_type = other DNA
ttgggtatataagacctacctctcttaaaatggttgaggccaatcttcgtcgtagaaacactgaagcggacgacgaatct

SEQ ID NO: 7870 - DNA, 80 bp, synthetic construct
  misc_feature 1..80: note = Synthetic: >NC_003310.1-cand-160010-160089
  source 1..80: mol_type = other DNA
catcgtcgcgtgatgttggcaaaaaacggatatggatgaggtcaacgaagcaggtctattcgacactattattattgaag

SEQ ID NO: 7871 - DNA, 80 bp, synthetic construct
  misc_feature 1..80: note = Synthetic: >NC_003310.1-cand-160090-160169
  source 1..80: mol_type = other DNA
atgatgtgaatttagcatatagtaagtgttaattcagatactacaggaccgtattagaatgtattttaacactaattaga

SEQ ID NO: 7872 - DNA, 80 bp, synthetic construct
  misc_feature 1..80: note = Synthetic: >NC_003310.1-cand-160170-160249
  source 1..80: mol_type = other DNA
gacttaagatttgacttaaaacttgataattaataatataactcgtttttatatgtggctatttcaacgtctaatgtatt

SEQ ID NO: 7873 - DNA, 80 bp, synthetic construct
  misc_feature 1..80: note = Synthetic: >NC_003310.1-cand-160250-160329
  source 1..80: mol_type = other DNA
agttaaatattaaaacttaccacgtaaaacttaaaatttaaaatggtatttcattgacagatcatacattatgaagtttc

SEQ ID NO: 7874 - DNA, 80 bp, synthetic construct
  misc_feature 1..80: note = Synthetic: >NC_003310.1-cand-160330-160409
  source 1..80: mol_type = other DNA
aaggacttgtgttaattgacaattgcaaaaatcaatgggtcgttggaccattaataggaaaaggtggattcggtagtatt

SEQ ID NO: 7875 - DNA, 80 bp, synthetic construct
  misc_feature 1..80: note = Synthetic: >NC_003310.1-cand-160410-160489
  source 1..80: mol_type = other DNA
tatactactaatgacaataattatgtagtaaaaatagagcccaaagctaacggatcattatttaccgaacaggcatttta

SEQ ID NO: 7876 - DNA, 80 bp, synthetic construct
  misc_feature 1..80: note = Synthetic: >NC_003310.1-cand-160490-160569
  source 1..80: mol_type = other DNA
tactagagtacttaaaccatccgttatcgaagaatggaaaaaatctcacaatataaagcacgtaggtcttatcacgtgca

SEQ ID NO: 7877 - DNA, 80 bp, synthetic construct
  misc_feature 1..80: note = Synthetic: >NC_003310.1-cand-160570-160649
  source 1..80: mol_type = other DNA
aggcatttggtttatacaaatccattaatgtggaatatcgattcttggtaattaatagattaggtgcagatctagatgcg

SEQ ID NO: 7878 - DNA, 80 bp, synthetic construct
  misc_feature 1..80: note = Synthetic: >NC_003310.1-cand-160650-160729
  source 1..80: mol_type = other DNA
gtgatcagagccaataataatagactaccagaaaggtcggtgatgttgatcggaatcgaaatcttaaataccatacaatt

SEQ ID NO: 7879 - DNA, 80 bp, synthetic construct
  misc_feature 1..80: note = Synthetic: >NC_003310.1-cand-160730-160809
  source 1..80: mol_type = other DNA
tatgcacgagcaaggatattctcacggagatattaaagcgagtaatatagtcttggatcaaatagataagaataaattat

SEQ ID NO: 7880 - DNA, 80 bp, synthetic construct
  misc_feature 1..80: note = Synthetic: >NC_003310.1-cand-160810-160889
  source 1..80: mol_type = other DNA
atctagtggattacggattggtttctaaattcatgtctaacggcgaacatgttccatttataagaaatccaaataaaatg

SEQ ID NO: 7881 - DNA, 80 bp, synthetic construct
  misc_feature 1..80: note = Synthetic: >NC_003310.1-cand-160890-160969
  source 1..80: mol_type = other DNA
gataacggtactctagaatttacacctatagattcgcataaaggatacgttgtatctagacgtggtgatctagaaacact

SEQ ID NO: 7882 - DNA, 80 bp, synthetic construct
  misc_feature 1..80: note = Synthetic: >NC_003310.1-cand-164560-164639
  source 1..80: mol_type = other DNA
acggaagtcatgtacgtaatatcatagcatctattagatatcgtcagagattaattagtctattatccaagaagctggat

SEQ ID NO: 7883 - DNA, 80 bp, synthetic construct
  misc_feature 1..80: note = Synthetic: >NC_003310.1-cand-164640-164719
  source 1..80: mol_type = other DNA
gctggagataaatggtcgtgttttcctaacgaaataaaatataaaatattggaaaactttaacgataacgaactgaccac

SEQ ID NO: 7884 - DNA, 80 bp, synthetic construct
  misc_feature 1..80: note = Synthetic: >NC_003310.1-cand-164720-164799
  source 1..80: mol_type = other DNA
atatctaaaaatcttataaacactattaaaatataaaatctaagtaggataaaaacactacatcattgtttccttttagt

SEQ ID NO: 7885 - DNA, 80 bp, synthetic construct
  misc_feature 1..80: note = Synthetic: >NC_003310.1-cand-164800-164879
  source 1..80: mol_type = other DNA
gctcgacagtgtatgctatttttaacactcataaataaaaatgaaaacgatttccgttgttacgttgttatgcgtactac

SEQ ID NO: 7886 - DNA, 80 bp, synthetic construct
  misc_feature 1..80: note = Synthetic: >NC_003310.1-cand-164880-164959
  source 1..80: mol_type = other DNA
ctgctgttgtttattcaacatgtactgtacccactatgaataacgctaaattaacgtctaccgaaacatcgtttaatgat

SEQ ID NO: 7887 - DNA, 80 bp, synthetic construct
  misc_feature 1..80: note = Synthetic: >NC_003310.1-cand-164960-165039
  source 1..80: mol_type = other DNA
aaacagaaagttacgtttacatgtgattcaggatatcattctttggatccaaatgctgtctgcgaaacagataaatggaa

SEQ ID NO: 7888 - DNA, 80 bp, synthetic construct
  misc_feature 1..80: note = Synthetic: >NC_003310.1-cand-165040-165119
  source 1..80: mol_type = other DNA
atacgaaaatccatgcaagaaaatgtgcacagtttctgattatgtctctgaactatatgataagccattatacgaagtga

SEQ ID NO: 7889 - DNA, 80 bp, synthetic construct
  misc_feature 1..80: note = Synthetic: >NC_003310.1-cand-165120-165199
  source 1..80: mol_type = other DNA
attccaccatgacactaagttgcaacggtgaaacaaaatattttcgttgtgaagaaaaaaatggaaatacttcttggaat

SEQ ID NO: 7890 - DNA, 80 bp, synthetic construct
  misc_feature 1..80: note = Synthetic: >NC_003310.1-cand-165200-165279
  source 1..80: mol_type = other DNA
gatactgtcacgtgtcctaatgcggaatgtcaacctcttcaattagaacacggatcgtgtcaaccagttaaagaaaaata

SEQ ID NO: 7891 - DNA, 80 bp, synthetic construct
  misc_feature 1..80: note = Synthetic: >NC_003310.1-cand-165290-165369
  source 1..80: mol_type = other DNA
gaatatatgactatcaactgtgatgttggatatgaggttattggtgtttcgtatataagttgtacggctaattcttggaa

SEQ ID NO: 7892 - DNA, 80 bp, synthetic construct
  misc_feature 1..80: note = Synthetic: >NC_003310.1-cand-165360-165439
  source 1..80: mol_type = other DNA
attcttggaatgttattccatcatgtcaacaaaaatgtgatataccgtctctatctaatggattaatttccggatctaca

SEQ ID NO: 7893 - DNA, 80 bp, synthetic construct
  misc_feature 1..80: note = Synthetic: >NC_003310.1-cand-165410-165489
  source 1..80: mol_type = other DNA
ctatctaatggattaatttccggatctacattttctatcggtggcgttatacatcttagttgtaaaagtggttttacact

SEQ ID NO: 7894 - DNA, 80 bp, synthetic construct
  misc_feature 1..80: note = Synthetic: >NC_003310.1-cand-165510-165589
  source 1..80: mol_type = other DNA
catgtatcgacggtaaatggaatcccatactcccaacatgtgtacgatctaacgaagaatttgatccagtggatgatggt

SEQ ID NO: 7895 - DNA, 80 bp, synthetic construct
  misc_feature 1..80: note = Synthetic: >NC_003310.1-cand-165590-165669
  source 1..80: mol_type = other DNA
cccgacgatgagacagatctgagcaaactctcgaaagacgttgtacaatatgaacaagaaatagaatcgttagaagcaac

SEQ ID NO: 7896 - DNA, 80 bp, synthetic construct
  misc_feature 1..80: note = Synthetic: >NC_003310.1-cand-165670-165749
  source 1..80: mol_type = other DNA
ttatcatataatcataatggcgttgacaattatgggtgtcatatttctaatctctattatagtattagtttgttcctgtg

SEQ ID NO: 7897 - DNA, 80 bp, synthetic construct
  misc_feature 1..80: note = Synthetic: >NC_003310.1-cand-165750-165829
  source 1..80: mol_type = other DNA
acaaaaataatgaccaatataagttccataaattgctaccgtgaatataaatccgttaaaataattaataattaataatt

SEQ ID NO: 7898 - DNA, 80 bp, synthetic construct
  misc_feature 1..80: note = Synthetic: >NC_004421.1-cand-3840-3919
  source 1..80: mol_type = other DNA
tactcccaacccaacatggtaacgaagacgaacgccatcgtcaagttgccagtttaccggccaatggcgaccaccaaagc

SEQ ID NO: 7899 - DNA, 80 bp, synthetic construct
  misc_feature 1..80: note = Synthetic: >NC_004421.1-cand-3950-4029
  source 1..80: mol_type = other DNA
cctcttccaaccctgtctctgctctcgcgtttacattgttcgcgcacagcgcatgacctacacccactgggccctgcgtt

SEQ ID NO: 7900 - DNA, 80 bp, synthetic construct
  misc_feature 1..80: note = Synthetic: >NC_004421.1-cand-4000-4079
  source 1..80: mol_type = other DNA
gcatgacctacacccactgggccctgcgttgtgtcgacagcgatggaacacgccagatttccctttctcgcttcaagttg

SEQ ID NO: 7901 - DNA, 80 bp, synthetic construct
  misc_feature 1..80: note = Synthetic: >NC_004421.1-cand-4080-4159
  source 1..80: mol_type = other DNA
tctgctgttgtggcatacgaggatccggaaggagaggtctaccgagaggtagaacctttccactggtccttggccgtcgc

SEQ ID NO: 7902 - DNA, 80 bp, synthetic construct
  misc_feature 1..80: note = Synthetic: >NC_004421.1-cand-4160-4239
  source 1..80: mol_type = other DNA
gatggtgggcagcccttgggactattctgcttccaacaactgcacccactttgtctctaacatcaccggtgttgaacttc

SEQ ID NO: 7903 - DNA, 80 bp, synthetic construct
  misc_feature 1..80: note = Synthetic: >NC_004421.1-cand-4190-4269
  source 1..80: mol_type = other DNA
ttccaacaactgcacccactttgtctctaacatcaccggtgttgaacttcccaacactggcttctcccttgctctcggaa

SEQ ID NO: 7904 - DNA, 80 bp, synthetic construct
  misc_feature 1..80: note = Synthetic: >NC_004421.1-cand-4370-4449
  source 1..80: mol_type = other DNA
gatcgatgctgcacaccgtgtctcaagatccattgaggaaacggtttctgcaattcgatctgctgaccttctaaactcca

SEQ ID NO: 7905 - DNA, 80 bp, synthetic construct
  misc_feature 1..80: note = Synthetic: >NC_004421.1-cand-4400-4479
  source 1..80: mol_type = other DNA
cattgaggaaacggtttctgcaattcgatctgctgaccttctaaactccactgctaacctctctcttgctgcttctgaca

SEQ ID NO: 7906 - DNA, 80 bp, synthetic construct
  misc_feature 1..80: note = Synthetic: >NC_004421.1-cand-4480-4559
  source 1..80: mol_type = other DNA
tacgtgaggcttccacccgggtatcctcttccattgacggcttctcaaacatgctccaggattttgcccgaaacttccgt

SEQ ID NO: 7907 - DNA, 80 bp, synthetic construct
  misc_feature 1..80: note = Synthetic: >NC_004421.1-cand-4570-4649
  source 1..80: mol_type = other DNA
atgatgttgtcggctctggaatctcttccttcctaacttggctcaccaaaatctttggttaccttctggttctttttggc

SEQ ID NO: 7908 - DNA, 80 bp, synthetic construct
  misc_feature 1..80: note = Synthetic: >NC_004421.1-cand-4650-4729
  source 1..80: mol_type = other DNA
tctcccactcccatgtccgttgctggactcttggtgataatctgtgcggatctggcaccacagcttcgcacctatttcac

SEQ ID NO: 7909 - DNA, 80 bp, synthetic construct
  misc_feature 1..80: note = Synthetic: >NC_004421.1-cand-4730-4809
  source 1..80: mol_type = other DNA
tgagagaaacaccactctgggcgctctcttctattggctggcaaccaagcttggtttgttagtcactccagaggaggcgg

SEQ ID NO: 7910 - DNA, 80 bp, synthetic construct
  misc_feature 1..80: note = Synthetic: >NC_004421.1-cand-4810-4889
  source 1..80: mol_type = other DNA
aagttgccgccatcgagcctcaaggcgtgcgggacttaaaggaaggtgtccaggctgttcgtaacactgaatggcttgct

SEQ ID NO: 7911 - DNA, 80 bp, synthetic construct
  misc_feature 1..80: note = Synthetic: >NC_004421.1-cand-4890-4969
  source 1..80: mol_type = other DNA
gaaaccgcatggaaatgggctaagagagttctggattggattcgtggaaaagtcaagactgaccctaaggccattcttgc

SEQ ID NO: 7912 - DNA, 80 bp, synthetic construct
  misc_feature 1..80: note = Synthetic: >NC_004421.1-cand-4970-5049
  source 1..80: mol_type = other DNA
cgactcccatgatgaaatactcagacactactctgaatccatagccgcgctcggttcagaacgcactcccatcagtgcca

SEQ ID NO: 7913 - DNA, 80 bp, synthetic construct
  misc_feature 1..80: note = Synthetic: >NC_004421.1-cand-5050-5129
  source 1..80: mol_type = other DNA
tcaccgatgcaatctcccgttgccgcgagctcgtcaaggtcgcagctgacgccaggtctgctccccactcttcttttctc

SEQ ID NO: 7914 - DNA, 80 bp, synthetic construct
  misc_feature 1..80: note = Synthetic: >NC_005238.1-cand-2090-2169
  source 1..80: mol_type = other DNA
ggattgactgttgaccaatctacagttggtgcaagcggtatctatccatcctttatgtcacgagttgtttataaacatta

SEQ ID NO: 7915 - DNA, 80 bp, synthetic construct
  misc_feature 1..80: note = Synthetic: >NC_005238.1-cand-2170-2249
  source 1..80: mol_type = other DNA
taagagtttaatttcagaagtgacaacttgcttttttctttttgaaaagggtttgcatgggaatgtgaatgaagaggcta

SEQ ID NO: 7916 - DNA, 80 bp, synthetic construct
  misc_feature 1..80: note = Synthetic: >NC_005238.1-cand-2240-2319
  source 1..80: mol_type = other DNA
gaagaggctaaaatacatctggaaactgtggaatgggcaacaaagttcaaagaaaaggaggataagtatggtgagatgtt

SEQ ID NO: 7917 - DNA, 80 bp, synthetic construct
  misc_feature 1..80: note = Synthetic: >NC_005238.1-cand-2320-2399
  source 1..80: mol_type = other DNA
agttgaacatggttatacaataggagagcttgtagaatccagtgaactagcagtccaacaactatattgtcaagatgcag

SEQ ID NO: 7918 - DNA, 80 bp, synthetic construct
  misc_feature 1..80: note = Synthetic: >NC_005238.1-cand-2400-2479
  source 1..80: mol_type = other DNA
ttgagctggctgccaatgaattgaaccgagttcttatcgcaaagtctcaggtggttgctaatagtatcttaaataagtat

SEQ ID NO: 7919 - DNA, 80 bp, synthetic construct
  misc_feature 1..80: note = Synthetic: >NC_005238.1-cand-2480-2559
  source 1..80: mol_type = other DNA
tgggaagagccatattttagccaaacaaggaatattagtttaaaaggcatgtcaggccaagtacaagaggatggacattt

SEQ ID NO: 7920 - DNA, 80 bp, synthetic construct
  misc_feature 1..80: note = Synthetic: >NC_005238.1-cand-2560-2639
  source 1..80: mol_type = other DNA
gtcgtcatccactacaataattgaagctataagatatctgtctaattcaaggaacaatcctaacgttcttcaactatatg

SEQ ID NO: 7921 - DNA, 80 bp, synthetic construct
  misc_feature 1..80: note = Synthetic: >NC_005238.1-cand-2640-2719
  source 1..80: mol_type = other DNA
aagaaactagacatcagaaggcacaagctagaattgtgaggaagtttcagaggacagaagctgatcgaggttttttcatt

SEQ ID NO: 7922 - DNA, 80 bp, synthetic construct
  misc_feature 1..80: note = Synthetic: >NC_005238.1-cand-2720-2799
  source 1..80: mol_type = other DNA
acgacactaccaacaagatgtcgtcttgagattattgaggactattatgatgcaatatcaaaaaacgtagcagaggaata

SEQ ID NO: 7923 - DNA, 80 bp, synthetic construct
  misc_feature 1..80: note = Synthetic: >NC_005238.1-cand-2800-2879
  source 1..80: mol_type = other DNA
tatctcatatggtggagaaaggaaaattctctgtatccaggcggcccttgaaaaagctctccgctgggcatctggagaga

SEQ ID NO: 7924 - DNA, 80 bp, synthetic construct
  misc_feature 1..80: note = Synthetic: >NC_005238.1-cand-2880-2959
  source 1..80: mol_type = other DNA
gctttattgagctcagcaacgggaaatttataaggatgaagagaaaacttatgtatgtcagtgctgatgccactaaatgg

SEQ ID NO: 7925 - DNA, 80 bp, synthetic construct
  misc_feature 1..80: note = Synthetic: >NC_005238.1-cand-2960-3039
  source 1..80: mol_type = other DNA
tctccaggtgataattcagcaaaattcaggcgattcactgctgcccttcataatggactgcctgatgacaggttgaaaaa

SEQ ID NO: 7926 - DNA, 80 bp, synthetic construct
  misc_feature 1..80: note = Synthetic: >NC_005238.1-cand-3040-3119
  source 1..80: mol_type = other DNA
ctgtgtcattgatgccttgcgccatgtatataagactgacttttatatgtctagaaaacttagacactatattgattcta

SEQ ID NO: 7927 - DNA, 80 bp, synthetic construct
  misc_feature 1..80: note = Synthetic: >NC_005238.1-cand-3120-3199
  source 1..80: mol_type = other DNA
tggatacttatgaacctcatgtcagagactttttaaatttctttccagacgggcatcatggagaggtacgaggcaattgg

SEQ ID NO: 7928 - DNA, 80 bp, synthetic construct
  misc_feature 1..80: note = Synthetic: >NC_005238.1-cand-3200-3279
  source 1..80: mol_type = other DNA
ttgcagggtaacttgaacaagtgttcatcattgtttggtgtggcaatgtccttattatttaaagaaatttggacaaggtt

SEQ ID NO: 7929 - DNA, 80 bp, synthetic construct
  misc_feature 1..80: note = Synthetic: >NC_005238.1-cand-3290-3369
  source 1..80: mol_type = other DNA
ttagactgcttttttgaatttgctcatcattcagatgatgcacttttcatatatggctacttagaaccagctgatgacgg

SEQ ID NO: 7930 - DNA, 80 bp, synthetic construct
  misc_feature 1..80: note = Synthetic: >NC_006577.2-cand-21570-21649
  source 1..80: mol_type = other DNA
cttatagtttatttgatatgactaaattttctttgaaattggctggcactgctgttgttaatttaagaccagatcaatta

SEQ ID NO: 7931 - DNA, 80 bp, synthetic construct
  misc_feature 1..80: note = Synthetic: >NC_006577.2-cand-21650-21729
  source 1..80: mol_type = other DNA
aatgatttagtttattctcttattgaaagaggtaaattattagttcgcgatacgcgtaaagagatttttgttggtgatag

SEQ ID NO: 7932 - DNA, 80 bp, synthetic construct
  misc_feature 1..80: note = Synthetic: >NC_006577.2-cand-21730-21809
  source 1..80: mol_type = other DNA
tcttgtaaatacttgttagatctcattaaatctaaactatgttaattatttttttatttttttatttctgttatggtttt

SEQ ID NO: 7933 - DNA, 80 bp, synthetic construct
  misc_feature 1..80: note = Synthetic: >NC_006577.2-cand-21810-21889
  source 1..80: mol_type = other DNA
aatgaacctcttaatgttgtgtctcatttaaaccatgactggtttttatttggtgatagtcgttctgattgtaaccatat

SEQ ID NO: 7934 - DNA, 80 bp, synthetic construct
  misc_feature 1..80: note = Synthetic: >NC_006577.2-cand-21900-21979
  source 1..80: mol_type = other DNA
aaaattaaaaattttgattatttggatattcaccctagtttgtgcaacaatggtaagatttcatctagtgccggtgattc

SEQ ID NO: 7935 - DNA, 80 bp, synthetic construct
  misc_feature 1..80: note = Synthetic: >NC_006577.2-cand-21980-22059
  source 1..80: mol_type = other DNA
tatttttaagagttttcatttcactcgattttataattacactggcgaaggtgatcaaattattttttatgagggtgtta

SEQ ID NO: 7936 - DNA, 80 bp, synthetic construct
  misc_feature 1..80: note = Synthetic: >NC_006577.2-cand-22060-22139
  source 1..80: mol_type = other DNA
attttaatccttatcatagatttaagtgttttcctaatggtagtaatgatgtatggcttcttaacaaggtaagattttat

SEQ ID NO: 7937 - DNA, 80 bp, synthetic construct
  misc_feature 1..80: note = Synthetic: >NC_006577.2-cand-22140-22219
  source 1..80: mol_type = other DNA
cgtgccttatattctaatatggccttttttcgttatcttacttttgttgatattccttataatgtttctctttctaagtt

SEQ ID NO: 7938 - DNA, 80 bp, synthetic construct
  misc_feature 1..80: note = Synthetic: >NC_006577.2-cand-22220-22299
  source 1..80: mol_type = other DNA
taattcttgtaaaagtgatattttatcacttaacaatcctatttttattaattattctaaggaagtttattttactttat

SEQ ID NO: 7939 - DNA, 80 bp, synthetic construct
  misc_feature 1..80: note = Synthetic: >NC_006577.2-cand-22300-22379
  source 1..80: mol_type = other DNA
taggttgttctctttatttagtaccgctttgcctttttaaatctaactttagtcagtactattataacatagatactggc

SEQ ID NO: 7940 - DNA, 80 bp, synthetic construct
  misc_feature 1..80: note = Synthetic: >NC_006577.2-cand-22380-22459
  source 1..80: mol_type = other DNA
tctgtttatggtttttctaatgttgtttatcctgatttagactgtatttatatttctcttaaaccaggttcttataaagt

SEQ ID NO: 7941 - DNA, 80 bp, synthetic construct
  misc_feature 1..80: note = Synthetic: >NC_006577.2-cand-22460-22539
  source 1..80: mol_type = other DNA
ttccaccactgcaccttttttatccttacctactaaagctctctgttttgataaatctaaacaatttgtacctgtacagg

SEQ ID NO: 7942 - DNA, 80 bp, synthetic construct
  misc_feature 1..80: note = Synthetic: >NC_006577.2-cand-22540-22619
  source 1..80: mol_type = other DNA
ttgttgattctagatggaacaacgagcgtgcctcagatatttctttatctgttgcatgtcaattgccatattgttatttt

SEQ ID NO: 7943 - DNA, 80 bp, synthetic construct
  misc_feature 1..80: note = Synthetic: >NC_006577.2-cand-22620-22699
  source 1..80: mol_type = other DNA
cgcaattcttctgctaattatgttggcaagtatgatattaaccacggtgatagtggttttatttctattttatctggtct

SEQ ID NO: 7944 - DNA, 80 bp, synthetic construct
  misc_feature 1..80: note = Synthetic: >NC_006577.2-cand-22700-22779
  source 1..80: mol_type = other DNA
tttatataatgtttcttgtatttcatattatggtgtatttttatatgataattttacatccatttggccctattattctt

SEQ ID NO: 7945 - DNA, 80 bp, synthetic construct
  misc_feature 1..80: note = Synthetic: >NC_006577.2-cand-22780-22859
  source 1..80: mol_type = other DNA
ttggtaggtgtcctacatcttctattattaaacatccaatttgtgtttatgattttttgcctattattttacaaggtatt

SEQ ID NO: 7946 - DNA, 80 bp, synthetic construct
  misc_feature 1..80: note = Synthetic: >NC_009827.1-cand-160-239
  source 1..80: mol_type = other DNA
accggaattgccaggacgaccgggtcctttccattggatcaaacccgctcaatgcctggagatttgggcgtgcccccgca

SEQ ID NO: 7947 - DNA, 80 bp, synthetic construct
  misc_feature 1..80: note = Synthetic: >NC_009827.1-cand-370-449
  source 1..80: mol_type = other DNA
caaaagaaacaccaaccgtcgcccaatggacgtcaagttcccgggcggcggccagatcgttggtggagtttacttgctgc

SEQ ID NO: 7948 - DNA, 80 bp, synthetic construct
  misc_feature 1..80: note = Synthetic: >NC_009827.1-cand-480-559
  source 1..80: mol_type = other DNA
ccacaagaaagacatccgagcgatcccagcccagaggtaggcgccaacctatacccaaggcgcgcccatctcagggccgg

SEQ ID NO: 7949 - DNA, 80 bp, synthetic construct
  misc_feature 1..80: note = Synthetic: >NC_009827.1-cand-570-649
  source 1..80: mol_type = other DNA
agcctggctacccctggcccctgtatgggaatgagggctgcgggtgggcaggctggcttatgtctccccgcggctctcgc

SEQ ID NO: 7950 - DNA, 80 bp, synthetic construct
  misc_feature 1..80: note = Synthetic: >NC_009827.1-cand-660-739
  source 1..80: mol_type = other DNA
gcccaaacgacccccggcgtcggtcccgtaatttgggtaaggtcatcgataccctgacatgcggactcgccgacctcatg

SEQ ID NO: 7951 - DNA, 80 bp, synthetic construct
  misc_feature 1..80: note = Synthetic: >NC_009827.1-cand-740-819
  source 1..80: mol_type = other DNA
gggtacattcccgtcgtaggcggacccttgggtggcgtcgcggctgcgctcgcacatggtgtgagggcaatcgaggacgg

SEQ ID NO: 7952 - DNA, 80 bp, synthetic construct
  misc_feature 1..80: note = Synthetic: >NC_009827.1-cand-800-879
  source 1..80: mol_type = other DNA
gtgagggcaatcgaggacgggattaactatgcaacagggaatcttcctggttgctctttttctatcttcatcctggcact

SEQ ID NO: 7953 - DNA, 80 bp, synthetic construct
  misc_feature 1..80: note = Synthetic: >NC_009827.1-cand-880-959
  source 1..80: mol_type = other DNA
gctctcgtgcctcaccacaccagcctcggcgctcacatacggcaactccagcgggttgtaccatctaaccaatgattgtc

SEQ ID NO: 7954 - DNA, 80 bp, synthetic construct
  misc_feature 1..80: note = Synthetic: >NC_009827.1-cand-960-1039
  source 1..80: mol_type = other DNA
cacgctccagcatagtgctggaagcggaggccatgatcctacacctagctggttgtgtgccttgcgtgagagccggaaac

SEQ ID NO: 7955 - DNA, 80 bp, synthetic construct
  misc_feature 1..80: note = Synthetic: >NC_009827.1-cand-1040-1119
  source 1..80: mol_type = other DNA
atttcacgctgctggcatcctgtttcacccaccctggctgtaccgaatgcctcggtgcctgcgagcgggttccgcaaaca

SEQ ID NO: 7956 - DNA, 80 bp, synthetic construct
  misc_feature 1..80: note = Synthetic: >NC_009827.1-cand-1120-1199
  source 1..80: mol_type = other DNA
tgtggatctcctcgcaggcgctgcagtcgtttgctcttcgatgtatatcggagacctctgcggtgccgtatttttggcag

SEQ ID NO: 7957 - DNA, 80 bp, synthetic construct
  misc_feature 1..80: note = Synthetic: >NC_009827.1-cand-1200-1279
  source 1..80: mol_type = other DNA
gacagttggctaccttcagtcctcgcatccacgacataacgcaggactgcaattgttcggtttatacaggccatgttacc

SEQ ID NO: 7958 - DNA, 80 bp, synthetic construct
  misc_feature 1..80: note = Synthetic: >NC_009827.1-cand-1280-1359
  source 1..80: mol_type = other DNA
ggccacagaatggcgtgggacatgatgatgaactggtcgcctaccactaccctggtcctgtcgagcattctgagagtgcc

SEQ ID NO: 7959 - DNA, 80 bp, synthetic construct
  misc_feature 1..80: note = Synthetic: >NC_009827.1-cand-1310-1389
  source 1..80: mol_type = other DNA
aactggtcgcctaccactaccctggtcctgtcgagcattctgagagtgcccgaaatagtgctcgaggtgttcgccggcgg

SEQ ID NO: 7960 - DNA, 80 bp, synthetic construct
  misc_feature 1..80: note = Synthetic: >NC_009827.1-cand-1480-1559
  source 1..80: mol_type = other DNA
agaggcaaccaccaccgtcggcagagcggccggccgttctgcttatctcttcacctccattttctcgtctggtccaaatc

SEQ ID NO: 7961 - DNA, 80 bp, synthetic construct
  misc_feature 1..80: note = Synthetic: >NC_009827.1-cand-1520-1599
  source 1..80: mol_type = other DNA
gcttatctcttcacctccattttctcgtctggtccaaatcagaagatacagcttattaacaccaatggtagctggcacat

SEQ ID NO: 7962 - DNA, 80 bp, synthetic construct
  misc_feature 1..80: note = Synthetic: >NC_019843.3-cand-7040-7119
  source 1..80: mol_type = other DNA
attggtgcttgattagccaagattccataactcactacccagctcttaagatggttcaaacacatcttagccactatgtt

SEQ ID NO: 7963 - DNA, 80 bp, synthetic construct
  misc_feature 1..80: note = Synthetic: >NC_019843.3-cand-7120-7199
  source 1..80: mol_type = other DNA
cttaacatagattggttgtggtttgcatttgagactggtttggcatacatgctctatacctcggccttcaactggttgtt

SEQ ID NO: 7964 - DNA, 80 bp, synthetic construct
  misc_feature 1..80: note = Synthetic: >NC_019843.3-cand-7200-7279
  source 1..80: mol_type = other DNA
gttggcaggtacattgcattatttctttgcacagacttccatatttgtagactggcggtcatacaattatgctgtgtcta

SEQ ID NO: 7965 - DNA, 80 bp, synthetic construct
  misc_feature 1..80: note = Synthetic: >NC_019843.3-cand-7280-7359
  source 1..80: mol_type = other DNA
gtgccttctggttattcacccacattccaatggcgggtttggtacgaatgtataatttgttagcatgcctttggctttta

SEQ ID NO: 7966 - DNA, 80 bp, synthetic construct
  misc_feature 1..80: note = Synthetic: >NC_019843.3-cand-7360-7439
  source 1..80: mol_type = other DNA
cgcaagttttatcagcatgtaatcaatggttgcaaagatacggcatgcttgctctgctataagaggaaccgacttactag

SEQ ID NO: 7967 - DNA, 80 bp, synthetic construct
  misc_feature 1..80: note = Synthetic: >NC_019843.3-cand-7440-7519
  source 1..80: mol_type = other DNA
agttgaagcttctaccgttgtctgtggtggaaaacgtacgttttatatcacagcaaatggcggtatttcattctgtcgta

SEQ ID NO: 7968 - DNA, 80 bp, synthetic construct
  misc_feature 1..80: note = Synthetic: >NC_019843.3-cand-7480-7559
  source 1..80: mol_type = other DNA
ttttatatcacagcaaatggcggtatttcattctgtcgtaggcataattggaattgtgtggattgtgacactgcaggtgt

SEQ ID NO: 7969 - DNA, 80 bp, synthetic construct
  misc_feature 1..80: note = Synthetic: >NC_019843.3-cand-7610-7689
  source 1..80: mol_type = other DNA
tacgcaggcctattaacgctacggatagatcacattattatgtggattccgttacagttaaagagactgttgttcagttt

SEQ ID NO: 7970 - DNA, 80 bp, synthetic construct
  misc_feature 1..80: note = Synthetic: >NC_019843.3-cand-7690-7769
  source 1..80: mol_type = other DNA
aattatcgtagagacggtcaaccattctacgagcggtttcccctctgcgcttttacaaatctagataagttgaagttcaa

SEQ ID NO: 7971 - DNA, 80 bp, synthetic construct
  misc_feature 1..80: note = Synthetic: >NC_019843.3-cand-7770-7849
  source 1..80: mol_type = other DNA
agaggtctgtaaaactactactggtatacctgaatacaactttatcatctacgactcatcagatcgtggccaggaaagtt

SEQ ID NO: 7972 - DNA, 80 bp, synthetic construct
  misc_feature 1..80: note = Synthetic: >NC_019843.3-cand-7850-7929
  source 1..80: mol_type = other DNA
tagctaggtctgcatgtgtttattattctcaagtcttgtgtaaatcaattcttttggttgactcaagtttggttacttct

SEQ ID NO: 7973 - DNA, 80 bp, synthetic construct
  misc_feature 1..80: note = Synthetic: >NC_019843.3-cand-7930-8009
  source 1..80: mol_type = other DNA
gttggtgattctagtgaaatcgccactaaaatgtttgattcctttgttaatagtttcgtctcgctgtataatgtcacacg

SEQ ID NO: 7974 - DNA, 80 bp, synthetic construct
  misc_feature 1..80: note = Synthetic: >NC_019843.3-cand-8010-8089
  source 1..80: mol_type = other DNA
cgataagttggaaaaacttatctctactgctcgtgatggcgtaaggcgaggcgataacttccatagtgtcttaacaacat

SEQ ID NO: 7975 - DNA, 80 bp, synthetic construct
  misc_feature 1..80: note = Synthetic: >NC_019843.3-cand-8090-8169
  source 1..80: mol_type = other DNA
tcattgacgcagcacgaggccccgcaggtgtggagtctgatgttgagaccaatgaaattgttgactctgtgcagtatgct

SEQ ID NO: 7976 - DNA, 80 bp, synthetic construct
  misc_feature 1..80: note = Synthetic: >NC_019843.3-cand-8170-8249
  source 1..80: mol_type = other DNA
cataaacatgacatacaaattactaatgagagctacaataattatgtaccctcatatgttaaacctgatagtgtgtctac

SEQ ID NO: 7977 - DNA, 80 bp, synthetic construct
  misc_feature 1..80: note = Synthetic: >NC_019843.3-cand-8250-8329
  source 1..80: mol_type = other DNA
cagcgatttaggtagtctcattgattgtaatgcggcttcagttaaccaaattgtcttgcgtaattctaatggtgcttgca

SEQ ID NO: 7978 - DNA, 80 bp, synthetic construct
  misc_feature 1..80: note = Synthetic: >NC_019843.3-cand-14710-14789
  source 1..80: mol_type = other DNA
tgacgctcaaacattttttctttgctcaagatggtaatgctgctattacagattataattactattcttataatctgcct

SEQ ID NO: 7979 - DNA, 80 bp, synthetic construct
  misc_feature 1..80: note = Synthetic: >NC_019843.3-cand-14790-14869
  source 1..80: mol_type = other DNA
actatgtgtgacatcaaacaaatgttgttctgcatggaagttgtaaacaagtacttcgaaatctatgacggtggttgtct

SEQ ID NO: 7980 - DNA, 80 bp, synthetic construct
  misc_feature 1..80: note = Synthetic: >NC_019843.3-cand-14870-14949
  source 1..80: mol_type = other DNA
taatgcttctgaagtggttgttaataatttagacaagagtgctggccatccttttaataagtttggcaaagctcgtgtct

SEQ ID NO: 7981 - DNA, 80 bp, synthetic construct
  misc_feature 1..80: note = Synthetic: >NC_019843.3-cand-14950-15029
  source 1..80: mol_type = other DNA
attatgagagcatgtcttaccaggagcaagatgaactttttgccatgacaaagcgtaacgtcattcctaccatgactcaa

SEQ ID NO: 7982 - DNA, 80 bp, synthetic construct
  misc_feature 1..80: note = Synthetic: >NC_019843.3-cand-15030-15109
  source 1..80: mol_type = other DNA
atgaatctaaaatatgctattagtgctaagaatagagctcgcactgttgcaggcgtgtccatacttagcacaatgactaa

SEQ ID NO: 7983 - DNA, 80 bp, synthetic construct
  misc_feature 1..80: note = Synthetic: >NC_019843.3-cand-15110-15189
  source 1..80: mol_type = other DNA
tcgccagtaccatcagaaaatgcttaagtccatggctgcaactcgtggagcgacttgcgtcattggtactacaaagttct

SEQ ID NO: 7984 - DNA, 80 bp, synthetic construct
  misc_feature 1..80: note = Synthetic: >NC_019843.3-cand-15190-15269
  source 1..80: mol_type = other DNA
acggtggctgggatttcatgcttaaaacattgtacaaagatgttgataatccgcatcttatgggttgggattaccctaag

SEQ ID NO: 7985 - DNA, 80 bp, synthetic construct
  misc_feature 1..80: note = Synthetic: >NC_019843.3-cand-15270-15349
  source 1..80: mol_type = other DNA
tgtgatagagctatgcctaatatgtgtagaatcttcgcttcactcatattagctcgtaaacatggcacttgttgtactac

SEQ ID NO: 7986 - DNA, 80 bp, synthetic construct
  misc_feature 1..80: note = Synthetic: >NC_019843.3-cand-15350-15429
  source 1..80: mol_type = other DNA
aagggacagattttatcgcttggcaaatgagtgtgctcaggtgctaagcgaatatgttctatgtggtggtggttactacg

SEQ ID NO: 7987 - DNA, 80 bp, synthetic construct
  misc_feature 1..80: note = Synthetic: >NC_019843.3-cand-15430-15509
  source 1..80: mol_type = other DNA
tcaaacctggaggtaccagtagcggagatgccaccactgcatatgccaatagtgtctttaacattttgcaggcgacaact

SEQ ID NO: 7988 - DNA, 80 bp, synthetic construct
  misc_feature 1..80: note = Synthetic: >NC_019843.3-cand-15510-15589
  source 1..80: mol_type = other DNA
gctaatgtcagtgcacttatgggtgctaatggcaacaagattgttgacaaagaagttaaagacatgcagtttgatttgta

SEQ ID NO: 7989 - DNA, 80 bp, synthetic construct
  misc_feature 1..80: note = Synthetic: >NC_019843.3-cand-15590-15669
  source 1..80: mol_type = other DNA
tgtcaatgtttacaggagcactagcccagaccccaaatttgttgataaatactatgcttttcttaataagcacttttcta

SEQ ID NO: 7990 - DNA, 80 bp, synthetic construct
  misc_feature 1..80: note = Synthetic: >NC_019843.3-cand-15670-15749
  source 1..80: mol_type = other DNA
tgatgatactgtctgatgacggtgtcgtttgctataatagtgattatgcagctaagggttacattgctggaatacagaat

SEQ ID NO: 7991 - DNA, 80 bp, synthetic construct
  misc_feature 1..80: note = Synthetic: >NC_019843.3-cand-15750-15829
  source 1..80: mol_type = other DNA
tttaaggaaacgctgtattatcagaacaatgtctttatgtctgaagctaaatgctgggtggaaaccgatctgaagaaagg

SEQ ID NO: 7992 - DNA, 80 bp, synthetic construct
  misc_feature 1..80: note = Synthetic: >NC_019843.3-cand-15830-15909
  source 1..80: mol_type = other DNA
gccacatgaattctgttcacagcatacgctttatattaaggatggcgacgatggttacttccttccttatccagaccctt

SEQ ID NO: 7993 - DNA, 80 bp, synthetic construct
  misc_feature 1..80: note = Synthetic: >NC_019843.3-cand-15910-15989
  source 1..80: mol_type = other DNA
caagaattttgtctgccggttgctttgtagatgatatcgttaagactgacggtacactcatggtagagcggtttgtgtct

SEQ ID NO: 7994 - DNA, 80 bp, synthetic construct
  misc_feature 1..80: note = Synthetic: >NC_029647.1-cand-2130-2209
  source 1..80: mol_type = other DNA
gacaacaagtacggccttgctgaaactctccgcgtgggcaacaaactgaggaatgtgacaactatagagggcttcaagaa

SEQ ID NO: 7995 - DNA, 80 bp, synthetic construct
  misc_feature 1..80: note = Synthetic: >NC_029647.1-cand-2250-2329
  source 1..80: mol_type = other DNA
tggaaaggcgtaacttacgaccttgagtcagatggtaagggatcagtcaccattgacagggtgcagtcacagatggtaca

SEQ ID NO: 7996 - DNA, 80 bp, synthetic construct
  misc_feature 1..80: note = Synthetic: >NC_029647.1-cand-2340-2419
  source 1..80: mol_type = other DNA
gagattcaccaggctgtcctgcgcttacgccaagctcgggtgcggtattacgtcatgactgctcagaatgtcacctacgg

SEQ ID NO: 7997 - DNA, 80 bp, synthetic construct
  misc_feature 1..80: note = Synthetic: >NC_029647.1-cand-2410-2489
  source 1..80: mol_type = other DNA
tcacctacgggctccttcaggccgccggcgcagcattcgtccttaacaggatattcaggcgtgcagagaacccattctca

SEQ ID NO: 7998 - DNA, 80 bp, synthetic construct
  misc_feature 1..80: note = Synthetic: >NC_029647.1-cand-2490-2569
  source 1..80: mol_type = other DNA
cgcctagtcaaagtggaggaggacaaggacgaagatgcacgcatggctatcatccccaaaaaggtagagattgttgaatc

SEQ ID NO: 7999 - DNA, 80 bp, synthetic construct
  misc_feature 1..80: note = Synthetic: >NC_029647.1-cand-2570-2649
  source 1..80: mol_type = other DNA
caatctagaggaagaagggaaaaagaaagggaagaacaagcaaggcagaggccgtaagcacacagctttctcctccaaag

SEQ ID NO: 8000 - DNA, 80 bp, synthetic construct
  misc_feature 1..80: note = Synthetic: >NC_029647.1-cand-2650-2729
  source 1..80: mol_type = other DNA
gactgagtgacgaggagtacgaagagttcaagcagctcagagaggagaagggaggaaagtactcaatccaagaatacctc

SEQ ID NO: 8001 - DNA, 80 bp, synthetic construct
  misc_feature 1..80: note = Synthetic: >NC_029647.1-cand-2730-2809
  source 1..80: mol_type = other DNA
gaagaccgtgaccgtttcgaggaagaggtcgcgtatgcacaggcctgtggaggtgactgtgatgacatcgaaatcagccg

SEQ ID NO: 8002 - DNA, 80 bp, synthetic construct
  misc_feature 1..80: note = Synthetic: >NC_029647.1-cand-2810-2889
  source 1..80: mol_type = other DNA
catacgcaactccattttccgcccaagtaggaaacagagaaaggaggagagagttaagcttggcctggtcaccggttctg

SEQ ID NO: 8003 - DNA, 80 bp, synthetic construct
  misc_feature 1..80: note = Synthetic: >NC_029647.1-cand-2890-2969
  source 1..80: mol_type = other DNA
agatcagaaaacggaagcctgatgacttccagccaaaagggaaactgtgggcagatgacgagagaaccgttgattacaac

SEQ ID NO: 8004 - DNA, 80 bp, synthetic construct
  misc_feature 1..80: note = Synthetic: >NC_029647.1-cand-2950-3029
  source 1..80: mol_type = other DNA
agagaaccgttgattacaacgaaaagctggactttgaagcacccgcttccatctgggcgcgtatagttcagcttggtaca

SEQ ID NO: 8005 - DNA, 80 bp, synthetic construct
  misc_feature 1..80: note = Synthetic: >NC_029647.1-cand-3110-3189
  source 1..80: mol_type = other DNA
ggttccaatcaagcaagtacaaatacacaggtgtggcgagttcaccagacttaggttctcgaagatgatcaggccagatg

SEQ ID NO: 8006 - DNA, 80 bp, synthetic construct
  misc_feature 1..80: note = Synthetic: >NC_029647.1-cand-3130-3209
  source 1..80: mol_type = other DNA
aaatacacaggtgtggcgagttcaccagacttaggttctcgaagatgatcaggccagatgtgactggtatgatacttgaa

SEQ ID NO: 8007 - DNA, 80 bp, synthetic construct
  misc_feature 1..80: note = Synthetic: >NC_029647.1-cand-3220-3299
  source 1..80: mol_type = other DNA
ccgaaggtgtcgtttgtagcatactggtcaagagaccaacaggtgagtgcctgccactagcagtcaggatgggaacccaa

SEQ ID NO: 8008 - DNA, 80 bp, synthetic construct
  misc_feature 1..80: note = Synthetic: >NC_029647.1-cand-3260-3339
  source 1..80: mol_type = other DNA
aggtgagtgcctgccactagcagtcaggatgggaacccaagctaccatgaagatacaagggaaagtggtctcgggccaac

SEQ ID NO: 8009 - DNA, 80 bp, synthetic construct
  misc_feature 1..80: note = Synthetic: >NC_029647.1-cand-3390-3469
  source 1..80: mol_type = other DNA
acccctggtgactgtggatgcccttacgtgtacaaacgtggtaacgactatgtggttgtgggtgtgcacactgccgcggg

SEQ ID NO: 8010 - DNA, 80 bp, synthetic construct
  misc_feature 1..80: note = Synthetic: >NC_034517.1-cand-3900-3979
  source 1..80: mol_type = other DNA
aagcgggcacttctgggtttcatgcacaagcgtcaaaagcaaatggtttatatacttggactatttaaattcttaatgaa

SEQ ID NO: 8011 - DNA, 80 bp, synthetic construct
  misc_feature 1..80: note = Synthetic: >NC_034517.1-cand-3990-4069
  source 1..80: mol_type = other DNA
gatacgtttcaacatgagagacttggagaattctcatttatgggaaaagttcagtggaaaattttcatcccaaaatctga

SEQ ID NO: 8012 - DNA, 80 bp, synthetic construct
  misc_feature 1..80: note = Synthetic: >NC_034517.1-cand-4070-4149
  source 1..80: mol_type = other DNA
atttgagttttcagacatgtatactcataagtttttgaaaatatggagtgaccaacatgccacatacgattatattattc

SEQ ID NO: 8013 - DNA, 80 bp, synthetic construct
  misc_feature 1..80: note = Synthetic: >NC_034517.1-cand-4150-4229
  source 1..80: mol_type = other DNA
cgaaagggcgtgataatctaattatttaccttgtgagaaaaataaatgacccaagtattgttacagccatgacaatgcag

SEQ ID NO: 8014 - DNA, 80 bp, synthetic construct
  misc_feature 1..80: note = Synthetic: >NC_034517.1-cand-4230-4309
  source 1..80: mol_type = other DNA
tcccctttacagctaaggttcaggatgcaggcaaaacagcatatgaaagtctgtaaattaggtgaagactgggtgacgtt

SEQ ID NO: 8015 - DNA, 80 bp, synthetic construct
  misc_feature 1..80: note = Synthetic: >NC_034517.1-cand-4310-4389
  source 1..80: mol_type = other DNA
tagggaagtgcttgctgctgcacatagctttgcatcaacatatgaggttagtcaaatagacctagacttatttcagacat

SEQ ID NO: 8016 - DNA, 80 bp, synthetic construct
  misc_feature 1..80: note = Synthetic: >NC_034517.1-cand-4390-4469
  source 1..80: mol_type = other DNA
tgacagattgtactttttcaaaggagtatgcttggaaggatttcttaaatagtgttcattgtgatgtcatacctacaaag

SEQ ID NO: 8017 - DNA, 80 bp, synthetic construct
  misc_feature 1..80: note = Synthetic: >NC_034517.1-cand-4470-4549
  source 1..80: mol_type = other DNA
caagtgcaaagggcaaaagttgcaagaacattcactgtcagagaaaaggatcaaattattcagaatagtatccctgcagt

SEQ ID NO: 8018 - DNA, 80 bp, synthetic construct
  misc_feature 1..80: note = Synthetic: >NC_034517.1-cand-4550-4629
  source 1..80: mol_type = other DNA
aataggttataagtttgcaatatcaattgatgaaatgtcagatgtccttgatgtggctagattccctgattcactggctg

SEQ ID NO: 8019 - DNA, 80 bp, synthetic construct
  misc_feature 1..80: note = Synthetic: >NC_034517.1-cand-4630-4709
  source 1..80: mol_type = other DNA
ttgatttaaagacaatgaaggatggagtgtatagagagttaggcttaaatatatctgaccctgaggttatgaagaaggtg

SEQ ID NO: 8020 - DNA, 80 bp, synthetic construct
  misc_feature 1..80: note = Synthetic: >NC_034517.1-cand-4710-4789
  source 1..80: mol_type = other DNA
gcacctatgttgtataagagtgcaaaatctagggtcgttatagttcaaggaaatgtagaaggcacagcagaatctatctg

SEQ ID NO: 8021 - DNA, 80 bp, synthetic construct
  misc_feature 1..80: note = Synthetic: >NC_034517.1-cand-4790-4869
  source 1..80: mol_type = other DNA
cgcctactggctgaagactatgtcattagttaagacaattagggttaagcctcataaagaggtcttgcgagctgtttcaa

SEQ ID NO: 8022 - DNA, 80 bp, synthetic construct
  misc_feature 1..80: note = Synthetic: >NC_034517.1-cand-4870-4949
  source 1..80: mol_type = other DNA
ttttcaatagaaaggaagatatcggtcaacagaaggacttggctgcattaaggttatgtattgaaatttggagatggtca

SEQ ID NO: 8023 - DNA, 80 bp, synthetic construct
  misc_feature 1..80: note = Synthetic: >NC_034517.1-cand-4950-5029
  source 1..80: mol_type = other DNA
aaagctaataatgccccatataaggagtggttccatgctctgtggtttgaggacaaaactttttcagagtggcttgatag

SEQ ID NO: 8024 - DNA, 80 bp, synthetic construct
  misc_feature 1..80: note = Synthetic: >NC_034517.1-cand-5030-5109
  source 1..80: mol_type = other DNA
attcatacgagttggtgtccctcctgttgacccagagatacaatgtgctgctttgatgattgcagacatcaaaggagatt

SEQ ID NO: 8025 - DNA, 80 bp, synthetic construct
  misc_feature 1..80: note = Synthetic: >NC_034517.1-cand-5110-5189
  source 1..80: mol_type = other DNA
tatctgttctacagcttcaggctaataggagagcatattcaggaaaacaatacgatgcttactgtgtccaaacatacaat

SEQ ID NO: 8026 - DNA, 80 bp, synthetic construct
  misc_feature 1..80: note = Synthetic: >NC_034555.1-cand-890-969
  source 1..80: mol_type = other DNA
tgggtgtagtctggtagaccatcttgactcaccgtcatcgatctgggtgtttgctggtgcacctgatcgatgtccgccaa

SEQ ID NO: 8027 - DNA, 80 bp, synthetic construct
  misc_feature 1..80: note = Synthetic: >NC_034555.1-cand-1010-1089
  source 1..80: mol_type = other DNA
cttctcaatcttacaagacatgagaaataccatcatggcttctaagactgttgggacatcagaagaaaagctaagaaaga

SEQ ID NO: 8028 - DNA, 80 bp, synthetic construct
  misc_feature 1..80: note = Synthetic: >NC_034555.1-cand-1050-1129
  source 1..80: mol_type = other DNA
tctaagactgttgggacatcagaagaaaagctaagaaagaagtcatctttttaccagtcatacttgaggaggacacaatc

SEQ ID NO: 8029 - DNA, 80 bp, synthetic construct
  misc_feature 1..80: note = Synthetic: >NC_034555.1-cand-1220-1299
  source 1..80: mol_type = other DNA
tatggacccagagctcagaaaccttgcacaactgctgattgaccagaaggtgaaagaaatttctaaccaagagcccttaa

SEQ ID NO: 8030 - DNA, 80 bp, synthetic construct
  misc_feature 1..80: note = Synthetic: >NC_034555.1-cand-1240-1319
  source 1..80: mol_type = other DNA
accttgcacaactgctgattgaccagaaggtgaaagaaatttctaaccaagagcccttaaagctctaattagttttagat

SEQ ID NO: 8031 - DNA, 80 bp, synthetic construct
  misc_feature 1..80: note = Synthetic: >NC_034555.1-cand-1330-1409
  source 1..80: mol_type = other DNA
acttgacaacactaatcattaggtaagtaattataagtaagtaactaattattactaacttgggttcagggccattgtaa

SEQ ID NO: 8032 - DNA, 80 bp, synthetic construct
  misc_feature 1..80: note = Synthetic: >NC_034555.1-cand-1420-1499
  source 1..80: mol_type = other DNA
tcagggtatgttaggtaagcacaattatcccacagtaagttaggttaaataagttaactaattaagttaattagttaagt

SEQ ID NO: 8033 - DNA, 80 bp, synthetic construct
  misc_feature 1..80: note = Synthetic: >NC_034555.1-cand-1510-1589
  source 1..80: mol_type = other DNA
ccttatgtatgtgaatattaatgtgaattatgtatactactgattattatcactgccatatcagggtaaagggccagggt

SEQ ID NO: 8034 - DNA, 80 bp, synthetic construct
  misc_feature 1..80: note = Synthetic: >NC_034555.1-cand-1620-1699
  source 1..80: mol_type = other DNA
ttaggaccaagctaccttaagtagcttttttttgtatatatggatgtagatatcatttgatcagttactaataagctatc

SEQ ID NO: 8035 - DNA, 80 bp, synthetic construct
  misc_feature 1..80: note = Synthetic: >NC_034555.1-cand-1660-1739
  source 1..80: mol_type = other DNA
tggatgtagatatcatttgatcagttactaataagctatcctttttttccttccttctctcctttcttgcttattaacaa

SEQ ID NO: 8036 - DNA, 80 bp, synthetic construct
  misc_feature 1..80: note = Synthetic: >NC_034555.1-cand-1720-1799
  source 1..80: mol_type = other DNA
cctttcttgcttattaacaacaacatactacctcaaattttcaaaaacaacacactacctctttattactacctcatgaa

SEQ ID NO: 8037 - DNA, 80 bp, synthetic construct
  misc_feature 1..80: note = Synthetic: >NC_034556.1-cand-0-79
  source 1..80: mol_type = other DNA
agtagactccggaagagacaacactgatcaaaatggaaaaatacagagaaattcacaggaatctgaaggagtttgctact

SEQ ID NO: 8038 - DNA, 80 bp, synthetic construct
  misc_feature 1..80: note = Synthetic: >NC_034556.1-cand-80-159
  source 1..80: mol_type = other DNA
aactcgctgactgcagttgagtgtatagattacctagatagactttatgccgtacggcatgaccttgtcgaccaaatgat

SEQ ID NO: 8039 - DNA, 80 bp, synthetic construct
  misc_feature 1..80: note = Synthetic: >NC_034556.1-cand-160-239
  source 1..80: mol_type = other DNA
aaaacatgattggtctgataacaaggatgttgaagagcctatagcaaaagttcttctctttgctgggatacctaataatg

SEQ ID NO: 8040 - DNA, 80 bp, synthetic construct
  misc_feature 1..80: note = Synthetic: >NC_034556.1-cand-240-319
  source 1..80: mol_type = other DNA
tcattactgcattagaaaagaaaataattccagatcatcctagtggaaagacattgaaggcatttttccggatgacccct

SEQ ID NO: 8041 - DNA, 80 bp, synthetic construct
  misc_feature 1..80: note = Synthetic: >NC_034556.1-cand-320-399
  source 1..80: mol_type = other DNA
gacaactatcggattcaaggaaaccttattgagtttgtagaggtaactgttacttcagatgtagacaaaggaacaagaga

SEQ ID NO: 8042 - DNA, 80 bp, synthetic construct
  misc_feature 1..80: note = Synthetic: >NC_034556.1-cand-4240-4319
  source 1..80: mol_type = other DNA
attgagatttagaatgcaggctaaacagcatatgaaagtctgtaggctagataatgaatgggtcacttttagagaagttc

SEQ ID NO: 8043 - DNA, 80 bp, synthetic construct
  misc_feature 1..80: note = Synthetic: >NC_034556.1-cand-4320-4399
  source 1..80: mol_type = other DNA
tagcagcagcaaatagttttgcagaaagttatgaacctacacagaatgacattgatctatttaaaacgttaactgagtgt

SEQ ID NO: 8044 - DNA, 80 bp, synthetic construct
  misc_feature 1..80: note = Synthetic: >NC_034556.1-cand-4410-4489
  source 1..80: mol_type = other DNA
aagaatatgcctggaaagattttctaaataatgttaattgtgatgttatcccggttaagcaagttcaaagagcaaaagtg

SEQ ID NO: 8045 - DNA, 80 bp, synthetic construct
  misc_feature 1..80: note = Synthetic: >NC_034556.1-cand-4490-4569
  source 1..80: mol_type = other DNA
gcaagaacattcacagttagagaaaaggatcaggtcatacagaataatataccagcagttatcgggtataagtttgctat

SEQ ID NO: 8046 - DNA, 80 bp, synthetic construct
  misc_feature 1..80: note = Synthetic: >NC_034556.1-cand-4570-4649
  source 1..80: mol_type = other DNA
tacagttgatgagatgtcagatgttttagattctgctagattcccagattctctggccgtggatttaaaaactatgaaag

SEQ ID NO: 8047 - DNA, 80 bp, synthetic construct
  misc_feature 1..80: note = Synthetic: >NC_034556.1-cand-4660-4739
  source 1..80: mol_type = other DNA
ccgggagcttggtttagacatatcattacctgatgtaatgaaaaaggttgcccctatgttatacaaaagttcaaagtcaa

SEQ ID NO: 8048 - DNA, 80 bp, synthetic construct
  misc_feature 1..80: note = Synthetic: >NC_034556.1-cand-4730-4809
  source 1..80: mol_type = other DNA
tcaaagtcaagagttgtaatcgtacaaggcaatgttgaaggaacagcagaagctatctgtgcatattggcttcgttctat

SEQ ID NO: 8049 - DNA, 80 bp, synthetic construct
  misc_feature 1..80: note = Synthetic: >NC_034556.1-cand-4810-4889
  source 1..80: mol_type = other DNA
gtcattaatcaaaaccattagagtcaaacctcataaagaagttctaaaggcagtctctatttttaataggaaggaagaca

SEQ ID NO: 8050 - DNA, 80 bp, synthetic construct
  misc_feature 1..80: note = Synthetic: >NC_034556.1-cand-4890-4969
  source 1..80: mol_type = other DNA
tcggtcaacaaaaagatttatctgcattaaaattatgtattgaagtgtggaggtgggccaaagccaataacgcaccatat

SEQ ID NO: 8051 - DNA, 80 bp, synthetic construct
  misc_feature 1..80: note = Synthetic: >NC_034556.1-cand-4970-5049
  source 1..80: mol_type = other DNA
cgtgactggttccatgcattgtggtttgaagacaaaacattctctgaatggcttgacagatttattagagttggtgtacc

SEQ ID NO: 8052 - DNA, 80 bp, synthetic construct
  misc_feature 1..80: note = Synthetic: >NC_034556.1-cand-5020-5099
  source 1..80: mol_type = other DNA
gcttgacagatttattagagttggtgtacctccagtagaccctgagattcaatgtgcagccctgatgattgctgatgtga

SEQ ID NO: 8053 - DNA, 80 bp, synthetic construct
  misc_feature 1..80: note = Synthetic: >NC_034556.1-cand-5130-5209
  source 1..80: mol_type = other DNA
ccaacagacgtgcatattctggaaagcaatatgatgcttactgtgtgcaaacttataatgaagaaactaaattatatgag

SEQ ID NO: 8054 - DNA, 80 bp, synthetic construct
  misc_feature 1..80: note = Synthetic: >NC_034556.1-cand-5210-5289
  source 1..80: mol_type = other DNA
ggagacttaagagtaacttttaatttcggtgtcgattgtgcaagattagaaatattctgggacaaacgcacatatattct

SEQ ID NO: 8055 - DNA, 80 bp, synthetic construct
  misc_feature 1..80: note = Synthetic: >NC_034556.1-cand-5290-5369
  source 1..80: mol_type = other DNA
tgaaacatccatcacccaaaaacacgtattaaagatcatgatggatgaagtctcaaaagagctgttaaggtgtggaatga

SEQ ID NO: 8056 - DNA, 80 bp, synthetic construct
  misc_feature 1..80: note = Synthetic: >NC_034556.1-cand-5360-5439
  source 1..80: mol_type = other DNA
tgtggaatgagatttaacacagagcaggtgaatagtgttaagcatttggtattatttaaaacagaatccggttttgaatg

SEQ ID NO: 8057 - DNA, 80 bp, synthetic construct
  misc_feature 1..80: note = Synthetic: >NC_034556.1-cand-5450-5529
  source 1..80: mol_type = other DNA
aatgtgccatgtattgtttacaagaattgtgcccttagaactgggcttcgaactaatcaggccattaatcataagttcat

SEQ ID NO: 8058 - DNA, 80 bp, synthetic construct
  misc_feature 1..80: note = Synthetic: >NC_034563.1-cand-2880-2959
  source 1..80: mol_type = other DNA
ataactaaagatattgattttgaaaatcttgctgagaatccatgccagataggcctacaagtatcagccatagaaggagc

SEQ ID NO: 8059 - DNA, 80 bp, synthetic construct
  misc_feature 1..80: note = Synthetic: >NC_034563.1-cand-2970-3049
  source 1..80: mol_type = other DNA
ggtgtgggtttcacattgacatgtcaagtgtctcttacagagtgcccaacattcctaacatccataaaggcttgtgacat

SEQ ID NO: 8060 - DNA, 80 bp, synthetic construct
  misc_feature 1..80: note = Synthetic: >NC_034563.1-cand-3040-3119
  source 1..80: mol_type = other DNA
cttgtgacatggctatctgttatggtgcagagagtgtgacactggttagagggcgaaatacagttaaaattagcggcaaa

SEQ ID NO: 8061 - DNA, 80 bp, synthetic construct
  misc_feature 1..80: note = Synthetic: >NC_034563.1-cand-3120-3199
  source 1..80: mol_type = other DNA
ggtgggcatagtggctcttcctttaagcgttgtcatgggacagactgctctgctacagggctacaagcaactgcaccaca

SEQ ID NO: 8062 - DNA, 80 bp, synthetic construct
  misc_feature 1..80: note = Synthetic: >NC_034563.1-cand-3200-3279
  source 1..80: mol_type = other DNA
ccttgatagggttgcaggtgtaagcgagcttagtaatgaaaaagtttatgatgatggtgctcctcaatgtgggattacat

SEQ ID NO: 8063 - DNA, 80 bp, synthetic construct
  misc_feature 1..80: note = Synthetic: >NC_034563.1-cand-3280-3359
  source 1..80: mol_type = other DNA
gtcggtttgtaaagtctggagagtgggttaagggtatttttaatggcaattggattgttctgattgttctatgtgtgtta

SEQ ID NO: 8064 - DNA, 80 bp, synthetic construct
  misc_feature 1..80: note = Synthetic: >NC_034563.1-cand-3360-3439
  source 1..80: mol_type = other DNA
ctcttaatctctctaattctcttaagtattttttgtcctgtccgtaaacacaaaaaatcataatcacactacctaaccaa

SEQ ID NO: 8065 - DNA, 80 bp, synthetic construct
  misc_feature 1..80: note = Synthetic: >NC_034563.1-cand-3440-3519
  source 1..80: mol_type = other DNA
acaataatgtacataccatatgactttactaattcttttctatttactctttatttgactattatttttctttttttaaa

SEQ ID NO: 8066 - DNA, 80 bp, synthetic construct
  misc_feature 1..80: note = Synthetic: >NC_035889.1-cand-0-79
  source 1..80: mol_type = other DNA
gttgatctgtgtgaatcagactgcgacagttcgagtttgaagcgaaagctagcaacagtatcaacaggttttattttgga

SEQ ID NO: 8067 - DNA, 80 bp, synthetic construct
  misc_feature 1..80: note = Synthetic: >NC_035889.1-cand-80-159
  source 1..80: mol_type = other DNA
tttggaaacgagagtttctggtcatgaaaaacccaaaaaagaaatccggaggattccggattgtcaatatgctaaaacgc

SEQ ID NO: 8068 - DNA, 80 bp, synthetic construct
  misc_feature 1..80: note = Synthetic: >NC_035889.1-cand-190-269
  source 1..80: mol_type = other DNA
ttgaagaggctgccagccggacttctgctgggtcatgggcccatcaggatggtcttggcaattctagcctttttgagatt

SEQ ID NO: 8069 - DNA, 80 bp, synthetic construct
  misc_feature 1..80: note = Synthetic: >NC_035889.1-cand-230-309
  source 1..80: mol_type = other DNA
ccatcaggatggtcttggcaattctagcctttttgagattcacggcaatcaagccatcactgggtctcatcaatagatgg

SEQ ID NO: 8070 - DNA, 80 bp, synthetic construct
  misc_feature 1..80: note = Synthetic: >NC_035889.1-cand-410-489
  source 1..80: mol_type = other DNA
gacgaggcgcagatactagtgtcggaattgttggcctcctgctgaccacagctatggcagcggaggtcactagacgtggg

SEQ ID NO: 8071 - DNA, 80 bp, synthetic construct
  misc_feature 1..80: note = Synthetic: >NC_035889.1-cand-440-519
  source 1..80: mol_type = other DNA
ttggcctcctgctgaccacagctatggcagcggaggtcactagacgtgggagtgcatactatatgtacttggacagaaac

SEQ ID NO: 8072 - DNA, 80 bp, synthetic construct
  misc_feature 1..80: note = Synthetic: >NC_035889.1-cand-560-639
  source 1..80: mol_type = other DNA
tgaataagtgttatatacagatcatggatcttggacacatgtgtgatgccaccatgagctatgaatgccctatgctggat

SEQ ID NO: 8073 - DNA, 80 bp, synthetic construct
  misc_feature 1..80: note = Synthetic: >NC_035889.1-cand-650-729
  source 1..80: mol_type = other DNA
aaccagatgacgtcgattgttggtgcaacacgacgtcaacttgggttgtgtacggaacctgccatcacaaaaaaggtgaa

SEQ ID NO: 8074 - DNA, 80 bp, synthetic construct
  misc_feature 1..80: note = Synthetic: >NC_035889.1-cand-7260-7339
  source 1..80: mol_type = other DNA
ggcgcactacatgtacttgatcccagggctgcaggcagcagctgcgcgtgctgcccagaagagaacggcagctggcatca

SEQ ID NO: 8075 - DNA, 80 bp, synthetic construct
  misc_feature 1..80: note = Synthetic: >NC_035889.1-cand-7340-7419
  source 1..80: mol_type = other DNA
tgaagaaccctgttgtggatggaatagtggtgactgacattgacacaatgacaattgacccccaagtggagaaaaagatg

SEQ ID NO: 8076 - DNA, 80 bp, synthetic construct
  misc_feature 1..80: note = Synthetic: >NC_035889.1-cand-7400-7479
  source 1..80: mol_type = other DNA
cccaagtggagaaaaagatgggacaggtgctactcatagcagtagcagtctccagcgccatactgtcgcggaccgcctgg

SEQ ID NO: 8077 - DNA, 80 bp, synthetic construct
  misc_feature 1..80: note = Synthetic: >NC_035889.1-cand-7500-7579
  source 1..80: mol_type = other DNA
cctgatcacagccgcaacttccactttgtgggaaggctctccgaacaagtactggaactcctctacagccacttcactgt

SEQ ID NO: 8078 - DNA, 80 bp, synthetic construct
  misc_feature 1..80: note = Synthetic: >NC_035889.1-cand-7510-7589
  source 1..80: mol_type = other DNA
gccgcaacttccactttgtgggaaggctctccgaacaagtactggaactcctctacagccacttcactgtgtaacatttt

SEQ ID NO: 8079 - DNA, 80 bp, synthetic construct
  misc_feature 1..80: note = Synthetic: >NC_035889.1-cand-7670-7749
  source 1..80: mol_type = other DNA
gaacaggagagaccctgggagagaaatggaaggcccgcttgaaccagatgtcggccctggagttctactcctacaaaaag

SEQ ID NO: 8080 - DNA, 80 bp, synthetic construct
  misc_feature 1..80: note = Synthetic: >NC_035889.1-cand-7750-7829
  source 1..80: mol_type = other DNA
tcaggcatcaccgaggtgtgcagagaagaggcccgccgcgccctcaaggatggtgtggcaacgggaggccatgctgtgtc

SEQ ID NO: 8081 - DNA, 80 bp, synthetic construct
  misc_feature 1..80: note = Synthetic: >NC_035889.1-cand-7780-7859
  source 1..80: mol_type = other DNA
gcccgccgcgccctcaaggatggtgtggcaacgggaggccatgctgtgtcccgaggaagtgcaaagctgagatggttggt

SEQ ID NO: 8082 - DNA, 80 bp, synthetic construct
  misc_feature 1..80: note = Synthetic: >NC_035889.1-cand-7920-7999
  source 1..80: mol_type = other DNA
ctggagttactacgccgccaccatccgcaaagttcaagaagtgaaaggatacacaaaaggaggccctggtcatgaagaac

SEQ ID NO: 8083 - DNA, 80 bp, synthetic construct
  misc_feature 1..80: note = Synthetic: >NC_035889.1-cand-7970-8049
  source 1..80: mol_type = other DNA
acacaaaaggaggccctggtcatgaagaacccgtgttggtgcaaagctatgggtggaacatagtccgtcttaagagtggg

SEQ ID NO: 8084 - DNA, 80 bp, synthetic construct
  misc_feature 1..80: note = Synthetic: >NC_035889.1-cand-8070-8149
  source 1..80: mol_type = other DNA
ggctgagccgtgtgacacgttgctgtgtgacataggtgagtcatcatctagtcctgaagtggaagaagcacggacgctca

SEQ ID NO: 8085 - DNA, 80 bp, synthetic construct
  misc_feature 1..80: note = Synthetic: >NC_035889.1-cand-8170-8249
  source 1..80: mol_type = other DNA
gattggcttgaaaaaagaccaggagccttttgtataaaagtgttgtgcccatacaccagcactatgatggaaaccctgga

SEQ ID NO: 8086 - DNA, 80 bp, synthetic construct
  misc_feature 1..80: note = Synthetic: >NC_035889.1-cand-8190-8269
  source 1..80: mol_type = other DNA
aggagccttttgtataaaagtgttgtgcccatacaccagcactatgatggaaaccctggagcgactgcagcgtaggtatg

SEQ ID NO: 8087 - DNA, 80 bp, synthetic construct
  misc_feature 1..80: note = Synthetic: >NC_035889.1-cand-8300-8379
  source 1..80: mol_type = other DNA
gcaactctacacatgagatgtactgggtctctggagcgaaaagcaacaccataaaaagtgtgtccaccacgagccagctc

SEQ ID NO: 8088 - DNA, 80 bp, synthetic construct
  misc_feature 1..80: note = Synthetic: >NC_035889.1-cand-8390-8469
  source 1..80: mol_type = other DNA
gcatggacgggcctaggaggccagtgaaatatgaggaggatgtgaatctcggctctggcacgcgggctgtggtaagctgc

SEQ ID NO: 8089 - DNA, 80 bp, synthetic construct
  misc_feature 1..80: note = Synthetic: >NC_035889.1-cand-8470-8549
  source 1..80: mol_type = other DNA
gctgaagctcccaacatgaagatcattggtaaccgcattgaaaggatccgcagtgagcacgcggaaacgtggttctttga

SEQ ID NO: 8090 - DNA, 80 bp, synthetic construct
  misc_feature 1..80: note = Synthetic: >NC_038299.1-cand-5040-5119
  source 1..80: mol_type = other DNA
gggtgattcctgttgatccagagatacagtgtatgggtctattgctttatgatgtgctaggctatagaagtgtattacag

SEQ ID NO: 8091 - DNA, 80 bp, synthetic construct
  misc_feature 1..80: note = Synthetic: >NC_038299.1-cand-5120-5199
  source 1..80: mol_type = other DNA
atgcaagcaaatagaagagcttattcaggtaagcaatatgatgcctattgtgtgcaaacatataatgaggaaacaaagct

SEQ ID NO: 8092 - DNA, 80 bp, synthetic construct
  misc_feature 1..80: note = Synthetic: >NC_038299.1-cand-5200-5279
  source 1..80: mol_type = other DNA
ttatgagggtgatttgagggtaacatttaattttgggttagactgtgcaaggcttgagatattttgggacaagaaagagt

SEQ ID NO: 8093 - DNA, 80 bp, synthetic construct
  misc_feature 1..80: note = Synthetic: >NC_038299.1-cand-5280-5359
  source 1..80: mol_type = other DNA
atgtgcttgagacttctattacacagaagcatgtgttaagactgatgatggaagaggtctcaaaagaactaacgaggtgc

SEQ ID NO: 8094 - DNA, 80 bp, synthetic construct
  misc_feature 1..80: note = Synthetic: >NC_038299.1-cand-5350-5429
  source 1..80: mol_type = other DNA
aacgaggtgcggtatgaggtttaagacggagcaggtaaatcaaactaggagcttagtcctgtttaagactgaatctgggt

SEQ ID NO: 8095 - DNA, 80 bp, synthetic construct
  misc_feature 1..80: note = Synthetic: >NC_038299.1-cand-5440-5519
  source 1..80: mol_type = other DNA
taagcctaatgtcccatgtattgtctacaaacactgcgcactgaggacaggattgaggacaaagcagcctattaataaag

SEQ ID NO: 8096 - DNA, 80 bp, synthetic construct
  misc_feature 1..80: note = Synthetic: >NC_038299.1-cand-5520-5599
  source 1..80: mol_type = other DNA
aatttatgattaacatccaatcagaaggttttagagcgattgcacagatggatgtagagagcccaaggttcctactagct

SEQ ID NO: 8097 - DNA, 80 bp, synthetic construct
  misc_feature 1..80: note = Synthetic: >NC_038299.1-cand-5600-5679
  source 1..80: mol_type = other DNA
catgcttatcatactctaagagatgtaagattccaagcagtccaggcagtaggaaatgtgtggtttaaaacagaacagca

SEQ ID NO: 8098 - DNA, 80 bp, synthetic construct
  misc_feature 1..80: note = Synthetic: >NC_038299.1-cand-5680-5759
  source 1..80: mol_type = other DNA
taaactcttcattaatcctataatttcctctggtctccttgagaatttcatgaaaggattgcctgcagcaataccgcctg

SEQ ID NO: 8099 - DNA, 80 bp, synthetic construct
  misc_feature 1..80: note = Synthetic: >NC_038299.1-cand-5740-5819
  source 1..80: mol_type = other DNA
gcctgcagcaataccgcctgctgcatattcattaataatgaataaggcaaagatctctgtagatttattcatgtttaatg

SEQ ID NO: 8100 - DNA, 80 bp, synthetic construct
  misc_feature 1..80: note = Synthetic: >NC_038299.1-cand-5820-5899
  source 1..80: mol_type = other DNA
agttgctagcattaatcaacaaaaataatatcttagatttgaatggtatagaagagacatcagaaggttatagtacagtc

SEQ ID NO: 8101 - DNA, 80 bp, synthetic construct
  misc_feature 1..80: note = Synthetic: >NC_038299.1-cand-5900-5979
  source 1..80: mol_type = other DNA
acatccatgtcaagcaaacaatggtctgaggaaatgagtttgatgtctgatgatgatattgatgatgatgaggaatttac

SEQ ID NO: 8102 - DNA, 80 bp, synthetic construct
  misc_feature 1..80: note = Synthetic: >NC_038299.1-cand-5990-6069
  source 1..80: mol_type = other DNA
gatgatattgattttgagcaggttgatttagatgaggacatacagcatttcttgcaggatgaatctgcatatgttggtga

SEQ ID NO: 8103 - DNA, 80 bp, synthetic construct
  misc_feature 1..80: note = Synthetic: >NC_038299.1-cand-6030-6109
  source 1..80: mol_type = other DNA
tacagcatttcttgcaggatgaatctgcatatgttggtgaccttttaatccaaactgaagaagtggaggttaagaagata

SEQ ID NO: 8104 - DNA, 80 bp, synthetic construct
  misc_feature 1..80: note = Synthetic: >NC_038299.1-cand-6150-6229
  source 1..80: mol_type = other DNA
agagttgggtatcaaagggccttgctatagataaagtttataatcccgttgggatcttattaatgactaggtatatgtca

SEQ ID NO: 8105 - DNA, 80 bp, synthetic construct
  misc_feature 1..80: note = Synthetic: >NC_038299.1-cand-6230-6309
  source 1..80: mol_type = other DNA
aaaaattataatttccatgctgtccctttagcactgatgaacccatatgacctgacagaatttgagagtgttgtgaaagg

SEQ ID NO: 8106 - DNA, 80 bp, synthetic construct
  misc_feature 1..80: note = Synthetic: >NC_038312.1-cand-1940-2019
  source 1..80: mol_type = other DNA
gatctcttagaatttcactcatgtacacaggaccagccctatccagtgcaaagatcattttagcatacactccccctggc

SEQ ID NO: 8107 - DNA, 80 bp, synthetic construct
  misc_feature 1..80: note = Synthetic: >NC_038312.1-cand-2020-2099
  source 1..80: mol_type = other DNA
acgcgtggtccagaagatagaaaggaagcaatgttgggaacacatgttgtatgggatattggcttacaatccaccatagt

SEQ ID NO: 8108 - DNA, 80 bp, synthetic construct
  misc_feature 1..80: note = Synthetic: >NC_038312.1-cand-2100-2179
  source 1..80: mol_type = other DNA
tatgaccattccatggacatcaggtgtacaatttagatacacagaccctgatacttatactagtgctgggtatctatcat

SEQ ID NO: 8109 - DNA, 80 bp, synthetic construct
  misc_feature 1..80: note = Synthetic: >NC_038312.1-cand-2180-2259
  source 1..80: mol_type = other DNA
gctggtatcagacatcactcatacttccaccacaaaccagtggtcaagtctaccttttatcttttatcagtgcttgtcct

SEQ ID NO: 8110 - DNA, 80 bp, synthetic construct
  misc_feature 1..80: note = Synthetic: >NC_038312.1-cand-2260-2339
  source 1..80: mol_type = other DNA
gatttcaaacttagattaatgaaagacacacaaaccatctcgcagactgatgctttgacagagggtcttagtgacgagtt

SEQ ID NO: 8111 - DNA, 80 bp, synthetic construct
  misc_feature 1..80: note = Synthetic: >NC_038312.1-cand-2340-2419
  source 1..80: mol_type = other DNA
ggaggaagtcattgtcgagaaaactaaacagacattggcctcagtctcctcaggacctaagcacactcagagtgttcctg

SEQ ID NO: 8112 - DNA, 80 bp, synthetic construct
  misc_feature 1..80: note = Synthetic: >NC_038312.1-cand-2420-2499
  source 1..80: mol_type = other DNA
ctctaactgctaatgaaacaggtgccacactccccacacgaccatcagacaacgtggaaactagaactacttacatgcat

SEQ ID NO: 8113 - DNA, 80 bp, synthetic construct
  misc_feature 1..80: note = Synthetic: >NC_038312.1-cand-2500-2579
  source 1..80: mol_type = other DNA
ttcaatggttcagaaacagatgtagagagcttcctcggcagagcagcttgtgtgcatgtgacagaaatcaaaaacaagaa

SEQ ID NO: 8114 - DNA, 80 bp, synthetic construct
  misc_feature 1..80: note = Synthetic: >NC_038312.1-cand-2620-2699
  source 1..80: mol_type = other DNA
aatgattggaaaattaacctttcaagtcttgtccagcttagaaagaagttagaactctttacttatgtcagatttgactc

SEQ ID NO: 8115 - DNA, 80 bp, synthetic construct
  misc_feature 1..80: note = Synthetic: >NC_038312.1-cand-2670-2749
  source 1..80: mol_type = other DNA
agaactctttacttatgtcagatttgactcagaatacactattctggccacggcttcacaaccagaggcgtccagttatt

SEQ ID NO: 8116 - DNA, 80 bp, synthetic construct
  misc_feature 1..80: note = Synthetic: >NC_038312.1-cand-2760-2839
  source 1..80: mol_type = other DNA
aacagtccaggcaatgtatgtgcctcccggtgcacctaaccctaaggaatgggatgattacacatggcaaagtgcttcta

SEQ ID NO: 8117 - DNA, 80 bp, synthetic construct
  misc_feature 1..80: note = Synthetic: >NC_038312.1-cand-2840-2919
  source 1..80: mol_type = other DNA
accccagtgtgtttttcaaagttggtgagacatccaggtttagtgtcccttttgtaggcatagcatcagcatataattgt

SEQ ID NO: 8118 - DNA, 80 bp, synthetic construct
  misc_feature 1..80: note = Synthetic: >NC_038312.1-cand-2920-2999
  source 1..80: mol_type = other DNA
ttttatgatgggtactcacatgatgatccagacactccttatggcataacagtactaaatcacatgggtagcatggcatt

SEQ ID NO: 8119 - DNA, 80 bp, synthetic construct
  misc_feature 1..80: note = Synthetic: >NC_038312.1-cand-3000-3079
  source 1..80: mol_type = other DNA
cagagtggttaatgaacatgatgttcataccacgattgtgaaaattagagtttaccacagagccaaacatgtggaagcat

SEQ ID NO: 8120 - DNA, 80 bp, synthetic construct
  misc_feature 1..80: note = Synthetic: >NC_038312.1-cand-3080-3159
  source 1..80: mol_type = other DNA
ggattccaagagcacctagagccttgccatacgtgtctattggacgcactaactaccccagagattcaaaaacaataata

SEQ ID NO: 8121 - DNA, 80 bp, synthetic construct
  misc_feature 1..80: note = Synthetic: >NC_038312.1-cand-3130-3209
  source 1..80: mol_type = other DNA
aactaccccagagattcaaaaacaataataaagaagaggacaaacataaaaacatatgggctaggacccaggtttggtgg

SEQ ID NO: 8122 - DNA, 80 bp, synthetic construct
  misc_feature 1..80: note = Synthetic: >NC_038506.1-cand-370-449
  source 1..80: mol_type = other DNA
catcagaggcacatgcatcctagcatctgatctatatgacacattaaaacgagttaagaaaacagtcctttgttatgatt

SEQ ID NO: 8123 - DNA, 80 bp, synthetic construct
  misc_feature 1..80: note = Synthetic: >NC_038506.1-cand-450-529
  source 1..80: mol_type = other DNA
tgacctgtaaccaaacacaatgtcaaccaacagtatacctcatcactcctgttgggacatgtatgtcaatcagaagttgt

SEQ ID NO: 8124 - DNA, 80 bp, synthetic construct
  misc_feature 1..80: note = Synthetic: >NC_038506.1-cand-530-609
  source 1..80: mol_type = other DNA
atggctaaccttttaagcaatagaattcaaattacatttgagaaaacacactgcgttacaggtcagctagttgagggaca

SEQ ID NO: 8125 - DNA, 80 bp, synthetic construct
  misc_feature 1..80: note = Synthetic: >NC_038506.1-cand-610-689
  source 1..80: mol_type = other DNA
atgtttcaatccatcccactcacttactttatcccagccaccacatacatatgatgttgtaacactgcctacaacttgtt

SEQ ID NO: 8126 - DNA, 80 bp, synthetic construct
  misc_feature 1..80: note = Synthetic: >NC_038506.1-cand-690-769
  source 1..80: mol_type = other DNA
tttttactgcaaagaaagctgatcaatataagattgttaaaacctttgaaggaatcataagcaagactggctgtacagaa

SEQ ID NO: 8127 - DNA, 80 bp, synthetic construct
  misc_feature 1..80: note = Synthetic: >NC_038506.1-cand-760-839
  source 1..80: mol_type = other DNA
ctgtacagaaaatagtatccaagggtattatgtctgttttattggaagccactctgagcctttgatcatccccactctag

SEQ ID NO: 8128 - DNA, 80 bp, synthetic construct
  misc_feature 1..80: note = Synthetic: >NC_038506.1-cand-840-919
  source 1..80: mol_type = other DNA
aagatataagatcagcagaattagccagtcgtatgctgctccatccaagaggtgaagatcatgatccactccaaaatgcc

SEQ ID NO: 8129 - DNA, 80 bp, synthetic construct
  misc_feature 1..80: note = Synthetic: >NC_038506.1-cand-920-999
  source 1..80: mol_type = other DNA
caggcagttttaaggattgttgggccaataacagcaaaagttcctagcagtagttcaactgaaactttacaaggcattgc

SEQ ID NO: 8130 - DNA, 80 bp, synthetic construct
  misc_feature 1..80: note = Synthetic: >NC_038506.1-cand-1000-1079
  source 1..80: mol_type = other DNA
ttttgcaggtgttcccatgtatagttctttctcaactcttgtccggaatgctgatcctgaatatgtgttttccccgggta

SEQ ID NO: 8131 - DNA, 80 bp, synthetic construct
  misc_feature 1..80: note = Synthetic: >NC_038506.1-cand-1080-1159
  source 1..80: mol_type = other DNA
ttataccagaatcaaaccaaagtgtgtgtgataaaaagacacttccactcacatggacagggtacttgccaatttctggg

SEQ ID NO: 8132 - DNA, 80 bp, synthetic construct
  misc_feature 1..80: note = Synthetic: >NC_038506.1-cand-1160-1239
  source 1..80: mol_type = other DNA
gaaatggaaaaggtaacaggttgcacagttttttgcacacttgcagggcctggagcaaattgtgaggcatactctgaaag

SEQ ID NO: 8133 - DNA, 80 bp, synthetic construct
  misc_feature 1..80: note = Synthetic: >NC_038506.1-cand-1210-1289
  source 1..80: mol_type = other DNA
tggagcaaattgtgaggcatactctgaaagtgggattttcaatatcagttcacctacatgccttgtcaacaaagtacaaa

SEQ ID NO: 8134 - DNA, 80 bp, synthetic construct
  misc_feature 1..80: note = Synthetic: >NC_038506.1-cand-1310-1389
  source 1..80: mol_type = other DNA
aagattaactttatgtgtcagcgtattgacaacaacgtggtggtttactgtaatggacagaagaaagtcatcctaaccaa

SEQ ID NO: 8135 - DNA, 80 bp, synthetic construct
  misc_feature 1..80: note = Synthetic: >NC_038506.1-cand-1390-1469
  source 1..80: mol_type = other DNA
aacacttgttattggccagtgcatatacacatttacaagcttgttttcattaatgcctgatgttgcacattcccttgctg

SEQ ID NO: 8136 - DNA, 80 bp, synthetic construct
  misc_feature 1..80: note = Synthetic: >NC_038506.1-cand-1470-1549
  source 1..80: mol_type = other DNA
ttgagctatgtgtacctgggcttcatggctgggctacaatagctttattgtcaaccttttgttttggatggcttctaatc

SEQ ID NO: 8137 - DNA, 80 bp, synthetic construct
  misc_feature 1..80: note = Synthetic: >NC_038506.1-cand-1550-1629
  source 1..80: mol_type = other DNA
cctggcataacactaattgtgcttaagatattaaaaatccttacttattcttgctcacactattcaagtgaatcaaaatt

SEQ ID NO: 8138 - DNA, 80 bp, synthetic construct
  misc_feature 1..80: note = Synthetic: >NC_044856.1-cand-6670-6749
  source 1..80: mol_type = other DNA
cttgtttattttatgtctaactttccaattgggcacactagttccagtatggcacaagtcccatgcaccctccctcagga

SEQ ID NO: 8139 - DNA, 80 bp, synthetic construct
  misc_feature 1..80: note = Synthetic: >NC_044856.1-cand-6710-6789
  source 1..80: mol_type = other DNA
gttccagtatggcacaagtcccatgcaccctccctcaggaatttgtggcacactttgttaatgaacaggcccctgttcga

SEQ ID NO: 8140 - DNA, 80 bp, synthetic construct
  misc_feature 1..80: note = Synthetic: >NC_044856.1-cand-6810-6889
  source 1..80: mol_type = other DNA
ctatgtggaccctgacacacacagaaatcttggtgagttcaaattataccctgaaggttacataacctgtgtgccaaaca

SEQ ID NO: 8141 - DNA, 80 bp, synthetic construct
  misc_feature 1..80: note = Synthetic: >NC_044856.1-cand-6890-6969
  source 1..80: mol_type = other DNA
cgggtggtggtggcccccaaagtctcccaaccaatggagtatttatcttctcatcttgggtatccagatattatcaactt

SEQ ID NO: 8142 - DNA, 80 bp, synthetic construct
  misc_feature 1..80: note = Synthetic: >NC_044856.1-cand-6970-7049
  source 1..80: mol_type = other DNA
aagcctgtgggaacggctggaccagccaggaggcttggagttagaagggtataatggcccaagcaatctttggagcaata

SEQ ID NO: 8143 - DNA, 80 bp, synthetic construct
  misc_feature 1..80: note = Synthetic: >NC_044856.1-cand-7050-7129
  source 1..80: mol_type = other DNA
gctgccactgccgcaggcagtgcggtgggagcaggaattcaagcagggactgaggctgcattgcaataccaaaggtatca

SEQ ID NO: 8144 - DNA, 80 bp, synthetic construct
  misc_feature 1..80: note = Synthetic: >NC_044856.1-cand-7110-7189
  source 1..80: mol_type = other DNA
ttgcaataccaaaggtatcaacaagatttgaccctccaacaaaattcatttaaacatgatgaaagaatgctaggcctgca

SEQ ID NO: 8145 - DNA, 80 bp, synthetic construct
  misc_feature 1..80: note = Synthetic: >NC_044856.1-cand-7210-7289
  source 1..80: mol_type = other DNA
tattgcaaaagaatctgtcaactaggtataatcttttacttaattcaggtatgtcgtcagctgatgctgcccgcaccatt

SEQ ID NO: 8146 - DNA, 80 bp, synthetic construct
  misc_feature 1..80: note = Synthetic: >NC_044856.1-cand-7290-7369
  source 1..80: mol_type = other DNA
gtcggtgctcccgcctcaaaggttgtggactggaatggtgttaggattgcagccccaacatcgaccgctaccacactgcg

SEQ ID NO: 8147 - DNA, 80 bp, synthetic construct
  misc_feature 1..80: note = Synthetic: >NC_044856.1-cand-7370-7449
  source 1..80: mol_type = other DNA
gtcaggcaactttatgaacatacctgtctttcaaaagactaaacagcagtcatcttctgtgctgtcttctggatattcta

SEQ ID NO: 8148 - DNA, 80 bp, synthetic construct
  misc_feature 1..80: note = Synthetic: >NC_044856.1-cand-7450-7529
  source 1..80: mol_type = other DNA
accctaattatgattcctctactcttgtgtctagaactactcaatgggttgaatcacagaattcatctagaagcttgcct

SEQ ID NO: 8149 - DNA, 80 bp, synthetic construct
  misc_feature 1..80: note = Synthetic: >NC_044856.1-cand-7530-7609
  source 1..80: mol_type = other DNA
ccctttcatccttcagctttaaggaccacgtgggttacaccacctggttcaacctcaacttctacttattcatctgtgtc

SEQ ID NO: 8150 - DNA, 80 bp, synthetic construct
  misc_feature 1..80: note = Synthetic: >NC_044856.1-cand-7610-7689
  source 1..80: mol_type = other DNA
ttcagcgccccggtttttcaacaccgagcgccttcctttattcgcaaataatggtaggaagtgaatttttgtaatataat

SEQ ID NO: 8151 - DNA, 80 bp, synthetic construct
  misc_feature 1..80: note = Synthetic: >NC_044932.1-cand-0-79
  source 1..80: mol_type = other DNA
atgaagatggcgtctaacgacgctgccactgcgaccgctggcacaaccagctcaaacagtgaaattcacaacaaagatgt

SEQ ID NO: 8152 - DNA, 80 bp, synthetic construct
  misc_feature 1..80: note = Synthetic: >NC_044932.1-cand-50-129
  source 1..80: mol_type = other DNA
ctcaaacagtgaaattcacaacaaagatgttagtaacacacaaaacatctttgccaacatgactgttggcataaagaggg

SEQ ID NO: 8153 - DNA, 80 bp, synthetic construct
  misc_feature 1..80: note = Synthetic: >NC_044932.1-cand-160-239
  source 1..80: mol_type = other DNA
ccaagcccccttccacaaagaaggaggacaaaaccacccttcctccaataccccccccaccccccaatggtgaggacatt

SEQ ID NO: 8154 - DNA, 80 bp, synthetic construct
  misc_feature 1..80: note = Synthetic: >NC_001612.1-cand-7240-7319
  source 1..80: mol_type = other DNA
gagcacaattaggtctgtcccagtaggaaaagctttggctataccgaattatgaaaatctgagacgcaattggctcgaat

SEQ ID NO: 8155 - DNA, 80 bp, synthetic construct
  misc_feature 1..80: note = Synthetic: >AdVB3-cand-2940-3019
  source 1..80: mol_type = other DNA
attcggatgagaggccttatcagatgctgacctgcgctggtggacattgcaatattcttgctaccgtgcatatcgtttca

SEQ ID NO: 8156 - DNA, 80 bp, synthetic construct
  misc_feature 1..80: note = Synthetic: >AdVB3-cand-5430-5509
  source 1..80: mol_type = other DNA
attcgggggagtatgcatccgcaccgcaggaggcgcagacggtttcgcactctacgagccaggtcagatccggctcatcg

SEQ ID NO: 8157 - DNA, 80 bp, synthetic construct
  misc_feature 1..80: note = Synthetic: >NC_001611.1-cand-162920-162999
  source 1..80: mol_type = other DNA
ggcatgtcgatggcaaaattcttttcgttggtagatattgctctccaacaactaattaagcatattcttaatattagaat

SEQ ID NO: 8158 - DNA, 80 bp, synthetic construct
  misc_feature 1..80: note = Synthetic: >EF177176.1-cand-6320-6399
  source 1..80: mol_type = other DNA
attctatgtggttttacttacgcagggaacaattatttgccagacattattttaatagggctggtaaagttggggaaaca

SEQ ID NO: 8159 - DNA, 80 bp, synthetic construct
  misc_feature 1..80: note = Synthetic: >NC_001611.1-cand-89360-89439
  source 1..80: mol_type = other DNA
cgaaatagattatttaacagctattcaagattttattatcgaggtgtcaaactgtgtagctagattcgcgtttacagaat

SEQ ID NO: 8160 - DNA, 80 bp, synthetic construct
  misc_feature 1..80: note = Synthetic: >AdVB3-cand-1670-1749
  source 1..80: mol_type = other DNA
ctctggcctttggagattctggttcggtggtgatctagctaggctagtgtttaggataaaacaggactacagggaagaat

SEQ ID NO: 8161 - DNA, 80 bp, synthetic construct
  misc_feature 1..80: note = Synthetic: >NC_001611.1-cand-177540-177619
  source 1..80: mol_type = other DNA
attgacatgtggtttagcagcaacattggtaattaaaccgtacgaggtacccatcagtgatatgcaactactaaaaatgg

SEQ ID NO: 8162 - DNA, 80 bp, synthetic construct
  misc_feature 1..80: note = Synthetic: >AdVB7-cand-7590-7669
  source 1..80: mol_type = other DNA
attgacgaaaatgctgcccgactgccattttttctggggtgacgcaatagaaggtttgggggtcctgccgccagcgatcc

SEQ ID NO: 8163 - DNA, 80 bp, synthetic construct
  misc_feature 1..80: note = Synthetic: >NC_001611.1-cand-123210-123289
  source 1..80: mol_type = other DNA
attgagtggaaagttcaaaaagtcagacggtagttatcgaacacatcctcactattcatggatgcagaatatttctattc

SEQ ID NO: 8164 - DNA, 80 bp, synthetic construct
  misc_feature 1..80: note = Synthetic: >NC_001611.1-cand-91330-91409
  source 1..80: mol_type = other DNA
cgttgactactttccaacagaaaatatccaagtattttaattctagactatttggacacgacatagagagcttcatcaat

SEQ ID NO: 8165 - DNA, 80 bp, synthetic construct
  misc_feature 1..80: note = Synthetic: >AdVB7-cand-12090-12169
  source 1..80: mol_type = other DNA
tatgcacagcttgcaaagagctctaacgggggctgggaccgatggggagaactactttgacatgggagcggacttgcaat

SEQ ID NO: 8166 - DNA, 80 bp, synthetic construct
  misc_feature 1..80: note = Synthetic: >NC_003310.1-cand-179950-180029
  source 1..80: mol_type = other DNA
cataaaccatccattcatatacatgattaaagataacaccggacatacactttttatagggaaatactgctatccgcaat

SEQ ID NO: 8167 - DNA, 80 bp, synthetic construct
  misc_feature 1..80: note = Synthetic: >AdVB7-cand-12250-12329
  source 1..80: mol_type = other DNA
gagggcgagtacttggaagactgatggcgcgacccgtatttttgctagatggaacagcagcaggcaccggaccccgcaat

SEQ ID NO: 8168 - DNA, 80 bp, synthetic construct
  misc_feature 1..80: note = Synthetic: >EVD70-cand-3540-3619
  source 1..80: mol_type = other DNA
tttgagggccctggtattcagtggatcaatgaaagtgattactatccagctagatatcaaacaaacactctcttagcaat

SEQ ID NO: 8169 - DNA, 80 bp, synthetic construct
  misc_feature 1..80: note = Synthetic: >NC_001611.1-cand-41790-41869
  source 1..80: mol_type = other DNA
caggtatagagtttgcggataatgatagacaagatatatatactctatttcaacacactggtagaatagtccatagcaat

SEQ ID NO: 8170 - DNA, 80 bp, synthetic construct
  misc_feature 1..80: note = Synthetic: >NC_001611.1-cand-30320-30399
  source 1..80: mol_type = other DNA
cactataatataatctagacagatagatgattcgataaataaagaagatatatcgttggtaggataatacatccccattc

SEQ ID NO: 8171 - DNA, 80 bp, synthetic construct
  misc_feature 1..80: note = Synthetic: >AdVB3-cand-17040-17119
  source 1..80: mol_type = other DNA
cactcgctactatcgaaaccggagcaacacctctcgccgccgcaaaccacctgcaagtcgcactcgcagtcgccgccgcc

SEQ ID NO: 8172 - DNA, 80 bp, synthetic construct
  misc_feature 1..80: note = Synthetic: >AdVB7-cand-29120-29199
  source 1..80: mol_type = other DNA
gttactattatggttatgacagatccagtagtcaatataaaaattacttagttcgcataactcagcccaaattaacagtg

SEQ ID NO: 8173 - DNA, 80 bp, synthetic construct
  misc_feature 1..80: note = Synthetic: >AdVB7-cand-7670-7749
  source 1..80: mol_type = other DNA
cacttaagtttcatggcgaggtcataggcgatgttgacgagccgctggtctccagagagtttcatgaccagcatgaaggg

SEQ ID NO: 8174 - DNA, 80 bp, synthetic construct
  misc_feature 1..80: note = Synthetic: >NC_003310.1-cand-104370-104449
  source 1..80: mol_type = other DNA
cacttcgaagagttaatattattgggtggtaaactagataaaaaggaatctattaaagattgtttaagaagagaattaaa

SEQ ID NO: 8175 - DNA, 80 bp, synthetic construct
  misc_feature 1..80: note = Synthetic: >NC_003310.1-cand-56120-56199
  source 1..80: mol_type = other DNA
ttaccacttaaatcgatataacagtaacttgtatgcgagattgggttaataaatacagaaggaaacttcttatcgaagtg

SEQ ID NO: 8176 - DNA, 80 bp, synthetic construct
  misc_feature 1..80: note = Synthetic: >NC_039476.1-cand-4730-4809
  source 1..80: mol_type = other DNA
cactttcctccgaaggacggtgactcgtgacccagctggctggtttggaaaactggaccaaagctcaattttgaggcaga

SEQ ID NO: 8177 - DNA, 80 bp, synthetic construct
  misc_feature 1..80: note = Synthetic: >EVD70-cand-2530-2609
  source 1..80: mol_type = other DNA
cagaaccagaggaagctattcaaactcgtactgtgatcaatatgcatggtactgcagagtgcctggtggaaaatttctta

SEQ ID NO: 8178 - DNA, 80 bp, synthetic construct
  misc_feature 1..80: note = Synthetic: >NC_001611.1-cand-76180-76259
  source 1..80: mol_type = other DNA
cagaactaatgtatattttaggtacttatggacaacagaggatagatggcgaaccagcagagactcgagtattgggtaga

SEQ ID NO: 8179 - DNA, 80 bp, synthetic construct
  misc_feature 1..80: note = Synthetic: >NC_039476.1-cand-3000-3079
  source 1..80: mol_type = other DNA
tacaatgagaaactggactttgaggcccccccaagcatatggtctaggattgtgagctttggttctggctggggcttctg

SEQ ID NO: 8180 - DNA, 80 bp, synthetic construct
  misc_feature 1..80: note = Synthetic: >NC_005228.1-cand-3020-3099
  source 1..80: mol_type = other DNA
tgtggggtttaatttagtctgctctgtcagccttacagaatgtgcatcgtttctcacatcaatcaaagcatgtgattctg

SEQ ID NO: 8181 - DNA, 80 bp, synthetic construct
  misc_feature 1..80: note = Synthetic: >EVD70-cand-7140-7219
  source 1..80: mol_type = other DNA
ccgagaaacacacaagatcatgtgagatccttgtgcctactggcctggcacaatggtgaagaaacttacaatgaattctg

SEQ ID NO: 8182 - DNA, 80 bp, synthetic construct
  misc_feature 1..80: note = Synthetic: >AdVB7-cand-25370-25449
  source 1..80: mol_type = other DNA
cagactttatgagccagagcatgcttaacaactttcgctctttcatcctggaacgctccggtatcctgcctgccacctgc

SEQ ID NO: 8183 - DNA, 80 bp, synthetic construct
  misc_feature 1..80: note = Synthetic: >NC_001611.1-cand-80700-80779
  source 1..80: mol_type = other DNA
cgactttctacgtcgtaattaggttctaatgccgatctttgaatggatactagttttctaagttctaatgtgattctctg

SEQ ID NO: 8184 - DNA, 80 bp, synthetic construct
  misc_feature 1..80: note = Synthetic: >NC_001611.1-cand-99220-99299
  source 1..80: mol_type = other DNA
cagatagtttatctttccccctagatacattggccgtaatagttgtcggtctaaagaatatctttggtgtaaagttaaaa

SEQ ID NO: 8185 - DNA, 80 bp, synthetic construct
  misc_feature 1..80: note = Synthetic: >NC_001611.1-cand-145850-145929
  source 1..80: mol_type = other DNA
taaaggcgcgtcaatgactctcagtaagagttatgaatctggattgcctaaacccgacttagttatattcttggaatctg

SEQ ID NO: 8186 - DNA, 80 bp, synthetic construct
  misc_feature 1..80: note = Synthetic: >NC_003310.1-cand-56320-56399
  source 1..80: mol_type = other DNA
ctcgtccaacgagtaacatccgtctggagatatcccgttagaaatataaaaccaactaatattgagaaattcatccatgg

SEQ ID NO: 8187 - DNA, 80 bp, synthetic construct
  misc_feature 1..80: note = Synthetic: >NC_001611.1-cand-49070-49149
  source 1..80: mol_type = other DNA
tctggcattatctatatgtgagagaatatcctctagagaatcagtatcctttttgataatagtggatctcaatgacatgg

SEQ ID NO: 8188 - DNA, 80 bp, synthetic construct
  misc_feature 1..80: note = Synthetic: >NC_003310.1-cand-82740-82819
  source 1..80: mol_type = other DNA
ccattaaaaattgttagatttttccgcaataacatggtaactggagtagagatagccgatagatctgttatttcagtcgc

SEQ ID NO: 8189 - DNA, 80 bp, synthetic construct
  misc_feature 1..80: note = Synthetic: >NC_001611.1-cand-9380-9459
  source 1..80: mol_type = other DNA
ccattaaaatgattattccggcagcgaacttgatattggatatatcacaacctttgttaatatctacgacaatagacagc

SEQ ID NO: 8190 - DNA, 80 bp, synthetic construct
  misc_feature 1..80: note = Synthetic: >NC_003310.1-cand-62240-62319
  source 1..80: mol_type = other DNA
cccaaatagttttataaactcgcttaatatcttctggaaggtttgtattctgaatggatccaccatctaccataatccta

SEQ ID NO: 8191 - DNA, 80 bp, synthetic construct
  misc_feature 1..80: note = Synthetic: >EVB79-cand-7170-7249
  source 1..80: mol_type = other DNA
cccaagatcatgtgcgatccttgtgcttattggcttggcacaatggagagcaggaatatgaagaatttgtgtccaagatc

SEQ ID NO: 8192 - DNA, 80 bp, synthetic construct
  misc_feature 1..80: note = Synthetic: >NC_001611.1-cand-24320-24399
  source 1..80: mol_type = other DNA
cccaatcggccttcttttttacacaaggcattgtctctatagcattaaagagatagtttttttcattactatctttaaca

SEQ ID NO: 8193 - DNA, 80 bp, synthetic construct
  misc_feature 1..80: note = Synthetic: >AdVB3-cand-4790-4869
  source 1..80: mol_type = other DNA
cccaattacgggttgcagatggtagtttagggagcgacagctgccgtcctcccggagcaggggggccacttcgttcatca

SEQ ID NO: 8194 - DNA, 80 bp, synthetic construct
  misc_feature 1..80: note = Synthetic: >NC_003310.1-cand-107110-107189
  source 1..80: mol_type = other DNA
cccaatttgtataaatatccttaagatgtttgagaatatatacagtagtcattgttttaccgacacctgtttcatggaac

SEQ ID NO: 8195 - DNA, 80 bp, synthetic construct
  misc_feature 1..80: note = Synthetic: >AdVB7-cand-800-879
  source 1..80: mol_type = other DNA
ccgatgaaggattggacataaaccctcctcctgagacccttgttaccccaggggtggttgtggaaagcggcagaggtggg

SEQ ID NO: 8196 - DNA, 80 bp, synthetic construct
  misc_feature 1..80: note = Synthetic: >NC_039477.1-cand-810-889
  source 1..80: mol_type = other DNA
cccataaaagacctcataggaaaaattaaaccattaaacatattgaacatcctggcaacgtgtgactggacgtttgccgg

SEQ ID NO: 8197 - DNA, 80 bp, synthetic construct
  misc_feature 1..80: note = Synthetic: >EVD70-cand-3000-3079
  source 1..80: mol_type = other DNA
gcaaatttctacgacggatttgctggttttgagaaaaaggccactgttctttacggcataaatccagcaaacactatggg

SEQ ID NO: 8198 - DNA, 80 bp, synthetic construct
  misc_feature 1..80: note = Synthetic: >AdVB7-cand-18690-18769
  source 1..80: mol_type = other DNA
ccccaatgggcatacatgcacatcgccggacaggatgcttcggagtacctgagtccgggtctggtgcagttcgcccgtgc

SEQ ID NO: 8199 - DNA, 80 bp, synthetic construct
  misc_feature 1..80: note = Synthetic: >NC_039477.1-cand-3930-4009
  source 1..80: mol_type = other DNA
ccccatcacgtccgaaagaatgaattctggaatggtgagaccttcactggtaaattggcagaccaagcatcaaaagcaaa

SEQ ID NO: 8200 - DNA, 80 bp, synthetic construct
  misc_feature 1..80: note = Synthetic: >NC_001672.1-cand-10970-11049
  source 1..80: mol_type = other DNA
ggaggagggaagagagaaattggcagctctcttcaggatttttcctcctcctatacaaaattccccctcggtagaggggg

SEQ ID NO: 8201 - DNA, 80 bp, synthetic construct
  misc_feature 1..80: note = Synthetic: >HCV.A9-cand-6960-7039
  source 1..80: mol_type = other DNA
cccctggccaattgatgcctccttgcttgctgaagccggcaaagggtatggtctgatcatgacaccagcagacaaagggg

SEQ ID NO: 8202 - DNA, 80 bp, synthetic construct
  misc_feature 1..80: note = Synthetic: >AdVB3-cand-11050-11129
  source 1..80: mol_type = other DNA
tcgcccgagcggcacccgcgggtgcaactaaaaaaggactctcgcgaggcgtacgtgccccagcagaacctgttcaggga

SEQ ID NO: 8203 - DNA, 80 bp, synthetic construct
  misc_feature 1..80: note = Synthetic: >AdVB3-cand-11780-11859
  source 1..80: mol_type = other DNA
atcgcaatgacaggatgcaccgtgcggtgagcgccagcaggaggcgcgagctgagcgacagagaacttatgcacagcttg

SEQ ID NO: 8204 - DNA, 80 bp, synthetic construct
  misc_feature 1..80: note = Synthetic: >AdVB3-cand-11790-11869
  source 1..80: mol_type = other DNA
caggatgcaccgtgcggtgagcgccagcaggaggcgcgagctgagcgacagagaacttatgcacagcttgcaaagagctc

SEQ ID NO: 8205 - DNA, 80 bp, synthetic construct
  misc_feature 1..80: note = Synthetic: >AdVB3-cand-12390-12469
  source 1..80: mol_type = other DNA
gaccaacctggaccggatggtgaccgatgtgcgcgaggccgtgtctcagcgcgagcggtttcagcgcgacgccaacttgg

SEQ ID NO: 8206 - DNA, 80 bp, synthetic construct
  misc_feature 1..80: note = Synthetic: >AdVB3-cand-12610-12689
  source 1..80: mol_type = other DNA
ccagattacttcttccagaccagcagacagggcttgcagacagtgaacctgactcaggctttcaagaacctgaagggtct

SEQ ID NO: 8207 - DNA, 80 bp, synthetic construct
  misc_feature 1..80: note = Synthetic: >AdVB3-cand-12800-12879
  source 1..80: mol_type = other DNA
tcgaccgcaactcctacttgggctacctgcttaacctgtatcgcgaggccataggacagagccaggtggacgaacagacc

SEQ ID NO: 8208 - DNA, 80 bp, synthetic construct
  misc_feature 1..80: note = Synthetic: >AdVB3-cand-13070-13149
  source 1..80: mol_type = other DNA
cgacacctaccgccgcgctggacatgacagctcgaaacatggagcccagcatgtatgctagtaacaggcctttcattaac

SEQ ID NO: 8209 - DNA, 80 bp, synthetic construct
  misc_feature 1..80: note = Synthetic: >AdVB3-cand-13270-13349
  source 1..80: mol_type = other DNA
gaccccaatgacgggttcctgtgggacgatgtagacagcagcatattctccccgcctcccggttatacagtttggaagaa

SEQ ID NO: 8210 - DNA, 80 bp, synthetic construct
  misc_feature 1..80: note = Synthetic: >AdVB3-cand-13400-13479
  source 1..80: mol_type = other DNA
gtgctgccgcgaccgtgcccgaagctgcaagtcctttccctagcttgcccttttcactaaacagcgttcgcagcagtgaa

SEQ ID NO: 8211 - DNA, 80 bp, synthetic construct
  misc_feature 1..80: note = Synthetic: >AdVB3-cand-13570-13649
  source 1..80: mol_type = other DNA
aacaatggaatagagagcctggtggataagatgagtagatggaagacctatgcgcaggatcacagagacgagcccaaaat

SEQ ID NO: 8212 - DNA, 80 bp, synthetic construct
  misc_feature 1..80: note = Synthetic: >AdVB3-cand-13780-13859
  source 1..80: mol_type = other DNA
ccgttcgctcatctgcgtcccagattcgggcgcatgttgtaaaagtaaaagtaaaataaaaaggcaactcaccaaggcca

SEQ ID NO: 8213 - DNA, 80 bp, synthetic construct
  misc_feature 1..80: note = Synthetic: >AdVB3-cand-13920-13999
  source 1..80: mol_type = other DNA
agccgtgctaggcggagcggtggtgtatccggagggtcctcctcctccttcttacgagagcgtgatgcagcaacaggcgg

SEQ ID NO: 8214 - DNA, 80 bp, synthetic construct
  misc_feature 1..80: note = Synthetic: >AdVB3-cand-14000-14079
  source 1..80: mol_type = other DNA
cgatgctacagcccccactggaggctcccttcgtacccccgcggtacctggcgcctacggaagggagaaacagcattcgt

SEQ ID NO: 8215 - DNA, 80 bp, synthetic construct
  misc_feature 1..80: note = Synthetic: >AdVB3-cand-14160-14239
  source 1..80: mol_type = other DNA
ctatcagaacgaccacagcaacttcctgaccacggtggtgcagaacaatgactttacccccacggaggctagcacccaga

SEQ ID NO: 8216 - DNA, 80 bp, synthetic construct
  misc_feature 1..80: note = Synthetic: >AdVB3-cand-14270-14349
  source 1..80: mol_type = other DNA
gcggtcagctgaagaccatcatgcacaccaacatgcccaacgtgaacgagtacatgttcagcaacaagttcaaggcgagg

SEQ ID NO: 8217 - DNA, 80 bp, synthetic construct
  misc_feature 1..80: note = Synthetic: >AdVB3-cand-14400-14479
  source 1..80: mol_type = other DNA
tgatcataaagaggatatcttaaagtatgagtggtttgagttcactttaccagaaggcaacttctcagccaccatgacca

SEQ ID NO: 8218 - DNA, 80 bp, synthetic construct
  misc_feature 1..80: note = Synthetic: >AdVE4-cand-26860-26939
  source 1..80: mol_type = other DNA
tcaaatcgccggatcgggaagatcttccttcacgcctcgtcaggccgtgctaactttggaaagttcgtcctcgcaacccc

SEQ ID NO: 8219 - DNA, 80 bp, synthetic construct
  misc_feature 1..80: note = Synthetic: >AdVE4-cand-26940-27019
  source 1..80: mol_type = other DNA
gctcgggcggcatcggcactctccagtttgtggaggagttcactccttcggtctacttcaaccccttctccggctccccc

SEQ ID NO: 8220 - DNA, 80 bp, synthetic construct
  misc_feature 1..80: note = Synthetic: >AdVE4-cand-27020-27099
  source 1..80: mol_type = other DNA
ggccactacccggacgagtttatccccaacttcgacgccatcagcgagtcggtggacggctacgattgaatgtcccatgc

SEQ ID NO: 8221 - DNA, 80 bp, synthetic construct
  misc_feature 1..80: note = Synthetic: >AdVE4-cand-27100-27179
  source 1..80: mol_type = other DNA
tggcgcggctgacctagctcggcttcgacacctggaccactgccgccgctttcgctgcttcgctcgggaccttgtcgagt

SEQ ID NO: 8222 - DNA, 80 bp, synthetic construct
  misc_feature 1..80: note = Synthetic: >AdVE4-cand-27170-27249
  source 1..80: mol_type = other DNA
cttgtcgagttcacctactttgagctgcccgaggagcaccctcagggcccggcccacggagtgcggatcgtcatcgaagg

SEQ ID NO: 8223 - DNA, 80 bp, synthetic construct
  misc_feature 1..80: note = Synthetic: >AdVE4-cand-27260-27339
  source 1..80: mol_type = other DNA
tcccacctgcttcgtatcttcagccagcgcccaatcctggttgagcgacaacagggcaacaccctcctgaccctctactg

SEQ ID NO: 8224 - DNA, 80 bp, synthetic construct
  misc_feature 1..80: note = Synthetic: >AdVE4-cand-27340-27419
  source 1..80: mol_type = other DNA
catctgcaaccaccccggcctgcatgaaagtctttgttgtctgctgtgtactgagtataataaaagctgagatcagcgac

SEQ ID NO: 8225 - DNA, 80 bp, synthetic construct
  misc_feature 1..80: note = Synthetic: >AdVE4-cand-27420-27499
  source 1..80: mol_type = other DNA
tactccggactccattgtattcctgcatccttcaaccagtctctgaccttcaccgggaacgagaccgagctccatctcca

SEQ ID NO: 8226 - DNA, 80 bp, synthetic construct
  misc_feature 1..80: note = Synthetic: >AdVE4-cand-27500-27579
  source 1..80: mol_type = other DNA
gtgtaagccccacaagaagtacctcacctggctgtaccagggcttcccgttcgccgttgttaaccactgctacaacgacg

SEQ ID NO: 8227 - DNA, 80 bp, synthetic construct
  misc_feature 1..80: note = Synthetic: >AdVE4-cand-27580-27659
  source 1..80: mol_type = other DNA
gagtcctgctaaacggtcccgccaaccttactttttccacccgcagaagcaagctactgctcttccgacccttcctacca

SEQ ID NO: 8228 - DNA, 80 bp, synthetic construct
  misc_feature 1..80: note = Synthetic: >AdVE4-cand-27660-27739
  source 1..80: mol_type = other DNA
gggatatatcagtgcgtctcgggaccctgccatcacaccttccacctgatcccgaataccacctattccccagcgccgct

SEQ ID NO: 8229 - DNA, 80 bp, synthetic construct
  misc_feature 1..80: note = Synthetic: >AdVE4-cand-27740-27819
  source 1..80: mol_type = other DNA
ccccactaacaaccaaactaaccaccaccaacgctaccgtcgagacctcgttgaatctaataccacccacaccggaggtg

SEQ ID NO: 8230 - DNA, 80 bp, synthetic construct
  misc_feature 1..80: note = Synthetic: >AdVE4-cand-27790-27869
  source 1..80: mol_type = other DNA
ttgaatctaataccacccacaccggaggtgagctccgaggtcctcagtcctctgggatttattacggtccctgggaggtg

SEQ ID NO: 8231 - DNA, 80 bp, synthetic construct
  misc_feature 1..80: note = Synthetic: >AdVE4-cand-27900-27979
  source 1..80: mol_type = other DNA
ggtgggcttttggctctttgctacctatacctcccttgcttttcctacttagtggtgctttgttgctggtttaaaaaatg

SEQ ID NO: 8232 - DNA, 80 bp, synthetic construct
  misc_feature 1..80: note = Synthetic: >AdVE4-cand-27980-28059
  source 1..80: mol_type = other DNA
gggaagatcaccctagtgtgcggtgtgctggtggcggtacttttgattttgggtttgggcagcacggctgtagtgacgga

SEQ ID NO: 8233 - DNA, 80 bp, synthetic construct
  misc_feature 1..80: note = Synthetic: >AdVE4-cand-28050-28129
  source 1..80: mol_type = other DNA
tagtgacggagaaggccgatccctgcttaacttttaaccccgacaaatgccagctgagttttcaaccagatggcaatcgg

SEQ ID NO: 8234 - DNA, 80 bp, synthetic construct
  misc_feature 1..80: note = Synthetic: >EU711054.1-cand-1260-1339
  source 1..80: mol_type = other DNA
ctgacccagtaaatgctatagttgaacaagtaagaagctttgttagtggaggaagacaaagagaactgttacaaatagct

SEQ ID NO: 8235 - DNA, 80 bp, synthetic construct
  misc_feature 1..80: note = Synthetic: >EU711054.1-cand-1300-1379
  source 1..80: mol_type = other DNA
tgttagtggaggaagacaaagagaactgttacaaatagctgcaggtcaacctgtagacatttctgaaggtgtatcaagag

SEQ ID NO: 8236 - DNA, 80 bp, synthetic construct
  misc_feature 1..80: note = Synthetic: >EU711054.1-cand-1380-1459
  source 1..80: mol_type = other DNA
gcacagctactatttcaaatgctgtagaagctgtaagagatgcaactcaaagactatcacaagcaacctacaactttgtt

SEQ ID NO: 8237 - DNA, 80 bp, synthetic construct
  misc_feature 1..80: note = Synthetic: >EU711054.1-cand-1460-1539
  source 1..80: mol_type = other DNA
tatgatgcttctacccttccaagggatggctttaatgcacttagtgatggagttcacaggctaggccagtggatttcaat

SEQ ID NO: 8238 - DNA, 80 bp, synthetic construct
  misc_feature 1..80: note = Synthetic: >EU711054.1-cand-1560-1639
  source 1..80: mol_type = other DNA
ctccccattatgcagcccctgactggattttatatgtacttgaagagctaaacagtgacatttctaaaattcctacacag

SEQ ID NO: 8239 - DNA, 80 bp, synthetic construct
  misc_feature 1..80: note = Synthetic: >EU711054.1-cand-1620-1699
  source 1..80: mol_type = other DNA
tttctaaaattcctacacagggaattaaaagaaaactacaacaaaatggcctgcacagcaaagccagcctgcacagcaaa

SEQ ID NO: 8240 - DNA, 80 bp, synthetic construct
  misc_feature 1..80: note = Synthetic: >EU711054.1-cand-1690-1769
  source 1..80: mol_type = other DNA
gcacagcaaaaccaggaaggtcaccaagaagtcaacccacaagagtgcaaagccttccaaaacaagtcagaaaaggaggg

SEQ ID NO: 8241 - DNA, 80 bp, synthetic construct
  misc_feature 1..80: note = Synthetic: >EU711054.1-cand-1770-1849
  source 1..80: mol_type = other DNA
gtagacgtgctggccgccgtaccactgtcagaagaaacagagtttaaagttgaattgtttgttaaacctgttattggaaa

SEQ ID NO: 8242 - DNA, 80 bp, synthetic construct
  misc_feature 1..80: note = Synthetic: >EU711054.1-cand-1860-1939
  source 1..80: mol_type = other DNA
actaccccacattattggtctattagtagcccacttaaaactgctgaagctgctaatgttactcctgatgctgatactac

SEQ ID NO: 8243 - DNA, 80 bp, synthetic construct
  misc_feature 1..80: note = Synthetic: >EU711054.1-cand-1940-2019
  source 1..80: mol_type = other DNA
tgtgtgctacagcttgtcacaggttgctccccctgatattcctaatcaggttagtgaatgtgacatgcttatatgggagc

SEQ ID NO: 8244 - DNA, 80 bp, synthetic construct
  misc_feature 1..80: note = Synthetic: >EU711054.1-cand-2000-2079
  source 1..80: mol_type = other DNA
tgacatgcttatatgggagctgtatagaatggaaacagaagttttggtgcttcctgtgcttaatgctggcatacttacta

SEQ ID NO: 8245 - DNA, 80 bp, synthetic construct
  misc_feature 1..80: note = Synthetic: >EU711054.1-cand-2100-2179
  source 1..80: mol_type = other DNA
gctggtcctcaactttatttttgggcagttggaggacagcccttggatgtgctaggacttgctcccactgaaaaatacaa

SEQ ID NO: 8246 - DNA, 80 bp, synthetic construct
  misc_feature 1..80: note = Synthetic: >EU711054.1-cand-2190-2269
  source 1..80: mol_type = other DNA
cagtatactgtaaatcctaaaaccaatggtactgtgcctcatgtttattccagttctgaaacacccagggcaagggtcac

SEQ ID NO: 8247 - DNA, 80 bp, synthetic construct
  misc_feature 1..80: note = Synthetic: >EU711054.1-cand-2260-2339
  source 1..80: mol_type = other DNA
caagggtcactaatgaaaagtacagcattgaatcatgggtggcagaccctagccgcaatgataactgcagatactttggc

SEQ ID NO: 8248 - DNA, 80 bp, synthetic construct
  misc_feature 1..80: note = Synthetic: >EU711054.1-cand-2360-2439
  source 1..80: mol_type = other DNA
aactccaccagtggtgtcatttagtaataatagcacaattccactgttggatgaaaatggcattggcattctttgcttgc

SEQ ID NO: 8249 - DNA, 80 bp, synthetic construct
  misc_feature 1..80: note = Synthetic: >EU711054.1-cand-2420-2499
  source 1..80: mol_type = other DNA
cattggcattctttgcttgcaaggtagattgtacataacttgtgctgaccttttgggagttaacaaaaatagagtacata

SEQ ID NO: 8250 - DNA, 80 bp, synthetic construct
  misc_feature 1..80: note = Synthetic: >EVA91-cand-5530-5609
  source 1..80: mol_type = other DNA
tttggatagagcacaagcaggttaaaattctggatgctgttgaattggtagatgaacaacaagtcaatcttgaactcaca

SEQ ID NO: 8251 - DNA, 80 bp, synthetic construct
  misc_feature 1..80: note = Synthetic: >EVA91-cand-5610-5689
  source 1..80: mol_type = other DNA
ttgatcacccttgacaccaatgaaaaattcagagacattacaaaattcatccctgagcaaattgaaggagctgttgacgc

SEQ ID NO: 8252 - DNA, 80 bp, synthetic construct
  misc_feature 1..80: note = Synthetic: >EVA91-cand-5690-5769
  source 1..80: mol_type = other DNA
cactcttgtcatcaatacagaagccatgccatcaatgtttgtcccagttggtgacgttcaacagtatggctttctcaata

SEQ ID NO: 8253 - DNA, 80 bp, synthetic construct
  misc_feature 1..80: note = Synthetic: >EVA91-cand-5880-5959
  source 1..80: mol_type = other DNA
ggcaacggccgccaaggcttctgtgctgcactcaaacgcagttactttgcctctgagcagggtgagatccaatggatgaa

SEQ ID NO: 8254 - DNA, 80 bp, synthetic construct
  misc_feature 1..80: note = Synthetic: >EVA91-cand-5930-6009
  source 1..80: mol_type = other DNA
ctctgagcagggtgagatccaatggatgaaacctaataaggagacaggcaatttcaacatcaacggcccaaccaagacca

SEQ ID NO: 8255 - DNA, 80 bp, synthetic construct
  misc_feature 1..80: note = Synthetic: >EVA91-cand-6050-6129
  source 1..80: mol_type = other DNA
caaagaaccagcagtcctccattctaaggacaagagacttgaagttgactttgaaactgccctcttctccaaatacatag

SEQ ID NO: 8256 - DNA, 80 bp, synthetic construct
  misc_feature 1..80: note = Synthetic: >EVA91-cand-6090-6169
  source 1..80: mol_type = other DNA
gaagttgactttgaaactgccctcttctccaaatacatagggaacaagatctatgaaccagatgagtacatgattcaggc

SEQ ID NO: 8257 - DNA, 80 bp, synthetic construct
  misc_feature 1..80: note = Synthetic: >EVA91-cand-6170-6249
  source 1..80: mol_type = other DNA
tgcaaaccattatgcagaccagctcaaacaattggacattgacacatcaaagatgagcatggaggatgcttgttatggaa

SEQ ID NO: 8258 - DNA, 80 bp, synthetic construct
  misc_feature 1..80: note = Synthetic: >EVA91-cand-6250-6329
  source 1..80: mol_type = other DNA
cagaattcctagaagggattgatttggcaacgagtgcagggtacccctacaatgcattgggcattaagaagagggacatt

SEQ ID NO: 8259 - DNA, 80 bp, synthetic construct
  misc_feature 1..80: note = Synthetic: >EVA91-cand-6400-6479
  source 1..80: mol_type = other DNA
actctacttatgttaaggatgagcttagagcaaaagataagatcaagaaaggaaaatctagactaattgaagccagtagt

SEQ ID NO: 8260 - DNA, 80 bp, synthetic construct
  misc_feature 1..80: note = Synthetic: >EVA91-cand-6460-6539
  source 1..80: mol_type = other DNA
gactaattgaagccagtagtattaatgactcagtttaccttagaatgtgctttggccacttgtatgagaaattccatgca

SEQ ID NO: 8261 - DNA, 80 bp, synthetic construct
  misc_feature 1..80: note = Synthetic: >EVA91-cand-6560-6639
  source 1..80: mol_type = other DNA
atcagcagttggctgtaacccagayactttctggagtaaaatccctataatgcttcctggttctctctttgcttttgatt

SEQ ID NO: 8262 - DNA, 80 bp, synthetic construct
  misc_feature 1..80: note = Synthetic: >EVA91-cand-6720-6799
  source 1..80: mol_type = other DNA
gatgctatttctttgattgagggaatcaatcactcccaccacatttacagaaatcaaacgtactgtgtgatgggtgggat

SEQ ID NO: 8263 - DNA, 80 bp, synthetic construct
  misc_feature 1..80: note = Synthetic: >EVA91-cand-6800-6879
  source 1..80: mol_type = other DNA
gccatctggatgttctggcactagtatttttaattccatgattaataatataataatcagaactctcctaatcaagactt

SEQ ID NO: 8264 - DNA, 80 bp, synthetic construct
  misc_feature 1..80: note = Synthetic: >EVA91-cand-6880-6959
  source 1..80: mol_type = other DNA
tcaaaggaattgatttagatgaattaaatatgattgcatatggagatgatgtccttgctagctaccccttccctatcgac

SEQ ID NO: 8265 - DNA, 80 bp, synthetic construct
  misc_feature 1..80: note = Synthetic: >EVA91-cand-6960-7039
  source 1..80: mol_type = other DNA
tgtgctgaacttgcaaagataggattggaatatggtttagttatgacaccagctgataagtctgcttgctttaatgaagt

SEQ ID NO: 8266 - DNA, 80 bp, synthetic construct
  misc_feature 1..80: note = Synthetic: >EVB74-cand-4740-4819
  source 1..80: mol_type = other DNA
gggcgctcgcaagaagatttcacttcgacatgaatatcgaggtaatctcgatgtacagtcaaaatgggaaaattaacatg

SEQ ID NO: 8267 - DNA, 80 bp, synthetic construct
  misc_feature 1..80: note = Synthetic: >EVB74-cand-4810-4889
  source 1..80: mol_type = other DNA
aattaacatgcccatgtctgtcaaaacttgtgatgaagaatgctgccctgtcaattttaaaaggtgctgcccactggtgt

SEQ ID NO: 8268 - DNA, 80 bp, synthetic construct
  misc_feature 1..80: note = Synthetic: >EVB74-cand-4890-4969
  source 1..80: mol_type = other DNA
gtggcaaggccattcaatttgttgataggagaacccaggttagatactcactagacatgctggtcactgaaatgttcaga

SEQ ID NO: 8269 - DNA, 80 bp, synthetic construct
  misc_feature 1..80: note = Synthetic: >EVB74-cand-5050-5129
  source 1..80: mol_type = other DNA
tagtgtggccccagagacaccccccccaccagcgattgctgacctcctgaaatcagtggatagtgaggttgtgagagagt

SEQ ID NO: 8270 - DNA, 80 bp, synthetic construct
  misc_feature 1..80: note = Synthetic: >EVB74-cand-5150-5229
  source 1..80: mol_type = other DNA
attgtgccagagatcaactccactctgcaaattgaaaaacacgtcagcagggcttttatttgtctgcaggctctcaccac

SEQ ID NO: 8271 - DNA, 80 bp, synthetic construct
  misc_feature 1..80: note = Synthetic: >EVB74-cand-5210-5289
  source 1..80: mol_type = other DNA
tgtctgcaggctctcaccacctttgtctcggtggccggtataatttacatcatttacaagttgtttgctggtttccaggg

SEQ ID NO: 8272 - DNA, 80 bp, synthetic construct
  misc_feature 1..80: note = Synthetic: >EVB74-cand-5290-5369
  source 1..80: mol_type = other DNA
tgcatacacagggatgccaaaccagaaacccaaagtgcccaccctaaggcaagccaaagtgcaaggtccagcatttgaat

SEQ ID NO: 8273 - DNA, 80 bp, synthetic construct
  misc_feature 1..80: note = Synthetic: >EVB74-cand-5370-5449
  source 1..80: mol_type = other DNA
tcgcagtggcaatgatgagaaggaatgccagtacagtgaaaactgagtacggtgagttcaccatgcttggtatctatgat

SEQ ID NO: 8274 - DNA, 80 bp, synthetic construct
  misc_feature 1..80: note = Synthetic: >EVB74-cand-5450-5529
  source 1..80: mol_type = other DNA
aggtgggcggtgctgccacggcacgccaagcccggtcctaccattctgatgaatgatcaagaggttggcgtgctggacgc

SEQ ID NO: 8275 - DNA, 80 bp, synthetic construct
  misc_feature 1..80: note = Synthetic: >EVB74-cand-5530-5609
  source 1..80: mol_type = other DNA
caaagagctagtggacaaggatgggacaaacctggaactgactctcctgaagctcaaccgtaatgagaagttcagagaca

SEQ ID NO: 8276 - DNA, 80 bp, synthetic construct
  misc_feature 1..80: note = Synthetic: >EVB74-cand-5610-5689
  source 1..80: mol_type = other DNA
ttagaggattccttgcaagggaggaggttgaagtgagtgaggcagtgctcgcaatcaacacaagcaaattcccaaacatg

SEQ ID NO: 8277 - DNA, 80 bp, synthetic construct
  misc_feature 1..80: note = Synthetic: >EVB74-cand-5690-5769
  source 1..80: mol_type = other DNA
tacattccagtgggtcaagtcactgattatggcttcttaaatttaggtggcaccccaacaaagagaatgctcatgtataa

SEQ ID NO: 8278 - DNA, 80 bp, synthetic construct
  misc_feature 1..80: note = Synthetic: >EVB74-cand-5760-5839
  source 1..80: mol_type = other DNA
tcatgtataactttcccaccagagcaggacaatgtggcggtgtcctcatgtcaacagggaaagtgcttgggatacatgtg

SEQ ID NO: 8279 - DNA, 80 bp, synthetic construct
  misc_feature 1..80: note = Synthetic: >EVB74-cand-5850-5929
  source 1..80: mol_type = other DNA
gccaccaaggcttcgcagcagcactccttaggcattacttcaatgaggagcagggtgaaatagagttcattgaaagttca

SEQ ID NO: 8280 - DNA, 80 bp, synthetic construct
  misc_feature 1..80: note = Synthetic: >EVB74-cand-5930-6009
  source 1..80: mol_type = other DNA
aaagatgcaggattccccacaatcaatactcctagcaagactaaattagaaccaagtgtattccatcaggtttttgaagg

SEQ ID NO: 8281 - DNA, 80 bp, synthetic construct
  misc_feature 1..80: note = Synthetic: >EVB74-cand-6040-6119
  source 1..80: mol_type = other DNA
ggacccgagactcaaggtcaattttgaggaggcaatcttttccaaatacatcggcaatgtcaacactcacgtggatgagt

SEQ ID NO: 8282 - DNA, 80 bp, synthetic construct
  misc_feature 1..80: note = Synthetic: >EVB81-cand-6540-6619
  source 1..80: mol_type = other DNA
acaggtagtgcggttgggtgtgacccagacctgttctggagcaagatcccagtcatgcttgatggtcaccttatcgcttt

SEQ ID NO: 8283 - DNA, 80 bp, synthetic construct
  misc_feature 1..80: note = Synthetic: >EVB81-cand-6620-6699
  source 1..80: mol_type = other DNA
tgactacagtgggtatgatgccagtctaagcccagtgtggttcgcttgtctaaaaatgttgttagagaagctgggataca

SEQ ID NO: 8284 - DNA, 80 bp, synthetic construct
  misc_feature 1..80: note = Synthetic: >EVB81-cand-6700-6779
  source 1..80: mol_type = other DNA
cacacaaggagaccaattacatagactacttgtgcaactcacatcacctgtatagagacaaacactactttgtaagaggg

SEQ ID NO: 8285 - DNA, 80 bp, synthetic construct
  misc_feature 1..80: note = Synthetic: >EVB81-cand-6780-6859
  source 1..80: mol_type = other DNA
ggaatgccatcaggatgttcaggtaccagcattttcaactcaatgatcaacaacattatcatcagaacactaatgttgaa

SEQ ID NO: 8286 - DNA, 80 bp, synthetic construct
  misc_feature 1..80: note = Synthetic: >EVB81-cand-6870-6949
  source 1..80: mol_type = other DNA
gggatagacttagatcaattcaggatgatagcatatggtgatgatgtcattgcgtcttatccacaccctattgacgccgc

SEQ ID NO: 8287 - DNA, 80 bp, synthetic construct
  misc_feature 1..80: note = Synthetic: >EVB81-cand-6940-7019
  source 1..80: mol_type = other DNA
ttgacgccgcgctgctggcagaagcagggaaaggatacggtttgatcatgacaccggctgataaaggagagtgcttcaac

SEQ ID NO: 8288 - DNA, 80 bp, synthetic construct
  misc_feature 1..80: note = Synthetic: >EVB81-cand-7020-7099
  source 1..80: mol_type = other DNA
gaagtgacgtggaccaacgtcaccttcctaaaaagatatttcagggcagatgagcagtatcctttccttgtccatcctgt

SEQ ID NO: 8289 - DNA, 80 bp, synthetic construct
  misc_feature 1..80: note = Synthetic: >EVB81-cand-7100-7179
  source 1..80: mol_type = other DNA
gatgccaatgaaagacatccatgaatcgattaggtggaccaaagaccccaaaaatactcaagatcatgtgcgatccttgt

SEQ ID NO: 8290 - DNA, 80 bp, synthetic construct
  misc_feature 1..80: note = Synthetic: >EVB81-cand-7190-7269
  source 1..80: mol_type = other DNA
ttggcacaatggagagcaagaatatgaggagttcgtatctaaaatcagaagcgtcccagttgggcgctgtctgactttac

SEQ ID NO: 8291 - DNA, 80 bp, synthetic construct
  misc_feature 1..80: note = Synthetic: >EVB82-cand-60-139
  source 1..80: mol_type = other DNA
ggtacccttgtacgcctgttttatttctccctcccccaaccagtaacctagaagtaaagcaaacccgatcaatagcaggt

SEQ ID NO: 8292 - DNA, 80 bp, synthetic construct
  misc_feature 1..80: note = Synthetic: >EVB82-cand-140-219
  source 1..80: mol_type = other DNA
gcgacacaccagtcgtatcttgatcaagcacttctgtaaccccgggccgagtatcaatagactgctcacgcggttgaggg

SEQ ID NO: 8293 - DNA, 80 bp, synthetic construct
  misc_feature 1..80: note = Synthetic: >EVB82-cand-220-299
  source 1..80: mol_type = other DNA
agaaaacgctcgttatccggctgactacttcgagaaacccagtaacaccatagaagttgcagagtgtttcgctcagcact

SEQ ID NO: 8294 - DNA, 80 bp, synthetic construct
  misc_feature 1..80: note = Synthetic: >EVB82-cand-390-469
  source 1..80: mol_type = other DNA
catgggacgctctaatacagacatggtgtgaagagtcaattgagctagtcagtattcctccggcccctgaatgcggctaa

SEQ ID NO: 8295 - DNA, 80 bp, synthetic construct
  misc_feature 1..80: note = Synthetic: >EVB82-cand-420-499
  source 1..80: mol_type = other DNA
aagagtcaattgagctagtcagtattcctccggcccctgaatgcggctaatcctaactgcggagcacgtgcctccaatcc

SEQ ID NO: 8296 - DNA, 80 bp, synthetic construct
  misc_feature 1..80: note = Synthetic: >EVB82-cand-620-699
  source 1..80: mol_type = other DNA
gctattggattggccatccggtgactaacagagcaatcatataccaatttgttggttttataccattgaattacaaagtt

SEQ ID NO: 8297 - DNA, 80 bp, synthetic construct
  misc_feature 1..80: note = Synthetic: >EVB82-cand-700-779
  source 1..80: mol_type = other DNA
ctaatcacccttaaattcattttaacacttaatacgtcaaaatgggagcacaggtatcaacacagaagacaggtgcacac

SEQ ID NO: 8298 - DNA, 80 bp, synthetic construct
  misc_feature 1..80: note = Synthetic: >HCV.A10-cand-3080-3159
  source 1..80: mol_type = other DNA
ggagacctcaaacacaacatacggattgtgcccaaacaatatgatgggcacttttgcagtgagagttgttagtagggagg

SEQ ID NO: 8299 - DNA, 80 bp, synthetic construct
  misc_feature 1..80: note = Synthetic: >HCV.A10-cand-3160-3239
  source 1..80: mol_type = other DNA
caagccaactaaaactacagactagagtgtacatgaagcttaagcatgtgagggcctgggtcccaagaccgatcaggtct

SEQ ID NO: 8300 - DNA, 80 bp, synthetic construct
  misc_feature 1..80: note = Synthetic: >HCV.A10-cand-3240-3319
  source 1..80: mol_type = other DNA
cagccatacctgcttaaaaacttccccaattacgacagtagcaagattaccaacagtgcacgggaccgatccagtatcaa

SEQ ID NO: 8301 - DNA, 80 bp, synthetic construct
  misc_feature 1..80: note = Synthetic: >HCV.A10-cand-3320-3399
  source 1..80: mol_type = other DNA
gcaagctaatatgggtaaatttgggcaacaatctggcgccatctacgttggtaactacagagtggtcaatagacacctgg

SEQ ID NO: 8302 - DNA, 80 bp, synthetic construct
  misc_feature 1..80: note = Synthetic: >HCV.A10-cand-3400-3479
  source 1..80: mol_type = other DNA
ccacccacaatgactgggccaacctggtgtgggaagacagttctcgagacctgcttgtttcgtctaccactgcccagggt

SEQ ID NO: 8303 - DNA, 80 bp, synthetic construct
  misc_feature 1..80: note = Synthetic: >HCV.A10-cand-3520-3599
  source 1..80: mol_type = other DNA
actactgtaactcaaggaggaaacattatccagtcagcttctctaaacctagcctcgtcttcgtagaggccagtgagtat

SEQ ID NO: 8304 - DNA, 80 bp, synthetic construct
  misc_feature 1..80: note = Synthetic: >HCV.A10-cand-3560-3639
  source 1..80: mol_type = other DNA
ctctaaacctagcctcgtcttcgtagaggccagtgagtattaccctgctagatatcaatctcacctaatgctcgctgcag

SEQ ID NO: 8305 - DNA, 80 bp, synthetic construct
  misc_feature 1..80: note = Synthetic: >HCV.A10-cand-3670-3749
  source 1..80: mol_type = other DNA
tcttgaggtgtcagcatggtgtggttggcatagtgtccactggtggcaatggtcttgtcggttttgctaacgtgagggac

SEQ ID NO: 8306 - DNA, 80 bp, synthetic construct
  misc_feature 1..80: note = Synthetic: >HCV.A10-cand-3720-3799
  source 1..80: mol_type = other DNA
ggtcttgtcggttttgctaacgtgagggacctcttatggttggatgaagaagccatggaacagggagtgtctgactatat

SEQ ID NO: 8307 - DNA, 80 bp, synthetic construct
  misc_feature 1..80: note = Synthetic: >HCV.A10-cand-3800-3879
  source 1..80: mol_type = other DNA
caagggactcggcgacgcttttggtactggttttactgacgcagtgtctagggaagtggaggctctgaaaaatcacctga

SEQ ID NO: 8308 - DNA, 80 bp, synthetic construct
  misc_feature 1..80: note = Synthetic: >HCV.A10-cand-3880-3959
  source 1..80: mol_type = other DNA
ttggttccgagggagcggtggagaagatcctgaagaacttggtgaaactcatatcagctctggtcatagttatcagaagt

SEQ ID NO: 8309 - DNA, 80 bp, synthetic construct
  misc_feature 1..80: note = Synthetic: >HCV.A10-cand-3960-4039
  source 1..80: mol_type = other DNA
gactatgacatggtcacccttaccgcaactctagctctgattgggtgtcacgggagcccatgggcgtggatcaaagcaaa

SEQ ID NO: 8310 - DNA, 80 bp, synthetic construct
  misc_feature 1..80: note = Synthetic: >HCV.A10-cand-4030-4109
  source 1..80: mol_type = other DNA
tcaaagcaaagacggcgtccatcttaggtattcctatggcacagaagcagagtgcatcttggcttaagaagttcaacgat

SEQ ID NO: 8311 - DNA, 80 bp, synthetic construct
  misc_feature 1..80: note = Synthetic: >HCV.A10-cand-4110-4189
  source 1..80: mol_type = other DNA
atggcgaacgctgcaaagggattggagtggatctccaacaaaatcagcaaatttattgattggctcaaggaaaagatcat

SEQ ID NO: 8312 - DNA, 80 bp, synthetic construct
  misc_feature 1..80: note = Synthetic: >HCV.A10-cand-4190-4269
  source 1..80: mol_type = other DNA
tccagccgcaaaggaaaaagttgagtttcttaataacctcaagcaactgcccttgatggaaaaccaaattgctaacttag

SEQ ID NO: 8313 - DNA, 80 bp, synthetic construct
  misc_feature 1..80: note = Synthetic: >HCV.A10-cand-4270-4349
  source 1..80: mol_type = other DNA
aacagtctgctgcttcacaagaagaccttgaagtcatgtttggtaatgtgtcatacctagctcacttttgtcgcaagttc

SEQ ID NO: 8314 - DNA, 80 bp, synthetic construct
  misc_feature 1..80: note = Synthetic: >HCV.A5-cand-1580-1659
  source 1..80: mol_type = other DNA
cattgtaacttcacattgttcgtcattcccgtgagtccattgaattatgacgcaggcgccacggcagctataccaatcac

SEQ ID NO: 8315 - DNA, 80 bp, synthetic construct
  misc_feature 1..80: note = Synthetic: >HCV.A5-cand-1700-1779
  source 1..80: mol_type = other DNA
cgtcaagcagtctctcaaggcttgccagtggagataaagcctgggtcttatcaattcctgactacagatgatgaggtttc

SEQ ID NO: 8316 - DNA, 80 bp, synthetic construct
  misc_feature 1..80: note = Synthetic: >HCV.A5-cand-1740-1819
  source 1..80: mol_type = other DNA
ctgggtcttatcaattcctgactacagatgatgaggtttctgccccaatattgccaggatttcaacctaccccggagatc

SEQ ID NO: 8317 - DNA, 80 bp, synthetic construct
  misc_feature 1..80: note = Synthetic: >HCV.A5-cand-1820-1899
  source 1..80: mol_type = other DNA
cacattccaggcgaggtcaggaacttgctagaattgtgccaagttgagacaatcctagaggttaacaacactactgacac

SEQ ID NO: 8318 - DNA, 80 bp, synthetic construct
  misc_feature 1..80: note = Synthetic: >HCV.A5-cand-1900-1979
  source 1..80: mol_type = other DNA
tcatggtatgtctaggttgctgatccctgtgtctgcacaaacagctgctgataaactgtgtgcatcattcagagttgacc

SEQ ID NO: 8319 - DNA, 80 bp, synthetic construct
  misc_feature 1..80: note = Synthetic: >HCV.A5-cand-1980-2059
  source 1..80: mol_type = other DNA
ccgggcgaagcggtccgtgggaatccacactcctgggccagatctgtaggtattacacacaatggtctggttcactcgaa

SEQ ID NO: 8320 - DNA, 80 bp, synthetic construct
  misc_feature 1..80: note = Synthetic: >HCV.A5-cand-2060-2139
  source 1..80: mol_type = other DNA
gtgacattcatgttcacgggctcctttatggctacgggcaagatgctcatagcctacacaccacccggtggagaacaacc

SEQ ID NO: 8321 - DNA, 80 bp, synthetic construct
  misc_feature 1..80: note = Synthetic: >HCV.A5-cand-2140-2219
  source 1..80: mol_type = other DNA
caagacacgtgatgtggccatgctgggcacccatgtgatttgggactttggacttcagtcctcggtcaccttggtcatcc

SEQ ID NO: 8322 - DNA, 80 bp, synthetic construct
  misc_feature 1..80: note = Synthetic: >HCV.A5-cand-2220-2299
  source 1..80: mol_type = other DNA
cttggatcagcaattcacattatagaacagtggagactggtggaatactcgattactattccacagggatagtgaccatc

SEQ ID NO: 8323 - DNA, 80 bp, synthetic construct
  misc_feature 1..80: note = Synthetic: >HCV.A5-cand-2340-2419
  source 1..80: mol_type = other DNA
ccagtgcctatatcatagcccttggagcagctcaaaagaatttcacgcttaagttgtgcagggataccgagtccatctcc

SEQ ID NO: 8324 - DNA, 80 bp, synthetic construct
  misc_feature 1..80: note = Synthetic: >HCV.A5-cand-2380-2459
  source 1..80: mol_type = other DNA
tttcacgcttaagttgtgcagggataccgagtccatctcccagactgccatactacagggtgatccgattgctgatataa

SEQ ID NO: 8325 - DNA, 80 bp, synthetic construct
  misc_feature 1..80: note = Synthetic: >HCV.A5-cand-2470-2549
  source 1..80: mol_type = other DNA
agtgacacagaccactagcagagcaataagtggatcaattcaaccagtgacagctgctaacactcagcccagctcacacc

SEQ ID NO: 8326 - DNA, 80 bp, synthetic construct
  misc_feature 1..80: note = Synthetic: >HCV.A5-cand-2540-2619
  source 1..80: mol_type = other DNA
agctcacaccggcttgggacagggcaggtaccagctctgcaagcggcggagacaggagcaacttcaaacgccaccgatga

SEQ ID NO: 8327 - DNA, 80 bp, synthetic construct
  misc_feature 1..80: note = Synthetic: >HCV.A5-cand-2580-2659
  source 1..80: mol_type = other DNA
aagcggcggagacaggagcaacttcaaacgccaccgatgagagcatgattgaaaccaggtgtgtggtcaacaggcatggg

SEQ ID NO: 8328 - DNA, 80 bp, synthetic construct
  misc_feature 1..80: note = Synthetic: >HCV.A5-cand-2700-2779
  source 1..80: mol_type = other DNA
gcctggcaggaatcttgataattgaggattctgggacctctacaaagggttatgccacttgggaaattgatgtgatggga

SEQ ID NO: 8329 - DNA, 80 bp, synthetic construct
  misc_feature 1..80: note = Synthetic: >HCV.A5-cand-2780-2859
  source 1..80: mol_type = other DNA
tttgtccaattgagacgcaagttggaaatgttcacatacatgcgatttgacgcagaattcacctttatcactgcggaaag

SEQ ID NO: 8330 - DNA, 80 bp, synthetic construct
  misc_feature 1..80: note = Synthetic: >HCV.A5-cand-5430-5509
  source 1..80: mol_type = other DNA
ggcaggcgcaaaccgaccagggacacttcactatgctcggagtgcgtgatcgcatcgccatcctgccccgccactcgcaa

SEQ ID NO: 8331 - DNA, 80 bp, synthetic construct
  misc_feature 1..80: note = Synthetic: >HCV.A5-cand-5510-5589
  source 1..80: mol_type = other DNA
ccaggaaagaccatatgggtcgaacacaagctggttaacgtgcttgatgctgtcgaactggtggatgagcaaggtattaa

SEQ ID NO: 8332 - DNA, 80 bp, synthetic construct
  misc_feature 1..80: note = Synthetic: >HCV.A5-cand-5590-5669
  source 1..80: mol_type = other DNA
cttggaacttacgctggtgaccctagataccaatgagaagtttagagacattaccaaatttattccagagaacatcagtg

SEQ ID NO: 8333 - DNA, 80 bp, synthetic construct
  misc_feature 1..80: note = Synthetic: >HCV.A5-cand-5670-5749
  source 1..80: mol_type = other DNA
gtgccagtgatgcaactttggtgattaacaccgagcacatgccgtcaatgtttgtcccgataggagatgttgtgcagtat

SEQ ID NO: 8334 - DNA, 80 bp, synthetic construct
  misc_feature 1..80: note = Synthetic: >HCV.A5-cand-5740-5819
  source 1..80: mol_type = other DNA
tgtgcagtatgggttcctaaacctcagtggtaagccaacccacagaaccatgatgtacaattttcccacaaaggctgggc

SEQ ID NO: 8335 - DNA, 80 bp, synthetic construct
  misc_feature 1..80: note = Synthetic: >HCV.A5-cand-5830-5909
  source 1..80: mol_type = other DNA
cgtggtcacgtcaattggcaaggttattggtatccacattggaggcaatggacgccaaggcttctgtgctggtttgaaga

SEQ ID NO: 8336 - DNA, 80 bp, synthetic construct
  misc_feature 1..80: note = Synthetic: >HCV.A5-cand-5910-5989
  source 1..80: mol_type = other DNA
ggagctactttgccagtgagcaaggcgagatccagtgggtgaaacctaacaaggagactggtagattgaacattaatgga

SEQ ID NO: 8337 - DNA, 80 bp, synthetic construct
  misc_feature 1..80: note = Synthetic: >HCV.A5-cand-5990-6069
  source 1..80: mol_type = other DNA
ccaacacgcactaagctagaacctagcgtgttccatgatgtgtttgagggcagcaaagaaccagcagttctaacaaataa

SEQ ID NO: 8338 - DNA, 80 bp, synthetic construct
  misc_feature 1..80: note = Synthetic: >HCV.A5-cand-6060-6139
  source 1..80: mol_type = other DNA
taacaaataaagatcctagactggaagtcgactttgagcaagcccttttctccaagtacgtgggcaatgctctgcacgag

SEQ ID NO: 8339 - DNA, 80 bp, synthetic construct
  misc_feature 1..80: note = Synthetic: >HCV.A5-cand-6140-6219
  source 1..80: mol_type = other DNA
cctgatgagtatgtgcagcaggctgctctccactatgcaaaccagctcaaacaactggatataaataccaacaaaatgag

SEQ ID NO: 8340 - DNA, 80 bp, synthetic construct
  misc_feature 1..80: note = Synthetic: >HCV.A5-cand-6210-6289
  source 1..80: mol_type = other DNA
acaaaatgagtatggaggaggcgtgttatggcacggagaacttggaagccattgaccttcatactagtgctgggtaccct

SEQ ID NO: 8341 - DNA, 80 bp, synthetic construct
  misc_feature 1..80: note = Synthetic: >HCV.A5-cand-6290-6369
  source 1..80: mol_type = other DNA
tacagcgctctgggtataaagaagagggacatcttggatcctactactagagatgtatcaaagatgaagttttacatgga

SEQ ID NO: 8342 - DNA, 80 bp, synthetic construct
  misc_feature 1..80: note = Synthetic: >HCV.A5-cand-6360-6439
  source 1..80: mol_type = other DNA
tttacatggacaagtacggtctagacctaccctactccacctacgtgaaagatgaactcaggtccctagacaaaattaag

SEQ ID NO: 8343 - DNA, 80 bp, synthetic construct
  misc_feature 1..80: note = Synthetic: >HCV.A5-cand-6450-6529
  source 1..80: mol_type = other DNA
ctcgcctgatagaagctagtagtctgaatgactcggtgtacctcagaatgacttttggccacctttatgaagtgtttcac

SEQ ID NO: 8344 - DNA, 80 bp, synthetic construct
  misc_feature 1..80: note = Synthetic: >HCV.A5-cand-6530-6609
  source 1..80: mol_type = other DNA
gccaatccagggacagtgacagggtcagcagtcgggtgcaacccggacacgttttggagcaaactcccaatcttgctgcc

SEQ ID NO: 8345 - DNA, 80 bp, synthetic construct
  misc_feature 1..80: note = Synthetic: >HCV.A5-cand-6610-6689
  source 1..80: mol_type = other DNA
tggttcattatttgcctttgattactcagggtatgatgctagcctaagtcccgtttggttcagagctttggagatggtct

SEQ ID NO: 8346 - DNA, 80 bp, synthetic construct
  misc_feature 1..80: note = Synthetic: >JX443691.1-cand-170-249
  source 1..80: mol_type = other DNA
cattggagactaaactcggagaactcaagagacaacttgcagatatggtggcagctcaaaaactggctacaaaaccagtt

SEQ ID NO: 8347 - DNA, 80 bp, synthetic construct
  misc_feature 1..80: note = Synthetic: >JX443691.1-cand-260-339
  source 1..80: mol_type = other DNA
ggcttgagcctgatgatcatttaaaggaaaagtcttcactgagatatgggaatgtcctggatgttaattccattgatctg

SEQ ID NO: 8348 - DNA, 80 bp, synthetic construct
  misc_feature 1..80: note = Synthetic: >JX443691.1-cand-380-459
  source 1..80: mol_type = other DNA
gggcctatattcttggttttgcaatcccgataattctaaaagcattatatatgctttctactcgcgggaggcagactgtc

SEQ ID NO: 8349 - DNA, 80 bp, synthetic construct
  misc_feature 1..80: note = Synthetic: >JX443691.1-cand-460-539
  source 1..80: mol_type = other DNA
aaggacaacaaagggacaaggattaggttcaaggatgattcatcctttgaggaaatcaatggaatacgcaaaccaaaaca

SEQ ID NO: 8350 - DNA, 80 bp, synthetic construct
  misc_feature 1..80: note = Synthetic: >JX443691.1-cand-540-619
  source 1..80: mol_type = other DNA
tctatatgtatcaatgccgactgcacaatccaccatgaaggctgaagagataacaccaggtagatttcggacaattgcct

SEQ ID NO: 8351 - DNA, 80 bp, synthetic construct
  misc_feature 1..80: note = Synthetic: >JX443691.1-cand-630-709
  source 1..80: mol_type = other DNA
ccctgcacaggtaaaagcacgaaacatcattagtcctgttatgggagtgattggatttggcttctttgtaaaggactgga

SEQ ID NO: 8352 - DNA, 80 bp, synthetic construct
  misc_feature 1..80: note = Synthetic: >JX443691.1-cand-720-799
  source 1..80: mol_type = other DNA
tgaagacttcctgtcaaaagaatgcccctttttaccaaaacctaaagctccatctgaggcatttatggctacaaataagg

SEQ ID NO: 8353 - DNA, 80 bp, synthetic construct
  misc_feature 1..80: note = Synthetic: >JX443691.1-cand-810-889
  source 1..80: mol_type = other DNA
caatagacagagacaggtaaatgagtcaaaaatccaggacatagtagatttgatagaccatgcagaaacagaatcagcta

SEQ ID NO: 8354 - DNA, 80 bp, synthetic construct
  misc_feature 1..80: note = Synthetic: >JX443691.1-cand-900-979
  source 1..80: mol_type = other DNA
ggatattgctacaccacattcagtctgggtttttgcatgtgcaccagataggtgcccaccaacagcattatatgttgctg

SEQ ID NO: 8355 - DNA, 80 bp, synthetic construct
  misc_feature 1..80: note = Synthetic: >JX443691.1-cand-990-1069
  source 1..80: mol_type = other DNA
actgggtgctttctttgctattctccaagacatgcgaaatacaatcatggcctcaaagtctgtgggaacagcagaagaaa

SEQ ID NO: 8356 - DNA, 80 bp, synthetic construct
  misc_feature 1..80: note = Synthetic: >JX443691.1-cand-1080-1159
  source 1..80: mol_type = other DNA
gaagtctgctttctatcaatcatacctcagaaggactcagtctatggggattcaacytgatcaaaaaatcataatccttt

SEQ ID NO: 8357 - DNA, 80 bp, synthetic construct
  misc_feature 1..80: note = Synthetic: >JX443691.1-cand-1130-1209
  source 1..80: mol_type = other DNA
ttcaacytgatcaaaaaatcataatcctttacatgttagcctgggggaaagaggctgtgaaccacttccatcttggggat

SEQ ID NO: 8358 - DNA, 80 bp, synthetic construct
  misc_feature 1..80: note = Synthetic: >JX443691.1-cand-1220-1299
  source 1..80: mol_type = other DNA
ctgaacttaggcagcttgctcaggcactgattgacactaaggtgaaagagatttctaaccaagagccattaaaattgtag

SEQ ID NO: 8359 - DNA, 80 bp, synthetic construct
  misc_feature 1..80: note = Synthetic: >JX443691.1-cand-1310-1389
  source 1..80: mol_type = other DNA
aagagcactggataggagggactttccggacttgtgtcaaatgtttaatcatctcaggatctctctgtaatgtgactaat

SEQ ID NO: 8360 - DNA, 80 bp, synthetic construct
  misc_feature 1..80: note = Synthetic: >JX443691.1-cand-1390-1469
  source 1..80: mol_type = other DNA
cgggttgactggagggtggtgggtagtttcactactaattacgggtaagaaaacattatttttcttgcactagggataag

SEQ ID NO: 8361 - DNA, 80 bp, synthetic construct
  misc_feature 1..80: note = Synthetic: >NC_001489.1-cand-3540-3619
  source 1..80: mol_type = other DNA
caattctaaggattttcctaacatgtctgaaacggatttgtgtttcttgctgcattggttaaatccaaagaaaattaatt

SEQ ID NO: 8362 - DNA, 80 bp, synthetic construct
  misc_feature 1..80: note = Synthetic: >NC_001489.1-cand-3620-3699
  source 1..80: mol_type = other DNA
tagcagatagaatgcttggattgtctggagttcaggaaattaaagaacaaggtgttggattaatagcagagtgtagaact

SEQ ID NO: 8363 - DNA, 80 bp, synthetic construct
  misc_feature 1..80: note = Synthetic: >NC_001489.1-cand-3700-3779
  source 1..80: mol_type = other DNA
ttcttagattctattgctggaactttaaaatctatgatgtttggatttcatcattctgtgactgttgaaattataaacac

SEQ ID NO: 8364 - DNA, 80 bp, synthetic construct
  misc_feature 1..80: note = Synthetic: >NC_001489.1-cand-3780-3859
  source 1..80: mol_type = other DNA
tgtgctctgttttgttaagagtggaattttgctttatgtaatacaacaattgaatcaggatgaacattctcacataattg

SEQ ID NO: 8365 - DNA, 80 bp, synthetic construct
  misc_feature 1..80: note = Synthetic: >NC_001489.1-cand-3860-3939
  source 1..80: mol_type = other DNA
gtttgttgagagtcatgaattatgcagatattggttgttcagttatttcatgtggcaaagttttttccaaaatgctggaa

SEQ ID NO: 8366 - DNA, 80 bp, synthetic construct
  misc_feature 1..80: note = Synthetic: >NC_001489.1-cand-3940-4019
  source 1..80: mol_type = other DNA
acagtctttaattggcaaatggactccagaatgatggagttaaggactcagagtttttccaactggttaagagatatttg

SEQ ID NO: 8367 - DNA, 80 bp, synthetic construct
  misc_feature 1..80: note = Synthetic: >NC_001489.1-cand-4020-4099
  source 1..80: mol_type = other DNA
ttctgggatcaccatttttaaaaacttcaaggatgcaatttattggctttatacaaaattaaaggacttttatgaagtga

SEQ ID NO: 8368 - DNA, 80 bp, synthetic construct
  misc_feature 1..80: note = Synthetic: >NC_001489.1-cand-4100-4179
  source 1..80: mol_type = other DNA
attatggcaagaagaaggacattttaaatattcttaaagataaccaacaaaaaatagagaaagccattgaggaagccgat

SEQ ID NO: 8369 - DNA, 80 bp, synthetic construct
  misc_feature 1..80: note = Synthetic: >NC_001489.1-cand-4150-4229
  source 1..80: mol_type = other DNA
aaaatagagaaagccattgaggaagccgatgaattttgcattttgcaaatccaagatgtggaaaaatttgaacagtatca

SEQ ID NO: 8370 - DNA, 80 bp, synthetic construct
  misc_feature 1..80: note = Synthetic: >NC_001489.1-cand-4260-4339
  source 1..80: mol_type = other DNA
aactgttcattcaatggctcaggttgatccaaatttaatggttcatttgtcacctttgagagattgtatagcaagagttc

SEQ ID NO: 8371 - DNA, 80 bp, synthetic construct
  misc_feature 1..80: note = Synthetic: >NC_001489.1-cand-4340-4419
  source 1..80: mol_type = other DNA
atcagaaacttaaaaaccttggatctataaatcaggcaatggtaacgagatgtgagccagttgtttgttatttatatggc

SEQ ID NO: 8372 - DNA, 80 bp, synthetic construct
  misc_feature 1..80: note = Synthetic: >NC_001489.1-cand-4430-4509
  source 1..80: mol_type = other DNA
gaggaaagagcttaacatcaattgcattggcaaccaaaatttgtaaacattatggtgttgagcctgaaaagaatatctat

SEQ ID NO: 8373 - DNA, 80 bp, synthetic construct
  misc_feature 1..80: note = Synthetic: >NC_001489.1-cand-4500-4579
  source 1..80: mol_type = other DNA
gaatatctatactaaacctgtggcttcagattactgggatggatatagtggacaattagtttgcatcattgatgatattg

SEQ ID NO: 8374 - DNA, 80 bp, synthetic construct
  misc_feature 1..80: note = Synthetic: >NC_001489.1-cand-4580-4659
  source 1..80: mol_type = other DNA
gccaaaacacaacagatgaggattggtcagatttttgtcagttagtgtcaggatgtccaatgagattaaacatggcctct

SEQ ID NO: 8375 - DNA, 80 bp, synthetic construct
  misc_feature 1..80: note = Synthetic: >NC_001489.1-cand-4660-4739
  source 1..80: mol_type = other DNA
cttgaggagaagggtaggcatttttcttctccttttataatagcaacttcaaattggtcaaatccaagtccaaaaacagt

SEQ ID NO: 8376 - DNA, 80 bp, synthetic construct
  misc_feature 1..80: note = Synthetic: >NC_001489.1-cand-4740-4819
  source 1..80: mol_type = other DNA
ttatgttaaggaagcaattgaccgcagactccatttcaaggttgaagttaaacctgcttcatttttcaaaaatcctcaca

SEQ ID NO: 8377 - DNA, 80 bp, synthetic construct
  misc_feature 1..80: note = Synthetic: >NC_001611.1-cand-160370-160449
  source 1..80: mol_type = other DNA
ctgtatctgttaaaactacgattatctattaaagacagagatactaaatatagacaataacataccatggaaaaatatta

SEQ ID NO: 8378 - DNA, 80 bp, synthetic construct
  misc_feature 1..80: note = Synthetic: >NC_001611.1-cand-160450-160529
  source 1..80: mol_type = other DNA
cagattttattaaactcttttatagagaaatgtaataattgctcaaataatactatatacaatatcactataaagtcttg

SEQ ID NO: 8379 - DNA, 80 bp, synthetic construct
  misc_feature 1..80: note = Synthetic: >NC_001611.1-cand-160530-160609
  source 1..80: mol_type = other DNA
gactaattatactttggtaaatgttacaactgacaatagtgtctacttaaatgtatctagtgatatcgtgatcaataaaa

SEQ ID NO: 8380 - DNA, 80 bp, synthetic construct
  misc_feature 1..80: note = Synthetic: >NC_001611.1-cand-160610-160689
  source 1..80: mol_type = other DNA
caggaaatattactacattcattaataatacagttaatggtaatttatcgattagtcttaatgatacactaagtatatac

SEQ ID NO: 8381 - DNA, 80 bp, synthetic construct
  misc_feature 1..80: note = Synthetic: >NC_001611.1-cand-160690-160769
  source 1..80: mol_type = other DNA
acagaatcagaacctgtgtttatagtggatccattcattactcttgataaattgtacaactgttcgttctccaaaccaat

SEQ ID NO: 8382 - DNA, 80 bp, synthetic construct
  misc_feature 1..80: note = Synthetic: >NC_001611.1-cand-160770-160849
  source 1..80: mol_type = other DNA
caattatgtaaatatctttaatacagagtttaatactaatactaatactaatactaatactaatactaatactaatacta

SEQ ID NO: 8383 - DNA, 80 bp, synthetic construct
  misc_feature 1..80: note = Synthetic: >NC_001611.1-cand-160850-160929
  source 1..80: mol_type = other DNA
ctacttgtaagaatgagactgactacacaccaatggacatttcttatgttattaatgacaatataacattcattagtaat

SEQ ID NO: 8384 - DNA, 80 bp, synthetic construct
  misc_feature 1..80: note = Synthetic: >NC_001611.1-cand-160930-161009
  source 1..80: mol_type = other DNA
atcacatcaagtacaaaatatatcaactcatgtgtaaattcgtcactgagtttacagatagcggttgtcagaataccagt

SEQ ID NO: 8385 - DNA, 80 bp, synthetic construct
  misc_feature 1..80: note = Synthetic: >NC_001611.1-cand-161010-161089
  source 1..80: mol_type = other DNA
attgtttaataaaacaatggaacaattaggtattactctaggatctgatttggaagcgtatttcatgtgtaagttacagg

SEQ ID NO: 8386 - DNA, 80 bp, synthetic construct
  misc_feature 1..80: note = Synthetic: >NC_001611.1-cand-161090-161169
  source 1..80: mol_type = other DNA
aacttaattgtgacgcgagtattctcttgaacaaggcatcaaaaaatgtaatggatagacaattatcaaaaactccaacg

SEQ ID NO: 8387 - DNA, 80 bp, synthetic construct
  misc_feature 1..80: note = Synthetic: >NC_001611.1-cand-161170-161249
  source 1..80: mol_type = other DNA
agataaaagagatccactgagatgactggaaatcacttctgtctacataagaatcaagctaggctggaaactatttacga

SEQ ID NO: 8388 - DNA, 80 bp, synthetic construct
  misc_feature 1..80: note = Synthetic: >NC_001611.1-cand-161250-161329
  source 1..80: mol_type = other DNA
aactatcaaaatgcagggtacaacaaacaataatgacggaagtaaacgaacgtctccaatatatgataacgttggcaata

SEQ ID NO: 8389 - DNA, 80 bp, synthetic construct
  misc_feature 1..80: note = Synthetic: >NC_001611.1-cand-161330-161409
  source 1..80: mol_type = other DNA
ctaaggattcattgacatatgtaaatattaataaagtatatatgagatacacgttttgatagtcatcctaatcgtatcgg

SEQ ID NO: 8390 - DNA, 80 bp, synthetic construct
  misc_feature 1..80: note = Synthetic: >NC_001611.1-cand-161400-161479
  source 1..80: mol_type = other DNA
atcgtatcggagtacggagatcatcaagttcatcatccgatattattgtaaccacaatgcattggcatcaaaagaagata

SEQ ID NO: 8391 - DNA, 80 bp, synthetic construct
  misc_feature 1..80: note = Synthetic: >NC_001611.1-cand-161480-161559
  source 1..80: mol_type = other DNA
gatgaactgacatatagcgaatataaggagatccaacactattaggagaaagcaggtcatatggaagatgttcaagctgt

SEQ ID NO: 8392 - DNA, 80 bp, synthetic construct
  misc_feature 1..80: note = Synthetic: >NC_001611.1-cand-161560-161639
  source 1..80: mol_type = other DNA
taatatcaatctcgataaacgtgaacaggctgtcggagccacagtttcgagacgaggagatttagaaatgttgggattat

SEQ ID NO: 8393 - DNA, 80 bp, synthetic construct
  misc_feature 1..80: note = Synthetic: >NC_001611.1-cand-180020-180099
  source 1..80: mol_type = other DNA
cagtatctatggaaattatggataatcggtactaataaaaaatagtttaactctttttagaaccagtttggtactggaat

SEQ ID NO: 8394 - DNA, 80 bp, synthetic construct
  misc_feature 1..80: note = Synthetic: >NC_001611.1-cand-180100-180179
  source 1..80: mol_type = other DNA
ttcagttcattcgttgagaatattgatgattttttttaagatgatatttactttttatatgcttgcattacagaataata

SEQ ID NO: 8395 - DNA, 80 bp, synthetic construct
  misc_feature 1..80: note = Synthetic: >NC_001611.1-cand-180180-180259
  source 1..80: mol_type = other DNA
ttcacaggtattattaaaatgagtatcggagctacattaccatatcatcatccatgctcatgtggatggaaaatccatcc

SEQ ID NO: 8396 - DNA, 80 bp, synthetic construct
  misc_feature 1..80: note = Synthetic: >NC_001611.1-cand-180260-180339
  source 1..80: mol_type = other DNA
attatataattaatgatacgtgcatgtttgatatattctttaaatggaacagacatcacagactgagatacgcaaagaat

SEQ ID NO: 8397 - DNA, 80 bp, synthetic construct
  misc_feature 1..80: note = Synthetic: >NC_001611.1-cand-180340-180419
  source 1..80: mol_type = other DNA
cctacattcctaaactttgtatctgacataagaacagtgagaggatcgactccatagtggacaacattaatacaaacgat

SEQ ID NO: 8398 - DNA, 80 bp, synthetic construct
  misc_feature 1..80: note = Synthetic: >NC_001611.1-cand-180420-180499
  source 1..80: mol_type = other DNA
aacttgatttcaaaattatcaatggagatacaacgtgaaatactttattactccattaaataatgtatcacttacgataa

SEQ ID NO: 8399 - DNA, 80 bp, synthetic construct
  misc_feature 1..80: note = Synthetic: >NC_001611.1-cand-180500-180579
  source 1..80: mol_type = other DNA
tgtctctataaacgaccggtttatcattaattaatacaatgtctaaattccatagcatattacaaaatcaccgtctaaga

SEQ ID NO: 8400 - DNA, 80 bp, synthetic construct
  misc_feature 1..80: note = Synthetic: >NC_001611.1-cand-180580-180659
  source 1..80: mol_type = other DNA
tgataaaaacacgtttattttatatgtcaaccattactaaaaaatatattgttctgtttttgttttctttttcttacaca

SEQ ID NO: 8401 - DNA, 80 bp, synthetic construct
  misc_feature 1..80: note = Synthetic: >NC_001611.1-cand-180660-180739
  source 1..80: mol_type = other DNA
catcgctaattatgaaaaagtaaatgatgaaatgtatgagatggtgagatggacgagattgtgaacattgttcgtgatag

SEQ ID NO: 8402 - DNA, 80 bp, synthetic construct
  misc_feature 1..80: note = Synthetic: >NC_001611.1-cand-180740-180819
  source 1..80: mol_type = other DNA
tatgtggtttatacctaacgtatttatggacaacggtgagaatgacggccacgtttctgtcaacaatgtctgtcatatgt

SEQ ID NO: 8403 - DNA, 80 bp, synthetic construct
  misc_feature 1..80: note = Synthetic: >NC_001611.1-cand-180820-180899
  source 1..80: mol_type = other DNA
atttcgcgttctttgatgttgatacatcgtctcatctgtttaagctagttattaaacactgcgatctgaataaacaacta

SEQ ID NO: 8404 - DNA, 80 bp, synthetic construct
  misc_feature 1..80: note = Synthetic: >NC_001611.1-cand-180900-180979
  source 1..80: mol_type = other DNA
aaatgtggtatgtctccattacattgctatgtgatgaatacacgatttaagccatctgtattaaagatattgttacacaa

SEQ ID NO: 8405 - DNA, 80 bp, synthetic construct
  misc_feature 1..80: note = Synthetic: >NC_001611.1-cand-180980-181059
  source 1..80: mol_type = other DNA
cggtgtgaataactttgataataaggataacaaaggacatattcctctacaccactatctgatttattcactatcaatcg

SEQ ID NO: 8406 - DNA, 80 bp, synthetic construct
  misc_feature 1..80: note = Synthetic: >NC_001611.1-cand-181140-181219
  source 1..80: mol_type = other DNA
tataaattcaatgggagattaaactactacgttctgtacaaattattgactaaaggatctgaccctaattgcgtcgacga

SEQ ID NO: 8407 - DNA, 80 bp, synthetic construct
  misc_feature 1..80: note = Synthetic: >NC_001611.1-cand-181270-181349
  source 1..80: mol_type = other DNA
acgaaagtaattattacaagtcaaagagttacactaagatgcgagctgagaagcgattcatctatacgataataaatcat

SEQ ID NO: 8408 - DNA, 80 bp, synthetic construct
  misc_feature 1..80: note = Synthetic: >NC_001611.1-cand-181690-181769
  source 1..80: mol_type = other DNA
acattcagaaagacgaatattataataccatgactcctcttcatacagccttccagaattgtaacaacaatgttgcctca

SEQ ID NO: 8409 - DNA, 80 bp, synthetic construct
  misc_feature 1..80: note = Synthetic: >NC_001943.1-cand-4720-4799
  source 1..80: mol_type = other DNA
gaagcactcagtttggccctgtgcaggcgctaggtgcacagtattccatgtggaagttgaagtatttgaatgtcaaattg

SEQ ID NO: 8410 - DNA, 80 bp, synthetic construct
  misc_feature 1..80: note = Synthetic: >NC_001943.1-cand-4760-4839
  source 1..80: mol_type = other DNA
gtattccatgtggaagttgaagtatttgaatgtcaaattgacctctatggttggtgcatctgctgttaatggtactgtct

SEQ ID NO: 8411 - DNA, 80 bp, synthetic construct
  misc_feature 1..80: note = Synthetic: >NC_001943.1-cand-4860-4939
  source 1..80: mol_type = other DNA
actaccacgcctacttctactagttggtcaggattaggtgcacgtaaacatcttgatgttacggttggtaagaatgcaac

SEQ ID NO: 8412 - DNA, 80 bp, synthetic construct
  misc_feature 1..80: note = Synthetic: >NC_001943.1-cand-4940-5019
  source 1..80: mol_type = other DNA
atttaaattgaaaccttctgaccttggtggacctagggatggctggtggctcacaaacaccaacgacaatgcatctgaca

SEQ ID NO: 8413 - DNA, 80 bp, synthetic construct
  misc_feature 1..80: note = Synthetic: >NC_001943.1-cand-5030-5109
  source 1..80: mol_type = other DNA
ctccattgaaatacacacactcggacgaacaatgtcctcatacaagaatgagcagttcacaggagggctatttttggttg

SEQ ID NO: 8414 - DNA, 80 bp, synthetic construct
  misc_feature 1..80: note = Synthetic: >NC_001943.1-cand-5110-5189
  source 1..80: mol_type = other DNA
aacttgcttcagagtggtgcttcacaggttatgctgccaacccaaaccttgttaacttggtcaagtcaacagataatcaa

SEQ ID NO: 8415 - DNA, 80 bp, synthetic construct
  misc_feature 1..80: note = Synthetic: >NC_001943.1-cand-5160-5239
  source 1..80: mol_type = other DNA
gttaacttggtcaagtcaacagataatcaagtatctgtgacatttgaaggaagtgcaggatcaccattaataatgaatgt

SEQ ID NO: 8416 - DNA, 80 bp, synthetic construct
  misc_feature 1..80: note = Synthetic: >NC_001943.1-cand-5270-5349
  source 1..80: mol_type = other DNA
tcttgcacgctcaacaacacccaccactctagcgcgtgcaggagagagaaccacctcagacacagtatggcaggtgctca

SEQ ID NO: 8417 - DNA, 80 bp, synthetic construct
  misc_feature 1..80: note = Synthetic: >NC_001943.1-cand-5350-5429
  source 1..80: mol_type = other DNA
atacagctgtatctgctgctgagcttgtcacgcctcctccattcaattggttagttaaaggaggttggtggtttgtgaaa

SEQ ID NO: 8418 - DNA, 80 bp, synthetic construct
  misc_feature 1..80: note = Synthetic: >NC_001943.1-cand-5430-5509
  source 1..80: mol_type = other DNA
ctcattgccgggagaaccagaactggctctcgtagcttttatgtgtatcccagctaccaagatgctttgtccaacaagcc

SEQ ID NO: 8419 - DNA, 80 bp, synthetic construct
  misc_feature 1..80: note = Synthetic: >NC_001943.1-cand-5510-5589
  source 1..80: mol_type = other DNA
agcactctgcaccggcagcactccaggaggcatgaggacgcggaatcctgtgacaaccaccctacaattcacacagatga

SEQ ID NO: 8420 - DNA, 80 bp, synthetic construct
  misc_feature 1..80: note = Synthetic: >NC_001943.1-cand-5590-5669
  source 1..80: mol_type = other DNA
accaacctagtctagggcacggtgaagcaccagctgcgtttggtagatccattccagcacctggtgaggagtttaaagtc

SEQ ID NO: 8421 - DNA, 80 bp, synthetic construct
  misc_feature 1..80: note = Synthetic: >NC_001943.1-cand-5670-5749
  source 1..80: mol_type = other DNA
gtcctcacgtttggagccccaatgagccctaatgcaaataacaaacagacttgggttaataaacctcttgatgcgccttc

SEQ ID NO: 8422 - DNA, 80 bp, synthetic construct
  misc_feature 1..80: note = Synthetic: >NC_001943.1-cand-5750-5829
  source 1..80: mol_type = other DNA
aggccattacaatgtgaagattgcaaaggatgttgaccactatctaaccatgcagggtttcacttctatagcttctgttg

SEQ ID NO: 8423 - DNA, 80 bp, synthetic construct
  misc_feature 1..80: note = Synthetic: >NC_001943.1-cand-5830-5909
  source 1..80: mol_type = other DNA
actggtacaccatagattttcaaccatctgaggcccctgccccaatacaaggcctgcaggtacttgtgaacagctcgaaa

SEQ ID NO: 8424 - DNA, 80 bp, synthetic construct
  misc_feature 1..80: note = Synthetic: >NC_001943.1-cand-5910-5989
  source 1..80: mol_type = other DNA
aaagctgatgtgtatgccatcaaacaatttgttacagcgcagaccaacaacaagcaccaggttacaagcctgttcctagt

SEQ ID NO: 8425 - DNA, 80 bp, synthetic construct
  misc_feature 1..80: note = Synthetic: >NC_001959.2-cand-3080-3159
  source 1..80: mol_type = other DNA
aggtggtgatggtggcataggagaaactgaaatggaaatccgtcacagggtcttctataaatccaagagtaagaaacacc

SEQ ID NO: 8426 - DNA, 80 bp, synthetic construct
  misc_feature 1..80: note = Synthetic: >NC_001959.2-cand-3130-3209
  source 1..80: mol_type = other DNA
tcttctataaatccaagagtaagaaacaccaacaagagcaacggcgacaacttggtctagtgactggatcagacatcaga

SEQ ID NO: 8427 - DNA, 80 bp, synthetic construct
  misc_feature 1..80: note = Synthetic: >NC_001959.2-cand-3210-3289
  source 1..80: mol_type = other DNA
aaacgtaagcccattgactggaccccgccaaagaatgaatgggcagatgatgacagagaggtggattataatgaaaagat

SEQ ID NO: 8428 - DNA, 80 bp, synthetic construct
  misc_feature 1..80: note = Synthetic: >NC_001959.2-cand-3260-3339
  source 1..80: mol_type = other DNA
tgacagagaggtggattataatgaaaagatcaattttgaagctcccccgacactatggagccgagtcacaaagtttggat

SEQ ID NO: 8429 - DNA, 80 bp, synthetic construct
  misc_feature 1..80: note = Synthetic: >NC_001959.2-cand-3370-3449
  source 1..80: mol_type = other DNA
tgttcatcacaaccacacatgtagtgccaactggtgtgaaagaattctttggtgagcccctatctagtatagcaatccac

SEQ ID NO: 8430 - DNA, 80 bp, synthetic construct
  misc_feature 1..80: note = Synthetic: >NC_001959.2-cand-3450-3529
  source 1..80: mol_type = other DNA
caagcaggtgagttcacacaattcaggttctcaaagaaaatgcgccctgacttgacaggtatggtccttgaagaaggttg

SEQ ID NO: 8431 - DNA, 80 bp, synthetic construct
  misc_feature 1..80: note = Synthetic: >NC_001959.2-cand-3520-3599
  source 1..80: mol_type = other DNA
aagaaggttgccctgaagggacagtctgctcagtcctaattaaacgggattcgggtgaactacttccgctagccgtccgt

SEQ ID NO: 8432 - DNA, 80 bp, synthetic construct
  misc_feature 1..80: note = Synthetic: >NC_001959.2-cand-3610-3689
  source 1..80: mol_type = other DNA
ttgcctccatgaggatacagggtcggcttgtccatggccaatcagggatgttactgacaggggccaatgcaaaggggatg

SEQ ID NO: 8433 - DNA, 80 bp, synthetic construct
  misc_feature 1..80: note = Synthetic: >NC_001959.2-cand-3720-3799
  source 1..80: mol_type = other DNA
gcaccatacgtccacaagcgcgggaatgactgggttgtgtgtggagtccacgctgcagccacaaagtcaggcaacaccgt

SEQ ID NO: 8434 - DNA, 80 bp, synthetic construct
  misc_feature 1..80: note = Synthetic: >NC_001959.2-cand-3770-3849
  source 1..80: mol_type = other DNA
cgctgcagccacaaagtcaggcaacaccgtggtctgcgctgtacaggctggagagggcgaaaccgcactagaaggtggag

SEQ ID NO: 8435 - DNA, 80 bp, synthetic construct
  misc_feature 1..80: note = Synthetic: >NC_001959.2-cand-3860-3939
  source 1..80: mol_type = other DNA
ttatgccggccacgagattgtgaggtatggaagtggcccagcactgtcaactaaaacaaaattctggaggtcctccccag

SEQ ID NO: 8436 - DNA, 80 bp, synthetic construct
  misc_feature 1..80: note = Synthetic: >NC_001959.2-cand-3900-3979
  source 1..80: mol_type = other DNA
gcactgtcaactaaaacaaaattctggaggtcctccccagaaccactgccccccggagtatatgagccagcatacctggg

SEQ ID NO: 8437 - DNA, 80 bp, synthetic construct
  misc_feature 1..80: note = Synthetic: >NC_001959.2-cand-4010-4089
  source 1..80: mol_type = other DNA
atccctacaacaggtactacgtgaccaactgaaaccctttgcggacccccgcggccgcatgcctgagcctggcctactgg

SEQ ID NO: 8438 - DNA, 80 bp, synthetic construct
  misc_feature 1..80: note = Synthetic: >NC_001959.2-cand-4090-4169
  source 1..80: mol_type = other DNA
aggctgcggttgagactgtaacatccatgttagaacagacaatggataccccaagcccgtggtcttacgctgatgcctgc

SEQ ID NO: 8439 - DNA, 80 bp, synthetic construct
  misc_feature 1..80: note = Synthetic: >NC_001959.2-cand-4200-4279
  source 1..80: mol_type = other DNA
taccctcaccataaaaggaagaatgatgattggaatggcaccaccttcgttggagagctcggtgagcaagctgcacacgc

SEQ ID NO: 8440 - DNA, 80 bp, synthetic construct
  misc_feature 1..80: note = Synthetic: >NC_001959.2-cand-4250-4329
  source 1..80: mol_type = other DNA
tggagagctcggtgagcaagctgcacacgccaacaatatgtatgagaatgctaaacatatgaaacccatttacactgcag

SEQ ID NO: 8441 - DNA, 80 bp, synthetic construct
  misc_feature 1..80: note = Synthetic: >NC_002019.1-cand-910-989
  source 1..80: mol_type = other DNA
ctttgaaagagagggatactctctagtcggaatagaccctttcagactgcttcaaaacagccaagtgtacagcctaatca

SEQ ID NO: 8442 - DNA, 80 bp, synthetic construct
  misc_feature 1..80: note = Synthetic: >NC_002019.1-cand-990-1069
  source 1..80: mol_type = other DNA
gaccaaatgagaatccagcacacaagagtcaactggtgtggatggcatgccattctgccgcatttgaagatctaagagta

SEQ ID NO: 8443 - DNA, 80 bp, synthetic construct
  misc_feature 1..80: note = Synthetic: >NC_002019.1-cand-1070-1149
  source 1..80: mol_type = other DNA
ttgagcttcatcaaagggacgaaggtggtcccaagagggaagctttccactagaggagttcaaattgcttccaatgaaaa

SEQ ID NO: 8444 - DNA, 80 bp, synthetic construct
  misc_feature 1..80: note = Synthetic: >NC_002019.1-cand-1230-1309
  source 1..80: mol_type = other DNA
atcaacagagggcatctgcgggccaaatcagcatacaacctacgttctcagtacagagaaatctcccttttgacagaaca

SEQ ID NO: 8445 - DNA, 80 bp, synthetic construct
  misc_feature 1..80: note = Synthetic: >NC_002019.1-cand-1260-1339
  source 1..80: mol_type = other DNA
gcatacaacctacgttctcagtacagagaaatctcccttttgacagaacaaccgttatggcagcattcactgggaataca

SEQ ID NO: 8446 - DNA, 80 bp, synthetic construct
  misc_feature 1..80: note = Synthetic: >NC_002019.1-cand-1430-1509
  source 1..80: mol_type = other DNA
ttcgagctctcggacgaaaaggcagcgagcccgatcgtgccttcctttgacatgagtaatgaaggatcttatttcttcgg

SEQ ID NO: 8447 - DNA, 80 bp, synthetic construct
  misc_feature 1..80: note = Synthetic: >NC_002020.1-cand-0-79
  source 1..80: mol_type = other DNA
aaagcagggtgacaaagacataatggatccaaacactgtgtcaagctttcaggtagattgctttctttggcatgtccgca

SEQ ID NO: 8448 - DNA, 80 bp, synthetic construct
  misc_feature 1..80: note = Synthetic: >NC_002020.1-cand-80-159
  source 1..80: mol_type = other DNA
aacgagttgcagaccaagaactaggtgatgccccattccttgatcggcttcgccgagatcagaaatccctaagaggaagg

SEQ ID NO: 8449 - DNA, 80 bp, synthetic construct
  misc_feature 1..80: note = Synthetic: >NC_002020.1-cand-180-259
  source 1..80: mol_type = other DNA
catcgagacagccacacgtgctggaaagcagatagtggagcggattctgaaagaagaatccgatgaggcacttaaaatga

SEQ ID NO: 8450 - DNA, 80 bp, synthetic construct
  misc_feature 1..80: note = Synthetic: >NC_002020.1-cand-270-349
  source 1..80: mol_type = other DNA
tgtacctgcgtcgcgttacctaaccgacatgactcttgaggaaatgtcaagggaatggtccatgctcatacccaagcaga

SEQ ID NO: 8451 - DNA, 80 bp, synthetic construct
  misc_feature 1..80: note = Synthetic: >NC_002020.1-cand-640-719
  source 1..80: mol_type = other DNA
aatgagaatgggagacctccactcactccaaaacagaaacgagaaatggcgggaacaattaggtcagaagtttgaagaaa

SEQ ID NO: 8452 - DNA, 80 bp, synthetic construct
  misc_feature 1..80: note = Synthetic: >NC_002020.1-cand-720-799
  source 1..80: mol_type = other DNA
taagatggttgattgaagaagtgagacacaaactgaaggtaacagagaatagttttgagcaaataacatttatgcaagcc

SEQ ID NO: 8453 - DNA, 80 bp, synthetic construct
  misc_feature 1..80: note = Synthetic: >NC_002020.1-cand-800-879
  source 1..80: mol_type = other DNA
ttacatctattgcttgaagtggagcaagagataagaactttctcatttcagcttatttaataataaaaaacacccttgtt

SEQ ID NO: 8454 - DNA, 80 bp, synthetic construct
  misc_feature 1..80: note = Synthetic: >NC_002021.1-cand-20-99
  source 1..80: mol_type = other DNA
atggatgtcaatccgaccttacttttcttaaaagtgccagcacaaaatgctataagcacaactttcccttataccggaga

SEQ ID NO: 8455 - DNA, 80 bp, synthetic construct
  misc_feature 1..80: note = Synthetic: >NC_002021.1-cand-100-179
  source 1..80: mol_type = other DNA
ccctccttacagccatgggacaggaacaggatacaccatggatactgtcaacaggacacatcagtactcagaaaaggcaa

SEQ ID NO: 8456 - DNA, 80 bp, synthetic construct
  misc_feature 1..80: note = Synthetic: >NC_002021.1-cand-180-259
  source 1..80: mol_type = other DNA
gatggacaacaaacaccgaaactggagcaccgcaactcaacccgattgatgggccactgccagaagacaatgaaccaagt

SEQ ID NO: 8457 - DNA, 80 bp, synthetic construct
  misc_feature 1..80: note = Synthetic: >NC_003310.1-cand-42230-42309
  source 1..80: mol_type = other DNA
aaaacttatatatcctgttctatcaacgattctagaatatcatcggctatatcgctaaaattttcatcaaagtcgacatc

SEQ ID NO: 8458 - DNA, 80 bp, synthetic construct
  misc_feature 1..80: note = Synthetic: >NC_003310.1-cand-42300-42379
  source 1..80: mol_type = other DNA
agtcgacatcacaacctaactcagtcaatatattaagaagttccatgatgtcatcttcgtctatttctatatccgtatcc

SEQ ID NO: 8459 - DNA, 80 bp, synthetic construct
  misc_feature 1..80: note = Synthetic: >NC_003310.1-cand-42380-42459
  source 1..80: mol_type = other DNA
attgtagattgttgaccgattatcgagtttaaatcattactaatactcaatccttcagaatacaatctgtgtttcattgt

SEQ ID NO: 8460 - DNA, 80 bp, synthetic construct
  misc_feature 1..80: note = Synthetic: >NC_003310.1-cand-42460-42539
  source 1..80: mol_type = other DNA
aaatttataggcggtgtatttaagttggtagattttcaattatgtatcattatagcaacagtaattcttgctcctccttg

SEQ ID NO: 8461 - DNA, 80 bp, synthetic construct
  misc_feature 1..80: note = Synthetic: >NC_003310.1-cand-42540-42619
  source 1..80: mol_type = other DNA
attttagcatcctcttcattattttcttctacgtacataagcatgtccaatacgttagacaacacaccgacgatggtggc

SEQ ID NO: 8462 - DNA, 80 bp, synthetic construct
  misc_feature 1..80: note = Synthetic: >NC_003310.1-cand-42620-42699
  source 1..80: mol_type = other DNA
cgccacagacacgaatatgactagaccgatgaccatttaaaaaatactctctagctttaacttaaactgtatcgatcatt

SEQ ID NO: 8463 - DNA, 80 bp, synthetic construct
  misc_feature 1..80: note = Synthetic: >NC_003310.1-cand-42940-43019
  source 1..80: mol_type = other DNA
gctgttgaaaatgaaacggtgaatacaataattcagataatgtaaaatcatgattccgtattctgatgatattagaactg

SEQ ID NO: 8464 - DNA, 80 bp, synthetic construct
  misc_feature 1..80: note = Synthetic: >NC_003310.1-cand-43020-43099
  source 1..80: mol_type = other DNA
ctaatggatgtcgatggtatgtatctaggagtatctattttaacaaagcatcgatttgctaatatacaattatccttttg

SEQ ID NO: 8465 - DNA, 80 bp, synthetic construct
  misc_feature 1..80: note = Synthetic: >NC_003310.1-cand-43180-43259
  source 1..80: mol_type = other DNA
tatctagccccgcaatactcctcattacgtttcattttttgtctagaatgcccattttgttcatcttggtacatagatta

SEQ ID NO: 8466 - DNA, 80 bp, synthetic construct
  misc_feature 1..80: note = Synthetic: >NC_003310.1-cand-43350-43429
  source 1..80: mol_type = other DNA
gataccctgatattaatacccctgccgttactattatttataactgatgtaacccacgtaacattggaattaattatcga

SEQ ID NO: 8467 - DNA, 80 bp, synthetic construct
  misc_feature 1..80: note = Synthetic: >NC_003310.1-cand-43430-43509
  source 1..80: mol_type = other DNA
tagtaatgcatcgacacttccaaaattgtctattataaactcaccgataatttttttattgcatgttttcatattcatta

SEQ ID NO: 8468 - DNA, 80 bp, synthetic construct
  misc_feature 1..80: note = Synthetic: >NC_003310.1-cand-43590-43669
  source 1..80: mol_type = other DNA
tcaaatgccagacaatcacgtacaaagtacatggaaataggttttgttctattacgcatcatagattcatataaaacacc

SEQ ID NO: 8469 - DNA, 80 bp, synthetic construct
  misc_feature 1..80: note = Synthetic: >NC_003310.1-cand-43750-43829
  source 1..80: mol_type = other DNA
caaattctaattttttttcattgatagtaccaaattcttctatctctttaactacttgcatagataggtaattacagtga

SEQ ID NO: 8470 - DNA, 80 bp, synthetic construct
  misc_feature 1..80: note = Synthetic: >NC_003310.1-cand-43910-43989
  source 1..80: mol_type = other DNA
tagaatatatgtatgtaaaaatatagtagaatttcattttgttttttctatgctataaatgaattctcattttgtatctg

SEQ ID NO: 8471 - DNA, 80 bp, synthetic construct
  misc_feature 1..80: note = Synthetic: >NC_003310.1-cand-43990-44069
  source 1..80: mol_type = other DNA
cacatactccgttttatatcaataccaaagaaggaagatatctggttctaaaagccgttaaagtatgcgatgttagaact

SEQ ID NO: 8472 - DNA, 80 bp, synthetic construct
  misc_feature 1..80: note = Synthetic: >NC_003310.1-cand-44070-44149
  source 1..80: mol_type = other DNA
gtagaatgcgaaggaagtaaagcttcctgcgtactcaaagtagataaaccctcatcacccacgtgtgagagaagaccttc

SEQ ID NO: 8473 - DNA, 80 bp, synthetic construct
  misc_feature 1..80: note = Synthetic: >NC_003310.1-cand-54530-54609
  source 1..80: mol_type = other DNA
tcgtccatataaaatggattacttaatgtattggcaaaccgtaacataccgttggataactctgctccatttagtaccga

SEQ ID NO: 8474 - DNA, 80 bp, synthetic construct
  misc_feature 1..80: note = Synthetic: >NC_003310.1-cand-55250-55329
  source 1..80: mol_type = other DNA
tatgttgacgcaccagcgtctgtttttgtttctactccataatactcccacaaatactgacacaaacaagcatcatgaat

SEQ ID NO: 8475 - DNA, 80 bp, synthetic construct
  misc_feature 1..80: note = Synthetic: >NC_003310.1-cand-55410-55489
  source 1..80: mol_type = other DNA
aagataatttatatgtatcattaggtaaagtaggacatgatagtacgactttaaatccattttcccaaatatctttacga

SEQ ID NO: 8476 - DNA, 80 bp, synthetic construct
  misc_feature 1..80: note = Synthetic: >NC_003310.1-cand-55490-55569
  source 1..80: mol_type = other DNA
attactttacatataatatcctcatcaacagtcacataattacctgttgttaaaacctttgcaaatgtatcggctttgcc

SEQ ID NO: 8477 - DNA, 80 bp, synthetic construct
  misc_feature 1..80: note = Synthetic: >NC_003310.1-cand-55880-55959
  source 1..80: mol_type = other DNA
agacgattagtaatatatctcagatcaaagttatgtccgttaaaggtaacgacgtagtcgaacgttagttccaacaattg

SEQ ID NO: 8478 - DNA, 80 bp, synthetic construct
  misc_feature 1..80: note = Synthetic: >NC_003310.1-cand-55960-56039
  source 1..80: mol_type = other DNA
tttagctattcgtaacaaaactatttcagaacatagaactagttctcgttcgtaatccatttccattagcgactgtatcc

SEQ ID NO: 8479 - DNA, 80 bp, synthetic construct
  misc_feature 1..80: note = Synthetic: >NC_003310.1-cand-56280-56359
  source 1..80: mol_type = other DNA
cacaatgataacatccattgttaatctttgtcaaatattgctcgtccaacgagtaacatccgtctggagatatcccgtta

SEQ ID NO: 8480 - DNA, 80 bp, synthetic construct
  misc_feature 1..80: note = Synthetic: >NC_003310.1-cand-56400-56479
  source 1..80: mol_type = other DNA
tggcattttgtatgctgcgtttctttggctcttctatcaaccacatatctgcgacggagcattttctatctttaatatct

SEQ ID NO: 8481 - DNA, 80 bp, synthetic construct
  misc_feature 1..80: note = Synthetic: >NC_003310.1-cand-56760-56839
  source 1..80: mol_type = other DNA
gagccatatggaccattatttttatagtactttcgcaagcgggtttagacggcaacatagaagcgtgtaaacgaaaaata

SEQ ID NO: 8482 - DNA, 80 bp, synthetic construct
  misc_feature 1..80: note = Synthetic: >NC_003310.1-cand-56880-56959
  source 1..80: mol_type = other DNA
gacacgcgactatcgctatagaggacaataatgtcatgtctagcgatgatctgaattatatttattattttttcatcaga

SEQ ID NO: 8483 - DNA, 80 bp, synthetic construct
  misc_feature 1..80: note = Synthetic: >NC_003310.1-cand-57040-57119
  source 1..80: mol_type = other DNA
aaaacttatgattagtcacgactgaaataaccgcgtgattattttttggtataattctacacggcatggtttctgtgact

SEQ ID NO: 8484 - DNA, 80 bp, synthetic construct
  misc_feature 1..80: note = Synthetic: >NC_003310.1-cand-57120-57199
  source 1..80: mol_type = other DNA
atgaattcaacacctgttatcttagtgaaatctttaacaaacagcaagggttcgtcaaagacataaaactcattgtttac

SEQ ID NO: 8485 - DNA, 80 bp, synthetic construct
  misc_feature 1..80: note = Synthetic: >NC_003310.1-cand-57440-57519
  source 1..80: mol_type = other DNA
tgatggacagatgatacaaataagaaggtacggtacctttgtccaccatctcctccaattcatactctattttgtcatta

SEQ ID NO: 8486 - DNA, 80 bp, synthetic construct
  misc_feature 1..80: note = Synthetic: >NC_003310.1-cand-57600-57679
  source 1..80: mol_type = other DNA
ataattgtccaagactgtcaatctataatagatagtagctataatatattctatgatggtattgaagaagatgacaacct

SEQ ID NO: 8487 - DNA, 80 bp, synthetic construct
  misc_feature 1..80: note = Synthetic: >NC_003310.1-cand-57680-57759
  source 1..80: mol_type = other DNA
tggcatattgatcatttaacacagacatggtatcaacaaatagcttaaatgaaagagaatcagtaattggaataagcgtc

SEQ ID NO: 8488 - DNA, 80 bp, synthetic construct
  misc_feature 1..80: note = Synthetic: >NC_003310.1-cand-57760-57839
  source 1..80: mol_type = other DNA
ttctcgatgtagtgtccgtataccaacatgtctgatattttgatgtattccattaaattatttagttttttctttttatt

SEQ ID NO: 8489 - DNA, 80 bp, synthetic construct
  misc_feature 1..80: note = Synthetic: >NC_003467.2-cand-250-329
  source 1..80: mol_type = other DNA
tcatacaacatctatggcccagaagagtttcacccaagttgaatggagaaagaaaagtgacacaactgataccacaaatg

SEQ ID NO: 8490 - DNA, 80 bp, synthetic construct
  misc_feature 1..80: note = Synthetic: >NC_003467.2-cand-330-409
  source 1..80: mol_type = other DNA
ctgcgtccactacctttgaagcacaaactaaaactgttaaccttagagggacttgtatactggcacctgaactctatgat

SEQ ID NO: 8491 - DNA, 80 bp, synthetic construct
  misc_feature 1..80: note = Synthetic: >NC_003467.2-cand-410-489
  source 1..80: mol_type = other DNA
acattgaagaaagtaaaaaagacagtcctgtgctatgatctaacatgtaatcaaacacattgtcagccaactgtctatct

SEQ ID NO: 8492 - DNA, 80 bp, synthetic construct
  misc_feature 1..80: note = Synthetic: >NC_003467.2-cand-490-569
  source 1..80: mol_type = other DNA
gattgcacctgtattgacatgcatgtcaataagaagttgtatggctagtgtgtttacaagcaggattcaggtgatttatg

SEQ ID NO: 8493 - DNA, 80 bp, synthetic construct
  misc_feature 1..80: note = Synthetic: >NC_003467.2-cand-570-649
  source 1..80: mol_type = other DNA
aaaagacacattgtgtaacaggtcagctgattgagggtcagtgtttcaacccagcacacacattgacattatctcagcct

SEQ ID NO: 8494 - DNA, 80 bp, synthetic construct
  misc_feature 1..80: note = Synthetic: >NC_003467.2-cand-650-729
  source 1..80: mol_type = other DNA
gctcacacttatgatactgtcacccttcctatctcttgttttttcacaccaaagaagtcggagcaactaaaagttataaa

SEQ ID NO: 8495 - DNA, 80 bp, synthetic construct
  misc_feature 1..80: note = Synthetic: >NC_003467.2-cand-730-809
  source 1..80: mol_type = other DNA
aacatttgaaggaattctgacgaagacaggttgcacggagaatgcattgcagggttattatgtgtgttttttagggagtc

SEQ ID NO: 8496 - DNA, 80 bp, synthetic construct
  misc_feature 1..80: note = Synthetic: >NC_003467.2-cand-810-889
  source 1..80: mol_type = other DNA
attcagaacctttaattgttccgagtttggaggacatacggtctgctgaagttgttagtaggatgcttgtacaccctagg

SEQ ID NO: 8497 - DNA, 80 bp, synthetic construct
  misc_feature 1..80: note = Synthetic: >NC_003467.2-cand-890-969
  source 1..80: mol_type = other DNA
ggagaagaccatgatgccatacagaattcacaaagtcacttaagaatagtgggacctatcacagcaaaagtgccatcaac

SEQ ID NO: 8498 - DNA, 80 bp, synthetic construct
  misc_feature 1..80: note = Synthetic: >NC_003467.2-cand-1000-1079
  source 1..80: mol_type = other DNA
ctttgcaggcgtcccaatgtatagctctttatctacactagtcagaaatgcagacccagaatttgtattttctccaggta

SEQ ID NO: 8499 - DNA, 80 bp, synthetic construct
  misc_feature 1..80: note = Synthetic: >NC_003467.2-cand-1050-1129
  source 1..80: mol_type = other DNA
cagacccagaatttgtattttctccaggtatagtacctgaatctaatcacagtacatgtgataagaagacagtacctatc

SEQ ID NO: 8500 - DNA, 80 bp, synthetic construct
  misc_feature 1..80: note = Synthetic: >NC_003467.2-cand-1130-1209
  source 1..80: mol_type = other DNA
acatggacaggctacctaccaatatcaggtgagatggaaaaagtgactggatgtacagttttttgtacactagcaggacc

SEQ ID NO: 8501 - DNA, 80 bp, synthetic construct
  misc_feature 1..80: note = Synthetic: >NC_003467.2-cand-1220-1299
  source 1..80: mol_type = other DNA
tgtgaggcctattctgaaaatggtatatttaacatcagttctccaacatgtcttgtaaacaaagtccaaagatttcgtgg

SEQ ID NO: 8502 - DNA, 80 bp, synthetic construct
  misc_feature 1..80: note = Synthetic: >NC_003467.2-cand-1300-1379
  source 1..80: mol_type = other DNA
atctgaacagaaaataaattttatctgtcagcgggtagatcaggatgttgttgtatactgcaatgggcaaaagaaagtca

SEQ ID NO: 8503 - DNA, 80 bp, synthetic construct
  misc_feature 1..80: note = Synthetic: >NC_003467.2-cand-1390-1469
  source 1..80: mol_type = other DNA
aactttggttattgggcagtgtatttatacattcacaagcctattttcattgatgcctgatgtagcccactcattggctg

SEQ ID NO: 8504 - DNA, 80 bp, synthetic construct
  misc_feature 1..80: note = Synthetic: >NC_003467.2-cand-1470-1549
  source 1..80: mol_type = other DNA
tagaattatgtgtcccgggattacatggatgggccactgtcatgcttctatcaacattctgctttgggtgggtcttgatt

SEQ ID NO: 8505 - DNA, 80 bp, synthetic construct
  misc_feature 1..80: note = Synthetic: >NC_003899.1-cand-2980-3059
  source 1..80: mol_type = other DNA
aatggcaagctgagcatgacgctatcatggcgaaaatacttgagacaccagctagcagtgacgttttccaaaacaaagtg

SEQ ID NO: 8506 - DNA, 80 bp, synthetic construct
  misc_feature 1..80: note = Synthetic: >NC_003899.1-cand-3060-3139
  source 1..80: mol_type = other DNA
aacgtctgctgggccaaagcgctagaacctgtgttggccaccgccaatattacgctgacccgctcgcagtgggagactat

SEQ ID NO: 8507 - DNA, 80 bp, synthetic construct
  misc_feature 1..80: note = Synthetic: >NC_003899.1-cand-3130-3209
  source 1..80: mol_type = other DNA
gggagactattccagcgttcaaggatgacaaagcgtattcgcctgagatggccttaaactttttctgcaccagattcttt

SEQ ID NO: 8508 - DNA, 80 bp, synthetic construct
  misc_feature 1..80: note = Synthetic: >NC_003899.1-cand-3220-3299
  source 1..80: mol_type = other DNA
tcgacagcgggttgttctccgcgccaactgttccgctgtcttacaccaatgaacactgggataatagcccaggtccaaac

SEQ ID NO: 8509 - DNA, 80 bp, synthetic construct
  misc_feature 1..80: note = Synthetic: >NC_003899.1-cand-3300-3379
  source 1..80: mol_type = other DNA
atgtatgggttgtgcatgcgcaacgctaaagaacttgcacgtcggtatccttgtattctgaaagccgtggatacaggtag

SEQ ID NO: 8510 - DNA, 80 bp, synthetic construct
  misc_feature 1..80: note = Synthetic: >NC_003899.1-cand-3380-3459
  source 1..80: mol_type = other DNA
agtggttgacgttcgcacagacactattaaagactataacccgctaataaatgtggtacccctgaatagaagactcccac

SEQ ID NO: 8511 - DNA, 80 bp, synthetic construct
  misc_feature 1..80: note = Synthetic: >NC_003899.1-cand-3460-3539
  source 1..80: mol_type = other DNA
actcattggttgtcacacagagatacactgggaacggtgattactcccagctagtgaccaagatgacaggaaaaaccgta

SEQ ID NO: 8512 - DNA, 80 bp, synthetic construct
  misc_feature 1..80: note = Synthetic: >NC_003899.1-cand-3540-3619
  source 1..80: mol_type = other DNA
ctagtagtgggtacacctatgaacataccaggaaagagagtcgagacattaggccaaagcccacaatgtacatataaagc

SEQ ID NO: 8513 - DNA, 80 bp, synthetic construct
  misc_feature 1..80: note = Synthetic: >NC_003899.1-cand-3620-3699
  source 1..80: mol_type = other DNA
ggaactggacctgggcattcctgccgctttaggcaaatatgacatcatttttattaacgtgaggactccctaccgacacc

SEQ ID NO: 8514 - DNA, 80 bp, synthetic construct
  misc_feature 1..80: note = Synthetic: >NC_003899.1-cand-3700-3779
  source 1..80: mol_type = other DNA
accattaccaacagtgcgaggaccatgcgatccaccacagcatgcttactagaaaagcagtggaccatttgaacaaaggc

SEQ ID NO: 8515 - DNA, 80 bp, synthetic construct
  misc_feature 1..80: note = Synthetic: >NC_003899.1-cand-3780-3859
  source 1..80: mol_type = other DNA
ggtacgtgcatcgcattgggctatgggactgcggacagagccaccgagaacattatctctgcagtcgctcgctcattcag

SEQ ID NO: 8516 - DNA, 80 bp, synthetic construct
  misc_feature 1..80: note = Synthetic: >NC_003899.1-cand-3860-3939
  source 1..80: mol_type = other DNA
gttctcacgtgtgtgccagccgaagtgtgcctgggaaaacactgaggtcgcgttcgtgtttttcggcaaggacaacggca

SEQ ID NO: 8517 - DNA, 80 bp, synthetic construct
  misc_feature 1..80: note = Synthetic: >NC_003899.1-cand-3940-4019
  source 1..80: mol_type = other DNA
accatctccaagatcaagataggttgagtgttgtgttaaacaacatataccaagggtcaactcaacatgaagctggcaga

SEQ ID NO: 8518 - DNA, 80 bp, synthetic construct
  misc_feature 1..80: note = Synthetic: >NC_003899.1-cand-4020-4099
  source 1..80: mol_type = other DNA
gcacctgcgtatagagtggtgcgcggcgacataacaaagagcaatgatgaggttattgttaacgcggcgaacaacaaagg

SEQ ID NO: 8519 - DNA, 80 bp, synthetic construct
  misc_feature 1..80: note = Synthetic: >NC_003899.1-cand-4100-4179
  source 1..80: mol_type = other DNA
gcaacccggtggcggtgtgtgtggcgccctttacaggaagtggcctggagcttttgataagcagccggtagcaactggta

SEQ ID NO: 8520 - DNA, 80 bp, synthetic construct
  misc_feature 1..80: note = Synthetic: >NC_003899.1-cand-4180-4259
  source 1..80: mol_type = other DNA
aagcgcaccttgtcaagcattctccgaacgtcatccatgccgttggccctaatttttctcggctatcagaaaacgaagga

SEQ ID NO: 8521 - DNA, 80 bp, synthetic construct
  misc_feature 1..80: note = Synthetic: >NC_003899.1-cand-8110-8189
  source 1..80: mol_type = other DNA
agtacaccagtgacaagcctcctggcttttataactggcaccatggagctgtacagtatgagaacaataggttcaccgta

SEQ ID NO: 8522 - DNA, 80 bp, synthetic construct
  misc_feature 1..80: note = Synthetic: >NC_003899.1-cand-8200-8279
  source 1..80: mol_type = other DNA
tcggtggaaagggtgacagcgggagacctattcttgacaacaaaggtagagtcgtcgcaattgtcctgggtggagtcaac

SEQ ID NO: 8523 - DNA, 80 bp, synthetic construct
  misc_feature 1..80: note = Synthetic: >NC_003899.1-cand-8240-8319
  source 1..80: mol_type = other DNA
caaaggtagagtcgtcgcaattgtcctgggtggagtcaacgaaggatccaggacggctctatcagtggtgacatggaacc

SEQ ID NO: 8524 - DNA, 80 bp, synthetic construct
  misc_feature 1..80: note = Synthetic: >NC_003899.1-cand-8360-8439
  source 1..80: mol_type = other DNA
gccatggtcgcttgccactgtcatgtgcgtcctggccaatatcacgtttccatgtgatcaaccaccctgcatgccatgct

SEQ ID NO: 8525 - DNA, 80 bp, synthetic construct
  misc_feature 1..80: note = Synthetic: >NC_003899.1-cand-8430-8509
  source 1..80: mol_type = other DNA
atgccatgctgttatgaaaagaatccacacgaaacactcaccatgttggaacagaattacgacagccgagcctatgatca

SEQ ID NO: 8526 - DNA, 80 bp, synthetic construct
  misc_feature 1..80: note = Synthetic: >NC_003899.1-cand-8510-8589
  source 1..80: mol_type = other DNA
gctgctcgatgccgctgtgaaatgtaatgctaggagaaccaggagagatttggacactcatttcacccagtataagctgg

SEQ ID NO: 8527 - DNA, 80 bp, synthetic construct
  misc_feature 1..80: note = Synthetic: >NC_003899.1-cand-8590-8669
  source 1..80: mol_type = other DNA
cacgcccgtatattgctgattgccctaactgtgggcatagtcggtgcgacagccctatagctatagaagaagtcagaggg

SEQ ID NO: 8528 - DNA, 80 bp, synthetic construct
  misc_feature 1..80: note = Synthetic: >NC_003899.1-cand-8670-8749
  source 1..80: mol_type = other DNA
gatgcgcacgcaggagtcatccgcatccagacatcagctatgttcggtctgaagacggatggagttgatttggcctacat

SEQ ID NO: 8529 - DNA, 80 bp, synthetic construct
  misc_feature 1..80: note = Synthetic: >NC_003899.1-cand-8750-8829
  source 1..80: mol_type = other DNA
gagtttcatgaacggcaaaacgcagaaatcaataaagatcgacaacctgcatgtgcgcacctcagccccttgttccctcg

SEQ ID NO: 8530 - DNA, 80 bp, synthetic construct
  misc_feature 1..80: note = Synthetic: >NC_003899.1-cand-8790-8869
  source 1..80: mol_type = other DNA
gacaacctgcatgtgcgcacctcagccccttgttccctcgtgtcgcaccacggctattacatcctggctcaatgcccacc

SEQ ID NO: 8531 - DNA, 80 bp, synthetic construct
  misc_feature 1..80: note = Synthetic: >NC_003899.1-cand-8910-8989
  source 1..80: mol_type = other DNA
cgccatacgtgcacagttgcccataaggtagaattcaggccagtgggtagagagaaataccgtcacccacctgaacatgg

SEQ ID NO: 8532 - DNA, 80 bp, synthetic construct
  misc_feature 1..80: note = Synthetic: >NC_003899.1-cand-8990-9069
  source 1..80: mol_type = other DNA
agttgaattaccatgcaaccgttacacccacaagcgtgcagaccaaggacactacgttgagatgcatcaacccgggctag

SEQ ID NO: 8533 - DNA, 80 bp, synthetic construct
  misc_feature 1..80: note = Synthetic: >NC_003899.1-cand-9070-9149
  source 1..80: mol_type = other DNA
ttgccgaccactctctccttagcatccacagtgccaaggtgaaaattacggtaccgagcggcgcccaagtgaaatactac

SEQ ID NO: 8534 - DNA, 80 bp, synthetic construct
  misc_feature 1..80: note = Synthetic: >NC_003899.1-cand-9150-9229
  source 1..80: mol_type = other DNA
tgcaagtgcccagacgtacgagagggaactaccagcagcgactatacaaccacctgcacggatgtcaaacaatgcagggc

SEQ ID NO: 8535 - DNA, 80 bp, synthetic construct
  misc_feature 1..80: note = Synthetic: >NC_003899.1-cand-9230-9309
  source 1..80: mol_type = other DNA
ttacctgattgacaacaaaaaatgggtgtacaactctggaagactgcctcgaggagagggcgacacttttaaaggaaaac

SEQ ID NO: 8536 - DNA, 80 bp, synthetic construct
  misc_feature 1..80: note = Synthetic: >NC_003899.1-cand-9310-9389
  source 1..80: mol_type = other DNA
ttcatgtgccctttgtgcctgttaaggccaagtgcatcgccacgctggcaccagagcctctagttgagcacaaacaccgc

SEQ ID NO: 8537 - DNA, 80 bp, synthetic construct
  misc_feature 1..80: note = Synthetic: >NC_005215.1-cand-1980-2059
  source 1..80: mol_type = other DNA
tgatcatatgggcagccagtgcagacacccctttaatggagtctggttggtctgacacagcacatggtgtgggcataatt

SEQ ID NO: 8538 - DNA, 80 bp, synthetic construct
  misc_feature 1..80: note = Synthetic: >NC_005215.1-cand-2060-2139
  source 1..80: mol_type = other DNA
cctatgaagacagatttggagcttgattttgcattggcctcatcatcttcttacagttataggcgaaagcttgttaatcc

SEQ ID NO: 8539 - DNA, 80 bp, synthetic construct
  misc_feature 1..80: note = Synthetic: >NC_005215.1-cand-2140-2219
  source 1..80: mol_type = other DNA
tgctaatcaagaagaaacactcccttttcatttccagttagataaacaagtagtgcatgcagagatccagaacctaggac

SEQ ID NO: 8540 - DNA, 80 bp, synthetic construct
  misc_feature 1..80: note = Synthetic: >NC_005215.1-cand-2190-2269
  source 1..80: mol_type = other DNA
tagtgcatgcagagatccagaacctaggacattggatggatggcacattcaacataaaaactgcttttcactgttatggg

SEQ ID NO: 8541 - DNA, 80 bp, synthetic construct
  misc_feature 1..80: note = Synthetic: >NC_005215.1-cand-2300-2379
  source 1..80: mol_type = other DNA
acagccaagtgtttctttgaaaaggattatcaatatgaaacaagttggggctgtaatccaccagactgtccaggggtagg

SEQ ID NO: 8542 - DNA, 80 bp, synthetic construct
  misc_feature 1..80: note = Synthetic: >NC_005215.1-cand-2400-2479
  source 1..80: mol_type = other DNA
gggtgtaccttgataagctccgttcggttgggaaagcgtacaagatagtatcactcaaatatacacggaaggtgtgtatt

SEQ ID NO: 8543 - DNA, 80 bp, synthetic construct
  misc_feature 1..80: note = Synthetic: >NC_005215.1-cand-2460-2539
  source 1..80: mol_type = other DNA
atacacggaaggtgtgtattcaattaggaacagaacaaacttgtaaacatatagatgtaaatgattgcctggttacccct

SEQ ID NO: 8544 - DNA, 80 bp, synthetic construct
  misc_feature 1..80: note = Synthetic: >NC_005215.1-cand-2540-2619
  source 1..80: mol_type = other DNA
tctgtcaaagtttgtatgattggtactatatcaaagctccagccaggtgataccttgttgttcttaggtcctttagagca

SEQ ID NO: 8545 - DNA, 80 bp, synthetic construct
  misc_feature 1..80: note = Synthetic: >NC_005215.1-cand-2620-2699
  source 1..80: mol_type = other DNA
gggtgggatcattcttaagcaatggtgtacaacatcatgtgtgtttggagatcccggtgatattatgtcaacaacaagtg

SEQ ID NO: 8546 - DNA, 80 bp, synthetic construct
  misc_feature 1..80: note = Synthetic: >NC_005215.1-cand-2680-2759
  source 1..80: mol_type = other DNA
tattatgtcaacaacaagtgggatgcggtgcccagaacatactggatcttttagaaagatctgtgggtttgctacgacac

SEQ ID NO: 8547 - DNA, 80 bp, synthetic construct
  misc_feature 1..80: note = Synthetic: >NC_005215.1-cand-2760-2839
  source 1..80: mol_type = other DNA
caacatgtgagtatcaaggcaacacagtgtctggattccaacgcatgatggcaactcgagattctttccagtcattcaat

SEQ ID NO: 8548 - DNA, 80 bp, synthetic construct
  misc_feature 1..80: note = Synthetic: >NC_005215.1-cand-2840-2919
  source 1..80: mol_type = other DNA
gtgacagaaccacatatcactagcaaccgacttgagtggattgatccagatagcagtatcaaagatcacattaatatggt

SEQ ID NO: 8549 - DNA, 80 bp, synthetic construct
  misc_feature 1..80: note = Synthetic: >NC_005215.1-cand-2910-2989
  source 1..80: mol_type = other DNA
ttaatatggttttaaatcgagatgtttcctttcaggatctaagtgataacccatgcaaggttgacctgcatacacaatca

SEQ ID NO: 8550 - DNA, 80 bp, synthetic construct
  misc_feature 1..80: note = Synthetic: >NC_005215.1-cand-3050-3129
  source 1..80: mol_type = other DNA
gagtgtgcaaattttataacttcaattaaagcatgtgattctgccatgtgttatggagccacagtgacaaatctgcttag

SEQ ID NO: 8551 - DNA, 80 bp, synthetic construct
  misc_feature 1..80: note = Synthetic: >NC_005215.1-cand-3080-3159
  source 1..80: mol_type = other DNA
gcatgtgattctgccatgtgttatggagccacagtgacaaatctgcttagagggtctaacacagttaaagttgttggtaa

SEQ ID NO: 8552 - DNA, 80 bp, synthetic construct
  misc_feature 1..80: note = Synthetic: >NC_005215.1-cand-3170-3249
  source 1..80: mol_type = other DNA
tctggatctttgtttaaatgctgccatgatactgactgtaccgaagaagggttagcagcatctccaccacatttagacag

SEQ ID NO: 8553 - DNA, 80 bp, synthetic construct
  misc_feature 1..80: note = Synthetic: >NC_005217.1-cand-4400-4479
  source 1..80: mol_type = other DNA
gtacattttctaaagagtatgcatggaaagatttcttgaacgaagttaggtgtgaagtggtacctacaaaacatgtccat

SEQ ID NO: 8554 - DNA, 80 bp, synthetic construct
  misc_feature 1..80: note = Synthetic: >NC_005217.1-cand-4480-4559
  source 1..80: mol_type = other DNA
cggtcaaaaatcgcaagaacttttacagtgcgtgagaaggatcaagctattcagaatccaattactgctgttatagggta

SEQ ID NO: 8555 - DNA, 80 bp, synthetic construct
  misc_feature 1..80: note = Synthetic: >NC_005217.1-cand-4560-4639
  source 1..80: mol_type = other DNA
taaatatgcttcaactgtagatgaaatcagtgatgttttagatagttccttttttcctgattcattatctgctgaccttc

SEQ ID NO: 8556 - DNA, 80 bp, synthetic construct
  misc_feature 1..80: note = Synthetic: >NC_005217.1-cand-4640-4719
  source 1..80: mol_type = other DNA
aagtcatgaaggaaggtgtgtatagagagctgggtttagatataggtcttcctgaggtgttgaagcgaatagcaccactt

SEQ ID NO: 8557 - DNA, 80 bp, synthetic construct
  misc_feature 1..80: note = Synthetic: >NC_005217.1-cand-4720-4799
  source 1..80: mol_type = other DNA
ttgtacaaagctgggagatctagagttgttatagtggaaggcaacgtagagggcacagcagaatcaatttgtagctattg

SEQ ID NO: 8558 - DNA, 80 bp, synthetic construct
  misc_feature 1..80: note = Synthetic: >NC_005217.1-cand-4800-4879
  source 1..80: mol_type = other DNA
gcttcgtagcatgtcattggtcaaaacaatcaaagtacgtccaaaaaaagaagtgctcagagcagtttcactatatagca

SEQ ID NO: 8559 - DNA, 80 bp, synthetic construct
  misc_feature 1..80: note = Synthetic: >NC_005217.1-cand-4880-4959
  source 1..80: mol_type = other DNA
caaaggaaaatattgggttacaagatgatgttgcagctacacgattgtgtatagaagtctggagatggtgcaaagctaat

SEQ ID NO: 8560 - DNA, 80 bp, synthetic construct
  misc_feature 1..80: note = Synthetic: >NC_005217.1-cand-4960-5039
  source 1..80: mol_type = other DNA
gatcagaatgtaaatgactggttaaatgcactgtactttgaaaagcaaactctcatggattgggtagaaaggttccgtag

SEQ ID NO: 8561 - DNA, 80 bp, synthetic construct
  misc_feature 1..80: note = Synthetic: >NC_005217.1-cand-5040-5119
  source 1..80: mol_type = other DNA
aaaaggagtggttcctattgaccctgaaattcagtgtattgccttactactttatgatgtgttaggttataagagtgtat

SEQ ID NO: 8562 - DNA, 80 bp, synthetic construct
  misc_feature 1..80: note = Synthetic: >NC_005217.1-cand-5120-5199
  source 1..80: mol_type = other DNA
tgcagatgcaggcaaataggcgagcatattcagggaaacagtatgatgcatattgtgttcaaacgtataatgaagaaaca

SEQ ID NO: 8563 - DNA, 80 bp, synthetic construct
  misc_feature 1..80: note = Synthetic: >NC_005217.1-cand-5200-5279
  source 1..80: mol_type = other DNA
agactctatgagggagatttaagggtcacatttaattttggccttgattgtgcaaggttggaaatcttttgggataagaa

SEQ ID NO: 8564 - DNA, 80 bp, synthetic construct
  misc_feature 1..80: note = Synthetic: >NC_005217.1-cand-5290-5369
  source 1..80: mol_type = other DNA
cttgaaacatcaattacgcaacgtcatgttttaaagttgatgatggaggaagtcacacaagaattgttaaggtgtgggat

SEQ ID NO: 8565 - DNA, 80 bp, synthetic construct
  misc_feature 1..80: note = Synthetic: >NC_005217.1-cand-5360-5439
  source 1..80: mol_type = other DNA
ggtgtgggatgagatttaagacagagcaagtaagtcatacgaggagtttggttttattcaaaacggaatcagggtttgag

SEQ ID NO: 8566 - DNA, 80 bp, synthetic construct
  misc_feature 1..80: note = Synthetic: >NC_005217.1-cand-5450-5529
  source 1..80: mol_type = other DNA
caaatgtgccgtgtatagtcttcaagcattgtgctttgcgtacaggtttaaggactaagcaagctattaataaagagttc

SEQ ID NO: 8567 - DNA, 80 bp, synthetic construct
  misc_feature 1..80: note = Synthetic: >NC_005217.1-cand-5530-5609
  source 1..80: mol_type = other DNA
atgataaatgtccaagcagatgggtttagagctatagcacagatggatatggaaagtccgagatttctattagcacatgc

SEQ ID NO: 8568 - DNA, 80 bp, synthetic construct
  misc_feature 1..80: note = Synthetic: >NC_005217.1-cand-5610-5689
  source 1..80: mol_type = other DNA
ttatcatacattacgtgatgtgcgttaccaagctgtgcaggctgtaggcaatgtgtggtttcaaactgctcaacataaat

SEQ ID NO: 8569 - DNA, 80 bp, synthetic construct
  misc_feature 1..80: note = Synthetic: >NC_005219.1-cand-2590-2669
  source 1..80: mol_type = other DNA
ttgaaggtggtggtctaatatttaaacactggtgtacatccacatgtcaatttggtgacccaggagatatcatgagtcca

SEQ ID NO: 8570 - DNA, 80 bp, synthetic construct
  misc_feature 1..80: note = Synthetic: >NC_005219.1-cand-2670-2749
  source 1..80: mol_type = other DNA
agagacaaaggttttttatgccctgagtttccaggtagtttcaggaagaaatgcaactttgctactacccctatttgtga

SEQ ID NO: 8571 - DNA, 80 bp, synthetic construct
  misc_feature 1..80: note = Synthetic: >NC_005219.1-cand-2750-2829
  source 1..80: mol_type = other DNA
gtatgatggaaatatggtctcaggttacaagaaagtgatggcgacaattgattccttccaatcttttaatacaagcacta

SEQ ID NO: 8572 - DNA, 80 bp, synthetic construct
  misc_feature 1..80: note = Synthetic: >NC_005219.1-cand-2830-2909
  source 1..80: mol_type = other DNA
tgcacttcactgatgaaaggatagagtggaaagaccctgatggaatgctaagggaccatataaacattttagtaacgaag

SEQ ID NO: 8573 - DNA, 80 bp, synthetic construct
  misc_feature 1..80: note = Synthetic: >NC_005219.1-cand-2890-2969
  source 1..80: mol_type = other DNA
taaacattttagtaacgaaggacattgactttgataaccttggtgaaaatccttgcaaaattggcctacaaacatcttct

SEQ ID NO: 8574 - DNA, 80 bp, synthetic construct
  misc_feature 1..80: note = Synthetic: >NC_005219.1-cand-3000-3079
  source 1..80: mol_type = other DNA
ttcacattaacatgtctggtatcactaacagaatgtcctacctttttgacctcaataaaggcttgtgataaggctatctg

SEQ ID NO: 8575 - DNA, 80 bp, synthetic construct
  misc_feature 1..80: note = Synthetic: >NC_005219.1-cand-3040-3119
  source 1..80: mol_type = other DNA
cctttttgacctcaataaaggcttgtgataaggctatctgttatggtgcagagagtgtaacattgacaagaggacaaaat

SEQ ID NO: 8576 - DNA, 80 bp, synthetic construct
  misc_feature 1..80: note = Synthetic: >NC_005219.1-cand-3100-3179
  source 1..80: mol_type = other DNA
cattgacaagaggacaaaatacagtcaaggtatcagggaaaggtggccatagtggttcaacatttaggtgttgccatggg

SEQ ID NO: 8577 - DNA, 80 bp, synthetic construct
  misc_feature 1..80: note = Synthetic: >NC_005219.1-cand-3190-3269
  source 1..80: mol_type = other DNA
cacaaattggactccatgctgctgcacctcaccttgacaaggtaaatgggatttctgagatagaaaatagtaaagtatat

SEQ ID NO: 8578 - DNA, 80 bp, synthetic construct
  misc_feature 1..80: note = Synthetic: >NC_005219.1-cand-3320-3399
  source 1..80: mol_type = other DNA
ggaatggatttcagggatattcagtggtaattggattgtactcattgtcctctgtgtatttctattgttctccttggttt

SEQ ID NO: 8579 - DNA, 80 bp, synthetic construct
  misc_feature 1..80: note = Synthetic: >NC_005219.1-cand-3360-3439
  source 1..80: mol_type = other DNA
ctcattgtcctctgtgtatttctattgttctccttggttttactaagcattctctgtcccgtaaggaagcataaaaaatc

SEQ ID NO: 8580 - DNA, 80 bp, synthetic construct
  misc_feature 1..80: note = Synthetic: >NC_005219.1-cand-3440-3519
  source 1..80: mol_type = other DNA
atagctaaattctgtgactatcctgttcttatgtatagctttaacatatatactaatttttatattccagtatactctat

SEQ ID NO: 8581 - DNA, 80 bp, synthetic construct
  misc_feature 1..80: note = Synthetic: >NC_005219.1-cand-3520-3599
  source 1..80: mol_type = other DNA
ctaacacactaaaaaaaatagtagctttctaaccacaaaacttagattcttcttctgtatgatgtcttaacatcttgcgg

SEQ ID NO: 8582 - DNA, 80 bp, synthetic construct
  misc_feature 1..80: note = Synthetic: >NC_005222.1-cand-0-79
  source 1..80: mol_type = other DNA
agtagactccctaaataacaaactctgaaaagaatggataaatatagagaaattcacaataagttgaaggagttttctcc

SEQ ID NO: 8583 - DNA, 80 bp, synthetic construct
  misc_feature 1..80: note = Synthetic: >NC_005222.1-cand-80-159
  source 1..80: mol_type = other DNA
tggtacattaactgcagtagagtgtatagattatcttgatagactttacgccgtgagacatgacattgtagaccaaatga

SEQ ID NO: 8584 - DNA, 80 bp, synthetic construct
  misc_feature 1..80: note = Synthetic: >NC_005222.1-cand-140-219
  source 1..80: mol_type = other DNA
tgacattgtagaccaaatgattaagcatgactggtctgataataaggattcagaagaagcaatagggaaagtactattat

SEQ ID NO: 8585 - DNA, 80 bp, synthetic construct
  misc_feature 1..80: note = Synthetic: >NC_005222.1-cand-5350-5429
  source 1..80: mol_type = other DNA
agttgattaagtgtgggatgagatttaatacagaacaggtccaaggagtacggcacatggtgttatttaagacagagtct

SEQ ID NO: 8586 - DNA, 80 bp, synthetic construct
  misc_feature 1..80: note = Synthetic: >NC_005222.1-cand-5450-5529
  source 1..80: mol_type = other DNA
aaatattccatgtattgtttataagaactgtgtcctaaggacaagccttaggactacgcaagcaattaaccataaattta

SEQ ID NO: 8587 - DNA, 80 bp, synthetic construct
  misc_feature 1..80: note = Synthetic: >NC_005222.1-cand-5510-5589
  source 1..80: mol_type = other DNA
agcaattaaccataaatttatgattacaataaaggatgatgggcttcgtgctattgcacaacatgatgaagatagcccaa

SEQ ID NO: 8588 - DNA, 80 bp, synthetic construct
  misc_feature 1..80: note = Synthetic: >NC_005222.1-cand-5590-5669
  source 1..80: mol_type = other DNA
gattcctattagctcatgcatttcacacaataagagatattaggtatcaagcggtagatgctgtaagtaatgtatggttc

SEQ ID NO: 8589 - DNA, 80 bp, synthetic construct
  misc_feature 1..80: note = Synthetic: >NC_005222.1-cand-5670-5749
  source 1..80: mol_type = other DNA
atccacaaaggagtaaaactgtatttaaatcccatcatttcatctggtttacttgagaattttatgaagaatcttccagc

SEQ ID NO: 8590 - DNA, 80 bp, synthetic construct
  misc_feature 1..80: note = Synthetic: >NC_005222.1-cand-5750-5829
  source 1..80: mol_type = other DNA
tgcaatccctcctgctgcatattcactgatcatgaaccgtgcaaaaatatctgttgacctctttatgtttaacgatttac

SEQ ID NO: 8591 - DNA, 80 bp, synthetic construct
  misc_feature 1..80: note = Synthetic: >NC_005222.1-cand-5800-5879
  source 1..80: mol_type = other DNA
ctgttgacctctttatgtttaacgatttacttaagctaattaaccctaggaatacattggatctatcaggccttgaaaca

SEQ ID NO: 8592 - DNA, 80 bp, synthetic construct
  misc_feature 1..80: note = Synthetic: >NC_005222.1-cand-5910-5989
  source 1..80: mol_type = other DNA
atgtcaagccgattatggtctgaagaaatgagcttagtagatgatgatgaagagcttgatgatgagttcacaattgactt

SEQ ID NO: 8593 - DNA, 80 bp, synthetic construct
  misc_feature 1..80: note = Synthetic: >NC_005222.1-cand-5990-6069
  source 1..80: mol_type = other DNA
gcaagatgtggattttgagaatatagatatagaagcagacattgaacatttcctgcaggatgaaagttcatacacaggag

SEQ ID NO: 8594 - DNA, 80 bp, synthetic construct
  misc_feature 1..80: note = Synthetic: >NC_005222.1-cand-6030-6109
  source 1..80: mol_type = other DNA
attgaacatttcctgcaggatgaaagttcatacacaggagacctattaatcagcacagaggaaactgaatcaaagaaaat

SEQ ID NO: 8595 - DNA, 80 bp, synthetic construct
  misc_feature 1..80: note = Synthetic: >NC_005222.1-cand-6150-6229
  source 1..80: mol_type = other DNA
aaaagctgggtatcacgtgggttatctattgagaaagtatatagtcctgttaatattatcttaatgtcacggtatatctc

SEQ ID NO: 8596 - DNA, 80 bp, synthetic construct
  misc_feature 1..80: note = Synthetic: >NC_005222.1-cand-6230-6309
  source 1..80: mol_type = other DNA
caaaacatttaatttgagtaccaaacaggtctcattattagatccatatgatttaacagaattagagagcattgtccgag

SEQ ID NO: 8597 - DNA, 80 bp, synthetic construct
  misc_feature 1..80: note = Synthetic: >NC_005222.1-cand-6320-6399
  source 1..80: mol_type = other DNA
atgtgttattgaccagttcgaaagtctcgatagagaggctcagaatatggttgttaataaaggaatatgccctgaggatg

SEQ ID NO: 8598 - DNA, 80 bp, synthetic construct
  misc_feature 1..80: note = Synthetic: >NC_005222.1-cand-6400-6479
  source 1..80: mol_type = other DNA
ttattcctgattcattattttcatttaggcacaccatggtactgttgaggaggttattcccgcaggattctatttcctct

SEQ ID NO: 8599 - DNA, 80 bp, synthetic construct
  misc_feature 1..80: note = Synthetic: >NC_005223.1-cand-0-79
  source 1..80: mol_type = other DNA
agtagactccgcaagaagaagcaaacacagacaaatatgggaaaatcgagtccagtttgtctgtatctgattcttcaggg

SEQ ID NO: 8600 - DNA, 80 bp, synthetic construct
  misc_feature 1..80: note = Synthetic: >NC_005223.1-cand-80-159
  source 1..80: mol_type = other DNA
tctattactatttgatacagtaaatgccaaaaacctgaatgaacttaaaatggagtgtccgcacactattgggctaggtc

SEQ ID NO: 8601 - DNA, 80 bp, synthetic construct
  misc_feature 1..80: note = Synthetic: >NC_005831.2-cand-13810-13889
  source 1..80: mol_type = other DNA
atataagatagtctctcgttattttgacatttatgaaggtggctgtattaaggcatgtgaagttgttgtaacaaatctta

SEQ ID NO: 8602 - DNA, 80 bp, synthetic construct
  misc_feature 1..80: note = Synthetic: >NC_005831.2-cand-13890-13969
  source 1..80: mol_type = other DNA
ataagagtgctggttggccattaaataagtttggtaaagctagtttgtattatgaatctatatcttatgaagaacaggat

SEQ ID NO: 8603 - DNA, 80 bp, synthetic construct
  misc_feature 1..80: note = Synthetic: >NC_005831.2-cand-13970-14049
  source 1..80: mol_type = other DNA
gctttgtttgctttgacaaagcgtaatgtcctccctactatgacacagctgaatcttaagtatgctattagtggtaaaga

SEQ ID NO: 8604 - DNA, 80 bp, synthetic construct
  misc_feature 1..80: note = Synthetic: >NC_005831.2-cand-14050-14129
  source 1..80: mol_type = other DNA
acgtgctagaactgttggtggtgtttctctgttgtctacaatgaccacaagacaataccatcaaaaacatcttaaatcca

SEQ ID NO: 8605 - DNA, 80 bp, synthetic construct
  misc_feature 1..80: note = Synthetic: >NC_005831.2-cand-14130-14209
  source 1..80: mol_type = other DNA
ttgttaatacacgcaatgccactgttgttattggtactaccaaattttatggtggttggaataatatgttgcgtacttta

SEQ ID NO: 8606 - DNA, 80 bp, synthetic construct
  misc_feature 1..80: note = Synthetic: >NC_005831.2-cand-14210-14289
  source 1..80: mol_type = other DNA
attgatggtgttgaaaaccctatgcttatgggttgggattatcccaaatgtgatagagctttgcctaacatgatacgtat

SEQ ID NO: 8607 - DNA, 80 bp, synthetic construct
  misc_feature 1..80: note = Synthetic: >NC_005831.2-cand-14290-14369
  source 1..80: mol_type = other DNA
gatttcagccatggtgttgggctctaagcatgttaattgttgtactgcaacagataggttttataggcttggtaatgagt

SEQ ID NO: 8608 - DNA, 80 bp, synthetic construct
  misc_feature 1..80: note = Synthetic: >NC_005831.2-cand-14370-14449
  source 1..80: mol_type = other DNA
tggcacaagttttaacagaagttgtttattctaatggtggtttttattttaagccaggtggtacgacttctggtgacgct

SEQ ID NO: 8609 - DNA, 80 bp, synthetic construct
  misc_feature 1..80: note = Synthetic: >NC_005831.2-cand-14450-14529
  source 1..80: mol_type = other DNA
agtacagcttatgctaattctatttttaacatttttcaagccgtgagttctaacattaacaggttgcttagtgtcccatc

SEQ ID NO: 8610 - DNA, 80 bp, synthetic construct
  misc_feature 1..80: note = Synthetic: >NC_005831.2-cand-14530-14609
  source 1..80: mol_type = other DNA
agattcatgtaataatgttaatgttagggatctacaacgacgtctgtatgataattgttataggttaactagtgttgaag

SEQ ID NO: 8611 - DNA, 80 bp, synthetic construct
  misc_feature 1..80: note = Synthetic: >NC_005831.2-cand-14610-14689
  source 1..80: mol_type = other DNA
agtcattcattgatgattattatggttatcttaggaaacatttttcaatgatgattctctctgatgacggtgttgtctgt

SEQ ID NO: 8612 - DNA, 80 bp, synthetic construct
  misc_feature 1..80: note = Synthetic: >NC_005831.2-cand-14690-14769
  source 1..80: mol_type = other DNA
tataacaaggattatgctgagttaggttatatagcagacattagtgcttttaaagccactttgtattaccagaataatgt

SEQ ID NO: 8613 - DNA, 80 bp, synthetic construct
  misc_feature 1..80: note = Synthetic: >NC_005831.2-cand-14770-14849
  source 1..80: mol_type = other DNA
ctttatgagtacttctaaatgttgggttgaagaagatttaactaagggaccacatgagttttgttcccagcatactatgc

SEQ ID NO: 8614 - DNA, 80 bp, synthetic construct
  misc_feature 1..80: note = Synthetic: >NC_005831.2-cand-14850-14929
  source 1..80: mol_type = other DNA
aaatagttgacaaagatggtacctattatttgccttacccagatcctagtaggatcttgtcagctggtgtttttgttgat

SEQ ID NO: 8615 - DNA, 80 bp, synthetic construct
  misc_feature 1..80: note = Synthetic: >NC_005831.2-cand-14930-15009
  source 1..80: mol_type = other DNA
gatgttgttaagacagatgctgttgttttgttagaacgttatgtgtctttagctattgatgcataccctctttcaaaaca

SEQ ID NO: 8616 - DNA, 80 bp, synthetic construct
  misc_feature 1..80: note = Synthetic: >NC_005831.2-cand-15010-15089
  source 1..80: mol_type = other DNA
ccctaattccgaatatcgtaaggttttttacgtattacttgattgggttaagcatcttaacaaaaatttgaatgagggtg

SEQ ID NO: 8617 - DNA, 80 bp, synthetic construct
  misc_feature 1..80: note = Synthetic: >NC_005831.2-cand-18910-18989
  source 1..80: mol_type = other DNA
ttttacgcttactacgaacgctgttttattttctactgttgtcattaaaaatttaacacctataaagttgaattttggta

SEQ ID NO: 8618 - DNA, 80 bp, synthetic construct
  misc_feature 1..80: note = Synthetic: >NC_005831.2-cand-18990-19069
  source 1..80: mol_type = other DNA
tgttgaatggtatgccagtttcttctattaagggtgataaaggtgttgaaaaattagttaattggtacatatatgttcgt

SEQ ID NO: 8619 - DNA, 80 bp, synthetic construct
  misc_feature 1..80: note = Synthetic: >NC_005831.2-cand-19070-19149
  source 1..80: mol_type = other DNA
aaaaatggtcaatttcaagatcactatgatggtttttacactcaaggtaggaatttatcagactttacaccaagaagtga

SEQ ID NO: 8620 - DNA, 80 bp, synthetic construct
  misc_feature 1..80: note = Synthetic: >NC_005831.2-cand-19150-19229
  source 1..80: mol_type = other DNA
tatggagtatgattttcttaacatggatatgggtgtttttattaataaatatggtcttgaggattttaattttgaacatg

SEQ ID NO: 8621 - DNA, 80 bp, synthetic construct
  misc_feature 1..80: note = Synthetic: >NC_005831.2-cand-19230-19309
  source 1..80: mol_type = other DNA
ttgtatatggtgatgtttcaaaaactacattaggaggtcttcatttgttgatatcacagtttaggcttagtaaaatgggt

SEQ ID NO: 8622 - DNA, 80 bp, synthetic construct
  misc_feature 1..80: note = Synthetic: >NC_005831.2-cand-19310-19389
  source 1..80: mol_type = other DNA
gttttgaaagctgatgattttgtcactgcttctgacacaactttgaggtgctgtactgttacttatcttaatgaacttag

SEQ ID NO: 8623 - DNA, 80 bp, synthetic construct
  misc_feature 1..80: note = Synthetic: >NC_005831.2-cand-19390-19469
  source 1..80: mol_type = other DNA
ttcaaaagttgtttgtacttatatggatttgttgttggacgactttgttactatactaaagagtttagatcttggtgtaa

SEQ ID NO: 8624 - DNA, 80 bp, synthetic construct
  misc_feature 1..80: note = Synthetic: >NC_005831.2-cand-19470-19549
  source 1..80: mol_type = other DNA
tatctaaagttcatgaagttattatagataataaaccttataggtggatgttgtggtgtaaagataaccacttgtccact

SEQ ID NO: 8625 - DNA, 80 bp, synthetic construct
  misc_feature 1..80: note = Synthetic: >NC_005831.2-cand-19550-19629
  source 1..80: mol_type = other DNA
ttttatccacagttgcagtctgctgaatggaagtgtggttatgctatgccacaaatttataagcttcaacgtatgtgttt

SEQ ID NO: 8626 - DNA, 80 bp, synthetic construct
  misc_feature 1..80: note = Synthetic: >NC_005831.2-cand-19630-19709
  source 1..80: mol_type = other DNA
ggaaccttgtaatttatataattatggtgctggtattaagttgcctagtggtataatgttaaatgttgttaaatacactc

SEQ ID NO: 8627 - DNA, 80 bp, synthetic construct
  misc_feature 1..80: note = Synthetic: >NC_005831.2-cand-19710-19789
  source 1..80: mol_type = other DNA
agctttgtcaatacctaaatagcactacaatgtgcgtacctcataatatgcgtgttttgcactatggtgctggttctgac

SEQ ID NO: 8628 - DNA, 80 bp, synthetic construct
  misc_feature 1..80: note = Synthetic: >NC_005831.2-cand-19790-19869
  source 1..80: mol_type = other DNA
aaaggtgtggcacctggtacaactgttttaaaacgttggctaccacccgatgcaataatcattgataatgatatcaatga

SEQ ID NO: 8629 - DNA, 80 bp, synthetic construct
  misc_feature 1..80: note = Synthetic: >NC_005831.2-cand-19870-19949
  source 1..80: mol_type = other DNA
ttatgttagtgatgcagattttagcattacaggtgattgtgctactgtttatcttgaagataagtttgacttacttattt

SEQ ID NO: 8630 - DNA, 80 bp, synthetic construct
  misc_feature 1..80: note = Synthetic: >NC_005831.2-cand-19950-20029
  source 1..80: mol_type = other DNA
ctgatatgtatgatggtagaattaaattttgtgatggtgaaaatgtctctaaagatgggttttttacttatcttaatggt

SEQ ID NO: 8631 - DNA, 80 bp, synthetic construct
  misc_feature 1..80: note = Synthetic: >NC_005831.2-cand-20030-20109
  source 1..80: mol_type = other DNA
gttattagagaaaaattagctattggtggtagtgttgccattaagattacagaatatagttggaataagtatctttatga

SEQ ID NO: 8632 - DNA, 80 bp, synthetic construct
  misc_feature 1..80: note = Synthetic: >NC_005831.2-cand-20110-20189
  source 1..80: mol_type = other DNA
attaatacaaagatttgctttttggactttgttttgcacgtctgttaatacatcctcttcagaagcttttcttattggta

SEQ ID NO: 8633 - DNA, 80 bp, synthetic construct
  misc_feature 1..80: note = Synthetic: >NC_005831.2-cand-22760-22839
  source 1..80: mol_type = other DNA
ttccttctaactggactacttcagttcaagttgagtacctccaaattactagtactccaatagttgttgattgtgctact

SEQ ID NO: 8634 - DNA, 80 bp, synthetic construct
  misc_feature 1..80: note = Synthetic: >NC_005831.2-cand-22840-22919
  source 1..80: mol_type = other DNA
tatgtgtgtaatggtaaccctcgctgtaagaatctacttaagcagtatacttctgcttgtaaaactattgaagatgcctt

SEQ ID NO: 8635 - DNA, 80 bp, synthetic construct
  misc_feature 1..80: note = Synthetic: >NC_005831.2-cand-22920-22999
  source 1..80: mol_type = other DNA
acgacttagtgctcatttggaaactaatgatgttagtagtatgctaactttcgatagcaatgcttttagtttggctaatg

SEQ ID NO: 8636 - DNA, 80 bp, synthetic construct
  misc_feature 1..80: note = Synthetic: >NC_005831.2-cand-23000-23079
  source 1..80: mol_type = other DNA
ttactagttttggagattataacctttctagtgttttacctcagagaaacattcgttcaagccgtatagcaggacgtagt

SEQ ID NO: 8637 - DNA, 80 bp, synthetic construct
  misc_feature 1..80: note = Synthetic: >NC_005831.2-cand-23080-23159
  source 1..80: mol_type = other DNA
gctttggaagatttgttgtttagcaaagttgttacatctggtttgggtactgttgatgttgactataagtcttgtactaa

SEQ ID NO: 8638 - DNA, 80 bp, synthetic construct
  misc_feature 1..80: note = Synthetic: >NC_005831.2-cand-23160-23239
  source 1..80: mol_type = other DNA
aggtctttctattgctgaccttgcttgtgctcagtactacaatggcataatggttttgccaggtgttgctgatgctgaac

SEQ ID NO: 8639 - DNA, 80 bp, synthetic construct
  misc_feature 1..80: note = Synthetic: >NC_005831.2-cand-23240-23319
  source 1..80: mol_type = other DNA
gtatggccatgtacacaggttctcttataggtggcatggtgctcggaggtcttacatcagcagccgccatacctttttct

SEQ ID NO: 8640 - DNA, 80 bp, synthetic construct
  misc_feature 1..80: note = Synthetic: >NC_005831.2-cand-23320-23399
  source 1..80: mol_type = other DNA
ttggcactgcaagcacgacttaactatgttgctttacaaactgatgtgcttcaagaaaatcagaaaattttggctgcatc

SEQ ID NO: 8641 - DNA, 80 bp, synthetic construct
  misc_feature 1..80: note = Synthetic: >NC_005831.2-cand-23410-23489
  source 1..80: mol_type = other DNA
gctattaataatattgttgcttcttttagtagcgttaatgatgctattacacaaactgcagaggctatacatactgttac

SEQ ID NO: 8642 - DNA, 80 bp, synthetic construct
  misc_feature 1..80: note = Synthetic: >NC_005831.2-cand-23490-23569
  source 1..80: mol_type = other DNA
tattgcacttaataagattcaggatgttgttaatcaacagggtagtgctcttaaccatctcacttcacaattgagacata

SEQ ID NO: 8643 - DNA, 80 bp, synthetic construct
  misc_feature 1..80: note = Synthetic: >NC_005831.2-cand-23570-23649
  source 1..80: mol_type = other DNA
attttcaggccatttctaattcaattcaggctatttatgaccggcttgattcaattcaagccgatcaacaagttgacaga

SEQ ID NO: 8644 - DNA, 80 bp, synthetic construct
  misc_feature 1..80: note = Synthetic: >NC_005831.2-cand-23650-23729
  source 1..80: mol_type = other DNA
ttaattactggacggcttgcagctttgaatgcatttgtttcccaagttttgaataaatatactgaagttcgtggttcaag

SEQ ID NO: 8645 - DNA, 80 bp, synthetic construct
  misc_feature 1..80: note = Synthetic: >NC_005831.2-cand-23730-23809
  source 1..80: mol_type = other DNA
acgcttagcacagcagaagattaatgaatgtgtcaagtcacaatctaatagatatggtttttgtggcaatggcactcaca

SEQ ID NO: 8646 - DNA, 80 bp, synthetic construct
  misc_feature 1..80: note = Synthetic: >NC_005831.2-cand-23810-23889
  source 1..80: mol_type = other DNA
tcttttcaatcgtcaactcagctccagatggtttgctttttcttcatactgttttgctgccaactgattacaagaatgta

SEQ ID NO: 8647 - DNA, 80 bp, synthetic construct
  misc_feature 1..80: note = Synthetic: >NC_005831.2-cand-23890-23969
  source 1..80: mol_type = other DNA
aaggcgtggtctggtatctgtgttgatggcatttatggctatgttctgcgtcaacctaacttggttctttattctgataa

SEQ ID NO: 8648 - DNA, 80 bp, synthetic construct
  misc_feature 1..80: note = Synthetic: >NC_005831.2-cand-23970-24049
  source 1..80: mol_type = other DNA
tggtgtctttcgtgtaacttccagggtcatgtttcaacctcgcttacctgttttgtctgattttgtgcaaatatataatt

SEQ ID NO: 8649 - DNA, 80 bp, synthetic construct
  misc_feature 1..80: note = Synthetic: >NC_006213.1-cand-2850-2929
  source 1..80: mol_type = other DNA
ttttaatactattttaaatactgcgtgtggagtgtttgaagtggatgatactgttgatatggaggaattttatgctgtgg

SEQ ID NO: 8650 - DNA, 80 bp, synthetic construct
  misc_feature 1..80: note = Synthetic: >NC_006213.1-cand-2930-3009
  source 1..80: mol_type = other DNA
tgattgatgccatagaagagaaactttctccatgtaaggagcttgaaggtgtaggtgctaaagttagtgcctttttacag

SEQ ID NO: 8651 - DNA, 80 bp, synthetic construct
  misc_feature 1..80: note = Synthetic: >NC_006213.1-cand-3010-3089
  source 1..80: mol_type = other DNA
aaattagaggataatcccctatttttatttgatgaggctggcgaggaagttcttgctcctaaattgtattgtgcctttac

SEQ ID NO: 8652 - DNA, 80 bp, synthetic construct
  misc_feature 1..80: note = Synthetic: >NC_006213.1-cand-3090-3169
  source 1..80: mol_type = other DNA
agctcctgaagatgatgactttcttgaggaaagtgatgttgaagaagatgatgtagaaggtgaggaaactgatttaactg

SEQ ID NO: 8653 - DNA, 80 bp, synthetic construct
  misc_feature 1..80: note = Synthetic: >NC_006213.1-cand-3170-3249
  source 1..80: mol_type = other DNA
tcacaagtgctggacagccttgtgttgctagtgaacaggaggagtcttctgaagtcttagaggacactttggatgatggt

SEQ ID NO: 8654 - DNA, 80 bp, synthetic construct
  misc_feature 1..80: note = Synthetic: >NC_006213.1-cand-3250-3329
  source 1..80: mol_type = other DNA
ccaagtgtggagacatctgattcacaagttgaagaagatgtagaaatgtcggattttgttgatcttgaatctgtgattca

SEQ ID NO: 8655 - DNA, 80 bp, synthetic construct
  misc_feature 1..80: note = Synthetic: >NC_006213.1-cand-3330-3409
  source 1..80: mol_type = other DNA
ggattatgaaaatgtttgttttgagttttatactacagagccagaatttgttaaagttttgggtctgtatgtgcctaaag

SEQ ID NO: 8656 - DNA, 80 bp, synthetic construct
  misc_feature 1..80: note = Synthetic: >NC_006213.1-cand-3410-3489
  source 1..80: mol_type = other DNA
caactcgcaacaattgctggttgcgatcagttttggcagtgatgcagaaattgccctgtcaatttaaagataaaaatttg

SEQ ID NO: 8657 - DNA, 80 bp, synthetic construct
  misc_feature 1..80: note = Synthetic: >NC_006213.1-cand-3490-3569
  source 1..80: mol_type = other DNA
caggatctttgggtgttatacaagcaacagtatagtcagttgtttgttgataccttggttaataagatacctgctaatat

SEQ ID NO: 8658 - DNA, 80 bp, synthetic construct
  misc_feature 1..80: note = Synthetic: >NC_006213.1-cand-3570-3649
  source 1..80: mol_type = other DNA
tgtacttccacaaggtggttatgttgctgattttgcatattggtttttaaccttatgtgattggcagtgtgttgcatact

SEQ ID NO: 8659 - DNA, 80 bp, synthetic construct
  misc_feature 1..80: note = Synthetic: >NC_006213.1-cand-3650-3729
  source 1..80: mol_type = other DNA
ggaaatgcattaaatgtgatttagctcttaagcttaaaggcttggatgctatgttcttttatggtgatgttgtttcacat

SEQ ID NO: 8660 - DNA, 80 bp, synthetic construct
  misc_feature 1..80: note = Synthetic: >NC_006213.1-cand-3730-3809
  source 1..80: mol_type = other DNA
atatgcaagtgtggtgagtctatggtacttattgatgttgatgtgccatttacagcccactttgctcttaaagataagtt

SEQ ID NO: 8661 - DNA, 80 bp, synthetic construct
  misc_feature 1..80: note = Synthetic: >NC_006213.1-cand-3810-3889
  source 1..80: mol_type = other DNA
gttttgtgcatttattactaagcgtattgtgtataaagcagcttgtgttgtggatgttaatgatagtcattctatggctg

SEQ ID NO: 8662 - DNA, 80 bp, synthetic construct
  misc_feature 1..80: note = Synthetic: >NC_006213.1-cand-3890-3969
  source 1..80: mol_type = other DNA
ttgttgatggtaaacaaattgatgatcatcgtatcactagtattactagtgataagtttgattttattattgggcatggt

SEQ ID NO: 8663 - DNA, 80 bp, synthetic construct
  misc_feature 1..80: note = Synthetic: >NC_006213.1-cand-3970-4049
  source 1..80: mol_type = other DNA
atgtcattttcaatgactacttttgaaattgcccaattgtatggttcttgtataacacctaatgtgtgttttgttaaagg

SEQ ID NO: 8664 - DNA, 80 bp, synthetic construct
  misc_feature 1..80: note = Synthetic: >NC_006213.1-cand-4050-4129
  source 1..80: mol_type = other DNA
tgatataattaaagtatctaagcttgttaaagcagaagttgttgtaaaccctgctaatggccatatggcacatggtggtg

SEQ ID NO: 8665 - DNA, 80 bp, synthetic construct
  misc_feature 1..80: note = Synthetic: >NC_007548.1-cand-3210-3289
  source 1..80: mol_type = other DNA
aattgtatgaatctcccggttttggtgcaacacaattaaatgcgctaccattagatttaacggcagcagaaaaagttttc

SEQ ID NO: 8666 - DNA, 80 bp, synthetic construct
  misc_feature 1..80: note = Synthetic: >NC_007548.1-cand-3290-3369
  source 1..80: mol_type = other DNA
tctattaaactaaatttaccaaatacatactatgaactcttaatgttaatattgttatatgagtacgtcaattttgtcat

SEQ ID NO: 8667 - DNA, 80 bp, synthetic construct
  misc_feature 1..80: note = Synthetic: >NC_007548.1-cand-3370-3449
  source 1..80: mol_type = other DNA
gttcactggcgatactttcagagcggtgtgcattccagaatcacaaactataaacgcaaaattagtcaaaacggtcatga

SEQ ID NO: 8668 - DNA, 80 bp, synthetic construct
  misc_feature 1..80: note = Synthetic: >NC_007548.1-cand-3440-3519
  source 1..80: mol_type = other DNA
acggtcatgaccatgattgataacattcagttagacacagttatgttttctgataacatatattaaacgtgagagtacat

SEQ ID NO: 8669 - DNA, 80 bp, synthetic construct
  misc_feature 1..80: note = Synthetic: >NC_007549.1-cand-0-79
  source 1..80: mol_type = other DNA
cttaagcgctgcaagatggaagtgattgaaaagctcgagacaattagagaaacgttaaatgacacaaaagataaaaaaga

SEQ ID NO: 8670 - DNA, 80 bp, synthetic construct
  misc_feature 1..80: note = Synthetic: >NC_007549.1-cand-80-159
  source 1..80: mol_type = other DNA
tttccaaaaaattcatgatgaactagttcaatatcttgacggtatagatccactgactatcgatgatgataaatggaatg

SEQ ID NO: 8671 - DNA, 80 bp, synthetic construct
  misc_feature 1..80: note = Synthetic: >NC_007549.1-cand-170-249
  source 1..80: mol_type = other DNA
actttttaaaattatcatagtaaagttaaaaaactcaacaatcaaaacgacttctcttgaaaatgagttaacccaacatg

SEQ ID NO: 8672 - DNA, 80 bp, synthetic construct
  misc_feature 1..80: note = Synthetic: >NC_007549.1-cand-250-329
  source 1..80: mol_type = other DNA
agaaaaaaagaacggttaaagaagtggaaaaagttgaagaagacatgaaggtggatgtggcgaatgataatagcaaacca

SEQ ID NO: 8673 - DNA, 80 bp, synthetic construct
  misc_feature 1..80: note = Synthetic: >NC_007549.1-cand-330-409
  source 1..80: mol_type = other DNA
actcttatggataaagtattacaggtgtcaagtcagccaaataatccatattctgctgatgtattacaaataagaacaat

SEQ ID NO: 8674 - DNA, 80 bp, synthetic construct
  misc_feature 1..80: note = Synthetic: >NC_007549.1-cand-420-499
  source 1..80: mol_type = other DNA
actttgtttgttgatacggattctgaggcatattcactatatgttccagaatctcagaaacttgatgtttcaccaattac

SEQ ID NO: 8675 - DNA, 80 bp, synthetic construct
  misc_feature 1..80: note = Synthetic: >NC_007549.1-cand-510-589
  source 1..80: mol_type = other DNA
actacgattgaaaagtatcaaccaaaggttaatattctcaaacaagcagttatagtcccatcacaaaatccattgctagc

SEQ ID NO: 8676 - DNA, 80 bp, synthetic construct
  misc_feature 1..80: note = Synthetic: >NC_007549.1-cand-590-669
  source 1..80: mol_type = other DNA
agatacctatggtgcacctgagatacttttttctactgatttctttgatgatatcacttcaaattcttcagaaggattac

SEQ ID NO: 8677 - DNA, 80 bp, synthetic construct
  misc_feature 1..80: note = Synthetic: >NC_007549.1-cand-680-759
  source 1..80: mol_type = other DNA
ctttgataaggcatacaaattaaaaaaagaattaccaaatctaccatttctttcatcattagataaggatgttaacccgc

SEQ ID NO: 8678 - DNA, 80 bp, synthetic construct
  misc_feature 1..80: note = Synthetic: >NC_007549.1-cand-760-839
  source 1..80: mol_type = other DNA
ttaatccacttaattcagtatgtaaatcatttggacaagaaaagtattatgatatggtaatggatcgcaccgatagagga

SEQ ID NO: 8679 - DNA, 80 bp, synthetic construct
  misc_feature 1..80: note = Synthetic: >NC_007549.1-cand-850-929
  source 1..80: mol_type = other DNA
gaagagcagcaatgcaatttgataatgttatcgttgatgcacaaaacagaaccgttcaatttaatgttagaatgcatcca

SEQ ID NO: 8680 - DNA, 80 bp, synthetic construct
  misc_feature 1..80: note = Synthetic: >NC_007549.1-cand-930-1009
  source 1..80: mol_type = other DNA
tttgatttacaattgctacgtatatctcaacagttcgctgagccaatgcaagatttggctccagttgtaagagagtatat

SEQ ID NO: 8681 - DNA, 80 bp, synthetic construct
  misc_feature 1..80: note = Synthetic: >NC_012532.1-cand-170-249
  source 1..80: mol_type = other DNA
tgtaaaccccttgggaggtttgaagaggttgccagccggacttctgctgggtcatggacccatcagaatggttttggcga

SEQ ID NO: 8682 - DNA, 80 bp, synthetic construct
  misc_feature 1..80: note = Synthetic: >NC_012532.1-cand-230-309
  source 1..80: mol_type = other DNA
catcagaatggttttggcgatactagcctttttgagatttacagcaatcaagccatcactgggccttatcaacagatggg

SEQ ID NO: 8683 - DNA, 80 bp, synthetic construct
  misc_feature 1..80: note = Synthetic: >NC_012532.1-cand-410-489
  source 1..80: mol_type = other DNA
acgtggcgcagacaccagcatcggaatcattggcctcctgctgactacagccatggcagcagagatcactagacgcggga

SEQ ID NO: 8684 - DNA, 80 bp, synthetic construct
  misc_feature 1..80: note = Synthetic: >NC_012532.1-cand-490-569
  source 1..80: mol_type = other DNA
gtgcatactacatgtacttggataggagcgatgccgggaaggccatttcgtttgctaccacattgggagtgaacaagtgc

SEQ ID NO: 8685 - DNA, 80 bp, synthetic construct
  misc_feature 1..80: note = Synthetic: >NC_012532.1-cand-570-649
  source 1..80: mol_type = other DNA
cacgtacagatcatggacctcgggcacatgtgtgacgccaccatgagttatgagtgccctatgctggatgagggagtgga

SEQ ID NO: 8686 - DNA, 80 bp, synthetic construct
  misc_feature 1..80: note = Synthetic: >NC_012532.1-cand-650-729
  source 1..80: mol_type = other DNA
accagatgatgtcgattgctggtgcaacacgacatcaacttgggttgtgtacggaacctgtcatcacaaaaaaggtgagg

SEQ ID NO: 8687 - DNA, 80 bp, synthetic construct
  misc_feature 1..80: note = Synthetic: >NC_012532.1-cand-730-809
  source 1..80: mol_type = other DNA
cacggcgatctagaagagccgtgacgctcccttctcactctacaaggaagttgcaaacgcggtcgcagacctggttagaa

SEQ ID NO: 8688 - DNA, 80 bp, synthetic construct
  misc_feature 1..80: note = Synthetic: >NC_012532.1-cand-810-889
  source 1..80: mol_type = other DNA
tcaagagaatacacgaagcacttgatcaaggttgaaaactggatattcaggaaccccgggtttgcgctagtggccgttgc

SEQ ID NO: 8689 - DNA, 80 bp, synthetic construct
  misc_feature 1..80: note = Synthetic: >NC_012532.1-cand-970-1049
  source 1..80: mol_type = other DNA
gtatcaggtgcattggagtcagcaatagagacttcgtggagggcatgtcaggtgggacctgggttgatgttgtcttggaa

SEQ ID NO: 8690 - DNA, 80 bp, synthetic construct
  misc_feature 1..80: note = Synthetic: >NC_012532.1-cand-1050-1129
  source 1..80: mol_type = other DNA
catggaggctgcgttaccgtgatggcacaggacaagccaacagtcgacatagagttggtcacgacgacggttagtaacat

SEQ ID NO: 8691 - DNA, 80 bp, synthetic construct
  misc_feature 1..80: note = Synthetic: >NC_012532.1-cand-1140-1219
  source 1..80: mol_type = other DNA
agatcctattgctacgaggcatcgatatcggacatggcttcggacagtcgttgcccaacacaaggtgaagcctaccttga

SEQ ID NO: 8692 - DNA, 80 bp, synthetic construct
  misc_feature 1..80: note = Synthetic: >NC_012532.1-cand-1190-1269
  source 1..80: mol_type = other DNA
ttgcccaacacaaggtgaagcctaccttgacaagcaatcagacactcaatatgtctgcaaaagaacattagtggacagag

SEQ ID NO: 8693 - DNA, 80 bp, synthetic construct
  misc_feature 1..80: note = Synthetic: >NC_012532.1-cand-1300-1379
  source 1..80: mol_type = other DNA
aagggagcttggtgacatgtgccaagtttacgtgttctaagaagatgaccgggaagagcattcaaccggaaaatctggag

SEQ ID NO: 8694 - DNA, 80 bp, synthetic construct
  misc_feature 1..80: note = Synthetic: >NC_012532.1-cand-1380-1459
  source 1..80: mol_type = other DNA
tatcggataatgctatcagtgcatggctcccagcatagcgggatgattggatatgaaactgacgaagatagagcgaaagt

SEQ ID NO: 8695 - DNA, 80 bp, synthetic construct
  misc_feature 1..80: note = Synthetic: >NC_012532.1-cand-1460-1539
  source 1..80: mol_type = other DNA
cgaggttacgcctaattcaccaagagcggaagcaaccttgggaggctttggaagcttaggacttgactgtgaaccaagga

SEQ ID NO: 8696 - DNA, 80 bp, synthetic construct
  misc_feature 1..80: note = Synthetic: >NC_012532.1-cand-1540-1619
  source 1..80: mol_type = other DNA
caggccttgacttttcagatctgtattacctgaccatgaacaataagcattggttggtgcacaaagagtggtttcatgac

SEQ ID NO: 8697 - DNA, 80 bp, synthetic construct
  misc_feature 1..80: note = Synthetic: >NC_012532.1-cand-5480-5559
  source 1..80: mol_type = other DNA
agctgcaagaggatacatatcaacaagggttgaaatgggcgaggcggctgccatttttatgactgccacaccaccaggaa

SEQ ID NO: 8698 - DNA, 80 bp, synthetic construct
  misc_feature 1..80: note = Synthetic: >NC_012532.1-cand-5560-5639
  source 1..80: mol_type = other DNA
cccgtgatgcgtttcctgactctaactcaccaatcatggacacagaagtggaagtcccagagagagcctggagctcaggc

SEQ ID NO: 8699 - DNA, 80 bp, synthetic construct
  misc_feature 1..80: note = Synthetic: >NC_012532.1-cand-5640-5719
  source 1..80: mol_type = other DNA
tttgattgggtgacagaccattctgggaaaacagtttggttcgttccaagcgtgagaaacggaaatgaaatcgcagcctg

SEQ ID NO: 8700 - DNA, 80 bp, synthetic construct
  misc_feature 1..80: note = Synthetic: >NC_012532.1-cand-5720-5799
  source 1..80: mol_type = other DNA
tctgacaaaggctggaaagcgggtcatacagctcagcaggaagacttttgagacagaatttcagaaaacaaaaaatcaag

SEQ ID NO: 8701 - DNA, 80 bp, synthetic construct
  misc_feature 1..80: note = Synthetic: >NC_012532.1-cand-5800-5879
  source 1..80: mol_type = other DNA
agtgggactttgtcataacaactgacatctcagagatgggcgccaacttcaaggctgaccgggtcatagactctaggaga

SEQ ID NO: 8702 - DNA, 80 bp, synthetic construct
  misc_feature 1..80: note = Synthetic: >NC_012532.1-cand-5880-5959
  source 1..80: mol_type = other DNA
tgcctaaaaccagtcatacttgatggtgagagagtcatcttggctgggcccatgcctgtcacgcatgctagtgctgctca

SEQ ID NO: 8703 - DNA, 80 bp, synthetic construct
  misc_feature 1..80: note = Synthetic: >NC_012532.1-cand-5960-6039
  source 1..80: mol_type = other DNA
gaggagaggacgtataggcaggaaccctaacaaacctggagatgagtacatgtatggaggtgggtgtgcagagactgatg

SEQ ID NO: 8704 - DNA, 80 bp, synthetic construct
  misc_feature 1..80: note = Synthetic: >NC_012532.1-cand-6040-6119
  source 1..80: mol_type = other DNA
aaggccatgcacactggcttgaagcaagaatgcttcttgacaacatctacctccaggatggcctcatagcctcgctctat

SEQ ID NO: 8705 - DNA, 80 bp, synthetic construct
  misc_feature 1..80: note = Synthetic: >NC_012532.1-cand-6120-6199
  source 1..80: mol_type = other DNA
cggcctgaggccgataaggtagccgccattgagggagagtttaagctgaggacagagcaaaggaagaccttcgtggaact

SEQ ID NO: 8706 - DNA, 80 bp, synthetic construct
  misc_feature 1..80: note = Synthetic: >NC_012532.1-cand-6200-6279
  source 1..80: mol_type = other DNA
catgaagagaggagaccttcccgtctggctagcctatcaggttgcatctgccggaataacttacacagacagaagatggt

SEQ ID NO: 8707 - DNA, 80 bp, synthetic construct
  misc_feature 1..80: note = Synthetic: >NC_012532.1-cand-6280-6359
  source 1..80: mol_type = other DNA
gctttgatggcacaaccaacaacaccataatggaagacagtgtaccagcagaggtttggacaaagtatggagagaagaga

SEQ ID NO: 8708 - DNA, 80 bp, synthetic construct
  misc_feature 1..80: note = Synthetic: >NC_012532.1-cand-6360-6439
  source 1..80: mol_type = other DNA
gtgctcaaaccgagatggatggatgctagggtctgttcagaccatgcggccctgaagtcgttcaaagaattcgccgctgg

SEQ ID NO: 8709 - DNA, 80 bp, synthetic construct
  misc_feature 1..80: note = Synthetic: >NC_012532.1-cand-6440-6519
  source 1..80: mol_type = other DNA
aaaaagaggagcggctttgggagtaatggaggccctgggaacactgccaggacacatgacagagaggtttcaggaagcca

SEQ ID NO: 8710 - DNA, 80 bp, synthetic construct
  misc_feature 1..80: note = Synthetic: >NC_012532.1-cand-6520-6599
  source 1..80: mol_type = other DNA
ttgacaacctcgccgtgctcatgcgagcagagactggaagcaggccttataaggcagcggcagcccaactgccggagacc

SEQ ID NO: 8711 - DNA, 80 bp, synthetic construct
  misc_feature 1..80: note = Synthetic: >NC_012532.1-cand-6560-6639
  source 1..80: mol_type = other DNA
caggccttataaggcagcggcagcccaactgccggagaccctagagaccattatgctcttaggtttgctgggaacagttt

SEQ ID NO: 8712 - DNA, 80 bp, synthetic construct
  misc_feature 1..80: note = Synthetic: >NC_012532.1-cand-6720-6799
  source 1..80: mol_type = other DNA
gcatggctcatgtggctttcggaaattgaaccagccagaattgcatgtgtcctcattgttgtgtttttattactggtggt

SEQ ID NO: 8713 - DNA, 80 bp, synthetic construct
  misc_feature 1..80: note = Synthetic: >NC_021928.1-cand-14280-14359
  source 1..80: mol_type = other DNA
atagaacaatttatagttaatgtcaatgtaggtgattttgaattcaatgacactcaaaatagtattgtattattatcaca

SEQ ID NO: 8714 - DNA, 80 bp, synthetic construct
  misc_feature 1..80: note = Synthetic: >NC_021928.1-cand-14400-14479
  source 1..80: mol_type = other DNA
gatgagtcgacatcaatcattaatgatgcaatcatagagactgattactcttcaaattggatcagtgaattcttaaatac

SEQ ID NO: 8715 - DNA, 80 bp, synthetic construct
  misc_feature 1..80: note = Synthetic: >NC_021928.1-cand-14480-14559
  source 1..80: mol_type = other DNA
ttacttggatcaagtattcatatatattgggtggaacattttattagaattatcatatcagatgtattatttaaggatta

SEQ ID NO: 8716 - DNA, 80 bp, synthetic construct
  misc_feature 1..80: note = Synthetic: >NC_021928.1-cand-14560-14639
  source 1..80: mol_type = other DNA
ctggattaatgaacttactagattatattgaattaacattgcaaaggatacccggattgtcaatacagaacttggcttcg

SEQ ID NO: 8717 - DNA, 80 bp, synthetic construct
  misc_feature 1..80: note = Synthetic: >NC_021928.1-cand-14630-14709
  source 1..80: mol_type = other DNA
cttggcttcgacgataagccatccaaaaattttaagaagaatgattaatttaggaatttgtgtcccaagcaactctccac

SEQ ID NO: 8718 - DNA, 80 bp, synthetic construct
  misc_feature 1..80: note = Synthetic: >NC_021928.1-cand-14680-14759
  source 1..80: mol_type = other DNA
taggaatttgtgtcccaagcaactctccacaatttgcaacacttaacttcacaaagatagctgtgcaatgtcttatgtgg

SEQ ID NO: 8719 - DNA, 80 bp, synthetic construct
  misc_feature 1..80: note = Synthetic: >NC_021928.1-cand-14780-14859
  source 1..80: mol_type = other DNA
aaatctttataatcatatatcattcaaaatattaattcactcagaagatgcaatagatttaaatgatagaatatataact

SEQ ID NO: 8720 - DNA, 80 bp, synthetic construct
  misc_feature 1..80: note = Synthetic: >NC_021928.1-cand-14860-14939
  source 1..80: mol_type = other DNA
ttgctgcaagaaaactgacattaattgcaatgctatatgattttgagtgtaatttaccaaaattaaagggtcttactgca

SEQ ID NO: 8721 - DNA, 80 bp, synthetic construct
  misc_feature 1..80: note = Synthetic: >NC_021928.1-cand-14940-15019
  source 1..80: mol_type = other DNA
gaaaataaatgttgcatattgactgaattcttattaagtgaaacatgcttagcaaatttatcaattcaacacaatgaatc

SEQ ID NO: 8722 - DNA, 80 bp, synthetic construct
  misc_feature 1..80: note = Synthetic: >NC_021928.1-cand-15020-15099
  source 1..80: mol_type = other DNA
atacatcaatcaagtaacaaatccaaatatacatccttatccatgtaatagttattatttatccagaaaggcattaaatt

SEQ ID NO: 8723 - DNA, 80 bp, synthetic construct
  misc_feature 1..80: note = Synthetic: >NC_021928.1-cand-15100-15179
  source 1..80: mol_type = other DNA
ttataagatcaaagaatgaatcagagttctttctaaagaattattatgatgattatggatttgttgatacccctacagat

SEQ ID NO: 8724 - DNA, 80 bp, synthetic construct
  misc_feature 1..80: note = Synthetic: >NC_021928.1-cand-15180-15259
  source 1..80: mol_type = other DNA
tttttacagcttaaaagtgaggaaaataatgatacactcttaacaaatgatattataattgaattactcaatcattctca

SEQ ID NO: 8725 - DNA, 80 bp, synthetic construct
  misc_feature 1..80: note = Synthetic: >NC_021928.1-cand-15260-15339
  source 1..80: mol_type = other DNA
aaaacttgaaagacatgaaatacctttccaggaatcacccactattgatcaagaaaatttctatccagaacctcctgtac

SEQ ID NO: 8726 - DNA, 80 bp, synthetic construct
  misc_feature 1..80: note = Synthetic: >NC_021928.1-cand-15340-15419
  source 1..80: mol_type = other DNA
atcatatacttaggccattaggcttgacatctacttcatggtataaatcattaagtatagttaaattcttagaaatgatt

SEQ ID NO: 8727 - DNA, 80 bp, synthetic construct
  misc_feature 1..80: note = Synthetic: >NC_021928.1-cand-15420-15499
  source 1..80: mol_type = other DNA
caaatacccgatggatctcatttatatttagctgaaggtagtggtgcttctatgacattgatagaaaacttttatcctgg

SEQ ID NO: 8728 - DNA, 80 bp, synthetic construct
  misc_feature 1..80: note = Synthetic: >NC_021928.1-cand-15500-15579
  source 1..80: mol_type = other DNA
gaggaagatatactataacagctattactcaagcgaattaaaccctcctcagaggaactttgaacctttacccacacaat

SEQ ID NO: 8729 - DNA, 80 bp, synthetic construct
  misc_feature 1..80: note = Synthetic: >NC_026423.1-cand-10-89
  source 1..80: mol_type = other DNA
gactttacttttcttgaaagtgccagtgcaaaatgctataagtaccactttcccttatactggagaccctccatacagcc

SEQ ID NO: 8730 - DNA, 80 bp, synthetic construct
  misc_feature 1..80: note = Synthetic: >NC_026423.1-cand-190-269
  source 1..80: mol_type = other DNA
actcaatccaattgatggaccattacctgaggacaacgagccgagtgggtatgcacaaacggattgtgtattggaagcaa

SEQ ID NO: 8731 - DNA, 80 bp, synthetic construct
  misc_feature 1..80: note = Synthetic: >NC_026423.1-cand-270-349
  source 1..80: mol_type = other DNA
tggctttccttgaagaatctcacccagggatctttgaaaactcgtgtctcgaaacgatggaaattgttcagcaaacaaga

SEQ ID NO: 8732 - DNA, 80 bp, synthetic construct
  misc_feature 1..80: note = Synthetic: >NC_026423.1-cand-330-409
  source 1..80: mol_type = other DNA
aaattgttcagcaaacaagagtggataaactgacccaaggccgccagacctatgactggacgttgaatagaaatcagccg

SEQ ID NO: 8733 - DNA, 80 bp, synthetic construct
  misc_feature 1..80: note = Synthetic: >NC_026423.1-cand-420-499
  source 1..80: mol_type = other DNA
cattggccaacactatagaggtattcagatcgaatggcctgacagccaatgaatcaggaaggttgatcgatttcctcaag

SEQ ID NO: 8734 - DNA, 80 bp, synthetic construct
  misc_feature 1..80: note = Synthetic: >NC_026423.1-cand-490-569
  source 1..80: mol_type = other DNA
tttcctcaaggacgtgatggattcaatggataaggaagaaatggagattacaacacatttccagaggaagaggagagtga

SEQ ID NO: 8735 - DNA, 80 bp, synthetic construct
  misc_feature 1..80: note = Synthetic: >NC_026423.1-cand-570-649
  source 1..80: mol_type = other DNA
gggacaacatgaccaagaaaatggtcacacagagaacaataggaaagaaaaaacaaagactgaacaaaaggagctaccta

SEQ ID NO: 8736 - DNA, 80 bp, synthetic construct
  misc_feature 1..80: note = Synthetic: >NC_026423.1-cand-650-729
  source 1..80: mol_type = other DNA
ataagagcacttacattgaacacaatgacaaaggatgctgaaagaggcaagctgaaaaggagggcaatcgcaacacccgg

SEQ ID NO: 8737 - DNA, 80 bp, synthetic construct
  misc_feature 1..80: note = Synthetic: >NC_026423.1-cand-730-809
  source 1..80: mol_type = other DNA
gatgcaaatcagaggattcgtgtattttgtagaagcactagcgaggagcatctgtgagaaacttgagcaatctggcctcc

SEQ ID NO: 8738 - DNA, 80 bp, synthetic construct
  misc_feature 1..80: note = Synthetic: >NC_026423.1-cand-810-889
  source 1..80: mol_type = other DNA
ctgtcggagggaatgagaagaaagctaaattggcaaatgttgtgaggaagatgatgactaattcacaagatacagagctc

SEQ ID NO: 8739 - DNA, 80 bp, synthetic construct
  misc_feature 1..80: note = Synthetic: >NC_026423.1-cand-910-989
  source 1..80: mol_type = other DNA
caacaccaaatggaatgagaatcaaaacccccggatgtttctagcaatgataacatacatcacaagaaaccagccagaat

SEQ ID NO: 8740 - DNA, 80 bp, synthetic construct
  misc_feature 1..80: note = Synthetic: >NC_026423.1-cand-970-1049
  source 1..80: mol_type = other DNA
cacaagaaaccagccagaatggtttagaaatgtcttaagcattgctcctataatgttctcaaacaagatggcgagattag

SEQ ID NO: 8741 - DNA, 80 bp, synthetic construct
  misc_feature 1..80: note = Synthetic: >NC_026423.1-cand-1060-1139
  source 1..80: mol_type = other DNA
catgttcgaaagtaagagtatgaagttacggacacaagtaccagcggaaatgctcgcaaatattgacctgaaatacttca

SEQ ID NO: 8742 - DNA, 80 bp, synthetic construct
  misc_feature 1..80: note = Synthetic: >NC_026423.1-cand-1230-1309
  source 1..80: mol_type = other DNA
tcaacatgttgagtacagtcttaggagtttcaattctgaatctcgggcagaagaagtacaccaaaaccacatattggtgg

SEQ ID NO: 8743 - DNA, 80 bp, synthetic construct
  misc_feature 1..80: note = Synthetic: >NC_026423.1-cand-1320-1399
  source 1..80: mol_type = other DNA
aatcctcagatgacttcgccctcatagtgaatgcaccgaatcatgagggaatacaggcaggagtagataggttctataga

SEQ ID NO: 8744 - DNA, 80 bp, synthetic construct
  misc_feature 1..80: note = Synthetic: >NC_026423.1-cand-1400-1479
  source 1..80: mol_type = other DNA
acctgcaaattagttgggataaacatgagcaagaagaaatcctacataaatcggacaggaacattcgaattcacaagctt

SEQ ID NO: 8745 - DNA, 80 bp, synthetic construct
  misc_feature 1..80: note = Synthetic: >NC_038312.1-cand-4530-4609
  source 1..80: mol_type = other DNA
tagtttagacaataaaggaatgttgtttactagtaactttgtgttggcctcaaccaattcaaacactctaagtcccccca

SEQ ID NO: 8746 - DNA, 80 bp, synthetic construct
  misc_feature 1..80: note = Synthetic: >NC_038312.1-cand-4610-4689
  source 1..80: mol_type = other DNA
ctatcttgaacccagaagctctgattagacggtttggatttgatttggatatttgcatgcacagcacatacacaaagaat

SEQ ID NO: 8747 - DNA, 80 bp, synthetic construct
  misc_feature 1..80: note = Synthetic: >NC_038312.1-cand-4690-4769
  source 1..80: mol_type = other DNA
ggtaagttgaatgcagcaatggcaaccagtttgtgtaaagattgtcaccagccttcaaattttaaaaaatgttgcccatt

SEQ ID NO: 8748 - DNA, 80 bp, synthetic construct
  misc_feature 1..80: note = Synthetic: >NC_038312.1-cand-4770-4849
  source 1..80: mol_type = other DNA
agtctgtggcaaagctatcagtttggtagatagggtctctaatgttagatttagtattgatcaattagttactgccatca

SEQ ID NO: 8749 - DNA, 80 bp, synthetic construct
  misc_feature 1..80: note = Synthetic: >NC_038312.1-cand-4850-4929
  source 1..80: mol_type = other DNA
taaatgattacaaaaataaggtgaaaattacagattcacttgaagtgttatttcaagggcctgtgtacaaggacctggaa

SEQ ID NO: 8750 - DNA, 80 bp, synthetic construct
  misc_feature 1..80: note = Synthetic: >NC_038312.1-cand-4930-5009
  source 1..80: mol_type = other DNA
attgatatatgtaatacacctccacccgagtgtatcagtgacttattgaaatcagtagattcagaggaagtcagagaata

SEQ ID NO: 8751 - DNA, 80 bp, synthetic construct
  misc_feature 1..80: note = Synthetic: >NC_038312.1-cand-5010-5089
  source 1..80: mol_type = other DNA
ttgcaagaaaaagaaatggattattccacaaatttccactaacatagaaagggcagttaaccaagcaagtatgataatca

SEQ ID NO: 8752 - DNA, 80 bp, synthetic construct
  misc_feature 1..80: note = Synthetic: >NC_038312.1-cand-5100-5179
  source 1..80: mol_type = other DNA
gatgtttgtcagtacattaggtatagtttatgtcatatacaaactttttgctcagacacaaggaccttactctgggaatc

SEQ ID NO: 8753 - DNA, 80 bp, synthetic construct
  misc_feature 1..80: note = Synthetic: >NC_038312.1-cand-5180-5259
  source 1..80: mol_type = other DNA
cagttcataacaaactcaaaccacccactttaaaaccagttgtggtacaagggcctaatacagagtttgctttgtcctta

SEQ ID NO: 8754 - DNA, 80 bp, synthetic construct
  misc_feature 1..80: note = Synthetic: >NC_038312.1-cand-5300-5379
  source 1..80: mol_type = other DNA
aattcactagtttgggtattcatgatcgtatctgtgtcttaccaacacatgcccaaccaggtgataatgtcctcgtgaat

SEQ ID NO: 8755 - DNA, 80 bp, synthetic construct
  misc_feature 1..80: note = Synthetic: >NC_038312.1-cand-5340-5419
  source 1..80: mol_type = other DNA
accaacacatgcccaaccaggtgataatgtcctcgtgaatggacagaaaatccaaattaaagacaaatacaaactagtag

SEQ ID NO: 8756 - DNA, 80 bp, synthetic construct
  misc_feature 1..80: note = Synthetic: >NC_038312.1-cand-5410-5489
  source 1..80: mol_type = other DNA
aaactagtagatccagataatactaatttagaactcaccataatagagttagacaggaatgaaaaattcagggatattag

SEQ ID NO: 8757 - DNA, 80 bp, synthetic construct
  misc_feature 1..80: note = Synthetic: >NC_038312.1-cand-5500-5579
  source 1..80: mol_type = other DNA
tcagaggatttggaaggattagatgctactttagtagtgcactccaatggatttactaatactatattagatgtaggacc

SEQ ID NO: 8758 - DNA, 80 bp, synthetic construct
  misc_feature 1..80: note = Synthetic: >NC_038312.1-cand-5570-5649
  source 1..80: mol_type = other DNA
atgtaggaccaataaccatggctggacttataaatttaagtaatacaccaacaaccaggatgatccgctatgactaccca

SEQ ID NO: 8759 - DNA, 80 bp, synthetic construct
  misc_feature 1..80: note = Synthetic: >NC_038312.1-cand-5670-5749
  source 1..80: mol_type = other DNA
gggtgtgttgtgcacaacaggaaaaatatttggaatacatgttggtggtaatggtagacgaggattttcagcacaactca

SEQ ID NO: 8760 - DNA, 80 bp, synthetic construct
  misc_feature 1..80: note = Synthetic: >NC_038312.1-cand-5730-5809
  source 1..80: mol_type = other DNA
aggattttcagcacaactcaaaaagcaatactttgtggagaaacagggattaattgtatctaaacaaaaggtgagagata

SEQ ID NO: 8761 - DNA, 80 bp, synthetic construct
  misc_feature 1..80: note = Synthetic: >NC_039199.1-cand-4460-4539
  source 1..80: mol_type = other DNA
gccttggtggatcaatcaaacagaatcctaagcagtgcagagaaaggaaacactggcttcatcattgtaataattctaat

SEQ ID NO: 8762 - DNA, 80 bp, synthetic construct
  misc_feature 1..80: note = Synthetic: >NC_039199.1-cand-4540-4619
  source 1..80: mol_type = other DNA
tgctgtccttggctctaccatgatcctagtgagtgtttttatcataataaagaaaacaaagaaacccacaggagcacctc

SEQ ID NO: 8763 - DNA, 80 bp, synthetic construct
  misc_feature 1..80: note = Synthetic: >NC_039199.1-cand-4610-4689
  source 1..80: mol_type = other DNA
ggagcacctccagagctgagtggtgtcacaaacaatggcttcataccacataattagttaattaaaaataaagtaaatta

SEQ ID NO: 8764 - DNA, 80 bp, synthetic construct
  misc_feature 1..80: note = Synthetic: >NC_039199.1-cand-4680-4759
  source 1..80: mol_type = other DNA
aagtaaattaaaataaattaaaattaaaaataaaaatttgggacaaatcataatgtctcgcaaggctccgtgcaaatatg

SEQ ID NO: 8765 - DNA, 80 bp, synthetic construct
  misc_feature 1..80: note = Synthetic: >NC_039199.1-cand-4770-4849
  source 1..80: mol_type = other DNA
caaatgcaatagaggaagtgagtgcaagtttaaccacaattactggagttggccagatagatacttattaataagatcaa

SEQ ID NO: 8766 - DNA, 80 bp, synthetic construct
  misc_feature 1..80: note = Synthetic: >NC_039199.1-cand-4860-4939
  source 1..80: mol_type = other DNA
aaatcaacttttaaggaacactgatagagctgatggcttatcaataatatcaggagcaggcagagaagataggacacaag

SEQ ID NO: 8767 - DNA, 80 bp, synthetic construct
  misc_feature 1..80: note = Synthetic: >NC_039199.1-cand-4940-5019
  source 1..80: mol_type = other DNA
attttgtcctaggttccaccaatgtggttcaaggttatattgatgataaccaaagcataacaaaagctgcagcctgttac

SEQ ID NO: 8768 - DNA, 80 bp, synthetic construct
  misc_feature 1..80: note = Synthetic: >NC_039199.1-cand-5020-5099
  source 1..80: mol_type = other DNA
agtctacataatataatcaaacaactacaagaagttgaagttaggcaggctagagataacaaactatctgacagcaaaca

SEQ ID NO: 8769 - DNA, 80 bp, synthetic construct
  misc_feature 1..80: note = Synthetic: >NC_039199.1-cand-5100-5179
  source 1..80: mol_type = other DNA
tgtagcacttcacaacttagtcctatcttatatggagatgagcaaaactcctgcatctttaatcaacaatctcaagagac

SEQ ID NO: 8770 - DNA, 80 bp, synthetic construct
  misc_feature 1..80: note = Synthetic: >NC_039199.1-cand-5180-5259
  source 1..80: mol_type = other DNA
tgccgagagagaaactgaaaaaattagcaaagctcataattgacttatcagcaggtgctgaaaatgactcttcatatgcc

SEQ ID NO: 8771 - DNA, 80 bp, synthetic construct
  misc_feature 1..80: note = Synthetic: >NC_039199.1-cand-5260-5339
  source 1..80: mol_type = other DNA
ttgcaagacagtgaaagcactaatcaagtgcagtgagcatggtccagttttcattactatagaggttgatgacatgatat

SEQ ID NO: 8772 - DNA, 80 bp, synthetic construct
  misc_feature 1..80: note = Synthetic: >NC_039199.1-cand-5340-5419
  source 1..80: mol_type = other DNA
ggactcacaaggacttaaaagaagctttatctgatgggatagtgaagtctcatactaacatttacaattgttatttagaa

SEQ ID NO: 8773 - DNA, 80 bp, synthetic construct
  misc_feature 1..80: note = Synthetic: >NC_039199.1-cand-5420-5499
  source 1..80: mol_type = other DNA
aacatagaaattatatatgtcaaggcttacttaagttagtaaaaacacatcagagtgggataaatgacaatgataacatt

SEQ ID NO: 8774 - DNA, 80 bp, synthetic construct
  misc_feature 1..80: note = Synthetic: >NC_039199.1-cand-5500-5579
  source 1..80: mol_type = other DNA
agatgtcattaaaagtgatgggtcttcaaaaacatgtactcacctcaaaaaaataattaaagaccactctggtaaagtgc

SEQ ID NO: 8775 - DNA, 80 bp, synthetic construct
  misc_feature 1..80: note = Synthetic: >NC_039199.1-cand-5580-5659
  source 1..80: mol_type = other DNA
ttattgtacttaagttaatattagctttactaacatttctcacagtaacaatcaccatcaattatataaaagtggaaaac

SEQ ID NO: 8776 - DNA, 80 bp, synthetic construct
  misc_feature 1..80: note = Synthetic: >NC_039199.1-cand-5660-5739
  source 1..80: mol_type = other DNA
aatctgcaaatatgccagtcaaaaactgaatcagacaaaaaggactcatcatcaaataccacatcagtcacaaccaagac

SEQ ID NO: 8777 - DNA, 80 bp, synthetic construct
  misc_feature 1..80: note = Synthetic: >NC_039218.1-cand-5250-5329
  source 1..80: mol_type = other DNA
ccattgttgacgtcatgtgccatgccacgtacgtccacagaaggctgctgccccaagggagacaaaattgggaagtcgcc

SEQ ID NO: 8778 - DNA, 80 bp, synthetic construct
  misc_feature 1..80: note = Synthetic: >NC_039218.1-cand-5290-5369
  source 1..80: mol_type = other DNA
aaggctgctgccccaagggagacaaaattgggaagtcgccataatggatgaggcccattggactgatccgcacagtatcg

SEQ ID NO: 8779 - DNA, 80 bp, synthetic construct
  misc_feature 1..80: note = Synthetic: >NC_039218.1-cand-5370-5449
  source 1..80: mol_type = other DNA
cggcaagagggcatctttattcgctcgccaaagagaacaggtgcgccttggtgctcatgacagcaactccacccggccgg

SEQ ID NO: 8780 - DNA, 80 bp, synthetic construct
  misc_feature 1..80: note = Synthetic: >NC_039218.1-cand-5450-5529
  source 1..80: mol_type = other DNA
ggagatcctttcccggagtccaatggagccattatgagtgaggaaagggccattccggacggagagtggagagtgggctt

SEQ ID NO: 8781 - DNA, 80 bp, synthetic construct
  misc_feature 1..80: note = Synthetic: >NC_039218.1-cand-5510-5589
  source 1..80: mol_type = other DNA
ggagagtggagagtgggctttgactggataacagagtatgagggtcgaacagcatggttcgttccatccatatcaaaagg

SEQ ID NO: 8782 - DNA, 80 bp, synthetic construct
  misc_feature 1..80: note = Synthetic: >NC_039218.1-cand-5620-5699
  source 1..80: mol_type = other DNA
aggcaaaagtgtgatctgtctcaacagtaaaacctttgagaaggattacctgagggtcagggaagagaagccagattttg

SEQ ID NO: 8783 - DNA, 80 bp, synthetic construct
  misc_feature 1..80: note = Synthetic: >NC_039218.1-cand-5700-5779
  source 1..80: mol_type = other DNA
tggtgacaacagatatctctgagatgggtgccaacctggatgtcagccgagttattgatggtagaacaaacataaagcca

SEQ ID NO: 8784 - DNA, 80 bp, synthetic construct
  misc_feature 1..80: note = Synthetic: >NC_039218.1-cand-5770-5849
  source 1..80: mol_type = other DNA
cataaagccagaggaggtggatggaaaggtagagttgactggaaccaggaaggtcacgacagcatcggcggctcagcgcc

SEQ ID NO: 8785 - DNA, 80 bp, synthetic construct
  misc_feature 1..80: note = Synthetic: >NC_039218.1-cand-5860-5939
  source 1..80: mol_type = other DNA
gggaaggacatctggacgcactgatgagtacatatactctggacagtgtgatgatgacgacaccagcctcgttcaatgga

SEQ ID NO: 8786 - DNA, 80 bp, synthetic construct
  misc_feature 1..80: note = Synthetic: >NC_039218.1-cand-5900-5979
  source 1..80: mol_type = other DNA
ggacagtgtgatgatgacgacaccagcctcgttcaatggaaggaggcgcagatactcctggacaatatcaccacactgag

SEQ ID NO: 8787 - DNA, 80 bp, synthetic construct
  misc_feature 1..80: note = Synthetic: >NC_039218.1-cand-6020-6099
  source 1..80: mol_type = other DNA
atgccagaagtggctggccactacaggctgaatgaggagaaaaggaaacacttccggcacttgatgactcaatgtgactt

SEQ ID NO: 8788 - DNA, 80 bp, synthetic construct
  misc_feature 1..80: note = Synthetic: >NC_039218.1-cand-6090-6169
  source 1..80: mol_type = other DNA
aatgtgacttcactccctggctggcgtggcatgtcgccaccaacaccagcaatgtgttggatcggagctggacctggcag

SEQ ID NO: 8789 - DNA, 80 bp, synthetic construct
  misc_feature 1..80: note = Synthetic: >NC_039218.1-cand-6200-6279
  source 1..80: mol_type = other DNA
gacggagatctggtgcggtttaaaacgcctggcggctcagaacgtgtcttgcagccggtgtggaaggactgcagaatgtt

SEQ ID NO: 8790 - DNA, 80 bp, synthetic construct
  misc_feature 1..80: note = Synthetic: >NC_039218.1-cand-6260-6339
  source 1..80: mol_type = other DNA
tggaaggactgcagaatgttccgtgagggacgggacgtcaaagacttcatactgtacgcctccgggcgtcgcagtgttgg

SEQ ID NO: 8791 - DNA, 80 bp, synthetic construct
  misc_feature 1..80: note = Synthetic: >NC_039218.1-cand-6370-6449
  source 1..80: mol_type = other DNA
cggtctcttgaggcacaggtgcgccagcgcgcttgacgtagtttacacccttctcaatgagaatccgggcagcagggcaa

SEQ ID NO: 8792 - DNA, 80 bp, synthetic construct
  misc_feature 1..80: note = Synthetic: >NC_039218.1-cand-6420-6499
  source 1..80: mol_type = other DNA
ttctcaatgagaatccgggcagcagggcaatgcgcatggctgagagagatgcaccagaggcatttctgactattgttgag

SEQ ID NO: 8793 - DNA, 80 bp, synthetic construct
  misc_feature 1..80: note = Synthetic: >NC_044853.1-cand-4690-4769
  source 1..80: mol_type = other DNA
ctacataattagagttaaagaagggctcccctcaggattcccatgcacatcacaagttaacagtatcaaccattggctca

SEQ ID NO: 8794 - DNA, 80 bp, synthetic construct
  misc_feature 1..80: note = Synthetic: >NC_044853.1-cand-4770-4849
  source 1..80: mol_type = other DNA
ttactctctgtgcactctcagaagtaactggtctttcccctgatgtaatccagtcacaatcctatttctcattttatggg

SEQ ID NO: 8795 - DNA, 80 bp, synthetic construct
  misc_feature 1..80: note = Synthetic: >NC_044853.1-cand-4850-4929
  source 1..80: mol_type = other DNA
gatgatgaaattgtatcaactgatatagactttgatccagcccgattaacccaggtgctcaaagagtatggacttcggcc

SEQ ID NO: 8796 - DNA, 80 bp, synthetic construct
  misc_feature 1..80: note = Synthetic: >NC_044853.1-cand-4930-5009
  source 1..80: mol_type = other DNA
cacgcgcccagacaagagcgagggtcccataataatgaggagacagatagatggtctggtattccttaggaggacgattt

SEQ ID NO: 8797 - DNA, 80 bp, synthetic construct
  misc_feature 1..80: note = Synthetic: >NC_044853.1-cand-5040-5119
  source 1..80: mol_type = other DNA
tggatagagcctccattgaaagacagctctggtggacacgtggcccgaatcatgatgaccctagtgagaccctaatacca

SEQ ID NO: 8798 - DNA, 80 bp, synthetic construct
  misc_feature 1..80: note = Synthetic: >NC_044853.1-cand-5090-5169
  source 1..80: mol_type = other DNA
catgatgaccctagtgagaccctaataccacacccacagaggaaagtacaactcatctcactccttggtgaagcttcact

SEQ ID NO: 8799 - DNA, 80 bp, synthetic construct
  misc_feature 1..80: note = Synthetic: >NC_044853.1-cand-5170-5249
  source 1..80: mol_type = other DNA
ccatggggaaaagttctatagaaagatagccagcagagtcattcaagaaattaagacggggggcttggaaatgtatgtgc

SEQ ID NO: 8800 - DNA, 80 bp, synthetic construct
  misc_feature 1..80: note = Synthetic: >NC_044853.1-cand-5310-5389
  source 1..80: mol_type = other DNA
atcgcaatctgctgcccgaattcgtgaatgatgatggcgtctaaggacgccccaacatcccctgatggcgctagtggcgc

SEQ ID NO: 8801 - DNA, 80 bp, synthetic construct
  misc_feature 1..80: note = Synthetic: >NC_044853.1-cand-5490-5569
  source 1..80: mol_type = other DNA
attgacccatggatttttaataactttgtccaggcaccccaaggagaattcactatttcccctaataatacccccggtga

SEQ ID NO: 8802 - DNA, 80 bp, synthetic construct
  misc_feature 1..80: note = Synthetic: >NC_044853.1-cand-5570-5649
  source 1..80: mol_type = other DNA
tatcttgtttgatctacaattaggaccccaccttaacccatttttggctcatctttcgcagatgtacaatggatgggttg

SEQ ID NO: 8803 - DNA, 80 bp, synthetic construct
  misc_feature 1..80: note = Synthetic: >NC_044853.1-cand-5650-5729
  source 1..80: mol_type = other DNA
gcaatatgcgtgtacgcatattgctggcagggaatgcttttacagctggaaagataattatctgctgtgttccccctggt

SEQ ID NO: 8804 - DNA, 80 bp, synthetic construct
  misc_feature 1..80: note = Synthetic: >NC_044853.1-cand-5730-5809
  source 1..80: mol_type = other DNA
tttgatgctagaatactcacaattgctcaggcaactcttttcccacacctgatcgctgatgttaggactcttgagcccgt

SEQ ID NO: 8805 - DNA, 80 bp, synthetic construct
  misc_feature 1..80: note = Synthetic: >NC_044853.1-cand-5810-5889
  source 1..80: mol_type = other DNA
ggaacttcctctggaggacgtgcgcaacgttctctttcacaatagcagccagccgcaaccaacaatgcgattggtggcta

SEQ ID NO: 8806 - DNA, 80 bp, synthetic construct
  misc_feature 1..80: note = Synthetic: >NC_044853.1-cand-5890-5969
  source 1..80: mol_type = other DNA
tgttgtacaccccactccgcacgggcggtggctctggaggcactgacgcctttgtggtggcaggtagggtacttacgtgc

SEQ ID NO: 8807 - DNA, 80 bp, synthetic construct
  misc_feature 1..80: note = Synthetic: >NC_044853.1-cand-5970-6049
  source 1..80: mol_type = other DNA
cctgcccctgattttagctttttgtttcttgttcccccttctgtcgagcaaaagaccagggtattcagtgttcctaatgt

SEQ ID NO: 8808 - DNA, 80 bp, synthetic construct
  misc_feature 1..80: note = Synthetic: >NC_044853.1-cand-6130-6209
  source 1..80: mol_type = other DNA
tccagtttcagaatgggcgctgtcagattgatggccagctccagggcaccacccctgtctcgctcagccagctttgcaag

SEQ ID NO: 8809 - DNA, 80 bp, synthetic construct
  misc_feature 1..80: note = Synthetic: >NC_001611.1-cand-52780-52859
  source 1..80: mol_type = other DNA
gttttattttatccttgtccaatgtgaattgaatgggagcggatgcgggtttcgtacgtagatagtacattcccgttttt

SEQ ID NO: 8810 - DNA, 80 bp, synthetic construct
  misc_feature 1..80: note = Synthetic: >NC_003310.1-cand-133970-134049
  source 1..80: mol_type = other DNA
aaaaactatatctatgttgatagaagttattttaacagccgcatattctactaagccgtacaacaataagggagaaaacc

SEQ ID NO: 8811 - DNA, 80 bp, synthetic construct
  misc_feature 1..80: note = Synthetic: >NC_001611.1-cand-76900-76979
  source 1..80: mol_type = other DNA
aaaaactcaattatactctaggtggtggaactcctattggaattatttctgcacaggtattgtctgagaagtttacacaa

SEQ ID NO: 8812 - DNA, 80 bp, synthetic construct
  misc_feature 1..80: note = Synthetic: >EVB81-cand-6300-6379
  source 1..80: mol_type = other DNA
aaaaagagggatatcttgtcaaagaagtccaaggacttgaccaagctgaaggagtgcatggacaagtatggattgaacct

SEQ ID NO: 8813 - DNA, 80 bp, synthetic construct
  misc_feature 1..80: note = Synthetic: >NC_003310.1-cand-128990-129069
  source 1..80: mol_type = other DNA
aaaaagatattagtaaaagatgtagaccatttaatacgatccaaggttagagaacatacatttgtaaaagtaaaaaagaa

SEQ ID NO: 8814 - DNA, 80 bp, synthetic construct
  misc_feature 1..80: note = Synthetic: >AdVB3-cand-30490-30569
  source 1..80: mol_type = other DNA
tgctaccatgaaaaatctgattttcccacatactggatagtgattgttggaataattaacatactttcatgtaccttttt

SEQ ID NO: 8815 - DNA, 80 bp, synthetic construct
  misc_feature 1..80: note = Synthetic: >NC_003310.1-cand-71630-71709
  source 1..80: mol_type = other DNA
aaaaaggtagatgttctcgtttccaaaaaatgtatagatgaactagtcgatccaataaattatcaaatacttcaaaattt

SEQ ID NO: 8816 - DNA, 80 bp, synthetic construct
  misc_feature 1..80: note = Synthetic: >NC_001611.1-cand-80380-80459
  source 1..80: mol_type = other DNA
aataataatatttgagagtattggtaatgtacaaactctttagcggtataattagtttttttctctcgatttctattttt

SEQ ID NO: 8817 - DNA, 80 bp, synthetic construct
  misc_feature 1..80: note = Synthetic: >NC_003310.1-cand-74420-74499
  source 1..80: mol_type = other DNA
tttttattatattactattggcaattgtagatataacttctggtaaatatttttctaccttttcattctcttctattttt

SEQ ID NO: 8818 - DNA, 80 bp, synthetic construct
  misc_feature 1..80: note = Synthetic: >NC_001611.1-cand-107730-107809
  source 1..80: mol_type = other DNA
taaaatatttttctatgttaggaatatggtttttcactttaatagatatatggtttttggccaaaatgatagatattttt

SEQ ID NO: 8819 - DNA, 80 bp, synthetic construct
  misc_feature 1..80: note = Synthetic: >NC_003310.1-cand-67930-68009
  source 1..80: mol_type = other DNA
aagcatcatacgaaaatagattctatgtttttaatgactgccacgttagaggatgacagggaacgtctaaaaatattttt

SEQ ID NO: 8820 - DNA, 80 bp, synthetic construct
  misc_feature 1..80: note = Synthetic: >NC_003310.1-cand-196220-196299
  source 1..80: mol_type = other DNA
aaaaatatttttattctctttctctcttcgatggtctcacaaaaatattaaacctctttctgatgtctcaactatttcgt

SEQ ID NO: 8821 - DNA, 80 bp, synthetic construct
  misc_feature 1..80: note = Synthetic: >NC_003310.1-cand-123250-123329
  source 1..80: mol_type = other DNA
gtcacatctgtttgagaattaagattattgttgcctcctttgacggctgcatctccaccgatctgcgctagtagattttt

SEQ ID NO: 8822 - DNA, 80 bp, synthetic construct
  misc_feature 1..80: note = Synthetic: >NC_003310.1-cand-50450-50529
  source 1..80: mol_type = other DNA
agataactctcttctataaaaaatggattttattcgtagaaagtatcttatatacacagtagaaaataatatagattttt

SEQ ID NO: 8823 - DNA, 80 bp, synthetic construct
  misc_feature 1..80: note = Synthetic: >AdVB7-cand-14080-14159
  source 1..80: mol_type = other DNA
aaaaatgcaactcaccaaggccatggcgaccgagcgtgcgttcgttcttttttgttatctgtgtttagtacgatgaggag

SEQ ID NO: 8824 - DNA, 80 bp, synthetic construct
  misc_feature 1..80: note = Synthetic: >NC_003310.1-cand-37260-37339
  source 1..80: mol_type = other DNA
aaaaattataatatttcctctttcgtattcgtaattagttctcttttcatgttcgaaaaagtgaaacatgcggttaaaat

SEQ ID NO: 8825 - DNA, 80 bp, synthetic construct
  misc_feature 1..80: note = Synthetic: >NC_039477.1-cand-3260-3339
  source 1..80: mol_type = other DNA
aggcaccgtggcaactgtgctcatcaaacgccccaccggagagctcatgcctcttgcagccagaatgggaacacacgcaa

SEQ ID NO: 8826 - DNA, 80 bp, synthetic construct
  misc_feature 1..80: note = Synthetic: >NC_001611.1-cand-117440-117519
  source 1..80: mol_type = other DNA
aggcagtcggattggaacataagatatctatagatggagtaagtagtttattaaaggaactaaagactcaaagtccggat

SEQ ID NO: 8827 - DNA, 80 bp, synthetic construct
  misc_feature 1..80: note = Synthetic: >AdVB3-cand-9680-9759
  source 1..80: mol_type = other DNA
aggcagttttaagacggcggatggtggcgaggagcaccaggtctttgggtccggcttgttggatgcgcaggcgatgggcc

SEQ ID NO: 8828 - DNA, 80 bp, synthetic construct
  misc_feature 1..80: note = Synthetic: >HQ537689.1-cand-5530-5609
  source 1..80: mol_type = other DNA
tttacatcctagttattttattttacgtcgcaggcgtaaacgttttccatatttttttacagatgtccgtgtggcggcct

SEQ ID NO: 8829 - DNA, 80 bp, synthetic construct
  misc_feature 1..80: note = Synthetic: >NC_003310.1-cand-31410-31489
  source 1..80: mol_type = other DNA
ttacattaaacgtacattttccattattaataagaatgactcctatgtttcccctataatcttcgtctattacaccgcct

SEQ ID NO: 8830 - DNA, 80 bp, synthetic construct
  misc_feature 1..80: note = Synthetic: >NC_003310.1-cand-103090-103169
  source 1..80: mol_type = other DNA
aggctcaacaaggtaccgaatctagttttgtttttctcgcgaatatcgttgactcataagaaagagaatagcggtgagta

SEQ ID NO: 8831 - DNA, 80 bp, synthetic construct
  misc_feature 1..80: note = Synthetic: >NC_001611.1-cand-134330-134409
  source 1..80: mol_type = other DNA
aggctgctattactgacgccactgcagttgctgctgcattatctactcatagaaaggttgcgtctagcactacacaatat

SEQ ID NO: 8832 - DNA, 80 bp, synthetic construct
  misc_feature 1..80: note = Synthetic: >NC_007381.1-cand-860-939
  source 1..80: mol_type = other DNA
tacaacttcgaaaaagagggatactctctagtgggaatagaccctttcaaactgcttcaaaacagccaagtatacagcct

SEQ ID NO: 8833 - DNA, 80 bp, synthetic construct
  misc_feature 1..80: note = Synthetic: >NC_001611.1-cand-122330-122409
  source 1..80: mol_type = other DNA
agggaaaagattctcatttgataaaaattccgctactaataggatacgggaataaaaatccacttgatacagccaagtat

SEQ ID NO: 8834 - DNA, 80 bp, synthetic construct
  misc_feature 1..80: note = Synthetic: >AdVB3-cand-4390-4469
  source 1..80: mol_type = other DNA
agggaaaagcatgaaaaaatttggagacgcctttgtgaccccccagattctccatgcactcatccataatgatagcgatg

SEQ ID NO: 8835 - DNA, 80 bp, synthetic construct
  misc_feature 1..80: note = Synthetic: >EVD70-cand-3700-3779
  source 1..80: mol_type = other DNA
agggaatagttgctttcacagacattagaaatctcctgtggttagaggatgatgccatggaacaaggtataacagattac

SEQ ID NO: 8836 - DNA, 80 bp, synthetic construct
  misc_feature 1..80: note = Synthetic: >EVA76-cand-6330-6409
  source 1..80: mol_type = other DNA
agggacatcttgaacccccaaactagggatgtgaccaaaatgaaaatgtacctggacaaatatggtattgacctccctta

SEQ ID NO: 8837 - DNA, 80 bp, synthetic construct
  misc_feature 1..80: note = Synthetic: >NC_001611.1-cand-42030-42109
  source 1..80: mol_type = other DNA
agggacgtgttaataaaaacatgcttaagttagtttatatctttgagcctgaaaaagatatcagagaacttctgctagaa

SEQ ID NO: 8838 - DNA, 80 bp, synthetic construct
  misc_feature 1..80: note = Synthetic: >NC_001611.1-cand-14110-14189
  source 1..80: mol_type = other DNA
agggagagtataaaacattaaatgtccgtacttattaaagtattcagtagccaatcctaactctttcgaatacttattaa

SEQ ID NO: 8839 - DNA, 80 bp, synthetic construct
  misc_feature 1..80: note = Synthetic: >AdVB3-cand-26770-26849
  source 1..80: mol_type = other DNA
ctatcagccccaaatggggttggcagcaggcgcttcccaggactactccacccgcatgaattggcttagcgccgggccct

SEQ ID NO: 8840 - DNA, 80 bp, synthetic construct
  misc_feature 1..80: note = Synthetic: >NC_003310.1-cand-130920-130999
  source 1..80: mol_type = other DNA
tgtttatggagttagcaatttcaaaatagggatgtttaacctgacatttattaagtcgttggatcataccgttttcccct

SEQ ID NO: 8841 - DNA, 80 bp, synthetic construct
  misc_feature 1..80: note = Synthetic: >NC_001611.1-cand-67550-67629
  source 1..80: mol_type = other DNA
agtgttcgaatgccaatgttaatttcttactaacacgtaattataataatttaggactttgtaatattgtacgatgtaat

SEQ ID NO: 8842 - DNA, 80 bp, synthetic construct
  misc_feature 1..80: note = Synthetic: >NC_001611.1-cand-130810-130889
  source 1..80: mol_type = other DNA
cagagatatcatagccgctcttagagtttcagcgtgattttccaacctaaatagaacgtcatcattgcgtttacaacact

SEQ ID NO: 8843 - DNA, 80 bp, synthetic construct
  misc_feature 1..80: note = Synthetic: >NC_003310.1-cand-108020-108099
  source 1..80: mol_type = other DNA
ctagatcgctttctggtaacatgatatcatgtgtaaaaagttttaacatgtcggtcggcattctatttagatcattaact

SEQ ID NO: 8844 - DNA, 80 bp, synthetic construct
  misc_feature 1..80: note = Synthetic: >EVA89-cand-6480-6559
  source 1..80: mol_type = other DNA
gtattaatgattcagtttaccttagaatgtgttttggccacctgtatgagaaattccatgcaaacccagggacaataact

SEQ ID NO: 8845 - DNA, 80 bp, synthetic construct
  misc_feature 1..80: note = Synthetic: >NC_004905.2-cand-1120-1199
  source 1..80: mol_type = other DNA
agttcagattgcttcaaatgagaacgtggaagcaatggattccagcactcttgaactgagaagcagatattgggctataa

SEQ ID NO: 8846 - DNA, 80 bp, synthetic construct
  misc_feature 1..80: note = Synthetic: >AdVB7-cand-12010-12089
  source 1..80: mol_type = other DNA
gatctgggggtgtatcgcaatgacaggatgcaccgtgcggtgagcgccagcaggaggcgcgagctgagcgacagagaact

SEQ ID NO: 8847 - DNA, 80 bp, synthetic construct
  misc_feature 1..80: note = Synthetic: >EVD70-cand-3860-3939
  source 1..80: mol_type = other DNA
agttggagaggacagtttattggaaaagcttcttaaagcattaatcaaaatagtatctgcaatggtgattgtgattagga

SEQ ID NO: 8848 - DNA, 80 bp, synthetic construct
  misc_feature 1..80: note = Synthetic: >NC_001611.1-cand-11380-11459
  source 1..80: mol_type = other DNA
ctctgatacaattagatatatctattgtgtcggtagacgataccgttacatttgaattaatggtgttccattttacaact

SEQ ID NO: 8849 - DNA, 80 bp, synthetic construct
  misc_feature 1..80: note = Synthetic: >NC_007376.1-cand-1090-1169
  source 1..80: mol_type = other DNA
taaaaacatgaagaaaacgagtcagctaaagtgggcacttggtgagaacatggcaccagagaaggtagactttgacaact

SEQ ID NO: 8850 - DNA, 80 bp, synthetic construct
  misc_feature 1..80: note = Synthetic: >NC_003310.1-cand-116780-116859
  source 1..80: mol_type = other DNA
agttgttactgatttttttcattccaggatctagataattaataataatgggttttctattcttattctttgtattttga

SEQ ID NO: 8851 - DNA, 80 bp, synthetic construct
  misc_feature 1..80: note = Synthetic: >NC_001611.1-cand-44590-44669
  source 1..80: mol_type = other DNA
agtttaaaacttctatcgataattgtttcatatgttttaatatttacaagttttttggtccatggtacattagccggaca

SEQ ID NO: 8852 - DNA, 80 bp, synthetic construct
  misc_feature 1..80: note = Synthetic: >NC_003310.1-cand-142260-142339
  source 1..80: mol_type = other DNA
tttaatatatcctttcgtttcccctttacaggcatcgatcgtagcatattttccgcgtctgagatggaaatgttaaaact

SEQ ID NO: 8853 - DNA, 80 bp, synthetic construct
  misc_feature 1..80: note = Synthetic: >NC_001611.1-cand-84140-84219
  source 1..80: mol_type = other DNA
tttcaaaaagagcttatatggcaacgactattttagaaatggtaaaggataaaaattttttagatgtagtatctaaaact

SEQ ID NO: 8854 - DNA, 80 bp, synthetic construct
  misc_feature 1..80: note = Synthetic: >NC_001611.1-cand-96110-96189
  source 1..80: mol_type = other DNA
gatctaatatttttagatccgaattcaggtaatggactccaatacgaaattgcaaaatatgctctagatactgcaaaact

SEQ ID NO: 8855 - DNA, 80 bp, synthetic construct
  misc_feature 1..80: note = Synthetic: >KC470236.1-cand-2730-2809
  source 1..80: mol_type = other DNA
ataaaaactggaaatgtttttttgaaaagacttggtgcagattagacttgcagcaggacgaggatgaaggagacaatgat

SEQ ID NO: 8856 - DNA, 80 bp, synthetic construct
  misc_feature 1..80: note = Synthetic: >NC_001611.1-cand-56070-56149
  source 1..80: mol_type = other DNA
ttattgacattgtatggttttaaatattctataacttgagacttgatagatattaatgacgaattgaaaattatttttat

SEQ ID NO: 8857 - DNA, 80 bp, synthetic construct
  misc_feature 1..80: note = Synthetic: >AdVB3-cand-16640-16719
  source 1..80: mol_type = other DNA
tgcctgcgcggagaggcgtaaagcgcgagggtgaggacctatatcctaccatgcagctaatggtgcccaagcgccagagg

SEQ ID NO: 8858 - DNA, 80 bp, synthetic construct
  misc_feature 1..80: note = Synthetic: >AdVB7-cand-11610-11689
  source 1..80: mol_type = other DNA
cctgatcgcccgcgaggaagtgaccctgggtctgatgcatctgtgggacctgatggaggctatcacccagaaccccacta

SEQ ID NO: 8859 - DNA, 80 bp, synthetic construct
  misc_feature 1..80: note = Synthetic: >AdVB7-cand-16160-16239
  source 1..80: mol_type = other DNA
tgcggagggccaaacgtgtggggcgaagagccatgcttagagcggccagacgcgcggctttaggtgccagcagcggcagg

SEQ ID NO: 8860 - DNA, 80 bp, synthetic construct
  misc_feature 1..80: note = Synthetic: >NC_001722.1-cand-760-839
  source 1..80: mol_type = other DNA
cctggtcattcggtgttcatctgagtaacaagaccctggtctgttaggacccttctcgctttgggaatccaaggcaggaa

SEQ ID NO: 8861 - DNA, 80 bp, synthetic construct
  misc_feature 1..80: note = Synthetic: >NC_003310.1-cand-108260-108339
  source 1..80: mol_type = other DNA
tttgttttcattattattagttattatctcccataatcttggtaatacttacaccttgatcataagataccttatacagg

SEQ ID NO: 8862 - DNA, 80 bp, synthetic construct
  misc_feature 1..80: note = Synthetic: >NC_001611.1-cand-128240-128319
  source 1..80: mol_type = other DNA
taagagacgcgacttcaggagttagtagaagaactctgtttctgtatctatcaacgctggaatcaatactcaagttaagg

SEQ ID NO: 8863 - DNA, 80 bp, synthetic construct
  misc_feature 1..80: note = Synthetic: >HCV.A20-cand-6860-6939
  source 1..80: mol_type = other DNA
tggctgctctggcacttcaatttttaattcaatgattaacaatttaataattaggacacttttactgaaaacctacaagg

SEQ ID NO: 8864 - DNA, 80 bp, synthetic construct
  misc_feature 1..80: note = Synthetic: >EVD70-cand-6500-6579
  source 1..80: mol_type = other DNA
cctttatgcaacattccacaaaaatccaggagtcgccactgggagcgctgttggatgtgatccagatttgttttggtcca

SEQ ID NO: 8865 - DNA, 80 bp, synthetic construct
  misc_feature 1..80: note = Synthetic: >AdVB3-cand-18240-18319
  source 1..80: mol_type = other DNA
cgaaagcaaactggcaaagtactctgaacagcatcgtgggtctgggcgtgcagagtgtaaagcgccgtcgctgctattaa

SEQ ID NO: 8866 - DNA, 80 bp, synthetic construct
  misc_feature 1..80: note = Synthetic: >NC_011509.2-cand-960-1039
  source 1..80: mol_type = other DNA
cgaacatcatgcaacagtgggattgacacttagaattgagtctgcagtttgtgagtctgtactcgccgatgcaagtgaaa

SEQ ID NO: 8867 - DNA, 80 bp, synthetic construct
  misc_feature 1..80: note = Synthetic: >NC_003310.1-cand-90890-90969
  source 1..80: mol_type = other DNA
tgtagctatatagatgacgatcctttaagagaggtataataactttaccccaatcagatagactgttgttatggtcttcg

SEQ ID NO: 8868 - DNA, 80 bp, synthetic construct
  misc_feature 1..80: note = Synthetic: >NC_003310.1-cand-124050-124129
  source 1..80: mol_type = other DNA
cgaataaacaaagtggaatataaaccatataaaaacaatagtttgtactgcaaaaataatatctatttttgttttcgaag

SEQ ID NO: 8869 - DNA, 80 bp, synthetic construct
  misc_feature 1..80: note = Synthetic: >NC_003310.1-cand-98340-98419
  source 1..80: mol_type = other DNA
tagaggtaatgatgttatctttgttcttaagactataggtgtcccgtcagcatgcagacaaaatgaagatccaagattcg

SEQ ID NO: 8870 - DNA, 80 bp, synthetic construct
  misc_feature 1..80: note = Synthetic: >NC_003310.1-cand-139690-139769
  source 1..80: mol_type = other DNA
tttgttcaaactttgttgttatattagtaatctttttttccaaattagttagccgttgtttgagagtttcctcattgtcg

SEQ ID NO: 8871 - DNA, 80 bp, synthetic construct
  misc_feature 1..80: note = Synthetic: >AdVB3-cand-17600-17679
  source 1..80: mol_type = other DNA
cgacacggcacgaggccgtacatgggcacctggagcgacatcggcacgagccaactgaacgggggcgccttcaattggag

SEQ ID NO: 8872 - DNA, 80 bp, synthetic construct
  misc_feature 1..80: note = Synthetic: >NC_003310.1-cand-175340-175419
  source 1..80: mol_type = other DNA
cgactatctaggtatttgtatctcaccgatagagaacatataaatgtagactctattaaacagttgtgtaaaatatcaga

SEQ ID NO: 8873 - DNA, 80 bp, synthetic construct
  misc_feature 1..80: note = Synthetic: >AdVB3-cand-30890-30969
  source 1..80: mol_type = other DNA
gatgccattgggattcaccagtgcaaaaaaggcatattctgcttagtaaaacaatccaaaatctcctacgagatcaccgc

SEQ ID NO: 8874 - DNA, 80 bp, synthetic construct
  misc_feature 1..80: note = Synthetic: >AdVB3-cand-30970-31049
  source 1..80: mol_type = other DNA
tactgaccatcgtctctcatacgagctcggtccgcagcgacaaaaattcacctgcatggtgggaatcaaccccatagtta

SEQ ID NO: 8875 - DNA, 80 bp, synthetic construct
  misc_feature 1..80: note = Synthetic: >AdVB3-cand-31050-31129
  source 1..80: mol_type = other DNA
tcacccagcagtctggagatactaagggttgcatccactgttcctgtgattccaccgagtgcatctacacactgctgaag

SEQ ID NO: 8876 - DNA, 80 bp, synthetic construct
  misc_feature 1..80: note = Synthetic: >AdVB3-cand-31130-31209
  source 1..80: mol_type = other DNA
accctctgcggccttcgagacctcctacccatgaactaatcattgcccctaccttacccaatccaaatattaataaagac

SEQ ID NO: 8877 - DNA, 80 bp, synthetic construct
  misc_feature 1..80: note = Synthetic: >AdVB3-cand-31210-31289
  source 1..80: mol_type = other DNA
acttacttgaaatcagcaatacagtctttgtcaaaactttctaccagcagcacctcaccctcttcccaactctggtactc

SEQ ID NO: 8878 - DNA, 80 bp, synthetic construct
  misc_feature 1..80: note = Synthetic: >AdVB3-cand-31290-31369
  source 1..80: mol_type = other DNA
taaacgtcggagggtggcatactttctccacactttgaaagggatgtcaaattttatttcctcttctttgcccacaatct

SEQ ID NO: 8879 - DNA, 80 bp, synthetic construct
  misc_feature 1..80: note = Synthetic: >AdVB3-cand-31370-31449
  source 1..80: mol_type = other DNA
tcatttctttatccccagatggccaagcgagctcggctaagcacttccttcaacccggtgtacccttatgaagatgaaag

SEQ ID NO: 8880 - DNA, 80 bp, synthetic construct
  misc_feature 1..80: note = Synthetic: >AdVB3-cand-31440-31519
  source 1..80: mol_type = other DNA
aagatgaaagcaacttacaacacccatttataaatcctggtttcatttcccctgacgggttcacacaaagtccaaacggg

SEQ ID NO: 8881 - DNA, 80 bp, synthetic construct
  misc_feature 1..80: note = Synthetic: >AdVB3-cand-31530-31609
  source 1..80: mol_type = other DNA
ttaaatgtgttaatccacttaccactgcaagcggctccctccaacttaaagtgggaagtggtcttacagtagacactact

SEQ ID NO: 8882 - DNA, 80 bp, synthetic construct
  misc_feature 1..80: note = Synthetic: >AdVB3-cand-31610-31689
  source 1..80: mol_type = other DNA
gatggatccttagaagaaaacatcaaagttaacacccccctaacaaagtcaaaccattctataaatttaccaataggaaa

SEQ ID NO: 8883 - DNA, 80 bp, synthetic construct
  misc_feature 1..80: note = Synthetic: >AdVB3-cand-31690-31769
  source 1..80: mol_type = other DNA
cggtttgcaaatagaacaaaacaaactttgcagtaagctcggaaatggtcttacatttgactcttccaattctattgcac

SEQ ID NO: 8884 - DNA, 80 bp, synthetic construct
  misc_feature 1..80: note = Synthetic: >AdVB3-cand-31780-31859
  source 1..80: mol_type = other DNA
cactttatggacaggtccaaaaccagaagccaactgcataattgaatacgggaaagaaaacccagatagcaaactaactt

SEQ ID NO: 8885 - DNA, 80 bp, synthetic construct
  misc_feature 1..80: note = Synthetic: >AdVB3-cand-31860-31939
  source 1..80: mol_type = other DNA
taatccttgtaaaaaatggaggaattgttaatggatatgtaacgctaatgggagcctcagactatgttaacaccttattt

SEQ ID NO: 8886 - DNA, 80 bp, synthetic construct
  misc_feature 1..80: note = Synthetic: >AdVB3-cand-31940-32019
  source 1..80: mol_type = other DNA
aaaaacaaaaatgtctccattaatgtagaattatactttgatgccactggtcatatattaccagacttatcttctcttaa

SEQ ID NO: 8887 - DNA, 80 bp, synthetic construct
  misc_feature 1..80: note = Synthetic: >AdVB3-cand-32020-32099
  source 1..80: mol_type = other DNA
aacagatctacaactaaaatacaagcaaaccactcactttagtgcaagaggttttatgccaagtactacagcgtatccat

SEQ ID NO: 8888 - DNA, 80 bp, synthetic construct
  misc_feature 1..80: note = Synthetic: >AdVB3-cand-32100-32179
  source 1..80: mol_type = other DNA
ttgtccttcctaatgcgggaacagataatgaaaattatatttttggtcaatgctactacaaagcaagcgatggcgccctt

SEQ ID NO: 8889 - DNA, 80 bp, synthetic construct
  misc_feature 1..80: note = Synthetic: >AdVE4-cand-6050-6129
  source 1..80: mol_type = other DNA
ttgatattgacggtaccggcggagatgcctttcaagagcccctcgtccatctggtcagaaaaaacaatctttttgttgtc

SEQ ID NO: 8890 - DNA, 80 bp, synthetic construct
  misc_feature 1..80: note = Synthetic: >AdVE4-cand-6130-6209
  source 1..80: mol_type = other DNA
aagtttggtggcaaaggagccgtagagggcgttggaaaggagcttggcaatggagcgcatggtctggtttttttccttgt

SEQ ID NO: 8891 - DNA, 80 bp, synthetic construct
  misc_feature 1..80: note = Synthetic: >AdVE4-cand-6190-6269
  source 1..80: mol_type = other DNA
ggtctggtttttttccttgtcggcgcgctccttggcggcgatgttaagttgcacgtactcgcgcgccacgcacttccatt

SEQ ID NO: 8892 - DNA, 80 bp, synthetic construct
  misc_feature 1..80: note = Synthetic: >AdVE4-cand-6290-6369
  source 1..80: mol_type = other DNA
ttgtctggcacaattctgacctgccagccccggttatgcagggtgataaggtccacgctggtggccacctcgccgcgcag

SEQ ID NO: 8893 - DNA, 80 bp, synthetic construct
  misc_feature 1..80: note = Synthetic: >AdVE4-cand-6380-6459
  source 1..80: mol_type = other DNA
gtccagcaaaggcggccgcccttgcgcgagcagaaggggggcagggggtccagcataagctcttcgggggggtcggcatc

SEQ ID NO: 8894 - DNA, 80 bp, synthetic construct
  misc_feature 1..80: note = Synthetic: >AdVE4-cand-6490-6569
  source 1..80: mol_type = other DNA
gtcaaagtagctgatgcatgtgccaagatcgtccagagaagcttgccattcgcgcacggctagcgcgcgctcgtagggac

SEQ ID NO: 8895 - DNA, 80 bp, synthetic construct
  misc_feature 1..80: note = Synthetic: >AdVE4-cand-6620-6699
  source 1..80: mol_type = other DNA
ccgcagatgtcgtagacgtagaggggctcctcgaggattccgatgtaggtggggtagcagcggcccccgcggatgctggc

SEQ ID NO: 8896 - DNA, 80 bp, synthetic construct
  misc_feature 1..80: note = Synthetic: >AdVE4-cand-6730-6809
  source 1..80: mol_type = other DNA
ggcgaggagtccggctccgagattggagcggttgggtttttcggtgcggtaaacgatctgacggaagatggcgtgggagt

SEQ ID NO: 8897 - DNA, 80 bp, synthetic construct
  misc_feature 1..80: note = Synthetic: >AdVE4-cand-6770-6849
  source 1..80: mol_type = other DNA
tcggtgcggtaaacgatctgacggaagatggcgtgggagttggaggagatggtgggtctttggaaaatgttaaagtgggc

SEQ ID NO: 8898 - DNA, 80 bp, synthetic construct
  misc_feature 1..80: note = Synthetic: >AdVE4-cand-6860-6939
  source 1..80: mol_type = other DNA
ccgaccgagtcgcggataaagtgggcgtaggagtcttgcagcttggcaacgagctcggcagtaacaaggacgtccagggc

SEQ ID NO: 8899 - DNA, 80 bp, synthetic construct
  misc_feature 1..80: note = Synthetic: >AdVE4-cand-6940-7019
  source 1..80: mol_type = other DNA
gcagtagtcgagggtctcttggatgatgtcatacttgagcttgcccttttgtttccacagctggcggttgagaaggaact

SEQ ID NO: 8900 - DNA, 80 bp, synthetic construct
  misc_feature 1..80: note = Synthetic: >AdVE4-cand-7050-7129
  source 1..80: mol_type = other DNA
gaaacccgtcctgatcggcacggtaagagcctagcatgtagaactggttgacggccttgtaggcgcagcagcccttttcc

SEQ ID NO: 8901 - DNA, 80 bp, synthetic construct
  misc_feature 1..80: note = Synthetic: >AdVE4-cand-7140-7219
  source 1..80: mol_type = other DNA
cgtaggcctgggcggccttgcgcagggaggtgtgcgtaagggcgaaggtgtccctgaccattacctttaggaactggtac

SEQ ID NO: 8902 - DNA, 80 bp, synthetic construct
  misc_feature 1..80: note = Synthetic: >AdVE4-cand-7180-7259
  source 1..80: mol_type = other DNA
ggcgaaggtgtccctgaccattacctttaggaactggtacttgaagtcgatatcgtcacagcccccatgctcccagagct

SEQ ID NO: 8903 - DNA, 80 bp, synthetic construct
  misc_feature 1..80: note = Synthetic: >AdVE4-cand-7200-7279
  source 1..80: mol_type = other DNA
ttacctttaggaactggtacttgaagtcgatatcgtcacagcccccatgctcccagagctggaagtccgtgcgcttcttg

SEQ ID NO: 8904 - DNA, 80 bp, synthetic construct
  misc_feature 1..80: note = Synthetic: >AdVE4-cand-28130-28209
  source 1..80: mol_type = other DNA
tgcgcggtgttgattaagtgcgggtgggaatgcgatagcgtggtgatccattataaaaacaagacgcggaacaatactct

SEQ ID NO: 8905 - DNA, 80 bp, synthetic construct
  misc_feature 1..80: note = Synthetic: >AdVE4-cand-28230-28309
  source 1..80: mol_type = other DNA
gggaccccgagtggtacaccgtctctgtccctggtgctgacggctccctccgcacggtgaacaacactttcatttttaag

SEQ ID NO: 8906 - DNA, 80 bp, synthetic construct
  misc_feature 1..80: note = Synthetic: >AdVE4-cand-28290-28369
  source 1..80: mol_type = other DNA
acaacactttcatttttaagcacatgtgcaataccgccatgttcatgagcaggcagtacgatatgtggcccccacgaaaa

SEQ ID NO: 8907 - DNA, 80 bp, synthetic construct
  misc_feature 1..80: note = Synthetic: >AdVE4-cand-28370-28449
  source 1..80: mol_type = other DNA
gagaacatcgtggtcttctccatcgcttacagcttgtgcacggtgctaatcaccgcgattgtgtgcctgagcattcacat

SEQ ID NO: 8908 - DNA, 80 bp, synthetic construct
  misc_feature 1..80: note = Synthetic: >AdVE4-cand-28450-28529
  source 1..80: mol_type = other DNA
gctcattgctattcgccccagaaataatgccgagaaagaaaaacagccataacaccattttttttacacacctttttcag

SEQ ID NO: 8909 - DNA, 80 bp, synthetic construct
  misc_feature 1..80: note = Synthetic: >AdVE4-cand-28530-28609
  source 1..80: mol_type = other DNA
accatggcctctgttacagcccttatttattttttgggtcttctgggctctatcagcagttttgaccataaaaacataac

SEQ ID NO: 8910 - DNA, 80 bp, synthetic construct
  misc_feature 1..80: note = Synthetic: >AdVE4-cand-28610-28689
  source 1..80: mol_type = other DNA
tgcttatgttggttctaactgtgtactaactgggtaccaatcacaccaacgggtttcatggtactggtttgataaaaaaa

SEQ ID NO: 8911 - DNA, 80 bp, synthetic construct
  misc_feature 1..80: note = Synthetic: >AdVE4-cand-28690-28769
  source 1..80: mol_type = other DNA
aacacagcttatacactttgcaaaggttatcatcaacccacacagcgcggtggtctttattacagctgcactaataataa

SEQ ID NO: 8912 - DNA, 80 bp, synthetic construct
  misc_feature 1..80: note = Synthetic: >AdVE4-cand-28770-28849
  source 1..80: mol_type = other DNA
tatcacactacttcaagtgactaaacaatattctgggacatattatggaaccaattttaacacaaaacaggacacttatt

SEQ ID NO: 8913 - DNA, 80 bp, synthetic construct
  misc_feature 1..80: note = Synthetic: >AdVE4-cand-28840-28919
  source 1..80: mol_type = other DNA
gacacttattatagtgtcgaagtattggatccaactactcccagaactaaaaccaaacataccacaactaaaaagcccac

SEQ ID NO: 8914 - DNA, 80 bp, synthetic construct
  misc_feature 1..80: note = Synthetic: >AdVE4-cand-28920-28999
  source 1..80: mol_type = other DNA
tatacctaaaaccactaaattaacaacaacaaccagcaccacacttgctatgactacacacactaagctgacctcacagg

SEQ ID NO: 8915 - DNA, 80 bp, synthetic construct
  misc_feature 1..80: note = Synthetic: >AdVE4-cand-28960-29039
  source 1..80: mol_type = other DNA
acacttgctatgactacacacactaagctgacctcacaggcaactactgaaaacgaattggttgccctgacgcaaaatgg

SEQ ID NO: 8916 - DNA, 80 bp, synthetic construct
  misc_feature 1..80: note = Synthetic: >AdVE4-cand-29080-29159
  source 1..80: mol_type = other DNA
gagaaaattcccagatccatgattggcattatcgctgctgtagtggtgtgtatggtcattatcatcttgtgcatgatgta

SEQ ID NO: 8917 - DNA, 80 bp, synthetic construct
  misc_feature 1..80: note = Synthetic: >AdVE4-cand-29160-29239
  source 1..80: mol_type = other DNA
ctatgcctgctactacagaaaacacaggctgaacaacaagctggacccctactaaatgtttattttaaattttttagaac

SEQ ID NO: 8918 - DNA, 80 bp, synthetic construct
  misc_feature 1..80: note = Synthetic: >AdVE4-cand-29240-29319
  source 1..80: mol_type = other DNA
cataaagatcctaagccttttttgtttttctataatttttacctctgctatttgtgaatcagtggataaggacgttactg

SEQ ID NO: 8919 - DNA, 80 bp, synthetic construct
  misc_feature 1..80: note = Synthetic: >AdVE4-cand-29320-29399
  source 1..80: mol_type = other DNA
tcacactggaggcagtagcagagttagcaaagcagattcatgaagattcctttgttgctaatactcccacacaccccgga

SEQ ID NO: 8920 - DNA, 80 bp, synthetic construct
  misc_feature 1..80: note = Synthetic: >EF571895.1-cand-1760-1839
  source 1..80: mol_type = other DNA
agactacctcacccacaacccttccctttttctacctcaacacatactacctcaaattgatttttcttgatgcttctcaa

SEQ ID NO: 8921 - DNA, 80 bp, synthetic construct
  misc_feature 1..80: note = Synthetic: >EU711054.1-cand-0-79
  source 1..80: mol_type = other DNA
caggcctccttattataataaaaaaaagctaagcatgattgacagtgtgggctaaaccaaaagcacaagaacaaagcttt

SEQ ID NO: 8922 - DNA, 80 bp, synthetic construct
  misc_feature 1..80: note = Synthetic: >EU711054.1-cand-80-159
  source 1..80: mol_type = other DNA
tagccaattagcagccacaaggtggagcaaaagtattaagtttcactgttatgtgcaggaatgtgcagctgtgacctttt

SEQ ID NO: 8923 - DNA, 80 bp, synthetic construct
  misc_feature 1..80: note = Synthetic: >EU711054.1-cand-160-239
  source 1..80: mol_type = other DNA
aaagtttccgggcacggagccaacttcctgggcctggtgccataccaacacagctgctgagcttccggaatacaatactg

SEQ ID NO: 8924 - DNA, 80 bp, synthetic construct
  misc_feature 1..80: note = Synthetic: >EU711054.1-cand-230-309
  source 1..80: mol_type = other DNA
tacaatactggtgccctttgtaagtgttttacaggtaagtaaggcctacaacagggcttatttgtactataagttaatgg

SEQ ID NO: 8925 - DNA, 80 bp, synthetic construct
  misc_feature 1..80: note = Synthetic: >EU711054.1-cand-330-409
  source 1..80: mol_type = other DNA
gaaagtgaagggtggcttaacagagacgtccttgggttcaaacctaagggtgccataagcaacattacattaatgttgtg

SEQ ID NO: 8926 - DNA, 80 bp, synthetic construct
  misc_feature 1..80: note = Synthetic: >EU711054.1-cand-340-419
  source 1..80: mol_type = other DNA
ggtggcttaacagagacgtccttgggttcaaacctaagggtgccataagcaacattacattaatgttgtgacatctccag

SEQ ID NO: 8927 - DNA, 80 bp, synthetic construct
  misc_feature 1..80: note = Synthetic: >EU711054.1-cand-500-579
  source 1..80: mol_type = other DNA
gtattggtgctaccgtctcgaacctagccgacagccgttggatataaagggtcaccatttttatttcagatgggcatatt

SEQ ID NO: 8928 - DNA, 80 bp, synthetic construct
  misc_feature 1..80: note = Synthetic: >EU711054.1-cand-580-659
  source 1..80: mol_type = other DNA
gcttgctgtgcctgaaataattgctgcatctgtagctggaggagcagaggcactatcaattgctggatctggagctgcaa

SEQ ID NO: 8929 - DNA, 80 bp, synthetic construct
  misc_feature 1..80: note = Synthetic: >EU711054.1-cand-640-719
  source 1..80: mol_type = other DNA
tgctggatctggagctgcaatagcaactggtgaaggtttagctgctcttggtgggcttacagagtcagcagcactattag

SEQ ID NO: 8930 - DNA, 80 bp, synthetic construct
  misc_feature 1..80: note = Synthetic: >EU711054.1-cand-730-809
  source 1..80: mol_type = other DNA
tgaaatatctgaagcagctgctactgtactaacaaaagtacctgagcttgtaactgtaacacaaggtgtaacagcagctg

SEQ ID NO: 8931 - DNA, 80 bp, synthetic construct
  misc_feature 1..80: note = Synthetic: >EU711054.1-cand-870-949
  source 1..80: mol_type = other DNA
gggacctgcctgcgagtaccccaacaggaagtccaagtggactacatccccccgcaggatacaatccccaaggaggtgga

SEQ ID NO: 8932 - DNA, 80 bp, synthetic construct
  misc_feature 1..80: note = Synthetic: >EU711054.1-cand-900-979
  source 1..80: mol_type = other DNA
gtccaagtggactacatccccccgcaggatacaatccccaaggaggtggacttaatatccagtccatccacaagcccctc

SEQ ID NO: 8933 - DNA, 80 bp, synthetic construct
  misc_feature 1..80: note = Synthetic: >EU711054.1-cand-960-1039
  source 1..80: mol_type = other DNA
agtccatccacaagcccctccacgccccctacccaggaatggcactggcacctatccctgaatacaacttggaaactgga

SEQ ID NO: 8934 - DNA, 80 bp, synthetic construct
  misc_feature 1..80: note = Synthetic: >EU711054.1-cand-1060-1139
  source 1..80: mol_type = other DNA
ggtattcaacttcattgcatcccacctgcccgagttgcctagcctgcaggacgtgttcaatagaattgcctatggaatct

SEQ ID NO: 8935 - DNA, 80 bp, synthetic construct
  misc_feature 1..80: note = Synthetic: >EU711054.1-cand-1160-1239
  source 1..80: mol_type = other DNA
gggagaacagtagttaatagagcagttagtgaagaattacaaagactactaggagatttagaatatggatttagaactgc

SEQ ID NO: 8936 - DNA, 80 bp, synthetic construct
  misc_feature 1..80: note = Synthetic: >EVA91-cand-50-129
  source 1..80: mol_type = other DNA
ctggtatcacggtacctttgtgcgcctgttttatatccctttccccatgtaacttagaagttattaaacaaagttcaata

SEQ ID NO: 8937 - DNA, 80 bp, synthetic construct
  misc_feature 1..80: note = Synthetic: >EVA91-cand-140-219
  source 1..80: mol_type = other DNA
caaaccagtgccaccacgaacaagcacttctgtttccccggtgaagctgtatagactgtctccacggttgaaaatggcag

SEQ ID NO: 8938 - DNA, 80 bp, synthetic construct
  misc_feature 1..80: note = Synthetic: >EVA91-cand-540-619
  source 1..80: mol_type = other DNA
tactttgggtgtccgtgtttccttttattttatcatggctgcttatggtgacaatctaagattgttatcatatagctatt

SEQ ID NO: 8939 - DNA, 80 bp, synthetic construct
  misc_feature 1..80: note = Synthetic: >EVA91-cand-620-699
  source 1..80: mol_type = other DNA
ggattggccatccggtgactaacagagatctcatatacctttttgttggttttactaaattaaatattaccacgttcaag

SEQ ID NO: 8940 - DNA, 80 bp, synthetic construct
  misc_feature 1..80: note = Synthetic: >EVA91-cand-700-779
  source 1..80: mol_type = other DNA
acacttctccttatcatacaactaaatagtgagaagagaaaatgggagctcaagtctcaactcagaaaactggatcgcat

SEQ ID NO: 8941 - DNA, 80 bp, synthetic construct
  misc_feature 1..80: note = Synthetic: >EVA91-cand-780-859
  source 1..80: mol_type = other DNA
gagaatcaaaacatcgctgcaagtggatccactataaactataccaccattaattactacaaggattcatatgctgcatc

SEQ ID NO: 8942 - DNA, 80 bp, synthetic construct
  misc_feature 1..80: note = Synthetic: >EVA91-cand-860-939
  source 1..80: mol_type = other DNA
tgcagccaagcaggatttctcgcaagacccctccaaattcactcaacctgtagtagatgccctaaaagagacggcaccac

SEQ ID NO: 8943 - DNA, 80 bp, synthetic construct
  misc_feature 1..80: note = Synthetic: >EVA91-cand-940-1019
  source 1..80: mol_type = other DNA
cactgaaatcaccatcggcagaagcatgtgggtatagtgacagagtggctcagttaaccgtgggcaactccactattacc

SEQ ID NO: 8944 - DNA, 80 bp, synthetic construct
  misc_feature 1..80: note = Synthetic: >EVA91-cand-1060-1139
  source 1..80: mol_type = other DNA
ggccagagtattgcccagatactgatgctactgctgtagacaaacccacaaggcccgatgtctccgtcaataggttttac

SEQ ID NO: 8945 - DNA, 80 bp, synthetic construct
  misc_feature 1..80: note = Synthetic: >EVA91-cand-1100-1179
  source 1..80: mol_type = other DNA
caaacccacaaggcccgatgtctccgtcaataggttttacacacttagtgctaagctgtgggaaaagactggcgagaatt

SEQ ID NO: 8946 - DNA, 80 bp, synthetic construct
  misc_feature 1..80: note = Synthetic: >EVA91-cand-1190-1269
  source 1..80: mol_type = other DNA
gtactggaaattcccagatgtgttgacagaaacgggagtcttcggacaaaatgcccaatatcactatttgtatagatctg

SEQ ID NO: 8947 - DNA, 80 bp, synthetic construct
  misc_feature 1..80: note = Synthetic: >EVA91-cand-1260-1339
  source 1..80: mol_type = other DNA
tatagatctggattctgtgtgcatgttcagtgcaacgctagtaaattccatcaaggaacactactggttgtagtgatccc

SEQ ID NO: 8948 - DNA, 80 bp, synthetic construct
  misc_feature 1..80: note = Synthetic: >EVA91-cand-1340-1419
  source 1..80: mol_type = other DNA
ggagtttgttaattctagatcctctaatagtactgaccctaccacagctccacacccaccatactatgcaactcaaccag

SEQ ID NO: 8949 - DNA, 80 bp, synthetic construct
  misc_feature 1..80: note = Synthetic: >EVA91-cand-1430-1509
  source 1..80: mol_type = other DNA
taagacctttgcatacccctatgtgttggatgcaggcgtaccactctcccaagcattaatctggccgcatcaatggatta

SEQ ID NO: 8950 - DNA, 80 bp, synthetic construct
  misc_feature 1..80: note = Synthetic: >EVA91-cand-1510-1589
  source 1..80: mol_type = other DNA
acctcaggactaacaattgtgccaccatagttatcccctatgctaacaccgtgccctttgactcggctctgaatcattgc

SEQ ID NO: 8951 - DNA, 80 bp, synthetic construct
  misc_feature 1..80: note = Synthetic: >EVA91-cand-1590-1669
  source 1..80: mol_type = other DNA
aattttggtctcgccatcatcccaatagcaccattggactttaatgagggagcaacgacagctataccaataacagttac

SEQ ID NO: 8952 - DNA, 80 bp, synthetic construct
  misc_feature 1..80: note = Synthetic: >EVB74-cand-2060-2139
  source 1..80: mol_type = other DNA
ctgacattcttgttttgcgggtcagcaatggccactggcaaattgttgcttgcatactcaccaccaggcgctagcgtgcc

SEQ ID NO: 8953 - DNA, 80 bp, synthetic construct
  misc_feature 1..80: note = Synthetic: >EVB74-cand-2140-2219
  source 1..80: mol_type = other DNA
gactagcaggaagcaagccatgttgggcactcacataatatgggatctgggcttgcagtcaagttgtgtgttatgtgtac

SEQ ID NO: 8954 - DNA, 80 bp, synthetic construct
  misc_feature 1..80: note = Synthetic: >EVB74-cand-2210-2289
  source 1..80: mol_type = other DNA
ttatgtgtaccatggatcagccaatcacattaccgcatggtgcaaaaagacccatacacagcagccgggtatgtcacgtg

SEQ ID NO: 8955 - DNA, 80 bp, synthetic construct
  misc_feature 1..80: note = Synthetic: >EVB74-cand-2290-2369
  source 1..80: mol_type = other DNA
ctggtaccaaacaaacattgtcgtgcccgctgatactccgcaaaagtgcgtggtgttaggctttgcatctgcttgcaacg

SEQ ID NO: 8956 - DNA, 80 bp, synthetic construct
  misc_feature 1..80: note = Synthetic: >EVB74-cand-2350-2429
  source 1..80: mol_type = other DNA
ctttgcatctgcttgcaacgacttctctgtgcgcttgttgcgtgatactccattcatagaacagaaggcccaactgcaag

SEQ ID NO: 8957 - DNA, 80 bp, synthetic construct
  misc_feature 1..80: note = Synthetic: >EVB74-cand-2440-2519
  source 1..80: mol_type = other DNA
cgatagtcgtgtggcaaacactgaagccacgggtccaacaaattcgatgcaagttcctgctctcaccgcggtagagacgg

SEQ ID NO: 8958 - DNA, 80 bp, synthetic construct
  misc_feature 1..80: note = Synthetic: >EVB74-cand-2530-2609
  source 1..80: mol_type = other DNA
tcaggttgtacccggtgacactatacagactagacatgtggttaacttccactcccgctcagaatccacgttagagaact

SEQ ID NO: 8959 - DNA, 80 bp, synthetic construct
  misc_feature 1..80: note = Synthetic: >EVB74-cand-2610-2689
  source 1..80: mol_type = other DNA
tcatgggtagggcagcctgtgtatttatgtcaacatatcagtcaatggacacaacagataaaacaaagcgctacaccaat

SEQ ID NO: 8960 - DNA, 80 bp, synthetic construct
  misc_feature 1..80: note = Synthetic: >EVB74-cand-2690-2769
  source 1..80: mol_type = other DNA
tgggatataaacatcagggagatggtccaattgagaagaaaatgtgagctgtttacatacatgcgctttgatattgaggt

SEQ ID NO: 8961 - DNA, 80 bp, synthetic construct
  misc_feature 1..80: note = Synthetic: >EVB74-cand-2770-2849
  source 1..80: mol_type = other DNA
gacatttgtgataaccagtaggcaggacccgggaacaaacttggaacaagacatgcccgtcttgacacaccagattatgt

SEQ ID NO: 8962 - DNA, 80 bp, synthetic construct
  misc_feature 1..80: note = Synthetic: >EVB74-cand-2850-2929
  source 1..80: mol_type = other DNA
atataccgcctggaggccccataccccaagaagtgaacagttatgcgtggcaaacgtccaccaacccaagtgtattctgg

SEQ ID NO: 8963 - DNA, 80 bp, synthetic construct
  misc_feature 1..80: note = Synthetic: >EVB74-cand-2930-3009
  source 1..80: mol_type = other DNA
acagagggcaatgcaccagcgcgtatgtccattccctttattagtgtgggaaacgcgtacagcaccttctatgatggatg

SEQ ID NO: 8964 - DNA, 80 bp, synthetic construct
  misc_feature 1..80: note = Synthetic: >EVB74-cand-3030-3109
  source 1..80: mol_type = other DNA
gggtgtacgggtacacgacgctcaactcaatgggcaaactatacatcaggcatgtgaacgcgagcacacccactcaaata

SEQ ID NO: 8965 - DNA, 80 bp, synthetic construct
  misc_feature 1..80: note = Synthetic: >EVB74-cand-3090-3169
  source 1..80: mol_type = other DNA
cgagcacacccactcaaataaccagcacagtgcgcgtttatttcaaaccaaaacacgtgagagcttgggtgccacgccca

SEQ ID NO: 8966 - DNA, 80 bp, synthetic construct
  misc_feature 1..80: note = Synthetic: >EVB74-cand-3170-3249
  source 1..80: mol_type = other DNA
ccacggttgtgtcagtacaaaaccaaagctagtgtagattttgaagtcacgaaagtcacggaagagagagaaagtatcaa

SEQ ID NO: 8967 - DNA, 80 bp, synthetic construct
  misc_feature 1..80: note = Synthetic: >EVB74-cand-3240-3319
  source 1..80: mol_type = other DNA
aaagtatcaactcagtgccacaagtggatcactcgttacgaacatacggtgcttttggacagcaatctggcgctgtgtac

SEQ ID NO: 8968 - DNA, 80 bp, synthetic construct
  misc_feature 1..80: note = Synthetic: >EVB81-cand-5110-5189
  source 1..80: mol_type = other DNA
cggacctactgaaatctgtggatagtgaggcggtcagggagtactgcaaggaaaaagggtggttagtgcccgaaattaac

SEQ ID NO: 8969 - DNA, 80 bp, synthetic construct
  misc_feature 1..80: note = Synthetic: >EVB81-cand-5200-5279
  source 1..80: mol_type = other DNA
agattgaaaagcacgtgagcagggcattcatttgtctacaagcactcactacttttgtctccgtggcgggtgtcatatac

SEQ ID NO: 8970 - DNA, 80 bp, synthetic construct
  misc_feature 1..80: note = Synthetic: >EVB81-cand-5280-5359
  source 1..80: mol_type = other DNA
atcatttacaaactttttgcaggcttccagggagcttacactggcatgcccaaccagaaacctaaagtgccaaccttgag

SEQ ID NO: 8971 - DNA, 80 bp, synthetic construct
  misc_feature 1..80: note = Synthetic: >EVB81-cand-5360-5439
  source 1..80: mol_type = other DNA
acaggccaaggtacaagggccagcttttgaatttgcggtagccatgatgaaaaggaatgccagcactgtaaagactgagt

SEQ ID NO: 8972 - DNA, 80 bp, synthetic construct
  misc_feature 1..80: note = Synthetic: >EVB81-cand-5450-5529
  source 1..80: mol_type = other DNA
cacaatgcttggcatttatgatagatgggcagtgctaccccgacatgccaaacctggacccaccattctaatgaatgacc

SEQ ID NO: 8973 - DNA, 80 bp, synthetic construct
  misc_feature 1..80: note = Synthetic: >EVB81-cand-5520-5599
  source 1..80: mol_type = other DNA
atgaatgaccaggaagtgggcgtagtggatgctaaggagttagtggacaaagatggcaccaacctagaattaacactctt

SEQ ID NO: 8974 - DNA, 80 bp, synthetic construct
  misc_feature 1..80: note = Synthetic: >EVB81-cand-5600-5679
  source 1..80: mol_type = other DNA
gaaactcagtagaaacgagaaattcagagatatccgaggcttcttaacacgtgaagaggctgaagtcaatgaagctgtgc

SEQ ID NO: 8975 - DNA, 80 bp, synthetic construct
  misc_feature 1..80: note = Synthetic: >EVB81-cand-5680-5759
  source 1..80: mol_type = other DNA
ttgctattaacaccagcaagtttccaaatatgtatatcccagttggacaggtaacagactatggattcctcaatctgggt

SEQ ID NO: 8976 - DNA, 80 bp, synthetic construct
  misc_feature 1..80: note = Synthetic: >EVB81-cand-5760-5839
  source 1..80: mol_type = other DNA
ggcacccccactaagcgcatgctaatgtataacttcccaacacgcgcgggccaatgtggaggtgtcctaatgtcgacagg

SEQ ID NO: 8977 - DNA, 80 bp, synthetic construct
  misc_feature 1..80: note = Synthetic: >EVB81-cand-5840-5919
  source 1..80: mol_type = other DNA
caaagtacttggtattcacgttggtggtaatggacaccaaggattctcagcagccctattgcgccactattttaatgatg

SEQ ID NO: 8978 - DNA, 80 bp, synthetic construct
  misc_feature 1..80: note = Synthetic: >EVB81-cand-5910-5989
  source 1..80: mol_type = other DNA
tttaatgatgagcagggtgaaattgagttcattgagagctctaaggaggctggcttcccggtcattaacacccccagtaa

SEQ ID NO: 8979 - DNA, 80 bp, synthetic construct
  misc_feature 1..80: note = Synthetic: >EVB81-cand-5980-6059
  source 1..80: mol_type = other DNA
cccccagtaaaacaaagcttgagcccagcgtctttcatcatgtatttaagggaaacaaggagccggcagtactgaggaat

SEQ ID NO: 8980 - DNA, 80 bp, synthetic construct
  misc_feature 1..80: note = Synthetic: >EVB81-cand-6070-6149
  source 1..80: mol_type = other DNA
ggttgagagccaactttgaggaagccatcttctctaagtacattggaaatgtgaacacgcacgtggacgagtatatggtg

SEQ ID NO: 8981 - DNA, 80 bp, synthetic construct
  misc_feature 1..80: note = Synthetic: >EVB81-cand-6140-6219
  source 1..80: mol_type = other DNA
gtatatggtggaagctgtcgaccattatgctggacagcttgcaaccttggacatcagtacagaacctatgaagcttgagg

SEQ ID NO: 8982 - DNA, 80 bp, synthetic construct
  misc_feature 1..80: note = Synthetic: >EVB81-cand-6190-6269
  source 1..80: mol_type = other DNA
acatcagtacagaacctatgaagcttgaggatgccgtctatggcaccgaaggtctggaagcactggatctaagcactagc

SEQ ID NO: 8983 - DNA, 80 bp, synthetic construct
  misc_feature 1..80: note = Synthetic: >EVB81-cand-6380-6459
  source 1..80: mol_type = other DNA
ccctatggtcacctatgtgaaagatgagttgagatcagcggagaaagtggccaaaggaaaatccagactgattgaagcat

SEQ ID NO: 8984 - DNA, 80 bp, synthetic construct
  misc_feature 1..80: note = Synthetic: >HCV.A1-cand-730-809
  source 1..80: mol_type = other DNA
aaaatccgggtcacacgagaatcagaatgtggctgccggtggttctaccatcaattacaccaccataaactattataaag

SEQ ID NO: 8985 - DNA, 80 bp, synthetic construct
  misc_feature 1..80: note = Synthetic: >HCV.A1-cand-810-889
  source 1..80: mol_type = other DNA
atagtgctagcaactcagcatcaaaacaagatttctcccaagatccatctaagtttacagagccagttaaggatatcatg

SEQ ID NO: 8986 - DNA, 80 bp, synthetic construct
  misc_feature 1..80: note = Synthetic: >HCV.A1-cand-890-969
  source 1..80: mol_type = other DNA
atcaaaacagccccggccttaaactcacccaacattgaagcttgtggatatagtgatagagttcttcaattaacattagg

SEQ ID NO: 8987 - DNA, 80 bp, synthetic construct
  misc_feature 1..80: note = Synthetic: >HCV.A1-cand-970-1049
  source 1..80: mol_type = other DNA
aaactctactattaccactcaggaggctgctaattcagttattgcatatggtgagtggccctctttcttaagtgacaagg

SEQ ID NO: 8988 - DNA, 80 bp, synthetic construct
  misc_feature 1..80: note = Synthetic: >HCV.A1-cand-1050-1129
  source 1..80: mol_type = other DNA
aagctaacccagtggatgcccctacggaacccgatgcatctagcaatagattctacactctagatagcaaaccatgggca

SEQ ID NO: 8989 - DNA, 80 bp, synthetic construct
  misc_feature 1..80: note = Synthetic: >HCV.A1-cand-1130-1209
  source 1..80: mol_type = other DNA
gcagattctagaggatggtggtggaagttaccagacgccctaaaggacatgggcatgtttggacaaaatatgttttacca

SEQ ID NO: 8990 - DNA, 80 bp, synthetic construct
  misc_feature 1..80: note = Synthetic: >HCV.A1-cand-1210-1289
  source 1..80: mol_type = other DNA
ctacctaggtagagctggatataccgtgcacgtacagtgtaatgcttccaagttccaccaaggaacacttcttgttgctg

SEQ ID NO: 8991 - DNA, 80 bp, synthetic construct
  misc_feature 1..80: note = Synthetic: >HCV.A1-cand-1230-1309
  source 1..80: mol_type = other DNA
ataccgtgcacgtacagtgtaatgcttccaagttccaccaaggaacacttcttgttgctgctattccagagtttatgatg

SEQ ID NO: 8992 - DNA, 80 bp, synthetic construct
  misc_feature 1..80: note = Synthetic: >HCV.A1-cand-1380-1459
  source 1..80: mol_type = other DNA
ccttccagaagactgccaccttgactaccggggatggtaaaaactctttttgcccactcgactgggtgttgggttgtggg

SEQ ID NO: 8993 - DNA, 80 bp, synthetic construct
  misc_feature 1..80: note = Synthetic: >HCV.A1-cand-1460-1539
  source 1..80: mol_type = other DNA
gtgatggctggaaatgctacagtgttcccgcaccagtttataaacctaagaactaacaattcagccactctggtcttacc

SEQ ID NO: 8994 - DNA, 80 bp, synthetic construct
  misc_feature 1..80: note = Synthetic: >HCV.A1-cand-1510-1589
  source 1..80: mol_type = other DNA
aactaacaattcagccactctggtcttaccttatgttaactcaattgccacagattgcatggcgaagcataataattggg

SEQ ID NO: 8995 - DNA, 80 bp, synthetic construct
  misc_feature 1..80: note = Synthetic: >HCV.A1-cand-1620-1699
  source 1..80: mol_type = other DNA
agtatagcaatggtgcatcaacccttgtgcccattactatcacaatagcacctatgtgttgtgaatttaatggattgagg

SEQ ID NO: 8996 - DNA, 80 bp, synthetic construct
  misc_feature 1..80: note = Synthetic: >HCV.A1-cand-1700-1779
  source 1..80: mol_type = other DNA
tcacttacgacaccatacactcagggtttaccagtaatgaacactcctggatccaatcagttcttgaccacagacaactt

SEQ ID NO: 8997 - DNA, 80 bp, synthetic construct
  misc_feature 1..80: note = Synthetic: >HCV.A1-cand-1750-1829
  source 1..80: mol_type = other DNA
atccaatcagttcttgaccacagacaactttcagtcaccctgtgccctaccagattttgatgtgactccagaaatacaca

SEQ ID NO: 8998 - DNA, 80 bp, synthetic construct
  misc_feature 1..80: note = Synthetic: >HCV.A1-cand-1870-1949
  source 1..80: mol_type = other DNA
tgattcactagtcccaatgaatgcagtagcaggtaaggtcaactcaatggaagcttaccagataccaatacaagcaaacc

SEQ ID NO: 8999 - DNA, 80 bp, synthetic construct
  misc_feature 1..80: note = Synthetic: >HCV.A1-cand-1950-2029
  source 1..80: mol_type = other DNA
agcaagataacaacaagtcaatctttgctatcagtctcagccctgctgctaatcccagattgtcatataccatgctcggt

SEQ ID NO: 9000 - DNA, 80 bp, synthetic construct
  misc_feature 1..80: note = Synthetic: >HCV.A1-cand-3320-3399
  source 1..80: mol_type = other DNA
atcaggacgtatgggtttggacaccaaaacaaggcagtatatacagcgggctacaagatctgcaattatcacctggccac

SEQ ID NO: 9001 - DNA, 80 bp, synthetic construct
  misc_feature 1..80: note = Synthetic: >HCV.A1-cand-3400-3479
  source 1..80: mol_type = other DNA
tccagaagatatggaaaaagcagttaacattatgtgggatagagaccttctagtttgtgaaagtggtgcacagggcaccg

SEQ ID NO: 9002 - DNA, 80 bp, synthetic construct
  misc_feature 1..80: note = Synthetic: >HCV.A1-cand-3480-3559
  source 1..80: mol_type = other DNA
acgccattgctaggtgctcatgcaaaacaggaatttactactgtgagtctaaaagaaagtattaccctgtctcagtctgt

SEQ ID NO: 9003 - DNA, 80 bp, synthetic construct
  misc_feature 1..80: note = Synthetic: >HCV.A1-cand-3560-3639
  source 1..80: mol_type = other DNA
ggaccaacattccaatacatggaggccaatgatttttacccagctagataccagtcccatatgctaatcggttgtggttt

SEQ ID NO: 9004 - DNA, 80 bp, synthetic construct
  misc_feature 1..80: note = Synthetic: >HCV.A1-cand-3600-3679
  source 1..80: mol_type = other DNA
cagctagataccagtcccatatgctaatcggttgtggttttgccaaccctggtgactgcggtgggattctcagatgccaa

SEQ ID NO: 9005 - DNA, 80 bp, synthetic construct
  misc_feature 1..80: note = Synthetic: >HCV.A1-cand-3720-3799
  source 1..80: mol_type = other DNA
ttgtggcatttgcagacatcagagacttgtatatgtatgaagatgaggccatggaacagggtgtcacagattatgtcaat

SEQ ID NO: 9006 - DNA, 80 bp, synthetic construct
  misc_feature 1..80: note = Synthetic: >HCV.A1-cand-3800-3879
  source 1..80: mol_type = other DNA
agactaggaatggcatttggtgctggtttcagtgctgaagtggcaaataaaatttcagagatacaaaatacagtccaaag

SEQ ID NO: 9007 - DNA, 80 bp, synthetic construct
  misc_feature 1..80: note = Synthetic: >HCV.A1-cand-3870-3949
  source 1..80: mol_type = other DNA
cagtccaaagtgttctcacagaaaagctcctcaaaaatctcataaaaattgtctcagctcttgttatagttgctagaaat

SEQ ID NO: 9008 - DNA, 80 bp, synthetic construct
  misc_feature 1..80: note = Synthetic: >HCV.A1-cand-3950-4029
  source 1..80: mol_type = other DNA
tatgaagattcaatcacagttttggctacactctctctccttgggtgtgatgcttccccatggcagtggctcaaagaaaa

SEQ ID NO: 9009 - DNA, 80 bp, synthetic construct
  misc_feature 1..80: note = Synthetic: >HCV.A1-cand-4030-4109
  source 1..80: mol_type = other DNA
gctttgtaatatgattggtgttccctatgtcatgaaacaaggagactcttggttaaagaagtttacagaagcttgtaatg

SEQ ID NO: 9010 - DNA, 80 bp, synthetic construct
  misc_feature 1..80: note = Synthetic: >HCV.A1-cand-4100-4179
  source 1..80: mol_type = other DNA
gcttgtaatgctgccaaagggctagagtggattgcaaacaaaattagcaagttcattgactggattaaagaaaaagtgct

SEQ ID NO: 9011 - DNA, 80 bp, synthetic construct
  misc_feature 1..80: note = Synthetic: >HCV.A1-cand-4180-4259
  source 1..80: mol_type = other DNA
cccagaggcaaaagataaactagagtacctttccaagctaaaacagcttgagatgatagagaatcaaatggctacactac

SEQ ID NO: 9012 - DNA, 80 bp, synthetic construct
  misc_feature 1..80: note = Synthetic: >HCV.A1-cand-4260-4339
  source 1..80: mol_type = other DNA
accaatcatgtcccagccaagaagaacaggaagtccttttcaataatatcagatggctggcaataaaggcaagaaagttt

SEQ ID NO: 9013 - DNA, 80 bp, synthetic construct
  misc_feature 1..80: note = Synthetic: >HCV.A1-cand-4340-4419
  source 1..80: mol_type = other DNA
gcacccctgtatgcagctgaagctcgcagaatatttaagttggaaacatctatcaataattatgtacaattcaagaccaa

SEQ ID NO: 9014 - DNA, 80 bp, synthetic construct
  misc_feature 1..80: note = Synthetic: >HCV.A1-cand-4420-4499
  source 1..80: mol_type = other DNA
acaccgcattgaaccagtatgtttattgattcatggaacaccaggcacaggcaaatcagttgccacaggtcttattggga

SEQ ID NO: 9015 - DNA, 80 bp, synthetic construct
  misc_feature 1..80: note = Synthetic: >HCV.A1-cand-4500-4579
  source 1..80: mol_type = other DNA
gagcaatagcaaaacaggcaaatactagtacatattctctaccaccagatccctcacatttcgacggctacaagcagcaa

SEQ ID NO: 9016 - DNA, 80 bp, synthetic construct
  misc_feature 1..80: note = Synthetic: >HCV.A1-cand-5940-6019
  source 1..80: mol_type = other DNA
aaattcaatggatgagaccaagtaaagatgcaggttaccccatgatcaacgcgccatcaaagacgaaattagagccaagt

SEQ ID NO: 9017 - DNA, 80 bp, synthetic construct
  misc_feature 1..80: note = Synthetic: >HCV.A1-cand-6020-6099
  source 1..80: mol_type = other DNA
gtcttttttgatgttttcccaggcgagaaagaaccagctgcgttaactaaaaatgatcccagattaaaagttgattttga

SEQ ID NO: 9018 - DNA, 80 bp, synthetic construct
  misc_feature 1..80: note = Synthetic: >HCV.A1-cand-6100-6179
  source 1..80: mol_type = other DNA
agaggctgtgttctctaagtacattgggaataaaatcacagaagttgacgaatacatgagagaggctgttgaccattacg

SEQ ID NO: 9019 - DNA, 80 bp, synthetic construct
  misc_feature 1..80: note = Synthetic: >HCV.A1-cand-6180-6259
  source 1..80: mol_type = other DNA
ctggtcaattgatgtcccttgacatacccacagaacaaatgtgcttggaagatgccatgtatggcacagatggtcttgag

SEQ ID NO: 9020 - DNA, 80 bp, synthetic construct
  misc_feature 1..80: note = Synthetic: >HCV.A1-cand-6260-6339
  source 1..80: mol_type = other DNA
gccctggatttaacaactagtgctggatatccttacgtggctattgggaaaaagaaaagagatattcttaacaagcaaac

SEQ ID NO: 9021 - DNA, 80 bp, synthetic construct
  misc_feature 1..80: note = Synthetic: >HCV.A1-cand-6340-6419
  source 1..80: mol_type = other DNA
aagagacaccaaggaaatgcaaaaaatgttagataaatatgggataaatctacctttagtgacttatgttaaagatgagc

SEQ ID NO: 9022 - DNA, 80 bp, synthetic construct
  misc_feature 1..80: note = Synthetic: >HCV.A1-cand-6420-6499
  source 1..80: mol_type = other DNA
ttagatccaaatcaaaagtagaacagggcaaatccagattgattgaagcgagctctttgaatgactcagttgccatgaga

SEQ ID NO: 9023 - DNA, 80 bp, synthetic construct
  misc_feature 1..80: note = Synthetic: >HCV.A1-cand-6500-6579
  source 1..80: mol_type = other DNA
caggcttttggccacctgtatgccaaattccaccagaacccaggaataataacaggttcagcagttgggtgtgatccaga

SEQ ID NO: 9024 - DNA, 80 bp, synthetic construct
  misc_feature 1..80: note = Synthetic: >HCV.A1-cand-6660-6739
  source 1..80: mol_type = other DNA
ccccagcttggttcgaagctctgaaaatggtgttggaaaagattggatttggtgatcgagttgattttatagattattta

SEQ ID NO: 9025 - DNA, 80 bp, synthetic construct
  misc_feature 1..80: note = Synthetic: >HCV.A1-cand-6740-6819
  source 1..80: mol_type = other DNA
aatcattcacaccatttatacagaaacaaattatactgtgtcaagggtggaatgccctcagggtgttctggtacttcaat

SEQ ID NO: 9026 - DNA, 80 bp, synthetic construct
  misc_feature 1..80: note = Synthetic: >HCV.A1-cand-6800-6879
  source 1..80: mol_type = other DNA
gggtgttctggtacttcaatctttaattctatgattaacaatttaataattaggacattaatgctaaaaacttataaagg

SEQ ID NO: 9027 - DNA, 80 bp, synthetic construct
  misc_feature 1..80: note = Synthetic: >HCV.A1-cand-6990-7069
  source 1..80: mol_type = other DNA
tagtcatgacaccagcagacaagggtgctactttcacagatgtagattggagtaatgtaacatttctcaaaagattcttc

SEQ ID NO: 9028 - DNA, 80 bp, synthetic construct
  misc_feature 1..80: note = Synthetic: >HCV.A1-cand-7070-7149
  source 1..80: mol_type = other DNA
agagcagatgagcagtatcctttccttgttcacccagtgatgcccatgaaagatatttatgaatctattaggtggaccaa

SEQ ID NO: 9029 - DNA, 80 bp, synthetic construct
  misc_feature 1..80: note = Synthetic: >HCV.A1-cand-7280-7359
  source 1..80: mol_type = other DNA
gagtattctactcttcgcaggcgctggctcgattctttttagagtaaccctacctcacccgaattggcttgggttgtggt

SEQ ID NO: 9030 - DNA, 80 bp, synthetic construct
  misc_feature 1..80: note = Synthetic: >HCV.A10-cand-80-159
  source 1..80: mol_type = other DNA
gttttataacccttcccccgaaacttgcaacttagaagttatgtacattactgatcaatagcaggcgtggcacaccagcc

SEQ ID NO: 9031 - DNA, 80 bp, synthetic construct
  misc_feature 1..80: note = Synthetic: >HCV.A10-cand-160-239
  source 1..80: mol_type = other DNA
atgtcttgatcaagcacttctgtacccccggactgagtatcaatagactgctcacgtggtcgaaggagaaaacgttcgtt

SEQ ID NO: 9032 - DNA, 80 bp, synthetic construct
  misc_feature 1..80: note = Synthetic: >HCV.A10-cand-1840-1919
  source 1..80: mol_type = other DNA
actctttgctggagttgtgtagggtggagactattttggaagtgaacaacaccacagaagcaacaggattaacaaggctc

SEQ ID NO: 9033 - DNA, 80 bp, synthetic construct
  misc_feature 1..80: note = Synthetic: >HCV.A10-cand-1880-1959
  source 1..80: mol_type = other DNA
agtgaacaacaccacagaagcaacaggattaacaaggctcttaataccagtgtcctcgcagaacaaagctgatgagttgt

SEQ ID NO: 9034 - DNA, 80 bp, synthetic construct
  misc_feature 1..80: note = Synthetic: >HCV.A10-cand-1960-2039
  source 1..80: mol_type = other DNA
gtgctgcgtttatggttgatccaggccgaattggaccttggcaatctactttagttggacagatttgccggtattacaca

SEQ ID NO: 9035 - DNA, 80 bp, synthetic construct
  misc_feature 1..80: note = Synthetic: >HCV.A10-cand-2040-2119
  source 1..80: mol_type = other DNA
caatggtccgggtctttgaaggtgaccttcatgttcacaggatcctttatggcaacaggcaagatgctggtggcctactc

SEQ ID NO: 9036 - DNA, 80 bp, synthetic construct
  misc_feature 1..80: note = Synthetic: >HCV.A10-cand-2120-2199
  source 1..80: mol_type = other DNA
cccgcccggaagcgctcaaccagccaacagagaaaccgccatgctgggcacgcacgtcatctgggactttggactacaat

SEQ ID NO: 9037 - DNA, 80 bp, synthetic construct
  misc_feature 1..80: note = Synthetic: >HCV.A10-cand-2200-2279
  source 1..80: mol_type = other DNA
cgtcagtctctttggtgataccgtggatcagtaacactcacttccgcactgccaagacaggtgggaattacgattactac

SEQ ID NO: 9038 - DNA, 80 bp, synthetic construct
  misc_feature 1..80: note = Synthetic: >HCV.A10-cand-2280-2359
  source 1..80: mol_type = other DNA
acggcaggtgtagtgaccttatggtatcaaaccaattacgtggtcccaccagaaacacctggagaggcatatattattgc

SEQ ID NO: 9039 - DNA, 80 bp, synthetic construct
  misc_feature 1..80: note = Synthetic: >HCV.A10-cand-2370-2449
  source 1..80: mol_type = other DNA
gcacaagacaacttcactttgaagatatgcaaggatactgatgaagtgacacaacaagctgtgttgcaaggtgaccctgt

SEQ ID NO: 9040 - DNA, 80 bp, synthetic construct
  misc_feature 1..80: note = Synthetic: >HCV.A10-cand-2480-2559
  source 1..80: mol_type = other DNA
cacagcgcgcagagctattagcagtgctacaaatgttgaatccgcagccaacaccactcccagttcacaccgattagaga

SEQ ID NO: 9041 - DNA, 80 bp, synthetic construct
  misc_feature 1..80: note = Synthetic: >HCV.A10-cand-2520-2599
  source 1..80: mol_type = other DNA
tccgcagccaacaccactcccagttcacaccgattagagactggacgcgtaccagcactacaggctgcagagacgggtgc

SEQ ID NO: 9042 - DNA, 80 bp, synthetic construct
  misc_feature 1..80: note = Synthetic: >HCV.A10-cand-2580-2659
  source 1..80: mol_type = other DNA
caggctgcagagacgggtgccacttctaatgccacagatgagaacatgattgagacccgttgtgtggttaacagaaatgg

SEQ ID NO: 9043 - DNA, 80 bp, synthetic construct
  misc_feature 1..80: note = Synthetic: >HCV.A10-cand-2740-2819
  source 1..80: mol_type = other DNA
acaccactgggtatgctacatgggacatagacatcatgggctttgtccaactccgcagaaaatgcgagatgttcacatac

SEQ ID NO: 9044 - DNA, 80 bp, synthetic construct
  misc_feature 1..80: note = Synthetic: >HCV.A10-cand-2760-2839
  source 1..80: mol_type = other DNA
tgggacatagacatcatgggctttgtccaactccgcagaaaatgcgagatgttcacatacatgaggttcaacgcagaatt

SEQ ID NO: 9045 - DNA, 80 bp, synthetic construct
  misc_feature 1..80: note = Synthetic: >HCV.A10-cand-2840-2919
  source 1..80: mol_type = other DNA
cacatttgtcacaacgactgagaatggagaggctcgtccgtacatgctgcaatatatgtatgtgccccctggcgccccca

SEQ ID NO: 9046 - DNA, 80 bp, synthetic construct
  misc_feature 1..80: note = Synthetic: >HCV.A10-cand-2920-2999
  source 1..80: mol_type = other DNA
aaccgacgggaagggatgcctttcaatggcaaacagcaactaacccatcagtctttgtcaaactcactgaccctcctgca

SEQ ID NO: 9047 - DNA, 80 bp, synthetic construct
  misc_feature 1..80: note = Synthetic: >HCV.A10-cand-3000-3079
  source 1..80: mol_type = other DNA
caagtctcagttcctttcatgtcaccagctagtgcatatcagtggttctatgatggttaccccactttcggccagcaccc

SEQ ID NO: 9048 - DNA, 80 bp, synthetic construct
  misc_feature 1..80: note = Synthetic: >HCV.A11-cand-1120-1199
  source 1..80: mol_type = other DNA
cgaagtgtctgcatgcagattctacacgttagatacagtcacgtggagtaagagttcaaaaggatggtggtggaaactac

SEQ ID NO: 9049 - DNA, 80 bp, synthetic construct
  misc_feature 1..80: note = Synthetic: >HCV.A11-cand-1220-1299
  source 1..80: mol_type = other DNA
gggctgttcgggcaaaacatgtactaccactacctgggccgttcgggctacactgtgcatgtgcaatgtaatgcatccaa

SEQ ID NO: 9050 - DNA, 80 bp, synthetic construct
  misc_feature 1..80: note = Synthetic: >HCV.A11-cand-1280-1359
  source 1..80: mol_type = other DNA
gtgcaatgtaatgcatccaaattccaccagggcgctctgggcgttttcgccattccagagtactgtatggcctgcaacac

SEQ ID NO: 9051 - DNA, 80 bp, synthetic construct
  misc_feature 1..80: note = Synthetic: >HCV.A11-cand-1360-1439
  source 1..80: mol_type = other DNA
tgatgctaagaccaactatgttagctatgtacaagcaaacccaggtgaggctggtggagtctttaccgacacgtacaatc

SEQ ID NO: 9052 - DNA, 80 bp, synthetic construct
  misc_feature 1..80: note = Synthetic: >HCV.A11-cand-1460-1539
  source 1..80: mol_type = other DNA
gcacgaaagtttgcagcggtggattacctgcttggttgtggagtgttggctggtaacgctttcgtcttcccccaccaaat

SEQ ID NO: 9053 - DNA, 80 bp, synthetic construct
  misc_feature 1..80: note = Synthetic: >HCV.A11-cand-1520-1599
  source 1..80: mol_type = other DNA
ttcgtcttcccccaccaaatcatcaatctccgcaccaacaactgtgccacactagttttaccttacgtgaactcaatggc

SEQ ID NO: 9054 - DNA, 80 bp, synthetic construct
  misc_feature 1..80: note = Synthetic: >HCV.A11-cand-1630-1709
  source 1..80: mol_type = other DNA
gggaatagcaatactacctcttgctgagctggactttgctgaggcgtcatctactgaaatccccataaccatcacaatcg

SEQ ID NO: 9055 - DNA, 80 bp, synthetic construct
  misc_feature 1..80: note = Synthetic: >HCV.A11-cand-1680-1759
  source 1..80: mol_type = other DNA
ctactgaaatccccataaccatcacaatcgcaccaatgtgttgtgagttcaatggactgaggaatttgactagtccagct

SEQ ID NO: 9056 - DNA, 80 bp, synthetic construct
  misc_feature 1..80: note = Synthetic: >HCV.A11-cand-1760-1839
  source 1..80: mol_type = other DNA
aaacagggcctaccagtaatgaatgtacctggcagtaatcagttcttatcatctgacaatttccaatcaccgtgtgcctt

SEQ ID NO: 9057 - DNA, 80 bp, synthetic construct
  misc_feature 1..80: note = Synthetic: >HCV.A11-cand-1840-1919
  source 1..80: mol_type = other DNA
acctgaatttgacgtaacaccaccgatacacattccaggtgaagttaggaacatgatggagcttgccgaaatagatacct

SEQ ID NO: 9058 - DNA, 80 bp, synthetic construct
  misc_feature 1..80: note = Synthetic: >HCV.A11-cand-1920-1999
  source 1..80: mol_type = other DNA
taattccaatggatctcagcgaaaccaagaaaaacacaatgggaatgtacagagttgagttagggtctggcaagtcacta

SEQ ID NO: 9059 - DNA, 80 bp, synthetic construct
  misc_feature 1..80: note = Synthetic: >HCV.A11-cand-2000-2079
  source 1..80: mol_type = other DNA
actaaacccatactgtgtcttagcttgagtccagctagtgaacaacgtttagggtacaccatgttgggagagattctgaa

SEQ ID NO: 9060 - DNA, 80 bp, synthetic construct
  misc_feature 1..80: note = Synthetic: >HCV.A11-cand-2080-2159
  source 1..80: mol_type = other DNA
ttactacacacactggagtgggtctctgaaattcacctttctgttctgtgggagcatgatggcaacaggcaaaattttaa

SEQ ID NO: 9061 - DNA, 80 bp, synthetic construct
  misc_feature 1..80: note = Synthetic: >HCV.A11-cand-2160-2239
  source 1..80: mol_type = other DNA
tatcgtatgcaccaccaggtgcgaaaccacctaaaaccagaaaggaggccatgcttggcacacacatgatttgggacatt

SEQ ID NO: 9062 - DNA, 80 bp, synthetic construct
  misc_feature 1..80: note = Synthetic: >HCV.A11-cand-2240-2319
  source 1..80: mol_type = other DNA
ggacttcaatcatccgcgaccatggtcgtgccttggatcagtaacgttatgtaccggaggtgtgtgaaggatgactttac

SEQ ID NO: 9063 - DNA, 80 bp, synthetic construct
  misc_feature 1..80: note = Synthetic: >HCV.A11-cand-2320-2399
  source 1..80: mol_type = other DNA
tgaaggtggatatatatcaatgttctaccagactaaaatcgtggtgcctctatcaacacccaccacaatgacactactca

SEQ ID NO: 9064 - DNA, 80 bp, synthetic construct
  misc_feature 1..80: note = Synthetic: >HCV.A11-cand-3690-3769
  source 1..80: mol_type = other DNA
taatagggcacggttttgcatcaccaggcgattgtggtggcattctcagatgtcaacatggagtcataggaataataact

SEQ ID NO: 9065 - DNA, 80 bp, synthetic construct
  misc_feature 1..80: note = Synthetic: >HCV.A11-cand-3780-3859
  source 1..80: mol_type = other DNA
agggcctagttgcattctcggacatcagagatttatatgcatatgaagaggaagccatggagcaaggaatctcgaactac

SEQ ID NO: 9066 - DNA, 80 bp, synthetic construct
  misc_feature 1..80: note = Synthetic: >HCV.A11-cand-3880-3959
  source 1..80: mol_type = other DNA
atttggcagcgggtttactcaacaaattggagataaaatatcagagcttaccagtatggtcaccagcacgatcactgaaa

SEQ ID NO: 9067 - DNA, 80 bp, synthetic construct
  misc_feature 1..80: note = Synthetic: >HCV.A11-cand-3930-4009
  source 1..80: mol_type = other DNA
ccagtatggtcaccagcacgatcactgaaaaattacttaaaaacttgatcaaaattatctcgtctcttgtcatcatcacc

SEQ ID NO: 9068 - DNA, 80 bp, synthetic construct
  misc_feature 1..80: note = Synthetic: >HCV.A11-cand-4010-4089
  source 1..80: mol_type = other DNA
agaaattatgaggacaccaccacggtgctcgccaccttggcactcctcggctgtgacgtttctccatggcaatggctgaa

SEQ ID NO: 9069 - DNA, 80 bp, synthetic construct
  misc_feature 1..80: note = Synthetic: >HCV.A11-cand-4090-4169
  source 1..80: mol_type = other DNA
gaagaaagcatgtgacatcttagaaatcccctatgttgtaagccaaggtgatagttggctgaagaaattcaccgaggcgt

SEQ ID NO: 9070 - DNA, 80 bp, synthetic construct
  misc_feature 1..80: note = Synthetic: >HCV.A11-cand-4170-4249
  source 1..80: mol_type = other DNA
gcaacgcagcaaaaggcctggagtgggtgtcaaacaagatttctaaatttatagactggctcaaagaaaggatcattcca

SEQ ID NO: 9071 - DNA, 80 bp, synthetic construct
  misc_feature 1..80: note = Synthetic: >HCV.A11-cand-4250-4329
  source 1..80: mol_type = other DNA
caagctagagataaacttgagttcgtcactaagcttaagcagctggagatgctagagaatcagattgctaccatacacca

SEQ ID NO: 9072 - DNA, 80 bp, synthetic construct
  misc_feature 1..80: note = Synthetic: >HCV.A11-cand-4330-4409
  source 1..80: mol_type = other DNA
atcttgtcccagccaagagcatcaggagattctgttcaataatgtaagttggttgtcgatccaatccaaaagatttgcac

SEQ ID NO: 9073 - DNA, 80 bp, synthetic construct
  misc_feature 1..80: note = Synthetic: >HCV.A11-cand-4410-4489
  source 1..80: mol_type = other DNA
ctttgtatgcacttgaggcaaaaagaatccaaaagttggaacacaccattaacaactacatacagttcaagagcaaacac

SEQ ID NO: 9074 - DNA, 80 bp, synthetic construct
  misc_feature 1..80: note = Synthetic: >HCV.A11-cand-4490-4569
  source 1..80: mol_type = other DNA
cgtattgaaccagtatgtttactagtgcatggtagtccaggaacaggcaaatcagttgcaacaaatttaatagctagagc

SEQ ID NO: 9075 - DNA, 80 bp, synthetic construct
  misc_feature 1..80: note = Synthetic: >HCV.A11-cand-4570-4649
  source 1..80: mol_type = other DNA
aattgctgagaaagagaacacttcaacatactcgctaccacccgacccttcacactttgatggwtacaaacagcagggag

SEQ ID NO: 9076 - DNA, 80 bp, synthetic construct
  misc_feature 1..80: note = Synthetic: >HCV.A11-cand-4690-4769
  source 1..80: mol_type = other DNA
tgacatgaaactattctgtcagatggtgtccacagttgaatttatcccaccaatggcatcattagaagagaaaggcattc

SEQ ID NO: 9077 - DNA, 80 bp, synthetic construct
  misc_feature 1..80: note = Synthetic: >HCV.A11-cand-4730-4809
  source 1..80: mol_type = other DNA
tttatcccaccaatggcatcattagaagagaaaggcattctgtttacgtccaactatgtgctagcttccaccaactccag

SEQ ID NO: 9078 - DNA, 80 bp, synthetic construct
  misc_feature 1..80: note = Synthetic: >HCV.A11-cand-4810-4889
  source 1..80: mol_type = other DNA
taggattgcaccacctactgtagcccatagtgatgcactagccaggaggtttgcctttgacatagatattcaggtcatga

SEQ ID NO: 9079 - DNA, 80 bp, synthetic construct
  misc_feature 1..80: note = Synthetic: >HCV.A11-cand-4890-4969
  source 1..80: mol_type = other DNA
atgagtactccagagatggaaagctgaatatggcaatggctacggagatgtgcaagaactgccaccaaccagcaaacttc

SEQ ID NO: 9080 - DNA, 80 bp, synthetic construct
  misc_feature 1..80: note = Synthetic: >HCV.A4-cand-1960-2039
  source 1..80: mol_type = other DNA
cagtggatacactctgtgcatcattccaggtcgaccctggacgcgacgggccttggcaatcaactttgattgggcaatta

SEQ ID NO: 9081 - DNA, 80 bp, synthetic construct
  misc_feature 1..80: note = Synthetic: >HCV.A4-cand-2040-2119
  source 1..80: mol_type = other DNA
tgtagatactacactcagtggtcaggttccttagagatcacttttatgtttacgggctcattcatggcaacaggtaagat

SEQ ID NO: 9082 - DNA, 80 bp, synthetic construct
  misc_feature 1..80: note = Synthetic: >HCV.A4-cand-2120-2199
  source 1..80: mol_type = other DNA
gcttatagcatacacccctccaggcagtgcacaacccacaacacgtgaattggcaatgctcggcacacacataatctggg

SEQ ID NO: 9083 - DNA, 80 bp, synthetic construct
  misc_feature 1..80: note = Synthetic: >HCV.A4-cand-2190-2269
  source 1..80: mol_type = other DNA
ataatctgggattttggattgcagtcttcagtcactcttgtggtgccctggataagtaacacacacttcagaactgtgaa

SEQ ID NO: 9084 - DNA, 80 bp, synthetic construct
  misc_feature 1..80: note = Synthetic: >HCV.A4-cand-2280-2359
  source 1..80: mol_type = other DNA
tacttagattattatgctacaggtgtggttaccatatggtaccagacaaacttcgtagtgccaccagacacgccgaacga

SEQ ID NO: 9085 - DNA, 80 bp, synthetic construct
  misc_feature 1..80: note = Synthetic: >HCV.A4-cand-2360-2439
  source 1..80: mol_type = other DNA
agctaatatcatagcaatgggagcagggcaaaagaatttcacgttaaagttgtgcaaagatacacctgagataacccagc

SEQ ID NO: 9086 - DNA, 80 bp, synthetic construct
  misc_feature 1..80: note = Synthetic: >HCV.A4-cand-2440-2519
  source 1..80: mol_type = other DNA
aggccgtgttgcagggtgatgcaatagctgatgctatacaaaacacggtcacatccaccatacagagggtcaccactaat

SEQ ID NO: 9087 - DNA, 80 bp, synthetic construct
  misc_feature 1..80: note = Synthetic: >HCV.A4-cand-2520-2599
  source 1..80: mol_type = other DNA
gttgtcgggcaagatgcaacagccgccaacaccacacctagttcccatagtttgaacactggcctagttcctgccctcca

SEQ ID NO: 9088 - DNA, 80 bp, synthetic construct
  misc_feature 1..80: note = Synthetic: >HCV.A4-cand-2610-2689
  source 1..80: mol_type = other DNA
acaggagcttcatctacagctacagatggcaacttgatagagacaagatgtgttgtaaactccaatggcactcgtgaaac

SEQ ID NO: 9089 - DNA, 80 bp, synthetic construct
  misc_feature 1..80: note = Synthetic: >HCV.A4-cand-2680-2759
  source 1..80: mol_type = other DNA
ctcgtgaaactcatattgaacatttcttctctaggtcaggactagtgggtgttatggaggtggatgatacaggcactgct

SEQ ID NO: 9090 - DNA, 80 bp, synthetic construct
  misc_feature 1..80: note = Synthetic: >HCV.A4-cand-2770-2849
  source 1..80: mol_type = other DNA
tctcaaactgggatattgacattatggcgtttgtgcaactgcgccgtaagcttgaggcattcacatatatgcggtttgat

SEQ ID NO: 9091 - DNA, 80 bp, synthetic construct
  misc_feature 1..80: note = Synthetic: >HCV.A4-cand-2850-2929
  source 1..80: mol_type = other DNA
gcagaattcaccttcgtcaccaatctagaaaatgggctcacgaacaacagtgtgatccaatacatgtatgtaccaccagg

SEQ ID NO: 9092 - DNA, 80 bp, synthetic construct
  misc_feature 1..80: note = Synthetic: >HCV.A4-cand-2930-3009
  source 1..80: mol_type = other DNA
ggcccctaaacctgatgctcgagaatcattccagtggcaaaccgcgaccaatccgtcagtttttcagaaaatggacagcc

SEQ ID NO: 9093 - DNA, 80 bp, synthetic construct
  misc_feature 1..80: note = Synthetic: >HCV.A4-cand-3010-3089
  source 1..80: mol_type = other DNA
caccaccgcaagtgtcggtgccctttatgtcaccagctagtgcctaccaatggttctatgatggttatcccacttttggg

SEQ ID NO: 9094 - DNA, 80 bp, synthetic construct
  misc_feature 1..80: note = Synthetic: >HCV.A4-cand-3060-3139
  source 1..80: mol_type = other DNA
tggttctatgatggttatcccacttttgggcctcactcagagacatctaacctatcttatgggcagtgtcctaacaacat

SEQ ID NO: 9095 - DNA, 80 bp, synthetic construct
  misc_feature 1..80: note = Synthetic: >HCV.A4-cand-3170-3249
  source 1..80: mol_type = other DNA
caagcaaattaccaatcagaagtttcagattcgcatttatttgcggcttaagagagtgagggcatgggtccctagaccct

SEQ ID NO: 9096 - DNA, 80 bp, synthetic construct
  misc_feature 1..80: note = Synthetic: >HCV.A4-cand-4660-4739
  source 1..80: mol_type = other DNA
ctgatggtaaggacatgtcactgttctgccaaatggtgtccactgtcgacttcatcccaccaatggcttccctcgaggag

SEQ ID NO: 9097 - DNA, 80 bp, synthetic construct
  misc_feature 1..80: note = Synthetic: >HCV.A4-cand-4770-4849
  source 1..80: mol_type = other DNA
atcgcatccaccaatgctagcaacatcatagtgccaacagtgtccgattccgatgccattcgccgcagattttacatgga

SEQ ID NO: 9098 - DNA, 80 bp, synthetic construct
  misc_feature 1..80: note = Synthetic: >HCV.A4-cand-4850-4929
  source 1..80: mol_type = other DNA
ttgtgacattgaggtgacagactcatacaaaacagacctaggtagattggatgctgggcgggccgccaaactgtgttctg

SEQ ID NO: 9099 - DNA, 80 bp, synthetic construct
  misc_feature 1..80: note = Synthetic: >HCV.A4-cand-4930-5009
  source 1..80: mol_type = other DNA
aaaataacaccgcaaacttcaaacgctgcagccccctagtatgtgggaaggctattcagctcagagacaggaaatctaaa

SEQ ID NO: 9100 - DNA, 80 bp, synthetic construct
  misc_feature 1..80: note = Synthetic: >HCV.A4-cand-5010-5089
  source 1..80: mol_type = other DNA
gttaggtatagcgtggacacagtggtctctgagctgattagggagtacaataataggtctgccattggtaacacaattga

SEQ ID NO: 9101 - DNA, 80 bp, synthetic construct
  misc_feature 1..80: note = Synthetic: >HCV.A4-cand-5090-5169
  source 1..80: mol_type = other DNA
agccttgtttcagggaccacccaagttcagacccataagaatcagccttgaggagaagccagccccagatgccattagtg

SEQ ID NO: 9102 - DNA, 80 bp, synthetic construct
  misc_feature 1..80: note = Synthetic: >HCV.A4-cand-5170-5249
  source 1..80: mol_type = other DNA
accttcttgctagtgtggatagtgaagaggtgcgccagtactgcagagaccaagggtggatcatcccagaaacccccact

SEQ ID NO: 9103 - DNA, 80 bp, synthetic construct
  misc_feature 1..80: note = Synthetic: >HCV.A4-cand-5250-5329
  source 1..80: mol_type = other DNA
aatgttgagcgacacctcaatagagctgtgctagttatgcaatccattgctacagtggtagcagttgtctcactggtgta

SEQ ID NO: 9104 - DNA, 80 bp, synthetic construct
  misc_feature 1..80: note = Synthetic: >HCV.A4-cand-5330-5409
  source 1..80: mol_type = other DNA
tgtcatctacaagctctttgctggattccagggtgcatattctggtgcccctaagcaggcgctcaagaagcctgttctcc

SEQ ID NO: 9105 - DNA, 80 bp, synthetic construct
  misc_feature 1..80: note = Synthetic: >HCV.A4-cand-5410-5489
  source 1..80: mol_type = other DNA
gcacagcaacagtgcaaggtccaagtcttgactttgctctatcactactgaggaggaacatcaggcaagttcagacagat

SEQ ID NO: 9106 - DNA, 80 bp, synthetic construct
  misc_feature 1..80: note = Synthetic: >HCV.A4-cand-5490-5569
  source 1..80: mol_type = other DNA
caagggcacttcaccatgctgggagtcagagaccgcttggctgttctcccgcgacactcacagcctggaaagacaatctg

SEQ ID NO: 9107 - DNA, 80 bp, synthetic construct
  misc_feature 1..80: note = Synthetic: >HCV.A4-cand-5540-5619
  source 1..80: mol_type = other DNA
gcgacactcacagcctggaaagacaatctgggtggagcacaagcttgtgaacgttctggatgctgttgagttagtggatg

SEQ ID NO: 9108 - DNA, 80 bp, synthetic construct
  misc_feature 1..80: note = Synthetic: >HCV.A4-cand-5650-5729
  source 1..80: mol_type = other DNA
tcactcttgacaccaatgaaaagttcagagacatcactaaattcatcccagaaagtattagtgctgctagtgacgccact

SEQ ID NO: 9109 - DNA, 80 bp, synthetic construct
  misc_feature 1..80: note = Synthetic: >HCV.A4-cand-5730-5809
  source 1..80: mol_type = other DNA
ttagtgatcaacacagaacacatgccttcaatgtttgtgccagtaggtgatgtcgtgcagtatggtttcctaaatcttag

SEQ ID NO: 9110 - DNA, 80 bp, synthetic construct
  misc_feature 1..80: note = Synthetic: >HCV.A4-cand-5790-5869
  source 1..80: mol_type = other DNA
tatggtttcctaaatcttagtggaaaaccaactcaccgcaccatgatgtacaacttccccactaaggcaggtcagtgtgg

SEQ ID NO: 9111 - DNA, 80 bp, synthetic construct
  misc_feature 1..80: note = Synthetic: >HCV.A4-cand-5890-5969
  source 1..80: mol_type = other DNA
gaaaggtcattggcattcacataggaggtaatggcaggcaaggtttctgtgcaggactcaagagaagctactttgctagt

SEQ ID NO: 9112 - DNA, 80 bp, synthetic construct
  misc_feature 1..80: note = Synthetic: >HCV.A6-cand-640-719
  source 1..80: mol_type = other DNA
ccagtgacaaacagagctttgatatacttgtttgtgggtttcgttccactcaccaatcgtacagttcatactctaaagta

SEQ ID NO: 9113 - DNA, 80 bp, synthetic construct
  misc_feature 1..80: note = Synthetic: >HCV.A6-cand-720-799
  source 1..80: mol_type = other DNA
cattttgattctgaacaatagaaaatgggcgcccaagtttcaacagaaaaatctgggtcgcacgagacaaagaatgtagc

SEQ ID NO: 9114 - DNA, 80 bp, synthetic construct
  misc_feature 1..80: note = Synthetic: >HCV.A6-cand-800-879
  source 1..80: mol_type = other DNA
gaccgaagggtctactatcaacttcaccaacatcaattactataaggattcttatgcagcgtcagctagtagacaggatt

SEQ ID NO: 9115 - DNA, 80 bp, synthetic construct
  misc_feature 1..80: note = Synthetic: >HCV.A6-cand-880-959
  source 1..80: mol_type = other DNA
ttgcacaagatcccgcaaagttcacacgccctgtcttggataccatcagggaggttgcagccccgttgcaatccccttct

SEQ ID NO: 9116 - DNA, 80 bp, synthetic construct
  misc_feature 1..80: note = Synthetic: >HCV.A6-cand-970-1049
  source 1..80: mol_type = other DNA
gcggttatagtgaccgagtcgcacagttgactgtgggcaactcaaccattactacccaagaggcagccaacattgtattg

SEQ ID NO: 9117 - DNA, 80 bp, synthetic construct
  misc_feature 1..80: note = Synthetic: >HCV.A6-cand-1050-1129
  source 1..80: mol_type = other DNA
agctacggagagtggccagaatactgtccttccacggacgctacagctgtggacaagcctactcgccctgacgtgtcagt

SEQ ID NO: 9118 - DNA, 80 bp, synthetic construct
  misc_feature 1..80: note = Synthetic: >HCV.A6-cand-1130-1209
  source 1..80: mol_type = other DNA
gaataggttctacacactgtcaactaagagttggaagacagaatctactggctggtactggaaattccctgatgtgctaa

SEQ ID NO: 9119 - DNA, 80 bp, synthetic construct
  misc_feature 1..80: note = Synthetic: >HCV.A6-cand-1210-1289
  source 1..80: mol_type = other DNA
atgacacaggagttttcggtcaaaacgcccaattccactacttgtaccgctcgggtttctgcatgcacgttcagtgcaat

SEQ ID NO: 9120 - DNA, 80 bp, synthetic construct
  misc_feature 1..80: note = Synthetic: >HCV.A6-cand-1310-1389
  source 1..80: mol_type = other DNA
ggccctcttagtggctgcaatccccgaatttgtggttgctgcaagcagccctgccacgaagcctaatggacaagggttgt

SEQ ID NO: 9121 - DNA, 80 bp, synthetic construct
  misc_feature 1..80: note = Synthetic: >HCV.A6-cand-1370-1449
  source 1..80: mol_type = other DNA
gcctaatggacaagggttgtacccagatttcgctcacactaacccaggtaaaaatggccaagagtttcgagatccttatg

SEQ ID NO: 9122 - DNA, 80 bp, synthetic construct
  misc_feature 1..80: note = Synthetic: >HCV.A6-cand-1460-1539
  source 1..80: mol_type = other DNA
tggagtccccctaagtcaagcactggtttacccccatcaatggatcaatctacgaactaataactgcgcaaccattatta

SEQ ID NO: 9123 - DNA, 80 bp, synthetic construct
  misc_feature 1..80: note = Synthetic: >HCV.A6-cand-1540-1619
  source 1..80: mol_type = other DNA
tgccatatgtcaatgcgcttccatttgattcagcgcttaaccactcaaattttggattggttgtgatccctattagccct

SEQ ID NO: 9124 - DNA, 80 bp, synthetic construct
  misc_feature 1..80: note = Synthetic: >HCV.A6-cand-1620-1699
  source 1..80: mol_type = other DNA
ttaaaatattgtaatggagctaccacagaggtgccaatcacactaactattgccccacttaactcggagtttagcggcct

SEQ ID NO: 9125 - DNA, 80 bp, synthetic construct
  misc_feature 1..80: note = Synthetic: >HCV.A6-cand-1700-1779
  source 1..80: mol_type = other DNA
ccgacaagcaataaaacaagggtttcccacagagctcaagcctgggaccaatcaatttcttacaactgatgacgggacat

SEQ ID NO: 9126 - DNA, 80 bp, synthetic construct
  misc_feature 1..80: note = Synthetic: >HCV.A6-cand-1780-1859
  source 1..80: mol_type = other DNA
ccccgccaatactgcccggttttgaaccaactccattgattcacattcctggtgagttcacctctttgttagatttgtgt

SEQ ID NO: 9127 - DNA, 80 bp, synthetic construct
  misc_feature 1..80: note = Synthetic: >HCV.A6-cand-1820-1899
  source 1..80: mol_type = other DNA
tcacattcctggtgagttcacctctttgttagatttgtgtcaaatagaaaccatactagaagtcaataataccaccggca

SEQ ID NO: 9128 - DNA, 80 bp, synthetic construct
  misc_feature 1..80: note = Synthetic: >HQ537729.1-cand-5310-5389
  source 1..80: mol_type = other DNA
gaggaagatattatattttcagcatcttctaacaatactttatatactacatctaacactgcatatgttcctagcaatac

SEQ ID NO: 9129 - DNA, 80 bp, synthetic construct
  misc_feature 1..80: note = Synthetic: >HQ537729.1-cand-5390-5469
  source 1..80: mol_type = other DNA
tactataccattaagtagtggctatgatattcctataacagcagggccagacattgtatttaactctaatactattacta

SEQ ID NO: 9130 - DNA, 80 bp, synthetic construct
  misc_feature 1..80: note = Synthetic: >HQ537729.1-cand-5440-5519
  source 1..80: mol_type = other DNA
acattgtatttaactctaatactattactaacactgtactaccggtacccacaggtcctatatattctattattgcagat

SEQ ID NO: 9131 - DNA, 80 bp, synthetic construct
  misc_feature 1..80: note = Synthetic: >HQ537729.1-cand-5550-5629
  source 1..80: mol_type = other DNA
tatttattaaaacgacgtcgtaaacgtattccatatttttttgcagatgtctctgtggcggtctaacgaagccactgtct

SEQ ID NO: 9132 - DNA, 80 bp, synthetic construct
  misc_feature 1..80: note = Synthetic: >HQ537729.1-cand-5640-5719
  source 1..80: mol_type = other DNA
agtgtcagtgtctaaggttgttagcactgatgaatatgtaacacgcacaaacatttactatcatgcaggcagttctaggc

SEQ ID NO: 9133 - DNA, 80 bp, synthetic construct
  misc_feature 1..80: note = Synthetic: >HQ537729.1-cand-5730-5809
  source 1..80: mol_type = other DNA
aggtcacccatactatgctattaaaaaacaagattctaataaaatagcagtacccaaggtatctggtttgcaatacagag

SEQ ID NO: 9134 - DNA, 80 bp, synthetic construct
  misc_feature 1..80: note = Synthetic: >HQ537729.1-cand-5810-5889
  source 1..80: mol_type = other DNA
tatttagagtaaaattaccagatcctaataagtttggatttccagacacatcattttatgatcctgcctcccagcgtttg

SEQ ID NO: 9135 - DNA, 80 bp, synthetic construct
  misc_feature 1..80: note = Synthetic: >HQ537729.1-cand-5890-5969
  source 1..80: mol_type = other DNA
gtttgggcctgtacaggagttgaagtaggtcgtggtcagccattaggtgtaggtattagtggtcatcctttattaaataa

SEQ ID NO: 9136 - DNA, 80 bp, synthetic construct
  misc_feature 1..80: note = Synthetic: >HQ537729.1-cand-5970-6049
  source 1..80: mol_type = other DNA
attggatgatactgaaaattctaataaatatgttggtaactctggtacagataacagggaatgcatttctatggattata

SEQ ID NO: 9137 - DNA, 80 bp, synthetic construct
  misc_feature 1..80: note = Synthetic: >HQ537729.1-cand-6020-6099
  source 1..80: mol_type = other DNA
ataacagggaatgcatttctatggattataaacaaacacaattgtgtttaataggttgtaggcctcctataggtgaacat

SEQ ID NO: 9138 - DNA, 80 bp, synthetic construct
  misc_feature 1..80: note = Synthetic: >HQ537729.1-cand-6110-6189
  source 1..80: mol_type = other DNA
gcacaccttgtaatgctaaccaggtaaaagcaggtgaatgtcctcctttggagttactaaacactgtactacaagacggg

SEQ ID NO: 9139 - DNA, 80 bp, synthetic construct
  misc_feature 1..80: note = Synthetic: >HQ537729.1-cand-6210-6289
  source 1..80: mol_type = other DNA
tggtgcaatggattttactacattacaagctaataaaagtaatgttcccctagatatatgcagttccatttgcaaatatc

SEQ ID NO: 9140 - DNA, 80 bp, synthetic construct
  misc_feature 1..80: note = Synthetic: >HQ537729.1-cand-6290-6369
  source 1..80: mol_type = other DNA
ctgattatctaaaaatggtttctgagccatatggagatatgttatttttttatttacgtagagagcaaatgtttgttaga

SEQ ID NO: 9141 - DNA, 80 bp, synthetic construct
  misc_feature 1..80: note = Synthetic: >HQ537729.1-cand-6370-6449
  source 1..80: mol_type = other DNA
catttatttaatagggctggaactgtaggtgaaacagtacctgcagacctatatattaagggtaccactggcacattgcc

SEQ ID NO: 9142 - DNA, 80 bp, synthetic construct
  misc_feature 1..80: note = Synthetic: >HQ537729.1-cand-6450-6529
  source 1..80: mol_type = other DNA
tagtactagttattttcctactcctagtggctctatggtaacctcagatgcacaaatatttaataaaccatattggttgc

SEQ ID NO: 9143 - DNA, 80 bp, synthetic construct
  misc_feature 1..80: note = Synthetic: >HQ537729.1-cand-6530-6609
  source 1..80: mol_type = other DNA
aacgtgcacaaggccataataatggtatttgttggagtaaccaattgtttgttactgtagttgatacaacccgtagtaca

SEQ ID NO: 9144 - DNA, 80 bp, synthetic construct
  misc_feature 1..80: note = Synthetic: >KC470236.1-cand-3620-3699
  source 1..80: mol_type = other DNA
tacaggccacaacacaagacggtacctcagttgtggtaacactacgcctataatacatttaaaaggtgacaaaaatggtt

SEQ ID NO: 9145 - DNA, 80 bp, synthetic construct
  misc_feature 1..80: note = Synthetic: >KC470236.1-cand-3690-3769
  source 1..80: mol_type = other DNA
aaaaatggtttaaaatgtttaagatatagactacaaaaatatgacacattgtttgaaaatatttcatgtacctggcattg

SEQ ID NO: 9146 - DNA, 80 bp, synthetic construct
  misc_feature 1..80: note = Synthetic: >KC470236.1-cand-3790-3869
  source 1..80: mol_type = other DNA
aaaacgctggcatattaactgttacatatgccacagagtcacaacgccaaaaatttttggacactgttaaaataccttct

SEQ ID NO: 9147 - DNA, 80 bp, synthetic construct
  misc_feature 1..80: note = Synthetic: >KC470236.1-cand-3870-3949
  source 1..80: mol_type = other DNA
agtgtacatgtttcattgggttacatgacattgtaaagtatactatggatattgtgtatgtatattgtatgcatactaca

SEQ ID NO: 9148 - DNA, 80 bp, synthetic construct
  misc_feature 1..80: note = Synthetic: >KC470236.1-cand-3950-4029
  source 1..80: mol_type = other DNA
tagatgatattattggtatttttggtgtggtttggtgtgtgtatatatatatgttgcaatgtcccgcttttgccgtctgt

SEQ ID NO: 9149 - DNA, 80 bp, synthetic construct
  misc_feature 1..80: note = Synthetic: >KC470236.1-cand-4030-4109
  source 1..80: mol_type = other DNA
gcatgtgtgtgcgtatgtgtggataattgtgtttgtgtttattcttatacgtaccacaccattggaggtgttttttgtat

SEQ ID NO: 9150 - DNA, 80 bp, synthetic construct
  misc_feature 1..80: note = Synthetic: >KC470236.1-cand-4120-4199
  source 1..80: mol_type = other DNA
ttttgtattgcccatgtggttgttgcatagactggcaatggatatgatatagtactgtatatgtatgtgcattgtgcata

SEQ ID NO: 9151 - DNA, 80 bp, synthetic construct
  misc_feature 1..80: note = Synthetic: >KC470236.1-cand-4200-4279
  source 1..80: mol_type = other DNA
actactgtacatagctttttatatttttttttgttactaataaacatggtttcccaccgtgctgccaggcgtaagcgtgc

SEQ ID NO: 9152 - DNA, 80 bp, synthetic construct
  misc_feature 1..80: note = Synthetic: >KC470236.1-cand-4280-4359
  source 1..80: mol_type = other DNA
atctgcaactgacctatatagaacctgtaaacaatcgggtacctgtccaccagacgttgttgataaagttgagggtacta

SEQ ID NO: 9153 - DNA, 80 bp, synthetic construct
  misc_feature 1..80: note = Synthetic: >KC470236.1-cand-4360-4439
  source 1..80: mol_type = other DNA
cacttgctgacaaaattttacagtggactagtttaggtatatttttgggtgggttaggcataggcacaggtactggtact

SEQ ID NO: 9154 - DNA, 80 bp, synthetic construct
  misc_feature 1..80: note = Synthetic: >KC470236.1-cand-4470-4549
  source 1..80: mol_type = other DNA
ggtaggcctaatactgttgtagatgtgtctcctgcacgtccacctgtagttattgaacctgttggtccttctgagccatc

SEQ ID NO: 9155 - DNA, 80 bp, synthetic construct
  misc_feature 1..80: note = Synthetic: >KC470236.1-cand-4530-4609
  source 1..80: mol_type = other DNA
gttggtccttctgagccatctattgtgcaattggtggaggactcaagtgttataacctctggaacaccagtaccaacatt

SEQ ID NO: 9156 - DNA, 80 bp, synthetic construct
  misc_feature 1..80: note = Synthetic: >KC470236.1-cand-4610-4689
  source 1..80: mol_type = other DNA
tacaggcacctctggatttgaaattacttcttcttctactactacgcctgcggtattggatattacaccctcctctgggt

SEQ ID NO: 9157 - DNA, 80 bp, synthetic construct
  misc_feature 1..80: note = Synthetic: >KC470236.1-cand-4690-4769
  source 1..80: mol_type = other DNA
ctgtacaaataacctctactagttatactaaccctgcctttacggatccttccttaattgaggttccccaaacaggtgaa

SEQ ID NO: 9158 - DNA, 80 bp, synthetic construct
  misc_feature 1..80: note = Synthetic: >KC470236.1-cand-4770-4849
  source 1..80: mol_type = other DNA
acctcgggtaatatatttgtcagtacccctacatcaggtacacatggctatgaggaaatacctatggaagtgtttgccac

SEQ ID NO: 9159 - DNA, 80 bp, synthetic construct
  misc_feature 1..80: note = Synthetic: >KC470236.1-cand-4850-4929
  source 1..80: mol_type = other DNA
acatggcacaggtaccgaacctattagcagcacacctacacctggaatcagtcgtgtggcaggaccacgtttatatagta

SEQ ID NO: 9160 - DNA, 80 bp, synthetic construct
  misc_feature 1..80: note = Synthetic: >NC_001477.1-cand-9170-9249
  source 1..80: mol_type = other DNA
agccggatgggacacaagaataacagaggatgatcttcagaatgaggccaaaatcactgacatcatggaacctgaacatg

SEQ ID NO: 9161 - DNA, 80 bp, synthetic construct
  misc_feature 1..80: note = Synthetic: >NC_001477.1-cand-9250-9329
  source 1..80: mol_type = other DNA
ccctattggccacgtcaatctttaagctaacctaccaaaacaaggtagtaagggtgcagagaccagcgaaaaatggaacc

SEQ ID NO: 9162 - DNA, 80 bp, synthetic construct
  misc_feature 1..80: note = Synthetic: >NC_001477.1-cand-9330-9409
  source 1..80: mol_type = other DNA
gtgatggatgtcatatccagacgtgaccagagaggaagtggacaggttggaacctatggcttaaacaccttcaccaacat

SEQ ID NO: 9163 - DNA, 80 bp, synthetic construct
  misc_feature 1..80: note = Synthetic: >NC_001477.1-cand-9410-9489
  source 1..80: mol_type = other DNA
ggaggcccaactaataagacaaatggagtctgagggaatcttttcacccagcgaattggaaaccccaaatctagccgaaa

SEQ ID NO: 9164 - DNA, 80 bp, synthetic construct
  misc_feature 1..80: note = Synthetic: >NC_001477.1-cand-9490-9569
  source 1..80: mol_type = other DNA
gagtcctcgactggttgaaaaaacatggcaccgagaggctgaaaagaatggcaatcagtggagatgactgtgtggtgaaa

SEQ ID NO: 9165 - DNA, 80 bp, synthetic construct
  misc_feature 1..80: note = Synthetic: >NC_001477.1-cand-9570-9649
  source 1..80: mol_type = other DNA
ccaatcgatgacagatttgcaacagccttaacagctttgaatgacatgggaaaggtaagaaaagacataccgcaatggga

SEQ ID NO: 9166 - DNA, 80 bp, synthetic construct
  misc_feature 1..80: note = Synthetic: >NC_001477.1-cand-9650-9729
  source 1..80: mol_type = other DNA
accttcaaaaggatggaatgattggcaacaagtgcctttctgttcacaccatttccaccagctgattatgaaggatggga

SEQ ID NO: 9167 - DNA, 80 bp, synthetic construct
  misc_feature 1..80: note = Synthetic: >NC_001477.1-cand-9730-9809
  source 1..80: mol_type = other DNA
gggagatagtggtgccatgccgcaaccaagatgaacttgtaggtagggccagagtatcacaaggcgccggatggagcttg

SEQ ID NO: 9168 - DNA, 80 bp, synthetic construct
  misc_feature 1..80: note = Synthetic: >NC_001477.1-cand-9810-9889
  source 1..80: mol_type = other DNA
agagaaactgcatgcctaggcaagtcatatgcacaaatgtggcagctgatgtacttccacaggagagacttgagattagc

SEQ ID NO: 9169 - DNA, 80 bp, synthetic construct
  misc_feature 1..80: note = Synthetic: >NC_001477.1-cand-9890-9969
  source 1..80: mol_type = other DNA
ggctaatgctatctgttcagccgttccagttgattgggtcccaaccagccgcaccacctggtcgatccatgcccaccatc

SEQ ID NO: 9170 - DNA, 80 bp, synthetic construct
  misc_feature 1..80: note = Synthetic: >NC_001477.1-cand-9970-10049
  source 1..80: mol_type = other DNA
aatggatgacaacagaagacatgttgtcagtgtggaatagggtttggatagaggaaaacccatggatggaggacaagact

SEQ ID NO: 9171 - DNA, 80 bp, synthetic construct
  misc_feature 1..80: note = Synthetic: >NC_001477.1-cand-10050-10129
  source 1..80: mol_type = other DNA
catgtgtccagttgggaagacgttccatacctaggaaaaagggaagatcaatggtgtggttccctaataggcttaacagc

SEQ ID NO: 9172 - DNA, 80 bp, synthetic construct
  misc_feature 1..80: note = Synthetic: >NC_001477.1-cand-10130-10209
  source 1..80: mol_type = other DNA
acgagccacctgggccaccaacatacaagtggccataaaccaagtgagaaggctcattgggaatgagaattatctagact

SEQ ID NO: 9173 - DNA, 80 bp, synthetic construct
  misc_feature 1..80: note = Synthetic: >NC_001477.1-cand-10170-10249
  source 1..80: mol_type = other DNA
caagtgagaaggctcattgggaatgagaattatctagacttcatgacatcaatgaagagattcaaaaacgagagtgatcc

SEQ ID NO: 9174 - DNA, 80 bp, synthetic construct
  misc_feature 1..80: note = Synthetic: >NC_001477.1-cand-10290-10369
  source 1..80: mol_type = other DNA
aggaaaataaaaaatcaaacaaggcaagaagtcaggccggattaagccatagcacggtaagagctatgctgcctgtgagc

SEQ ID NO: 9175 - DNA, 80 bp, synthetic construct
  misc_feature 1..80: note = Synthetic: >NC_001477.1-cand-10360-10439
  source 1..80: mol_type = other DNA
gcctgtgagccccgtccaaggacgtaaaatgaagtcaggccgaaagccacggttcgagcaagccgtgctgcctgtagctc

SEQ ID NO: 9176 - DNA, 80 bp, synthetic construct
  misc_feature 1..80: note = Synthetic: >NC_001611.1-cand-166140-166219
  source 1..80: mol_type = other DNA
aaagactattccaacctactactagagtatataaaatctcgttacatgctattgaaggaagaggatatcgatgagaacat

SEQ ID NO: 9177 - DNA, 80 bp, synthetic construct
  misc_feature 1..80: note = Synthetic: >NC_001611.1-cand-166220-166299
  source 1..80: mol_type = other DNA
agtatcaactttattagataagggaatcgatcctaactttaaacaagacggatatacagcattacattattattatttgt

SEQ ID NO: 9178 - DNA, 80 bp, synthetic construct
  misc_feature 1..80: note = Synthetic: >NC_001611.1-cand-166300-166379
  source 1..80: mol_type = other DNA
gtcttgcacacgtttataaaccaggcgagtgtagaaaaccgataacgataaaaaaggccaagcgaattatttctttgttt

SEQ ID NO: 9179 - DNA, 80 bp, synthetic construct
  misc_feature 1..80: note = Synthetic: >NC_001611.1-cand-166380-166459
  source 1..80: mol_type = other DNA
atacaacatggagctaatctaaacgcgttagataattgtggtaatacaccattccatttgtatcttagtattgaaatgtg

SEQ ID NO: 9180 - DNA, 80 bp, synthetic construct
  misc_feature 1..80: note = Synthetic: >NC_001611.1-cand-166470-166549
  source 1..80: mol_type = other DNA
catatgactaaaatgctgttgacttttaatccgaatttcgaaatatgtaataatcatggattaacgcctatactatgtta

SEQ ID NO: 9181 - DNA, 80 bp, synthetic construct
  misc_feature 1..80: note = Synthetic: >NC_001611.1-cand-166550-166629
  source 1..80: mol_type = other DNA
tataacttccgactacatacaacacgatattcttgtcatgttgatacatcactatgaaacaaatgttggagaaatgccta

SEQ ID NO: 9182 - DNA, 80 bp, synthetic construct
  misc_feature 1..80: note = Synthetic: >NC_001611.1-cand-166630-166709
  source 1..80: mol_type = other DNA
tagatgagcgtcgtatgatcgtattcgagtttatcaaaacatattctacacgtccgttagattcgataacttatttgatg

SEQ ID NO: 9183 - DNA, 80 bp, synthetic construct
  misc_feature 1..80: note = Synthetic: >NC_001611.1-cand-166710-166789
  source 1..80: mol_type = other DNA
aataggtttaaaaatatagatattcatacccgctatgaaggaaagacattattacacatagcatgtgaatataataatac

SEQ ID NO: 9184 - DNA, 80 bp, synthetic construct
  misc_feature 1..80: note = Synthetic: >NC_001611.1-cand-166790-166869
  source 1..80: mol_type = other DNA
acacgtaatagattatcttatacgtattaacggagatataaatgcgttaaccgacaataacaaacacgctatccaactca

SEQ ID NO: 9185 - DNA, 80 bp, synthetic construct
  misc_feature 1..80: note = Synthetic: >NC_001611.1-cand-166870-166949
  source 1..80: mol_type = other DNA
ttatagataacaaagaaaattcccagtataccatcgattgtttattgtatatacttagatatattgtagataagaatgtg

SEQ ID NO: 9186 - DNA, 80 bp, synthetic construct
  misc_feature 1..80: note = Synthetic: >NC_001611.1-cand-166950-167029
  source 1..80: mol_type = other DNA
ataagatcgttggtggatcaacttccatatctacctatcttcgatataaaatcatttgagaaattcatatcatactgtat

SEQ ID NO: 9187 - DNA, 80 bp, synthetic construct
  misc_feature 1..80: note = Synthetic: >NC_001611.1-cand-167030-167109
  source 1..80: mol_type = other DNA
acttttagatgacacattttacgatagacacgttcagaatcgcgattctaaaacttatcgatacacgttttcaaaataca

SEQ ID NO: 9188 - DNA, 80 bp, synthetic construct
  misc_feature 1..80: note = Synthetic: >NC_001611.1-cand-167110-167189
  source 1..80: mol_type = other DNA
tatcattcgataaatacgatagtataataactaaatgctatgaagaaacaatattgctcaaactatccactgttctagac

SEQ ID NO: 9189 - DNA, 80 bp, synthetic construct
  misc_feature 1..80: note = Synthetic: >NC_001611.1-cand-167190-167269
  source 1..80: mol_type = other DNA
acaacactatattctgttttaagatgtcataattcgagaaagttaaaaagatacctcagcgtgttaaaaaaatataataa

SEQ ID NO: 9190 - DNA, 80 bp, synthetic construct
  misc_feature 1..80: note = Synthetic: >NC_001611.1-cand-167270-167349
  source 1..80: mol_type = other DNA
tgataagtccttcaaaatatattctaatattatgaatgagagataccttaatgtctattataaagatatgtatgtgtcaa

SEQ ID NO: 9191 - DNA, 80 bp, synthetic construct
  misc_feature 1..80: note = Synthetic: >NC_001611.1-cand-167350-167429
  source 1..80: mol_type = other DNA
aagtatacgataaactatttcctgttttcacagataaaaaatgtctactaacattactaccttcagaaattatatatgaa

SEQ ID NO: 9192 - DNA, 80 bp, synthetic construct
  misc_feature 1..80: note = Synthetic: >NC_001611.1-cand-175260-175339
  source 1..80: mol_type = other DNA
taaagaatttaacaatacgttgaaaaaaattggtgtaaaagatgataaaaacaatacagtatataactattataattgta

SEQ ID NO: 9193 - DNA, 80 bp, synthetic construct
  misc_feature 1..80: note = Synthetic: >NC_001611.1-cand-175340-175419
  source 1..80: mol_type = other DNA
aactaactacaaattctacatgtgacgagttaatcaatttagatgaagtcattaacaatataactttgacaaatattata

SEQ ID NO: 9194 - DNA, 80 bp, synthetic construct
  misc_feature 1..80: note = Synthetic: >NC_001611.1-cand-175500-175579
  source 1..80: mol_type = other DNA
agattgtctttacaaatcatatggtgtaagtgatgatgtaagtcattgtttttcatcacctagacgtagacgatctgacg

SEQ ID NO: 9195 - DNA, 80 bp, synthetic construct
  misc_feature 1..80: note = Synthetic: >NC_001611.1-cand-175540-175619
  source 1..80: mol_type = other DNA
agtcattgtttttcatcacctagacgtagacgatctgacgacaaacaggagtacacagaaatgaaattactcgaccacgc

SEQ ID NO: 9196 - DNA, 80 bp, synthetic construct
  misc_feature 1..80: note = Synthetic: >NC_001611.1-cand-175620-175699
  source 1..80: mol_type = other DNA
gaaaaaagatttaagaatagacagtgttattcctagaggtacaactcatttccaagtaggtgcatctggagcaagtggtg

SEQ ID NO: 9197 - DNA, 80 bp, synthetic construct
  misc_feature 1..80: note = Synthetic: >NC_001611.1-cand-175700-175779
  source 1..80: mol_type = other DNA
gtgttgtaggtgatagttccccatttcaaaatgttaaatcacgggccagtctattggcagaaaaaataatgcctagagta

SEQ ID NO: 9198 - DNA, 80 bp, synthetic construct
  misc_feature 1..80: note = Synthetic: >NC_001611.1-cand-175780-175859
  source 1..80: mol_type = other DNA
cccactactgctaccgaagagcagctatatgcaactataaatagacaaacaaagttgcctgcaggtgttaaaagtactcc

SEQ ID NO: 9199 - DNA, 80 bp, synthetic construct
  misc_feature 1..80: note = Synthetic: >NC_001611.1-cand-175860-175939
  source 1..80: mol_type = other DNA
gtttacagaggcgcttgtgtctacgataaaccaaaagctttctagtgttaaagaggtaacttatgcttcgtccaatctgc

SEQ ID NO: 9200 - DNA, 80 bp, synthetic construct
  misc_feature 1..80: note = Synthetic: >NC_001611.1-cand-175940-176019
  source 1..80: mol_type = other DNA
caggatcaagtggttatgttcatagaccatctgattctgttatttacagcactataagacggacacgtttacctagtgat

SEQ ID NO: 9201 - DNA, 80 bp, synthetic construct
  misc_feature 1..80: note = Synthetic: >NC_001611.1-cand-176100-176179
  source 1..80: mol_type = other DNA
gtcatcaagtagtgattttgaagatatagatgaggtggttgcagaatatagacaaaaatatggtggagctagccgtggta

SEQ ID NO: 9202 - DNA, 80 bp, synthetic construct
  misc_feature 1..80: note = Synthetic: >NC_001611.1-cand-176180-176259
  source 1..80: mol_type = other DNA
gaacatcgtcatcaagtagtagtgattttgaagatatagatgaggtggttgcagaatatagacaaaaatatggcaacgct

SEQ ID NO: 9203 - DNA, 80 bp, synthetic construct
  misc_feature 1..80: note = Synthetic: >NC_001611.1-cand-176260-176339
  source 1..80: mol_type = other DNA
atgacaaaaggacgtggttcttctaaaccggatccgttatatagtactgttaagaaaacacctaaaagtatagcatctgg

SEQ ID NO: 9204 - DNA, 80 bp, synthetic construct
  misc_feature 1..80: note = Synthetic: >NC_001611.1-cand-176340-176419
  source 1..80: mol_type = other DNA
agtagacatagtttcaaaacaaacagactattctttattacccggcgttaatactggcagttctatcgtaacacctctca

SEQ ID NO: 9205 - DNA, 80 bp, synthetic construct
  misc_feature 1..80: note = Synthetic: >NC_001611.1-cand-176420-176499
  source 1..80: mol_type = other DNA
ccagaagaggagctactagacgacctaaacgcccatctacacctccacgcgaagatctaccaccgcttcctctaaatcct

SEQ ID NO: 9206 - DNA, 80 bp, synthetic construct
  misc_feature 1..80: note = Synthetic: >NC_001611.1-cand-176500-176579
  source 1..80: mol_type = other DNA
ccttatcgacaactttctcgtggtggtgatcattctctacaacaagttcctcaacgtgattattctccaccacatagacc

SEQ ID NO: 9207 - DNA, 80 bp, synthetic construct
  misc_feature 1..80: note = Synthetic: >NC_001611.1-cand-176580-176659
  source 1..80: mol_type = other DNA
tcctccaccacttcctcctaaaccagttccagctattccacctagagatagtcaaccaaataataaaggatttagtaagt

SEQ ID NO: 9208 - DNA, 80 bp, synthetic construct
  misc_feature 1..80: note = Synthetic: >NC_001611.1-cand-181770-181849
  source 1..80: mol_type = other DNA
taccttgtatacatcggatacgacatcaaccttcctactaaagacgataagacagtattcgacttggtgtttgaaaacag

SEQ ID NO: 9209 - DNA, 80 bp, synthetic construct
  misc_feature 1..80: note = Synthetic: >NC_001611.1-cand-181850-181929
  source 1..80: mol_type = other DNA
aaacatcttattcaatgcgggtgttattcacaacatcatccaccacagactgaaagtatctctacctatgattaaatcgt

SEQ ID NO: 9210 - DNA, 80 bp, synthetic construct
  misc_feature 1..80: note = Synthetic: >NC_001611.1-cand-181930-182009
  source 1..80: mol_type = other DNA
tgttctataagatgttagaattctctccctacgacgattactacgtaaagaagataatagcctactgcatattaagggac

SEQ ID NO: 9211 - DNA, 80 bp, synthetic construct
  misc_feature 1..80: note = Synthetic: >NC_001611.1-cand-182090-182169
  source 1..80: mol_type = other DNA
taagatagattccatcatcaaaaaatgcaactgggacataagtcgcctcaaagatattcaaatctctgacaccaacctgt

SEQ ID NO: 9212 - DNA, 80 bp, synthetic construct
  misc_feature 1..80: note = Synthetic: >NC_001611.1-cand-182170-182249
  source 1..80: mol_type = other DNA
atactgtattaagaacagaagacatccggtatcgtacctatcttaaagccatacatttagatagtcacatttcatttccc

SEQ ID NO: 9213 - DNA, 80 bp, synthetic construct
  misc_feature 1..80: note = Synthetic: >NC_001611.1-cand-182250-182329
  source 1..80: mol_type = other DNA
atgtacgacgatcttatagaacagtgtcatctatcgatggagcgtaaaagtaaactcgtcgacaaagtactcaataaatt

SEQ ID NO: 9214 - DNA, 80 bp, synthetic construct
  misc_feature 1..80: note = Synthetic: >NC_001611.1-cand-182330-182409
  source 1..80: mol_type = other DNA
aaagtctaccatcgatggtcaatctagactatcgtatttgcctccagaaattatacgcaacatcataaccaagctaagcg

SEQ ID NO: 9215 - DNA, 80 bp, synthetic construct
  misc_feature 1..80: note = Synthetic: >NC_001611.1-cand-182490-182569
  source 1..80: mol_type = other DNA
tctatatgattggagaagtaggaaacaggaacacggtgattactacattattaaatcatgaagtccgtattatacttgta

SEQ ID NO: 9216 - DNA, 80 bp, synthetic construct
  misc_feature 1..80: note = Synthetic: >NC_001611.1-cand-182620-182699
  source 1..80: mol_type = other DNA
atacaccacccaatggaaagtgtaaagacaccgaatacaaacgccataatctgtgttgtttatcgtgtcctccgggaaca

SEQ ID NO: 9217 - DNA, 80 bp, synthetic construct
  misc_feature 1..80: note = Synthetic: >NC_001611.1-cand-182700-182779
  source 1..80: mol_type = other DNA
tacgcttccagattatgtgatagcaagactaacacacaatgtacaccgtgtggttcgggtacctttacatctcgcaataa

SEQ ID NO: 9218 - DNA, 80 bp, synthetic construct
  misc_feature 1..80: note = Synthetic: >NC_001611.1-cand-182860-182939
  source 1..80: mol_type = other DNA
atagaatctgtgaatgctctcccggatattattgtcttcttaaaggatcatccggatgcaaggcatgtgtttcccaaaca

SEQ ID NO: 9219 - DNA, 80 bp, synthetic construct
  misc_feature 1..80: note = Synthetic: >NC_001611.1-cand-182940-183019
  source 1..80: mol_type = other DNA
aaatgtggaataggatacggagtatccggacacacgtctgttggagacgtcatctgttctccgtgtggtttcggaacata

SEQ ID NO: 9220 - DNA, 80 bp, synthetic construct
  misc_feature 1..80: note = Synthetic: >NC_001611.1-cand-183020-183099
  source 1..80: mol_type = other DNA
ttctcacaccgtctcttccgcagataaatgcgaacccgtacccaacaatacatttaactatatcgatgtggaaattacac

SEQ ID NO: 9221 - DNA, 80 bp, synthetic construct
  misc_feature 1..80: note = Synthetic: >NC_001611.1-cand-183080-183159
  source 1..80: mol_type = other DNA
tatcgatgtggaaattacactgtatccagttaacgacacatcgtgtactcggacgaccactaccggtctcagcgaatcca

SEQ ID NO: 9222 - DNA, 80 bp, synthetic construct
  misc_feature 1..80: note = Synthetic: >NC_001611.1-cand-183160-183239
  source 1..80: mol_type = other DNA
tcttaacgtcggaactaactattactatgaatcatacagattgcaatcccgtatttcgtgaggaatacttctctgtcctt

SEQ ID NO: 9223 - DNA, 80 bp, synthetic construct
  misc_feature 1..80: note = Synthetic: >NC_001611.1-cand-183240-183319
  source 1..80: mol_type = other DNA
aataaggtagcaacttcaggattttttacaggagaaaatagatatcaaaatatttcaaaggtgtgtactttaaattttga

SEQ ID NO: 9224 - DNA, 80 bp, synthetic construct
  misc_feature 1..80: note = Synthetic: >NC_001943.1-cand-3480-3559
  source 1..80: mol_type = other DNA
gcttagaagcgcatcagaatgccttaatgaaacagcataccgacacctcagttggtcaatgtgggtggtcaccaatggaa

SEQ ID NO: 9225 - DNA, 80 bp, synthetic construct
  misc_feature 1..80: note = Synthetic: >NC_001943.1-cand-3540-3619
  source 1..80: mol_type = other DNA
gtgggtggtcaccaatggaaggcggctttaaaaaaaccatgcagcgcctggtaaataaagggaataaacacttcattgag

SEQ ID NO: 9226 - DNA, 80 bp, synthetic construct
  misc_feature 1..80: note = Synthetic: >NC_001943.1-cand-3620-3699
  source 1..80: mol_type = other DNA
ttcgactggacccgctatgatggaactataccaccagcactctttaaacacatcaaagaaattaggtggaatttcatcaa

SEQ ID NO: 9227 - DNA, 80 bp, synthetic construct
  misc_feature 1..80: note = Synthetic: >NC_001943.1-cand-3700-3779
  source 1..80: mol_type = other DNA
taaagaccaacgtgaaaagtacagacatgtacatgaatggtatgttaacaacctccttaatcgccatgtacttctaccat

SEQ ID NO: 9228 - DNA, 80 bp, synthetic construct
  misc_feature 1..80: note = Synthetic: >NC_001943.1-cand-3780-3859
  source 1..80: mol_type = other DNA
ctggtgaagtcaccttgcagacgcgaggtaatccatctggtcagttttcaacaacaatggataacaacatggttaacttt

SEQ ID NO: 9229 - DNA, 80 bp, synthetic construct
  misc_feature 1..80: note = Synthetic: >NC_001943.1-cand-3850-3929
  source 1..80: mol_type = other DNA
ggttaacttttggttacaggcttttgagtttgcttattttaatggaccagacagagacctttggaagacctatgacactg

SEQ ID NO: 9230 - DNA, 80 bp, synthetic construct
  misc_feature 1..80: note = Synthetic: >NC_001943.1-cand-3930-4009
  source 1..80: mol_type = other DNA
tagtttatggagatgacaggctttctacaacaccttcggtgcccgatgattatgaggagagagtgatcactatgtataga

SEQ ID NO: 9231 - DNA, 80 bp, synthetic construct
  misc_feature 1..80: note = Synthetic: >NC_001943.1-cand-4000-4079
  source 1..80: mol_type = other DNA
tatgtatagagacatctttggcatgtgggttaagcctgggaaggttatctgtagagacagcatagttggattgtcctttt

SEQ ID NO: 9232 - DNA, 80 bp, synthetic construct
  misc_feature 1..80: note = Synthetic: >NC_001943.1-cand-4080-4159
  source 1..80: mol_type = other DNA
gtggcttcactgttaatgaaaaccttgagcctgtgccaacttctcctgaaaagttaatggcatcactgttaaaaccttac

SEQ ID NO: 9233 - DNA, 80 bp, synthetic construct
  misc_feature 1..80: note = Synthetic: >NC_001943.1-cand-4160-4239
  source 1..80: mol_type = other DNA
aaaatattacctgatcttgaatcactccatgggaaactcctatgctatcagttgcttgctgcgttcatggcagaggacca

SEQ ID NO: 9234 - DNA, 80 bp, synthetic construct
  misc_feature 1..80: note = Synthetic: >NC_001943.1-cand-4240-4319
  source 1..80: mol_type = other DNA
cccctttaaggtgtatgtggagcactgcctctcgcggactgcaaagcagcttcgtgactctggccttccagccagactca

SEQ ID NO: 9235 - DNA, 80 bp, synthetic construct
  misc_feature 1..80: note = Synthetic: >NC_001943.1-cand-4350-4429
  source 1..80: mol_type = other DNA
gaggaccaaagaagtgtgatggctagcaagtccaacaagcaagtaactgttgaggtcagtaataatggccgcagcaggag

SEQ ID NO: 9236 - DNA, 80 bp, synthetic construct
  misc_feature 1..80: note = Synthetic: >NC_001943.1-cand-4370-4449
  source 1..80: mol_type = other DNA
ggctagcaagtccaacaagcaagtaactgttgaggtcagtaataatggccgcagcaggagtaaatcaagggcccgttcac

SEQ ID NO: 9237 - DNA, 80 bp, synthetic construct
  misc_feature 1..80: note = Synthetic: >NC_001943.1-cand-4480-4559
  source 1..80: mol_type = other DNA
tcacagtcaattcaagaaacagagccaggagacagcccggacgcgacaaacgtcaatcttctcaacgtgtccgtaacatt

SEQ ID NO: 9238 - DNA, 80 bp, synthetic construct
  misc_feature 1..80: note = Synthetic: >NC_001943.1-cand-4560-4639
  source 1..80: mol_type = other DNA
gtcaataagcaactcaggaaacagggtgtcacaggaccaaaacctgcaatatgtcagagagcaacagcaacccttgggac

SEQ ID NO: 9239 - DNA, 80 bp, synthetic construct
  misc_feature 1..80: note = Synthetic: >NC_001943.1-cand-4640-4719
  source 1..80: mol_type = other DNA
agtcgggtcaaacaccagtggcaccactgagattgaggcgtgtattctcctcaaccctgtcctcgttaaggacgctactg

SEQ ID NO: 9240 - DNA, 80 bp, synthetic construct
  misc_feature 1..80: note = Synthetic: >NC_001959.2-cand-490-569
  source 1..80: mol_type = other DNA
tcacgacggtgtctgggcctgagtggaatatgtgcccgctaccaccagttgaccaaaggagcacgacacctgcaactgag

SEQ ID NO: 9241 - DNA, 80 bp, synthetic construct
  misc_feature 1..80: note = Synthetic: >NC_001959.2-cand-570-649
  source 1..80: mol_type = other DNA
cccacaattggtgacatgatcgaattctatgaagggcacatctatcattatgctatatacataggtcaaggcaagacggt

SEQ ID NO: 9242 - DNA, 80 bp, synthetic construct
  misc_feature 1..80: note = Synthetic: >NC_001959.2-cand-660-739
  source 1..80: mol_type = other DNA
tcccctcaagcagccttctcaataacgaggatcaccatacagcccatatcagcttggtggcgagtctgttatgtcccaca

SEQ ID NO: 9243 - DNA, 80 bp, synthetic construct
  misc_feature 1..80: note = Synthetic: >NC_001959.2-cand-740-819
  source 1..80: mol_type = other DNA
accaaaacagaggctcacatacgaccaactcaaagaattagaaaatgaaccatggccgtatgccgcagtcacgaacaact

SEQ ID NO: 9244 - DNA, 80 bp, synthetic construct
  misc_feature 1..80: note = Synthetic: >NC_001959.2-cand-820-899
  source 1..80: mol_type = other DNA
gcttcgaattttgttgccaggtcatgtgcttggaagatacttggttgcaaaggaagctcatctcctctggccggttttac

SEQ ID NO: 9245 - DNA, 80 bp, synthetic construct
  misc_feature 1..80: note = Synthetic: >NC_001959.2-cand-910-989
  source 1..80: mol_type = other DNA
aagattggtcccgagacactccagaattccaacaagacagcaagttagagatggttagggatgcagtgctagccgctata

SEQ ID NO: 9246 - DNA, 80 bp, synthetic construct
  misc_feature 1..80: note = Synthetic: >NC_001959.2-cand-990-1069
  source 1..80: mol_type = other DNA
aatgggttggtgtcgcggccatttaaagatcttctgggtaagctcaaacccttgaacgtgcttaacttactttcaaactg

SEQ ID NO: 9247 - DNA, 80 bp, synthetic construct
  misc_feature 1..80: note = Synthetic: >NC_001959.2-cand-1090-1169
  source 1..80: mol_type = other DNA
tcgtggagatggtggtcctccttttagaactctttggaatcttttggaacccacctgatgtttccaactttatagcttca

SEQ ID NO: 9248 - DNA, 80 bp, synthetic construct
  misc_feature 1..80: note = Synthetic: >NC_001959.2-cand-1150-1229
  source 1..80: mol_type = other DNA
tttccaactttatagcttcactcctgccagatttccatctacagggccccgaggaccttgccagggatctcgtgccaata

SEQ ID NO: 9249 - DNA, 80 bp, synthetic construct
  misc_feature 1..80: note = Synthetic: >NC_001959.2-cand-1240-1319
  source 1..80: mol_type = other DNA
ggatcggcttagccataggattcaccagagacaaggtaagtaagatgatgaagaatgctgttgatggacttcgtgcggca

SEQ ID NO: 9250 - DNA, 80 bp, synthetic construct
  misc_feature 1..80: note = Synthetic: >NC_001959.2-cand-1320-1399
  source 1..80: mol_type = other DNA
acccagctcggtcaatatggcctagaaatattctcattactaaagaagtacttcttcggtggtgatcaaacagagaaaac

SEQ ID NO: 9251 - DNA, 80 bp, synthetic construct
  misc_feature 1..80: note = Synthetic: >NC_001959.2-cand-1400-1479
  source 1..80: mol_type = other DNA
cctaaaagatattgagtcagcagttatagatatggaagtactatcatctacatcagtgactcagctcgtgagggacaaac

SEQ ID NO: 9252 - DNA, 80 bp, synthetic construct
  misc_feature 1..80: note = Synthetic: >NC_001959.2-cand-1480-1559
  source 1..80: mol_type = other DNA
agtctgcacgggcttatatggccatcttagataatgaagaagaaaaggcaaggaaattatctgtcaggaatgccgaccca

SEQ ID NO: 9253 - DNA, 80 bp, synthetic construct
  misc_feature 1..80: note = Synthetic: >NC_001959.2-cand-1560-1639
  source 1..80: mol_type = other DNA
cacgtagtatcctctaccaatgctctcatatcccggatctcaatggctagggctgcattggccaaggctcaagctgaaat

SEQ ID NO: 9254 - DNA, 80 bp, synthetic construct
  misc_feature 1..80: note = Synthetic: >NC_001959.2-cand-1640-1719
  source 1..80: mol_type = other DNA
gaccagcaggatgcgtcctgtggtcattatgatgtgtgggccccctggtataggtaaaaccaaggcagcagaacatctgg

SEQ ID NO: 9255 - DNA, 80 bp, synthetic construct
  misc_feature 1..80: note = Synthetic: >NC_001959.2-cand-1720-1799
  source 1..80: mol_type = other DNA
ctaaacgcctagccaatgagatacggcctggtggtaaggttgggctggtcccacgggaggcagtggatcattgggatgga

SEQ ID NO: 9256 - DNA, 80 bp, synthetic construct
  misc_feature 1..80: note = Synthetic: >NC_002021.1-cand-260-339
  source 1..80: mol_type = other DNA
ggttatgcccaaacagattgtgtattggaagcaatggctttccttgaggaatcccatcctggtatttttgaaaactcgtg

SEQ ID NO: 9257 - DNA, 80 bp, synthetic construct
  misc_feature 1..80: note = Synthetic: >NC_002021.1-cand-340-419
  source 1..80: mol_type = other DNA
tattgaaacgatggaggttgttcagcaaacacgagtagacaagctgacacaaggccgacagacctatgactggactttaa

SEQ ID NO: 9258 - DNA, 80 bp, synthetic construct
  misc_feature 1..80: note = Synthetic: >NC_002021.1-cand-420-499
  source 1..80: mol_type = other DNA
atagaaaccagcctgctgcaacagcattggccaacacaatagaagtgttcagatcaaatggcctcacggccaatgagtct

SEQ ID NO: 9259 - DNA, 80 bp, synthetic construct
  misc_feature 1..80: note = Synthetic: >NC_002021.1-cand-470-549
  source 1..80: mol_type = other DNA
agatcaaatggcctcacggccaatgagtctggaaggctcatagacttccttaaggatgtaatggagtcaatgaaaaaaga

SEQ ID NO: 9260 - DNA, 80 bp, synthetic construct
  misc_feature 1..80: note = Synthetic: >NC_002021.1-cand-580-659
  source 1..80: mol_type = other DNA
aaagagacgggtgagagacaatatgactaagaaaatgataacacagagaacaataggtaaaaggaaacagagattgaaca

SEQ ID NO: 9261 - DNA, 80 bp, synthetic construct
  misc_feature 1..80: note = Synthetic: >NC_002021.1-cand-660-739
  source 1..80: mol_type = other DNA
aaaggagttatctaattagagcattgaccctgaacacaatgaccaaagatgctgagagagggaagctaaaacggagagca

SEQ ID NO: 9262 - DNA, 80 bp, synthetic construct
  misc_feature 1..80: note = Synthetic: >NC_002021.1-cand-770-849
  source 1..80: mol_type = other DNA
tttgtatactttgttgagacactggcaaggagtatatgtgagaaacttgaacaatcagggttgccagttggaggcaatga

SEQ ID NO: 9263 - DNA, 80 bp, synthetic construct
  misc_feature 1..80: note = Synthetic: >NC_002021.1-cand-820-899
  source 1..80: mol_type = other DNA
acaatcagggttgccagttggaggcaatgagaagaaagcaaagttggcaaatgttgtaaggaagatgatgaccaattctc

SEQ ID NO: 9264 - DNA, 80 bp, synthetic construct
  misc_feature 1..80: note = Synthetic: >NC_002021.1-cand-910-989
  source 1..80: mol_type = other DNA
actttctttgaccatcactggagataacaccaaatggaacgaaaatcagaatcctcggatgtttttggccatgatcacat

SEQ ID NO: 9265 - DNA, 80 bp, synthetic construct
  misc_feature 1..80: note = Synthetic: >NC_002021.1-cand-990-1069
  source 1..80: mol_type = other DNA
atatgaccagaaatcagcccgaatggttcagaaatgttctaagtattgctccaataatgttctcaaacaaaatggcgaga

SEQ ID NO: 9266 - DNA, 80 bp, synthetic construct
  misc_feature 1..80: note = Synthetic: >NC_002021.1-cand-1070-1149
  source 1..80: mol_type = other DNA
ctgggaaaagggtatatgtttgagagcaagagtatgaaacttagaactcaaatacctgcagaaatgctagcaagcattga

SEQ ID NO: 9267 - DNA, 80 bp, synthetic construct
  misc_feature 1..80: note = Synthetic: >NC_002021.1-cand-1130-1209
  source 1..80: mol_type = other DNA
gaaatgctagcaagcattgatttgaaatatttcaatgattcaacaagaaagaagattgaaaaaatccgaccgctcttaat

SEQ ID NO: 9268 - DNA, 80 bp, synthetic construct
  misc_feature 1..80: note = Synthetic: >NC_002021.1-cand-1240-1319
  source 1..80: mol_type = other DNA
gatgatgggcatgttcaatatgttaagcactgtattaggcgtctccatcctgaatcttggacaaaagagatacaccaaga

SEQ ID NO: 9269 - DNA, 80 bp, synthetic construct
  misc_feature 1..80: note = Synthetic: >NC_002021.1-cand-1320-1399
  source 1..80: mol_type = other DNA
ctacttactggtgggatggtcttcaatcctctgacgattttgctctgattgtgaatgcacccaatcatgaagggattcaa

SEQ ID NO: 9270 - DNA, 80 bp, synthetic construct
  misc_feature 1..80: note = Synthetic: >NC_002021.1-cand-1400-1479
  source 1..80: mol_type = other DNA
gccggagtcgacaggttttatcgaacctgtaagctacatggaatcaatatgagcaagaaaaagtcttacataaacagaac

SEQ ID NO: 9271 - DNA, 80 bp, synthetic construct
  misc_feature 1..80: note = Synthetic: >NC_002021.1-cand-1480-1559
  source 1..80: mol_type = other DNA
aggtacatttgaattcacaagttttttctatcgttatgggtttgttgccaatttcagcatggagcttcccagttttggtg

SEQ ID NO: 9272 - DNA, 80 bp, synthetic construct
  misc_feature 1..80: note = Synthetic: >NC_003310.1-cand-40560-40639
  source 1..80: mol_type = other DNA
gtatacctagagaactttcgatacatctgctgtttcctgtaatcgttaaattttacaaatctataacatgctaaaccttt

SEQ ID NO: 9273 - DNA, 80 bp, synthetic construct
  misc_feature 1..80: note = Synthetic: >NC_003310.1-cand-40640-40719
  source 1..80: mol_type = other DNA
tgacgacagccattcattaatttctgatatggaatctgtaatctcaataccgtatcgttctaaagccagtgctatatctc

SEQ ID NO: 9274 - DNA, 80 bp, synthetic construct
  misc_feature 1..80: note = Synthetic: >NC_003310.1-cand-40720-40799
  source 1..80: mol_type = other DNA
cctgttcgtgggaacgctttcgtataatatcgatcaatggataatatgaagtttttggagaataatatgattcatgatct

SEQ ID NO: 9275 - DNA, 80 bp, synthetic construct
  misc_feature 1..80: note = Synthetic: >NC_003310.1-cand-40800-40879
  source 1..80: mol_type = other DNA
atttcgtccataaacaatctagacataggaattggaggcgatgatcttaattttgtgcaatgggtcaatcctataacttc

SEQ ID NO: 9276 - DNA, 80 bp, synthetic construct
  misc_feature 1..80: note = Synthetic: >NC_003310.1-cand-40880-40959
  source 1..80: mol_type = other DNA
taatattgtaatattcatcatcgacataacactatctatgttatcatcgtatattagtataccacgaccttcttcatttc

SEQ ID NO: 9277 - DNA, 80 bp, synthetic construct
  misc_feature 1..80: note = Synthetic: >NC_003310.1-cand-40960-41039
  source 1..80: mol_type = other DNA
gtgccaaaatgatatacagtcttaaataattacgcaatatctcaatagtttcataattgttagctgttttcatcaaggtt

SEQ ID NO: 9278 - DNA, 80 bp, synthetic construct
  misc_feature 1..80: note = Synthetic: >NC_003310.1-cand-41040-41119
  source 1..80: mol_type = other DNA
tgtatcctgtttaacatgatggcgttctataacgtctctattttctattttttaattttttaaatttttaacgatttact

SEQ ID NO: 9279 - DNA, 80 bp, synthetic construct
  misc_feature 1..80: note = Synthetic: >NC_003310.1-cand-41200-41279
  source 1..80: mol_type = other DNA
atccgtgattttggtaatgggttccgtcgaaatttgccgaagtgatatgaacatattcgtcgtcgactatcaacaatttt

SEQ ID NO: 9280 - DNA, 80 bp, synthetic construct
  misc_feature 1..80: note = Synthetic: >NC_003310.1-cand-41440-41519
  source 1..80: mol_type = other DNA
agttgtaaatgtcaggccaatagtagctactaccgtcgacacgtgtagtgggaactatggccaaatgttcaatatctata

SEQ ID NO: 9281 - DNA, 80 bp, synthetic construct
  misc_feature 1..80: note = Synthetic: >NC_003310.1-cand-41520-41599
  source 1..80: mol_type = other DNA
ctagtcttagccgacttgagtttatcaataactacatcagtgtctagatctctagaatatcccaataggtgttctggaga

SEQ ID NO: 9282 - DNA, 80 bp, synthetic construct
  misc_feature 1..80: note = Synthetic: >NC_003310.1-cand-41680-41759
  source 1..80: mol_type = other DNA
aattcaaccatgaattttttgcgctattaaaggctttaaaagtatcaaatcttctacgaagatctgtggccagcggagga

SEQ ID NO: 9283 - DNA, 80 bp, synthetic construct
  misc_feature 1..80: note = Synthetic: >NC_003310.1-cand-41830-41909
  source 1..80: mol_type = other DNA
aacatctttcatcatcagacacccaaaaacaaccgagtagtagtcccacattattttttttatctatattaacggttata

SEQ ID NO: 9284 - DNA, 80 bp, synthetic construct
  misc_feature 1..80: note = Synthetic: >NC_003310.1-cand-41930-42009
  source 1..80: mol_type = other DNA
actttgtagctctcccagatttcttttccctcgttcatctagcaaaactattattttaatccctttttcagatacctctt

SEQ ID NO: 9285 - DNA, 80 bp, synthetic construct
  misc_feature 1..80: note = Synthetic: >NC_003310.1-cand-41990-42069
  source 1..80: mol_type = other DNA
ccctttttcagatacctcttttagtttatcaaaaataagcgctcccctagtagtactcagaggattacaacaaaaagatg

SEQ ID NO: 9286 - DNA, 80 bp, synthetic construct
  misc_feature 1..80: note = Synthetic: >NC_003310.1-cand-42070-42149
  source 1..80: mol_type = other DNA
ctatgtatatatatttcttagctagagtgataatttcgttaaaacattcaaatgttgtcaaatgatcggatctaaaatcc

SEQ ID NO: 9287 - DNA, 80 bp, synthetic construct
  misc_feature 1..80: note = Synthetic: >NC_003310.1-cand-42150-42229
  source 1..80: mol_type = other DNA
atattttctggtagtgtttctaccagcctacattttgctcccgcaggtaccgatacaaatggccacatttagttaacata

SEQ ID NO: 9288 - DNA, 80 bp, synthetic construct
  misc_feature 1..80: note = Synthetic: >NC_003310.1-cand-44150-44229
  source 1..80: mol_type = other DNA
gtccccgtccagatgcgagagaatgaataaccctggaaaacaagtcccgtttatgagaacggacatgttacaaaatatgt

SEQ ID NO: 9289 - DNA, 80 bp, synthetic construct
  misc_feature 1..80: note = Synthetic: >NC_003310.1-cand-44230-44309
  source 1..80: mol_type = other DNA
ttgctgctaatcgcgacaacgtaacgtcaagacttttgaactaaaatacaattatatctttttcgatattaataaatccg

SEQ ID NO: 9290 - DNA, 80 bp, synthetic construct
  misc_feature 1..80: note = Synthetic: >NC_003310.1-cand-44710-44789
  source 1..80: mol_type = other DNA
tcatcggcatattattacgcgtaccatcaaagactataccatgtgtatatctaacgtattctagcatagttgccatacgt

SEQ ID NO: 9291 - DNA, 80 bp, synthetic construct
  misc_feature 1..80: note = Synthetic: >NC_003310.1-cand-44870-44949
  source 1..80: mol_type = other DNA
aaacgtcggatccactatatagatattatctataaagattttaggaactatgttcatggtatcctggcgaatattaaaac

SEQ ID NO: 9292 - DNA, 80 bp, synthetic construct
  misc_feature 1..80: note = Synthetic: >NC_003310.1-cand-45430-45509
  source 1..80: mol_type = other DNA
atttacctatattatatgtttgagtttgtttagaaaagtagctaagtatacgatcttttatttctgatgccgatgtatca

SEQ ID NO: 9293 - DNA, 80 bp, synthetic construct
  misc_feature 1..80: note = Synthetic: >NC_003310.1-cand-45590-45669
  source 1..80: mol_type = other DNA
atttctagcttgtaattttaacatatgatattcgttcacactaggtactctgcctaaataggtttctataatctttaatg

SEQ ID NO: 9294 - DNA, 80 bp, synthetic construct
  misc_feature 1..80: note = Synthetic: >NC_003310.1-cand-46160-46239
  source 1..80: mol_type = other DNA
cttccctctatcatgttcactactggtgtccacaatgataaatatctagagggaatataatatagtccatatgatgccaa

SEQ ID NO: 9295 - DNA, 80 bp, synthetic construct
  misc_feature 1..80: note = Synthetic: >NC_003310.1-cand-46400-46479
  source 1..80: mol_type = other DNA
cttttaaatgcagcgttctccaacgagtcaaagcataatactctgttggttttcttatattcaatattacgattttcttc

SEQ ID NO: 9296 - DNA, 80 bp, synthetic construct
  misc_feature 1..80: note = Synthetic: >NC_003310.1-cand-46640-46719
  source 1..80: mol_type = other DNA
aaccgtttcatcatcattggacagaatccatatttcttaatgtaaagagtgatcaaatcattgtgtttattgtaccatct

SEQ ID NO: 9297 - DNA, 80 bp, synthetic construct
  misc_feature 1..80: note = Synthetic: >NC_003310.1-cand-46960-47039
  source 1..80: mol_type = other DNA
atctatataattattttgtaagatgatattaactatgtgatctatataagtagtgtaataattcatgtatttcgatatat

SEQ ID NO: 9298 - DNA, 80 bp, synthetic construct
  misc_feature 1..80: note = Synthetic: >NC_003310.1-cand-47200-47279
  source 1..80: mol_type = other DNA
atagtttttgacactattttccgtcaattgattcttattcactatgtctaaaaaccggatagcgtccctaggacgaacta

SEQ ID NO: 9299 - DNA, 80 bp, synthetic construct
  misc_feature 1..80: note = Synthetic: >NC_003310.1-cand-47280-47359
  source 1..80: mol_type = other DNA
ctgccattaatatctctattatagcttctggacataaatcatctattataccagaattaatgggaactattccgtatcta

SEQ ID NO: 9300 - DNA, 80 bp, synthetic construct
  misc_feature 1..80: note = Synthetic: >NC_003310.1-cand-47440-47519
  source 1..80: mol_type = other DNA
gatagtgactatttcattctctgaaaattggtaactcattctatacacgctttccttgttgataaaggatagtatatact

SEQ ID NO: 9301 - DNA, 80 bp, synthetic construct
  misc_feature 1..80: note = Synthetic: >NC_003310.1-cand-47520-47599
  source 1..80: mol_type = other DNA
cgatggaatttgtaccaacaaactgttctcttatgaatcgtatatcatcatctgaaatgatcatgtaaggcatacattta

SEQ ID NO: 9302 - DNA, 80 bp, synthetic construct
  misc_feature 1..80: note = Synthetic: >NC_003310.1-cand-47770-47849
  source 1..80: mol_type = other DNA
attataaaggactttgggtatataagtgggatgaaatcctattttaattaatgcgatagccttgtcctcgtgcagatatc

SEQ ID NO: 9303 - DNA, 80 bp, synthetic construct
  misc_feature 1..80: note = Synthetic: >NC_003310.1-cand-47930-48009
  source 1..80: mol_type = other DNA
tactagtcgcgttaatagtactaaaatttgtattttttaatctatctcaataaaaaattaatatgtatgattcaatgtat

SEQ ID NO: 9304 - DNA, 80 bp, synthetic construct
  misc_feature 1..80: note = Synthetic: >NC_003310.1-cand-52100-52179
  source 1..80: mol_type = other DNA
cttggataaaagcatccatctaaccaagactgataagaaatatatacttcaattgataaggcacggtagatcatagaaca

SEQ ID NO: 9305 - DNA, 80 bp, synthetic construct
  misc_feature 1..80: note = Synthetic: >NC_003310.1-cand-52180-52259
  source 1..80: mol_type = other DNA
aaccaaatatattattaataatttgtatatacatagatataattatcatatattaaaaaataacacatttttgataaatg

SEQ ID NO: 9306 - DNA, 80 bp, synthetic construct
  misc_feature 1..80: note = Synthetic: >NC_003310.1-cand-52260-52339
  source 1..80: mol_type = other DNA
gaaactgttgcaacaattcagactcccaccaaattaatgaataaagaaaatgcagaaatgattttggaaaaaattgttaa

SEQ ID NO: 9307 - DNA, 80 bp, synthetic construct
  misc_feature 1..80: note = Synthetic: >NC_003310.1-cand-52340-52419
  source 1..80: mol_type = other DNA
tcatatagctatgtatattagtgacgaatcaatatattcagaaaataatcctgaatatattgattttcgtaacagatacg

SEQ ID NO: 9308 - DNA, 80 bp, synthetic construct
  misc_feature 1..80: note = Synthetic: >NC_003310.1-cand-52420-52499
  source 1..80: mol_type = other DNA
gagactatagatctctcattataaaaagtgatcacgagtttgtaaagctatgtaaagatcatgcagagaaaagttctcca

SEQ ID NO: 9309 - DNA, 80 bp, synthetic construct
  misc_feature 1..80: note = Synthetic: >NC_003310.1-cand-52500-52579
  source 1..80: mol_type = other DNA
gaaacgcaacaaatgattatcaaacacatatacgaacaatatcttattccagtatctgaagtactgttaaaacctataat

SEQ ID NO: 9310 - DNA, 80 bp, synthetic construct
  misc_feature 1..80: note = Synthetic: >NC_003310.1-cand-52660-52739
  source 1..80: mol_type = other DNA
acaatctctacacatggaactcatgtagcataggcaatgtaacgcgtctgttttatacattttttagttatctgatgaaa

SEQ ID NO: 9311 - DNA, 80 bp, synthetic construct
  misc_feature 1..80: note = Synthetic: >NC_003310.1-cand-52740-52819
  source 1..80: mol_type = other DNA
gataaactaaatatataagtataatcccattaatactttaacctgatgtattattacctgcatcttattagaatattaac

SEQ ID NO: 9312 - DNA, 80 bp, synthetic construct
  misc_feature 1..80: note = Synthetic: >NC_003310.1-cand-52850-52929
  source 1..80: mol_type = other DNA
aaatattatggcagcaaccgttccgcgttttgacgatgtgtacaaaaatgcacaaagaagaattctagatcaagaaacat

SEQ ID NO: 9313 - DNA, 80 bp, synthetic construct
  misc_feature 1..80: note = Synthetic: >NC_003310.1-cand-52940-53019
  source 1..80: mol_type = other DNA
aggtctaagtagaccgttaatgaaaaacacatatctatttgataattacgcgtatggatggataccagaaactgcaattt

SEQ ID NO: 9314 - DNA, 80 bp, synthetic construct
  misc_feature 1..80: note = Synthetic: >NC_003310.1-cand-53020-53099
  source 1..80: mol_type = other DNA
ggagtagtagatacgcaaacctagatgctagtgactattatcccatttcgttgggattacttaaaaagtttgaatttctc

SEQ ID NO: 9315 - DNA, 80 bp, synthetic construct
  misc_feature 1..80: note = Synthetic: >NC_003310.1-cand-53100-53179
  source 1..80: mol_type = other DNA
atgtctctatataaaggtcctattcccgtatatgaagaaaaagtaaatactgaattcattgctaatggatctttctccgg

SEQ ID NO: 9316 - DNA, 80 bp, synthetic construct
  misc_feature 1..80: note = Synthetic: >NC_003310.1-cand-53180-53259
  source 1..80: mol_type = other DNA
tagatacgtatcatatcttagaaagttttctgcccttccaacaaacgagtttattagttttttattattgacctccatcc

SEQ ID NO: 9317 - DNA, 80 bp, synthetic construct
  misc_feature 1..80: note = Synthetic: >NC_003310.1-cand-53660-53739
  source 1..80: mol_type = other DNA
cgacgtacaactgttgtaaattatttttatgcttcgtaaaatgtaggtcttgaaccaaacattctttgaaaaaatgagat

SEQ ID NO: 9318 - DNA, 80 bp, synthetic construct
  misc_feature 1..80: note = Synthetic: >NC_003310.1-cand-53900-53979
  source 1..80: mol_type = other DNA
gctggacagatatatgcaaaataatatcgttctccaagttctatagtctctggattgtttttattatattcagtaaccaa

SEQ ID NO: 9319 - DNA, 80 bp, synthetic construct
  misc_feature 1..80: note = Synthetic: >NC_003310.1-cand-54290-54369
  source 1..80: mol_type = other DNA
tatttcttcttcgattgcataatcaaattcttatataccgcctcaaactctattttaaaattatcaaacaatactctact

SEQ ID NO: 9320 - DNA, 80 bp, synthetic construct
  misc_feature 1..80: note = Synthetic: >NC_003468.2-cand-4400-4479
  source 1..80: mol_type = other DNA
gtacattttctaaagagtatgcttggaaagactttttaaatgaagtaaggtgtgaggtcttaacaacaagacatgtacat

SEQ ID NO: 9321 - DNA, 80 bp, synthetic construct
  misc_feature 1..80: note = Synthetic: >NC_003468.2-cand-4480-4559
  source 1..80: mol_type = other DNA
aggcctaaaattgctaggacattcactgttagagaaaaggaccaggctatacaaaatccaataaattcggtgattggcta

SEQ ID NO: 9322 - DNA, 80 bp, synthetic construct
  misc_feature 1..80: note = Synthetic: >NC_003468.2-cand-4560-4639
  source 1..80: mol_type = other DNA
taagtatgctcttacagtggatgaagtcagtgatgttcttgatagtgcattcttcccagagtctctatctgcagacttac

SEQ ID NO: 9323 - DNA, 80 bp, synthetic construct
  misc_feature 1..80: note = Synthetic: >NC_003468.2-cand-4640-4719
  source 1..80: mol_type = other DNA
aggttatgaaagatggagtttacagagaattaggacttgatataagttctcctgaagtcctaaaacgcatagcaccacta

SEQ ID NO: 9324 - DNA, 80 bp, synthetic construct
  misc_feature 1..80: note = Synthetic: >NC_003468.2-cand-4720-4799
  source 1..80: mol_type = other DNA
ttatataaggcaggaaggtcacgtgttgttattgtggaaggaaatgtagaagggacagctgagtcaatctgtagttattg

SEQ ID NO: 9325 - DNA, 80 bp, synthetic construct
  misc_feature 1..80: note = Synthetic: >NC_003468.2-cand-4800-4879
  source 1..80: mol_type = other DNA
gctcaagacaatgtcactgattaaaacaatcagagtaagacctaagaaggaggtactgaaagctatgtctttatatagtg

SEQ ID NO: 9326 - DNA, 80 bp, synthetic construct
  misc_feature 1..80: note = Synthetic: >NC_003468.2-cand-4880-4959
  source 1..80: mol_type = other DNA
ttaaagaaaatattggattgcaggatgatattgcagcaactcgactatgcatagaaatctggagatggtgtaaggcaaat

SEQ ID NO: 9327 - DNA, 80 bp, synthetic construct
  misc_feature 1..80: note = Synthetic: >NC_003468.2-cand-4960-5039
  source 1..80: mol_type = other DNA
gaacaggatgttaaagaatggctaacatctctgtactttgaaaaacagacattgatggattgggtagaaaggtttagaag

SEQ ID NO: 9328 - DNA, 80 bp, synthetic construct
  misc_feature 1..80: note = Synthetic: >NC_003468.2-cand-5040-5119
  source 1..80: mol_type = other DNA
gaaaggagttgttcctattgatcctgaaatacaatgtattggcctactcttatatgatgtattaggttataaaagtgtgt

SEQ ID NO: 9329 - DNA, 80 bp, synthetic construct
  misc_feature 1..80: note = Synthetic: >NC_003468.2-cand-5120-5199
  source 1..80: mol_type = other DNA
tacaaatgcaagcaaaccgaagagcctattcaggtaagcaatatgatgcatactgtgtgcaaacatataacgaggaaaca

SEQ ID NO: 9330 - DNA, 80 bp, synthetic construct
  misc_feature 1..80: note = Synthetic: >NC_003468.2-cand-5200-5279
  source 1..80: mol_type = other DNA
aaactatatgaaggtgaccttcgtgttacttttaattttggtttagattgtgcaaggttagaagttttttgggataaaaa

SEQ ID NO: 9331 - DNA, 80 bp, synthetic construct
  misc_feature 1..80: note = Synthetic: >NC_003468.2-cand-5280-5359
  source 1..80: mol_type = other DNA
agagtatatcttagagacatctatcacccaacgacatgtgttgcggttactgatggaagaagtgtcacaagaattaatta

SEQ ID NO: 9332 - DNA, 80 bp, synthetic construct
  misc_feature 1..80: note = Synthetic: >NC_003468.2-cand-5360-5439
  source 1..80: mol_type = other DNA
gatgtggaatgagattcaaaacagagcaagtcaatcaaactcggagcttagtgttattcaaaacagaggctggttttgaa

SEQ ID NO: 9333 - DNA, 80 bp, synthetic construct
  misc_feature 1..80: note = Synthetic: >NC_003468.2-cand-5450-5529
  source 1..80: mol_type = other DNA
ctaatgtgccatgtattgtatataaacactgtgtcttgagaactgggcttcgtacgaaacagccaattaataaagagttc

SEQ ID NO: 9334 - DNA, 80 bp, synthetic construct
  misc_feature 1..80: note = Synthetic: >NC_003468.2-cand-5520-5599
  source 1..80: mol_type = other DNA
taaagagttcatgataaatgtacaaagtgatggtttccgtgcaatagcacagatggatattgagagtccacggttcttgt

SEQ ID NO: 9335 - DNA, 80 bp, synthetic construct
  misc_feature 1..80: note = Synthetic: >NC_003468.2-cand-5600-5679
  source 1..80: mol_type = other DNA
tagcacatgcatatcatacactgcgtgatattagatatcaagcagtgcaggcagtagggaatgtatggtttaaaacagaa

SEQ ID NO: 9336 - DNA, 80 bp, synthetic construct
  misc_feature 1..80: note = Synthetic: >NC_005217.1-cand-480-559
  source 1..80: mol_type = other DNA
agcttataagatcacatttgatgttgtggctgtaaagacggatggttcaaacatatcaactcaatggcctagtcggcgta

SEQ ID NO: 9337 - DNA, 80 bp, synthetic construct
  misc_feature 1..80: note = Synthetic: >NC_005217.1-cand-560-639
  source 1..80: mol_type = other DNA
atgatggtgttgttcaacatatgaggcttgttcaggctgatattaattatgttagagaacatctcattaagcctgatgaa

SEQ ID NO: 9338 - DNA, 80 bp, synthetic construct
  misc_feature 1..80: note = Synthetic: >NC_005217.1-cand-640-719
  source 1..80: mol_type = other DNA
cgtgcatcattagaagccatgtttaatcttaagtttcatgtaggaggccctaaactgaggtattttaatataccagatta

SEQ ID NO: 9339 - DNA, 80 bp, synthetic construct
  misc_feature 1..80: note = Synthetic: >NC_005217.1-cand-720-799
  source 1..80: mol_type = other DNA
caagcctcagtcattatgtcaacctgagattacgaatttaattcaatattgcaagcactggctcacagaagatcatgatt

SEQ ID NO: 9340 - DNA, 80 bp, synthetic construct
  misc_feature 1..80: note = Synthetic: >NC_005217.1-cand-810-889
  source 1..80: mol_type = other DNA
ggaagtcacgggtaataatgttatgaactcatttgagaataatgaaagtgtatatatgtctagatacagggagtctcgta

SEQ ID NO: 9341 - DNA, 80 bp, synthetic construct
  misc_feature 1..80: note = Synthetic: >NC_005217.1-cand-890-969
  source 1..80: mol_type = other DNA
aaccacgtaatttcttattaattcaaggttctattcaaggtccttatttaccatcaactattagctctgaccagtgtgac

SEQ ID NO: 9342 - DNA, 80 bp, synthetic construct
  misc_feature 1..80: note = Synthetic: >NC_005217.1-cand-970-1049
  source 1..80: mol_type = other DNA
acaagaattggctgtttggaggtgttaaaagtacatccagagacaccagtacaagcaattgcagtggatatggcatataa

SEQ ID NO: 9343 - DNA, 80 bp, synthetic construct
  misc_feature 1..80: note = Synthetic: >NC_005217.1-cand-1050-1129
  source 1..80: mol_type = other DNA
gtatatggagttaaatagagatgagatcatcaactactacaatcctagagttcattttcaagcaactcagtcagtgaagg

SEQ ID NO: 9344 - DNA, 80 bp, synthetic construct
  misc_feature 1..80: note = Synthetic: >NC_005217.1-cand-1130-1209
  source 1..80: mol_type = other DNA
aaccaggtacattcaaattaggactttctcaactaaatccgatgtctaaatcaatattggaccaggttgggaaacacaag

SEQ ID NO: 9345 - DNA, 80 bp, synthetic construct
  misc_feature 1..80: note = Synthetic: >NC_005217.1-cand-1210-1289
  source 1..80: mol_type = other DNA
tcagaaaagggcctttttggtgaaccattagagagtataaacatatcaagccagattcaacagaatgagtgttcacgtat

SEQ ID NO: 9346 - DNA, 80 bp, synthetic construct
  misc_feature 1..80: note = Synthetic: >NC_005217.1-cand-1290-1369
  source 1..80: mol_type = other DNA
tatagaatcaatactttcaaatctcgaaataaatgttggtgaggtaacaatgagtctagctaatcctcgtaaaactacag

SEQ ID NO: 9347 - DNA, 80 bp, synthetic construct
  misc_feature 1..80: note = Synthetic: >NC_005217.1-cand-1370-1449
  source 1..80: mol_type = other DNA
gtgtagatgagttgttaggtaagttctatgagaatgaactgtctaagtatttgatcagcatattacgaaaaactgcagcc

SEQ ID NO: 9348 - DNA, 80 bp, synthetic construct
  misc_feature 1..80: note = Synthetic: >NC_005217.1-cand-1450-1529
  source 1..80: mol_type = other DNA
tggcatattgggcatttaataagagatataacagaaagtctcattgctcatgcaggtttaaagcggtctaaatactggtc

SEQ ID NO: 9349 - DNA, 80 bp, synthetic construct
  misc_feature 1..80: note = Synthetic: >NC_005217.1-cand-1560-1639
  source 1..80: mol_type = other DNA
attgttcatccttccttcaaagtctttagaggttgtcggatcttatattcggtatttcacagtattcaaagatggtatag

SEQ ID NO: 9350 - DNA, 80 bp, synthetic construct
  misc_feature 1..80: note = Synthetic: >NC_005217.1-cand-1610-1689
  source 1..80: mol_type = other DNA
ggtatttcacagtattcaaagatggtatagggcttatagatgaggaaaatttagactcaaaggtagacatcgacggtgtg

SEQ ID NO: 9351 - DNA, 80 bp, synthetic construct
  misc_feature 1..80: note = Synthetic: >NC_005217.1-cand-1690-1769
  source 1..80: mol_type = other DNA
cagtggtgtttttcaaaagtaatgagtattgacttaaacaggttgttagctttaaatattgcctttgaaaaggcacttct

SEQ ID NO: 9352 - DNA, 80 bp, synthetic construct
  misc_feature 1..80: note = Synthetic: >NC_005831.2-cand-26560-26639
  source 1..80: mol_type = other DNA
aataactcatctcgtgctagcagtcgttcttcaactcgtaacaactcacgagactcttctcgtagcacttcaagacaaca

SEQ ID NO: 9353 - DNA, 80 bp, synthetic construct
  misc_feature 1..80: note = Synthetic: >NC_005831.2-cand-26640-26719
  source 1..80: mol_type = other DNA
gtctcgcactcgttctgattctaaccagtcttcttcagatcttgttgctgctgttactttggctttaaagaacttaggtt

SEQ ID NO: 9354 - DNA, 80 bp, synthetic construct
  misc_feature 1..80: note = Synthetic: >NC_005831.2-cand-26720-26799
  source 1..80: mol_type = other DNA
ttgataaccagtcgaagtcacctagttcttctggtacttccactcctaagaaacctaataagcctctttctcaacccagg

SEQ ID NO: 9355 - DNA, 80 bp, synthetic construct
  misc_feature 1..80: note = Synthetic: >NC_005831.2-cand-26800-26879
  source 1..80: mol_type = other DNA
gctgataagccttctcagttgaagaaacctcgttggaagcgtgttcctaccagagaggaaaatgttattcagtgctttgg

SEQ ID NO: 9356 - DNA, 80 bp, synthetic construct
  misc_feature 1..80: note = Synthetic: >NC_005831.2-cand-26910-26989
  source 1..80: mol_type = other DNA
ttcagatcttgttcagaatggtgttgatgccaaaggttttccacagcttgctgaattgattcctaatcaggctgcgttat

SEQ ID NO: 9357 - DNA, 80 bp, synthetic construct
  misc_feature 1..80: note = Synthetic: >NC_005831.2-cand-26960-27039
  source 1..80: mol_type = other DNA
ctgaattgattcctaatcaggctgcgttattctttgatagtgaggttagcactgatgaagtgggtgataatgttcagatt

SEQ ID NO: 9358 - DNA, 80 bp, synthetic construct
  misc_feature 1..80: note = Synthetic: >NC_005831.2-cand-27040-27119
  source 1..80: mol_type = other DNA
acctacacctacaaaatgcttgtagctaaggataataagaaccttcctaagttcattgagcagattagtgcttttactaa

SEQ ID NO: 9359 - DNA, 80 bp, synthetic construct
  misc_feature 1..80: note = Synthetic: >NC_005831.2-cand-27120-27199
  source 1..80: mol_type = other DNA
acccagttctatcaaagaaatgcagtcacaatcatctcatgttgctcagaacacagtacttaatgcttctattccagaat

SEQ ID NO: 9360 - DNA, 80 bp, synthetic construct
  misc_feature 1..80: note = Synthetic: >NC_005831.2-cand-27200-27279
  source 1..80: mol_type = other DNA
ctaaaccattggctgatgatgattcagccattatagaaattgtcaacgaggttttgcattaaattgttttgtaattccag

SEQ ID NO: 9361 - DNA, 80 bp, synthetic construct
  misc_feature 1..80: note = Synthetic: >NC_005831.2-cand-27280-27359
  source 1..80: mol_type = other DNA
ttgaatgtttattattattagttgcaaccccatgcgtttagcgcatgataagggtttagtcttacacacaatggtaggcc

SEQ ID NO: 9362 - DNA, 80 bp, synthetic construct
  misc_feature 1..80: note = Synthetic: >NC_005831.2-cand-27360-27439
  source 1..80: mol_type = other DNA
agtgatagtaaagtgtaagtaatttgctatcatattaacatgtctagaggaaagtcagaactttttctgtttgtgttgtt

SEQ ID NO: 9363 - DNA, 80 bp, synthetic construct
  misc_feature 1..80: note = Synthetic: >NC_005831.2-cand-27440-27519
  source 1..80: mol_type = other DNA
ggagtacttaaagatcgcataggcgcgccaacaatggaagagccaacaacatatctaaaaatgttttgtctggtacttgt

SEQ ID NO: 9364 - DNA, 80 bp, synthetic construct
  misc_feature 1..80: note = Synthetic: >NC_006213.1-cand-0-79
  source 1..80: mol_type = other DNA
tgagcgatttgcgtgcgtgcatcccgcttcactgatctcttgttagatctttttgtaatctaaactttataaaaacatcc

SEQ ID NO: 9365 - DNA, 80 bp, synthetic construct
  misc_feature 1..80: note = Synthetic: >NC_006213.1-cand-80-159
  source 1..80: mol_type = other DNA
actccctgtaatctatgcttgtgggcgtagatttttcatagtggtgtttatattcatttctgctgttaacagctttcagc

SEQ ID NO: 9366 - DNA, 80 bp, synthetic construct
  misc_feature 1..80: note = Synthetic: >NC_006213.1-cand-160-239
  source 1..80: mol_type = other DNA
cagggacgtgttgtatcctaggcagtggcccgcccataggtcacaatgtcgaagatcaacaaatacggtctcgaactaca

SEQ ID NO: 9367 - DNA, 80 bp, synthetic construct
  misc_feature 1..80: note = Synthetic: >NC_006213.1-cand-220-299
  source 1..80: mol_type = other DNA
aaatacggtctcgaactacactgggctccagaatttccatggatgtttgaggacgcagaggagaagttggataaccctag

SEQ ID NO: 9368 - DNA, 80 bp, synthetic construct
  misc_feature 1..80: note = Synthetic: >NC_007549.1-cand-2330-2409
  source 1..80: mol_type = other DNA
ggcatttgataattcccctacatctcaacatggagttggtaaaggtgcagtgcttcatccagttccacaaaattttggca

SEQ ID NO: 9369 - DNA, 80 bp, synthetic construct
  misc_feature 1..80: note = Synthetic: >NC_007549.1-cand-2410-2489
  source 1..80: mol_type = other DNA
gatcttctcaattcgtgagaagagataacatattactgcaacgtccagctggaattcaacaatttacaatagaagactta

SEQ ID NO: 9370 - DNA, 80 bp, synthetic construct
  misc_feature 1..80: note = Synthetic: >NC_007549.1-cand-2490-2569
  source 1..80: mol_type = other DNA
aaacaaggaagatattttcaaggtcttatggcacaaattagagccagacaaccgattatagttaatggccctattccttt

SEQ ID NO: 9371 - DNA, 80 bp, synthetic construct
  misc_feature 1..80: note = Synthetic: >NC_007549.1-cand-2570-2649
  source 1..80: mol_type = other DNA
aagaatttctgatgccgctgaaattgaacaagttacattagcatttctaactatgaattcaccatatgatgcatacattg

SEQ ID NO: 9372 - DNA, 80 bp, synthetic construct
  misc_feature 1..80: note = Synthetic: >NC_007549.1-cand-2650-2729
  source 1..80: mol_type = other DNA
atccaagagatttgaaacaacaaaaacttttgactgatagagaagtggatttatttatcgatcaaaatccagctagacca

SEQ ID NO: 9373 - DNA, 80 bp, synthetic construct
  misc_feature 1..80: note = Synthetic: >NC_007549.1-cand-2720-2799
  source 1..80: mol_type = other DNA
agctagaccaaatgatgaatttgataatgtaatggctagaacatcagttttcataattgacgcccctagagctatcgttc

SEQ ID NO: 9374 - DNA, 80 bp, synthetic construct
  misc_feature 1..80: note = Synthetic: >NC_007549.1-cand-2780-2859
  source 1..80: mol_type = other DNA
cgcccctagagctatcgttccaattaatcctcaaagactaaattttccatatcatgatattatggtaactgattctgtga

SEQ ID NO: 9375 - DNA, 80 bp, synthetic construct
  misc_feature 1..80: note = Synthetic: >NC_007549.1-cand-2870-2949
  source 1..80: mol_type = other DNA
cgaatttacagttgcactgactccagatctacaattatttaacggtttactagtatttgagcaataaatcacgatctagc

SEQ ID NO: 9376 - DNA, 80 bp, synthetic construct
  misc_feature 1..80: note = Synthetic: >NC_007550.1-cand-0-79
  source 1..80: mol_type = other DNA
cttaagatgtctctcagaagtttgttgattacaactgaggcggttggagagaccactcaaacgagtgatcatcaaacatc

SEQ ID NO: 9377 - DNA, 80 bp, synthetic construct
  misc_feature 1..80: note = Synthetic: >NC_007550.1-cand-80-159
  source 1..80: mol_type = other DNA
atttagcacaagaacgtataacgaaatcaatgatagaccttcactgagaatagaaaaggatggagaaaaagcatactgtt

SEQ ID NO: 9378 - DNA, 80 bp, synthetic construct
  misc_feature 1..80: note = Synthetic: >NC_007550.1-cand-160-239
  source 1..80: mol_type = other DNA
ttaaaaatctagatccagtaagatatgatacacgaatgggagagtacccgtttgattacggtggacaatcaacagaaaat

SEQ ID NO: 9379 - DNA, 80 bp, synthetic construct
  misc_feature 1..80: note = Synthetic: >NC_007550.1-cand-240-319
  source 1..80: mol_type = other DNA
aatcaattacaatttgatcttttcacaaaggatctcaaagcagacactgatattgatttatctgatgatgtgaaagatga

SEQ ID NO: 9380 - DNA, 80 bp, synthetic construct
  misc_feature 1..80: note = Synthetic: >NC_007550.1-cand-320-399
  source 1..80: mol_type = other DNA
tttgaaacggcaaattatggaatactatcaacaaggataccgcgcaatttttttagttagacctcaaaatcaagaacaac

SEQ ID NO: 9381 - DNA, 80 bp, synthetic construct
  misc_feature 1..80: note = Synthetic: >NC_007550.1-cand-400-479
  source 1..80: mol_type = other DNA
attatatagccagttatagttcaactaatttaaacttcacatcacagccaagtatcggtgttaacctatctattttaaat

SEQ ID NO: 9382 - DNA, 80 bp, synthetic construct
  misc_feature 1..80: note = Synthetic: >NC_007550.1-cand-480-559
  source 1..80: mol_type = other DNA
aaaattcaagagaataaattatacatttattccacgcagccacacattccttctgtaggatgtgagatgatagcaaaaat

SEQ ID NO: 9383 - DNA, 80 bp, synthetic construct
  misc_feature 1..80: note = Synthetic: >NC_007550.1-cand-560-639
  source 1..80: mol_type = other DNA
atttagaaccgatatagataatgaaaattcattgattaactattcagcacctgtaacggtaacgatctcagtcacaaaag

SEQ ID NO: 9384 - DNA, 80 bp, synthetic construct
  misc_feature 1..80: note = Synthetic: >NC_007552.1-cand-1130-1209
  source 1..80: mol_type = other DNA
ccaatgcacatgttactataaagatatgaaaacacaatcaactggaccgtcaaagaaaaacgctaaacatcaagctgcag

SEQ ID NO: 9385 - DNA, 80 bp, synthetic construct
  misc_feature 1..80: note = Synthetic: >NC_007552.1-cand-1210-1289
  source 1..80: mol_type = other DNA
aacaaatgttcagacatcaatgtttctaatttccttgttgcagcaaggatgactagtgcattcaatgtatgattagcgac

SEQ ID NO: 9386 - DNA, 80 bp, synthetic construct
  misc_feature 1..80: note = Synthetic: >NC_007553.1-cand-0-79
  source 1..80: mol_type = other DNA
atttcttgctacaagtgactgtgaaggatggatctgattgagacgattaatgcagttgttgaactgcaacatagagttag

SEQ ID NO: 9387 - DNA, 80 bp, synthetic construct
  misc_feature 1..80: note = Synthetic: >NC_007553.1-cand-50-129
  source 1..80: mol_type = other DNA
tgcagttgttgaactgcaacatagagttagaaatttatcaccaaatactaatatatatcaagatgggcagacaacaatta

SEQ ID NO: 9388 - DNA, 80 bp, synthetic construct
  misc_feature 1..80: note = Synthetic: >NC_007553.1-cand-140-219
  source 1..80: mol_type = other DNA
tgctattgcatctagatgtaatggaaaagtgtacaatctaagagaccaaattgctcagttgtctccatttcaagttcata

SEQ ID NO: 9389 - DNA, 80 bp, synthetic construct
  misc_feature 1..80: note = Synthetic: >NC_007553.1-cand-230-309
  source 1..80: mol_type = other DNA
tccaatatcaactattttatcaacagatgatcatgaaacaatgtcggcgggaattgaatcgctgtttgacgttctagccg

SEQ ID NO: 9390 - DNA, 80 bp, synthetic construct
  misc_feature 1..80: note = Synthetic: >NC_007553.1-cand-320-399
  source 1..80: mol_type = other DNA
aactgagggatctagacagaatagagctgttgtcactaagtctattgagcctgaggttctaaaagcagttttagatattg

SEQ ID NO: 9391 - DNA, 80 bp, synthetic construct
  misc_feature 1..80: note = Synthetic: >NC_007553.1-cand-410-489
  source 1..80: mol_type = other DNA
ccagttttcagagaatccttatgcgaatatgttacaagttgacacggcaaaaatggagcagcaactagaacccattgatg

SEQ ID NO: 9392 - DNA, 80 bp, synthetic construct
  misc_feature 1..80: note = Synthetic: >NC_007553.1-cand-500-579
  source 1..80: mol_type = other DNA
aagtcagagaattaatatgttagcagctggaggtgctacaaataatactggtggaggatatcacgcattagttggaagag

SEQ ID NO: 9393 - DNA, 80 bp, synthetic construct
  misc_feature 1..80: note = Synthetic: >NC_007553.1-cand-590-669
  source 1..80: mol_type = other DNA
aacaggtataattacgattatccagggtagaccaggagccgtaacattcaatttaaatatgaaagtgccatgttctggag

SEQ ID NO: 9394 - DNA, 80 bp, synthetic construct
  misc_feature 1..80: note = Synthetic: >NC_007553.1-cand-670-749
  source 1..80: mol_type = other DNA
tactatcactaactttacttccagctccaggtgtgattcaattatcgctaggaaatcagccacctaataacatccccgta

SEQ ID NO: 9395 - DNA, 80 bp, synthetic construct
  misc_feature 1..80: note = Synthetic: >NC_007553.1-cand-760-839
  source 1..80: mol_type = other DNA
gtgttgacgtatcaacggtttttactgaaggagatatcgttataaggtttgaattggcaggaagagttgttggaaacgcc

SEQ ID NO: 9396 - DNA, 80 bp, synthetic construct
  misc_feature 1..80: note = Synthetic: >NC_007553.1-cand-850-929
  source 1..80: mol_type = other DNA
gaacactcaactttcctctatgtgatcgtattagcattacaattgaaccttggaatgccaataaacaaaataatgctaat

SEQ ID NO: 9397 - DNA, 80 bp, synthetic construct
  misc_feature 1..80: note = Synthetic: >NC_007553.1-cand-940-1019
  source 1..80: mol_type = other DNA
ataattggccggctggaacagcacaaagacaaccaactatatcattatttgttaacattattaatgcatcatctttaatt

SEQ ID NO: 9398 - DNA, 80 bp, synthetic construct
  misc_feature 1..80: note = Synthetic: >NC_007553.1-cand-1030-1109
  source 1..80: mol_type = other DNA
ctcattccaaatatttagctggtgcaacatatctgatgggtacaactttttcagaagattcatttattgcgtctccacct

SEQ ID NO: 9399 - DNA, 80 bp, synthetic construct
  misc_feature 1..80: note = Synthetic: >NC_007553.1-cand-1100-1179
  source 1..80: mol_type = other DNA
gtctccacctaatgttgtatggacaatgagctcattgctttcaggtgcgccaccacagtatattcattggacaagaaaaa

SEQ ID NO: 9400 - DNA, 80 bp, synthetic construct
  misc_feature 1..80: note = Synthetic: >NC_011507.2-cand-470-549
  source 1..80: mol_type = other DNA
gaaaatgatgtcgctgaaaaacttaaagtttataaaaggagattagacctattcaccatagtagcctcaacgataaataa

SEQ ID NO: 9401 - DNA, 80 bp, synthetic construct
  misc_feature 1..80: note = Synthetic: >NC_011507.2-cand-550-629
  source 1..80: mol_type = other DNA
atatggcgtaccaaggcataacgcaaagtacagatatgaatacgacgtaatgaaagataaaccatactacttagtgacat

SEQ ID NO: 9402 - DNA, 80 bp, synthetic construct
  misc_feature 1..80: note = Synthetic: >NC_011507.2-cand-630-709
  source 1..80: mol_type = other DNA
gggcaaattcttcaattgaaatgttaatgtcagttttctctcatgacgactatttgatagcaaaagagttaatagtgtta

SEQ ID NO: 9403 - DNA, 80 bp, synthetic construct
  misc_feature 1..80: note = Synthetic: >NC_011507.2-cand-710-789
  source 1..80: mol_type = other DNA
tcatattctaatagatctactctagcaaagttagtgtcatcaccaatgtcgattttggtagccttggtggatattaatgg

SEQ ID NO: 9404 - DNA, 80 bp, synthetic construct
  misc_feature 1..80: note = Synthetic: >NC_011507.2-cand-790-869
  source 1..80: mol_type = other DNA
aacatttattacaaatgaagaattagaattggaattttcaaataaatatgtacgagcaatagttccggatcaaacatttg

SEQ ID NO: 9405 - DNA, 80 bp, synthetic construct
  misc_feature 1..80: note = Synthetic: >NC_011507.2-cand-870-949
  source 1..80: mol_type = other DNA
acgaattaaatcaaatgcttgacaatatgaggaaagctggattagttgacatacctaagatgatacaggactggttagtt

SEQ ID NO: 9406 - DNA, 80 bp, synthetic construct
  misc_feature 1..80: note = Synthetic: >NC_011507.2-cand-950-1029
  source 1..80: mol_type = other DNA
gatcgttctatcgaaaaatttccattaatggctaagatatattcatggtcgtttcatgttggatttagaaagcaaaaaat

SEQ ID NO: 9407 - DNA, 80 bp, synthetic construct
  misc_feature 1..80: note = Synthetic: >NC_011507.2-cand-1030-1109
  source 1..80: mol_type = other DNA
gctagatgctgcgctggatcaattgaaaactgagtatacagaaaatgtggacgatgaaatgtatcgggaatatacaatgt

SEQ ID NO: 9408 - DNA, 80 bp, synthetic construct
  misc_feature 1..80: note = Synthetic: >NC_011507.2-cand-1110-1189
  source 1..80: mol_type = other DNA
taataagagatgaagtagttaaaatgcttgaagaaccagttaaacatgatgatcacttgctacgagattctgagttagct

SEQ ID NO: 9409 - DNA, 80 bp, synthetic construct
  misc_feature 1..80: note = Synthetic: >NC_011507.2-cand-1190-1269
  source 1..80: mol_type = other DNA
ggtttactatcaatgtcgtcagcatcgaatggtgagtcaaggcagctaaagtttggtaggaaaacaattttttcaactaa

SEQ ID NO: 9410 - DNA, 80 bp, synthetic construct
  misc_feature 1..80: note = Synthetic: >NC_011507.2-cand-1270-1349
  source 1..80: mol_type = other DNA
aaagaatatgcatgtcatggatgatatggctaacgaaagatacacgcctggtataataccaccagtgaatgttgataaac

SEQ ID NO: 9411 - DNA, 80 bp, synthetic construct
  misc_feature 1..80: note = Synthetic: >NC_011507.2-cand-1350-1429
  source 1..80: mol_type = other DNA
caataccattaggaagaagagatgttccaggaagaaggactagaataatattcattctgccatacgaatatttcatagca

SEQ ID NO: 9412 - DNA, 80 bp, synthetic construct
  misc_feature 1..80: note = Synthetic: >NC_011507.2-cand-1430-1509
  source 1..80: mol_type = other DNA
cagcacgctgtagttgaaaaaatgttgatttacgcaaaacatacgagagaatacgctgaattttattcacaatcaaacca

SEQ ID NO: 9413 - DNA, 80 bp, synthetic construct
  misc_feature 1..80: note = Synthetic: >NC_011507.2-cand-1510-1589
  source 1..80: mol_type = other DNA
attattgtcatacggcgatgtaacgcgttttttgtctaataacacaatggtcttgtatacggatgtatctcagtgggatt

SEQ ID NO: 9414 - DNA, 80 bp, synthetic construct
  misc_feature 1..80: note = Synthetic: >NC_011507.2-cand-1590-1669
  source 1..80: mol_type = other DNA
cgtctcagcataatacacagccatttaggaaaggaataataatgggactggacatattagctaacatgactaatgatgct

SEQ ID NO: 9415 - DNA, 80 bp, synthetic construct
  misc_feature 1..80: note = Synthetic: >NC_011507.2-cand-1670-1749
  source 1..80: mol_type = other DNA
aaagttcttcagacattaaatttatacaaacaaacacaaatcaatctcatggattcatacgttcaaataccagatggcaa

SEQ ID NO: 9416 - DNA, 80 bp, synthetic construct
  misc_feature 1..80: note = Synthetic: >NC_011509.2-cand-1260-1339
  source 1..80: mol_type = other DNA
tatcaagctgtttgaactctgtaagtaaggatacgtatacgcattcgctacacagagtaatcactcagatggtatagtga

SEQ ID NO: 9417 - DNA, 80 bp, synthetic construct
  misc_feature 1..80: note = Synthetic: >NC_011510.2-cand-10-89
  source 1..80: mol_type = other DNA
ttcgctcatttatagacaattgctcacgaattcttatacagtagatttatccgatgagatacaagagattggatcaacta

SEQ ID NO: 9418 - DNA, 80 bp, synthetic construct
  misc_feature 1..80: note = Synthetic: >NC_011510.2-cand-70-149
  source 1..80: mol_type = other DNA
acaagagattggatcaactaaatcacaaaatgtcacaattaatcctggaccatttgcgcaaacaggttatgctccagtta

SEQ ID NO: 9419 - DNA, 80 bp, synthetic construct
  misc_feature 1..80: note = Synthetic: >NC_011510.2-cand-170-249
  source 1..80: mol_type = other DNA
aatgattctacgacagttgaaccattgctggatgggccttatcaaccaacgacattcaatccaccagtcgattattggat

SEQ ID NO: 9420 - DNA, 80 bp, synthetic construct
  misc_feature 1..80: note = Synthetic: >NC_011510.2-cand-250-329
  source 1..80: mol_type = other DNA
gttactggctccaacgacacctggcgtaattgttgaaggtacaaataatacagatagatggttagccacaattttaatcg

SEQ ID NO: 9421 - DNA, 80 bp, synthetic construct
  misc_feature 1..80: note = Synthetic: >NC_011510.2-cand-330-409
  source 1..80: mol_type = other DNA
agccaaatgttcagtctgaaaatagaacttacactatatttggtattcaagaacaattaacggtatccaatacttcacaa

SEQ ID NO: 9422 - DNA, 80 bp, synthetic construct
  misc_feature 1..80: note = Synthetic: >NC_011510.2-cand-410-489
  source 1..80: mol_type = other DNA
gaccagtggaaatttattgatgtcgtaaaaacaactgcaaatggaagtataggacaatatggaccattactatccagtcc

SEQ ID NO: 9423 - DNA, 80 bp, synthetic construct
  misc_feature 1..80: note = Synthetic: >NC_011510.2-cand-470-549
  source 1..80: mol_type = other DNA
ggaccattactatccagtccgaaattatatgcagttatgaagcataatgaaaaattatatacatatgaaggacagacacc

SEQ ID NO: 9424 - DNA, 80 bp, synthetic construct
  misc_feature 1..80: note = Synthetic: >NC_011510.2-cand-540-619
  source 1..80: mol_type = other DNA
gacagacacctaacgctaggacagcacattattcaacaacgaattatgattctgttaatatgactgctttttgtgacttt

SEQ ID NO: 9425 - DNA, 80 bp, synthetic construct
  misc_feature 1..80: note = Synthetic: >NC_011510.2-cand-630-709
  source 1..80: mol_type = other DNA
ctagatctgaagagtctaaatgtacggaatacattaataatggattaccaccaatacaaaatactagaaatgttgtacca

SEQ ID NO: 9426 - DNA, 80 bp, synthetic construct
  misc_feature 1..80: note = Synthetic: >NC_011510.2-cand-710-789
  source 1..80: mol_type = other DNA
ttatcgttgactgctagagatgtaatacactatagagctcaagctaatgaagatattgtgatatccaagacatcattgtg

SEQ ID NO: 9427 - DNA, 80 bp, synthetic construct
  misc_feature 1..80: note = Synthetic: >NC_011510.2-cand-790-869
  source 1..80: mol_type = other DNA
gaaagaaatgcaatataatagagatataactattagatttaaatttgcaaatacaattataaaatcaggagggctgggat

SEQ ID NO: 9428 - DNA, 80 bp, synthetic construct
  misc_feature 1..80: note = Synthetic: >NC_011510.2-cand-860-939
  source 1..80: mol_type = other DNA
gggctgggatataagtggtcagaaatatcatttaagccagcgaattatcaatacacatatactcgtgatggtgaagaagt

SEQ ID NO: 9429 - DNA, 80 bp, synthetic construct
  misc_feature 1..80: note = Synthetic: >NC_011510.2-cand-940-1019
  source 1..80: mol_type = other DNA
taccgcacatactacttgttcagtgaatggcgttaatgacttcagttttaatggaggatatttaccaactgattttgttg

SEQ ID NO: 9430 - DNA, 80 bp, synthetic construct
  misc_feature 1..80: note = Synthetic: >NC_011510.2-cand-1030-1109
  source 1..80: mol_type = other DNA
tgaagtaattaaagagaattcatacgtctatatcgattactgggatgattcacaagcatttcgtaacgtggtgtatgtcc

SEQ ID NO: 9431 - DNA, 80 bp, synthetic construct
  misc_feature 1..80: note = Synthetic: >NC_011510.2-cand-1110-1189
  source 1..80: mol_type = other DNA
gatcgttagcagcaaacttgaattcagttatgtgtactggaggcagctataattttagtctaccagttggacaatggcct

SEQ ID NO: 9432 - DNA, 80 bp, synthetic construct
  misc_feature 1..80: note = Synthetic: >NC_012532.1-cand-2910-2989
  source 1..80: mol_type = other DNA
cacagagcatggaatagttttcttgtggaggatcacgggtttggagtcttccacaccagtgtctggcttaaggtcagaga

SEQ ID NO: 9433 - DNA, 80 bp, synthetic construct
  misc_feature 1..80: note = Synthetic: >NC_012532.1-cand-2990-3069
  source 1..80: mol_type = other DNA
agattactcattagaatgtgacccagccgtcataggaacagctgttaagggaagggaggccgcgcacagtgatctgggct

SEQ ID NO: 9434 - DNA, 80 bp, synthetic construct
  misc_feature 1..80: note = Synthetic: >NC_012532.1-cand-3070-3149
  source 1..80: mol_type = other DNA
attggattgaaagtgaaaagaatgacacatggaggctgaagagggcccacctgattgagatgaaaacatgtgaatggcca

SEQ ID NO: 9435 - DNA, 80 bp, synthetic construct
  misc_feature 1..80: note = Synthetic: >NC_012532.1-cand-3150-3229
  source 1..80: mol_type = other DNA
aagtctcacacattgtggacagatggagtagaagaaagtgatcttatcatacccaagtctttagctggtccactcagcca

SEQ ID NO: 9436 - DNA, 80 bp, synthetic construct
  misc_feature 1..80: note = Synthetic: >NC_012532.1-cand-3230-3309
  source 1..80: mol_type = other DNA
ccacaacaccagagagggttacagaacccaagtgaaagggccatggcacagtgaagagcttgaaatccggtttgaggaat

SEQ ID NO: 9437 - DNA, 80 bp, synthetic construct
  misc_feature 1..80: note = Synthetic: >NC_012532.1-cand-3310-3389
  source 1..80: mol_type = other DNA
gtccaggcaccaaggtttacgtggaggagacatgcggaactagaggaccatctctgagatcaactactgcaagtggaagg

SEQ ID NO: 9438 - DNA, 80 bp, synthetic construct
  misc_feature 1..80: note = Synthetic: >NC_012532.1-cand-3390-3469
  source 1..80: mol_type = other DNA
gtcattgaggaatggtgctgtagggaatgcacaatgcccccactatcgtttcgagcaaaagacggctgctggtatggaat

SEQ ID NO: 9439 - DNA, 80 bp, synthetic construct
  misc_feature 1..80: note = Synthetic: >NC_012532.1-cand-3450-3529
  source 1..80: mol_type = other DNA
gacggctgctggtatggaatggagataaggcccaggaaagaaccagagagcaacttagtgaggtcaatggtgacagcggg

SEQ ID NO: 9440 - DNA, 80 bp, synthetic construct
  misc_feature 1..80: note = Synthetic: >NC_012532.1-cand-3600-3679
  source 1..80: mol_type = other DNA
aagaagagaatgaccacaaagatcatcatgagcacatcaatggcagtgctggtagtcatgatcttgggaggattttcaat

SEQ ID NO: 9441 - DNA, 80 bp, synthetic construct
  misc_feature 1..80: note = Synthetic: >NC_012532.1-cand-3630-3709
  source 1..80: mol_type = other DNA
agcacatcaatggcagtgctggtagtcatgatcttgggaggattttcaatgagtgacctggccaagcttgtgatcctgat

SEQ ID NO: 9442 - DNA, 80 bp, synthetic construct
  misc_feature 1..80: note = Synthetic: >NC_012532.1-cand-3710-3789
  source 1..80: mol_type = other DNA
gggtgctactttcgcagaaatgaacactggaggagatgtagctcacttggcattggtagcggcatttaaagtcagaccag

SEQ ID NO: 9443 - DNA, 80 bp, synthetic construct
  misc_feature 1..80: note = Synthetic: >NC_012532.1-cand-3790-3869
  source 1..80: mol_type = other DNA
ccttgctggtctccttcattttcagagccaattggacaccccgtgagagcatgctgctagccctggcttcgtgtcttctg

SEQ ID NO: 9444 - DNA, 80 bp, synthetic construct
  misc_feature 1..80: note = Synthetic: >NC_012532.1-cand-3870-3949
  source 1..80: mol_type = other DNA
caaactgcgatctctgctcttgaaggtgacttgatggtcctcattaatggatttgctttggcctggttggcaattcgagc

SEQ ID NO: 9445 - DNA, 80 bp, synthetic construct
  misc_feature 1..80: note = Synthetic: >NC_012532.1-cand-3950-4029
  source 1..80: mol_type = other DNA
aatggccgtgccacgcactgacaacatcgctctaccaatcttggctgctctaacaccactagctcgaggcacactgctcg

SEQ ID NO: 9446 - DNA, 80 bp, synthetic construct
  misc_feature 1..80: note = Synthetic: >NC_012532.1-cand-4030-4109
  source 1..80: mol_type = other DNA
tggcatggagagcgggcctggctacttgtggagggatcatgctcctctccctgaaagggaaaggtagtgtgaagaagaac

SEQ ID NO: 9447 - DNA, 80 bp, synthetic construct
  misc_feature 1..80: note = Synthetic: >NC_012532.1-cand-4110-4189
  source 1..80: mol_type = other DNA
ctgccatttgtcatggccctgggattgacagctgtgagggtagtagaccctattaatgtggtaggactactgttactcac

SEQ ID NO: 9448 - DNA, 80 bp, synthetic construct
  misc_feature 1..80: note = Synthetic: >NC_012532.1-cand-8070-8149
  source 1..80: mol_type = other DNA
gacactctgctgtgtgacataggtgagtcatcatctagtcctgaagtggaagagacacgaacactcagagtgctctctat

SEQ ID NO: 9449 - DNA, 80 bp, synthetic construct
  misc_feature 1..80: note = Synthetic: >NC_012532.1-cand-8150-8229
  source 1..80: mol_type = other DNA
ggtgggggactggcttgaaaaaagaccaggggccttctgtataaaggtgctgtgcccatacaccagcactatgatggaaa

SEQ ID NO: 9450 - DNA, 80 bp, synthetic construct
  misc_feature 1..80: note = Synthetic: >NC_012532.1-cand-8230-8309
  source 1..80: mol_type = other DNA
ccatggagcgactgcaacgtaggcatgggggaggattagtcagagtgccattgtgtcgcaactccacacatgagatgtac

SEQ ID NO: 9451 - DNA, 80 bp, synthetic construct
  misc_feature 1..80: note = Synthetic: >NC_012532.1-cand-8320-8399
  source 1..80: mol_type = other DNA
gggcaaagagcaacatcataaaaagtgtgtccaccacaagtcagctcctcctgggacgcatggatggccccaggaggcca

SEQ ID NO: 9452 - DNA, 80 bp, synthetic construct
  misc_feature 1..80: note = Synthetic: >NC_012532.1-cand-8390-8469
  source 1..80: mol_type = other DNA
caggaggccagtgaaatatgaggaggatgtgaacctcggctcgggtacacgagctgtggcaagctgtgctgaggctccta

SEQ ID NO: 9453 - DNA, 80 bp, synthetic construct
  misc_feature 1..80: note = Synthetic: >NC_012532.1-cand-8470-8549
  source 1..80: mol_type = other DNA
acatgaaaatcatcggcaggcgcattgagagaatccgcaatgaacatgcagaaacatggtttcttgatgaaaaccaccca

SEQ ID NO: 9454 - DNA, 80 bp, synthetic construct
  misc_feature 1..80: note = Synthetic: >NC_012532.1-cand-8540-8619
  source 1..80: mol_type = other DNA
aaaccacccatacaggacatgggcctaccatgggagctacgaagcccccacgcaaggatcagcgtcttccctcgtgaacg

SEQ ID NO: 9455 - DNA, 80 bp, synthetic construct
  misc_feature 1..80: note = Synthetic: >NC_012532.1-cand-8630-8709
  source 1..80: mol_type = other DNA
actcctgtcaaagccttgggacgtggtgactggagttacaggaatagccatgactgacaccacaccatacggccaacaaa

SEQ ID NO: 9456 - DNA, 80 bp, synthetic construct
  misc_feature 1..80: note = Synthetic: >NC_012532.1-cand-8710-8789
  source 1..80: mol_type = other DNA
gagtcttcaaagaaaaagtggacaccagggtgccagatccccaagaaggcactcgccaggtaatgaacatagtctcttcc

SEQ ID NO: 9457 - DNA, 80 bp, synthetic construct
  misc_feature 1..80: note = Synthetic: >NC_012532.1-cand-8810-8889
  source 1..80: mol_type = other DNA
gaaacgcaagcggccacgcgtctgcaccaaagaagagtttatcaacaaggtgcgcagcaatgcagcactgggagcaatat

SEQ ID NO: 9458 - DNA, 80 bp, synthetic construct
  misc_feature 1..80: note = Synthetic: >NC_012532.1-cand-8870-8949
  source 1..80: mol_type = other DNA
tgcagcactgggagcaatatttgaagaggaaaaagaatggaagacggctgtggaagctgtgaatgatccaaggttttggg

SEQ ID NO: 9459 - DNA, 80 bp, synthetic construct
  misc_feature 1..80: note = Synthetic: >NC_012532.1-cand-8950-9029
  source 1..80: mol_type = other DNA
ccctagtggatagggagagagaacaccacctgagaggagagtgtcacagctgtgtgtacaacatgatgggaaaaagagaa

SEQ ID NO: 9460 - DNA, 80 bp, synthetic construct
  misc_feature 1..80: note = Synthetic: >NC_012532.1-cand-9030-9109
  source 1..80: mol_type = other DNA
aagaagcaaggagagttcgggaaagcaaaaggtagccgcgccatctggtacatgtggttgggagccagattcttggagtt

SEQ ID NO: 9461 - DNA, 80 bp, synthetic construct
  misc_feature 1..80: note = Synthetic: >NC_012532.1-cand-9110-9189
  source 1..80: mol_type = other DNA
tgaagcccttggattcttgaacgaggaccattggatgggaagagaaaactcaggaggtggagtcgaagggttaggattgc

SEQ ID NO: 9462 - DNA, 80 bp, synthetic construct
  misc_feature 1..80: note = Synthetic: >NC_012532.1-cand-9190-9269
  source 1..80: mol_type = other DNA
aaagacttggatacattctagaagaaatgaatcgggcaccaggaggaaagatgtacgcagatgacactgctggctgggac

SEQ ID NO: 9463 - DNA, 80 bp, synthetic construct
  misc_feature 1..80: note = Synthetic: >NC_012532.1-cand-9270-9349
  source 1..80: mol_type = other DNA
acccgcattagtaagtttgatctggagaatgaagctctgattaccaaccaaatggaggaagggcacagaactctggcgtt

SEQ ID NO: 9464 - DNA, 80 bp, synthetic construct
  misc_feature 1..80: note = Synthetic: >NC_012776.1-cand-80-159
  source 1..80: mol_type = other DNA
cataatgttcaccctcatcaagggcgttttcaatctatacaaatccggtcttttccagctggtcatctttctcctactct

SEQ ID NO: 9465 - DNA, 80 bp, synthetic construct
  misc_feature 1..80: note = Synthetic: >NC_012776.1-cand-160-239
  source 1..80: mol_type = other DNA
gtggcaagcgttgtgactcatcattgctatcaggattcaatctggagacagttcatttcaacatgtcactgttgagctcc

SEQ ID NO: 9466 - DNA, 80 bp, synthetic construct
  misc_feature 1..80: note = Synthetic: >NC_012776.1-cand-240-319
  source 1..80: mol_type = other DNA
atccctatggtctctgaacagcagcactgcatccagcacaatcacagctccataaccttcagtttgctgaccaacaagtc

SEQ ID NO: 9467 - DNA, 80 bp, synthetic construct
  misc_feature 1..80: note = Synthetic: >NC_012776.1-cand-320-399
  source 1..80: mol_type = other DNA
cgacttggaaaagtgcaatttcacccgcctgcaagctgttgacagggtgatctttgatctgttcagagagtttcatcacc

SEQ ID NO: 9468 - DNA, 80 bp, synthetic construct
  misc_feature 1..80: note = Synthetic: >NC_012776.1-cand-410-489
  source 1..80: mol_type = other DNA
ttttcctgttacttctgatctgaaatgctctcacaacaccagctacagagtgatagaatatgaagtcaccaaagagagtc

SEQ ID NO: 9469 - DNA, 80 bp, synthetic construct
  misc_feature 1..80: note = Synthetic: >NC_012776.1-cand-480-559
  source 1..80: mol_type = other DNA
aaagagagtctccctcgattgcaggaagctgtgagcaccttgttcccagacctccatctctccgaagataggtttctgca

SEQ ID NO: 9470 - DNA, 80 bp, synthetic construct
  misc_feature 1..80: note = Synthetic: >NC_012776.1-cand-560-639
  source 1..80: mol_type = other DNA
aattcaggcccatgatgacaagaactgcactggtctacacccattgaactacctgaggctcctgaaagagaattcagaaa

SEQ ID NO: 9471 - DNA, 80 bp, synthetic construct
  misc_feature 1..80: note = Synthetic: >NC_012776.1-cand-630-709
  source 1..80: mol_type = other DNA
aattcagaaacccactacaaagtgaggaaattaatgaaattgtttcagtggtctttgagtgatgagacaggtagccctct

SEQ ID NO: 9472 - DNA, 80 bp, synthetic construct
  misc_feature 1..80: note = Synthetic: >NC_012776.1-cand-710-789
  source 1..80: mol_type = other DNA
gccaggtggacactgtctagaaagatggctcatctttgcgtctgatataaagtgctttgataatgcagcgattgccaaat

SEQ ID NO: 9473 - DNA, 80 bp, synthetic construct
  misc_feature 1..80: note = Synthetic: >NC_012776.1-cand-790-869
  source 1..80: mol_type = other DNA
gcaataaagagcatgatgaggagttctgtgacatgttgaggctatttgactacaacaaagcaagtattgccaagcttagg

SEQ ID NO: 9474 - DNA, 80 bp, synthetic construct
  misc_feature 1..80: note = Synthetic: >NC_012776.1-cand-910-989
  source 1..80: mol_type = other DNA
tcaatgccatcatttcagacacacttttgatgagatcatccctcaagaggctgatgggcataccatactgcaattataca

SEQ ID NO: 9475 - DNA, 80 bp, synthetic construct
  misc_feature 1..80: note = Synthetic: >NC_012776.1-cand-940-1019
  source 1..80: mol_type = other DNA
tgagatcatccctcaagaggctgatgggcataccatactgcaattatacaaagttctggtatttaaaccatacaaaactg

SEQ ID NO: 9476 - DNA, 80 bp, synthetic construct
  misc_feature 1..80: note = Synthetic: >NC_012776.1-cand-1030-1109
  source 1..80: mol_type = other DNA
ctttaccccgatgttggctggttagtaatgggagttacctcaacgaaacaaaatttactcatgatatggaagatgaggca

SEQ ID NO: 9477 - DNA, 80 bp, synthetic construct
  misc_feature 1..80: note = Synthetic: >NC_012776.1-cand-1110-1189
  source 1..80: mol_type = other DNA
gataaactgctgaccgagatgctaaagaaagagtatgttaggagacaagagaaaacacccattactctgatggacatact

SEQ ID NO: 9478 - DNA, 80 bp, synthetic construct
  misc_feature 1..80: note = Synthetic: >NC_012776.1-cand-1190-1269
  source 1..80: mol_type = other DNA
gatgtttagtgtctctttctatatgttttctgtaacactatgcatatgcaacatacccacccatcggcacatcacaggtt

SEQ ID NO: 9479 - DNA, 80 bp, synthetic construct
  misc_feature 1..80: note = Synthetic: >NC_012776.1-cand-1280-1359
  source 1..80: mol_type = other DNA
caaaccacacagactcagaaagaatggcacctgtgcctgtggcttctttaagtcaataaacaggtccactggttgggcca

SEQ ID NO: 9480 - DNA, 80 bp, synthetic construct
  misc_feature 1..80: note = Synthetic: >NC_021928.1-cand-11780-11859
  source 1..80: mol_type = other DNA
taagttaacaaaatcactcttaactatgagtcagatagggattatctccaataaagagcgtaaggctacaaaggactcta

SEQ ID NO: 9481 - DNA, 80 bp, synthetic construct
  misc_feature 1..80: note = Synthetic: >NC_021928.1-cand-11860-11939
  source 1..80: mol_type = other DNA
tgacaatcctaaaggacattaagaagaataaaaatatacataaagaaaatgaaaagaaatatggttcagaaaatccatct

SEQ ID NO: 9482 - DNA, 80 bp, synthetic construct
  misc_feature 1..80: note = Synthetic: >NC_021928.1-cand-11940-12019
  source 1..80: mol_type = other DNA
ccttttggagatctaaggaaaaattctgcaataaatactcctgatgactcattagaaatagctgcatgctttttgacaac

SEQ ID NO: 9483 - DNA, 80 bp, synthetic construct
  misc_feature 1..80: note = Synthetic: >NC_021928.1-cand-12020-12099
  source 1..80: mol_type = other DNA
agatttacaaaaatattgtcttaattggagatatcaagcaataataccctttgctagaacattaaatcgaatgtatggat

SEQ ID NO: 9484 - DNA, 80 bp, synthetic construct
  misc_feature 1..80: note = Synthetic: >NC_021928.1-cand-12100-12179
  source 1..80: mol_type = other DNA
accctcatttatttgagtggattcatttaagactaatgaaatcaactttgtatgtaggtgacccgtttaatcctccatca

SEQ ID NO: 9485 - DNA, 80 bp, synthetic construct
  misc_feature 1..80: note = Synthetic: >NC_021928.1-cand-12180-12259
  source 1..80: mol_type = other DNA
gatcataatgtcagtgatctagataatgcacctaatgatgatatttttattgtttcaccaagaggaggtattgaaggtct

SEQ ID NO: 9486 - DNA, 80 bp, synthetic construct
  misc_feature 1..80: note = Synthetic: >NC_021928.1-cand-12260-12339
  source 1..80: mol_type = other DNA
gtgccaaaaattatggaccatgatttcaattgctactatattgttgtcatctgcagaatctaagactagagtaatgagca

SEQ ID NO: 9487 - DNA, 80 bp, synthetic construct
  misc_feature 1..80: note = Synthetic: >NC_021928.1-cand-12340-12419
  source 1..80: mol_type = other DNA
tggttcaaggagacaatcaaacaatagcaataactacaaaagtgccaaggagtatgcctcataaagaaaagaagcaatca

SEQ ID NO: 9488 - DNA, 80 bp, synthetic construct
  misc_feature 1..80: note = Synthetic: >NC_021928.1-cand-12420-12499
  source 1..80: mol_type = other DNA
gcttataatgcaagcaaagaattcttttctagattaaaacaaaataattatgggattggacataatttgaaggaacaaga

SEQ ID NO: 9489 - DNA, 80 bp, synthetic construct
  misc_feature 1..80: note = Synthetic: >NC_021928.1-cand-12500-12579
  source 1..80: mol_type = other DNA
aaccatattatcatctgatttctttgtatatggtaaaagaattttttggagagggaggatactcagccaagcgctcaaga

SEQ ID NO: 9490 - DNA, 80 bp, synthetic construct
  misc_feature 1..80: note = Synthetic: >NC_021928.1-cand-12580-12659
  source 1..80: mol_type = other DNA
atgctagcaaattatgtttaacagctgatatacttggtgactgcactcaatcttcttgctccaatctggcaacaacaatc

SEQ ID NO: 9491 - DNA, 80 bp, synthetic construct
  misc_feature 1..80: note = Synthetic: >NC_021928.1-cand-12670-12749
  source 1..80: mol_type = other DNA
ctgaaaacggacttgaaaaggatgtggcaataagactaaatatattcatggctattagacaattaacttttgatttgatc

SEQ ID NO: 9492 - DNA, 80 bp, synthetic construct
  misc_feature 1..80: note = Synthetic: >NC_021928.1-cand-12750-12829
  source 1..80: mol_type = other DNA
ttccctatgaatacaaataatgcatcaaacatttctgacatatatctaaaccatccagatttactagcaagaatttgtct

SEQ ID NO: 9493 - DNA, 80 bp, synthetic construct
  misc_feature 1..80: note = Synthetic: >NC_021928.1-cand-12830-12909
  source 1..80: mol_type = other DNA
tgtcccgtctaaagttggtggtttaaattatctatcaactagtcgattatttaatagaaatataggcgatccattagtgt

SEQ ID NO: 9494 - DNA, 80 bp, synthetic construct
  misc_feature 1..80: note = Synthetic: >NC_021928.1-cand-12910-12989
  source 1..80: mol_type = other DNA
ctgcatttgcagatattaagagactaataatggctagatgtattgaaccttgggtcttaacaaatatcatgagacgtcct

SEQ ID NO: 9495 - DNA, 80 bp, synthetic construct
  misc_feature 1..80: note = Synthetic: >NC_021928.1-cand-12990-13069
  source 1..80: mol_type = other DNA
ccgggagatggaaattggagtactctagcagcagatccttatgcagtcaatattgattacctatacccaccaactatatt

SEQ ID NO: 9496 - DNA, 80 bp, synthetic construct
  misc_feature 1..80: note = Synthetic: >NC_021928.1-cand-16880-16959
  source 1..80: mol_type = other DNA
tgaattccctaggctattattataatcagattaaaatttttaaaaaatacattattgataaaaactttttatatcgttcg

SEQ ID NO: 9497 - DNA, 80 bp, synthetic construct
  misc_feature 1..80: note = Synthetic: >NC_021928.1-cand-16960-17039
  source 1..80: mol_type = other DNA
gtatcgatctctcttagaagtgtttaataaaaaattaaaaacatatttaactttaaagaaaacttttcatatctcttctc

SEQ ID NO: 9498 - DNA, 80 bp, synthetic construct
  misc_feature 1..80: note = Synthetic: >NC_025114.1-cand-10-89
  source 1..80: mol_type = other DNA
cggacggcttcggcccacccgcgacaagaatgccgtcatctgtcctcattacccgtattccttcccttcccccgcaacca

SEQ ID NO: 9499 - DNA, 80 bp, synthetic construct
  misc_feature 1..80: note = Synthetic: >NC_025114.1-cand-70-149
  source 1..80: mol_type = other DNA
cttcccttcccccgcaaccaccacgcttactcgcgcacgtgttgagtggcacgtgcgttgtccaaacagctacacccaca

SEQ ID NO: 9500 - DNA, 80 bp, synthetic construct
  misc_feature 1..80: note = Synthetic: >NC_025114.1-cand-160-239
  source 1..80: mol_type = other DNA
cgggtttgtcccgccctcgggttcctcgcggaacccccccctccctctctctctttctatccgccctcacttcccataac

SEQ ID NO: 9501 - DNA, 80 bp, synthetic construct
  misc_feature 1..80: note = Synthetic: >NC_025114.1-cand-220-299
  source 1..80: mol_type = other DNA
ccgccctcacttcccataactacagtgctttggtaggtgagcaccctgaccccccgcggaagctgctaacgtggcaactg

SEQ ID NO: 9502 - DNA, 80 bp, synthetic construct
  misc_feature 1..80: note = Synthetic: >NC_025114.1-cand-320-399
  source 1..80: mol_type = other DNA
caaaggcacccggtctttccgccttcaggagtatctctgccggtgaattccggtagggctctgcttggtgccaacctccc

SEQ ID NO: 9503 - DNA, 80 bp, synthetic construct
  misc_feature 1..80: note = Synthetic: >NC_025114.1-cand-400-479
  source 1..80: mol_type = other DNA
ccaaatgcgcgctgcgggagtgctcttccccaactcatcttagtaacctctcatgtgtgtgcttggtcagcatatctgag

SEQ ID NO: 9504 - DNA, 80 bp, synthetic construct
  misc_feature 1..80: note = Synthetic: >NC_025114.1-cand-480-559
  source 1..80: mol_type = other DNA
gcgacgttccgctgtcccagaccagtccagcaatggacgggccagtgtgcgtagtcgctttccggttttccggcgcatgt

SEQ ID NO: 9505 - DNA, 80 bp, synthetic construct
  misc_feature 1..80: note = Synthetic: >NC_025114.1-cand-560-639
  source 1..80: mol_type = other DNA
ttggcgaaacgctgaggtaaggttggtgtgcccaacgcccgtaatttggtgatacctcaagaccacccaggaatgccagg

SEQ ID NO: 9506 - DNA, 80 bp, synthetic construct
  misc_feature 1..80: note = Synthetic: >NC_025114.1-cand-640-719
  source 1..80: mol_type = other DNA
gaggtaccccacttcggtgggatctgaccctgggctaattgtctacggtggttcttcttgcttccacttctcttttttct

SEQ ID NO: 9507 - DNA, 80 bp, synthetic construct
  misc_feature 1..80: note = Synthetic: >NC_025114.1-cand-720-799
  source 1..80: mol_type = other DNA
ggcatgatggagggctctaacggattctcgagttcgttggctggcctttcttcatcacgctcctcactccgccttctcac

SEQ ID NO: 9508 - DNA, 80 bp, synthetic construct
  misc_feature 1..80: note = Synthetic: >NC_025114.1-cand-800-879
  source 1..80: mol_type = other DNA
aagccttctctcccttcccccccccaaccctgatgcccgccgccactccggctggtatcgctctccccccacccttcccg

SEQ ID NO: 9509 - DNA, 80 bp, synthetic construct
  misc_feature 1..80: note = Synthetic: >NC_025114.1-cand-880-959
  source 1..80: mol_type = other DNA
tcaatgtctacctcaatgaacaatttgacaacctgtgcttgggtgccctccggtatccaggccacaaaatgtacccatct

SEQ ID NO: 9510 - DNA, 80 bp, synthetic construct
  misc_feature 1..80: note = Synthetic: >NC_025114.1-cand-960-1039
  source 1..80: mol_type = other DNA
gtttacaccctgttcccagatgtttcccctctcaaaattccccaatccatacccgcttttgcccaccttgtccaacgcca

SEQ ID NO: 9511 - DNA, 80 bp, synthetic construct
  misc_feature 1..80: note = Synthetic: >NC_025114.1-cand-1040-1119
  source 1..80: mol_type = other DNA
aggcctcaaacgccaaggcaactccaccacgaacatctacggcaatggtaacaacgtcaccactgacgttggtgccaacg

SEQ ID NO: 9512 - DNA, 80 bp, synthetic construct
  misc_feature 1..80: note = Synthetic: >NC_026422.1-cand-860-939
  source 1..80: mol_type = other DNA
attggcgggattaggatggttgacatccttagacaaaacccaacagaagaacaggctgtggatatatgtaaggcagcaat

SEQ ID NO: 9513 - DNA, 80 bp, synthetic construct
  misc_feature 1..80: note = Synthetic: >NC_026422.1-cand-940-1019
  source 1..80: mol_type = other DNA
gggtctaaggatcagttcatccttcagctttggaggtttcactttcaaaaggacaagtgggtcatctgtcaaaagggaag

SEQ ID NO: 9514 - DNA, 80 bp, synthetic construct
  misc_feature 1..80: note = Synthetic: >NC_026422.1-cand-1020-1099
  source 1..80: mol_type = other DNA
aagaagtgctcacaggcaacctccaaacattgaaaataagagtacatgaaggatatgaggaattcacaatggtcgggcga

SEQ ID NO: 9515 - DNA, 80 bp, synthetic construct
  misc_feature 1..80: note = Synthetic: >NC_026422.1-cand-1100-1179
  source 1..80: mol_type = other DNA
agagcaacagccattctaaggaaagcaaccagaagactgatccaactgatagtgagtgggaaagacgagcaatcaatcgc

SEQ ID NO: 9516 - DNA, 80 bp, synthetic construct
  misc_feature 1..80: note = Synthetic: >NC_026422.1-cand-1180-1259
  source 1..80: mol_type = other DNA
cgaggcaatcatagtggcaatggtattctcacaagaggattgtatgataaaggcagtgagaggtgatttgaactttgtca

SEQ ID NO: 9517 - DNA, 80 bp, synthetic construct
  misc_feature 1..80: note = Synthetic: >NC_026422.1-cand-1260-1339
  source 1..80: mol_type = other DNA
acagagcaaaccagcggctaaatcccatgcatcaactcctgaggcatttccaaaaggatgcaaaggtcctgtttcaaaac

SEQ ID NO: 9518 - DNA, 80 bp, synthetic construct
  misc_feature 1..80: note = Synthetic: >NC_026422.1-cand-1370-1449
  source 1..80: mol_type = other DNA
gggatgatcggaatattgcctgacatgacccccagcacagagatgtcattgagaggagtgagagttagtaaaatgggagt

SEQ ID NO: 9519 - DNA, 80 bp, synthetic construct
  misc_feature 1..80: note = Synthetic: >NC_026422.1-cand-1420-1499
  source 1..80: mol_type = other DNA
gagaggagtgagagttagtaaaatgggagtagatgaatattccagcactgagagagtggtcgtgagtattgatcgtttct

SEQ ID NO: 9520 - DNA, 80 bp, synthetic construct
  misc_feature 1..80: note = Synthetic: >NC_026422.1-cand-1520-1599
  source 1..80: mol_type = other DNA
ggaaacgtactcctgtctcctgaagaggttagtgaaacacagggaacagaaaagctgactataacatattcatcgtccat

SEQ ID NO: 9521 - DNA, 80 bp, synthetic construct
  misc_feature 1..80: note = Synthetic: >NC_026422.1-cand-1680-1759
  source 1..80: mol_type = other DNA
ttcaatggtcccaagatcctacaatgctatacaataagatggaatttgaaccctttcaatccctagtgcctaaagctgcc

SEQ ID NO: 9522 - DNA, 80 bp, synthetic construct
  misc_feature 1..80: note = Synthetic: >NC_026422.1-cand-1770-1849
  source 1..80: mol_type = other DNA
atagtgggttcgtgagggttctattccaacagatgcgtgacgtactgggaacatttgacactgtccaaataataaagcta

SEQ ID NO: 9523 - DNA, 80 bp, synthetic construct
  misc_feature 1..80: note = Synthetic: >NC_026422.1-cand-1840-1919
  source 1..80: mol_type = other DNA
aataaagctattaccatttgcagcagccccgccgaagcagagtaggatgcagttctcttctctaactgtgaatgtgaggg

SEQ ID NO: 9524 - DNA, 80 bp, synthetic construct
  misc_feature 1..80: note = Synthetic: >NC_026422.1-cand-1930-2009
  source 1..80: mol_type = other DNA
gagaatagttgtgagaggcaattctcctgtgttcaactacaacaaggcaaccaagaggcttacggtgcttggaaaggatg

SEQ ID NO: 9525 - DNA, 80 bp, synthetic construct
  misc_feature 1..80: note = Synthetic: >NC_026422.1-cand-1990-2069
  source 1..80: mol_type = other DNA
tacggtgcttggaaaggatgcaggtgcattgatggaagaccccgatgagggaacagcaggagtggaatctgcggtattga

SEQ ID NO: 9526 - DNA, 80 bp, synthetic construct
  misc_feature 1..80: note = Synthetic: >NC_026422.1-cand-2100-2179
  source 1..80: mol_type = other DNA
aaagatatgggccagcattgagcatcaacgaattgagcaatcttgcgaaaggagagaaggctaatgtgttgatagggcaa

SEQ ID NO: 9527 - DNA, 80 bp, synthetic construct
  misc_feature 1..80: note = Synthetic: >NC_026422.1-cand-2190-2269
  source 1..80: mol_type = other DNA
tgttggtgatgaaacggaaacgggactctagcatacttactgacagtcagacagcgaccaaaaggattcggatggccatc

SEQ ID NO: 9528 - DNA, 80 bp, synthetic construct
  misc_feature 1..80: note = Synthetic: >NC_026425.1-cand-1290-1369
  source 1..80: mol_type = other DNA
catacaatgctgaactcttggtagcaatggagaaccagcatacaattgatctggctgattcagaaatggacaaactgtac

SEQ ID NO: 9529 - DNA, 80 bp, synthetic construct
  misc_feature 1..80: note = Synthetic: >NC_026425.1-cand-1370-1449
  source 1..80: mol_type = other DNA
gaacgagtgaaaagacagctgagagagaatgctgaagaagatggcactggttgctttgaaatatttcacaagtgtgatga

SEQ ID NO: 9530 - DNA, 80 bp, synthetic construct
  misc_feature 1..80: note = Synthetic: >NC_026425.1-cand-1450-1529
  source 1..80: mol_type = other DNA
tgactgtatggccagtattagaaataacacctatgatcacagcaaatacagggaagaggcaatgcaaaatagaatacaga

SEQ ID NO: 9531 - DNA, 80 bp, synthetic construct
  misc_feature 1..80: note = Synthetic: >NC_026425.1-cand-1500-1579
  source 1..80: mol_type = other DNA
gggaagaggcaatgcaaaatagaatacagattgacccagtcaaactaagcagcggctacaaagatgtgatactttggttt

SEQ ID NO: 9532 - DNA, 80 bp, synthetic construct
  misc_feature 1..80: note = Synthetic: >NC_026425.1-cand-1610-1689
  source 1..80: mol_type = other DNA
gccattgtaatgggccttgtcttcatatgtgtaaagaatggaaacatgcggtgcactatttgtatataagtttggaaaaa

SEQ ID NO: 9533 - DNA, 80 bp, synthetic construct
  misc_feature 1..80: note = Synthetic: >NC_026426.1-cand-50-129
  source 1..80: mol_type = other DNA
cgccagaatgctactgagatcagggcatctgttggaagaatggttagcggcattgggagattctacatacagatgtgtac

SEQ ID NO: 9534 - DNA, 80 bp, synthetic construct
  misc_feature 1..80: note = Synthetic: >NC_026426.1-cand-80-159
  source 1..80: mol_type = other DNA
gttggaagaatggttagcggcattgggagattctacatacagatgtgtacagaactcaaactcagtgacaatgaagggag

SEQ ID NO: 9535 - DNA, 80 bp, synthetic construct
  misc_feature 1..80: note = Synthetic: >NC_026426.1-cand-170-249
  source 1..80: mol_type = other DNA
aacagtataacaatagagagaatggtactctctgcatttgatgaaagaaggaacagatacctggaagagcaccccagtgc

SEQ ID NO: 9536 - DNA, 80 bp, synthetic construct
  misc_feature 1..80: note = Synthetic: >NC_026426.1-cand-260-339
  source 1..80: mol_type = other DNA
cctaagaaaactggaggtccaatttacaggagaagagacggaaaatgggtgagagagctgatcctgtatgacaaagagga

SEQ ID NO: 9537 - DNA, 80 bp, synthetic construct
  misc_feature 1..80: note = Synthetic: >NC_026426.1-cand-340-419
  source 1..80: mol_type = other DNA
aatcaggagaatttggcgacaagcgaacaatggagaggatgcaactgctggtcttacccatctgatgatatggcattcca

SEQ ID NO: 9538 - DNA, 80 bp, synthetic construct
  misc_feature 1..80: note = Synthetic: >NC_026426.1-cand-430-509
  source 1..80: mol_type = other DNA
tgctacctatcagagaacgagagctctcgtgcgtactggaatggatccccggatgtgctctctgatgcaaggatcaactc

SEQ ID NO: 9539 - DNA, 80 bp, synthetic construct
  misc_feature 1..80: note = Synthetic: >NC_026426.1-cand-550-629
  source 1..80: mol_type = other DNA
gatagggacaatggtgatggaactgattcggatgataaaacgagggatcaacgaccggaatttctggagaggcgaaaatg

SEQ ID NO: 9540 - DNA, 80 bp, synthetic construct
  misc_feature 1..80: note = Synthetic: >NC_026426.1-cand-700-779
  source 1..80: mol_type = other DNA
aagggcaatgatggatcaagtgcgagagagcagaaatcctgggaatgctgaaatagaagatctcatttttctggcaaggt

SEQ ID NO: 9541 - DNA, 80 bp, synthetic construct
  misc_feature 1..80: note = Synthetic: >NC_026426.1-cand-750-829
  source 1..80: mol_type = other DNA
aaatagaagatctcatttttctggcaaggtctgcactcatcctgagaggatcagtggctcataaatcctgcttgcctgct

SEQ ID NO: 9542 - DNA, 80 bp, synthetic construct
  misc_feature 1..80: note = Synthetic: >NC_026426.1-cand-930-1009
  source 1..80: mol_type = other DNA
tctttagtctcattagaccaaatgagaacccagcacataagagccaactagtgtggatggcatgccactctgcagcgttt

SEQ ID NO: 9543 - DNA, 80 bp, synthetic construct
  misc_feature 1..80: note = Synthetic: >NC_026426.1-cand-1000-1079
  source 1..80: mol_type = other DNA
tgcagcgtttgaggaccttagggtctcaagtttcattagagggacaagaatggtcccaagaggacagctatccactagag

SEQ ID NO: 9544 - DNA, 80 bp, synthetic construct
  misc_feature 1..80: note = Synthetic: >NC_038311.1-cand-2620-2699
  source 1..80: mol_type = other DNA
acaaaatggaaaatcacactacaggaaatggcacagattaggagaaaatttgaattgtttacatatgtcaggtttgactc

SEQ ID NO: 9545 - DNA, 80 bp, synthetic construct
  misc_feature 1..80: note = Synthetic: >NC_038311.1-cand-2700-2779
  source 1..80: mol_type = other DNA
agaaataaccttggtgccttgtattgctggtagaggagacgacattggacatattgtaatgcaatatatgtatgttcctc

SEQ ID NO: 9546 - DNA, 80 bp, synthetic construct
  misc_feature 1..80: note = Synthetic: >NC_038311.1-cand-2780-2859
  source 1..80: mol_type = other DNA
caggagctccaattccttcaaaaagaaacgatttctcatggcaatcaggcaccaatatgtcaatattctggcaacatgga

SEQ ID NO: 9547 - DNA, 80 bp, synthetic construct
  misc_feature 1..80: note = Synthetic: >NC_038311.1-cand-2860-2939
  source 1..80: mol_type = other DNA
cagccatttcctagattttctttaccatttcttagcattgcatcagcttattatatgttttatgatggatatgatggaga

SEQ ID NO: 9548 - DNA, 80 bp, synthetic construct
  misc_feature 1..80: note = Synthetic: >NC_038311.1-cand-2940-3019
  source 1..80: mol_type = other DNA
caacacttcttccaagtatggtagcgtagttactaatgatatgggtactatatgctcaagaatagttacagaaaaacaga

SEQ ID NO: 9549 - DNA, 80 bp, synthetic construct
  misc_feature 1..80: note = Synthetic: >NC_038311.1-cand-3020-3099
  source 1..80: mol_type = other DNA
aacattctgttgtcatcacaacacacatatatcataaagctaaacacacaaaagcttggtgtcctaggccccctagagct

SEQ ID NO: 9550 - DNA, 80 bp, synthetic construct
  misc_feature 1..80: note = Synthetic: >NC_038311.1-cand-3110-3189
  source 1..80: mol_type = other DNA
cacatagtcatgtgactaattatatgccagaaacaggtgacgtgacaacagccatagtccgcagaaacactataacaact

SEQ ID NO: 9551 - DNA, 80 bp, synthetic construct
  misc_feature 1..80: note = Synthetic: >NC_038311.1-cand-3190-3269
  source 1..80: mol_type = other DNA
gctgggcccagtgatctatatgtgcatgtaggtaacttaatatatagaaacttacatctgttcaattctgaaatgcatga

SEQ ID NO: 9552 - DNA, 80 bp, synthetic construct
  misc_feature 1..80: note = Synthetic: >NC_038311.1-cand-3270-3349
  source 1..80: mol_type = other DNA
ttcaattttgatttcatactcttctgatttaatcatataccgcacaaacactataggtgatgattatattcccaattgta

SEQ ID NO: 9553 - DNA, 80 bp, synthetic construct
  misc_feature 1..80: note = Synthetic: >NC_038311.1-cand-3350-3429
  source 1..80: mol_type = other DNA
actgcactgaggctacttattattgtagacacaaaaataggtattacccaataaaagttactccacatgattggtatgaa

SEQ ID NO: 9554 - DNA, 80 bp, synthetic construct
  misc_feature 1..80: note = Synthetic: >NC_038311.1-cand-3430-3509
  source 1..80: mol_type = other DNA
atacaagagagtgaatattaccccaaacacatccaatacaacctattaattggtgaaggaccatgtgaacctggtgattg

SEQ ID NO: 9555 - DNA, 80 bp, synthetic construct
  misc_feature 1..80: note = Synthetic: >NC_038311.1-cand-3510-3589
  source 1..80: mol_type = other DNA
tggtggaaaacttctttgtagacatggtgtcattggcataatcacagcaggtggtgaaggtcatgtagcatttatagatc

SEQ ID NO: 9556 - DNA, 80 bp, synthetic construct
  misc_feature 1..80: note = Synthetic: >NC_038311.1-cand-3590-3669
  source 1..80: mol_type = other DNA
ttagacaatttcactgtgctgaggaacaaggcataactgattacatacacatgttgggagaggcttttggcaatggtttt

SEQ ID NO: 9557 - DNA, 80 bp, synthetic construct
  misc_feature 1..80: note = Synthetic: >NC_038311.1-cand-3670-3749
  source 1..80: mol_type = other DNA
gtagatagtgttaaagaacaaataaatgcaataaatccaatcaataacattagtaagaaggttattaagtggctacttag

SEQ ID NO: 9558 - DNA, 80 bp, synthetic construct
  misc_feature 1..80: note = Synthetic: >NC_038311.1-cand-3750-3829
  source 1..80: mol_type = other DNA
aataatctcggctatggttattataatcagaaactcctctgaccctcaaacgatcatagcaaccttgacactaattggtt

SEQ ID NO: 9559 - DNA, 80 bp, synthetic construct
  misc_feature 1..80: note = Synthetic: >NC_038311.1-cand-3830-3909
  source 1..80: mol_type = other DNA
gcaatggttcaccatggagatttctcaaagaaaagttttgcaaatggacccaattaacttatatccacaaagagtctgat

SEQ ID NO: 9560 - DNA, 80 bp, synthetic construct
  misc_feature 1..80: note = Synthetic: >NC_039199.1-cand-5750-5829
  source 1..80: mol_type = other DNA
catgatatcacacagtattttaaaagtttgattcaaaggtatacaaactctgcaataaacagtgacacatgctggaaaat

SEQ ID NO: 9561 - DNA, 80 bp, synthetic construct
  misc_feature 1..80: note = Synthetic: >NC_039199.1-cand-5830-5909
  source 1..80: mol_type = other DNA
aaacagaaatcaatgcacaaatataacaacatacaaatttttatgttttaaatctgaagacacaaaaaccaacaattgtg

SEQ ID NO: 9562 - DNA, 80 bp, synthetic construct
  misc_feature 1..80: note = Synthetic: >NC_039199.1-cand-5910-5989
  source 1..80: mol_type = other DNA
ataaactgacagatttatgcagaaacaaaccaaaaccagcagttggagtgtatcacatagtagaatgccattgtatatac

SEQ ID NO: 9563 - DNA, 80 bp, synthetic construct
  misc_feature 1..80: note = Synthetic: >NC_039199.1-cand-5990-6069
  source 1..80: mol_type = other DNA
acagttaaatggaagtgctatcattacccaaccgatgaaacccaatcctaaatgttaacaccagattaggatccatccaa

SEQ ID NO: 9564 - DNA, 80 bp, synthetic construct
  misc_feature 1..80: note = Synthetic: >NC_039199.1-cand-6070-6149
  source 1..80: mol_type = other DNA
gtctgttagttcaacaatttagttatttaaaaatattttgaaaacaagtaagtttctatgatacttcataataataagta

SEQ ID NO: 9565 - DNA, 80 bp, synthetic construct
  misc_feature 1..80: note = Synthetic: >NC_039199.1-cand-6150-6229
  source 1..80: mol_type = other DNA
ataattaattgcttaatcatcatcacaacattattcgaaaccataactattcaatttaaaaagtaaaaaacaataacatg

SEQ ID NO: 9566 - DNA, 80 bp, synthetic construct
  misc_feature 1..80: note = Synthetic: >NC_039199.1-cand-6230-6309
  source 1..80: mol_type = other DNA
ggacaagtagttatggaggtgaaagtggagaacattcgaacaatagatatgctcaaagcaagagtaaaaaatcgtgtggc

SEQ ID NO: 9567 - DNA, 80 bp, synthetic construct
  misc_feature 1..80: note = Synthetic: >NC_039199.1-cand-6310-6389
  source 1..80: mol_type = other DNA
acgcagcaaatgctttaaaaatgcctctttggtcctcataggaataactacattgagtattgccctcaatatctatctga

SEQ ID NO: 9568 - DNA, 80 bp, synthetic construct
  misc_feature 1..80: note = Synthetic: >NC_039199.1-cand-6400-6479
  source 1..80: mol_type = other DNA
taaaatgcaaaaaaacacatctgaatcagaacatcacaccagctcatcacccatggaatccagcagagaaactccaacgg

SEQ ID NO: 9569 - DNA, 80 bp, synthetic construct
  misc_feature 1..80: note = Synthetic: >NC_039199.1-cand-6480-6559
  source 1..80: mol_type = other DNA
tccccacagacaactcagacaccaactcaagcccacagcatccaactcaacagtccacagaaggctccacactctacttt

SEQ ID NO: 9570 - DNA, 80 bp, synthetic construct
  misc_feature 1..80: note = Synthetic: >NC_039199.1-cand-6560-6639
  source 1..80: mol_type = other DNA
gcagcctcagcaagctcaccagagacagaaccaacatcaacaccagatacaacaaaccgcccgcccttcgtcgacacaca

SEQ ID NO: 9571 - DNA, 80 bp, synthetic construct
  misc_feature 1..80: note = Synthetic: >NC_039199.1-cand-6640-6719
  source 1..80: mol_type = other DNA
cacaacaccaccaagcgcaagcagaacaaagacaagtccggcagtccacacaaaaaacaacccaaggacaagctctagaa

SEQ ID NO: 9572 - DNA, 80 bp, synthetic construct
  misc_feature 1..80: note = Synthetic: >NC_039199.1-cand-6720-6799
  source 1..80: mol_type = other DNA
cacattctccaccacgggcaacgacaaggacggcacgcagaaccaccactctccgcacaagcagcacaagaaagagaccg

SEQ ID NO: 9573 - DNA, 80 bp, synthetic construct
  misc_feature 1..80: note = Synthetic: >NC_039199.1-cand-6800-6879
  source 1..80: mol_type = other DNA
tccacagcatcagtccaacctgacatcagcgcaacaacccacaaaaacgaagaagcaagtccagcgagcccacaaacatc

SEQ ID NO: 9574 - DNA, 80 bp, synthetic construct
  misc_feature 1..80: note = Synthetic: >NC_039199.1-cand-6880-6959
  source 1..80: mol_type = other DNA
tgcaagcacaacaagaatacaaaggaaaagcgtggaggccaacacatcaacaacatacaaccaaactagttaacaaaaaa

SEQ ID NO: 9575 - DNA, 80 bp, synthetic construct
  misc_feature 1..80: note = Synthetic: >NC_039199.1-cand-6960-7039
  source 1..80: mol_type = other DNA
tacaaaataactctaagataaaccatgcagacaccaacaatggagaagccaaaagacaattcacaatctccccaaaaagg

SEQ ID NO: 9576 - DNA, 80 bp, synthetic construct
  misc_feature 1..80: note = Synthetic: >NC_044854.1-cand-2440-2519
  source 1..80: mol_type = other DNA
aaattggcatgtgcacaattaagtggcaggccaaggtgtattcactagaatcagatggtaacaatgttaacatcagagag

SEQ ID NO: 9577 - DNA, 80 bp, synthetic construct
  misc_feature 1..80: note = Synthetic: >NC_044854.1-cand-2480-2559
  source 1..80: mol_type = other DNA
ttcactagaatcagatggtaacaatgttaacatcagagaggagaaaaacgttctaacccaacaacaacagtcagtgtgcg

SEQ ID NO: 9578 - DNA, 80 bp, synthetic construct
  misc_feature 1..80: note = Synthetic: >NC_044854.1-cand-2560-2639
  source 1..80: mol_type = other DNA
ctgcttccatcgcactcacccgcctgcgggctgcgcgtgcggtggcgtacgcatcatgcatccagtcagcaataacctcc

SEQ ID NO: 9579 - DNA, 80 bp, synthetic construct
  misc_feature 1..80: note = Synthetic: >NC_044854.1-cand-2640-2719
  source 1..80: mol_type = other DNA
atactacaaattgctgcctcggctcttgtggtcaacagggctgtgaaaagaatgtttggcacacgcactgctgctctgtc

SEQ ID NO: 9580 - DNA, 80 bp, synthetic construct
  misc_feature 1..80: note = Synthetic: >NC_044854.1-cand-2720-2799
  source 1..80: mol_type = other DNA
cttagagggcccccccaaggaacacaagtgcagagtccaccaggctaaagccgcagggaaagggcccattggccatgatg

SEQ ID NO: 9581 - DNA, 80 bp, synthetic construct
  misc_feature 1..80: note = Synthetic: >NC_044854.1-cand-2800-2879
  source 1..80: mol_type = other DNA
atatggttgaaaagtatggactgtgtgagactgaggaggacgaagaagtggtccacactgagatgccatctgccaccata

SEQ ID NO: 9582 - DNA, 80 bp, synthetic construct
  misc_feature 1..80: note = Synthetic: >NC_044854.1-cand-2910-2989
  source 1..80: mol_type = other DNA
gggcgtggccggaagaacaactacaatgccttttcccgtagaggactcaatgatgaagagtacgaagagtacaagaaaat

SEQ ID NO: 9583 - DNA, 80 bp, synthetic construct
  misc_feature 1..80: note = Synthetic: >NC_044854.1-cand-2960-3039
  source 1..80: mol_type = other DNA
tgatgaagagtacgaagagtacaagaaaatacgggaagagaagggtggcaactacagcatccaggagtacctagaggata

SEQ ID NO: 9584 - DNA, 80 bp, synthetic construct
  misc_feature 1..80: note = Synthetic: >NC_044854.1-cand-3040-3119
  source 1..80: mol_type = other DNA
ggcaaaggtacgaagaggagcttgcagaggtccaggcaggtggagacggaggaatcggtgaaaccgaaatggaaatccga

SEQ ID NO: 9585 - DNA, 80 bp, synthetic construct
  misc_feature 1..80: note = Synthetic: >NC_044854.1-cand-3100-3179
  source 1..80: mol_type = other DNA
aaaccgaaatggaaatccgacatagagtattctacaagtctaagagcaagaaacaccaccaggaagagcggcgccaactg

SEQ ID NO: 9586 - DNA, 80 bp, synthetic construct
  misc_feature 1..80: note = Synthetic: >NC_044854.1-cand-3200-3279
  source 1..80: mol_type = other DNA
cattcgaaaaaggaaaccaatcgattggaccccccctaagtcagcatgggcagatgatgatcgtgaagtggactacaatg

SEQ ID NO: 9587 - DNA, 80 bp, synthetic construct
  misc_feature 1..80: note = Synthetic: >NC_044854.1-cand-3260-3339
  source 1..80: mol_type = other DNA
tcgtgaagtggactacaatgagaggatcaactttgaagcgccccccaccttgtggagccgggtcacaaagtttggatctg

SEQ ID NO: 9588 - DNA, 80 bp, synthetic construct
  misc_feature 1..80: note = Synthetic: >NC_044854.1-cand-3360-3439
  source 1..80: mol_type = other DNA
cccacagtcttcataaccacaacacatgttataccaaccagtgcaaaggaattctttggcgagccccttgccagtatagc

SEQ ID NO: 9589 - DNA, 80 bp, synthetic construct
  misc_feature 1..80: note = Synthetic: >NC_044854.1-cand-3440-3519
  source 1..80: mol_type = other DNA
catccacagggccggagaattcaccctcttcaggttttctaagaagatcaggcccgatctcacgggcatgatccttgagg

SEQ ID NO: 9590 - DNA, 80 bp, synthetic construct
  misc_feature 1..80: note = Synthetic: >NC_044854.1-cand-3520-3599
  source 1..80: mol_type = other DNA
aaggttgtccagaaggcacggtgtgctcagtgctaataaagagggattccggcgagctactaccactagctgtaaggatg

SEQ ID NO: 9591 - DNA, 80 bp, synthetic construct
  misc_feature 1..80: note = Synthetic: >NC_044854.1-cand-3580-3659
  source 1..80: mol_type = other DNA
taccactagctgtaaggatgggcgccatagcatcaatgcgcatacagggtcgccttgtccatgggcagtctggtatgttg

SEQ ID NO: 9592 - DNA, 80 bp, synthetic construct
  misc_feature 1..80: note = Synthetic: >NC_044932.1-cand-5410-5489
  source 1..80: mol_type = other DNA
ttcactgcaggaaaggtcatatttgcggctgtgccgcctcatttcccagtagaaaacattagtcccccacagataactat

SEQ ID NO: 9593 - DNA, 80 bp, synthetic construct
  misc_feature 1..80: note = Synthetic: >NC_044932.1-cand-5490-5569
  source 1..80: mol_type = other DNA
gttcccccacataatagttgatgttaggactcttgaaccaatttttatccctgtcccagatgtgagaaataatttctttc

SEQ ID NO: 9594 - DNA, 80 bp, synthetic construct
  misc_feature 1..80: note = Synthetic: >NC_044932.1-cand-5570-5649
  source 1..80: mol_type = other DNA
attacaatcaaatgaatgatccaaagatgaggttaattgctatgctgtacacccccttaagatcaaatggttcttctgat

SEQ ID NO: 9595 - DNA, 80 bp, synthetic construct
  misc_feature 1..80: note = Synthetic: >NC_044932.1-cand-5650-5729
  source 1..80: mol_type = other DNA
gatgttttcactgtgtcttgtagagttctcaccagacccacccctgattttgagttcaattatttggtaccacccactgt

SEQ ID NO: 9596 - DNA, 80 bp, synthetic construct
  misc_feature 1..80: note = Synthetic: >NC_044932.1-cand-5730-5809
  source 1..80: mol_type = other DNA
cgagtcaaggacaaaacccttcagtgtgcccatcctaacaattggagagatgacaaattctaggttcccattacctattg

SEQ ID NO: 9597 - DNA, 80 bp, synthetic construct
  misc_feature 1..80: note = Synthetic: >NC_044932.1-cand-5810-5889
  source 1..80: mol_type = other DNA
acatgctgtacaccagcccgactgacagtttggtcgtccaacctcaaaatggcaggtgcacaattgaaggtgaattgcaa

SEQ ID NO: 9598 - DNA, 80 bp, synthetic construct
  misc_feature 1..80: note = Synthetic: >NC_044932.1-cand-5890-5969
  source 1..80: mol_type = other DNA
ggtacaactcaattggtgactccaaacatttgttcccttcgaggcgcaatcaccgggcatgaaggcaatgatgacaacca

SEQ ID NO: 9599 - DNA, 80 bp, synthetic construct
  misc_feature 1..80: note = Synthetic: >NC_044932.1-cand-5970-6049
  source 1..80: mol_type = other DNA
caaatggcacatgacagtcacgagccctaatggtgccgcctttgacccaacagaggatgtgcctgcccccctgggcactc

SEQ ID NO: 9600 - DNA, 80 bp, synthetic construct
  misc_feature 1..80: note = Synthetic: >NC_044932.1-cand-6080-6159
  source 1..80: mol_type = other DNA
tctcccagagaaatagatccatcgaatctggccagagtggtcctgcaaatagatctcatgaggctgttgtctccacacgg

SEQ ID NO: 9601 - DNA, 80 bp, synthetic construct
  misc_feature 1..80: note = Synthetic: >NC_044932.1-cand-6130-6209
  source 1..80: mol_type = other DNA
agatctcatgaggctgttgtctccacacggagtcctaaatttacccctaaattaggttcagtaatgattgccacttggaa

SEQ ID NO: 9602 - DNA, 80 bp, synthetic construct
  misc_feature 1..80: note = Synthetic: >NC_044932.1-cand-6210-6289
  source 1..80: mol_type = other DNA
caccaatgatattgaacttgagcccaccaaattcacacctataggtcttgagaatcccggcccctttcaacaatggcggc

SEQ ID NO: 9603 - DNA, 80 bp, synthetic construct
  misc_feature 1..80: note = Synthetic: >NC_044932.1-cand-6290-6369
  source 1..80: mol_type = other DNA
taccaaattactcaggagccctaacactcaacatgggacttgcatcatctgtattcccaacataccctggtgaacaaatt

SEQ ID NO: 9604 - DNA, 80 bp, synthetic construct
  misc_feature 1..80: note = Synthetic: >NC_044932.1-cand-6370-6449
  source 1..80: mol_type = other DNA
cttttcttccgttcatacattcccctcaaaggtggctttggaaacacagccatagattgccttgtaccacaggaatgggt

SEQ ID NO: 9605 - DNA, 80 bp, synthetic construct
  misc_feature 1..80: note = Synthetic: >NC_044932.1-cand-6450-6529
  source 1..80: mol_type = other DNA
ccagcacttctatcaggaatcagcccctgcacaatcagatgtggcactacttaggtatgtgaaccctgagacaggacgtg

SEQ ID NO: 9606 - DNA, 80 bp, synthetic construct
  misc_feature 1..80: note = Synthetic: >NC_044932.1-cand-6530-6609
  source 1..80: mol_type = other DNA
tcctgtttgaggccaaactgcacagacaaggtttccttacagttgctagatcaggtgaaagtcccatcaatgttcctgcc

SEQ ID NO: 9607 - DNA, 80 bp, synthetic construct
  misc_feature 1..80: note = Synthetic: >NC_044932.1-cand-6610-6689
  source 1..80: mol_type = other DNA
aacggttatttcagatttgactcttgggttaaccaattctactctcttgcccccatgggaactgggaacgggcgcagaag

SEQ ID NO: 9608 - DNA, 80 bp, synthetic construct
  misc_feature 1..80: note = Synthetic: >NC_007360.1-cand-640-719
  source 1..80: mol_type = other DNA
gattaacgatcggaatttctggagaggtgaaaatgggcgaagaacaagaattgcatatgagagaatgtgcaacatcctca

SEQ ID NO: 9609 - DNA, 80 bp, synthetic construct
  misc_feature 1..80: note = Synthetic: >NC_001611.1-cand-72220-72299
  source 1..80: mol_type = other DNA
aaaaaaactgccgtatcaaggacagttaaaactattactaggagaattattttttcttagtaagttacagcgacacggta

SEQ ID NO: 9610 - DNA, 80 bp, synthetic construct
  misc_feature 1..80: note = Synthetic: >NC_001611.1-cand-13950-14029
  source 1..80: mol_type = other DNA
aaaaaaatcatttcgacattaattcctttttaaatttccgtctatcatctatagaaacatattctatgaatttataaaat

SEQ ID NO: 9611 - DNA, 80 bp, synthetic construct
  misc_feature 1..80: note = Synthetic: >NC_001611.1-cand-62770-62849
  source 1..80: mol_type = other DNA
aaaaaaatgataagatatcaacatggagtatatcatactctgattttaattcttctactgcctcactgacattttcacaa

SEQ ID NO: 9612 - DNA, 80 bp, synthetic construct
  misc_feature 1..80: note = Synthetic: >AdVB3-cand-29060-29139
  source 1..80: mol_type = other DNA
aaaaaacattccaaattcaatgattgcaattattgcggcggtggcattgggaatggcactaataataatatgcatgttcc

SEQ ID NO: 9613 - DNA, 80 bp, synthetic construct
  misc_feature 1..80: note = Synthetic: >NC_001611.1-cand-69180-69259
  source 1..80: mol_type = other DNA
aaaaaagtaattggagtgttcatatcctctacaggctattgtctcatgaccgtgtatgaaatttaagtaacacgactgtg

SEQ ID NO: 9614 - DNA, 80 bp, synthetic construct
  misc_feature 1..80: note = Synthetic: >NC_001611.1-cand-70300-70379
  source 1..80: mol_type = other DNA
aaaaaagtggtaggagaaagaataagaacatggttatcttccgtcaaggatcatcacctatcttgtgtattttcgaaact

SEQ ID NO: 9615 - DNA, 80 bp, synthetic construct
  misc_feature 1..80: note = Synthetic: >AdVB7-cand-28570-28649
  source 1..80: mol_type = other DNA
aggagttcccgagtggtatactgtctctgtccgaggtcctgacggttccatccgcattagtaacaacacttttatttttt

SEQ ID NO: 9616 - DNA, 80 bp, synthetic construct
  misc_feature 1..80: note = Synthetic: >AdVB7-cand-17750-17829
  source 1..80: mol_type = other DNA
aaaaaatagaatggactctgacgctcctggtcctgtgactatgtttttgtagagatggaagacatcaatttttcatccct

SEQ ID NO: 9617 - DNA, 80 bp, synthetic construct
  misc_feature 1..80: note = Synthetic: >NC_001611.1-cand-101150-101229
  source 1..80: mol_type = other DNA
ttaaagactgctttaggtgctgaaataaccacatctggaaggcttactcgcttagccatttaattacggaactatttttt

SEQ ID NO: 9618 - DNA, 80 bp, synthetic construct
  misc_feature 1..80: note = Synthetic: >NC_003310.1-cand-34140-34219
  source 1..80: mol_type = other DNA
gattgggaaaataacaaatctatttggatttggtgcaaggataggttccataactaaattaacaatagtagtaatttttt

SEQ ID NO: 9619 - DNA, 80 bp, synthetic construct
  misc_feature 1..80: note = Synthetic: >AdVB7-cand-880-959
  source 1..80: mol_type = other DNA
aaaaaattgcctgatctgggagcagctgaaatggacttgcgttgttatgaagagggttttcctccgagtgatgatgaaga

SEQ ID NO: 9620 - DNA, 80 bp, synthetic construct
  misc_feature 1..80: note = Synthetic: >NC_003310.1-cand-37020-37099
  source 1..80: mol_type = other DNA
aaaaacaaactttttattctttagatgaattattattggttcattggaatcaaaaagtaagatattatcgggtttaagat

SEQ ID NO: 9621 - DNA, 80 bp, synthetic construct
  misc_feature 1..80: note = Synthetic: >AdVB3-cand-8300-8379
  source 1..80: mol_type = other DNA
tccacgggtccgttggtggagatgtcaatggcttgcagggttccgtgccccttgggcgctaccaccgtgcccttgttttt

SEQ ID NO: 9622 - DNA, 80 bp, synthetic construct
  misc_feature 1..80: note = Synthetic: >NC_001611.1-cand-104050-104129
  source 1..80: mol_type = other DNA
aaaaacatcgctattgaccacggcttccattatttatattcgtagtttttactcgaaagcgtgattttaatatccaatct

SEQ ID NO: 9623 - DNA, 80 bp, synthetic construct
  misc_feature 1..80: note = Synthetic: >NC_003310.1-cand-171810-171889
  source 1..80: mol_type = other DNA
aaaaacatgtggtattagtgcaggtcgttattcttccaattgcaattggtaagatgacggccaactttagtacccacgtc

SEQ ID NO: 9624 - DNA, 80 bp, synthetic construct
  misc_feature 1..80: note = Synthetic: >NC_007573.1-cand-30-109
  source 1..80: mol_type = other DNA
agtaatggatttcatcaatcaaactttgttctcaaagtatactgaaagtaatgtagatacaattccttatcttttgggtc

SEQ ID NO: 9625 - DNA, 80 bp, synthetic construct
  misc_feature 1..80: note = Synthetic: >NC_003310.1-cand-78010-78089
  source 1..80: mol_type = other DNA
agtaatttatatttttacggtacgtctagtaagtagaaattatcaaatgttgttggtgttggtggcgctagtcatcacat

SEQ ID NO: 9626 - DNA, 80 bp, synthetic construct
  misc_feature 1..80: note = Synthetic: >NC_002023.1-cand-120-199
  source 1..80: mol_type = other DNA
agtacacatcaggaagacaggagaagaacccagcacttaggatgaaatggatgatggcaatgaaatatccaattacagca

SEQ ID NO: 9627 - DNA, 80 bp, synthetic construct
  misc_feature 1..80: note = Synthetic: >NC_001611.1-cand-71580-71659
  source 1..80: mol_type = other DNA
agtacagaattaattagacgagttagacgttatcaaatagctcaatataaatgcgtgactataaaatattctaacgataa

SEQ ID NO: 9628 - DNA, 80 bp, synthetic construct
  misc_feature 1..80: note = Synthetic: >HCV.A9-cand-6170-6249
  source 1..80: mol_type = other DNA
agtacatgctggaagctgttgaccactatgcaggacaactagccaccctggacatcagcacagaacccatgaagctagag

SEQ ID NO: 9629 - DNA, 80 bp, synthetic construct
  misc_feature 1..80: note = Synthetic: >NC_001611.1-cand-163100-163179
  source 1..80: mol_type = other DNA
agtacccacgtcttttcaccacagcactgtggatgtgacagactgaccagtattgatgacgtcagacaatgtttgactga

SEQ ID NO: 9630 - DNA, 80 bp, synthetic construct
  misc_feature 1..80: note = Synthetic: >NC_001611.1-cand-88400-88479
  source 1..80: mol_type = other DNA
agtactagatacgtataaaaaggtatctgatttgatataatgaattcagtgactgtatcacacgcaccatatactattac

SEQ ID NO: 9631 - DNA, 80 bp, synthetic construct
  misc_feature 1..80: note = Synthetic: >AdVB3-cand-33760-33839
  source 1..80: mol_type = other DNA
gattgcgtttcaagcagcagaggagagggaagagacggaagaatcatgttaatttttattccaaacgatctcgcagtact

SEQ ID NO: 9632 - DNA, 80 bp, synthetic construct
  misc_feature 1..80: note = Synthetic: >AdVB3-cand-13520-13599
  source 1..80: mol_type = other DNA
agtacttgaatgactctttgttgaggccagagagggaaaagaacttccccaacaatggaatagagagcctggtggataag

SEQ ID NO: 9633 - DNA, 80 bp, synthetic construct
  misc_feature 1..80: note = Synthetic: >HCV.A13-cand-6790-6869
  source 1..80: mol_type = other DNA
agtagactacattgattacctcaatcactcacaccacctgtacaaaaacaaaacttactgtgtcaagggcggcatgccat

SEQ ID NO: 9634 - DNA, 80 bp, synthetic construct
  misc_feature 1..80: note = Synthetic: >NC_001611.1-cand-75260-75339
  source 1..80: mol_type = other DNA
agtagctgttcaagaatatacaagtattatttttggaagacagccgtcgctacatagatacaacgtcatcgcttcatcta

SEQ ID NO: 9635 - DNA, 80 bp, synthetic construct
  misc_feature 1..80: note = Synthetic: >AdVB7-cand-8230-8309
  source 1..80: mol_type = other DNA
agtaggcagtgtcaggagattgacttgcatgatcttttcgagggcgtgagggaggttcagatggtacttgatctccacgg

SEQ ID NO: 9636 - DNA, 80 bp, synthetic construct
  misc_feature 1..80: note = Synthetic: >AJ616854.1-cand-0-79
  source 1..80: mol_type = other DNA
agtaggctccctaaagagcactatactaaaaatggcaacactagaggaactccaaaaagagatcaatagccatgagggcc

SEQ ID NO: 9637 - DNA, 80 bp, synthetic construct
  misc_feature 1..80: note = Synthetic: >NC_021546.1-cand-820-899
  source 1..80: mol_type = other DNA
ctgcatgtactccaattcgcgacttagtatcaaatatgactagatttgggtcaactgtttttaaatcaccaagttatact

SEQ ID NO: 9638 - DNA, 80 bp, synthetic construct
  misc_feature 1..80: note = Synthetic: >NC_001611.1-cand-30760-30839
  source 1..80: mol_type = other DNA
agtatactgttagcaacggtatatcgaatagattactcatgtaacctactagaatgatagttcgtgtactagtcataata

SEQ ID NO: 9639 - DNA, 80 bp, synthetic construct
  misc_feature 1..80: note = Synthetic: >NC_003310.1-cand-175500-175579
  source 1..80: mol_type = other DNA
agtatagatacaacggttactatcaatattattcatctagcgattatgaaaattataatgaatattattatgatgattat

SEQ ID NO: 9640 - DNA, 80 bp, synthetic construct
  misc_feature 1..80: note = Synthetic: >NC_003310.1-cand-102850-102929
  source 1..80: mol_type = other DNA
ataattctgtagttataaacgttccgtgtgtaataacctacgcatattatcacgttggggatatagtcagaggaacatta

SEQ ID NO: 9641 - DNA, 80 bp, synthetic construct
  misc_feature 1..80: note = Synthetic: >NC_001611.1-cand-22260-22339
  source 1..80: mol_type = other DNA
ctgttagtttccttaacaaatctaactggtgagttaatattcatgttgaacataaaactaatattttatttcaaaattat

SEQ ID NO: 9642 - DNA, 80 bp, synthetic construct
  misc_feature 1..80: note = Synthetic: >HCV.A19-cand-7240-7319
  source 1..80: mol_type = other DNA
atacaacaaattcttagctcaaattagaagcgtgccagttggccgtgctctgctcctaccggagtattctactcttcgca

SEQ ID NO: 9643 - DNA, 80 bp, synthetic construct
  misc_feature 1..80: note = Synthetic: >NC_003310.1-cand-184090-184169
  source 1..80: mol_type = other DNA
atacagcggataatattaagaaatacaagtttatcagaatggcaacgctactatccaaacatccagttattagattgaca

SEQ ID NO: 9644 - DNA, 80 bp, synthetic construct
  misc_feature 1..80: note = Synthetic: >U31794.1-cand-5560-5639
  source 1..80: mol_type = other DNA
atacagggagctacatttgcactatggcctgtatatttttttaaacgtaggcgccgtaaacgtattccctatttttttgc

SEQ ID NO: 9645 - DNA, 80 bp, synthetic construct
  misc_feature 1..80: note = Synthetic: >NC_003310.1-cand-51730-51809
  source 1..80: mol_type = other DNA
atacatacctgtttttgcacgagtcggatcccatggtcatagagaacggaatactaaagaaactgtcatctataaaatcc

SEQ ID NO: 9646 - DNA, 80 bp, synthetic construct
  misc_feature 1..80: note = Synthetic: >NC_001611.1-cand-21680-21759
  source 1..80: mol_type = other DNA
atacatagttgtgatcattattgctagccttatcttctatatcatctatatcatctatatcatctatatcatctatatca

SEQ ID NO: 9647 - DNA, 80 bp, synthetic construct
  misc_feature 1..80: note = Synthetic: >NC_003310.1-cand-53980-54059
  source 1..80: mol_type = other DNA
atacatattagggttatctgcggatttataatttgagtgatgcattcgactcaacataaataattctagaggagacgatc

SEQ ID NO: 9648 - DNA, 80 bp, synthetic construct
  misc_feature 1..80: note = Synthetic: >NC_003310.1-cand-50690-50769
  source 1..80: mol_type = other DNA
atacgaagcggttttacgacacgcatttgatgcacccacgttgtacgttaaagcattgactaagaattatttatcgttta

SEQ ID NO: 9649 - DNA, 80 bp, synthetic construct
  misc_feature 1..80: note = Synthetic: >HCV.A1-cand-6910-6989
  source 1..80: mol_type = other DNA
atacggagatgacgtcattgcgtcctacccacataaaattgatgctggcctcctagcccaagcaggaaaagactatggat

SEQ ID NO: 9650 - DNA, 80 bp, synthetic construct
  misc_feature 1..80: note = Synthetic: >NC_003310.1-cand-83620-83699
  source 1..80: mol_type = other DNA
ctgaatttatttcagaaattattcgtttactgaatcatatatgtattcattgcggattattgcgttcacgagaaccgtat

SEQ ID NO: 9651 - DNA, 80 bp, synthetic construct
  misc_feature 1..80: note = Synthetic: >NC_001611.1-cand-60630-60709
  source 1..80: mol_type = other DNA
atacgtgtaatgtaatcatataaatcatgcgatagccaaggaaaattcaaatagatgttcatcatataatcatcgctata

SEQ ID NO: 9652 - DNA, 80 bp, synthetic construct
  misc_feature 1..80: note = Synthetic: >NC_003310.1-cand-139130-139209
  source 1..80: mol_type = other DNA
atactatatataaaatatattgacccacgttagtaatcatgtaaatgtttaatgttttaaattttgtatttaatgatcca

SEQ ID NO: 9653 - DNA, 80 bp, synthetic construct
  misc_feature 1..80: note = Synthetic: >NC_007381.1-cand-1110-1189
  source 1..80: mol_type = other DNA
atactatggaatcaagtactcttgaactaagaagcaggtactgggccataaggaccagaagtggaggaaacactaatcaa

SEQ ID NO: 9654 - DNA, 80 bp, synthetic construct
  misc_feature 1..80: note = Synthetic: >NC_001611.1-cand-4350-4429
  source 1..80: mol_type = other DNA
atactggataaatacgaggacgtatataaagtaagtaaagaaaaagaatgtggaatttgctatgaagttgtctactcaaa

SEQ ID NO: 9655 - DNA, 80 bp, synthetic construct
  misc_feature 1..80: note = Synthetic: >NC_003310.1-cand-102050-102129
  source 1..80: mol_type = other DNA
atactttttctcaatacaaccaaattcttggacgatctattagaaaattctcttacgccgatatttctgaacccgttaat

SEQ ID NO: 9656 - DNA, 80 bp, synthetic construct
  misc_feature 1..80: note = Synthetic: >NC_003310.1-cand-68410-68489
  source 1..80: mol_type = other DNA
cccgctccttttggaggatcacaacaatttatttctaaatctatgagagatcaacgaaaaggaagagtaggaagagttaa

SEQ ID NO: 9657 - DNA, 80 bp, synthetic construct
  misc_feature 1..80: note = Synthetic: >AdVB3-cand-3590-3669
  source 1..80: mol_type = other DNA
cccgtccagcccgccaattcctcaacgctgacctatgccactttgagttcgtcaccattggatgcagctgcagccgccgc

SEQ ID NO: 9658 - DNA, 80 bp, synthetic construct
  misc_feature 1..80: note = Synthetic: >AdVB3-cand-22700-22779
  source 1..80: mol_type = other DNA
cccgttctcgctcgccacatccatctcaataatgtggtccttctggatcatgatagtgccatgcaggcatttcaccttgc

SEQ ID NO: 9659 - DNA, 80 bp, synthetic construct
  misc_feature 1..80: note = Synthetic: >NC_001430.1-cand-1400-1479
  source 1..80: mol_type = other DNA
ccctaccttttagatgatggtactagtttggcctgtgctcttgtataccctcaccagtggataaatcttagaaccaacaa

SEQ ID NO: 9660 - DNA, 80 bp, synthetic construct
  misc_feature 1..80: note = Synthetic: >AdVB7-cand-7350-7429
  source 1..80: mol_type = other DNA
tgataacctgagcggccaagacgatctcatcaaagccattgatgttgtgccccactatgtacagttctaagaatcgaggg

SEQ ID NO: 9661 - DNA, 80 bp, synthetic construct
  misc_feature 1..80: note = Synthetic: >NC_039477.1-cand-730-809
  source 1..80: mol_type = other DNA
ccctgcctaccatggatgactccaaaattaagaaggtagcaaatatattcctatgttcattgtccacattattcaccaga

SEQ ID NO: 9662 - DNA, 80 bp, synthetic construct
  misc_feature 1..80: note = Synthetic: >NC_001672.1-cand-80-159
  source 1..80: mol_type = other DNA
tcgtgaacgtgttgagaaaaagacagcttaggagaacaagagctggggatggtcaagaaggccatcctgaaaggtaaggg

SEQ ID NO: 9663 - DNA, 80 bp, synthetic construct
  misc_feature 1..80: note = Synthetic: >NC_001611.1-cand-8890-8969
  source 1..80: mol_type = other DNA
ccgaccaatctgggcgtataatgaatctgaactttaatttcttgtaatcattcgaaataatttttagtttgcatccgtag

SEQ ID NO: 9664 - DNA, 80 bp, synthetic construct
  misc_feature 1..80: note = Synthetic: >NC_001611.1-cand-26720-26799
  source 1..80: mol_type = other DNA
tagaacaaatagctacagtaaaaataactagaataatcgctacacccactagaaaccacggatcgtaatacggcaatcgg

SEQ ID NO: 9665 - DNA, 80 bp, synthetic construct
  misc_feature 1..80: note = Synthetic: >AdVB3-cand-12080-12159
  source 1..80: mol_type = other DNA
ccgcaatgcgggcggcgctgcagagccagccgtccggcattaactcctcggacgattggacccaggccatgcaacgcata

SEQ ID NO: 9666 - DNA, 80 bp, synthetic construct
  misc_feature 1..80: note = Synthetic: >AdVB3-cand-8380-8459
  source 1..80: mol_type = other DNA
ccttttgggcggcggtggctctgttgcttcttgcatgtttagaagcggtgtcgagggcgcgcaccgggcggcagtggcgg

SEQ ID NO: 9667 - DNA, 80 bp, synthetic construct
  misc_feature 1..80: note = Synthetic: >AdVB3-cand-8780-8859
  source 1..80: mol_type = other DNA
ccgcgaggtcgttggagatgcgcccaatgagttgagagaatgcattcatgcccgcctcgttccagacgcggctgtagacc

SEQ ID NO: 9668 - DNA, 80 bp, synthetic construct
  misc_feature 1..80: note = Synthetic: >AdVB3-cand-17200-17279
  source 1..80: mol_type = other DNA
ccgcgcgcgcgctaccatccaagcatcaccacttaatgactgttgacgctgcctccttgcagatatggccctcacttgcc

SEQ ID NO: 9669 - DNA, 80 bp, synthetic construct
  misc_feature 1..80: note = Synthetic: >AdVB7-cand-23720-23799
  source 1..80: mol_type = other DNA
ccgcgttcgggggtgtgctcccgttggcggtcgcttgactgatttcctccgcggctggccattgtgttctcctaggcaga

SEQ ID NO: 9670 - DNA, 80 bp, synthetic construct
  misc_feature 1..80: note = Synthetic: >AdVB3-cand-33600-33679
  source 1..80: mol_type = other DNA
ccgcttagtgtgttccgtctgataattcaagtacagccacactcttaagttggtcaaaagaatgctggcttcagttgtaa

SEQ ID NO: 9671 - DNA, 80 bp, synthetic construct
  misc_feature 1..80: note = Synthetic: >EVD70-cand-370-449
  source 1..80: mol_type = other DNA
cctacccatggctagcaccatgggacgctagttgtgaacaaggtgcgaagagcctattgagctacctgagagtcctccgg

SEQ ID NO: 9672 - DNA, 80 bp, synthetic construct
  misc_feature 1..80: note = Synthetic: >NC_003310.1-cand-45190-45269
  source 1..80: mol_type = other DNA
cttccatcaacttattaacatttttgactagggaagatacattatgacgtcccattacttttgccttgtctattacagcg

SEQ ID NO: 9673 - DNA, 80 bp, synthetic construct
  misc_feature 1..80: note = Synthetic: >NC_011504.2-cand-30-109
  source 1..80: mol_type = other DNA
cggaaagatggaaaagcttaccgacctcaattatacattgagtgtaatcactctaatgaacaatacattgcacacaatac

SEQ ID NO: 9674 - DNA, 80 bp, synthetic construct
  misc_feature 1..80: note = Synthetic: >AdVB7-cand-25450-25529
  source 1..80: mol_type = other DNA
tgtgcgctgccctccgactttgtgcctctcacctaccgcgagtgcccaccgccgctatggagccactgctacctgttccg

SEQ ID NO: 9675 - DNA, 80 bp, synthetic construct
  misc_feature 1..80: note = Synthetic: >NC_001611.1-cand-34900-34979
  source 1..80: mol_type = other DNA
tcgcccatgttttttatctctttcagtatgtgaatagataggtattttatctctattcatcatcgaatttaagagatccg

SEQ ID NO: 9676 - DNA, 80 bp, synthetic construct
  misc_feature 1..80: note = Synthetic: >NC_009824.1-cand-330-409
  source 1..80: mol_type = other DNA
gcaacatgagcacacttcctaaacctcaaagaaaaaccaaaagaaacaccatccgtcgcccacaggacgtcaagttcccg

SEQ ID NO: 9677 - DNA, 80 bp, synthetic construct
  misc_feature 1..80: note = Synthetic: >NC_003310.1-cand-40480-40559
  source 1..80: mol_type = other DNA
cgggacgcgtatatgtttctaaattcttaatccaaatataatgatgacctatatgccctattatcatactgtcaactata

SEQ ID NO: 9678 - DNA, 80 bp, synthetic construct
  misc_feature 1..80: note = Synthetic: >AdVB3-cand-16560-16639
  source 1..80: mol_type = other DNA
ggaggctgtgtccattcccttggatcatggaaatcccacccccagcctcaaaccagtcaccttgcagcaagtgctgcccg

SEQ ID NO: 9679 - DNA, 80 bp, synthetic construct
  misc_feature 1..80: note = Synthetic: >AdVB3-cand-5190-5269
  source 1..80: mol_type = other DNA
cggtgaaggggtgcgcgcctggttgggcgcttgcgagggtgcgcttcagactcatcctgctggtcgagaaccgctgccga

SEQ ID NO: 9680 - DNA, 80 bp, synthetic construct
  misc_feature 1..80: note = Synthetic: >AdVB7-cand-32970-33049
  source 1..80: mol_type = other DNA
cggtgcgcgcagcaacgcattctgatttcacttagattactacagtaggtacagcacattatcacaatattgtttaataa

SEQ ID NO: 9681 - DNA, 80 bp, synthetic construct
  misc_feature 1..80: note = Synthetic: >NC_001611.1-cand-64450-64529
  source 1..80: mol_type = other DNA
tttttattaattatactatgtcattaacaagtcatttaaatccatcgatagaaaaacatgtgggtatttattatggtacg

SEQ ID NO: 9682 - DNA, 80 bp, synthetic construct
  misc_feature 1..80: note = Synthetic: >NC_001611.1-cand-37060-37139
  source 1..80: mol_type = other DNA
ttttcttctttgaatggaataggtttttgaattagtttataattacaacataataaataaggaagtgtgcaaatagtacg

SEQ ID NO: 9683 - DNA, 80 bp, synthetic construct
  misc_feature 1..80: note = Synthetic: >AdVB3-cand-25090-25169
  source 1..80: mol_type = other DNA
cgtcgcctcggacctggcagacatcatcttccccgagcgtctcagggttactctgcgaaacggcctgccagactttatga

SEQ ID NO: 9684 - DNA, 80 bp, synthetic construct
  misc_feature 1..80: note = Synthetic: >NC_003310.1-cand-115980-116059
  source 1..80: mol_type = other DNA
gtatttaaacaaaggagaaaaatatttagttacggcatcagacgcaataacattttttgtaaatgtaacgtatttagacg

SEQ ID NO: 9685 - DNA, 80 bp, synthetic construct
  misc_feature 1..80: note = Synthetic: >NC_001611.1-cand-146730-146809
  source 1..80: mol_type = other DNA
cgtctcttcgtgaatttagaaaattatgctgtgctatatatcacgcatcaggatataaagaaaaatctaaattaattaga

SEQ ID NO: 9686 - DNA, 80 bp, synthetic construct
  misc_feature 1..80: note = Synthetic: >AdVB7-cand-22440-22519
  source 1..80: mol_type = other DNA
tctggacacgggagttgcggtacactgggttgcaacactggaacaccatcaaggctgggtgtctcacgcttgccagcacg

SEQ ID NO: 9687 - DNA, 80 bp, synthetic construct
  misc_feature 1..80: note = Synthetic: >AdVB3-cand-34080-34159
  source 1..80: mol_type = other DNA
cgtgtcagttcttgtggtaaatccaaaccacacattacaaacaggtcccggagggcgccctccaccaccattcttaaaca

SEQ ID NO: 9688 - DNA, 80 bp, synthetic construct
  misc_feature 1..80: note = Synthetic: >AF028027.1-cand-260-339
  source 1..80: mol_type = other DNA
aacagctaaagagctagaatcacatagacagagttgtcttaatgggcaatgcccatattgtatgacaatgacagaggcaa

SEQ ID NO: 9689 - DNA, 80 bp, synthetic construct
  misc_feature 1..80: note = Synthetic: >AF028027.1-cand-340-419
  source 1..80: mol_type = other DNA
cagaaagtgctttgcaagctcactattccatttgcaagttaactaataggtttcaggaagcactaaagaagtcattgaag

SEQ ID NO: 9690 - DNA, 80 bp, synthetic construct
  misc_feature 1..80: note = Synthetic: >AF028027.1-cand-420-499
  source 1..80: mol_type = other DNA
aaaccagaggtaagaagaggttgttacaaaacattaggtgtgtttagatacaaaagtagatgctatgtgggcttagtctg

SEQ ID NO: 9691 - DNA, 80 bp, synthetic construct
  misc_feature 1..80: note = Synthetic: >AF028027.1-cand-500-579
  source 1..80: mol_type = other DNA
gtgtatattgctaacctttgaattgatcatttgggctgtgagtgcagaaacccctcttcttgaagctggatggtcagata

SEQ ID NO: 9692 - DNA, 80 bp, synthetic construct
  misc_feature 1..80: note = Synthetic: >AF028027.1-cand-590-669
  source 1..80: mol_type = other DNA
tgttggagaacttccaatgaaaactgacttagaactggatttttccctaccatcttcatcctcatatagctataggagaa

SEQ ID NO: 9693 - DNA, 80 bp, synthetic construct
  misc_feature 1..80: note = Synthetic: >AF028027.1-cand-680-759
  source 1..80: mol_type = other DNA
tccggccaataaagaggaatctatcccatttcacttccaaatggaaaaacaaatcatacatgcagaaattcaaaacttgg

SEQ ID NO: 9694 - DNA, 80 bp, synthetic construct
  misc_feature 1..80: note = Synthetic: >AF028027.1-cand-760-839
  source 1..80: mol_type = other DNA
gtcattggatggatgcggtgctaaatatcaagactgcatttcattgttatggtgattgcaagaaatattcctacccatgg

SEQ ID NO: 9695 - DNA, 80 bp, synthetic construct
  misc_feature 1..80: note = Synthetic: >AF028027.1-cand-810-889
  source 1..80: mol_type = other DNA
ggtgattgcaagaaatattcctacccatggcaaacagcaaaatgtttttttgaaaaagattaccagtatgaaaatggttg

SEQ ID NO: 9696 - DNA, 80 bp, synthetic construct
  misc_feature 1..80: note = Synthetic: >AF028027.1-cand-920-999
  source 1..80: mol_type = other DNA
tgggacaggttgcactgcatgcgggatataccttgacaagttgaaatctgttggaaaggcatacaaaataatctccttaa

SEQ ID NO: 9697 - DNA, 80 bp, synthetic construct
  misc_feature 1..80: note = Synthetic: >AF028027.1-cand-1000-1079
  source 1..80: mol_type = other DNA
aatacaccaggaaagtatgtgttcaattagggacagagcaaacatgcaagcatattgatgcaaacgattgtcttgtaact

SEQ ID NO: 9698 - DNA, 80 bp, synthetic construct
  misc_feature 1..80: note = Synthetic: >AF028027.1-cand-1080-1159
  source 1..80: mol_type = other DNA
ccttctgttaaagtatgcattattgggactgtatccaaattacaaccatctgacactctactgtttctagggccattaga

SEQ ID NO: 9699 - DNA, 80 bp, synthetic construct
  misc_feature 1..80: note = Synthetic: >AF028027.1-cand-1220-1299
  source 1..80: mol_type = other DNA
cgacatcatgtctacaacaagtggtatgaggtgtccagaacacactggatcctttcggaagatttgtcactttgctacta

SEQ ID NO: 9700 - DNA, 80 bp, synthetic construct
  misc_feature 1..80: note = Synthetic: >AF028027.1-cand-1300-1379
  source 1..80: mol_type = other DNA
cacctgtatgcgagtatcaagggaatactgtctctggctataaaagattgatgggcacaaaaggttctttccaatcattt

SEQ ID NO: 9701 - DNA, 80 bp, synthetic construct
  misc_feature 1..80: note = Synthetic: >AF028027.1-cand-1380-1459
  source 1..80: mol_type = other DNA
aaccttacagaaccacatatcaccacaaataaacttgaatggattgacccagatggtaatacccgtgatcatgtaaatct

SEQ ID NO: 9702 - DNA, 80 bp, synthetic construct
  misc_feature 1..80: note = Synthetic: >AF028027.1-cand-1460-1539
  source 1..80: mol_type = other DNA
catcttaaatagagatgtgtcattccaggatctgagtgacaacccttgtaaagtagatttgcatacacaagcaattgaag

SEQ ID NO: 9703 - DNA, 80 bp, synthetic construct
  misc_feature 1..80: note = Synthetic: >AdVE4-cand-20360-20439
  source 1..80: mol_type = other DNA
cctactttgtctactcgggctccatcccctacctcgacggcaccttttacctcaaccacaccttcaagaaggtttcaatc

SEQ ID NO: 9704 - DNA, 80 bp, synthetic construct
  misc_feature 1..80: note = Synthetic: >AdVE4-cand-20440-20519
  source 1..80: mol_type = other DNA
accttcgactcttccgtcagctggcccggcaacgaccggctcctgacgcccaacgagtttgaaattaagcgcaccgtgga

SEQ ID NO: 9705 - DNA, 80 bp, synthetic construct
  misc_feature 1..80: note = Synthetic: >AdVE4-cand-20530-20609
  source 1..80: mol_type = other DNA
tacaacgtggcccagtgcaacatgaccaaggactggttcttggtccagatgctggcccattacaacattggctaccaggg

SEQ ID NO: 9706 - DNA, 80 bp, synthetic construct
  misc_feature 1..80: note = Synthetic: >AdVE4-cand-20610-20689
  source 1..80: mol_type = other DNA
cttctacgtgcccgagggctacaaggatcgcatgtactctttcttccgcaacttccagcccatgagccgccaggtggtgg

SEQ ID NO: 9707 - DNA, 80 bp, synthetic construct
  misc_feature 1..80: note = Synthetic: >AdVE4-cand-20690-20769
  source 1..80: mol_type = other DNA
acgaggttaactacaaggactaccaggccgtcaccctggcctatcagcacaacaactcgggctttgtcggttacctcgcg

SEQ ID NO: 9708 - DNA, 80 bp, synthetic construct
  misc_feature 1..80: note = Synthetic: >AdVE4-cand-20790-20869
  source 1..80: mol_type = other DNA
gccctaccccgccaactacccctacccgctcattggcaaaagcgccgtcaccagcgtcacccagaaaaagttcatctgcg

SEQ ID NO: 9709 - DNA, 80 bp, synthetic construct
  misc_feature 1..80: note = Synthetic: >AdVE4-cand-20850-20929
  source 1..80: mol_type = other DNA
ccagaaaaagttcatctgcgacagggtcatgtggcgcattcccttctccagcaacttcatgtccatgggcgcgctcaccg

SEQ ID NO: 9710 - DNA, 80 bp, synthetic construct
  misc_feature 1..80: note = Synthetic: >AdVE4-cand-20930-21009
  source 1..80: mol_type = other DNA
accttggccagaacatgctctatgctaactccgcccacgcgctagacatgaatttcgaagtcgaccccatggatgagtct

SEQ ID NO: 9711 - DNA, 80 bp, synthetic construct
  misc_feature 1..80: note = Synthetic: >AdVE4-cand-21010-21089
  source 1..80: mol_type = other DNA
acccttctctatgttgtcttcgaagtcttcgacgtcgtccgagtgcaccagccccaccgcggcgtcatcgaggccgtcta

SEQ ID NO: 9712 - DNA, 80 bp, synthetic construct
  misc_feature 1..80: note = Synthetic: >AdVE4-cand-21090-21169
  source 1..80: mol_type = other DNA
cctgcgcacccccttctcggccggtaacgccaccacataaattattgcttcttgcaagaagccatggccgcaggctccgg

SEQ ID NO: 9713 - DNA, 80 bp, synthetic construct
  misc_feature 1..80: note = Synthetic: >AdVE4-cand-21170-21249
  source 1..80: mol_type = other DNA
cgagcaggagcttagggccattatccgtgacctgggatgcgggccctacttcctgggcaccttcgataagcgctttccgg

SEQ ID NO: 9714 - DNA, 80 bp, synthetic construct
  misc_feature 1..80: note = Synthetic: >AdVE4-cand-21230-21309
  source 1..80: mol_type = other DNA
cttcgataagcgctttccgggattcatggccccgcacaagctggcctgcgccatcgtcaatacggccggtcgcgagaccg

SEQ ID NO: 9715 - DNA, 80 bp, synthetic construct
  misc_feature 1..80: note = Synthetic: >AdVE4-cand-21330-21409
  source 1..80: mol_type = other DNA
ttcgcctggaacccgcgctcgaacacctgctacctcttcgacccctttgggttctcggacgagcgcctcaagcagatcta

SEQ ID NO: 9716 - DNA, 80 bp, synthetic construct
  misc_feature 1..80: note = Synthetic: >AdVE4-cand-21410-21489
  source 1..80: mol_type = other DNA
ccagttcgagtacgagggcctgctgcgccgcagcgccctggccaccgaggatcgctgcgtcaccctggaaaagtccaccc

SEQ ID NO: 9717 - DNA, 80 bp, synthetic construct
  misc_feature 1..80: note = Synthetic: >AdVE4-cand-21490-21569
  source 1..80: mol_type = other DNA
agaccgtgcagggtccgcgctcggccgcctgcgggctcttctgctgcatgttcctgcacgccttcgtgcactggcccgac

SEQ ID NO: 9718 - DNA, 80 bp, synthetic construct
  misc_feature 1..80: note = Synthetic: >AdVE4-cand-21530-21609
  source 1..80: mol_type = other DNA
ctgctgcatgttcctgcacgccttcgtgcactggcccgaccgccccatggataagaaccctaccatgaacttgctgacgg

SEQ ID NO: 9719 - DNA, 80 bp, synthetic construct
  misc_feature 1..80: note = Synthetic: >EVB100-cand-4240-4319
  source 1..80: mol_type = other DNA
caccattgagcagagtgcaccctcacagagcgatcaggagcaactgttctccaatgtccaatactttgcacattattgca

SEQ ID NO: 9720 - DNA, 80 bp, synthetic construct
  misc_feature 1..80: note = Synthetic: >EVB100-cand-4310-4389
  source 1..80: mol_type = other DNA
cattattgcagaaagtacgcccccttgtatgctgctgaagccaaaagagtattctccctggaaaagaaaatgagcaacta

SEQ ID NO: 9721 - DNA, 80 bp, synthetic construct
  misc_feature 1..80: note = Synthetic: >EVB100-cand-4390-4469
  source 1..80: mol_type = other DNA
catacagttcaagtccaaatgccgtattgaacctgtctgtctcctgctccacgggtgtcccggtgctggcaagtccgtgg

SEQ ID NO: 9722 - DNA, 80 bp, synthetic construct
  misc_feature 1..80: note = Synthetic: >EVB100-cand-4470-4549
  source 1..80: mol_type = other DNA
caactaacctgattggccgttcgctagcagaaaaactcaacagttctgtgtactccttaccaccagaccctgatcatttt

SEQ ID NO: 9723 - DNA, 80 bp, synthetic construct
  misc_feature 1..80: note = Synthetic: >EVB100-cand-4540-4619
  source 1..80: mol_type = other DNA
tgatcattttgacggttacaaacagcaggctgtcgtgatcatggacgacttgtgccaaaatccagatggcaaggatgtgt

SEQ ID NO: 9724 - DNA, 80 bp, synthetic construct
  misc_feature 1..80: note = Synthetic: >EVB100-cand-4620-4699
  source 1..80: mol_type = other DNA
ccttattttgccagatggtgtcgagtgtcgactttgtgccgccaatggcagcacttgaggaaaagggcattctatttacg

SEQ ID NO: 9725 - DNA, 80 bp, synthetic construct
  misc_feature 1..80: note = Synthetic: >EVB100-cand-4730-4809
  source 1..80: mol_type = other DNA
gggtcaatcaatgctcccacggtgtcagatagtagggcacttgctaggaggttccattttgacatgaacatcgaggtaat

SEQ ID NO: 9726 - DNA, 80 bp, synthetic construct
  misc_feature 1..80: note = Synthetic: >EVB100-cand-4780-4859
  source 1..80: mol_type = other DNA
gttccattttgacatgaacatcgaggtaatctcgatgtacagccagaacggaaagatcaacatgccaatgtccgtaaaaa

SEQ ID NO: 9727 - DNA, 80 bp, synthetic construct
  misc_feature 1..80: note = Synthetic: >EVB100-cand-4860-4939
  source 1..80: mol_type = other DNA
cctgtgacgaggagtgttgcccggccaatttcaagaagtgttgtcccctggtttgtggaaaggccatacagttcatagac

SEQ ID NO: 9728 - DNA, 80 bp, synthetic construct
  misc_feature 1..80: note = Synthetic: >EVB100-cand-4940-5019
  source 1..80: mol_type = other DNA
aggcggacacaagtgaggtactcattagacatgcttgtgaccgagatgttcagagagtacaaccacagacacagtgtggg

SEQ ID NO: 9729 - DNA, 80 bp, synthetic construct
  misc_feature 1..80: note = Synthetic: >EVB100-cand-5020-5099
  source 1..80: mol_type = other DNA
cgccacactcgaggcccttttccaaggtccaccagtatacagggaaattaaaattagtgtggctccagagaccccccccc

SEQ ID NO: 9730 - DNA, 80 bp, synthetic construct
  misc_feature 1..80: note = Synthetic: >EVB100-cand-5100-5179
  source 1..80: mol_type = other DNA
caccagcaatagcagatctattgaaatccgtggatagtgaggcagttagagagtattgtaaggagaagggatggctagta

SEQ ID NO: 9731 - DNA, 80 bp, synthetic construct
  misc_feature 1..80: note = Synthetic: >EVB100-cand-5180-5259
  source 1..80: mol_type = other DNA
cccgagaccaactctactttacaaattgagaagcatgtgagtagggctttcatctgcctgcaagcactaactacatttgt

SEQ ID NO: 9732 - DNA, 80 bp, synthetic construct
  misc_feature 1..80: note = Synthetic: >EVB100-cand-5270-5349
  source 1..80: mol_type = other DNA
gggataatatacattatctacaagttatttgctggtttccagggagcttacactggtttgcctaaccagaaacccaaagt

SEQ ID NO: 9733 - DNA, 80 bp, synthetic construct
  misc_feature 1..80: note = Synthetic: >EVB100-cand-5340-5419
  source 1..80: mol_type = other DNA
aacccaaagtgccgaccctgagacaggctaaagttcaaggaccagcttttgaatttgcagtggccatgatgaaaagaaac

SEQ ID NO: 9734 - DNA, 80 bp, synthetic construct
  misc_feature 1..80: note = Synthetic: >EVB100-cand-5420-5499
  source 1..80: mol_type = other DNA
gccagtactgtaaaaaccgagtacggcgagttcacaatgctcggcatctacgacaggtgggcagtgttgccccgtcatgc

SEQ ID NO: 9735 - DNA, 80 bp, synthetic construct
  misc_feature 1..80: note = Synthetic: >EVB75-cand-5610-5689
  source 1..80: mol_type = other DNA
ttaaaacttaatagaaatgaaaagttcagagatattcgaggcttcctggcaagggaagaggtcgaagtcaatgaggctgt

SEQ ID NO: 9736 - DNA, 80 bp, synthetic construct
  misc_feature 1..80: note = Synthetic: >EVB75-cand-5690-5769
  source 1..80: mol_type = other DNA
actagctattaacaccagcaaatttccaaacatgtacatcccagttggtcaagtgacggactatggcttcctcaacctgg

SEQ ID NO: 9737 - DNA, 80 bp, synthetic construct
  misc_feature 1..80: note = Synthetic: >EVB75-cand-5850-5929
  source 1..80: mol_type = other DNA
ggcaaagtccttgggatacatgttggcgggaacggacaccaaggattttccgcggcactactgcgccactacttcaatga

SEQ ID NO: 9738 - DNA, 80 bp, synthetic construct
  misc_feature 1..80: note = Synthetic: >EVB75-cand-5930-6009
  source 1..80: mol_type = other DNA
tgaacaaggagagatagagttcattgagagctccaaggaagctggtttcccagtcattaacactccaagcaaaacaaagc

SEQ ID NO: 9739 - DNA, 80 bp, synthetic construct
  misc_feature 1..80: note = Synthetic: >EVB75-cand-5990-6069
  source 1..80: mol_type = other DNA
cactccaagcaaaacaaagctcgagcccagtgtcttccatcatgtgtttgagggaaacaaagaaccagcagtgttgagaa

SEQ ID NO: 9740 - DNA, 80 bp, synthetic construct
  misc_feature 1..80: note = Synthetic: >EVB75-cand-6090-6169
  source 1..80: mol_type = other DNA
gctaactttgaggaggccattttctccaaatacattggaaatgtgaacacacacgtggatgagtacatgatggaagccgt

SEQ ID NO: 9741 - DNA, 80 bp, synthetic construct
  misc_feature 1..80: note = Synthetic: >EVB75-cand-6170-6249
  source 1..80: mol_type = other DNA
agatcattatgcaggacagctggcaactctagacatcagcacagaacctatgaaactggaggacgcagtttatggcaccg

SEQ ID NO: 9742 - DNA, 80 bp, synthetic construct
  misc_feature 1..80: note = Synthetic: >EVB75-cand-6250-6329
  source 1..80: mol_type = other DNA
agggcttagaagcactagatttgaccacaagtgcagggtacccctatgttgcccttggcatcaaaaagagggatatttta

SEQ ID NO: 9743 - DNA, 80 bp, synthetic construct
  misc_feature 1..80: note = Synthetic: >EVB75-cand-6320-6399
  source 1..80: mol_type = other DNA
ggatattttatccaagaagaccaaggacctaacaaagctgaaagagtgcatggacaagtatgggctgaatctccccatgg

SEQ ID NO: 9744 - DNA, 80 bp, synthetic construct
  misc_feature 1..80: note = Synthetic: >EVB75-cand-6400-6479
  source 1..80: mol_type = other DNA
tcacttatgtgaaagacgagttgagatcagcagagaaggtggctaaaggcaaatccaggctaattgaagcatcaagtcta

SEQ ID NO: 9745 - DNA, 80 bp, synthetic construct
  misc_feature 1..80: note = Synthetic: >EVB75-cand-6480-6559
  source 1..80: mol_type = other DNA
aatgactcagtagccatgagacagacttttggaaacctgtacaaaacattccacctgaatccaggcatagtgacaggtag

SEQ ID NO: 9746 - DNA, 80 bp, synthetic construct
  misc_feature 1..80: note = Synthetic: >EVB75-cand-6560-6639
  source 1..80: mol_type = other DNA
tgcagttgggtgtgaccctgatctcttctggagcaaaatcccagtcatgcttgatggtcatctcattgcttttgactaca

SEQ ID NO: 9747 - DNA, 80 bp, synthetic construct
  misc_feature 1..80: note = Synthetic: >EVB75-cand-6640-6719
  source 1..80: mol_type = other DNA
gtggctatgatgctagtttgagtccagtgtggtttgcatgcttaaagttattgttagagaagttgggatactctcacaaa

SEQ ID NO: 9748 - DNA, 80 bp, synthetic construct
  misc_feature 1..80: note = Synthetic: >EVB75-cand-6700-6779
  source 1..80: mol_type = other DNA
agttgggatactctcacaaagaaaccaactacatagattacctatgcaactcccaccatttatacagagacaaacactac

SEQ ID NO: 9749 - DNA, 80 bp, synthetic construct
  misc_feature 1..80: note = Synthetic: >EVB75-cand-6800-6879
  source 1..80: mol_type = other DNA
atctggatgctcgggaaccagcattttcaattcaatgatcaacaacattatcatcagaacactaatgttgaaggtgtaca

SEQ ID NO: 9750 - DNA, 80 bp, synthetic construct
  misc_feature 1..80: note = Synthetic: >EVB75-cand-6890-6969
  source 1..80: mol_type = other DNA
cctggaccaatttaggatgatagcatatggtgatgatgtcattgcgtcgtatccacatcctatcgatgccgccctgctgg

SEQ ID NO: 9751 - DNA, 80 bp, synthetic construct
  misc_feature 1..80: note = Synthetic: >EVB82-cand-4820-4899
  source 1..80: mol_type = other DNA
gatttccatgtacagtcagagtggtaagatcaacatgccgatgtcagtgaagacgtgtgatgaagaatgttgcccagtta

SEQ ID NO: 9752 - DNA, 80 bp, synthetic construct
  misc_feature 1..80: note = Synthetic: >EVB82-cand-4900-4979
  source 1..80: mol_type = other DNA
acttcaagaaatgttgcccgctagtgtgcgggaaggctatccaattcattgacagaagaacccaagttagatattcttta

SEQ ID NO: 9753 - DNA, 80 bp, synthetic construct
  misc_feature 1..80: note = Synthetic: >EVB82-cand-4980-5059
  source 1..80: mol_type = other DNA
gatatgcttgtgactgagatgtttagggagtacaaccataggcacagtgttggagccactcttgaagcactgttccaagg

SEQ ID NO: 9754 - DNA, 80 bp, synthetic construct
  misc_feature 1..80: note = Synthetic: >EVB82-cand-5060-5139
  source 1..80: mol_type = other DNA
gccaccagtatatagagaaatcaaaattagcgtggcaccagagacaccaccaccaccagccattgcagacttgctcaagt

SEQ ID NO: 9755 - DNA, 80 bp, synthetic construct
  misc_feature 1..80: note = Synthetic: >EVB82-cand-5140-5219
  source 1..80: mol_type = other DNA
cagtggacagtgaggccgtgagagagtattgcaaagagaaaggatggctggtaccagagataagttccactctgcaaatt

SEQ ID NO: 9756 - DNA, 80 bp, synthetic construct
  misc_feature 1..80: note = Synthetic: >EVB82-cand-5220-5299
  source 1..80: mol_type = other DNA
gagaagcacgtcagcagggcctttatctgtttacaagcattgactaccttcgtctcagtggcaggaattatctacataat

SEQ ID NO: 9757 - DNA, 80 bp, synthetic construct
  misc_feature 1..80: note = Synthetic: >EVB82-cand-5240-5319
  source 1..80: mol_type = other DNA
ctttatctgtttacaagcattgactaccttcgtctcagtggcaggaattatctacataatctacaagctctttgcgggtt

SEQ ID NO: 9758 - DNA, 80 bp, synthetic construct
  misc_feature 1..80: note = Synthetic: >EVB82-cand-5400-5479
  source 1..80: mol_type = other DNA
ttcgaatttgctgtagccatgatgaagaagaattcaagtacggtgaaaaccgagtacggtgaatttaccatgttaggcat

SEQ ID NO: 9759 - DNA, 80 bp, synthetic construct
  misc_feature 1..80: note = Synthetic: >EVB82-cand-5460-5539
  source 1..80: mol_type = other DNA
gaatttaccatgttaggcatctacgacagatgggccgtcttaccacgccatgctaaacctggaccaaccattctaatgaa

SEQ ID NO: 9760 - DNA, 80 bp, synthetic construct
  misc_feature 1..80: note = Synthetic: >EVB82-cand-5530-5609
  source 1..80: mol_type = other DNA
ttctaatgaatgaccaagaagtcggagtattagatgccaaggagttggtggacaaggacggcaccaacctggagctgaca

SEQ ID NO: 9761 - DNA, 80 bp, synthetic construct
  misc_feature 1..80: note = Synthetic: >EVB82-cand-5610-5689
  source 1..80: mol_type = other DNA
ctactcaagctaaaccgaaatgagaagttcagggatataagaggcttcttggccaaggaagaggtggaggttaacgaggc

SEQ ID NO: 9762 - DNA, 80 bp, synthetic construct
  misc_feature 1..80: note = Synthetic: >EVB82-cand-5690-5769
  source 1..80: mol_type = other DNA
cgtacttgcaattaatactagcaagtttcccaacatgtacatccccgtaggacaggtctcagattatggcttcttgaacc

SEQ ID NO: 9763 - DNA, 80 bp, synthetic construct
  misc_feature 1..80: note = Synthetic: >EVB82-cand-5770-5849
  source 1..80: mol_type = other DNA
tgggcggtacacctaccaagagaatgcttatgtacaacttccccacaagggctggacagtgtggcggtgtgctcatgtcc

SEQ ID NO: 9764 - DNA, 80 bp, synthetic construct
  misc_feature 1..80: note = Synthetic: >EVB82-cand-5880-5959
  source 1..80: mol_type = other DNA
ggaaatggacaccaaggattctcagccgctctccttaaacactatttcaatgatgaacaaggagaaattgagtttatcga

SEQ ID NO: 9765 - DNA, 80 bp, synthetic construct
  misc_feature 1..80: note = Synthetic: >EVB82-cand-5930-6009
  source 1..80: mol_type = other DNA
tgatgaacaaggagaaattgagtttatcgaaagctcgaaagaagcgggattcccggttatcaacacgcctagtaagacca

SEQ ID NO: 9766 - DNA, 80 bp, synthetic construct
  misc_feature 1..80: note = Synthetic: >EVB82-cand-6010-6089
  source 1..80: mol_type = other DNA
aattagagcccagtgtcttccaccaagtctttgaaggcaacaaggaaccagcggtcctcaagaacggtgacccacgcctc

SEQ ID NO: 9767 - DNA, 80 bp, synthetic construct
  misc_feature 1..80: note = Synthetic: >EVD68-cand-3060-3139
  source 1..80: mol_type = other DNA
ctgacactattggcaacttgtgtgtcagaatagtgaatgaacatcaaccagttggttttacagtgaccgttagggtttac

SEQ ID NO: 9768 - DNA, 80 bp, synthetic construct
  misc_feature 1..80: note = Synthetic: >EVD68-cand-3140-3219
  source 1..80: mol_type = other DNA
atgaagcctaaacatataaaagcatgggctccacgaccaccgcgaaccatgccatacatgagcattgctaatgcaaatta

SEQ ID NO: 9769 - DNA, 80 bp, synthetic construct
  misc_feature 1..80: note = Synthetic: >EVD68-cand-3220-3299
  source 1..80: mol_type = other DNA
caaaggtagagatacagcaccaaacacacttaatgccataattggtaatagagcgagtgtcacaactatgcctcacaaca

SEQ ID NO: 9770 - DNA, 80 bp, synthetic construct
  misc_feature 1..80: note = Synthetic: >EVD68-cand-3330-3409
  source 1..80: mol_type = other DNA
tctttgtagggtcctttaagataattaactatcacttagccacaatagaagagagacaatcagccatctatgtggactgg

SEQ ID NO: 9771 - DNA, 80 bp, synthetic construct
  misc_feature 1..80: note = Synthetic: >EVD68-cand-3370-3449
  source 1..80: mol_type = other DNA
cacaatagaagagagacaatcagccatctatgtggactggcaatcagatgttctagtcacccccattgccgctcatggta

SEQ ID NO: 9772 - DNA, 80 bp, synthetic construct
  misc_feature 1..80: note = Synthetic: >EVD68-cand-3490-3569
  source 1..80: mol_type = other DNA
ctattgccggcacagagatagaagctacccaatttgctttgaaggtccaggaattcaatggattgaacaaaatgaatact

SEQ ID NO: 9773 - DNA, 80 bp, synthetic construct
  misc_feature 1..80: note = Synthetic: >EVD68-cand-3520-3599
  source 1..80: mol_type = other DNA
aatttgctttgaaggtccaggaattcaatggattgaacaaaatgaatactacccggcaagataccagactaatgtacttc

SEQ ID NO: 9774 - DNA, 80 bp, synthetic construct
  misc_feature 1..80: note = Synthetic: >EVD68-cand-3570-3649
  source 1..80: mol_type = other DNA
acccggcaagataccagactaatgtacttctagcagctggccctgcagaagcaggagattgtggtggtctattagtctgc

SEQ ID NO: 9775 - DNA, 80 bp, synthetic construct
  misc_feature 1..80: note = Synthetic: >EVD68-cand-3690-3769
  source 1..80: mol_type = other DNA
ggattgtagccttcacagacatcagaaatttactgtggttagatactgatgttatggaacaaggtattactgattacata

SEQ ID NO: 9776 - DNA, 80 bp, synthetic construct
  misc_feature 1..80: note = Synthetic: >EVD68-cand-3760-3839
  source 1..80: mol_type = other DNA
tgattacatacaaaatcttggtaatgcttttggagcaggattcacagaaacaatctccaataaggctaaggaagtgcaag

SEQ ID NO: 9777 - DNA, 80 bp, synthetic construct
  misc_feature 1..80: note = Synthetic: >EVD68-cand-3840-3919
  source 1..80: mol_type = other DNA
acatgttaattggagagagttcattattggaaaaattactaaaagctctaatcaaaattatatcagcactggtgattgtc

SEQ ID NO: 9778 - DNA, 80 bp, synthetic construct
  misc_feature 1..80: note = Synthetic: >EVD68-cand-3920-3999
  source 1..80: mol_type = other DNA
attagaaattcagaagatttgataacagttacagctacactagcattgttagggtgtcatgactcaccatggagctactt

SEQ ID NO: 9779 - DNA, 80 bp, synthetic construct
  misc_feature 1..80: note = Synthetic: >EVD68-cand-4000-4079
  source 1..80: mol_type = other DNA
gaagcaaaaagtatgctcatacttgggtattccctatgtgcctagacaaagtgaatcatggcttaagaagttcacagagg

SEQ ID NO: 9780 - DNA, 80 bp, synthetic construct
  misc_feature 1..80: note = Synthetic: >EVD68-cand-4100-4179
  source 1..80: mol_type = other DNA
ttagattggctatcacaaaagatagacaagttcattaattggctcaaaactaaaatattaccagaggctagggagaaata

SEQ ID NO: 9781 - DNA, 80 bp, synthetic construct
  misc_feature 1..80: note = Synthetic: >EVD68-cand-4160-4239
  source 1..80: mol_type = other DNA
ccagaggctagggagaaatatgaattcgtgcaaagactcaagcagctaccagtaatagaaaaacaagttagcactattga

SEQ ID NO: 9782 - DNA, 80 bp, synthetic construct
  misc_feature 1..80: note = Synthetic: >EVD68-cand-4240-4319
  source 1..80: mol_type = other DNA
gcatagttgcccaacaacagaacgacaacaggccttattcaacaatgttcagtattactcacattactgtaggaagtacg

SEQ ID NO: 9783 - DNA, 80 bp, synthetic construct
  misc_feature 1..80: note = Synthetic: >HCV.A15-cand-2160-2239
  source 1..80: mol_type = other DNA
aggtgcaaaaccacccaagaccaggaaggaagccatgcttggcacacacatcatttgggacattggattacagtcgtcag

SEQ ID NO: 9784 - DNA, 80 bp, synthetic construct
  misc_feature 1..80: note = Synthetic: >HCV.A15-cand-2240-2319
  source 1..80: mol_type = other DNA
ccacaatggttgttccatggatcagcaacgttatgtatcgaaggtgtgtcaaagacgatttcactgaaggaggttacatc

SEQ ID NO: 9785 - DNA, 80 bp, synthetic construct
  misc_feature 1..80: note = Synthetic: >HCV.A15-cand-2320-2399
  source 1..80: mol_type = other DNA
tcaatgttctaccagacaaaaatagtagtgcccctatcaacaccaacaaccatgacactcctcagcttcgtgtcggcatg

SEQ ID NO: 9786 - DNA, 80 bp, synthetic construct
  misc_feature 1..80: note = Synthetic: >HCV.A15-cand-2400-2479
  source 1..80: mol_type = other DNA
taatgatttcactgtgcggttgctgagagacactgctcacatttcacaaacaatccaaattaacacacaagggccaatag

SEQ ID NO: 9787 - DNA, 80 bp, synthetic construct
  misc_feature 1..80: note = Synthetic: >HCV.A15-cand-2480-2559
  source 1..80: mol_type = other DNA
aggagatcatctcgaccgtcgccagcaatgcacttgccctcagtcagcctaaaccggtggataattctgtacaaaacacc

SEQ ID NO: 9788 - DNA, 80 bp, synthetic construct
  misc_feature 1..80: note = Synthetic: >HCV.A15-cand-2560-2639
  source 1..80: mol_type = other DNA
caacagagcgcgcccgtgcacagccaagaggttccagcattaacagcagtagagactggagcaacaagtgatgtggtgcc

SEQ ID NO: 9789 - DNA, 80 bp, synthetic construct
  misc_feature 1..80: note = Synthetic: >HCV.A15-cand-2640-2719
  source 1..80: mol_type = other DNA
agctgatctagtgcaaaccaggcatgtagtgaatgtcaagtccagatctgagtccactatcgagtcgttctttgcaagag

SEQ ID NO: 9790 - DNA, 80 bp, synthetic construct
  misc_feature 1..80: note = Synthetic: >HCV.A15-cand-2720-2799
  source 1..80: mol_type = other DNA
ctgcctgcgtgactattatgcaggttgataactttaatgccaccaccacggaggacaagaggaagttatttgccaaatgg

SEQ ID NO: 9791 - DNA, 80 bp, synthetic construct
  misc_feature 1..80: note = Synthetic: >HCV.A15-cand-2800-2879
  source 1..80: mol_type = other DNA
gccatcacatacacagacacagtacaattgaggaggaaattggaatttttcacgtactccaggttcgatcttgagatgac

SEQ ID NO: 9792 - DNA, 80 bp, synthetic construct
  misc_feature 1..80: note = Synthetic: >HCV.A15-cand-2880-2959
  source 1..80: mol_type = other DNA
tttcgtgctaactgaaagatactattctcagagctcgggacacgctagatcgcaggtgtatcaaatcatgtacgtccctc

SEQ ID NO: 9793 - DNA, 80 bp, synthetic construct
  misc_feature 1..80: note = Synthetic: >HCV.A15-cand-2960-3039
  source 1..80: mol_type = other DNA
caggagcaccaacaccaaatgcatgggatgattacacgtggcagacgtcttctaacccatcaattttcttcaccactggt

SEQ ID NO: 9794 - DNA, 80 bp, synthetic construct
  misc_feature 1..80: note = Synthetic: >HCV.A15-cand-3040-3119
  source 1..80: mol_type = other DNA
aacgcacccccacgggtttcaatcccatttgtgggcattgcaaatgcttactcacacttttatgatggcttcagcagggt

SEQ ID NO: 9795 - DNA, 80 bp, synthetic construct
  misc_feature 1..80: note = Synthetic: >HCV.A15-cand-3120-3199
  source 1..80: mol_type = other DNA
acctttggaaggagagaccactgactcaggtgacgcttattatggcctcacttctatcaatgactttggaacacttgcag

SEQ ID NO: 9796 - DNA, 80 bp, synthetic construct
  misc_feature 1..80: note = Synthetic: >HCV.A15-cand-3200-3279
  source 1..80: mol_type = other DNA
taagagtggtcaatgactacaacccagcgagagtggagacaaggatcagagtctacatgaaacctaagcatgtgagagtg

SEQ ID NO: 9797 - DNA, 80 bp, synthetic construct
  misc_feature 1..80: note = Synthetic: >HCV.A15-cand-3280-3359
  source 1..80: mol_type = other DNA
tggtgtccacgaccccctagggctgtgagctacagaggacccggtgtggacctactgtccacctcagtgacgcccctatc

SEQ ID NO: 9798 - DNA, 80 bp, synthetic construct
  misc_feature 1..80: note = Synthetic: >HCV.A15-cand-3360-3439
  source 1..80: mol_type = other DNA
taagcatgaattgacaacgtacggattcggacaccagaacaaggcagtatacacagcaggttacaaaatttgcaattacc

SEQ ID NO: 9799 - DNA, 80 bp, synthetic construct
  misc_feature 1..80: note = Synthetic: >HCV.A2-cand-2820-2899
  source 1..80: mol_type = other DNA
ttcaatgctgaattcacttttgtggccaccactagggctgggcaggtgccgtctagggtgcttcagtacatgtacgtccc

SEQ ID NO: 9800 - DNA, 80 bp, synthetic construct
  misc_feature 1..80: note = Synthetic: >HCV.A2-cand-2920-2999
  source 1..80: mol_type = other DNA
acggtagggaggcttttcagtggcagtcctcaaccaacccatcagtgtttagtaagatgacagaccctccgccgcaagtg

SEQ ID NO: 9801 - DNA, 80 bp, synthetic construct
  misc_feature 1..80: note = Synthetic: >HCV.A2-cand-3000-3079
  source 1..80: mol_type = other DNA
tcagtaccatttatgtctcccgctagcgcttatcaatggttctacgacgggtatcccactttcggtgaacacaatggtga

SEQ ID NO: 9802 - DNA, 80 bp, synthetic construct
  misc_feature 1..80: note = Synthetic: >HCV.A2-cand-3070-3149
  source 1..80: mol_type = other DNA
acaatggtgaagacagcctgcggtacgggcaatgcccaaacaacgcactgggcacattctcagtaaggtttgtcagtgaa

SEQ ID NO: 9803 - DNA, 80 bp, synthetic construct
  misc_feature 1..80: note = Synthetic: >HCV.A2-cand-3150-3229
  source 1..80: mol_type = other DNA
gagatcaccaacgagcggatcaccatcaggatttacatgaggctcaagcacatacgagcttgggttccacgaccgctcag

SEQ ID NO: 9804 - DNA, 80 bp, synthetic construct
  misc_feature 1..80: note = Synthetic: >HCV.A2-cand-3230-3309
  source 1..80: mol_type = other DNA
gtctgaaccttacgtgctgaagaactttccaaattacactgccgttacccatgtcacagctaaccggcctagcatcacca

SEQ ID NO: 9805 - DNA, 80 bp, synthetic construct
  misc_feature 1..80: note = Synthetic: >HCV.A2-cand-3340-3419
  source 1..80: mol_type = other DNA
ccatatacgttggcagctatagagtagtgaacagacaccttgccactcacaatgattgggctaacttagtgtgggaagac

SEQ ID NO: 9806 - DNA, 80 bp, synthetic construct
  misc_feature 1..80: note = Synthetic: >HCV.A2-cand-3380-3459
  source 1..80: mol_type = other DNA
tgccactcacaatgattgggctaacttagtgtgggaagacagctccagagaccttttggtatcttcaaccaccggccagg

SEQ ID NO: 9807 - DNA, 80 bp, synthetic construct
  misc_feature 1..80: note = Synthetic: >HCV.A2-cand-3500-3579
  source 1..80: mol_type = other DNA
gtattattgcaactcccggaggaaacactatccagtcagtttttctaaacctagcctggtgttcgtcgaggccagcgagt

SEQ ID NO: 9808 - DNA, 80 bp, synthetic construct
  misc_feature 1..80: note = Synthetic: >HCV.A2-cand-3550-3629
  source 1..80: mol_type = other DNA
ctagcctggtgttcgtcgaggccagcgagtattacccagccaggtaccaatcacacctcatgctggccgagggacactca

SEQ ID NO: 9809 - DNA, 80 bp, synthetic construct
  misc_feature 1..80: note = Synthetic: >HCV.A2-cand-3630-3709
  source 1..80: mol_type = other DNA
gagcctggagattgtggtggtattctcaggtgtcagcacggtgtcgtgggaattgtatccactggagggaacggtcttgt

SEQ ID NO: 9810 - DNA, 80 bp, synthetic construct
  misc_feature 1..80: note = Synthetic: >HCV.A2-cand-3720-3799
  source 1..80: mol_type = other DNA
gatgttagggacctgctttggcttgatgaagaagctatggagcagggagtatctgattacatcaaaggtctcggcgatgc

SEQ ID NO: 9811 - DNA, 80 bp, synthetic construct
  misc_feature 1..80: note = Synthetic: >HCV.A2-cand-3790-3869
  source 1..80: mol_type = other DNA
tcggcgatgccttcggcacgggctttactgacgcagtgtctagggaggtggaagcattaaaaaaccacttgatcggttct

SEQ ID NO: 9812 - DNA, 80 bp, synthetic construct
  misc_feature 1..80: note = Synthetic: >HCV.A2-cand-3880-3959
  source 1..80: mol_type = other DNA
tcgaaaaaatcttgaagaatctggtgaaactaatttcagccttagttatagtcatcaggagcgattacgacatggtcact

SEQ ID NO: 9813 - DNA, 80 bp, synthetic construct
  misc_feature 1..80: note = Synthetic: >HCV.A2-cand-3950-4029
  source 1..80: mol_type = other DNA
catggtcactctcacggctacgcttgctctgatcgggtgccatgggagtccttgggcgtggattaaatcaaagacagctt

SEQ ID NO: 9814 - DNA, 80 bp, synthetic construct
  misc_feature 1..80: note = Synthetic: >HCV.A2-cand-4030-4109
  source 1..80: mol_type = other DNA
ccatcctaggtattcccatggcacaaaagcagagtgactcatggttaaagaagtttaatgacatggcaaatgctgcaaaa

SEQ ID NO: 9815 - DNA, 80 bp, synthetic construct
  misc_feature 1..80: note = Synthetic: >HCV.A2-cand-5490-5569
  source 1..80: mol_type = other DNA
cactcacagccagggaaaaccatctggatagagcacaaattggttaacatactagatgcagctgaactggtggatgagca

SEQ ID NO: 9816 - DNA, 80 bp, synthetic construct
  misc_feature 1..80: note = Synthetic: >HCV.A2-cand-5570-5649
  source 1..80: mol_type = other DNA
aggtgttaatttagaacttacactggtgaccttggacactaatgagaagtttagggatatcactaagttcatcccagaga

SEQ ID NO: 9817 - DNA, 80 bp, synthetic construct
  misc_feature 1..80: note = Synthetic: >HCV.A2-cand-5650-5729
  source 1..80: mol_type = other DNA
caatcactggagcgagtgatgcaacattagttatcaacactgagcacatgccctcaatgtttgtgccagtgggtgatgtt

SEQ ID NO: 9818 - DNA, 80 bp, synthetic construct
  misc_feature 1..80: note = Synthetic: >HCV.A2-cand-5730-5809
  source 1..80: mol_type = other DNA
gtgcaatatgggttcttgaatctcagtggtaaacctactcacagaaccatgatgtacaatttccccacaaaagcaggaca

SEQ ID NO: 9819 - DNA, 80 bp, synthetic construct
  misc_feature 1..80: note = Synthetic: >HCV.A2-cand-5820-5899
  source 1..80: mol_type = other DNA
gtagtcacttcagttggcaaggtcattggaatccacattggcggaaatggacgccagggcttttgcgccggcttaaagag

SEQ ID NO: 9820 - DNA, 80 bp, synthetic construct
  misc_feature 1..80: note = Synthetic: >HCV.A2-cand-5890-5969
  source 1..80: mol_type = other DNA
gcttaaagaggagctactttgctagtgaacaaggagagatccagtggatgaaacctaacaaagaaactgggaggctgaat

SEQ ID NO: 9821 - DNA, 80 bp, synthetic construct
  misc_feature 1..80: note = Synthetic: >HCV.A2-cand-5970-6049
  source 1..80: mol_type = other DNA
atcaatggtccaactcgaaccaaattagaacccagtgtgtttcatgatgtgtttgagggcaataaggagccggcagttct

SEQ ID NO: 9822 - DNA, 80 bp, synthetic construct
  misc_feature 1..80: note = Synthetic: >HCV.A2-cand-6050-6129
  source 1..80: mol_type = other DNA
gaccagcaaagatcccaggttggaggttgatttcgaacaagccctgttctctaaatacgtgggaaacaccctacacgagc

SEQ ID NO: 9823 - DNA, 80 bp, synthetic construct
  misc_feature 1..80: note = Synthetic: >HCV.A2-cand-6130-6209
  source 1..80: mol_type = other DNA
ccgatgagtatgtgacacaagctgcccttcactacgcaaatcaactaaaacaactagacataaataccagtaagatgagc

SEQ ID NO: 9824 - DNA, 80 bp, synthetic construct
  misc_feature 1..80: note = Synthetic: >HCV.A2-cand-6210-6289
  source 1..80: mol_type = other DNA
atggaggaagcatgctatggcacagagaatttggaggctattgatctgcacaccagtgctggatatccttatagtgcttt

SEQ ID NO: 9825 - DNA, 80 bp, synthetic construct
  misc_feature 1..80: note = Synthetic: >HCV.A2-cand-6290-6369
  source 1..80: mol_type = other DNA
gggcattaaaaagagggacattctcgatccagtcactagggacacctccaagatgaaactatatatggataagtatgggt

SEQ ID NO: 9826 - DNA, 80 bp, synthetic construct
  misc_feature 1..80: note = Synthetic: >HCV.A2-cand-6370-6449
  source 1..80: mol_type = other DNA
tggatttgccctactccacctatgtgaaggatgagcttaggtccctagataaaatcaagaagggaaaatctcgcttgatt

SEQ ID NO: 9827 - DNA, 80 bp, synthetic construct
  misc_feature 1..80: note = Synthetic: >HCV.A2-cand-6450-6529
  source 1..80: mol_type = other DNA
gaagccagcagtctaaatgactctgtctatcttagaatgacttttggccatctttatgaggtattccacgccaatccggg

SEQ ID NO: 9828 - DNA, 80 bp, synthetic construct
  misc_feature 1..80: note = Synthetic: >HCV.A2-cand-6560-6639
  source 1..80: mol_type = other DNA
tcctgacgtgttttggagcaagctgccaatcctactaccaggctcgctctttgcatttgactactcagggtacgatgcaa

SEQ ID NO: 9829 - DNA, 80 bp, synthetic construct
  misc_feature 1..80: note = Synthetic: >HCV.A2-cand-6610-6689
  source 1..80: mol_type = other DNA
ttgcatttgactactcagggtacgatgcaagcctcagtcctgtgtggttcagagctctagaactggttctacgagagatt

SEQ ID NO: 9830 - DNA, 80 bp, synthetic construct
  misc_feature 1..80: note = Synthetic: >HCV.A2-cand-6690-6769
  source 1..80: mol_type = other DNA
ggttactcggaggaggctgtgtcactcatagaagggattaatcacacccaccatgtgtatcggaacaagacatactgcgt

SEQ ID NO: 9831 - DNA, 80 bp, synthetic construct
  misc_feature 1..80: note = Synthetic: >HCV.B1-cand-5020-5099
  source 1..80: mol_type = other DNA
agtatatagagagattaagatcagtgttgcaccagaaacaccaccaccacctgcaattgcggatctgctcaaatcagtgg

SEQ ID NO: 9832 - DNA, 80 bp, synthetic construct
  misc_feature 1..80: note = Synthetic: >HCV.B1-cand-5100-5179
  source 1..80: mol_type = other DNA
acagtgaggctgtgagagagtactgcaaagaaaagggatggttggtgcctgagatcaactccactctacaaattgaaaaa

SEQ ID NO: 9833 - DNA, 80 bp, synthetic construct
  misc_feature 1..80: note = Synthetic: >HCV.B1-cand-5170-5249
  source 1..80: mol_type = other DNA
aattgaaaaacatgtcagtagagccttcatctgcctgcaagcactcaccacatttgtctcagtagcagggatcatctaca

SEQ ID NO: 9834 - DNA, 80 bp, synthetic construct
  misc_feature 1..80: note = Synthetic: >HCV.B1-cand-5250-5329
  source 1..80: mol_type = other DNA
tcatatacaagctgtttgcaggcttccaaggagcatacacaggaatgcccaaccagaagcccaaggtacccaccctgagg

SEQ ID NO: 9835 - DNA, 80 bp, synthetic construct
  misc_feature 1..80: note = Synthetic: >HCV.B1-cand-5330-5409
  source 1..80: mol_type = other DNA
caagcaaaagtgcaaggtcctgcttttgaatttgccgtggccatgatgaagaggaacgccagcacagtgaaaactgagta

SEQ ID NO: 9836 - DNA, 80 bp, synthetic construct
  misc_feature 1..80: note = Synthetic: >HCV.B1-cand-5410-5489
  source 1..80: mol_type = other DNA
tggtgagttcaccatgctgggcatctatgacaggtgggcagtgttaccacgccacgccaaacctgggccaaccatcctga

SEQ ID NO: 9837 - DNA, 80 bp, synthetic construct
  misc_feature 1..80: note = Synthetic: >HCV.B1-cand-5490-5569
  source 1..80: mol_type = other DNA
tgaatgaccaggaagttggtgtgttggacgccaaagagttggtggacaaggatggcacaaacctagaactgacactgctg

SEQ ID NO: 9838 - DNA, 80 bp, synthetic construct
  misc_feature 1..80: note = Synthetic: >HCV.B1-cand-5570-5649
  source 1..80: mol_type = other DNA
aaactcaacagaaatgagaagttcagagacatcagaggcttcttagccagggaggaggtggaagtcaacgaggctgtgct

SEQ ID NO: 9839 - DNA, 80 bp, synthetic construct
  misc_feature 1..80: note = Synthetic: >HCV.B1-cand-5650-5729
  source 1..80: mol_type = other DNA
agcaattaacaccagcaaattcccaaacatgtacatcccagtgggacaggtcacggattatggcttcctcaacctgggtg

SEQ ID NO: 9840 - DNA, 80 bp, synthetic construct
  misc_feature 1..80: note = Synthetic: >HCV.B1-cand-5730-5809
  source 1..80: mol_type = other DNA
gtacacccaccaagagaatgctcatgtacaacttccccacaagggcaggtcagtgtggtggcgtgctaatgtccactggc

SEQ ID NO: 9841 - DNA, 80 bp, synthetic construct
  misc_feature 1..80: note = Synthetic: >HCV.B1-cand-5810-5889
  source 1..80: mol_type = other DNA
aaagtcttgggaatacatgttggtggaaatggacatcaaggcttctcagcagcacttctcaaacactatttcaatgacga

SEQ ID NO: 9842 - DNA, 80 bp, synthetic construct
  misc_feature 1..80: note = Synthetic: >HCV.B1-cand-5870-5949
  source 1..80: mol_type = other DNA
aaacactatttcaatgacgaacaaggagaaatcgagttcattgagagctccaaggacgcaggcttcccagtcatcaacac

SEQ ID NO: 9843 - DNA, 80 bp, synthetic construct
  misc_feature 1..80: note = Synthetic: >HCV.B1-cand-5950-6029
  source 1..80: mol_type = other DNA
acctagcaaaacaaaactggaaccaagtgtcttccaccaggtgtttgaaggaaataaagagccagcagtccttaggaatg

SEQ ID NO: 9844 - DNA, 80 bp, synthetic construct
  misc_feature 1..80: note = Synthetic: >HCV.B1-cand-6030-6109
  source 1..80: mol_type = other DNA
gtgacccacgcctcaaagccaactttgaggaggccatcttttccaaatacattggaaatgtcaacacacatgtggatgag

SEQ ID NO: 9845 - DNA, 80 bp, synthetic construct
  misc_feature 1..80: note = Synthetic: >HCV.B1-cand-6110-6189
  source 1..80: mol_type = other DNA
tacatgctggaagccgttgaccattatgcaggacaactggcaaccctagacatcagcacagaaccaatgaaattggagga

SEQ ID NO: 9846 - DNA, 80 bp, synthetic construct
  misc_feature 1..80: note = Synthetic: >HCV.B1-cand-6190-6269
  source 1..80: mol_type = other DNA
tgctgtatatggtactgaaggcttggaagcgcttgatttaaccacgagtgcaggctacccctatgtcgccctaggtatta

SEQ ID NO: 9847 - DNA, 80 bp, synthetic construct
  misc_feature 1..80: note = Synthetic: >HCV.B6-cand-1060-1139
  source 1..80: mol_type = other DNA
tggcccgattacctgcatgatgatgaagcaactgcagaggaccaaccgacacaaccagacgtagccacctgcaggtttta

SEQ ID NO: 9848 - DNA, 80 bp, synthetic construct
  misc_feature 1..80: note = Synthetic: >HCV.B6-cand-1120-1199
  source 1..80: mol_type = other DNA
gtagccacctgcaggttttacacattggactctgtttcgtggcaatcatcatcagcagggtggtggtggaagtttcctga

SEQ ID NO: 9849 - DNA, 80 bp, synthetic construct
  misc_feature 1..80: note = Synthetic: >HCV.B6-cand-1180-1259
  source 1..80: mol_type = other DNA
tggtggtggaagtttcctgatgcgctgtccaatatgggcctgttcgggcaaaatatgcagtatcactacctaggtagatc

SEQ ID NO: 9850 - DNA, 80 bp, synthetic construct
  misc_feature 1..80: note = Synthetic: >HCV.B6-cand-1280-1359
  source 1..80: mol_type = other DNA
agtgcaacgcatccaaatttcaccaagggtgcctcttggtggtgtgcgtgccggaagcagaaatgggttgctctaaccta

SEQ ID NO: 9851 - DNA, 80 bp, synthetic construct
  misc_feature 1..80: note = Synthetic: >HCV.B6-cand-1310-1389
  source 1..80: mol_type = other DNA
gcctcttggtggtgtgcgtgccggaagcagaaatgggttgctctaacctaaacaacgctccactagcggctgacctgagt

SEQ ID NO: 9852 - DNA, 80 bp, synthetic construct
  misc_feature 1..80: note = Synthetic: >HCV.B6-cand-1480-1559
  source 1..80: mol_type = other DNA
gcagtgggaaacctaacaattttcccgcatcagtggattaatttacgcacgaacaacagtgctacaatagtaatgccata

SEQ ID NO: 9853 - DNA, 80 bp, synthetic construct
  misc_feature 1..80: note = Synthetic: >HCV.B6-cand-1520-1599
  source 1..80: mol_type = other DNA
atttacgcacgaacaacagtgctacaatagtaatgccatacataaatagtgtgcccatggacaatatgttcaggcacaat

SEQ ID NO: 9854 - DNA, 80 bp, synthetic construct
  misc_feature 1..80: note = Synthetic: >HCV.B6-cand-1570-1649
  source 1..80: mol_type = other DNA
gtgcccatggacaatatgttcaggcacaataactttactctgatgatcattcccttcgcaaagttagcatactctgatgg

SEQ ID NO: 9855 - DNA, 80 bp, synthetic construct
  misc_feature 1..80: note = Synthetic: >HCV.B6-cand-1680-1759
  source 1..80: mol_type = other DNA
catagcaccaatgaacgctgaatacaacggattaaggctagcagggcaccagggcttacccgtgatgaccacacccggta

SEQ ID NO: 9856 - DNA, 80 bp, synthetic construct
  misc_feature 1..80: note = Synthetic: >HCV.B6-cand-1760-1839
  source 1..80: mol_type = other DNA
gcacccagttcctaacttcagatgatttccaatcaccatgtgccatgccacaatttgatgtaaccccagagatgaacatt

SEQ ID NO: 9857 - DNA, 80 bp, synthetic construct
  misc_feature 1..80: note = Synthetic: >HCV.B6-cand-1840-1919
  source 1..80: mol_type = other DNA
ccaggacaggtgaataacctaatggagattgcggaagtcgactcagtggttccggtcaacaacaccgaaactaatgtaaa

SEQ ID NO: 9858 - DNA, 80 bp, synthetic construct
  misc_feature 1..80: note = Synthetic: >HCV.B6-cand-1920-1999
  source 1..80: mol_type = other DNA
tggcatggatgcatatcgcatacctgtacaatcgaacatggataccggtggccaagtgtttggctttcccttacaaccgg

SEQ ID NO: 9859 - DNA, 80 bp, synthetic construct
  misc_feature 1..80: note = Synthetic: >HCV.B6-cand-2000-2079
  source 1..80: mol_type = other DNA
gagctagtagcgtattccaacgcacactgttgggcgagattttaaactactacacacactggtcaggcagcattaaactc

SEQ ID NO: 9860 - DNA, 80 bp, synthetic construct
  misc_feature 1..80: note = Synthetic: >HCV.B6-cand-2080-2159
  source 1..80: mol_type = other DNA
accttcatgttttgtggatccgccatggccactggtaagtttttgctagcctactcccctccaggcgccggtgcaccaaa

SEQ ID NO: 9861 - DNA, 80 bp, synthetic construct
  misc_feature 1..80: note = Synthetic: >HCV.B6-cand-2160-2239
  source 1..80: mol_type = other DNA
gagtcgtaaggatgctatgttaggaacccatgtgatttgggatgttggtttgcagtccagctgtgtgctatgtataccat

SEQ ID NO: 9862 - DNA, 80 bp, synthetic construct
  misc_feature 1..80: note = Synthetic: >HCV.B6-cand-2240-2319
  source 1..80: mol_type = other DNA
ggattagccagacacattacagattcgtggtggcagatgagtacacagctggcggtttcataacctgctggtatcaaaca

SEQ ID NO: 9863 - DNA, 80 bp, synthetic construct
  misc_feature 1..80: note = Synthetic: >LC270039.1-cand-3150-3229
  source 1..80: mol_type = other DNA
atttacttggtgagtgtgaatgtacaattgtagaaggacaagtagattattatgggttatattattggtgtgatggagaa

SEQ ID NO: 9864 - DNA, 80 bp, synthetic construct
  misc_feature 1..80: note = Synthetic: >LC270039.1-cand-3230-3309
  source 1..80: mol_type = other DNA
aaaacatattttgtaaaattcagtaacgatgcaaagcaatattgtgcaacaggagtatgggaagtacatgtgggtggtca

SEQ ID NO: 9865 - DNA, 80 bp, synthetic construct
  misc_feature 1..80: note = Synthetic: >LC270039.1-cand-3310-3389
  source 1..80: mol_type = other DNA
ggtaattgtttgtcctgcatctgtatctagtaacgaagtatccactactgaaactgctgtccacctatgcaccgaaacct

SEQ ID NO: 9866 - DNA, 80 bp, synthetic construct
  misc_feature 1..80: note = Synthetic: >LC270039.1-cand-3390-3469
  source 1..80: mol_type = other DNA
ccaagacctccgcattgtccgtgggtgccaaagacacacacctacaaccaccacagaaacgacgacgaccagacgtcaca

SEQ ID NO: 9867 - DNA, 80 bp, synthetic construct
  misc_feature 1..80: note = Synthetic: >LC270039.1-cand-3430-3509
  source 1..80: mol_type = other DNA
cctacaaccaccacagaaacgacgacgaccagacgtcacagactccagaaacaccaagtaccccaacaaccttttgcggg

SEQ ID NO: 9868 - DNA, 80 bp, synthetic construct
  misc_feature 1..80: note = Synthetic: >LC270039.1-cand-3550-3629
  source 1..80: mol_type = other DNA
tgcaactgagtgcacaaacaaaggacgggttgcacatacaacttgtactgcacctataatacacctaaaaggtgatccta

SEQ ID NO: 9869 - DNA, 80 bp, synthetic construct
  misc_feature 1..80: note = Synthetic: >LC270039.1-cand-3630-3709
  source 1..80: mol_type = other DNA
atagtttaaaatgtttaagatatagggtaaaaccacataacagtttgtatgttcaaatttcatctacctggcattggacc

SEQ ID NO: 9870 - DNA, 80 bp, synthetic construct
  misc_feature 1..80: note = Synthetic: >LC270039.1-cand-3700-3779
  source 1..80: mol_type = other DNA
gcattggaccagtaatgaatgtacaaatactaaactaggtattgtaacaataacatacagtgatgaagcacaacgtgaac

SEQ ID NO: 9871 - DNA, 80 bp, synthetic construct
  misc_feature 1..80: note = Synthetic: >LC270039.1-cand-3780-3859
  source 1..80: mol_type = other DNA
aatttttaaaaactgttaaaataccaaatactgtgcaagttatacaaggtgtcatgtcattgtaatatttgtacatatgt

SEQ ID NO: 9872 - DNA, 80 bp, synthetic construct
  misc_feature 1..80: note = Synthetic: >LC270039.1-cand-3860-3939
  source 1..80: mol_type = other DNA
atatatgtatatgtgtatggtaaacacccaacacaagccaatattgctgctattgtgtatatataacaatgttaggatta

SEQ ID NO: 9873 - DNA, 80 bp, synthetic construct
  misc_feature 1..80: note = Synthetic: >LC270039.1-cand-3940-4019
  source 1..80: mol_type = other DNA
tttgtattttgttttattttgcttatggtgttttgtgcagtgcttaggccgctcttgctatctatatcggtgtatgcgca

SEQ ID NO: 9874 - DNA, 80 bp, synthetic construct
  misc_feature 1..80: note = Synthetic: >LC270039.1-cand-4020-4099
  source 1..80: mol_type = other DNA
ggtgttggtgctggtgcttttgctatgggtgtctattgggtcaccatttaaagtgttttttttgtacctactgtttttat

SEQ ID NO: 9875 - DNA, 80 bp, synthetic construct
  misc_feature 1..80: note = Synthetic: >LC270039.1-cand-4100-4179
  source 1..80: mol_type = other DNA
attttccaatgttttgtattcactgtcatgcacagtatttggcacaactgcaataactattgtacaaaactgttgtgtgt

SEQ ID NO: 9876 - DNA, 80 bp, synthetic construct
  misc_feature 1..80: note = Synthetic: >LC270039.1-cand-4180-4259
  source 1..80: mol_type = other DNA
actgctgtacatgtagattggctacatgcatatatgcaaaatatacttttttacttttgtagtttgtctaataaatactt

SEQ ID NO: 9877 - DNA, 80 bp, synthetic construct
  misc_feature 1..80: note = Synthetic: >LC270039.1-cand-4260-4339
  source 1..80: mol_type = other DNA
ttatattttttaatagcttgtcgcaatgagatacagacggtctacacggcacaaacgtgcttctgcaacacagctatatc

SEQ ID NO: 9878 - DNA, 80 bp, synthetic construct
  misc_feature 1..80: note = Synthetic: >LC270039.1-cand-4340-4419
  source 1..80: mol_type = other DNA
aaacatgcaaagcctctggcacctgcccccccgatgttattcctaaagtggaaggcacaactattgcagatcaactttta

SEQ ID NO: 9879 - DNA, 80 bp, synthetic construct
  misc_feature 1..80: note = Synthetic: >MH539865.1-cand-1560-1639
  source 1..80: mol_type = other DNA
tttgtttatcctaccatcaaaatcacttgaagttgtgggatcatatatacggtactttacagtattcaaggatgggatag

SEQ ID NO: 9880 - DNA, 80 bp, synthetic construct
  misc_feature 1..80: note = Synthetic: >MH539865.1-cand-1620-1699
  source 1..80: mol_type = other DNA
agtattcaaggatgggataggtatgatagatgaagagaatctagattcaaaagtggatattgacggtgttacttggtgtt

SEQ ID NO: 9881 - DNA, 80 bp, synthetic construct
  misc_feature 1..80: note = Synthetic: >MH539865.1-cand-1710-1789
  source 1..80: mol_type = other DNA
gatgagtattgacttaaatagactattagctctaaatatagcatttgagaaggcacttcttgccacagctacatggttcc

SEQ ID NO: 9882 - DNA, 80 bp, synthetic construct
  misc_feature 1..80: note = Synthetic: >MH539865.1-cand-1790-1869
  source 1..80: mol_type = other DNA
agtattatacagaggatcagggacatttccctttacagcatgcactgcgatctgtgtttgctttccatttcttgttatgt

SEQ ID NO: 9883 - DNA, 80 bp, synthetic construct
  misc_feature 1..80: note = Synthetic: >MH539865.1-cand-1870-1949
  source 1..80: mol_type = other DNA
gtctctcaaaagatgaaagtatgtgctatttttgataatcttaggtatcttattccagctgtgacttctctatactctgg

SEQ ID NO: 9884 - DNA, 80 bp, synthetic construct
  misc_feature 1..80: note = Synthetic: >MH539865.1-cand-1960-2039
  source 1..80: mol_type = other DNA
ttgatagaaaagttctttgaacgaccctttaagagtgcattggaagtttatttatataatataataaaggcattgctcat

SEQ ID NO: 9885 - DNA, 80 bp, synthetic construct
  misc_feature 1..80: note = Synthetic: >MH539865.1-cand-2040-2119
  source 1..80: mol_type = other DNA
aagtttagctcagaacaataaagtaaggttctattccagagttcgtcttcttgggttgacagtagaccattcaactgtgg

SEQ ID NO: 9886 - DNA, 80 bp, synthetic construct
  misc_feature 1..80: note = Synthetic: >MH539865.1-cand-2120-2199
  source 1..80: mol_type = other DNA
gggcaagtggagtgtatccttctttaatgtcaagggttgtttataagcattaccgaagtttaatctctgaagcgactact

SEQ ID NO: 9887 - DNA, 80 bp, synthetic construct
  misc_feature 1..80: note = Synthetic: >MH539865.1-cand-2220-2299
  source 1..80: mol_type = other DNA
gggattacatgggaatttaaatgaagaagctaaaatacatctagaaactgttgagtgggctagaaagtttgaggataaag

SEQ ID NO: 9888 - DNA, 80 bp, synthetic construct
  misc_feature 1..80: note = Synthetic: >MH539865.1-cand-2300-2379
  source 1..80: mol_type = other DNA
aaaagaaatatggtgatataatgatgagagaaggttacacaattgatgcaataaatgtaggtgatgtgcaggtagagcaa

SEQ ID NO: 9889 - DNA, 80 bp, synthetic construct
  misc_feature 1..80: note = Synthetic: >MH539865.1-cand-2380-2459
  source 1..80: mol_type = other DNA
cagcttttttgccaagaagtagttgagttaagtgcagaggagctgaataagtacttgcaagcaaagagtcaggttttggc

SEQ ID NO: 9890 - DNA, 80 bp, synthetic construct
  misc_feature 1..80: note = Synthetic: >MH539865.1-cand-2440-2519
  source 1..80: mol_type = other DNA
gcaaagagtcaggttttggcatctaatatcatgaataagcactgggataaaccatattttagccaaactcggaatataag

SEQ ID NO: 9891 - DNA, 80 bp, synthetic construct
  misc_feature 1..80: note = Synthetic: >MH539865.1-cand-2540-2619
  source 1..80: mol_type = other DNA
cattacaagaagacgggcatcttgcagctagtgttacattaatcgaagctatccgatttctaaaccgctcacaaacaaat

SEQ ID NO: 9892 - DNA, 80 bp, synthetic construct
  misc_feature 1..80: note = Synthetic: >MH539865.1-cand-2620-2699
  source 1..80: mol_type = other DNA
ccaaatgtgattgacatgtatgagcaaacaaagcaacataaagcacaagcccgcattgtaagaaaataccagcggacaga

SEQ ID NO: 9893 - DNA, 80 bp, synthetic construct
  misc_feature 1..80: note = Synthetic: >MH539865.1-cand-2710-2789
  source 1..80: mol_type = other DNA
ggtttctttataacgactcttccaacaagagttagactggaaattatcgaggattattatgatgctatagcacgggttgt

SEQ ID NO: 9894 - DNA, 80 bp, synthetic construct
  misc_feature 1..80: note = Synthetic: >MH539865.1-cand-2820-2899
  source 1..80: mol_type = other DNA
caagaaggtgctcaatatacaagcagcattagaaaaggctctacggtgggcatctggctcatctgacataacgacaagta

SEQ ID NO: 9895 - DNA, 80 bp, synthetic construct
  misc_feature 1..80: note = Synthetic: >MH539866.1-cand-170-249
  source 1..80: mol_type = other DNA
acaggctcagttgagacaacacctattcttttagctcaggtgactgacttaaagattgagagctcttgcaattttgacct

SEQ ID NO: 9896 - DNA, 80 bp, synthetic construct
  misc_feature 1..80: note = Synthetic: >MH539866.1-cand-250-329
  source 1..80: mol_type = other DNA
acatgtgcctgcaacaacaattcagaaatacaatcaagtagagtggtccaaaaagagttcaacaacagagagtactaatg

SEQ ID NO: 9897 - DNA, 80 bp, synthetic construct
  misc_feature 1..80: note = Synthetic: >MH539866.1-cand-290-369
  source 1..80: mol_type = other DNA
gagtggtccaaaaagagttcaacaacagagagtactaatgcaggtgcagctacatttgaggctagaacaaaagaagtaaa

SEQ ID NO: 9898 - DNA, 80 bp, synthetic construct
  misc_feature 1..80: note = Synthetic: >MH539866.1-cand-410-489
  source 1..80: mol_type = other DNA
gcagcatacaagtcaaggaaaactgtgatctgttatgatctagcctgcaatcaaacccattgcttgcctacagtccattt

SEQ ID NO: 9899 - DNA, 80 bp, synthetic construct
  misc_feature 1..80: note = Synthetic: >MH539866.1-cand-490-569
  source 1..80: mol_type = other DNA
gattgctcctgttcaaacatgcatgtctgttaggagctgcatgatagggttgctttctagtcggattcaggttatttatg

SEQ ID NO: 9900 - DNA, 80 bp, synthetic construct
  misc_feature 1..80: note = Synthetic: >MH539866.1-cand-570-649
  source 1..80: mol_type = other DNA
aaaaaacttattgtgtgacaggtcagctgatagaaggtctttgtttcattccaactcacacaatagcattgacacagcca

SEQ ID NO: 9901 - DNA, 80 bp, synthetic construct
  misc_feature 1..80: note = Synthetic: >MH539866.1-cand-630-709
  source 1..80: mol_type = other DNA
caatagcattgacacagccaggacatacatatgacactatgacactacctattacttgtttcttggtggcaaaaaaattg

SEQ ID NO: 9902 - DNA, 80 bp, synthetic construct
  misc_feature 1..80: note = Synthetic: >MH539866.1-cand-730-809
  source 1..80: mol_type = other DNA
tgttgagcttgaaaaactaattacaaatagtgggtgcacagaaaatagtttccagggatactacatctgttttataggaa

SEQ ID NO: 9903 - DNA, 80 bp, synthetic construct
  misc_feature 1..80: note = Synthetic: >MH539866.1-cand-810-889
  source 1..80: mol_type = other DNA
agcattcagaaccactatttgttccaatgatggatgactatcgttcagctgagttatttactcgtatggttttgaaccca

SEQ ID NO: 9904 - DNA, 80 bp, synthetic construct
  misc_feature 1..80: note = Synthetic: >MH539866.1-cand-900-979
  source 1..80: mol_type = other DNA
atcatgaccctgaccaaaacggacaaggcctgatgaggatagttggacctattactgcaaaagtgccatctacagaaacc

SEQ ID NO: 9905 - DNA, 80 bp, synthetic construct
  misc_feature 1..80: note = Synthetic: >MH539866.1-cand-1000-1079
  source 1..80: mol_type = other DNA
ggcctttgccggtgcacctatgtatagttccttctctacattggtaaggaaagcagacccagagtatgtattctcacctg

SEQ ID NO: 9906 - DNA, 80 bp, synthetic construct
  misc_feature 1..80: note = Synthetic: >MH539866.1-cand-1050-1129
  source 1..80: mol_type = other DNA
aagcagacccagagtatgtattctcacctggaattcttgcagaatcaaaccatagtgtttgtgacaaaaagacaatgcca

SEQ ID NO: 9907 - DNA, 80 bp, synthetic construct
  misc_feature 1..80: note = Synthetic: >MH539866.1-cand-1130-1209
  source 1..80: mol_type = other DNA
atcacatggacaggttttttagctgtttcaggagagatagaaaagataacaggttgtactgtcttttgtacccttgcagg

SEQ ID NO: 9908 - DNA, 80 bp, synthetic construct
  misc_feature 1..80: note = Synthetic: >MH539866.1-cand-1210-1289
  source 1..80: mol_type = other DNA
acctggtgcaagttgtgaggcatactctgaaacaggaatctttaatatcagttcaccaacgtgcttggtcaataaggttc

SEQ ID NO: 9909 - DNA, 80 bp, synthetic construct
  misc_feature 1..80: note = Synthetic: >MH539866.1-cand-1300-1379
  source 1..80: mol_type = other DNA
gggctcagagcagcgagtgaacttcatgtgtcaaagagtagatcaagatgttatcgtatactgtaacggtcagaagaagg

SEQ ID NO: 9910 - DNA, 80 bp, synthetic construct
  misc_feature 1..80: note = Synthetic: >MH539866.1-cand-1380-1459
  source 1..80: mol_type = other DNA
tgattctcacaaaaacattggtcataggtcagtgcatctatacatttactagtttattctcgttgatccctggtgttgcc

SEQ ID NO: 9911 - DNA, 80 bp, synthetic construct
  misc_feature 1..80: note = Synthetic: >NC_000883.2-cand-70-149
  source 1..80: mol_type = other DNA
ctgtgacgtcatttcctgtgacgtcacttccggtgggcgggacttccggaattagggttggctctgggccagcttgcttg

SEQ ID NO: 9912 - DNA, 80 bp, synthetic construct
  misc_feature 1..80: note = Synthetic: >NC_000883.2-cand-350-429
  source 1..80: mol_type = other DNA
atctgatttggtgtcttcttttaaattttagcgggcttttttcccgccttatgcaaatgggcagccattttaagtgtttt

SEQ ID NO: 9913 - DNA, 80 bp, synthetic construct
  misc_feature 1..80: note = Synthetic: >NC_000883.2-cand-400-479
  source 1..80: mol_type = other DNA
atgcaaatgggcagccattttaagtgttttactataattttattggtcagttttgtaacggttaaaatgggcggagcgta

SEQ ID NO: 9914 - DNA, 80 bp, synthetic construct
  misc_feature 1..80: note = Synthetic: >NC_000883.2-cand-510-589
  source 1..80: mol_type = other DNA
ctgccgcagctctttctttctgggctgctttttcctggactttcttgctgttttttgtgagctaactaacaggtatttat

SEQ ID NO: 9915 - DNA, 80 bp, synthetic construct
  misc_feature 1..80: note = Synthetic: >NC_000883.2-cand-630-709
  source 1..80: mol_type = other DNA
tgcttcaagtttcttctaatgttctggactgtgctaacgataactggtggtgctctttactagatttagacacttctgac

SEQ ID NO: 9916 - DNA, 80 bp, synthetic construct
  misc_feature 1..80: note = Synthetic: >NC_000883.2-cand-670-749
  source 1..80: mol_type = other DNA
taactggtggtgctctttactagatttagacacttctgactgggaaccactaactcatactaacagactaatggcaatat

SEQ ID NO: 9917 - DNA, 80 bp, synthetic construct
  misc_feature 1..80: note = Synthetic: >NC_000883.2-cand-790-869
  source 1..80: mol_type = other DNA
gccactagcagggtgcttgtacttttttcaagcagaatgtaacaaatttgaagaaggctatcatattcatgtggttattg

SEQ ID NO: 9918 - DNA, 80 bp, synthetic construct
  misc_feature 1..80: note = Synthetic: >NC_000883.2-cand-920-999
  source 1..80: mol_type = other DNA
tttaataatgtactttatcactttgtaactgaaaatgtgaagctaaaatttttgccaggaatgactacaaaaggcaaata

SEQ ID NO: 9919 - DNA, 80 bp, synthetic construct
  misc_feature 1..80: note = Synthetic: >NC_000883.2-cand-990-1069
  source 1..80: mol_type = other DNA
aaggcaaatactttagagatggagagcagtttatagaaaactatttaatgaaaaaaatacctttaaatgttgtatggtgt

SEQ ID NO: 9920 - DNA, 80 bp, synthetic construct
  misc_feature 1..80: note = Synthetic: >NC_000883.2-cand-1040-1119
  source 1..80: mol_type = other DNA
aaaaaaatacctttaaatgttgtatggtgtgttactaatattgatggatatatagatacctgtatttctgctacttttag

SEQ ID NO: 9921 - DNA, 80 bp, synthetic construct
  misc_feature 1..80: note = Synthetic: >NC_000883.2-cand-1210-1289
  source 1..80: mol_type = other DNA
agaggttgtgccatttaatgggaagggaactaaggctagcataaagtttcaaactatggtaaactggttgtgtgaaaaca

SEQ ID NO: 9922 - DNA, 80 bp, synthetic construct
  misc_feature 1..80: note = Synthetic: >NC_000883.2-cand-1230-1309
  source 1..80: mol_type = other DNA
ggaagggaactaaggctagcataaagtttcaaactatggtaaactggttgtgtgaaaacagagtgtttacagaggataag

SEQ ID NO: 9923 - DNA, 80 bp, synthetic construct
  misc_feature 1..80: note = Synthetic: >NC_000883.2-cand-1310-1389
  source 1..80: mol_type = other DNA
tggaaactagttgactttaaccagtacactttactaagcagtagtcacagtggaagttttcaaattcaaagtgcactaaa

SEQ ID NO: 9924 - DNA, 80 bp, synthetic construct
  misc_feature 1..80: note = Synthetic: >NC_000883.2-cand-1390-1469
  source 1..80: mol_type = other DNA
actagcaatttataaagcaactaatttagtgcctactagcacatttttattgcatacagactttgagcaggttatgtgta

SEQ ID NO: 9925 - DNA, 80 bp, synthetic construct
  misc_feature 1..80: note = Synthetic: >NC_000883.2-cand-1450-1529
  source 1..80: mol_type = other DNA
ctttgagcaggttatgtgtattaaagacaataaaattgttaaattgttactttgtcaaaactatgaccccctattggtgg

SEQ ID NO: 9926 - DNA, 80 bp, synthetic construct
  misc_feature 1..80: note = Synthetic: >NC_001545.2-cand-9000-9079
  source 1..80: mol_type = other DNA
ccagagcgcccccggctgcgcctggtcgacgccgacgaccccctgctgcgcactgcccctggacccggcgaggtgtgggt

SEQ ID NO: 9927 - DNA, 80 bp, synthetic construct
  misc_feature 1..80: note = Synthetic: >NC_001545.2-cand-9040-9119
  source 1..80: mol_type = other DNA
ccctgctgcgcactgcccctggacccggcgaggtgtgggtcacgcctgtcataggctctcaggcgcgcaagtgcggactc

SEQ ID NO: 9928 - DNA, 80 bp, synthetic construct
  misc_feature 1..80: note = Synthetic: >NC_001545.2-cand-9120-9199
  source 1..80: mol_type = other DNA
cacatacgcgctggaccgtacggccatgctaccgtcgaaatgcccgagtggatccacgcccacaccaccagcgacccctg

SEQ ID NO: 9929 - DNA, 80 bp, synthetic construct
  misc_feature 1..80: note = Synthetic: >NC_001545.2-cand-9220-9299
  source 1..80: mol_type = other DNA
ggctgaagttcaagacagttcgcccggtggccctgccacgcacgttagcgccaccccgcaatgtgcgtgtgaccgggtgc

SEQ ID NO: 9930 - DNA, 80 bp, synthetic construct
  misc_feature 1..80: note = Synthetic: >NC_001545.2-cand-9260-9339
  source 1..80: mol_type = other DNA
cacgttagcgccaccccgcaatgtgcgtgtgaccgggtgctaccagtgcggtacccccgcgctggtggaaggccttgccc

SEQ ID NO: 9931 - DNA, 80 bp, synthetic construct
  misc_feature 1..80: note = Synthetic: >NC_001545.2-cand-9360-9439
  source 1..80: mol_type = other DNA
ctcaccgtcaatggcgaggacctcggcgccgtcccccctgggaagttcgtcaccgccgccctcctcaacacccccccgcc

SEQ ID NO: 9932 - DNA, 80 bp, synthetic construct
  misc_feature 1..80: note = Synthetic: >NC_001545.2-cand-9460-9539
  source 1..80: mol_type = other DNA
gcgagagcgatcgcgcgaccgcgcgggtcatcgaccccgccgcgcaatcgtttaccggcgtggtgtatggcacacacacc

SEQ ID NO: 9933 - DNA, 80 bp, synthetic construct
  misc_feature 1..80: note = Synthetic: >NC_001545.2-cand-9520-9599
  source 1..80: mol_type = other DNA
tggtgtatggcacacacaccactgctgtgtcggagacccggcagacctgggcggagtgggctgctgcccattggtggcag

SEQ ID NO: 9934 - DNA, 80 bp, synthetic construct
  misc_feature 1..80: note = Synthetic: >NC_001545.2-cand-9600-9679
  source 1..80: mol_type = other DNA
ctcactctgggcgccatttgcgccctcccactcgctggcttactcgcttgctgtgccaaatgcttgtactacttgcgcgg

SEQ ID NO: 9935 - DNA, 80 bp, synthetic construct
  misc_feature 1..80: note = Synthetic: >NC_001563.2-cand-90-169
  source 1..80: mol_type = other DNA
cgatgtctaagaaaccaggagggcccggtaaaaaccgggctgtcaatatgctaaaacgcggtatgccccgcggattgtcc

SEQ ID NO: 9936 - DNA, 80 bp, synthetic construct
  misc_feature 1..80: note = Synthetic: >NC_001563.2-cand-170-249
  source 1..80: mol_type = other DNA
ttgataggactaaagagggctatgctgagtctgattgacgggaagggcccaatacgtttcgtgttggctcttttggcgtt

SEQ ID NO: 9937 - DNA, 80 bp, synthetic construct
  misc_feature 1..80: note = Synthetic: >NC_001563.2-cand-250-329
  source 1..80: mol_type = other DNA
tttcagattcactgcaatcgctccgactcgtgcggtgctggacagatggagaggcgtcaacaaacaaacagcaatgaagc

SEQ ID NO: 9938 - DNA, 80 bp, synthetic construct
  misc_feature 1..80: note = Synthetic: >NC_001563.2-cand-330-409
  source 1..80: mol_type = other DNA
atctcttgagtttcaagaaagaactaggaactctgaccagtgccatcaaccgccggagcacaaaacaaaagaaaagagga

SEQ ID NO: 9939 - DNA, 80 bp, synthetic construct
  misc_feature 1..80: note = Synthetic: >NC_001563.2-cand-410-489
  source 1..80: mol_type = other DNA
ggcacagcgggctttactatcttgcttgggctgatcgcctgtgctggagctgtgaccctctcgaacttccagggcaaagt

SEQ ID NO: 9940 - DNA, 80 bp, synthetic construct
  misc_feature 1..80: note = Synthetic: >NC_001563.2-cand-490-569
  source 1..80: mol_type = other DNA
gatgatgacagtcaatgcaaccgatgtcactgacgtgattaccattccaacagctgctgggaaaaacctgtgcatcgtaa

SEQ ID NO: 9941 - DNA, 80 bp, synthetic construct
  misc_feature 1..80: note = Synthetic: >NC_001563.2-cand-580-659
  source 1..80: mol_type = other DNA
cgtaggatacctttgtgaggatactatcacttatgaatgtccggtcctagctgctggaaatgaccctgaagacattgact

SEQ ID NO: 9942 - DNA, 80 bp, synthetic construct
  misc_feature 1..80: note = Synthetic: >NC_001611.1-cand-104570-104649
  source 1..80: mol_type = other DNA
cgtcaacgctggaaggagtgaactcggttgtgtattatcatctgccgacaaccaatcaaaaagattagacatatccgatg

SEQ ID NO: 9943 - DNA, 80 bp, synthetic construct
  misc_feature 1..80: note = Synthetic: >NC_001611.1-cand-104650-104729
  source 1..80: mol_type = other DNA
atgtattagtttgttgttgtcgtggttttggtgtaggagccggtgtaggtacctgcagtggagttatatgaatagttggt

SEQ ID NO: 9944 - DNA, 80 bp, synthetic construct
  misc_feature 1..80: note = Synthetic: >NC_001611.1-cand-104970-105049
  source 1..80: mol_type = other DNA
cgattataagattaaatggcagacacagacgatattatcgactatgaatccgatgatctcactgaatacgaggatgatga

SEQ ID NO: 9945 - DNA, 80 bp, synthetic construct
  misc_feature 1..80: note = Synthetic: >NC_001611.1-cand-105370-105449
  source 1..80: mol_type = other DNA
tcatcgaaaagaacggagaattgttgtcggtaaacgattttgacaaagatggtctgaaattccatctagactatattatc

SEQ ID NO: 9946 - DNA, 80 bp, synthetic construct
  misc_feature 1..80: note = Synthetic: >NC_001611.1-cand-105450-105529
  source 1..80: mol_type = other DNA
aaaatttggaaacttcaaaaacgatattagaatttatacgaatatcgttctctaaatgtcacaatcaagtctctcatatt

SEQ ID NO: 9947 - DNA, 80 bp, synthetic construct
  misc_feature 1..80: note = Synthetic: >NC_001611.1-cand-105530-105609
  source 1..80: mol_type = other DNA
tagcaggttattgtcgtactttatatcgtgttcattaacgatattttgcaaaatagtaatgattctatcttccttcgata

SEQ ID NO: 9948 - DNA, 80 bp, synthetic construct
  misc_feature 1..80: note = Synthetic: >NC_001611.1-cand-105610-105689
  source 1..80: mol_type = other DNA
gatattcttcagagattattgtcttatattctttcttgttatccgatataaatttaataagactttgaacattattaata

SEQ ID NO: 9949 - DNA, 80 bp, synthetic construct
  misc_feature 1..80: note = Synthetic: >NC_001611.1-cand-105690-105769
  source 1..80: mol_type = other DNA
cccgtttgtttaaatttttctacagatattttagttttggtagattctattgtgtctgttaatagacacccaacatcgac

SEQ ID NO: 9950 - DNA, 80 bp, synthetic construct
  misc_feature 1..80: note = Synthetic: >NC_001611.1-cand-105770-105849
  source 1..80: mol_type = other DNA
attcgacgttaattgtctataaattagagtataaattttagaaataacattagcaaattgttgtgcgttgatgtcgttat

SEQ ID NO: 9951 - DNA, 80 bp, synthetic construct
  misc_feature 1..80: note = Synthetic: >NC_001611.1-cand-105850-105929
  source 1..80: mol_type = other DNA
tctgaaacagtatgattttaggtagcattttcttaacaaagagaacgtatttattgttactcagttgaacagatgatata

SEQ ID NO: 9952 - DNA, 80 bp, synthetic construct
  misc_feature 1..80: note = Synthetic: >NC_001611.1-cand-105930-106009
  source 1..80: mol_type = other DNA
tccagattactaacgcatctgattccatataccaaactttcagaagaaatggtgtacaattgtttgtattcattcaatgt

SEQ ID NO: 9953 - DNA, 80 bp, synthetic construct
  misc_feature 1..80: note = Synthetic: >NC_001611.1-cand-106010-106089
  source 1..80: mol_type = other DNA
ctccttttcagaaattagtttagagtcaaatactgcaataattttcaaaagatagttttcatcagataagattttattta

SEQ ID NO: 9954 - DNA, 80 bp, synthetic construct
  misc_feature 1..80: note = Synthetic: >NC_001611.1-cand-106090-106169
  source 1..80: mol_type = other DNA
gtgtagatatgataaaactattgttttgttggagaacttgatacgccgcattctctgtagtcgacgctctcaaatgggaa

SEQ ID NO: 9955 - DNA, 80 bp, synthetic construct
  misc_feature 1..80: note = Synthetic: >NC_001611.1-cand-106290-106369
  source 1..80: mol_type = other DNA
gctacaaacttttccttttccgcatcatctagtttattatataccgattttacaacggcgccagatttaagaaaccagaa

SEQ ID NO: 9956 - DNA, 80 bp, synthetic construct
  misc_feature 1..80: note = Synthetic: >NC_001611.1-cand-106610-106689
  source 1..80: mol_type = other DNA
ttagttgtttaatttatttgtactcttccaaagttgggatagtatttttctaacgttggtattatattattaggatctac

SEQ ID NO: 9957 - DNA, 80 bp, synthetic construct
  misc_feature 1..80: note = Synthetic: >NC_001611.1-cand-107970-108049
  source 1..80: mol_type = other DNA
gatcggtaaatagttttacgttattaatcatcacggtatcaccgtcgctagataatgctaatgttccatccaagtcccaa

SEQ ID NO: 9958 - DNA, 80 bp, synthetic construct
  misc_feature 1..80: note = Synthetic: >NC_001611.1-cand-114180-114259
  source 1..80: mol_type = other DNA
tagaagctaaaaatatttttatttatacagaagatttaactagattatacaatgaactaatatgatccttttccagatta

SEQ ID NO: 9959 - DNA, 80 bp, synthetic construct
  misc_feature 1..80: note = Synthetic: >NC_001611.1-cand-114260-114339
  source 1..80: mol_type = other DNA
tttacaaacctggtatttcttgtttctggaggaggcaagtttacattcggacttggattttgtgagttcttgatcttatt

SEQ ID NO: 9960 - DNA, 80 bp, synthetic construct
  misc_feature 1..80: note = Synthetic: >NC_001611.1-cand-114340-114419
  source 1..80: mol_type = other DNA
atacatcgcgtataggatggcgacggtaactgctacacaaataccaatcaaaagaagaataccaatcatttattgataat

SEQ ID NO: 9961 - DNA, 80 bp, synthetic construct
  misc_feature 1..80: note = Synthetic: >NC_001611.1-cand-114420-114499
  source 1..80: mol_type = other DNA
aacttcactattgatcaagtatacaatatatcatcttttcactaaataagtagtaataatgattcaacaatgtcgagata

SEQ ID NO: 9962 - DNA, 80 bp, synthetic construct
  misc_feature 1..80: note = Synthetic: >NC_001611.1-cand-114490-114569
  source 1..80: mol_type = other DNA
tgtcgagatatatgaacgataataacttagtttacggaaatatcgctatgattggtatgaatgactccactaactctgtg

SEQ ID NO: 9963 - DNA, 80 bp, synthetic construct
  misc_feature 1..80: note = Synthetic: >NC_001611.1-cand-114570-114649
  source 1..80: mol_type = other DNA
gggtgcgcagtgctttccccacatagaataaattagcattccgactgtgataataataccaagtataaacgacataatac

SEQ ID NO: 9964 - DNA, 80 bp, synthetic construct
  misc_feature 1..80: note = Synthetic: >NC_001611.1-cand-114890-114969
  source 1..80: mol_type = other DNA
gaagatatggtaaaattaaatagtagtacacaacatgttataactaacagcagcaacggttcgtaattacttatcattta

SEQ ID NO: 9965 - DNA, 80 bp, synthetic construct
  misc_feature 1..80: note = Synthetic: >NC_001611.1-cand-114970-115049
  source 1..80: mol_type = other DNA
ctagacgaaaaggtggcgggatattttcttgctcaaataatacgaatatattacccatccattttatgcgatgtttatat

SEQ ID NO: 9966 - DNA, 80 bp, synthetic construct
  misc_feature 1..80: note = Synthetic: >NC_001611.1-cand-115130-115209
  source 1..80: mol_type = other DNA
cttaaacgtgaatgatctattatctggcataacgatgaccctacctgatgaatcagacaatgtactgggccatgtagaat

SEQ ID NO: 9967 - DNA, 80 bp, synthetic construct
  misc_feature 1..80: note = Synthetic: >NC_001611.1-cand-115210-115289
  source 1..80: mol_type = other DNA
aaattatcaacgaatcatcgtctacgaacatttatatcatttgttttaattttaggacgcgaataaatagatataaaata

SEQ ID NO: 9968 - DNA, 80 bp, synthetic construct
  misc_feature 1..80: note = Synthetic: >NC_001611.1-cand-115290-115369
  source 1..80: mol_type = other DNA
gaaaataacagatattacaaccagtgttatggccgcacccaaccaggtaggcagttttattttatcttttactacaggtt

SEQ ID NO: 9969 - DNA, 80 bp, synthetic construct
  misc_feature 1..80: note = Synthetic: >NC_001611.1-cand-115370-115449
  source 1..80: mol_type = other DNA
ctcctggatgtatgtcaccaactgtagacgtagttctagtacaattagacgtaagttccgcttgggaattttttaacgct

SEQ ID NO: 9970 - DNA, 80 bp, synthetic construct
  misc_feature 1..80: note = Synthetic: >NC_001611.1-cand-115730-115809
  source 1..80: mol_type = other DNA
catccatatgtttggagcaaatatcggaataagtagacatagccggtttccgttttacacgtaaccattctaaacaattg

SEQ ID NO: 9971 - DNA, 80 bp, synthetic construct
  misc_feature 1..80: note = Synthetic: >NC_001611.1-cand-115930-116009
  source 1..80: mol_type = other DNA
acgctatcactatctcccaggagataatccttttttataaaatgacatcgttgcccggatgctatataatcagtagcgtg

SEQ ID NO: 9972 - DNA, 80 bp, synthetic construct
  misc_feature 1..80: note = Synthetic: >NC_001611.1-cand-116000-116079
  source 1..80: mol_type = other DNA
cagtagcgtgttttaaatccttaatatattcaggagttacctcgttctgataatagattaatgttccaggacgaaatttg

SEQ ID NO: 9973 - DNA, 80 bp, synthetic construct
  misc_feature 1..80: note = Synthetic: >NC_001611.1-cand-116240-116319
  source 1..80: mol_type = other DNA
caaacttaacagttctattatatttaggataattaaaacctaattccatatatttgtctcgtatatctgctattcctgat

SEQ ID NO: 9974 - DNA, 80 bp, synthetic construct
  misc_feature 1..80: note = Synthetic: >NC_001722.1-cand-380-459
  source 1..80: mol_type = other DNA
aataacaggaacaaccatacttggtcaaggcaggaagtagctactaagaaacagctgaggctgcagggactttccagaag

SEQ ID NO: 9975 - DNA, 80 bp, synthetic construct
  misc_feature 1..80: note = Synthetic: >NC_001722.1-cand-840-919
  source 1..80: mol_type = other DNA
aatccctagcaggttggcgcccgaacagggacttgaagaggactgagaagccctggaactcggctgagtgaaggcagtaa

SEQ ID NO: 9976 - DNA, 80 bp, synthetic construct
  misc_feature 1..80: note = Synthetic: >NC_001722.1-cand-920-999
  source 1..80: mol_type = other DNA
gggcggcaggaacaaaccacgacggagtgctcctagaaaggcgcgggccgaggtaccaaaggcggcgtgtggagcgggag

SEQ ID NO: 9977 - DNA, 80 bp, synthetic construct
  misc_feature 1..80: note = Synthetic: >NC_001722.1-cand-1000-1079
  source 1..80: mol_type = other DNA
tgaaagaggcctccgggtgaaggtaagtacctacaccaaaaactgtagccagaaaaggcttgttatcctacctttagaca

SEQ ID NO: 9978 - DNA, 80 bp, synthetic construct
  misc_feature 1..80: note = Synthetic: >NC_001722.1-cand-1080-1159
  source 1..80: mol_type = other DNA
ggtagaagattgtgggagatgggcgcgagaaactccgtcttgagagggaaaaaagcagacgaattagaaaaagttaggtt

SEQ ID NO: 9979 - DNA, 80 bp, synthetic construct
  misc_feature 1..80: note = Synthetic: >NC_001722.1-cand-1150-1229
  source 1..80: mol_type = other DNA
aagttaggttacggcccggcggaaagaaaaagtacaggttaaaacatattgtgtgggcagcgaatgaattggataaattc

SEQ ID NO: 9980 - DNA, 80 bp, synthetic construct
  misc_feature 1..80: note = Synthetic: >NC_001722.1-cand-1230-1309
  source 1..80: mol_type = other DNA
ggattggcagagagcctgttggagtcaaaagaaggttgccaaaagattctcagagttttagatccattagtaccaacagg

SEQ ID NO: 9981 - DNA, 80 bp, synthetic construct
  misc_feature 1..80: note = Synthetic: >NC_001722.1-cand-1310-1389
  source 1..80: mol_type = other DNA
gtcagaaaatttaaaaagcctttttaataccgtctgcgtcatttggtgcttgcacgcagaagagaaagtgaaagatactg

SEQ ID NO: 9982 - DNA, 80 bp, synthetic construct
  misc_feature 1..80: note = Synthetic: >NC_001722.1-cand-1390-1469
  source 1..80: mol_type = other DNA
aggaagcaaagaaactagcacagagacatctagtggcagaaactggaactgcagagaaaatgccaaatacaagtagacca

SEQ ID NO: 9983 - DNA, 80 bp, synthetic construct
  misc_feature 1..80: note = Synthetic: >NC_001722.1-cand-1470-1549
  source 1..80: mol_type = other DNA
acagcaccacctagtgggaaaagaggaaactaccccgtgcaacaagcgggtggcaactatgtccatgtgccactgagccc

SEQ ID NO: 9984 - DNA, 80 bp, synthetic construct
  misc_feature 1..80: note = Synthetic: >NC_001722.1-cand-1510-1589
  source 1..80: mol_type = other DNA
aacaagcgggtggcaactatgtccatgtgccactgagcccccgaactctaaatgcatgggtaaaattagtggaggaaaag

SEQ ID NO: 9985 - DNA, 80 bp, synthetic construct
  misc_feature 1..80: note = Synthetic: >NC_001722.1-cand-1630-1709
  source 1..80: mol_type = other DNA
cagaaggctgcacgccctatgatattaatcaaatgcttaattgtgtgggcgatcaccaagcagctatgcaaataatcaga

SEQ ID NO: 9986 - DNA, 80 bp, synthetic construct
  misc_feature 1..80: note = Synthetic: >NC_001722.1-cand-1710-1789
  source 1..80: mol_type = other DNA
gagattattaatgaagaagcagcagactgggattcgcagcacccaataccaggccccttaccagcaggacagctcagaga

SEQ ID NO: 9987 - DNA, 80 bp, synthetic construct
  misc_feature 1..80: note = Synthetic: >NC_001722.1-cand-1790-1869
  source 1..80: mol_type = other DNA
cccaagagggtctgacatagcaggaacaacaagcacagtagatgaacagatccagtggatgtataggccacaaaatcccg

SEQ ID NO: 9988 - DNA, 80 bp, synthetic construct
  misc_feature 1..80: note = Synthetic: >NC_001722.1-cand-1870-1949
  source 1..80: mol_type = other DNA
taccggtagggaacatctacagaagatggatccaaatagggctgcaaaagtgtgtcagaaagtacaacccaactaacatc

SEQ ID NO: 9989 - DNA, 80 bp, synthetic construct
  misc_feature 1..80: note = Synthetic: >NC_001722.1-cand-1950-2029
  source 1..80: mol_type = other DNA
ttagacataaaacagggaccaaaagaaccgttccaaagctatgtagacaggttctacaaaagcttgagggcagaacaaac

SEQ ID NO: 9990 - DNA, 80 bp, synthetic construct
  misc_feature 1..80: note = Synthetic: >NC_001906.3-cand-8160-8239
  source 1..80: mol_type = other DNA
aatagttgagaaaaagagagggaattacagcaggctagatgataggcaagtgcgaccggtcagtaatggtgatctgtatt

SEQ ID NO: 9991 - DNA, 80 bp, synthetic construct
  misc_feature 1..80: note = Synthetic: >NC_001906.3-cand-8240-8319
  source 1..80: mol_type = other DNA
atattggaacataaaatacactacaatcaatccaattgttttatctttactaatgatataaacgatacttaatcatcagc

SEQ ID NO: 9992 - DNA, 80 bp, synthetic construct
  misc_feature 1..80: note = Synthetic: >NC_001906.3-cand-8320-8399
  source 1..80: mol_type = other DNA
tacctaagtgctcatatagctctcatgtatattcttttattattgttaacaacaggtctactaaatagtttaatccaata

SEQ ID NO: 9993 - DNA, 80 bp, synthetic construct
  misc_feature 1..80: note = Synthetic: >NC_001906.3-cand-8400-8479
  source 1..80: mol_type = other DNA
aattgaggataatcaattcttgcattgcataaactcgttaggttatatataacaaaaattatttttttctttttgaaaga

SEQ ID NO: 9994 - DNA, 80 bp, synthetic construct
  misc_feature 1..80: note = Synthetic: >NC_001906.3-cand-8480-8559
  source 1..80: mol_type = other DNA
ttgtatagtctggtcattctattataattgatataatgattctttgatcatattgatcaatgtacctatttgaatcaatc

SEQ ID NO: 9995 - DNA, 80 bp, synthetic construct
  misc_feature 1..80: note = Synthetic: >NC_001906.3-cand-8560-8639
  source 1..80: mol_type = other DNA
gacattggattctctattcttatgtaatcccagatggatcaaggctagtcataccttaaatcacaagctgtattattact

SEQ ID NO: 9996 - DNA, 80 bp, synthetic construct
  misc_feature 1..80: note = Synthetic: >NC_001906.3-cand-8640-8719
  source 1..80: mol_type = other DNA
tactgtgatggataaagggactttacaaaaaacttaggacccaagtccttaaccacattctaatgtgagggagaattaaa

SEQ ID NO: 9997 - DNA, 80 bp, synthetic construct
  misc_feature 1..80: note = Synthetic: >NC_001906.3-cand-8720-8799
  source 1..80: mol_type = other DNA
tgtacattgagactgacaatctaatatacagagtgtttgatcaagttaaaacatcaattgtcaggaattcattgataaac

SEQ ID NO: 9998 - DNA, 80 bp, synthetic construct
  misc_feature 1..80: note = Synthetic: >NC_001906.3-cand-8800-8879
  source 1..80: mol_type = other DNA
caacttgttagttagaattaagaaaatataagagctaatactcgcaagtcatttgcttcttcaagagcctgtctcaacta

SEQ ID NO: 9999 - DNA, 80 bp, synthetic construct
  misc_feature 1..80: note = Synthetic: >NC_001906.3-cand-8870-8949
  source 1..80: mol_type = other DNA
gtctcaactatcaagtgaatacatgatctaaaactagtatgatggctgattccaaattggtaagcctgaacaataatcta

SEQ ID NO: 10000 - DNA, 80 bp, synthetic construct
  misc_feature 1..80: note = Synthetic: >NC_001906.3-cand-8950-9029
  source 1..80: mol_type = other DNA
tctggtaaaatcaaggatcaaggtaaagttatcaagaattattacggcacaatggacatcaagaaaattaacgatgggtt

SEQ ID NO: 10001 - DNA, 80 bp, synthetic construct
  misc_feature 1..80: note = Synthetic: >NC_001906.3-cand-9050-9129
  source 1..80: mol_type = other DNA
gggcgtttaacacagtgatagctttgttgggatcaatcatcatcattgtgatgaatatcatgataattcaaaattacacc

SEQ ID NO: 10002 - DNA, 80 bp, synthetic construct
  misc_feature 1..80: note = Synthetic: >NC_001906.3-cand-9110-9189
  source 1..80: mol_type = other DNA
tgataattcaaaattacaccagaacgactgataatcaggcactaatcaaagagtcactccagagtgtacagcaacaaatc

SEQ ID NO: 10003 - DNA, 80 bp, synthetic construct
  misc_feature 1..80: note = Synthetic: >NC_001906.3-cand-9190-9269
  source 1..80: mol_type = other DNA
aaagctttaacagacaaaatcgggacagagataggccccaaagtctcactaattgacacatccagcaccatcacaattcc

SEQ ID NO: 10004 - DNA, 80 bp, synthetic construct
  misc_feature 1..80: note = Synthetic: >NC_001906.3-cand-9270-9349
  source 1..80: mol_type = other DNA
tgctaacatagggttactgggatccaagataagtcagtctaccagcagtattaatgagaatgttaacgataaatgcaaat

SEQ ID NO: 10005 - DNA, 80 bp, synthetic construct
  misc_feature 1..80: note = Synthetic: >NC_001906.3-cand-9350-9429
  source 1..80: mol_type = other DNA
ttactcttcctcctttaaagattcatgagtgtaatatctcttgtccgaatcctttgcctttcagagaataccgaccaatc

SEQ ID NO: 10006 - DNA, 80 bp, synthetic construct
  misc_feature 1..80: note = Synthetic: >NC_001906.3-cand-14530-14609
  source 1..80: mol_type = other DNA
ggcgatgcaagcttcctagattgggctagtgatccgtattcaggaaatctaccggattcacagagtattacaaaaacgat

SEQ ID NO: 10007 - DNA, 80 bp, synthetic construct
  misc_feature 1..80: note = Synthetic: >NC_001906.3-cand-14610-14689
  source 1..80: mol_type = other DNA
caagaatataacggctaggactatattgaggacatcaccgaatccaatgctgaagggtctattccatgataaatcattcg

SEQ ID NO: 10008 - DNA, 80 bp, synthetic construct
  misc_feature 1..80: note = Synthetic: >NC_001906.3-cand-14690-14769
  source 1..80: mol_type = other DNA
aggaagatctggagcttgctactttcctaatggatcgtagaattatattgcccagagccgcacatgaaattttagataat

SEQ ID NO: 10009 - DNA, 80 bp, synthetic construct
  misc_feature 1..80: note = Synthetic: >NC_001906.3-cand-14740-14819
  source 1..80: mol_type = other DNA
cccagagccgcacatgaaattttagataattctttgacaggtgctagagaggaaattgctggattacttgacacaacaaa

SEQ ID NO: 10010 - DNA, 80 bp, synthetic construct
  misc_feature 1..80: note = Synthetic: >NC_001906.3-cand-14850-14929
  source 1..80: mol_type = other DNA
cgggatacaacctaagttagtgtctagactgtctaaccatgattataatcagttcctgatactcaatagacttttgtcca

SEQ ID NO: 10011 - DNA, 80 bp, synthetic construct
  misc_feature 1..80: note = Synthetic: >NC_001906.3-cand-14930-15009
  source 1..80: mol_type = other DNA
ataaaaagagaaacgatcttatatcccctaaaacatgttcagtggatttggccaaggctcttcgttgtcatatgtggaga

SEQ ID NO: 10012 - DNA, 80 bp, synthetic construct
  misc_feature 1..80: note = Synthetic: >NC_001906.3-cand-15010-15089
  source 1..80: mol_type = other DNA
gatcttgctcttggtcgatcaatctatggacttgaagtgcctgacgctttggaagcaatgactggaagatatattacagg

SEQ ID NO: 10013 - DNA, 80 bp, synthetic construct
  misc_feature 1..80: note = Synthetic: >NC_001906.3-cand-15090-15169
  source 1..80: mol_type = other DNA
gagtatggaatgccaactttgtgatcaagggaatactatgtacggttggtttttcgtgccacgagattcacaattagacc

SEQ ID NO: 10014 - DNA, 80 bp, synthetic construct
  misc_feature 1..80: note = Synthetic: >NC_001906.3-cand-15170-15249
  source 1..80: mol_type = other DNA
aagtgaataaagagcactcatccattagagtaccttacgtcggctcaagcactgatgagaggtcagatatcaaactagga

SEQ ID NO: 10015 - DNA, 80 bp, synthetic construct
  misc_feature 1..80: note = Synthetic: >NC_001906.3-cand-15250-15329
  source 1..80: mol_type = other DNA
aacgtcaagagaccgacaagagcactgagatctgccatccgaattgcaactgtttatacctgggcatacggagattctga

SEQ ID NO: 10016 - DNA, 80 bp, synthetic construct
  misc_feature 1..80: note = Synthetic: >NC_001906.3-cand-15330-15409
  source 1..80: mol_type = other DNA
agaaagttggtatgaggcttggtacttggcttcccagagggtcaacattgatatagatgtgttaaaagctataactcctg

SEQ ID NO: 10017 - DNA, 80 bp, synthetic construct
  misc_feature 1..80: note = Synthetic: >NC_001906.3-cand-15410-15489
  source 1..80: mol_type = other DNA
tctcaacttccaacaatctatctcacagactcagagatagatctacacagttcaagttgccaggtagtgtccttaatagg

SEQ ID NO: 10018 - DNA, 80 bp, synthetic construct
  misc_feature 1..80: note = Synthetic: >NC_001906.3-cand-15490-15569
  source 1..80: mol_type = other DNA
gtttctagatatgtcaacataagtaatgataatttagacttcagagtggaaggtgaaaaggtcgacaccaatctaatata

SEQ ID NO: 10019 - DNA, 80 bp, synthetic construct
  misc_feature 1..80: note = Synthetic: >NC_001906.3-cand-15570-15649
  source 1..80: mol_type = other DNA
ccaacaaacaatgctactcggcttgtcagtattggaaggtaaatttcggttgagaacagaaacagatgattataacggaa

SEQ ID NO: 10020 - DNA, 80 bp, synthetic construct
  misc_feature 1..80: note = Synthetic: >NC_001906.3-cand-15650-15729
  source 1..80: mol_type = other DNA
tatatcatctgcatgtcagagataattgttgtgtcaaggaggttgctgatattggtggtgttaatgctgagctacctgtc

SEQ ID NO: 10021 - DNA, 80 bp, synthetic construct
  misc_feature 1..80: note = Synthetic: >NC_001906.3-cand-15730-15809
  source 1..80: mol_type = other DNA
ccagaatacactgaagtagaaaataataggctcatatatgacccagatcctgtttctgaaattgattgtgatcgcttatc

SEQ ID NO: 10022 - DNA, 80 bp, synthetic construct
  misc_feature 1..80: note = Synthetic: >NC_002058.3-cand-2970-3049
  source 1..80: mol_type = other DNA
gtgcccgagaaatgggacgactacacatggcaaacctcatcaaatccatcaatcttttacacctacggaacagctccagc

SEQ ID NO: 10023 - DNA, 80 bp, synthetic construct
  misc_feature 1..80: note = Synthetic: >NC_002058.3-cand-3050-3129
  source 1..80: mol_type = other DNA
ccggatctcggtaccgtatgttggtatttcgaacgcctattcacacttttacgacggtttttccaaagtaccactgaagg

SEQ ID NO: 10024 - DNA, 80 bp, synthetic construct
  misc_feature 1..80: note = Synthetic: >NC_002058.3-cand-3130-3209
  source 1..80: mol_type = other DNA
accagtcggcagcactaggtgactccctttatggtgcagcatctctaaatgacttcggtattttggctgttagagtagtc

SEQ ID NO: 10025 - DNA, 80 bp, synthetic construct
  misc_feature 1..80: note = Synthetic: >NC_002058.3-cand-3200-3279
  source 1..80: mol_type = other DNA
tagagtagtcaatgatcacaacccgaccaaggtcacctccaaaatcagagtgtatctaaaacccaaacacatcagagtct

SEQ ID NO: 10026 - DNA, 80 bp, synthetic construct
  misc_feature 1..80: note = Synthetic: >NC_002058.3-cand-3280-3359
  source 1..80: mol_type = other DNA
ggtgcccgcgtccaccgagggcagtggcgtactacggccctggagtggattacaaggatggtacgcttacacccctctcc

SEQ ID NO: 10027 - DNA, 80 bp, synthetic construct
  misc_feature 1..80: note = Synthetic: >NC_002058.3-cand-3360-3439
  source 1..80: mol_type = other DNA
accaaggatctgaccacatatggattcggacaccaaaacaaagcggtgtacactgcaggttacaaaatttgcaactacca

SEQ ID NO: 10028 - DNA, 80 bp, synthetic construct
  misc_feature 1..80: note = Synthetic: >NC_002058.3-cand-3440-3519
  source 1..80: mol_type = other DNA
cttggccactcaggatgatttgcaaaacgcagtgaacgtcatgtggagtagagacctcttagtcacagaatcaagagccc

SEQ ID NO: 10029 - DNA, 80 bp, synthetic construct
  misc_feature 1..80: note = Synthetic: >NC_002058.3-cand-3560-3639
  source 1..80: mol_type = other DNA
ggtgtactactgcgagtctagaaggaaatactacccagtatccttcgttggcccaacgttccagtacatggaggctaata

SEQ ID NO: 10030 - DNA, 80 bp, synthetic construct
  misc_feature 1..80: note = Synthetic: >NC_002058.3-cand-3600-3679
  source 1..80: mol_type = other DNA
tccttcgttggcccaacgttccagtacatggaggctaataactattacccagctaggtaccagtcccatatgctcattgg

SEQ ID NO: 10031 - DNA, 80 bp, synthetic construct
  misc_feature 1..80: note = Synthetic: >NC_002058.3-cand-3740-3819
  source 1..80: mol_type = other DNA
agggatcattactgctggtggcgaagggttggttgcattttcagacattagagacttgtatgcctacgaagaagaagcca

SEQ ID NO: 10032 - DNA, 80 bp, synthetic construct
  misc_feature 1..80: note = Synthetic: >NC_002058.3-cand-3760-3839
  source 1..80: mol_type = other DNA
gcgaagggttggttgcattttcagacattagagacttgtatgcctacgaagaagaagccatggaacaaggcatcaccaat

SEQ ID NO: 10033 - DNA, 80 bp, synthetic construct
  misc_feature 1..80: note = Synthetic: >NC_002058.3-cand-3860-3939
  source 1..80: mol_type = other DNA
cgcatttggaagtggatttactcagcagattagcgacaaaataacagagttgaccaatatggtgaccagtaccatcactg

SEQ ID NO: 10034 - DNA, 80 bp, synthetic construct
  misc_feature 1..80: note = Synthetic: >NC_002058.3-cand-3920-3999
  source 1..80: mol_type = other DNA
ggtgaccagtaccatcactgaaaagctacttaagaacttgatcaagatcatatcctcactagttattataactaggaact

SEQ ID NO: 10035 - DNA, 80 bp, synthetic construct
  misc_feature 1..80: note = Synthetic: >NC_002058.3-cand-4000-4079
  source 1..80: mol_type = other DNA
atgaagacaccacaacagtgctcgctaccctggcccttcttgggtgtgatgcttcaccatggcagtggcttagaaagaaa

SEQ ID NO: 10036 - DNA, 80 bp, synthetic construct
  misc_feature 1..80: note = Synthetic: >NC_002058.3-cand-4080-4159
  source 1..80: mol_type = other DNA
gcatgcgatgttctggagataccttatgtcatcaagcaaggtgacagttggttgaagaagtttactgaagcatgcaacgc

SEQ ID NO: 10037 - DNA, 80 bp, synthetic construct
  misc_feature 1..80: note = Synthetic: >NC_002058.3-cand-4160-4239
  source 1..80: mol_type = other DNA
agctaagggactggagtgggtgtcaaacaaaatctcaaaattcattgattggctcaaggagaaaattatcccacaagcta

SEQ ID NO: 10038 - DNA, 80 bp, synthetic construct
  misc_feature 1..80: note = Synthetic: >NC_002058.3-cand-5600-5679
  source 1..80: mol_type = other DNA
cttggatgccaaagcgctcgaagatcaagcaggaaccaatcttgaaatcactataatcactctaaagagaaatgaaaagt

SEQ ID NO: 10039 - DNA, 80 bp, synthetic construct
  misc_feature 1..80: note = Synthetic: >NC_002058.3-cand-5680-5759
  source 1..80: mol_type = other DNA
tcagagacattagaccacatatacctactcaaatcactgagacaaatgatggagtcttgatcgtgaacactagcaagtac

SEQ ID NO: 10040 - DNA, 80 bp, synthetic construct
  misc_feature 1..80: note = Synthetic: >NC_002058.3-cand-5770-5849
  source 1..80: mol_type = other DNA
atgttcctgtcggtgctgtgactgaacagggatatctaaatctcggtgggcgccaaactgctcgtactctaatgtacaac

SEQ ID NO: 10041 - DNA, 80 bp, synthetic construct
  misc_feature 1..80: note = Synthetic: >NC_002058.3-cand-5850-5929
  source 1..80: mol_type = other DNA
tttccaaccagagcaggacagtgtggtggagtcatcacatgtactgggaaagtcatcgggatgcatgttggtgggaacgg

SEQ ID NO: 10042 - DNA, 80 bp, synthetic construct
  misc_feature 1..80: note = Synthetic: >NC_002058.3-cand-6010-6089
  source 1..80: mol_type = other DNA
aggaagtgggatatccaatcataaatgccccgtccaaaaccaagcttgaacccagtgctttccactatgtgtttgaaggg

SEQ ID NO: 10043 - DNA, 80 bp, synthetic construct
  misc_feature 1..80: note = Synthetic: >NC_002058.3-cand-6110-6189
  source 1..80: mol_type = other DNA
cactaaaaacgatcccaggcttaagacagactttgaggaggcaattttctccaagtacgtgggtaacaaaattactgaag

SEQ ID NO: 10044 - DNA, 80 bp, synthetic construct
  misc_feature 1..80: note = Synthetic: >NC_002058.3-cand-6190-6269
  source 1..80: mol_type = other DNA
tggatgagtacatgaaagaggcagtagaccactatgctggccagctcatgtcactagacatcaacacagaacaaatgtgc

SEQ ID NO: 10045 - DNA, 80 bp, synthetic construct
  misc_feature 1..80: note = Synthetic: >NC_002058.3-cand-6270-6349
  source 1..80: mol_type = other DNA
ttggaggatgccatgtatggcactgatggtctagaagcacttgatttgtccaccagtgctggctacccttatgtagcaat

SEQ ID NO: 10046 - DNA, 80 bp, synthetic construct
  misc_feature 1..80: note = Synthetic: >NC_002058.3-cand-6350-6429
  source 1..80: mol_type = other DNA
gggaaagaagaagagagacatcttgaacaaacaaaccagagacactaaggaaatgcaaaaactgctcgacacatatggaa

SEQ ID NO: 10047 - DNA, 80 bp, synthetic construct
  misc_feature 1..80: note = Synthetic: >NC_002058.3-cand-6410-6489
  source 1..80: mol_type = other DNA
actgctcgacacatatggaatcaacctcccactggtgacttatgtaaaggatgaacttagatccaaaacaaaggttgagc

SEQ ID NO: 10048 - DNA, 80 bp, synthetic construct
  misc_feature 1..80: note = Synthetic: >NC_002058.3-cand-6510-6589
  source 1..80: mol_type = other DNA
gaagcttctagtttgaatgactcagtggcaatgagaatggcttttgggaacctatatgctgcttttcacaaaaacccagg

SEQ ID NO: 10049 - DNA, 80 bp, synthetic construct
  misc_feature 1..80: note = Synthetic: >NC_002058.3-cand-6620-6699
  source 1..80: mol_type = other DNA
tccagatttgttttggagcaaaattccggtattgatggaagagaagctgtttgcttttgactacacagggtatgatgcat

SEQ ID NO: 10050 - DNA, 80 bp, synthetic construct
  misc_feature 1..80: note = Synthetic: >NC_002058.3-cand-6670-6749
  source 1..80: mol_type = other DNA
ttgcttttgactacacagggtatgatgcatctctcagccctgcttggttcgaggcactaaagatggtgcttgagaaaatc

SEQ ID NO: 10051 - DNA, 80 bp, synthetic construct
  misc_feature 1..80: note = Synthetic: >NC_002058.3-cand-6750-6829
  source 1..80: mol_type = other DNA
ggattcggagacagagttgactacatcgactacctaaaccactcacaccacctgtacaagaataaaacatactgtgtcaa

SEQ ID NO: 10052 - DNA, 80 bp, synthetic construct
  misc_feature 1..80: note = Synthetic: >NC_002058.3-cand-6840-6919
  source 1..80: mol_type = other DNA
ccatctggctgctcaggcacttcaatttttaactcaatgattaacaacttgattatcaggacactcttactgaaaaccta

SEQ ID NO: 10053 - DNA, 80 bp, synthetic construct
  misc_feature 1..80: note = Synthetic: >NC_002058.3-cand-7100-7179
  source 1..80: mol_type = other DNA
cttgaagagattcttcagggcagacgagaaatacccatttcttattcatccagtaatgccaatgaaggaaattcatgaat

SEQ ID NO: 10054 - DNA, 80 bp, synthetic construct
  misc_feature 1..80: note = Synthetic: >NC_002205.1-cand-10-89
  source 1..80: mol_type = other DNA
aattgaactactaaagcagctgttaagggacaatgaagccaaaacggtgttgagacagacaacggtagaccaatacaaca

SEQ ID NO: 10055 - DNA, 80 bp, synthetic construct
  misc_feature 1..80: note = Synthetic: >NC_002205.1-cand-100-179
  source 1..80: mol_type = other DNA
attcaatacatcaagaattgaaaagaacccttcattaagaatgaagtgggccatgtgttccaattttcccttagctctga

SEQ ID NO: 10056 - DNA, 80 bp, synthetic construct
  misc_feature 1..80: note = Synthetic: >NC_002205.1-cand-180-259
  source 1..80: mol_type = other DNA
ccaagggtgatatggcaaatcgaatccccttggaatacaagggaatacaacttaaaacaaatgctgaagacataggaact

SEQ ID NO: 10057 - DNA, 80 bp, synthetic construct
  misc_feature 1..80: note = Synthetic: >NC_002205.1-cand-240-319
  source 1..80: mol_type = other DNA
atgctgaagacataggaactaaaggacaaatgtgttcaatagcagcagttacctggtggaatacatatgggcccataggg

SEQ ID NO: 10058 - DNA, 80 bp, synthetic construct
  misc_feature 1..80: note = Synthetic: >NC_002205.1-cand-400-479
  source 1..80: mol_type = other DNA
aacctttggccctgttgagagagtaagaaaaagagtactactaaacccgctcaccaaggaaatgcccccagatgaagcga

SEQ ID NO: 10059 - DNA, 80 bp, synthetic construct
  misc_feature 1..80: note = Synthetic: >NC_002205.1-cand-430-509
  source 1..80: mol_type = other DNA
aagagtactactaaacccgctcaccaaggaaatgcccccagatgaagcgagcaatgtaataatggaaatattattcccta

SEQ ID NO: 10060 - DNA, 80 bp, synthetic construct
  misc_feature 1..80: note = Synthetic: >NC_002205.1-cand-510-589
  source 1..80: mol_type = other DNA
aagaagcaggaataccaagagaatctacttggatacatagagaactgataaaagaaaaaagagaaaaattgaagggaacg

SEQ ID NO: 10061 - DNA, 80 bp, synthetic construct
  misc_feature 1..80: note = Synthetic: >NC_002205.1-cand-570-649
  source 1..80: mol_type = other DNA
gagaaaaattgaagggaacgatgataactcccattgtactggcatacatgcttgagagagaactagttgcccgaagaagg

SEQ ID NO: 10062 - DNA, 80 bp, synthetic construct
  misc_feature 1..80: note = Synthetic: >NC_002205.1-cand-650-729
  source 1..80: mol_type = other DNA
ttcctgccagtagcaggagcaacatcagcagagttcatagaaatgctacattgcttacaaggtgaaaattggagacaaat

SEQ ID NO: 10063 - DNA, 80 bp, synthetic construct
  misc_feature 1..80: note = Synthetic: >NC_002205.1-cand-740-819
  source 1..80: mol_type = other DNA
ggagggaataaactaactgaatctagatctcaatcaatgattgtagcttgcaggaagataatcagaagatcaatagttgc

SEQ ID NO: 10064 - DNA, 80 bp, synthetic construct
  misc_feature 1..80: note = Synthetic: >NC_002205.1-cand-820-899
  source 1..80: mol_type = other DNA
atcaaacccactagagctagctgtagagattgcaaataagactgtgatagacactgaacctttaaaatcatgtctggcag

SEQ ID NO: 10065 - DNA, 80 bp, synthetic construct
  misc_feature 1..80: note = Synthetic: >NC_002205.1-cand-910-989
  source 1..80: mol_type = other DNA
aggtgatgtagcctgtgacataataagagctgcattaggattaaaaattagacaaagacaaagatttgggagacttgaac

SEQ ID NO: 10066 - DNA, 80 bp, synthetic construct
  misc_feature 1..80: note = Synthetic: >NC_002205.1-cand-1000-1079
  source 1..80: mol_type = other DNA
atcaggaagaggattcaaaaatgatgaagagatattaatcggaaacggaacaatacaaaagattggaatatgggacggag

SEQ ID NO: 10067 - DNA, 80 bp, synthetic construct
  misc_feature 1..80: note = Synthetic: >NC_002205.1-cand-1120-1199
  source 1..80: mol_type = other DNA
attgaaaaaaagccaaatgagaatggaaaaactactgataaattcagccaaaaaggaggacatgaaagatttaataatct

SEQ ID NO: 10068 - DNA, 80 bp, synthetic construct
  misc_feature 1..80: note = Synthetic: >NC_002205.1-cand-1170-1249
  source 1..80: mol_type = other DNA
aaaaggaggacatgaaagatttaataatcttatgcatggtattttctcaagacactaggatgttccaaggagtgagagga

SEQ ID NO: 10069 - DNA, 80 bp, synthetic construct
  misc_feature 1..80: note = Synthetic: >NC_002205.1-cand-1250-1329
  source 1..80: mol_type = other DNA
gagataaattttcttaatcgagcaggccaacttttatcccccatgtaccaactccaacgatactttctgaataggagcaa

SEQ ID NO: 10070 - DNA, 80 bp, synthetic construct
  misc_feature 1..80: note = Synthetic: >NC_002207.1-cand-740-819
  source 1..80: mol_type = other DNA
tatgtttctcagattggtggcttcccaaatcaaacagaagacgaagggctaaaacaaagcggcagaattgttgttgatta

SEQ ID NO: 10071 - DNA, 80 bp, synthetic construct
  misc_feature 1..80: note = Synthetic: >NC_002207.1-cand-830-909
  source 1..80: mol_type = other DNA
aaacctggaaaaacaggaacaattgtttatcaaagaggcattttattgcctcaaaaagtgtggtgcgcaagtggcaggag

SEQ ID NO: 10072 - DNA, 80 bp, synthetic construct
  misc_feature 1..80: note = Synthetic: >NC_002207.1-cand-910-989
  source 1..80: mol_type = other DNA
caaggtaataaaagggtccttgcctttaattggtgaagcagattgcctccacgaaaagtacggtggattaaataaaagca

SEQ ID NO: 10073 - DNA, 80 bp, synthetic construct
  misc_feature 1..80: note = Synthetic: >NC_002207.1-cand-1000-1079
  source 1..80: mol_type = other DNA
cacaggagagcatgcaaaggccataggaaattgcccaatatgggtgaaaacacccttgaagctggccaatggaaccaaat

SEQ ID NO: 10074 - DNA, 80 bp, synthetic construct
  misc_feature 1..80: note = Synthetic: >NC_002207.1-cand-1090-1169
  source 1..80: mol_type = other DNA
tgcaaaactattaaaggaaagaggtttcttcggagctattgctggtttcttggaaggaggatgggaaggaatgattgcag

SEQ ID NO: 10075 - DNA, 80 bp, synthetic construct
  misc_feature 1..80: note = Synthetic: >NC_002207.1-cand-1180-1259
  source 1..80: mol_type = other DNA
atacacatctcatggagcacatggagtggcagtggcagcagaccttaagagtacacaagaagctataaacaagataacaa

SEQ ID NO: 10076 - DNA, 80 bp, synthetic construct
  misc_feature 1..80: note = Synthetic: >NC_002207.1-cand-1260-1339
  source 1..80: mol_type = other DNA
aaaatctcaactatttaagtgagctagaagtaaaaaaccttcaaagactaagcggagcaatgaatgagcttcacgacgaa

SEQ ID NO: 10077 - DNA, 80 bp, synthetic construct
  misc_feature 1..80: note = Synthetic: >NC_002207.1-cand-1340-1419
  source 1..80: mol_type = other DNA
atactcgagctagacgaaaaagtggatgatctaagagctgatacaataagctcacaaatagagcttgcagtcttgctttc

SEQ ID NO: 10078 - DNA, 80 bp, synthetic construct
  misc_feature 1..80: note = Synthetic: >NC_002207.1-cand-1390-1469
  source 1..80: mol_type = other DNA
ctcacaaatagagcttgcagtcttgctttccaacgaagggataataaacagtgaagatgagcatctcttggcacttgaaa

SEQ ID NO: 10079 - DNA, 80 bp, synthetic construct
  misc_feature 1..80: note = Synthetic: >NC_002207.1-cand-1470-1549
  source 1..80: mol_type = other DNA
gaaaactgaagaaaatgcttggcccctctgctgtagaaatagggaatgggtgctttgaaaccaaacacaaatgcaaccag

SEQ ID NO: 10080 - DNA, 80 bp, synthetic construct
  misc_feature 1..80: note = Synthetic: >NC_002207.1-cand-1550-1629
  source 1..80: mol_type = other DNA
acttgcctagacaggatagctgctggcacctttaatgcaggagatttttctcttcccacttttgattcattaaacattac

SEQ ID NO: 10081 - DNA, 80 bp, synthetic construct
  misc_feature 1..80: note = Synthetic: >NC_002207.1-cand-1630-1709
  source 1..80: mol_type = other DNA
tgctgcatctttaaatgatgatggcttggataatcatactatactgctctactactcaactgctgcttctagcttggctg

SEQ ID NO: 10082 - DNA, 80 bp, synthetic construct
  misc_feature 1..80: note = Synthetic: >NC_002207.1-cand-1710-1789
  source 1..80: mol_type = other DNA
taacattaatgatagctatcttcattgtctacatggtctccagagacaatgtttcttgttccatctgtctgtgagggaga

SEQ ID NO: 10083 - DNA, 80 bp, synthetic construct
  misc_feature 1..80: note = Synthetic: >NC_002207.1-cand-1790-1869
  source 1..80: mol_type = other DNA
ttaagccctgtgttttcctttactgtagtgctcatttgcttgtcaccattacaaagaaacgttattgaaaaatgctcttg

SEQ ID NO: 10084 - DNA, 80 bp, synthetic construct
  misc_feature 1..80: note = Synthetic: >NC_002208.1-cand-0-79
  source 1..80: mol_type = other DNA
gaagcacagcattttcttgtgagcttcgagcactaataaaactgaaaatcaaaatgtccaacatggatattgacagtata

SEQ ID NO: 10085 - DNA, 80 bp, synthetic construct
  misc_feature 1..80: note = Synthetic: >NC_002208.1-cand-50-129
  source 1..80: mol_type = other DNA
aaaatgtccaacatggatattgacagtataaataccggaacaatcgataaaacaccagaagaactgactcccggaaccag

SEQ ID NO: 10086 - DNA, 80 bp, synthetic construct
  misc_feature 1..80: note = Synthetic: >NC_003310.1-cand-2280-2359
  source 1..80: mol_type = other DNA
atttatctgtggaagagacggtgtgagaatatgttccgggaccacacggagaacagatgacgtctccggtagacgtgtat

SEQ ID NO: 10087 - DNA, 80 bp, synthetic construct
  misc_feature 1..80: note = Synthetic: >NC_003310.1-cand-2360-2439
  source 1..80: mol_type = other DNA
ccggatactccgtatcctattccacactttgttttagaaatacatgttctacaccctgatgatcctttgagaagacaata

SEQ ID NO: 10088 - DNA, 80 bp, synthetic construct
  misc_feature 1..80: note = Synthetic: >NC_003310.1-cand-141210-141289
  source 1..80: mol_type = other DNA
agttcaacgacgattgaattctcttcccgtggatgctgcatgatgaacgacgggatgttgttctattgatttggaattct

SEQ ID NO: 10089 - DNA, 80 bp, synthetic construct
  misc_feature 1..80: note = Synthetic: >NC_003310.1-cand-141530-141609
  source 1..80: mol_type = other DNA
ctttgtccgtaaaacataaatataaatacccgcttttatcaaacgttccaaaaagtcggcagccgacatttttaacatgg

SEQ ID NO: 10090 - DNA, 80 bp, synthetic construct
  misc_feature 1..80: note = Synthetic: >NC_003310.1-cand-141800-141879
  source 1..80: mol_type = other DNA
gaaggtaacaattaatgatctaaagatgatgctattttacatggatttatcatatcatggagtgacaagtagtggagcaa

SEQ ID NO: 10091 - DNA, 80 bp, synthetic construct
  misc_feature 1..80: note = Synthetic: >NC_003310.1-cand-141940-142019
  source 1..80: mol_type = other DNA
ttaataacaattataacaattataacaattataattgttataataattataattgttataattatgatgatacatttttt

SEQ ID NO: 10092 - DNA, 80 bp, synthetic construct
  misc_feature 1..80: note = Synthetic: >NC_003310.1-cand-142340-142419
  source 1..80: mol_type = other DNA
gcaaaaatgcgtaatgttagcccgtcctaatattggtacgtgtctataagtttggcatagtagaataatagacgtgttta

SEQ ID NO: 10093 - DNA, 80 bp, synthetic construct
  misc_feature 1..80: note = Synthetic: >NC_003310.1-cand-142740-142819
  source 1..80: mol_type = other DNA
cctgttaaaaccattctaaacggcatttttaataaattttctcttgaaaattgtttttcttgaaaacaattcataattat

SEQ ID NO: 10094 - DNA, 80 bp, synthetic construct
  misc_feature 1..80: note = Synthetic: >NC_003310.1-cand-142900-142979
  source 1..80: mol_type = other DNA
acatatcgtgatataaataacatttattatcatgatgacaccagaaaacgacgaagagcagacatctgtgttctccgcta

SEQ ID NO: 10095 - DNA, 80 bp, synthetic construct
  misc_feature 1..80: note = Synthetic: >NC_003310.1-cand-142980-143059
  source 1..80: mol_type = other DNA
ctgtttacggagacaaaattcagggaaagaataaacgcaaacgcgtgattggtctatgtattagaatatctatggttatt

SEQ ID NO: 10096 - DNA, 80 bp, synthetic construct
  misc_feature 1..80: note = Synthetic: >NC_003310.1-cand-143240-143319
  source 1..80: mol_type = other DNA
tattaccagggttcttgttatatattacattcagactataagtcattcgaggatgctaaagcaaactgcgctgcggaatc

SEQ ID NO: 10097 - DNA, 80 bp, synthetic construct
  misc_feature 1..80: note = Synthetic: >NC_003310.1-cand-143300-143379
  source 1..80: mol_type = other DNA
gcaaactgcgctgcggaatcatcaacgctacccaataaatccgatgtcttgactacctggctcattgattatgttgagga

SEQ ID NO: 10098 - DNA, 80 bp, synthetic construct
  misc_feature 1..80: note = Synthetic: >NC_003310.1-cand-143400-143479
  source 1..80: mol_type = other DNA
atccaattacaaaaactacatccgattatcaagattctgatgtatcacaagaagttagaaagtatttttgtacataaata

SEQ ID NO: 10099 - DNA, 80 bp, synthetic construct
  misc_feature 1..80: note = Synthetic: >NC_003310.1-cand-143480-143559
  source 1..80: mol_type = other DNA
aatgaaatcgcttaatagacaaactgtaagtaggtttaggaagttgtcggtgccggccgctataatgatgttactctcaa

SEQ ID NO: 10100 - DNA, 80 bp, synthetic construct
  misc_feature 1..80: note = Synthetic: >NC_003310.1-cand-143640-143719
  source 1..80: mol_type = other DNA
tacgataaacattgttatctggataccaacattaaaatgtctacggataatgcagtttatcagtgtcgcaaattacgagc

SEQ ID NO: 10101 - DNA, 80 bp, synthetic construct
  misc_feature 1..80: note = Synthetic: >NC_003310.1-cand-143800-143879
  source 1..80: mol_type = other DNA
agaccaatgataaatggttagatattaataatgataaagatatagatattagtaaattaacaaattttaagcaactaaac

SEQ ID NO: 10102 - DNA, 80 bp, synthetic construct
  misc_feature 1..80: note = Synthetic: >NC_003310.1-cand-143960-144039
  source 1..80: mol_type = other DNA
actatgcgttaaaagattctacaagtgataacaaaaaatgaattaatagtaagtcgttaacgtacgccgccatggacgcc

SEQ ID NO: 10103 - DNA, 80 bp, synthetic construct
  misc_feature 1..80: note = Synthetic: >NC_003310.1-cand-144040-144119
  source 1..80: mol_type = other DNA
gcgtttgttattactccaatgggtgtgttgactataacagatacattgtatgatgatctcgatatctcaatcatggactt

SEQ ID NO: 10104 - DNA, 80 bp, synthetic construct
  misc_feature 1..80: note = Synthetic: >NC_004162.2-cand-5200-5279
  source 1..80: mol_type = other DNA
acacgttgccatctgcaaccggaaaccttgcggccgtgtctgactgggtaatgagcaccgtacctgtcgcgccgcccaga

SEQ ID NO: 10105 - DNA, 80 bp, synthetic construct
  misc_feature 1..80: note = Synthetic: >NC_004162.2-cand-5250-5329
  source 1..80: mol_type = other DNA
atgagcaccgtacctgtcgcgccgcccagaagaaggcgagggagaaacctgactgtgacatgcgacgagagagaagggaa

SEQ ID NO: 10106 - DNA, 80 bp, synthetic construct
  misc_feature 1..80: note = Synthetic: >NC_004162.2-cand-5330-5409
  source 1..80: mol_type = other DNA
tataacacccatggctagcgtccgattctttagggcagagctgtgtccagtcgtacaagaaacagcggagacgcgtgaca

SEQ ID NO: 10107 - DNA, 80 bp, synthetic construct
  misc_feature 1..80: note = Synthetic: >NC_004162.2-cand-5410-5489
  source 1..80: mol_type = other DNA
cagctatgtctcttcaggcaccgccgagtaccgccacggaactgagtcacccgccgatctccttcggtgcaccaagcgag

SEQ ID NO: 10108 - DNA, 80 bp, synthetic construct
  misc_feature 1..80: note = Synthetic: >NC_004162.2-cand-5510-5589
  source 1..80: mol_type = other DNA
ggacttcaacgaaggagaaatcgaaagcttgtcttctgagctactaactttcggagacttcctacccggagaagtggatg

SEQ ID NO: 10109 - DNA, 80 bp, synthetic construct
  misc_feature 1..80: note = Synthetic: >NC_004162.2-cand-5570-5649
  source 1..80: mol_type = other DNA
cctacccggagaagtggatgatttgacagatagcgactggtccacgtgctcagacacggacgacgagttacgactagaca

SEQ ID NO: 10110 - DNA, 80 bp, synthetic construct
  misc_feature 1..80: note = Synthetic: >NC_004162.2-cand-5650-5729
  source 1..80: mol_type = other DNA
gggcaggtgggtatatattctcgtcggacactggtccaggtcatttacaacagaagtcagtacgccagtcagtgctgccg

SEQ ID NO: 10111 - DNA, 80 bp, synthetic construct
  misc_feature 1..80: note = Synthetic: >NC_004162.2-cand-5730-5809
  source 1..80: mol_type = other DNA
gtgaacaccctggaggaagtccacgaggagaagtgttacccacctaagctggatgaagcaaaggagcaactactacttaa

SEQ ID NO: 10112 - DNA, 80 bp, synthetic construct
  misc_feature 1..80: note = Synthetic: >NC_004162.2-cand-5810-5889
  source 1..80: mol_type = other DNA
gaaactccaggagagtgcatccatggccaacagaagcaggtatcagtcgcgcaaagtagaaaacatgaaagcaacaatca

SEQ ID NO: 10113 - DNA, 80 bp, synthetic construct
  misc_feature 1..80: note = Synthetic: >NC_004162.2-cand-5890-5969
  source 1..80: mol_type = other DNA
tccagagactaaagagaggctgtagattatacttaatgtcagagaccccaaaagtccctacctaccggaccacatatccg

SEQ ID NO: 10114 - DNA, 80 bp, synthetic construct
  misc_feature 1..80: note = Synthetic: >NC_004162.2-cand-5970-6049
  source 1..80: mol_type = other DNA
gcgcctgtgtactcgcctccgattaacgtccgactgtccaaccccgagtccgcagtggcagcatgcaatgagttcttggc

SEQ ID NO: 10115 - DNA, 80 bp, synthetic construct
  misc_feature 1..80: note = Synthetic: >NC_004162.2-cand-6050-6129
  source 1..80: mol_type = other DNA
tagaaactatccaactgtttcatcataccaaatcaccgacgagtatgatgcatatctagacatggtggacgggtcggaga

SEQ ID NO: 10116 - DNA, 80 bp, synthetic construct
  misc_feature 1..80: note = Synthetic: >NC_004162.2-cand-6130-6209
  source 1..80: mol_type = other DNA
gttgtctggaccgagcgacattcaatccgtcaaaacttaggagctacccaaaacagcacgcttaccacgcgccctccatc

SEQ ID NO: 10117 - DNA, 80 bp, synthetic construct
  misc_feature 1..80: note = Synthetic: >NC_004162.2-cand-6230-6309
  source 1..80: mol_type = other DNA
attccagaacacactacagaatgtactggcagcagccacgaaaagaaactgcaacgtcacacagatgagggaattaccca

SEQ ID NO: 10118 - DNA, 80 bp, synthetic construct
  misc_feature 1..80: note = Synthetic: >NC_004162.2-cand-6310-6389
  source 1..80: mol_type = other DNA
ctttggactcagcagtattcaacgtggagtgtttcaaaaaattcgcatgcaaccaagaatactgggaagaatttgctgcc

SEQ ID NO: 10119 - DNA, 80 bp, synthetic construct
  misc_feature 1..80: note = Synthetic: >NC_004162.2-cand-6360-6439
  source 1..80: mol_type = other DNA
aaccaagaatactgggaagaatttgctgccagccctatcaggataacaactgagaatttaacaacctatgttactaaact

SEQ ID NO: 10120 - DNA, 80 bp, synthetic construct
  misc_feature 1..80: note = Synthetic: >NC_005077.1-cand-2510-2589
  source 1..80: mol_type = other DNA
catgttgccaccatctataagtgatgcaccagcttttacagcagctgaaagactgaagttataaccagatatgttgagtg

SEQ ID NO: 10121 - DNA, 80 bp, synthetic construct
  misc_feature 1..80: note = Synthetic: >NC_005077.1-cand-2590-2669
  source 1..80: mol_type = other DNA
cactctcatcctttgttataatctgtaggcagtcgtgttctaaagttagtttttccaggtcatcaagattgggatatttg

SEQ ID NO: 10122 - DNA, 80 bp, synthetic construct
  misc_feature 1..80: note = Synthetic: >NC_005077.1-cand-2670-2749
  source 1..80: mol_type = other DNA
acagtgtagagaagaccaagtgatgttagtgcctgcacaacattgttcattgtttctcctccctgaactgtcatgcaggc

SEQ ID NO: 10123 - DNA, 80 bp, synthetic construct
  misc_feature 1..80: note = Synthetic: >NC_005077.1-cand-2750-2829
  source 1..80: mol_type = other DNA
aatggtaagagctggcattgaaccaaattggttattcagtttggagggatcagatacatcccacaacctgacaaccccac

SEQ ID NO: 10124 - DNA, 80 bp, synthetic construct
  misc_feature 1..80: note = Synthetic: >NC_005077.1-cand-2840-2919
  source 1..80: mol_type = other DNA
cctttgttgttggaatcccagggttctaagaatccctgctcttttttccaattgtgactgcgtcaagtttcccatgtaca

SEQ ID NO: 10125 - DNA, 80 bp, synthetic construct
  misc_feature 1..80: note = Synthetic: >NC_005077.1-cand-2920-2999
  source 1..80: mol_type = other DNA
tccttggactattgctttccctatctccaatcttcttctttagtttttctagatctgaggccaagtccattaattcatct

SEQ ID NO: 10126 - DNA, 80 bp, synthetic construct
  misc_feature 1..80: note = Synthetic: >NC_005077.1-cand-3000-3079
  source 1..80: mol_type = other DNA
ttgcccaaatcaccaactttcagaactgtgttgttctgaacacttttcatgctcatcagtctatcaacttctttatttaa

SEQ ID NO: 10127 - DNA, 80 bp, synthetic construct
  misc_feature 1..80: note = Synthetic: >NC_005077.1-cand-3080-3159
  source 1..80: mol_type = other DNA
gtccctaagtttatcaagatcagtgtctcctcgtttggacttacgtaggagtctttgaacttgagaaacttgtgtgaaat

SEQ ID NO: 10128 - DNA, 80 bp, synthetic construct
  misc_feature 1..80: note = Synthetic: >NC_005077.1-cand-3160-3239
  source 1..80: mol_type = other DNA
caagggagtctgcaatgagctttgcatcattaagaacacttgatttggttggttctgtgaacatccctagttctctcctt

SEQ ID NO: 10129 - DNA, 80 bp, synthetic construct
  misc_feature 1..80: note = Synthetic: >NC_005077.1-cand-3180-3259
  source 1..80: mol_type = other DNA
tttgcatcattaagaacacttgatttggttggttctgtgaacatccctagttctctccttagagattgagtccagcggaa

SEQ ID NO: 10130 - DNA, 80 bp, synthetic construct
  misc_feature 1..80: note = Synthetic: >NC_005078.1-cand-0-79
  source 1..80: mol_type = other DNA
catgtgatcctaggcgattcttgatcgcgcttattagctaaccaatttaatttggtgttgaagtgttgacacgctctcta

SEQ ID NO: 10131 - DNA, 80 bp, synthetic construct
  misc_feature 1..80: note = Synthetic: >NC_005078.1-cand-90-169
  source 1..80: mol_type = other DNA
cagcttatcagcttctttcaggagattcctgtttttctacaggaagctctgaacatcgctttagtggctgttagtctcat

SEQ ID NO: 10132 - DNA, 80 bp, synthetic construct
  misc_feature 1..80: note = Synthetic: >NC_005078.1-cand-170-249
  source 1..80: mol_type = other DNA
agctgtcatcaaaggcatcattaacctttacaaaagtggtctcttccagttcatcttctttctcctcctagcagggaggt

SEQ ID NO: 10133 - DNA, 80 bp, synthetic construct
  misc_feature 1..80: note = Synthetic: >NC_005078.1-cand-260-339
  source 1..80: mol_type = other DNA
tggcacattcaaaataggcctacacactgagttccagtcagtcacccttaccatgcagagacttttagctaaccattcaa

SEQ ID NO: 10134 - DNA, 80 bp, synthetic construct
  misc_feature 1..80: note = Synthetic: >NC_005078.1-cand-310-389
  source 1..80: mol_type = other DNA
ccatgcagagacttttagctaaccattcaaatgagctcccatctctctgcatgcttaacaatagtttttattatatgagg

SEQ ID NO: 10135 - DNA, 80 bp, synthetic construct
  misc_feature 1..80: note = Synthetic: >NC_005078.1-cand-430-509
  source 1..80: mol_type = other DNA
cagtcctcatgaaggagtatgatgtatcaatctatgaaccagaagaccttggaaattgtcttaacaagtctgactcaagc

SEQ ID NO: 10136 - DNA, 80 bp, synthetic construct
  misc_feature 1..80: note = Synthetic: >NC_005226.1-cand-6320-6399
  source 1..80: mol_type = other DNA
ggtgagtgtgtaaatgataggtttattgagtatgatcatgaggcagaaagaaaagtcaaggaagaaaaaatacaaccaga

SEQ ID NO: 10137 - DNA, 80 bp, synthetic construct
  misc_feature 1..80: note = Synthetic: >NC_005226.1-cand-6370-6449
  source 1..80: mol_type = other DNA
aaaagtcaaggaagaaaaaatacaaccagaagatgtcctcccggattcccttttctccttcagacatgctgatattcttc

SEQ ID NO: 10138 - DNA, 80 bp, synthetic construct
  misc_feature 1..80: note = Synthetic: >NC_005226.1-cand-6450-6529
  source 1..80: mol_type = other DNA
ttaggaggttgttcccaaaggattcagctgcttcattttattaataatgagtactatttgttgctcttttctcggagcat

SEQ ID NO: 10139 - DNA, 80 bp, synthetic construct
  misc_feature 1..80: note = Synthetic: >NC_005227.2-cand-0-79
  source 1..80: mol_type = other DNA
agtagactccttgaaaagctactactaaaaccgctggtatgagccaactcaaagaaatacaagaggaaatcacccgccat

SEQ ID NO: 10140 - DNA, 80 bp, synthetic construct
  misc_feature 1..80: note = Synthetic: >NC_005227.2-cand-80-159
  source 1..80: mol_type = other DNA
gaacagcaaattgtcattgcccggcaaaaacttaaagatgcagaaaagacggtggaagccgacccggatgatgttaacaa

SEQ ID NO: 10141 - DNA, 80 bp, synthetic construct
  misc_feature 1..80: note = Synthetic: >NC_005227.2-cand-150-229
  source 1..80: mol_type = other DNA
atgttaacaagagcacactacagagtagacgggcagctgtgtcagcattggaggacaaactggcagacttcaagaggcag

SEQ ID NO: 10142 - DNA, 80 bp, synthetic construct
  misc_feature 1..80: note = Synthetic: >NC_005227.2-cand-230-309
  source 1..80: mol_type = other DNA
cttgcagatctggtgtcaagtcaaaaaatgggtgaaaagcctgttgacccgactgggcttgagccggatgatcacctcaa

SEQ ID NO: 10143 - DNA, 80 bp, synthetic construct
  misc_feature 1..80: note = Synthetic: >NC_005227.2-cand-320-399
  source 1..80: mol_type = other DNA
agccttcgatatggaaatgtccttgatgtgaatgctattgacatcgatgagccaagtggacagacagcagattggttttc

SEQ ID NO: 10144 - DNA, 80 bp, synthetic construct
  misc_feature 1..80: note = Synthetic: >NC_005227.2-cand-410-489
  source 1..80: mol_type = other DNA
tacattacaggctttgcacttgcaataatcttgaaggcattgtatatgctgtcaactagagggaggcaaacaatcaagga

SEQ ID NO: 10145 - DNA, 80 bp, synthetic construct
  misc_feature 1..80: note = Synthetic: >NC_005227.2-cand-500-579
  source 1..80: mol_type = other DNA
acaagaatccggtttaaggatgacagctcatatgaagaaatcaatggcattagacgcccgaaacatctgtatgtgtctat

SEQ ID NO: 10146 - DNA, 80 bp, synthetic construct
  misc_feature 1..80: note = Synthetic: >NC_005227.2-cand-590-669
  source 1..80: mol_type = other DNA
cagtctaccatgaaagccgatgaattgacaccaggtaggtttagaacaattgtttgtggactctttcctgctcaaattat

SEQ ID NO: 10147 - DNA, 80 bp, synthetic construct
  misc_feature 1..80: note = Synthetic: >NC_005227.2-cand-670-749
  source 1..80: mol_type = other DNA
gcacagaaacatcataagtcctgtcatgggtgtgattggattttcttttttcgttaaagattggcctgaaaagattgagg

SEQ ID NO: 10148 - DNA, 80 bp, synthetic construct
  misc_feature 1..80: note = Synthetic: >NC_005227.2-cand-740-819
  source 1..80: mol_type = other DNA
aagattgaggagttccttattaaaccctgcccattcctgaagaaaagtggtcctagtaaggaagaagattttcttgtgag

SEQ ID NO: 10149 - DNA, 80 bp, synthetic construct
  misc_feature 1..80: note = Synthetic: >NC_005227.2-cand-820-899
  source 1..80: mol_type = other DNA
taatgatgcttaccttttaggacgtgaaaaggcattaagggagtcacaccttgctgagatagatgacttgattgaccttg

SEQ ID NO: 10150 - DNA, 80 bp, synthetic construct
  misc_feature 1..80: note = Synthetic: >NC_005227.2-cand-900-979
  source 1..80: mol_type = other DNA
cagcttcaggagacccaacaccaccagactctataaagtcaccacaagcaccatgggtgtttgcttgtcgaccagacagg

SEQ ID NO: 10151 - DNA, 80 bp, synthetic construct
  misc_feature 1..80: note = Synthetic: >NC_005227.2-cand-990-1069
  source 1..80: mol_type = other DNA
catgcatctatatagcagggatggcagagttgggagcatttttttccattctgcaggacatgaggaacacgattatggca

SEQ ID NO: 10152 - DNA, 80 bp, synthetic construct
  misc_feature 1..80: note = Synthetic: >NC_005302.1-cand-0-79
  source 1..80: mol_type = other DNA
aaagaaacacgtgccgcttacgcccacagtgttctcttgagtgttagcagaatggaaaacaagatcgaggtgaataacaa

SEQ ID NO: 10153 - DNA, 80 bp, synthetic construct
  misc_feature 1..80: note = Synthetic: >NC_005302.1-cand-90-169
  source 1..80: mol_type = other DNA
aacaggtggtttgaagagttcaaaaaaggaaatggacttgtggacaccttcacaaactcctattccttttgcgagagtgt

SEQ ID NO: 10154 - DNA, 80 bp, synthetic construct
  misc_feature 1..80: note = Synthetic: >NC_005302.1-cand-170-249
  source 1..80: mol_type = other DNA
tcccaatttggacaggtttgtgtttcagatggccagtgccaccgatgatgcacagaaggactccatctacgcatctgctc

SEQ ID NO: 10155 - DNA, 80 bp, synthetic construct
  misc_feature 1..80: note = Synthetic: >NC_005302.1-cand-260-339
  source 1..80: mol_type = other DNA
aacaaagttttgtgcacctatatatgagtgcgcatgggttagctccactggcattgtaaaaaagggacttgaatggttcg

SEQ ID NO: 10156 - DNA, 80 bp, synthetic construct
  misc_feature 1..80: note = Synthetic: >NC_005302.1-cand-350-429
  source 1..80: mol_type = other DNA
aggaaccattaagtcctgggatgaaagttatactgagctaaaggtcgacgtcccgaaaatagagcagcttaccggttacc

SEQ ID NO: 10157 - DNA, 80 bp, synthetic construct
  misc_feature 1..80: note = Synthetic: >NC_005302.1-cand-440-519
  source 1..80: mol_type = other DNA
cttgaagtggagaaaagacataggtttccgtgtcaatgccaacacagcagctctgagcaacaaagtcctcgcagaataca

SEQ ID NO: 10158 - DNA, 80 bp, synthetic construct
  misc_feature 1..80: note = Synthetic: >NC_005302.1-cand-520-599
  source 1..80: mol_type = other DNA
aagtccctggtgagattgtgatgtctgtcaaagagatgctgtcagacatgattaggagaaggaacctgattctaaacagg

SEQ ID NO: 10159 - DNA, 80 bp, synthetic construct
  misc_feature 1..80: note = Synthetic: >NC_005302.1-cand-620-699
  source 1..80: mol_type = other DNA
tggcccagtgagccatgagcatgtagactggtgcagggagtttgtcaaaggcaaatacatcatggccttcaacccaccat

SEQ ID NO: 10160 - DNA, 80 bp, synthetic construct
  misc_feature 1..80: note = Synthetic: >NC_005302.1-cand-710-789
  source 1..80: mol_type = other DNA
caacaagtcaggccgttcaggaatagcacttgttgcaacaggccttgctaagcttgcagagactgaaggaaagggaatat

SEQ ID NO: 10161 - DNA, 80 bp, synthetic construct
  misc_feature 1..80: note = Synthetic: >NC_005302.1-cand-780-859
  source 1..80: mol_type = other DNA
aagggaatatttgatgaagccaaaaagactgtggaggccctcaacgggtatctggacaagcataaggacgaagttgatag

SEQ ID NO: 10162 - DNA, 80 bp, synthetic construct
  misc_feature 1..80: note = Synthetic: >NC_005302.1-cand-870-949
  source 1..80: mol_type = other DNA
gacagcatgataacaaaccttcttaagcatattgccaaggcacaggagctctataaaaattcatctgcacttcgtgcaca

SEQ ID NO: 10163 - DNA, 80 bp, synthetic construct
  misc_feature 1..80: note = Synthetic: >NC_005302.1-cand-920-999
  source 1..80: mol_type = other DNA
ctataaaaattcatctgcacttcgtgcacaaagcgcacagattgacactgctttcagctcatactattggctttacaagg

SEQ ID NO: 10164 - DNA, 80 bp, synthetic construct
  misc_feature 1..80: note = Synthetic: >NC_005302.1-cand-1010-1089
  source 1..80: mol_type = other DNA
tcctgaaaccttcccgacggtgtcacagttcctctttgagctagggaaacagccaagaggtaccaagaaaatgaagaagg

SEQ ID NO: 10165 - DNA, 80 bp, synthetic construct
  misc_feature 1..80: note = Synthetic: >NC_005302.1-cand-1120-1199
  source 1..80: mol_type = other DNA
agaagctttatgagctctttgccgatgattctttccagcagaacaggatttacatgcatcctgccgtgcttacagctggt

SEQ ID NO: 10166 - DNA, 80 bp, synthetic construct
  misc_feature 1..80: note = Synthetic: >NC_005302.1-cand-1190-1269
  source 1..80: mol_type = other DNA
tacagctggtagaatcagtgaaatgggagtctgctttgggacaatccctgtggccaatcctgatgatgctgcccaaggat

SEQ ID NO: 10167 - DNA, 80 bp, synthetic construct
  misc_feature 1..80: note = Synthetic: >NC_005302.1-cand-1280-1359
  source 1..80: mol_type = other DNA
taagtctattctcaacctccgtaccaacactgagaccaataatccgtgtgccaaaaccatcgtcaagctatttgaagttc

SEQ ID NO: 10168 - DNA, 80 bp, synthetic construct
  misc_feature 1..80: note = Synthetic: >NC_006313.1-cand-4140-4219
  source 1..80: mol_type = other DNA
tgactatctaaaatgtcaggatcaaaatctttaatttcatggattgaggtctcattttttatggctctgtttacctgatg

SEQ ID NO: 10169 - DNA, 80 bp, synthetic construct
  misc_feature 1..80: note = Synthetic: >NC_006313.1-cand-4220-4299
  source 1..80: mol_type = other DNA
aggtgaccaaagagattccagtatcttcccttttgatgcattcttctcatttctttttggatcctgcaacctttcttctc

SEQ ID NO: 10170 - DNA, 80 bp, synthetic construct
  misc_feature 1..80: note = Synthetic: >NC_006313.1-cand-4300-4379
  source 1..80: mol_type = other DNA
tagcatctgaacttttcattttgtgtaatgctaactgtacttcatccctcacctgttcgaatgcagaaatttggtcctca

SEQ ID NO: 10171 - DNA, 80 bp, synthetic construct
  misc_feature 1..80: note = Synthetic: >NC_006313.1-cand-4380-4459
  source 1..80: mol_type = other DNA
gtcagtgcttcatacaatgttgacaattcttcttgagacttttcttgaggtacatttgcacttaccaagtttgtgaggtt

SEQ ID NO: 10172 - DNA, 80 bp, synthetic construct
  misc_feature 1..80: note = Synthetic: >NC_006313.1-cand-4460-4539
  source 1..80: mol_type = other DNA
ttttaacacaaggaaatcaatagaatcaggatctaaattgtacctacctttggtcttaaacatttctacaagtgatgtga

SEQ ID NO: 10173 - DNA, 80 bp, synthetic construct
  misc_feature 1..80: note = Synthetic: >NC_006313.1-cand-4540-4619
  source 1..80: mol_type = other DNA
cacatgatgataccattaactgtttattatatttatctacaatatttccaagttcatctaattttgggacaacaacactt

SEQ ID NO: 10174 - DNA, 80 bp, synthetic construct
  misc_feature 1..80: note = Synthetic: >NC_006313.1-cand-4620-4699
  source 1..80: mol_type = other DNA
ttattgctcgagatgtctaaagcagtacttgtgaaagtaggacgaaagggatctactttcaaatcccctgacactctcaa

SEQ ID NO: 10175 - DNA, 80 bp, synthetic construct
  misc_feature 1..80: note = Synthetic: >NC_006313.1-cand-4700-4779
  source 1..80: mol_type = other DNA
tttgcctctattgaacaatgaaacacagtatccaagtagttctctagagacaccaggctccttcacatcagattgatcaa

SEQ ID NO: 10176 - DNA, 80 bp, synthetic construct
  misc_feature 1..80: note = Synthetic: >NC_006313.1-cand-4780-4859
  source 1..80: mol_type = other DNA
gcaactctttggaaaagaatctatcaatactagaaatcatttggtgctcctgagattctgtcaaggttccgttcaatgac

SEQ ID NO: 10177 - DNA, 80 bp, synthetic construct
  misc_feature 1..80: note = Synthetic: >NC_006313.1-cand-4860-4939
  source 1..80: mol_type = other DNA
ggattcacaatgacactattaaatttcaatttgggttccaagaatttctcaaaacatttaatttgatctgttagcctatc

SEQ ID NO: 10178 - DNA, 80 bp, synthetic construct
  misc_feature 1..80: note = Synthetic: >NC_006313.1-cand-4940-5019
  source 1..80: mol_type = other DNA
tggagtttcttttgtaataaagtggcaaaggtaactaatgttcagtagaaacttgaatcttcttgtgaacccatattcta

SEQ ID NO: 10179 - DNA, 80 bp, synthetic construct
  misc_feature 1..80: note = Synthetic: >NC_006313.1-cand-5020-5099
  source 1..80: mol_type = other DNA
tctcattgtcaccagataaaatcgaaacaaacaatctgacacataatctttgcaattggatttctgagctagacttacac

SEQ ID NO: 10180 - DNA, 80 bp, synthetic construct
  misc_feature 1..80: note = Synthetic: >NC_006313.1-cand-5100-5179
  source 1..80: mol_type = other DNA
tcaactgccaacttagacataaggtcaatgtggtgtgcttggttgacatatgccattataaaatacctcaaaccttgaag

SEQ ID NO: 10181 - DNA, 80 bp, synthetic construct
  misc_feature 1..80: note = Synthetic: >NC_006313.1-cand-5180-5259
  source 1..80: mol_type = other DNA
gaatgtctgatttctcttcgaaggagaacagagcagtagtaacatgagtgtttttaattgagtggatactattctcacca

SEQ ID NO: 10182 - DNA, 80 bp, synthetic construct
  misc_feature 1..80: note = Synthetic: >NC_006313.1-cand-5260-5339
  source 1..80: mol_type = other DNA
actctgaatcaaagttcaaccagttgatcatttcttcacacattgatgtgatcacagcttcagaaaaaataggcacaaag

SEQ ID NO: 10183 - DNA, 80 bp, synthetic construct
  misc_feature 1..80: note = Synthetic: >NC_006313.1-cand-5330-5409
  source 1..80: mol_type = other DNA
aggcacaaagtatcttttaggatcacagtaaaaagatccgatctcagtcaactcaccattttctgcaatataaagtgagt

SEQ ID NO: 10184 - DNA, 80 bp, synthetic construct
  misc_feature 1..80: note = Synthetic: >NC_006572.1-cand-3440-3519
  source 1..80: mol_type = other DNA
aattaacttgtgaatgtgccacgacagcaaagtggacacgtaatccttactttttatgtcctctatatcatctcctgtct

SEQ ID NO: 10185 - DNA, 80 bp, synthetic construct
  misc_feature 1..80: note = Synthetic: >NC_006572.1-cand-3480-3559
  source 1..80: mol_type = other DNA
taatccttactttttatgtcctctatatcatctcctgtctcccatcgcaaattttgaagaaacaccaggaaaagaaaagg

SEQ ID NO: 10186 - DNA, 80 bp, synthetic construct
  misc_feature 1..80: note = Synthetic: >NC_006572.1-cand-3600-3679
  source 1..80: mol_type = other DNA
gagacctgacctagtgaaacattcaatttcatggctagaatggcattgtggaattccttctcattattaagacagctccc

SEQ ID NO: 10187 - DNA, 80 bp, synthetic construct
  misc_feature 1..80: note = Synthetic: >NC_006572.1-cand-3680-3759
  source 1..80: mol_type = other DNA
tctatattgcttagttagtgcctcaaaataatcctcaattaggcgtgtgaacatttttgtcctcaggtcacctatataaa

SEQ ID NO: 10188 - DNA, 80 bp, synthetic construct
  misc_feature 1..80: note = Synthetic: >NC_006572.1-cand-3760-3839
  source 1..80: mol_type = other DNA
gttccctgttccctccaacttgttctttgtaagataaggaaaacttgagccttccagtatcaggacccaaggatgtgtat

SEQ ID NO: 10189 - DNA, 80 bp, synthetic construct
  misc_feature 1..80: note = Synthetic: >NC_006572.1-cand-3850-3929
  source 1..80: mol_type = other DNA
attcttgactgtaaaaacataggttctttagaactgcagttgtacaatttgtcaatgacagtgctttacctaatgcctca

SEQ ID NO: 10190 - DNA, 80 bp, synthetic construct
  misc_feature 1..80: note = Synthetic: >NC_006572.1-cand-3920-3999
  source 1..80: mol_type = other DNA
taatgcctcagaattgctctctctttcactgatcctaacatcattcatcagcctttctctatcaatcttgaagtttaagc

SEQ ID NO: 10191 - DNA, 80 bp, synthetic construct
  misc_feature 1..80: note = Synthetic: >NC_006572.1-cand-4010-4089
  source 1..80: mol_type = other DNA
gtaatggctgtattttccagccaatttccctgcattcatctgaagaagtagtgacttgaagcactgaaaaaactgctggt

SEQ ID NO: 10192 - DNA, 80 bp, synthetic construct
  misc_feature 1..80: note = Synthetic: >NC_006572.1-cand-4090-4169
  source 1..80: mol_type = other DNA
cattgaatgttctggtggagacagcttgggtgatgcatgttattgggcaagagtccaaggaatccaaatagaaatacttt

SEQ ID NO: 10193 - DNA, 80 bp, synthetic construct
  misc_feature 1..80: note = Synthetic: >NC_006572.1-cand-4170-4249
  source 1..80: mol_type = other DNA
gaccttaactccaaatccttaaaaaagcctttgcagatcatctcataagcatctccaggtagtagtgactcatcaaaatc

SEQ ID NO: 10194 - DNA, 80 bp, synthetic construct
  misc_feature 1..80: note = Synthetic: >NC_006572.1-cand-4250-4329
  source 1..80: mol_type = other DNA
ttccaccatgtggtgtgctatctctgcctggatcagtctgtagtaaacacagcccacatcttcagtacctaaaaccttcc

SEQ ID NO: 10195 - DNA, 80 bp, synthetic construct
  misc_feature 1..80: note = Synthetic: >NC_006572.1-cand-4330-4409
  source 1..80: mol_type = other DNA
tcaagtctgtcaaggacttctcctctgacccatttcccacagggaacttcctgtcatatctatacttctcaaggacgaca

SEQ ID NO: 10196 - DNA, 80 bp, synthetic construct
  misc_feature 1..80: note = Synthetic: >NC_006572.1-cand-4410-4489
  source 1..80: mol_type = other DNA
tcaacagatttcttcacatcctctagacagtcaagtgcacaactatccaagaataactcatctaattcgtcaggagcccc

SEQ ID NO: 10197 - DNA, 80 bp, synthetic construct
  misc_feature 1..80: note = Synthetic: >NC_006572.1-cand-4490-4569
  source 1..80: mol_type = other DNA
ttgtgaattgggatttgaggaacctgacttcttccccacaacaaggtcactaatggccttttgcaccttataatcataat

SEQ ID NO: 10198 - DNA, 80 bp, synthetic construct
  misc_feature 1..80: note = Synthetic: >NC_006572.1-cand-4570-4649
  source 1..80: mol_type = other DNA
cctccttactcaagaggtatttagttttcctctggaatacctctgatagctggcaaacagaagcagccactagtttatca

SEQ ID NO: 10199 - DNA, 80 bp, synthetic construct
  misc_feature 1..80: note = Synthetic: >NC_006572.1-cand-4650-4729
  source 1..80: mol_type = other DNA
tgatcgtaattaagtatcctctctccgtcagtatacttattcacaaccacacttttgttgcttgcaaggtcaagagctgt

SEQ ID NO: 10200 - DNA, 80 bp, synthetic construct
  misc_feature 1..80: note = Synthetic: >NC_006577.2-cand-1910-1989
  source 1..80: mol_type = other DNA
atctttgatgtctcaattttcacaagaagtttctgatatgtgtttaaaaatgtgtattttgtttatggacagagtttcag

SEQ ID NO: 10201 - DNA, 80 bp, synthetic construct
  misc_feature 1..80: note = Synthetic: >NC_006577.2-cand-1990-2069
  source 1..80: mol_type = other DNA
ttgctacattttatatagagcattatgttaataggttggttactcaatttaagttattgggtactacacttgttaataaa

SEQ ID NO: 10202 - DNA, 80 bp, synthetic construct
  misc_feature 1..80: note = Synthetic: >NC_006577.2-cand-2070-2149
  source 1..80: mol_type = other DNA
atggttaattggtttaataccatgttagatgctagtgcacctgctacaggctggcttctttaccaattattgaatggtct

SEQ ID NO: 10203 - DNA, 80 bp, synthetic construct
  misc_feature 1..80: note = Synthetic: >NC_006577.2-cand-2150-2229
  source 1..80: mol_type = other DNA
ttttgtagtatctcaagccaactttaattttgttgctttaatacctgattatgctaaaattttagttaataaattttaca

SEQ ID NO: 10204 - DNA, 80 bp, synthetic construct
  misc_feature 1..80: note = Synthetic: >NC_006577.2-cand-2230-2309
  source 1..80: mol_type = other DNA
ctttttttaagttattattagagtgtgttacagttgatgttttaaaagatatgcctgttcttaaaactattaatggttta

SEQ ID NO: 10205 - DNA, 80 bp, synthetic construct
  misc_feature 1..80: note = Synthetic: >NC_006577.2-cand-2310-2389
  source 1..80: mol_type = other DNA
gtttgtattgtaggcaataagttttataacgttagtacagggttaattcctggttttgttttaccatgtaatgcacagga

SEQ ID NO: 10206 - DNA, 80 bp, synthetic construct
  misc_feature 1..80: note = Synthetic: >NC_006577.2-cand-2380-2459
  source 1..80: mol_type = other DNA
atgcacaggaacaacaaatttatttttttgaaggcgttgcagaatctgttatagtagaagatgatgttattgagaatgtc

SEQ ID NO: 10207 - DNA, 80 bp, synthetic construct
  misc_feature 1..80: note = Synthetic: >NC_006577.2-cand-2460-2539
  source 1..80: mol_type = other DNA
aaatcttctttatcatcttatgagtattgtcaaccacctaaatctgtagaaaaaatttgtattatagataatatgtacat

SEQ ID NO: 10208 - DNA, 80 bp, synthetic construct
  misc_feature 1..80: note = Synthetic: >NC_006577.2-cand-2540-2619
  source 1..80: mol_type = other DNA
gggtaagtgtggtgataaatttttccctattgtcatgaatgataaaaatatttgtcttttagatcaggcttggcgttttc

SEQ ID NO: 10209 - DNA, 80 bp, synthetic construct
  misc_feature 1..80: note = Synthetic: >NC_006577.2-cand-2620-2699
  source 1..80: mol_type = other DNA
catgtgcaggtagaaaagttaattttaacgagaaacctgttgttatggagattccgtctttgatgacagttaaggttatg

SEQ ID NO: 10210 - DNA, 80 bp, synthetic construct
  misc_feature 1..80: note = Synthetic: >NC_006577.2-cand-2700-2779
  source 1..80: mol_type = other DNA
tttgatttagattctacttttgatgatattttaggtaaagtttgttcagaatttgaagtagaaaagggtgttactgtaga

SEQ ID NO: 10211 - DNA, 80 bp, synthetic construct
  misc_feature 1..80: note = Synthetic: >NC_006577.2-cand-2780-2859
  source 1..80: mol_type = other DNA
tgattttgttgctgttgtttgtgatgctatagagaatgctttaaactcttgtaaagagcatccagtggttggttatcaag

SEQ ID NO: 10212 - DNA, 80 bp, synthetic construct
  misc_feature 1..80: note = Synthetic: >NC_006577.2-cand-2860-2939
  source 1..80: mol_type = other DNA
ttcgtgcatttttaaataaacttaatgagaatgttgtttatttatttgatgaggctggtgatgaagcaatggcctctcgt

SEQ ID NO: 10213 - DNA, 80 bp, synthetic construct
  misc_feature 1..80: note = Synthetic: >NC_006577.2-cand-2940-3019
  source 1..80: mol_type = other DNA
atgtattgtacttttgctattgaggatgttgaagacgttatcagtagtgaagctgtcgaagatactattgatggtgtcgt

SEQ ID NO: 10214 - DNA, 80 bp, synthetic construct
  misc_feature 1..80: note = Synthetic: >NC_006577.2-cand-3500-3579
  source 1..80: mol_type = other DNA
tgttactggtgatgatgtagatgatattgaaagtatttatgactttgatacttataaagctcttttagtttttaatgatg

SEQ ID NO: 10215 - DNA, 80 bp, synthetic construct
  misc_feature 1..80: note = Synthetic: >NC_006577.2-cand-3580-3659
  source 1..80: mol_type = other DNA
tctataatgatgctttgtttgttagttatggttctagtgttgaaacagaaacatattttaaagttaatggtttatggtca

SEQ ID NO: 10216 - DNA, 80 bp, synthetic construct
  misc_feature 1..80: note = Synthetic: >NC_006577.2-cand-6200-6279
  source 1..80: mol_type = other DNA
taaagttgacggtgtttatactaactttaagttagttggacatgatatttgtgctcaattgaatgataagttaggtttta

SEQ ID NO: 10217 - DNA, 80 bp, synthetic construct
  misc_feature 1..80: note = Synthetic: >NC_006577.2-cand-6280-6359
  source 1..80: mol_type = other DNA
atgtagatttgccgtttgttgagtacaaagtaacagtctggcctgtagctactggtgatgttgttttggcatctgatgat

SEQ ID NO: 10218 - DNA, 80 bp, synthetic construct
  misc_feature 1..80: note = Synthetic: >NC_006577.2-cand-6360-6439
  source 1..80: mol_type = other DNA
ttatatgtgaaacgttattttaaaggatgtgaaacttttggtaagcctgttatttggttttgtcatgatgaagcatcatt

SEQ ID NO: 10219 - DNA, 80 bp, synthetic construct
  misc_feature 1..80: note = Synthetic: >NC_006577.2-cand-6440-6519
  source 1..80: mol_type = other DNA
gaattctcttacttattttaataaacctagttttaaatctgaaaatagatatagtgttttgtctgttgattctgtatctg

SEQ ID NO: 10220 - DNA, 80 bp, synthetic construct
  misc_feature 1..80: note = Synthetic: >NC_006577.2-cand-6520-6599
  source 1..80: mol_type = other DNA
aggagtcacaaggtaatgtggttacttctgttatggaatcgcagattagtactaaagaggttaagttaaagggtgttaga

SEQ ID NO: 10221 - DNA, 80 bp, synthetic construct
  misc_feature 1..80: note = Synthetic: >NC_006577.2-cand-6600-6679
  source 1..80: mol_type = other DNA
aagactgttaaaatagaagatgctattattgttaatgatgaaaatagttctattaaggttgttaaaagtttatctttagt

SEQ ID NO: 10222 - DNA, 80 bp, synthetic construct
  misc_feature 1..80: note = Synthetic: >NC_006577.2-cand-6680-6759
  source 1..80: mol_type = other DNA
tgatgtttgggatatgtatttgacaggttgtgattatgttgtttgggttgctaatgaattgtcacgcctagttaaatcac

SEQ ID NO: 10223 - DNA, 80 bp, synthetic construct
  misc_feature 1..80: note = Synthetic: >NC_006577.2-cand-6760-6839
  source 1..80: mol_type = other DNA
caacagttagggaatatatacgatatggtattaaacctattactatacctatagatttgttatgtttaagagatgataat

SEQ ID NO: 10224 - DNA, 80 bp, synthetic construct
  misc_feature 1..80: note = Synthetic: >NC_006577.2-cand-6840-6919
  source 1..80: mol_type = other DNA
caaactcttttagttcctaaaatttttaaagcaagagctatagaattttatggttttttgaagtggttgtttatttatgt

SEQ ID NO: 10225 - DNA, 80 bp, synthetic construct
  misc_feature 1..80: note = Synthetic: >NC_006577.2-cand-6920-6999
  source 1..80: mol_type = other DNA
ttttagtttattacattttacaaatgataaaaccattttttatactacagaaatagcttctaagtttacttttaatttgt

SEQ ID NO: 10226 - DNA, 80 bp, synthetic construct
  misc_feature 1..80: note = Synthetic: >NC_006577.2-cand-7000-7079
  source 1..80: mol_type = other DNA
tttgtttggctcttaaaaatgcttttcagacatttagatggagtatatttataaaaggttttcttgttgtagccactgtg

SEQ ID NO: 10227 - DNA, 80 bp, synthetic construct
  misc_feature 1..80: note = Synthetic: >NC_006577.2-cand-7080-7159
  source 1..80: mol_type = other DNA
tttttgttttggtttaattttttgtatataaatgttatttttagtgacttttatcttcctaatattagtgtttttcctat

SEQ ID NO: 10228 - DNA, 80 bp, synthetic construct
  misc_feature 1..80: note = Synthetic: >NC_006577.2-cand-7160-7239
  source 1..80: mol_type = other DNA
ttttgtgggaagaattgttatgtggataaaggctacttttggtttggttacaatttgtgatttttattctaagttaggtg

SEQ ID NO: 10229 - DNA, 80 bp, synthetic construct
  misc_feature 1..80: note = Synthetic: >NC_006577.2-cand-7240-7319
  source 1..80: mol_type = other DNA
taggttttacaagtcatttttgtaatggtagttttatatgtgaattgtgtcattctggttttgatatgttggatacatat

SEQ ID NO: 10230 - DNA, 80 bp, synthetic construct
  misc_feature 1..80: note = Synthetic: >NC_006577.2-cand-7320-7399
  source 1..80: mol_type = other DNA
gcagctatagattttgttcagtatgaagtagatagacgtgttttatttgattatgttagtttagtcaaattaattgttga

SEQ ID NO: 10231 - DNA, 80 bp, synthetic construct
  misc_feature 1..80: note = Synthetic: >NC_006577.2-cand-7400-7479
  source 1..80: mol_type = other DNA
actcgttattggttattcattatacacagtatggttttatccattattttgtcttattggtttacaattatttactacat

SEQ ID NO: 10232 - DNA, 80 bp, synthetic construct
  misc_feature 1..80: note = Synthetic: >NC_006577.2-cand-12610-12689
  source 1..80: mol_type = other DNA
tggctgctaatactttaactatagtaataccagataaacaagtttttgataaagttgttgataatgtttatgttacatat

SEQ ID NO: 10233 - DNA, 80 bp, synthetic construct
  misc_feature 1..80: note = Synthetic: >NC_006577.2-cand-12690-12769
  source 1..80: mol_type = other DNA
gctggtagtgtatggcatatacagactgttcaagatgctgatggtattaataaacagttaactgatattagtgttgattc

SEQ ID NO: 10234 - DNA, 80 bp, synthetic construct
  misc_feature 1..80: note = Synthetic: >NC_006577.2-cand-12770-12849
  source 1..80: mol_type = other DNA
taattggcctcttgttatcattgcgaacaggtataatgaagttgctaatgctgttatgcagaataatgagttgatgcctc

SEQ ID NO: 10235 - DNA, 80 bp, synthetic construct
  misc_feature 1..80: note = Synthetic: >NC_006577.2-cand-12850-12929
  source 1..80: mol_type = other DNA
ataaattaaaaatacaagttgttaatagtggttctgatatgaattgtaatattcctactcaatgttattataataatggt

SEQ ID NO: 10236 - DNA, 80 bp, synthetic construct
  misc_feature 1..80: note = Synthetic: >NC_006577.2-cand-12930-13009
  source 1..80: mol_type = other DNA
agtagtggtagaatagtttatgctgttcttagtgatgttgatggtcttaagtatactaagataatgaaagatgatggaaa

SEQ ID NO: 10237 - DNA, 80 bp, synthetic construct
  misc_feature 1..80: note = Synthetic: >NC_006577.2-cand-13010-13089
  source 1..80: mol_type = other DNA
ttgtgttgttttagagcttgatcctccttgtaaattttctatacaagatgttaagggacttaaaattaagtatctttatt

SEQ ID NO: 10238 - DNA, 80 bp, synthetic construct
  misc_feature 1..80: note = Synthetic: >NC_006577.2-cand-13090-13169
  source 1..80: mol_type = other DNA
ttattaaaggatgtaacactttagctagagggtgggttgttggtactttatcttcaacaattagattgcaggctggtgtt

SEQ ID NO: 10239 - DNA, 80 bp, synthetic construct
  misc_feature 1..80: note = Synthetic: >NC_006577.2-cand-13160-13239
  source 1..80: mol_type = other DNA
ggctggtgttgctactgagtatgcagctaattcttctatactttcattatgtgcattttctgtagatcctaagaaaactt

SEQ ID NO: 10240 - DNA, 80 bp, synthetic construct
  misc_feature 1..80: note = Synthetic: >NC_006577.2-cand-13240-13319
  source 1..80: mol_type = other DNA
atttagattatatacaacaaggtggtgtacctataattaattgtgttaaaatgctctgtgatcatgctggtactggtatg

SEQ ID NO: 10241 - DNA, 80 bp, synthetic construct
  misc_feature 1..80: note = Synthetic: >NC_006577.2-cand-13320-13399
  source 1..80: mol_type = other DNA
gccattactattaaacctgaggctactattaaccaagattcttatggtggtgcctcagtttgtatttattgccgtgcacg

SEQ ID NO: 10242 - DNA, 80 bp, synthetic construct
  misc_feature 1..80: note = Synthetic: >NC_006577.2-cand-13390-13469
  source 1..80: mol_type = other DNA
gccgtgcacgtgtagagcatccagatgtagatggtatatgtaaattacgtggtaaatttgtacaagtccctttgggtata

SEQ ID NO: 10243 - DNA, 80 bp, synthetic construct
  misc_feature 1..80: note = Synthetic: >NC_006577.2-cand-13470-13549
  source 1..80: mol_type = other DNA
aaagatcctattctttatgtgttaacacatgatgtttgtcaagtctgtggtttttggagagatggcagttgttcctgtgt

SEQ ID NO: 10244 - DNA, 80 bp, synthetic construct
  misc_feature 1..80: note = Synthetic: >NC_006577.2-cand-13520-13599
  source 1..80: mol_type = other DNA
tttttggagagatggcagttgttcctgtgtaggttcaagtgtcgctgttcaatctaaagatttaaattttttaaacgggt

SEQ ID NO: 10245 - DNA, 80 bp, synthetic construct
  misc_feature 1..80: note = Synthetic: >NC_006577.2-cand-13630-13709
  source 1..80: mol_type = other DNA
accctgtgctagtggtttatctactgatgttcaattaagggcatttgacatttgtaataccaatagagctggtataggtt

SEQ ID NO: 10246 - DNA, 80 bp, synthetic construct
  misc_feature 1..80: note = Synthetic: >NC_006577.2-cand-13720-13799
  source 1..80: mol_type = other DNA
agtgaattgttgccgttttcagcgtatagatgacgacggtaataaattggataagttctttgttgtcaaaagaactaatt

SEQ ID NO: 10247 - DNA, 80 bp, synthetic construct
  misc_feature 1..80: note = Synthetic: >NC_006577.2-cand-13820-13899
  source 1..80: mol_type = other DNA
aaaacttattatgagttgactaaaagttgtggtgttgtggctgaacatgatttctttacatttgatattgatggtagtcg

SEQ ID NO: 10248 - DNA, 80 bp, synthetic construct
  misc_feature 1..80: note = Synthetic: >NC_007357.1-cand-1990-2069
  source 1..80: mol_type = other DNA
caactacaacaaggcaaccaaaaggcttacagtcctcggaaaggacgcaggtgcattaacagaagatccagacgagggaa

SEQ ID NO: 10249 - DNA, 80 bp, synthetic construct
  misc_feature 1..80: note = Synthetic: >NC_007357.1-cand-2100-2179
  source 1..80: mol_type = other DNA
gattcctaattctaggcagagaggacaaaagatatggacccgcattgagcatcaatgaactgagcaatcttgcaaaaggg

SEQ ID NO: 10250 - DNA, 80 bp, synthetic construct
  misc_feature 1..80: note = Synthetic: >NC_007357.1-cand-2180-2259
  source 1..80: mol_type = other DNA
gagaaggctaatgtattgataatgcaaggagacgtggtgttggtaatgaaacggaaacgggactttagcatacttactga

SEQ ID NO: 10251 - DNA, 80 bp, synthetic construct
  misc_feature 1..80: note = Synthetic: >NC_007358.1-cand-90-169
  source 1..80: mol_type = other DNA
atactggagatcctccatacagccatggaacaggaacaggatacaccatggacacagtcaacagaacacatcaatattca

SEQ ID NO: 10252 - DNA, 80 bp, synthetic construct
  misc_feature 1..80: note = Synthetic: >NC_007358.1-cand-210-289
  source 1..80: mol_type = other DNA
cccaactcaatccgattgatggaccactacctgaggataatgagccgagtgggtatgcacaaacagattgtgtattggaa

SEQ ID NO: 10253 - DNA, 80 bp, synthetic construct
  misc_feature 1..80: note = Synthetic: >NC_007358.1-cand-280-359
  source 1..80: mol_type = other DNA
tgtattggaagcaatggctttccttgaagaatcccacccagggatctttgaaaactcgtgtcttgaaacgatggaagttg

SEQ ID NO: 10254 - DNA, 80 bp, synthetic construct
  misc_feature 1..80: note = Synthetic: >NC_007358.1-cand-360-439
  source 1..80: mol_type = other DNA
ttcagcaaacaagagtggataagctgacccaaggtcgccaaacctatgactggacattgaaaagaaaccagccggctgca

SEQ ID NO: 10255 - DNA, 80 bp, synthetic construct
  misc_feature 1..80: note = Synthetic: >NC_007358.1-cand-440-519
  source 1..80: mol_type = other DNA
accgctttggccaacactatagaggtcttcagatcgaatggtctaacagccaatgaatcgggaaggctaatagatttcct

SEQ ID NO: 10256 - DNA, 80 bp, synthetic construct
  misc_feature 1..80: note = Synthetic: >NC_007358.1-cand-520-599
  source 1..80: mol_type = other DNA
caaagacgtgatggaatcaatggataagggagaaatggaaataataacacatttccagagaaagagaagagtgagggaca

SEQ ID NO: 10257 - DNA, 80 bp, synthetic construct
  misc_feature 1..80: note = Synthetic: >NC_007358.1-cand-750-829
  source 1..80: mol_type = other DNA
ccgggatgcaaatcagaggattcgtgtactttgtcgaaacactagcgaggagtatctgtgagaaacttgagcaatctgga

SEQ ID NO: 10258 - DNA, 80 bp, synthetic construct
  misc_feature 1..80: note = Synthetic: >NC_007358.1-cand-840-919
  source 1..80: mol_type = other DNA
gagggaatgaaaagaaggctaaattggcaaatgtcgtgaggaagatgatgactaactcacaagatacagagctctctttt

SEQ ID NO: 10259 - DNA, 80 bp, synthetic construct
  misc_feature 1..80: note = Synthetic: >NC_007358.1-cand-1000-1079
  source 1..80: mol_type = other DNA
gaaccaacctgaatggtttagaaatgtcttaagcattgctcctataatgttctcaaacaagatggcaagattagggaaag

SEQ ID NO: 10260 - DNA, 80 bp, synthetic construct
  misc_feature 1..80: note = Synthetic: >NC_007358.1-cand-1080-1159
  source 1..80: mol_type = other DNA
gatacatgttcgaaagtaagagcatgaagctacggacacaaataccagcagaaatgcttgcaagcattgacttgaaatac

SEQ ID NO: 10261 - DNA, 80 bp, synthetic construct
  misc_feature 1..80: note = Synthetic: >NC_007358.1-cand-1240-1319
  source 1..80: mol_type = other DNA
gatgatgggcatgttcaatatgctgagtacagtcttaggagtttcaatcctgaatcttgggcagaagaggtacaccaaaa

SEQ ID NO: 10262 - DNA, 80 bp, synthetic construct
  misc_feature 1..80: note = Synthetic: >NC_007358.1-cand-1410-1489
  source 1..80: mol_type = other DNA
ataggttctataggacttgcaaactagttggaatcaatatgaccaagaagaagtcttacataaatcggacaggaacatgt

SEQ ID NO: 10263 - DNA, 80 bp, synthetic construct
  misc_feature 1..80: note = Synthetic: >NC_007358.1-cand-1460-1539
  source 1..80: mol_type = other DNA
aagtcttacataaatcggacaggaacatgtgaattcacaagcttcttctaccgctatgggttcgtagccaacttcagtat

SEQ ID NO: 10264 - DNA, 80 bp, synthetic construct
  misc_feature 1..80: note = Synthetic: >NC_007363.1-cand-250-329
  source 1..80: mol_type = other DNA
gacgctttgtccagaatgccttaaatggaaatggagatccaaacaatatggatagggcagttaagctatacaagaagctg

SEQ ID NO: 10265 - DNA, 80 bp, synthetic construct
  misc_feature 1..80: note = Synthetic: >NC_007363.1-cand-270-349
  source 1..80: mol_type = other DNA
ttaaatggaaatggagatccaaacaatatggatagggcagttaagctatacaagaagctgaaaagagaaataacattcca

SEQ ID NO: 10266 - DNA, 80 bp, synthetic construct
  misc_feature 1..80: note = Synthetic: >NC_007363.1-cand-390-469
  source 1..80: mol_type = other DNA
cttgccagttgtatgggtctcatatacaacaggatgggaacggtgaccacagaagtggcttttggcctagtgtgtgccac

SEQ ID NO: 10267 - DNA, 80 bp, synthetic construct
  misc_feature 1..80: note = Synthetic: >NC_007363.1-cand-570-649
  source 1..80: mol_type = other DNA
actacagctaaggctatggagcagatggctggatcgagtgagcaggcagcggaagccatggaggttgctagtcaggctag

SEQ ID NO: 10268 - DNA, 80 bp, synthetic construct
  misc_feature 1..80: note = Synthetic: >NC_007363.1-cand-660-739
  source 1..80: mol_type = other DNA
caggcaatgaggacaattgggactcatcctagctccagtgccggtctgaaagataatcttcttgaaaatttgcaggccta

SEQ ID NO: 10269 - DNA, 80 bp, synthetic construct
  misc_feature 1..80: note = Synthetic: >NC_007363.1-cand-750-829
  source 1..80: mol_type = other DNA
atgggagtgcaaatgcagcgattcaagtgatcctcttgttgttgccgcaagtatcattgggatactgcacttgatattgt

SEQ ID NO: 10270 - DNA, 80 bp, synthetic construct
  misc_feature 1..80: note = Synthetic: >NC_007363.1-cand-830-909
  source 1..80: mol_type = other DNA
ggattcttgatcgtcttttcttcaaatgcatttatcgtcgccttaaatacggtttgaaaagagggccttctacggaaggg

SEQ ID NO: 10271 - DNA, 80 bp, synthetic construct
  misc_feature 1..80: note = Synthetic: >NC_007364.1-cand-110-189
  source 1..80: mol_type = other DNA
acaggctccgaagagaccaaaaggcattaaagggaagaggcagcacacttggactcgatttaagagtggctacaatggag

SEQ ID NO: 10272 - DNA, 80 bp, synthetic construct
  misc_feature 1..80: note = Synthetic: >NC_007364.1-cand-210-289
  source 1..80: mol_type = other DNA
catcctgaagagtgagacaaatgaaaacctcaaaatagccattgcttccagtcctgctcctcggtatatcaccgatatga

SEQ ID NO: 10273 - DNA, 80 bp, synthetic construct
  misc_feature 1..80: note = Synthetic: >NC_007364.1-cand-310-389
  source 1..80: mol_type = other DNA
gaatggtacatgctgatgcctaggcagaaaataactggaggccttatggtgaaaatggaccaagccataatggataaaag

SEQ ID NO: 10274 - DNA, 80 bp, synthetic construct
  misc_feature 1..80: note = Synthetic: >NC_007364.1-cand-400-479
  source 1..80: mol_type = other DNA
aaagcaaatttctcagttctatttgatcaactagagacattagtctctctgagggcattcacagaaagtggtgctattgt

SEQ ID NO: 10275 - DNA, 80 bp, synthetic construct
  misc_feature 1..80: note = Synthetic: >NC_007364.1-cand-490-569
  source 1..80: mol_type = other DNA
tttcccattccctccgtaccaggacattttacagaggatgtcaaaaatgcaattggaatcctcatcggtggacttgaatg

SEQ ID NO: 10276 - DNA, 80 bp, synthetic construct
  misc_feature 1..80: note = Synthetic: >NC_007364.1-cand-540-619
  source 1..80: mol_type = other DNA
aattggaatcctcatcggtggacttgaatggaatgataactcaattcgagcgtctgaaaatatacagagattcgcttggg

SEQ ID NO: 10277 - DNA, 80 bp, synthetic construct
  misc_feature 1..80: note = Synthetic: >NC_007364.1-cand-670-749
  source 1..80: mol_type = other DNA
tacatggcgaaacgagttgagtcagaagtttgaagagatcagatggctcattgctgaatgtagaaatatactgacaaaga

SEQ ID NO: 10278 - DNA, 80 bp, synthetic construct
  misc_feature 1..80: note = Synthetic: >NC_007364.1-cand-760-839
  source 1..80: mol_type = other DNA
ctttgaacagataacatttttgcaagcattgcaactcttacttgaagttgagagtgagataaggaccttctcttttcagc

SEQ ID NO: 10279 - DNA, 80 bp, synthetic construct
  misc_feature 1..80: note = Synthetic: >NC_007366.1-cand-10-89
  source 1..80: mol_type = other DNA
ataattctattaaccatgaagactatcattgctttgagctacattctatgtctggttttcgctcaaaaacttcccggaaa

SEQ ID NO: 10280 - DNA, 80 bp, synthetic construct
  misc_feature 1..80: note = Synthetic: >NC_009824.1-cand-7150-7229
  source 1..80: mol_type = other DNA
cgagccctcggtggctgcagagtgtttcaagaaacctcccaagtatcctccagcccttcctatctgggctagaccggact

SEQ ID NO: 10281 - DNA, 80 bp, synthetic construct
  misc_feature 1..80: note = Synthetic: >NC_009824.1-cand-7230-7309
  source 1..80: mol_type = other DNA
acaatcctccactgttggaccgctggaaagcaccggattatgtaccaccaactgtccatggatgtgccttaccaccacgg

SEQ ID NO: 10282 - DNA, 80 bp, synthetic construct
  misc_feature 1..80: note = Synthetic: >NC_009824.1-cand-7310-7389
  source 1..80: mol_type = other DNA
ggcgctccaccggtgcctccccctcggaggaaaaggacaattcagctggacggctctaatgtgtccgcggcgctagccgc

SEQ ID NO: 10283 - DNA, 80 bp, synthetic construct
  misc_feature 1..80: note = Synthetic: >NC_009824.1-cand-7370-7449
  source 1..80: mol_type = other DNA
gtgtccgcggcgctagccgcgctagctgaaaaatcattcccgtcctcgaaaccacaggaagagaatagctcatcctccgg

SEQ ID NO: 10284 - DNA, 80 bp, synthetic construct
  misc_feature 1..80: note = Synthetic: >NC_009824.1-cand-7500-7579
  source 1..80: mol_type = other DNA
gggagtccgactcagagtcatgctcgtctatgcctcctctcgagggagagccgggcgacccggacttgagttgcgactct

SEQ ID NO: 10285 - DNA, 80 bp, synthetic construct
  misc_feature 1..80: note = Synthetic: >NC_009824.1-cand-7550-7629
  source 1..80: mol_type = other DNA
ccgggcgacccggacttgagttgcgactcttggtccaccgttagtgacagcgaggagcagagcgtggtctgctgctctat

SEQ ID NO: 10286 - DNA, 80 bp, synthetic construct
  misc_feature 1..80: note = Synthetic: >NC_009824.1-cand-7630-7709
  source 1..80: mol_type = other DNA
gtcgtattcttggaccggcgccctgataacaccatgtagtgctgaggaagagaaactgcccatcagcccactcagcaact

SEQ ID NO: 10287 - DNA, 80 bp, synthetic construct
  misc_feature 1..80: note = Synthetic: >NC_009824.1-cand-7710-7789
  source 1..80: mol_type = other DNA
ccctgttgagacatcataacctagtctattcaacgtcgtctagaagcgcttctcagcgtcagaagaaggttaccttcgat

SEQ ID NO: 10288 - DNA, 80 bp, synthetic construct
  misc_feature 1..80: note = Synthetic: >NC_009824.1-cand-7760-7839
  source 1..80: mol_type = other DNA
tctcagcgtcagaagaaggttaccttcgatagactgcaggtgctcgacgaccattacaagactgcattaaaggaggtaaa

SEQ ID NO: 10289 - DNA, 80 bp, synthetic construct
  misc_feature 1..80: note = Synthetic: >NC_009824.1-cand-7840-7919
  source 1..80: mol_type = other DNA
ggagcgagcgtctagggtaaaggctcgcatgctcaccatcgaggaagcgtgcgcgctcgtccctcctcactctgcccgat

SEQ ID NO: 10290 - DNA, 80 bp, synthetic construct
  misc_feature 1..80: note = Synthetic: >NC_009824.1-cand-7920-7999
  source 1..80: mol_type = other DNA
cgaagttcgggtatagtgcgaaggacgttcgctccttgtccagcagggccattaaccagatccgctccgtctgggaggac

SEQ ID NO: 10291 - DNA, 80 bp, synthetic construct
  misc_feature 1..80: note = Synthetic: >NC_009824.1-cand-8000-8079
  source 1..80: mol_type = other DNA
ttgctggaagacaccacaactccaattccaaccaccatcatggcgaagaacgaggtgttttgcgtggaccccgctaaagg

SEQ ID NO: 10292 - DNA, 80 bp, synthetic construct
  misc_feature 1..80: note = Synthetic: >NC_009824.1-cand-8130-8209
  source 1..80: mol_type = other DNA
tctgtgagaaacgcgccctgtatgacgtgatacagaagttgtcaattgagacgatgggtcctgcctatggattccaatac

SEQ ID NO: 10293 - DNA, 80 bp, synthetic construct
  misc_feature 1..80: note = Synthetic: >NC_009824.1-cand-8160-8239
  source 1..80: mol_type = other DNA
tacagaagttgtcaattgagacgatgggtcctgcctatggattccaatactcgcctcaacagcgggtcgaacgtctgctg

SEQ ID NO: 10294 - DNA, 80 bp, synthetic construct
  misc_feature 1..80: note = Synthetic: >NC_009824.1-cand-8270-8349
  source 1..80: mol_type = other DNA
gggttctcatatgacacccgctgctttgactcaactgtcactgaacaggacatcagggtggaagaggagatataccaatg

SEQ ID NO: 10295 - DNA, 80 bp, synthetic construct
  misc_feature 1..80: note = Synthetic: >NC_009824.1-cand-8320-8399
  source 1..80: mol_type = other DNA
catcagggtggaagaggagatataccaatgctgtaaccttgaaccggaggccaggaaagtgatctcctccctcacggagc

SEQ ID NO: 10296 - DNA, 80 bp, synthetic construct
  misc_feature 1..80: note = Synthetic: >NC_009825.1-cand-1760-1839
  source 1..80: mol_type = other DNA
gggattgtgccagcatccagtgtgtgtggccccgtgtattgtttcactcccagccctgtcgtggtcggtactactgatca

SEQ ID NO: 10297 - DNA, 80 bp, synthetic construct
  misc_feature 1..80: note = Synthetic: >NC_009825.1-cand-1870-1949
  source 1..80: mol_type = other DNA
gaacgagactgatgtcttccttttgaactcgaccagaccgccgcatggtgcgtggtttggatgcgtgtggatgaacagta

SEQ ID NO: 10298 - DNA, 80 bp, synthetic construct
  misc_feature 1..80: note = Synthetic: >NC_009825.1-cand-1950-2029
  source 1..80: mol_type = other DNA
ccgggttcaccaaaacctgtggcgcccctccatgcgaggttaacaccaataatgggacctggcactgccccaccgattgc

SEQ ID NO: 10299 - DNA, 80 bp, synthetic construct
  misc_feature 1..80: note = Synthetic: >NC_009825.1-cand-2030-2109
  source 1..80: mol_type = other DNA
ttcaggaagcatccggagactacctacgccaagtgcggatcagggccttggatcacaccacgctgcctgattgattaccc

SEQ ID NO: 10300 - DNA, 80 bp, synthetic construct
  misc_feature 1..80: note = Synthetic: >NC_009825.1-cand-2110-2189
  source 1..80: mol_type = other DNA
gtaccggctgtggcatttcccgtgcaccgccaacttctccgtctttaacatcaggacatttgtcggcggtatagagcatc

SEQ ID NO: 10301 - DNA, 80 bp, synthetic construct
  misc_feature 1..80: note = Synthetic: >NC_009825.1-cand-2220-2299
  source 1..80: mol_type = other DNA
gggaagtctgtggcttggagcacagggatcgggtagagctatcacccctgctccttaccactacagcgtggcagatcctc

SEQ ID NO: 10302 - DNA, 80 bp, synthetic construct
  misc_feature 1..80: note = Synthetic: >NC_009825.1-cand-2270-2349
  source 1..80: mol_type = other DNA
ctccttaccactacagcgtggcagatcctcccctgctctttcaccactttacctgccctctccaccggcttgatccacct

SEQ ID NO: 10303 - DNA, 80 bp, synthetic construct
  misc_feature 1..80: note = Synthetic: >NC_009825.1-cand-2350-2429
  source 1..80: mol_type = other DNA
ccaccaaaatatcgtggacgtccagtacctctatggtgttggatctgcagtggtatcttgggcccttaagtgggaatatg

SEQ ID NO: 10304 - DNA, 80 bp, synthetic construct
  misc_feature 1..80: note = Synthetic: >NC_009825.1-cand-2430-2509
  source 1..80: mol_type = other DNA
tggtgctcgcgttcctgcttctcgcggacgcgagagtctctgcctacctatggatgatgtttatggtaagtcaagttgag

SEQ ID NO: 10305 - DNA, 80 bp, synthetic construct
  misc_feature 1..80: note = Synthetic: >NC_009825.1-cand-2510-2589
  source 1..80: mol_type = other DNA
gcggctctgtccaacctaattaacatcaatgctgcttcagccgctggtgcccaaggcttctggtacgccatcctcttcat

SEQ ID NO: 10306 - DNA, 80 bp, synthetic construct
  misc_feature 1..80: note = Synthetic: >NC_009825.1-cand-2590-2669
  source 1..80: mol_type = other DNA
ctgcattgtctggcatgtcaagggccggttcccagctgctgctgcctacgcagcctgcgggctgtggccctgttttctcc

SEQ ID NO: 10307 - DNA, 80 bp, synthetic construct
  misc_feature 1..80: note = Synthetic: >NC_009825.1-cand-2670-2749
  source 1..80: mol_type = other DNA
tgcttctgatgctgcctgagagggcttatgcatacgaccaggaagtggcagggtcccttggcggcgccatcgttgtcatg

SEQ ID NO: 10308 - DNA, 80 bp, synthetic construct
  misc_feature 1..80: note = Synthetic: >NC_009825.1-cand-2710-2789
  source 1..80: mol_type = other DNA
ggaagtggcagggtcccttggcggcgccatcgttgtcatgctgaccattctgacactgtctccgcactacaagttatggc

SEQ ID NO: 10309 - DNA, 80 bp, synthetic construct
  misc_feature 1..80: note = Synthetic: >NC_009825.1-cand-2810-2889
  source 1..80: mol_type = other DNA
atccaatattttatagctaggaccgaggctgtgctgcatgtctatattccatccttcaacgtgcgcgggcctcgcgactc

SEQ ID NO: 10310 - DNA, 80 bp, synthetic construct
  misc_feature 1..80: note = Synthetic: >NC_009825.1-cand-2890-2969
  source 1..80: mol_type = other DNA
agtgattgttcttgcagtcctggtctgtccagacctagtatttgacatcacaaaatatcttctggccatcttagggcccc

SEQ ID NO: 10311 - DNA, 80 bp, synthetic construct
  misc_feature 1..80: note = Synthetic: >NC_009825.1-cand-2970-3049
  source 1..80: mol_type = other DNA
tccacatactccaggcctcgctcctacgcatcccttactttgtgagggcacaagcgctggttaagatctgcagcttgttg

SEQ ID NO: 10312 - DNA, 80 bp, synthetic construct
  misc_feature 1..80: note = Synthetic: >NC_009942.1-cand-8910-8989
  source 1..80: mol_type = other DNA
gtgccatgtttgaagagcagaatcaatggaggagcgccagagaagcagttgaagatccaaaattttgggagatggtggat

SEQ ID NO: 10313 - DNA, 80 bp, synthetic construct
  misc_feature 1..80: note = Synthetic: >NC_009942.1-cand-9020-9099
  source 1..80: mol_type = other DNA
tgtcacacttgcatttacaacatgatgggaaagagagagaaaaaacccggagagttcggaaaggccaagggaagcagagc

SEQ ID NO: 10314 - DNA, 80 bp, synthetic construct
  misc_feature 1..80: note = Synthetic: >NC_009942.1-cand-9080-9159
  source 1..80: mol_type = other DNA
aaggccaagggaagcagagccatttggttcatgtggctcggagctcgctttctggagttcgaggctctgggttttctcaa

SEQ ID NO: 10315 - DNA, 80 bp, synthetic construct
  misc_feature 1..80: note = Synthetic: >NC_009942.1-cand-9160-9239
  source 1..80: mol_type = other DNA
tgaagaccactggcttggaagaaagaactcaggaggaggtgtcgagggcttgggcctccaaaaactgggttacatcctgc

SEQ ID NO: 10316 - DNA, 80 bp, synthetic construct
  misc_feature 1..80: note = Synthetic: >NC_009942.1-cand-9270-9349
  source 1..80: mol_type = other DNA
tctatgctgatgacacagctggctgggacacccgcatcacgagagctgacttggaaaatgaagctaaggtgcttgagctg

SEQ ID NO: 10317 - DNA, 80 bp, synthetic construct
  misc_feature 1..80: note = Synthetic: >NC_009942.1-cand-9360-9439
  source 1..80: mol_type = other DNA
aacatcggcgtcttgccagggccatcattgagctcacctatcgtcacaaagttgtgaaagtgatgcgcccggctgctgat

SEQ ID NO: 10318 - DNA, 80 bp, synthetic construct
  misc_feature 1..80: note = Synthetic: >NC_009942.1-cand-9400-9479
  source 1..80: mol_type = other DNA
tcgtcacaaagttgtgaaagtgatgcgcccggctgctgatggaagaaccgtcatggatgttatctccagagaagatcaga

SEQ ID NO: 10319 - DNA, 80 bp, synthetic construct
  misc_feature 1..80: note = Synthetic: >NC_009942.1-cand-9560-9639
  source 1..80: mol_type = other DNA
gaaggagtgattggcccagatgatgtggagaaactcacaaaagggaaaggacccaaagtcaggacctggctgtttgagaa

SEQ ID NO: 10320 - DNA, 80 bp, synthetic construct
  misc_feature 1..80: note = Synthetic: >NC_009942.1-cand-9650-9729
  source 1..80: mol_type = other DNA
agactcagccgcatggctgtcagtggagatgactgtgtggtaaagcccctggacgatcgctttgccacctcgctccactt

SEQ ID NO: 10321 - DNA, 80 bp, synthetic construct
  misc_feature 1..80: note = Synthetic: >NC_009942.1-cand-9730-9809
  source 1..80: mol_type = other DNA
cctcaatgctatgtcaaaggttcgcaaagacatccaagagtggaaaccgtcaactggatggtatgattggcagcaggttc

SEQ ID NO: 10322 - DNA, 80 bp, synthetic construct
  misc_feature 1..80: note = Synthetic: >NC_009942.1-cand-9810-9889
  source 1..80: mol_type = other DNA
cattttgctcaaaccatttcactgaattgatcatgaaagatggaagaacactggtggttccatgccgaggacaggatgaa

SEQ ID NO: 10323 - DNA, 80 bp, synthetic construct
  misc_feature 1..80: note = Synthetic: >NC_009942.1-cand-9920-9999
  source 1..80: mol_type = other DNA
gccggatggaacgtccgcgacactgcttgtctggctaagtcttatgcccagatgtggctgcttctgtacttccacagaag

SEQ ID NO: 10324 - DNA, 80 bp, synthetic construct
  misc_feature 1..80: note = Synthetic: >NC_009942.1-cand-9970-10049
  source 1..80: mol_type = other DNA
gatgtggctgcttctgtacttccacagaagagacctgcggctcatggccaacgccatttgctccgctgtccctgtgaatt

SEQ ID NO: 10325 - DNA, 80 bp, synthetic construct
  misc_feature 1..80: note = Synthetic: >NC_009942.1-cand-10050-10129
  source 1..80: mol_type = other DNA
gggtccctaccggaagaaccacgtggtccatccatgcaggaggagagtggatgacaacagaggacatgttggaggtctgg

SEQ ID NO: 10326 - DNA, 80 bp, synthetic construct
  misc_feature 1..80: note = Synthetic: >NC_009942.1-cand-10130-10209
  source 1..80: mol_type = other DNA
aaccgtgtttggatagaggagaatgaatggatggaagacaaaaccccagtggagaaatggagtgacgtcccatattcagg

SEQ ID NO: 10327 - DNA, 80 bp, synthetic construct
  misc_feature 1..80: note = Synthetic: >NC_014406.1-cand-3520-3599
  source 1..80: mol_type = other DNA
gggcattgtgaaagtgtacttcatggtgtttatgcactttcactccctttttacatttcatacagcttgctggatcattg

SEQ ID NO: 10328 - DNA, 80 bp, synthetic construct
  misc_feature 1..80: note = Synthetic: >NC_014406.1-cand-3600-3679
  source 1..80: mol_type = other DNA
gcaaattctatataatatcccaataatgccagacaatcagttaggtctgtgtcactagcaaaagaagctacttgattcca

SEQ ID NO: 10329 - DNA, 80 bp, synthetic construct
  misc_feature 1..80: note = Synthetic: >NC_014406.1-cand-3680-3759
  source 1..80: mol_type = other DNA
atcacattcctcttttttggagccttcctgaaagtcataactgtgtaaaccctcagccctagattcttgtataacagtaa

SEQ ID NO: 10330 - DNA, 80 bp, synthetic construct
  misc_feature 1..80: note = Synthetic: >NC_014406.1-cand-3760-3839
  source 1..80: mol_type = other DNA
attcatccccctgcaaggccatataacattcagcagattttaaaacagctttgattaacagaaatgaaatagtacagcat

SEQ ID NO: 10331 - DNA, 80 bp, synthetic construct
  misc_feature 1..80: note = Synthetic: >NC_014406.1-cand-3840-3919
  source 1..80: mol_type = other DNA
tttgacaaagcatttagcatagcagacactctatgtcttctaggagtaatacagtaaagtatagcccctgtattatcatt

SEQ ID NO: 10332 - DNA, 80 bp, synthetic construct
  misc_feature 1..80: note = Synthetic: >NC_014406.1-cand-3920-3999
  source 1..80: mol_type = other DNA
gcatttataggccccagtaaaaactgcattaaatgctgactgtagcttatcatacaaggtttcccatttttcaagggttg

SEQ ID NO: 10333 - DNA, 80 bp, synthetic construct
  misc_feature 1..80: note = Synthetic: >NC_014406.1-cand-4010-4089
  source 1..80: mol_type = other DNA
aaagcaggtatagcatttattaccaagagttgcatggcttagataatcatgcaggcaagatggaaagtcatttggagcag

SEQ ID NO: 10334 - DNA, 80 bp, synthetic construct
  misc_feature 1..80: note = Synthetic: >NC_014406.1-cand-4090-4169
  source 1..80: mol_type = other DNA
gattgggttttcttttcttaggaggagtgcaagaatacttgctgtcttgagagttgccttcaccagggtccacattgtct

SEQ ID NO: 10335 - DNA, 80 bp, synthetic construct
  misc_feature 1..80: note = Synthetic: >NC_014406.1-cand-4170-4249
  source 1..80: mol_type = other DNA
tcttcttctgaggctgacaggtgttcatcacaatataaatcttcatcgtcccagcctctattgaaatcagcccaccattg

SEQ ID NO: 10336 - DNA, 80 bp, synthetic construct
  misc_feature 1..80: note = Synthetic: >NC_014406.1-cand-4250-4329
  source 1..80: mol_type = other DNA
ttcccagccgggactgccatattgtggaggtggccttacctgtaaaataaattataagtttcaatgcatcactacctgga

SEQ ID NO: 10337 - DNA, 80 bp, synthetic construct
  misc_feature 1..80: note = Synthetic: >NC_014406.1-cand-4310-4389
  source 1..80: mol_type = other DNA
tcaatgcatcactacctggactatctataaaaattgcacttaccaccagatgagcttctctgtaattcccaaccaatcca

SEQ ID NO: 10338 - DNA, 80 bp, synthetic construct
  misc_feature 1..80: note = Synthetic: >NC_014406.1-cand-4420-4499
  source 1..80: mol_type = other DNA
acataaaagaatcagcttccacaggtaggccaaaccagagacagtagcacttgtagcaccagcactttccccaaatagtt

SEQ ID NO: 10339 - DNA, 80 bp, synthetic construct
  misc_feature 1..80: note = Synthetic: >NC_014406.1-cand-4500-4579
  source 1..80: mol_type = other DNA
ggctttcctaaattaatctccacttgctttttatgctcctttttgagaaggcaatgaaggcatttgcaggaactgattcc

SEQ ID NO: 10340 - DNA, 80 bp, synthetic construct
  misc_feature 1..80: note = Synthetic: >NC_014406.1-cand-4580-4659
  source 1..80: mol_type = other DNA
ttgttgtacacacaaacggaaatcccaaactttctttttatgaaattcagggcctaagaactccccaacagttaagggaa

SEQ ID NO: 10341 - DNA, 80 bp, synthetic construct
  misc_feature 1..80: note = Synthetic: >NC_014406.1-cand-4660-4739
  source 1..80: mol_type = other DNA
taccccaatcatcactgacctcagaggaaaagcaccaggtgggtgatgaagacatttggtccctcagggtggcattcaac

SEQ ID NO: 10342 - DNA, 80 bp, synthetic construct
  misc_feature 1..80: note = Synthetic: >NC_014406.1-cand-4740-4819
  source 1..80: mol_type = other DNA
ttctcctttaaaacattcaggcgttgcattttttcaggatcccctcctttatcaggatgatattttttacaagctagtct

SEQ ID NO: 10343 - DNA, 80 bp, synthetic construct
  misc_feature 1..80: note = Synthetic: >NC_019843.3-cand-22350-22429
  source 1..80: mol_type = other DNA
tcgttctatccaaagtgatagaaaagcttgggctgccttctacgtatataaacttcaaccgttaactttcctgttggatt

SEQ ID NO: 10344 - DNA, 80 bp, synthetic construct
  misc_feature 1..80: note = Synthetic: >NC_019843.3-cand-22430-22509
  source 1..80: mol_type = other DNA
tttctgttgatggttatatacgcagagctatagactgtggttttaatgatttgtcacaactccactgctcatatgaatcc

SEQ ID NO: 10345 - DNA, 80 bp, synthetic construct
  misc_feature 1..80: note = Synthetic: >NC_019843.3-cand-22510-22589
  source 1..80: mol_type = other DNA
ttcgatgttgaatctggagtttattcagtttcgtctttcgaagcaaaaccttctggctcagttgtggaacaggctgaagg

SEQ ID NO: 10346 - DNA, 80 bp, synthetic construct
  misc_feature 1..80: note = Synthetic: >NC_019843.3-cand-22590-22669
  source 1..80: mol_type = other DNA
tgttgaatgtgatttttcacctcttctgtctggcacacctcctcaggtttataatttcaagcgtttggtttttaccaatt

SEQ ID NO: 10347 - DNA, 80 bp, synthetic construct
  misc_feature 1..80: note = Synthetic: >NC_019843.3-cand-22670-22749
  source 1..80: mol_type = other DNA
gcaattataatcttaccaaattgctttcacttttttctgtgaatgattttacttgtagtcaaatatctccagcagcaatt

SEQ ID NO: 10348 - DNA, 80 bp, synthetic construct
  misc_feature 1..80: note = Synthetic: >NC_019843.3-cand-22750-22829
  source 1..80: mol_type = other DNA
gctagcaactgttattcttcactgattttggattacttttcatacccacttagtatgaaatccgatctcagtgttagttc

SEQ ID NO: 10349 - DNA, 80 bp, synthetic construct
  misc_feature 1..80: note = Synthetic: >NC_019843.3-cand-22830-22909
  source 1..80: mol_type = other DNA
tgctggtccaatatcccagtttaattataaacagtccttttctaatcccacatgtttgattttagcgactgttcctcata

SEQ ID NO: 10350 - DNA, 80 bp, synthetic construct
  misc_feature 1..80: note = Synthetic: >NC_019843.3-cand-22910-22989
  source 1..80: mol_type = other DNA
accttactactattactaagcctcttaagtacagctatattaacaagtgctctcgtcttctttctgatgatcgtactgaa

SEQ ID NO: 10351 - DNA, 80 bp, synthetic construct
  misc_feature 1..80: note = Synthetic: >NC_019843.3-cand-22990-23069
  source 1..80: mol_type = other DNA
gtacctcagttagtgaacgctaatcaatactcaccctgtgtatccattgtcccatccactgtgtgggaagacggtgatta

SEQ ID NO: 10352 - DNA, 80 bp, synthetic construct
  misc_feature 1..80: note = Synthetic: >NC_019843.3-cand-23070-23149
  source 1..80: mol_type = other DNA
ttataggaaacaactatctccacttgaaggtggtggctggcttgttgctagtggctcaactgttgccatgactgagcaat

SEQ ID NO: 10353 - DNA, 80 bp, synthetic construct
  misc_feature 1..80: note = Synthetic: >NC_019843.3-cand-23150-23229
  source 1..80: mol_type = other DNA
tacagatgggctttggtattacagttcaatatggtacagacaccaatagtgtttgccccaagcttgaatttgctaatgac

SEQ ID NO: 10354 - DNA, 80 bp, synthetic construct
  misc_feature 1..80: note = Synthetic: >NC_019843.3-cand-23230-23309
  source 1..80: mol_type = other DNA
acaaaaattgcctctcaattaggcaattgcgtggaatattccctctatggtgtttcgggccgtggtgtttttcagaattg

SEQ ID NO: 10355 - DNA, 80 bp, synthetic construct
  misc_feature 1..80: note = Synthetic: >NC_019843.3-cand-23300-23379
  source 1..80: mol_type = other DNA
ttcagaattgcacagctgtaggtgttcgacagcagcgctttgtttatgatgcgtaccagaatttagttggctattattct

SEQ ID NO: 10356 - DNA, 80 bp, synthetic construct
  misc_feature 1..80: note = Synthetic: >NC_019843.3-cand-23380-23459
  source 1..80: mol_type = other DNA
gatgatggcaactactactgtttgcgtgcttgtgttagtgttcctgtttctgtcatctatgataaagaaactaaaaccca

SEQ ID NO: 10357 - DNA, 80 bp, synthetic construct
  misc_feature 1..80: note = Synthetic: >NC_019843.3-cand-23460-23539
  source 1..80: mol_type = other DNA
cgctactctatttggtagtgttgcatgtgaacacatttcttctaccatgtctcaatactcccgttctacgcgatcaatgc

SEQ ID NO: 10358 - DNA, 80 bp, synthetic construct
  misc_feature 1..80: note = Synthetic: >NC_019843.3-cand-23540-23619
  source 1..80: mol_type = other DNA
ttaaacggcgagattctacatatggcccccttcagacacctgttggttgtgtcctaggacttgttaattcctctttgttc

SEQ ID NO: 10359 - DNA, 80 bp, synthetic construct
  misc_feature 1..80: note = Synthetic: >NC_019843.3-cand-26170-26249
  source 1..80: mol_type = other DNA
caactaagaaactgcgctacgttaagcgtagattttctcttctgcgccatgaagaccttagtgttattgtccaaccaaca

SEQ ID NO: 10360 - DNA, 80 bp, synthetic construct
  misc_feature 1..80: note = Synthetic: >NC_019843.3-cand-26250-26329
  source 1..80: mol_type = other DNA
cactatgtcagggttacattttcagaccccaacatgtggtatctacgttcgggtcatcatttacactcagttcacaattg

SEQ ID NO: 10361 - DNA, 80 bp, synthetic construct
  misc_feature 1..80: note = Synthetic: >NC_019843.3-cand-26330-26409
  source 1..80: mol_type = other DNA
gcttaaaccttatggcggccaacctgtttctgagtaccatattactctagctttgctaaatctcactgatgaagatttag

SEQ ID NO: 10362 - DNA, 80 bp, synthetic construct
  misc_feature 1..80: note = Synthetic: >NC_019843.3-cand-26410-26489
  source 1..80: mol_type = other DNA
ctagagatttttcacccattgcgctctttttgcgcaatgtcagatttgagctacatgagttcgccttgctgcgcaaaact

SEQ ID NO: 10363 - DNA, 80 bp, synthetic construct
  misc_feature 1..80: note = Synthetic: >NC_019843.3-cand-26490-26569
  source 1..80: mol_type = other DNA
cttgttcttaatgcatcagagatctactgtgctaacatacatagatttaagcctgtgtatagagttaacacggcaatccc

SEQ ID NO: 10364 - DNA, 80 bp, synthetic construct
  misc_feature 1..80: note = Synthetic: >NC_019843.3-cand-26570-26649
  source 1..80: mol_type = other DNA
tactattaaggattggcttctcgttcagggattttccctttaccatagtggcctccctttacatatgtcaatctctaaat

SEQ ID NO: 10365 - DNA, 80 bp, synthetic construct
  misc_feature 1..80: note = Synthetic: >NC_019843.3-cand-26650-26729
  source 1..80: mol_type = other DNA
tgcatgcactggatgatgttactcgcaattacatcattacaatgccatgctttagaacttaccctcaacaaatgtttgtt

SEQ ID NO: 10366 - DNA, 80 bp, synthetic construct
  misc_feature 1..80: note = Synthetic: >NC_019843.3-cand-26730-26809
  source 1..80: mol_type = other DNA
actcctttggccgtagatgttgtctccatacggtcttccaatcagggtaataaacaaattgttcattcttatcccatttt

SEQ ID NO: 10367 - DNA, 80 bp, synthetic construct
  misc_feature 1..80: note = Synthetic: >NC_019843.3-cand-26810-26889
  source 1..80: mol_type = other DNA
acatcatccaggattttaacgaactatggctttctcggcgtctttatttaaacccgtccagctagtcccagtttctcctg

SEQ ID NO: 10368 - DNA, 80 bp, synthetic construct
  misc_feature 1..80: note = Synthetic: >NC_019843.3-cand-26890-26969
  source 1..80: mol_type = other DNA
catttcatcgcattgagtctactgactctattgttttcacatacattcctgctagcggctatgtagctgctttagctgtc

SEQ ID NO: 10369 - DNA, 80 bp, synthetic construct
  misc_feature 1..80: note = Synthetic: >NC_019843.3-cand-26970-27049
  source 1..80: mol_type = other DNA
aatgtgtgtctcattcccctattattactgctacgtcaagatacttgtcgtcgcagcattatcagaactatggttctcta

SEQ ID NO: 10370 - DNA, 80 bp, synthetic construct
  misc_feature 1..80: note = Synthetic: >NC_019843.3-cand-27050-27129
  source 1..80: mol_type = other DNA
tttccttgttctgtataactttttattagccattgtactagtcaatggtgtacattatccaactggaagttgcctgatag

SEQ ID NO: 10371 - DNA, 80 bp, synthetic construct
  misc_feature 1..80: note = Synthetic: >NC_019843.3-cand-27130-27209
  source 1..80: mol_type = other DNA
ccttcttagttatcctcataatactttggtttgtagatagaattcgtttctgtctcatgctgaattcctacattccactg

SEQ ID NO: 10372 - DNA, 80 bp, synthetic construct
  misc_feature 1..80: note = Synthetic: >NC_019843.3-cand-27210-27289
  source 1..80: mol_type = other DNA
tttgacatgcgttcccactttattcgtgttagtacagtttcttctcatggtatggtccctgtaatacacaccaaaccatt

SEQ ID NO: 10373 - DNA, 80 bp, synthetic construct
  misc_feature 1..80: note = Synthetic: >NC_019843.3-cand-27300-27379
  source 1..80: mol_type = other DNA
aacttcgatcagcgttgcagctgttctcgttgtttttatttgcactcttccacttatatagagtgcacttatattagccg

SEQ ID NO: 10374 - DNA, 80 bp, synthetic construct
  misc_feature 1..80: note = Synthetic: >NC_019843.3-cand-27380-27459
  source 1..80: mol_type = other DNA
ttttagtaagattagcctagtttctgtaactgacttctccttaaacggcaatgtttccactgttttcgtgcctgcaacgc

SEQ ID NO: 10375 - DNA, 80 bp, synthetic construct
  misc_feature 1..80: note = Synthetic: >NC_021542.1-cand-430-509
  source 1..80: mol_type = other DNA
aggaatgtattgtgatactcaactttctgatacatacttcgaaatatccactggcggaacgtacgaagttacagacgtac

SEQ ID NO: 10376 - DNA, 80 bp, synthetic construct
  misc_feature 1..80: note = Synthetic: >NC_021542.1-cand-520-599
  source 1..80: mol_type = other DNA
tcagatgggatacacattccattcaagtgaggatttttatttgtgccacagaatttctagtgaagcttggttgaactatc

SEQ ID NO: 10377 - DNA, 80 bp, synthetic construct
  misc_feature 1..80: note = Synthetic: >NC_021542.1-cand-570-649
  source 1..80: mol_type = other DNA
gaatttctagtgaagcttggttgaactatcatttattttatagagattatgatgtatctggagtcataagtaaacaaata

SEQ ID NO: 10378 - DNA, 80 bp, synthetic construct
  misc_feature 1..80: note = Synthetic: >NC_021543.1-cand-50-129
  source 1..80: mol_type = other DNA
gagactgtcactatcaaaaatactttcaatgctcaagaagataacagtcaatcaataagaaaagatgatgatagaccagt

SEQ ID NO: 10379 - DNA, 80 bp, synthetic construct
  misc_feature 1..80: note = Synthetic: >NC_021543.1-cand-80-159
  source 1..80: mol_type = other DNA
gctcaagaagataacagtcaatcaataagaaaagatgatgatagaccagttaaaacgaaagaccgatactgttataaagc

SEQ ID NO: 10380 - DNA, 80 bp, synthetic construct
  misc_feature 1..80: note = Synthetic: >NC_021543.1-cand-160-239
  source 1..80: mol_type = other DNA
ggaacttaacaggtcaaagtattaccatgacgtacaaggattttcacttggccaatctgatttacacattgatcctacac

SEQ ID NO: 10381 - DNA, 80 bp, synthetic construct
  misc_feature 1..80: note = Synthetic: >NC_021543.1-cand-230-309
  source 1..80: mol_type = other DNA
gatcctacacagtttataatgtattctggaacaatttctaatgggataagttatgttaatcaagcaccaagttgcggtac

SEQ ID NO: 10382 - DNA, 80 bp, synthetic construct
  misc_feature 1..80: note = Synthetic: >NC_021543.1-cand-310-389
  source 1..80: mol_type = other DNA
agttttatcattaaaattcactcctggcaacagttctttaatcgagaatctacatattgaaccgtacaaagtcgaagttt

SEQ ID NO: 10383 - DNA, 80 bp, synthetic construct
  misc_feature 1..80: note = Synthetic: >NC_021543.1-cand-390-469
  source 1..80: mol_type = other DNA
taaaaattgaacatgttggtaacgtctcaagagccacgttgttgtcggatatcgtgtccttgagcatagctcaaaagaaa

SEQ ID NO: 10384 - DNA, 80 bp, synthetic construct
  misc_feature 1..80: note = Synthetic: >NC_021543.1-cand-470-549
  source 1..80: mol_type = other DNA
ttgctgctctacggattcactaaacttggtgtacagggtttaactggagacgttgtatctgttgaaacgaaaagaatacc

SEQ ID NO: 10385 - DNA, 80 bp, synthetic construct
  misc_feature 1..80: note = Synthetic: >NC_021543.1-cand-550-629
  source 1..80: mol_type = other DNA
tacaccgacacagacaaatctccttactattgaagattcaatgcagtgttttgcgtgggatatgaactgtgcaaacgctc

SEQ ID NO: 10386 - DNA, 80 bp, synthetic construct
  misc_feature 1..80: note = Synthetic: >NC_021543.1-cand-630-709
  source 1..80: mol_type = other DNA
gcagtacaaatcaagattcacgcttaataatatacgagcaggaagacggcttttggaaaatagtgaccgagactttgtct

SEQ ID NO: 10387 - DNA, 80 bp, synthetic construct
  misc_feature 1..80: note = Synthetic: >NC_021543.1-cand-720-799
  source 1..80: mol_type = other DNA
aaccttattttaaagcttacggaacaatgggaggcgcttttaaaaattggcttgttgactcgggatttgaaaagtatcaa

SEQ ID NO: 10388 - DNA, 80 bp, synthetic construct
  misc_feature 1..80: note = Synthetic: >NC_021543.1-cand-810-889
  source 1..80: mol_type = other DNA
tatacatgcgggatggcatgaccgttaatgcacacacaattacatatgttaatccatcaggaaaggctggtttacagcaa

SEQ ID NO: 10389 - DNA, 80 bp, synthetic construct
  misc_feature 1..80: note = Synthetic: >NC_021543.1-cand-900-979
  source 1..80: mol_type = other DNA
cagcaacagattacaatggtcagatcacagttttacaacctggtgacggattttcagtttggtattatgaggacaaatgg

SEQ ID NO: 10390 - DNA, 80 bp, synthetic construct
  misc_feature 1..80: note = Synthetic: >NC_021543.1-cand-990-1069
  source 1..80: mol_type = other DNA
aggccatatatgctaagaattttcaatcagatacacaagcacagggatgtctggagaatttcgggcctttgaagtttaaa

SEQ ID NO: 10391 - DNA, 80 bp, synthetic construct
  misc_feature 1..80: note = Synthetic: >NC_021546.1-cand-90-169
  source 1..80: mol_type = other DNA
ctcagaattcaaatctttttatttcagacagtaagacagcagtatttcaaacacaacatattttattagctgctggcgtt

SEQ ID NO: 10392 - DNA, 80 bp, synthetic construct
  misc_feature 1..80: note = Synthetic: >NC_021546.1-cand-160-239
  source 1..80: mol_type = other DNA
tgctggcgttggaataatcgctaccttgttagtcttattactttgtagttgtgtgttaaactgttatctttgcagaaaac

SEQ ID NO: 10393 - DNA, 80 bp, synthetic construct
  misc_feature 1..80: note = Synthetic: >NC_021546.1-cand-250-329
  source 1..80: mol_type = other DNA
gaatggagtatcatcacttcttgagcgaaatatcagacaaaacggatcttctgccaaaatatatgttaaaccagtcatgc

SEQ ID NO: 10394 - DNA, 80 bp, synthetic construct
  misc_feature 1..80: note = Synthetic: >NC_021546.1-cand-340-419
  source 1..80: mol_type = other DNA
aatcatcgaagaagcctgagaaaatatcattcattatgtatgataattccttgcatgaatgtcctgaaatgcccggtgat

SEQ ID NO: 10395 - DNA, 80 bp, synthetic construct
  misc_feature 1..80: note = Synthetic: >NC_021546.1-cand-430-509
  source 1..80: mol_type = other DNA
ttagcgatatttgtccacttaatcatgaacatttttgtggtggtatacacatacctaaacaagagaacacttctccgaaa

SEQ ID NO: 10396 - DNA, 80 bp, synthetic construct
  misc_feature 1..80: note = Synthetic: >NC_021546.1-cand-520-599
  source 1..80: mol_type = other DNA
cacacgccgcagcagataagataatatggccttgtggactaaaatcaatgaaaatcaatgacagaaaaattgaaggctat

SEQ ID NO: 10397 - DNA, 80 bp, synthetic construct
  misc_feature 1..80: note = Synthetic: >NC_021546.1-cand-610-689
  source 1..80: mol_type = other DNA
aatgtcgttgcggtaatctatatccaacatggatacctggagagagaaacttcttttttatcacatgttgtgccaatgac

SEQ ID NO: 10398 - DNA, 80 bp, synthetic construct
  misc_feature 1..80: note = Synthetic: >NC_021546.1-cand-700-779
  source 1..80: mol_type = other DNA
ttaagttgggaaagactgatggagacaaatgtcaaaactgttcaaaatttaacagatggtacttcccaggtctaggattt

SEQ ID NO: 10399 - DNA, 80 bp, synthetic construct
  misc_feature 1..80: note = Synthetic: >NC_021546.1-cand-910-989
  source 1..80: mol_type = other DNA
aaaattatgagtggaaaaggaatcttacaaacaatagtgaaatcgcgtttcgcgcccttaattcgccttttattcagact

SEQ ID NO: 10400 - DNA, 80 bp, synthetic construct
  misc_feature 1..80: note = Synthetic: >NC_021546.1-cand-1000-1079
  source 1..80: mol_type = other DNA
cctacagtaaaattgacgcagacgtgaattcaatgacagttaccgagcttgttgcttcagtgaatagaacatggaatact

SEQ ID NO: 10401 - DNA, 80 bp, synthetic construct
  misc_feature 1..80: note = Synthetic: >NC_021546.1-cand-1090-1169
  source 1..80: mol_type = other DNA
taattccaattaaccgcacgaaagtgctttttaaagactattacagagggaaatctatcatatttcatgacaacgatcat

SEQ ID NO: 10402 - DNA, 80 bp, synthetic construct
  misc_feature 1..80: note = Synthetic: >NC_021546.1-cand-1180-1259
  source 1..80: mol_type = other DNA
aaatactattgacattaactgactggcatttcctatagactgatggttccagacatctaacctatcctcactacatatct

SEQ ID NO: 10403 - DNA, 80 bp, synthetic construct
  misc_feature 1..80: note = Synthetic: >NC_021547.1-cand-0-79
  source 1..80: mol_type = other DNA
taattacgtttgattcagatagtacttcgggttactgagaaacgaacgtaatggccctggacgcgctagcttcaatcttg

SEQ ID NO: 10404 - DNA, 80 bp, synthetic construct
  misc_feature 1..80: note = Synthetic: >NC_021547.1-cand-80-159
  source 1..80: mol_type = other DNA
gagactgtattgcgcaaatgcggtatcaatgaaatttctagaataacaaccaagtttgaagaagcactcgatgattgcgg

SEQ ID NO: 10405 - DNA, 80 bp, synthetic construct
  misc_feature 1..80: note = Synthetic: >NC_021547.1-cand-170-249
  source 1..80: mol_type = other DNA
gacgactggagagaggcatattataaagagcgatttccaaagagaatgacagcaacgaccatggcatctcaaatcatgaa

SEQ ID NO: 10406 - DNA, 80 bp, synthetic construct
  misc_feature 1..80: note = Synthetic: >NC_021547.1-cand-260-339
  source 1..80: mol_type = other DNA
gaaaatctgcaactgaggaataaagcctgggctgaaggtgcagatcgcaaattcagattgttgtctagttttgaaattgg

SEQ ID NO: 10407 - DNA, 80 bp, synthetic construct
  misc_feature 1..80: note = Synthetic: >NC_026438.1-cand-0-79
  source 1..80: mol_type = other DNA
agagaataaaagaactgagagatctaatgtcgcagtcccgcactcgcgagatactcactaagaccactgtggaccatatg

SEQ ID NO: 10408 - DNA, 80 bp, synthetic construct
  misc_feature 1..80: note = Synthetic: >NC_026438.1-cand-80-159
  source 1..80: mol_type = other DNA
gccataatcaaaaagtacacatcaggaaggcaagagaagaaccccgcactcagaatgaagtggatgatggcaatgagata

SEQ ID NO: 10409 - DNA, 80 bp, synthetic construct
  misc_feature 1..80: note = Synthetic: >NC_026438.1-cand-160-239
  source 1..80: mol_type = other DNA
cccaattacagcagacaagagaataatggacatgattccagagaggaatgaacaaggacaaaccctctggagcaaaacaa

SEQ ID NO: 10410 - DNA, 80 bp, synthetic construct
  misc_feature 1..80: note = Synthetic: >NC_026438.1-cand-250-329
  source 1..80: mol_type = other DNA
atcagaccgagtgatggtatcacctctggccgtaacatggtggaataggaatggcccaacaacaagtacagttcattacc

SEQ ID NO: 10411 - DNA, 80 bp, synthetic construct
  misc_feature 1..80: note = Synthetic: >NC_026438.1-cand-330-409
  source 1..80: mol_type = other DNA
ctaaggtatataaaacttatttcgaaaaggtcgaaaggttgaaacatggtaccttcggccctgtccacttcagaaatcaa

SEQ ID NO: 10412 - DNA, 80 bp, synthetic construct
  misc_feature 1..80: note = Synthetic: >NC_026438.1-cand-410-489
  source 1..80: mol_type = other DNA
gttaaaataaggaggagagttgatacaaaccctggccatgcagatctcagtgccaaggaggcacaggatgtgattatgga

SEQ ID NO: 10413 - DNA, 80 bp, synthetic construct
  misc_feature 1..80: note = Synthetic: >NC_026438.1-cand-520-599
  source 1..80: mol_type = other DNA
aatactgacatcagagtcacagctggcaataacaaaagagaagaaagaagagctccaggattgtaaaattgctcccttga

SEQ ID NO: 10414 - DNA, 80 bp, synthetic construct
  misc_feature 1..80: note = Synthetic: >NC_026438.1-cand-580-659
  source 1..80: mol_type = other DNA
ttgtaaaattgctcccttgatggtggcgtacatgctagaaagagaattggtccgtaaaacaaggtttctcccagtagccg

SEQ ID NO: 10415 - DNA, 80 bp, synthetic construct
  misc_feature 1..80: note = Synthetic: >NC_026438.1-cand-670-749
  source 1..80: mol_type = other DNA
cagtgtttatattgaagtgttgcacttaacccaagggacgtgctgggagcagatgtacactccaggaggagaagtgagaa

SEQ ID NO: 10416 - DNA, 80 bp, synthetic construct
  misc_feature 1..80: note = Synthetic: >NC_026438.1-cand-750-829
  source 1..80: mol_type = other DNA
atgatgatgttgaccaaagtttgattatcgctgctagaaacatagtaagaagagcagcagtgtcagcagacccattagca

SEQ ID NO: 10417 - DNA, 80 bp, synthetic construct
  misc_feature 1..80: note = Synthetic: >NC_026438.1-cand-830-909
  source 1..80: mol_type = other DNA
tctctcttggaaatgtgccacagcacacagattggaggagtaaggatggtggacatccttagacagaatccaactgagga

SEQ ID NO: 10418 - DNA, 80 bp, synthetic construct
  misc_feature 1..80: note = Synthetic: >NC_026438.1-cand-910-989
  source 1..80: mol_type = other DNA
acaagccgtagacatatgcaaggcagcaatagggttgaggattagctcatctttcagttttggtgggttcactttcaaaa

SEQ ID NO: 10419 - DNA, 80 bp, synthetic construct
  misc_feature 1..80: note = Synthetic: >NC_026438.1-cand-980-1059
  source 1..80: mol_type = other DNA
actttcaaaaggacaagcggatcatcagtcaagaaagaagaagaagtgctaacgggcaacctccaaacactgaaaataag

SEQ ID NO: 10420 - DNA, 80 bp, synthetic construct
  misc_feature 1..80: note = Synthetic: >NC_026438.1-cand-1060-1139
  source 1..80: mol_type = other DNA
agtacatgaagggtatgaagaattcacaatggttgggagaagagcaacagctattctcagaaaggcaaccaggagattga

SEQ ID NO: 10421 - DNA, 80 bp, synthetic construct
  misc_feature 1..80: note = Synthetic: >NC_026438.1-cand-1140-1219
  source 1..80: mol_type = other DNA
tccagttgatagtaagcgggagagacgagcagtcaattgctgaggcaataattgtggccatggtattctcacaggaggat

SEQ ID NO: 10422 - DNA, 80 bp, synthetic construct
  misc_feature 1..80: note = Synthetic: >NC_026438.1-cand-1240-1319
  source 1..80: mol_type = other DNA
gggcgatctgaactttgtcaatagggcaaaccagcgactgaaccccatgcaccaactcttgaggcatttccaaaaagatg

SEQ ID NO: 10423 - DNA, 80 bp, synthetic construct
  misc_feature 1..80: note = Synthetic: >NC_035889.1-cand-9910-9989
  source 1..80: mol_type = other DNA
atccgggagactgcttgcctagcaaaatcatatgcgcaaatgtggcagctcctttatttccacagaagggacctccgact

SEQ ID NO: 10424 - DNA, 80 bp, synthetic construct
  misc_feature 1..80: note = Synthetic: >NC_035889.1-cand-9990-10069
  source 1..80: mol_type = other DNA
gatggccaatgccatttgttcatctgtgccagttgactgggttccaactgggagaactacctggtcaatccatggaaagg

SEQ ID NO: 10425 - DNA, 80 bp, synthetic construct
  misc_feature 1..80: note = Synthetic: >NC_035889.1-cand-10070-10149
  source 1..80: mol_type = other DNA
gagaatggatgaccactgaagacatgcttgtggtgtggaacagagtgtggattgaggagaacgaccacatggaagacaag

SEQ ID NO: 10426 - DNA, 80 bp, synthetic construct
  misc_feature 1..80: note = Synthetic: >NC_035889.1-cand-10150-10229
  source 1..80: mol_type = other DNA
accccagttacgaaatggacagacattccctatttgggaaaaagggaagacttgtggtgtggatctctcatagggcacag

SEQ ID NO: 10427 - DNA, 80 bp, synthetic construct
  misc_feature 1..80: note = Synthetic: >NC_035889.1-cand-10310-10389
  source 1..80: mol_type = other DNA
tggactacctatccacccaagttcgctacttgggtgaagaagggtctacacctggagtgctgtaagcaccaatcttaatg

SEQ ID NO: 10428 - DNA, 80 bp, synthetic construct
  misc_feature 1..80: note = Synthetic: >NC_035889.1-cand-10420-10499
  source 1..80: mol_type = other DNA
gggaaagctgtgcagcctgtgacccccccaggagaagctgggaaaccaagcctatagtcaggccgagaacgccatggcac

SEQ ID NO: 10429 - DNA, 80 bp, synthetic construct
  misc_feature 1..80: note = Synthetic: >NC_035889.1-cand-10530-10609
  source 1..80: mol_type = other DNA
agaggacactgagtcaaaaaaccccatgcgcttggaggcgcaggatgggaaaagaaggtggcgaccttccccacccttca

SEQ ID NO: 10430 - DNA, 80 bp, synthetic construct
  misc_feature 1..80: note = Synthetic: >NC_035889.1-cand-10630-10709
  source 1..80: mol_type = other DNA
atcagctgtggatctccagaagagggactagtggttagaggagaccccccggaaaacgcaaaacagcatattgacgctgg

SEQ ID NO: 10431 - DNA, 80 bp, synthetic construct
  misc_feature 1..80: note = Synthetic: >NC_035889.1-cand-10700-10779
  source 1..80: mol_type = other DNA
ttgacgctgggaaagaccagagactccatgagtttccaccacgctggccgccaggcacagatcgccgaatagcggcggcc

SEQ ID NO: 10432 - DNA, 80 bp, synthetic construct
  misc_feature 1..80: note = Synthetic: >NC_038298.1-cand-0-79
  source 1..80: mol_type = other DNA
agtagactccttgagaagctactactgaagaagctgtaatgagcaccctcaaagaagttcaagaaaatattacagttcat

SEQ ID NO: 10433 - DNA, 80 bp, synthetic construct
  misc_feature 1..80: note = Synthetic: >NC_038298.1-cand-60-139
  source 1..80: mol_type = other DNA
aagaaaatattacagttcatgaacagcagctagtaactgccagacagaagttgaaggatgctgagcgaacggtggaagtg

SEQ ID NO: 10434 - DNA, 80 bp, synthetic construct
  misc_feature 1..80: note = Synthetic: >NC_038298.1-cand-150-229
  source 1..80: mol_type = other DNA
acgttaacaaaagcacattacagagcagacgggcagctgtgtctgcattggagactaaactcggagagctcaagagacag

SEQ ID NO: 10435 - DNA, 80 bp, synthetic construct
  misc_feature 1..80: note = Synthetic: >NC_038298.1-cand-230-309
  source 1..80: mol_type = other DNA
ctggcagatcttgttgcagctcaaaaactggctgcaaaacctgttgatccaacagggattgagcctgatgaccatttaaa

SEQ ID NO: 10436 - DNA, 80 bp, synthetic construct
  misc_feature 1..80: note = Synthetic: >NC_038298.1-cand-300-379
  source 1..80: mol_type = other DNA
accatttaaaagaaaagtcatctctcaggtatgggaatgtccttgatgtcaactccattgaccttgaagaaccaagtggc

SEQ ID NO: 10437 - DNA, 80 bp, synthetic construct
  misc_feature 1..80: note = Synthetic: >NC_038298.1-cand-390-469
  source 1..80: mol_type = other DNA
actggaaggcaatcggagtctacattctcagttttgtccttccaatcgttctgaaggctctgtacatgctgtcaactaga

SEQ ID NO: 10438 - DNA, 80 bp, synthetic construct
  misc_feature 1..80: note = Synthetic: >NC_038298.1-cand-470-549
  source 1..80: mol_type = other DNA
gggagacagacagtaaaggaaaataagggcacacgaataaggtttaaggatgactcatcctacgatgatgtcaatggtat

SEQ ID NO: 10439 - DNA, 80 bp, synthetic construct
  misc_feature 1..80: note = Synthetic: >NC_039218.1-cand-1370-1449
  source 1..80: mol_type = other DNA
gattatggagacatctccctcacgtgccgggtgactagtggagtggatcctgcccagactgtggtattggaactggacaa

SEQ ID NO: 10440 - DNA, 80 bp, synthetic construct
  misc_feature 1..80: note = Synthetic: >NC_039218.1-cand-1440-1519
  source 1..80: mol_type = other DNA
aactggacaagacagcggaacacttgcccaaggcttggcaggtacaccgagactggtttgaggacctctccttgccatgg

SEQ ID NO: 10441 - DNA, 80 bp, synthetic construct
  misc_feature 1..80: note = Synthetic: >NC_039218.1-cand-1530-1609
  source 1..80: mol_type = other DNA
gtgcccaggaatggaaccatgctgaccggctcgtggaatttggtgaaccgcacgctgtgaaaatggacatttttaacctt

SEQ ID NO: 10442 - DNA, 80 bp, synthetic construct
  misc_feature 1..80: note = Synthetic: >NC_039218.1-cand-1620-1699
  source 1..80: mol_type = other DNA
cgggtatcctgttgaagtctctggctggagtgcccgtggctaacatagagggcagcaagtaccatctccagagtggtcat

SEQ ID NO: 10443 - DNA, 80 bp, synthetic construct
  misc_feature 1..80: note = Synthetic: >NC_039218.1-cand-1690-1769
  source 1..80: mol_type = other DNA
gagtggtcatgtcacctgcgatgtgggccttgaaaaacttaagatgaaagggatgacatacacggtttgtgagggatcaa

SEQ ID NO: 10444 - DNA, 80 bp, synthetic construct
  misc_feature 1..80: note = Synthetic: >NC_039218.1-cand-1770-1849
  source 1..80: mol_type = other DNA
aatttgcttggaaaaggccgccaaccgacagtggacatgataccgtagtcatggaggtgacttacaccgggagcaagcca

SEQ ID NO: 10445 - DNA, 80 bp, synthetic construct
  misc_feature 1..80: note = Synthetic: >NC_039218.1-cand-1850-1929
  source 1..80: mol_type = other DNA
tgcagaataccagtgagagccgtggcccatggagaacccaatgttaacgtggcaagtctaataaccccaaacccatccat

SEQ ID NO: 10446 - DNA, 80 bp, synthetic construct
  misc_feature 1..80: note = Synthetic: >NC_039218.1-cand-1930-2009
  source 1..80: mol_type = other DNA
ggaaacaactggaggagggttcgttgagctacagctaccaccaggagacaacatcatctatgttggtgagctgagccacc

SEQ ID NO: 10447 - DNA, 80 bp, synthetic construct
  misc_feature 1..80: note = Synthetic: >NC_039218.1-cand-1980-2059
  source 1..80: mol_type = other DNA
acatcatctatgttggtgagctgagccaccagtggtttcagaagggcagcacaattggccgtgttctggaaaagaccagg

SEQ ID NO: 10448 - DNA, 80 bp, synthetic construct
  misc_feature 1..80: note = Synthetic: >NC_039218.1-cand-2090-2169
  source 1..80: mol_type = other DNA
gagcacgcctgggacttcggttcggtaggcggcatgctatcatcagtggggaaggctctacacacggcttttggcgcagc

SEQ ID NO: 10449 - DNA, 80 bp, synthetic construct
  misc_feature 1..80: note = Synthetic: >NC_039218.1-cand-2170-2249
  source 1..80: mol_type = other DNA
atttaataccatttttggaggggtgggattcctcccacgcattctgctgggggtagctctggcttggctggggctcaact

SEQ ID NO: 10450 - DNA, 80 bp, synthetic construct
  misc_feature 1..80: note = Synthetic: >NC_039218.1-cand-2320-2399
  source 1..80: mol_type = other DNA
tggtgctgatatgggctgtgcaattgatgctaacaggatggagctacgatgtggtgagggccttgttgtgtggagagagg

SEQ ID NO: 10451 - DNA, 80 bp, synthetic construct
  misc_feature 1..80: note = Synthetic: >NC_039218.1-cand-2330-2409
  source 1..80: mol_type = other DNA
atgggctgtgcaattgatgctaacaggatggagctacgatgtggtgagggccttgttgtgtggagagaggtcaccgactg

SEQ ID NO: 10452 - DNA, 80 bp, synthetic construct
  misc_feature 1..80: note = Synthetic: >NC_039218.1-cand-2410-2489
  source 1..80: mol_type = other DNA
gtatgatggttacgcattccacccagaatcgccctctgtccttgcggcatctctaaaagaagcatatgaggaaggaattt

SEQ ID NO: 10453 - DNA, 80 bp, synthetic construct
  misc_feature 1..80: note = Synthetic: >NC_039218.1-cand-2490-2569
  source 1..80: mol_type = other DNA
gtggtattgtgccccagaaccggcttgagatggccatgtggaggcgtgtggaggctgtgctcaacttggccctcgcagag

SEQ ID NO: 10454 - DNA, 80 bp, synthetic construct
  misc_feature 1..80: note = Synthetic: >NC_039218.1-cand-2540-2619
  source 1..80: mol_type = other DNA
gaggctgtgctcaacttggccctcgcagagagtgatgctaatctaacggtggttgtggacaaaagagatcccagtgacta

SEQ ID NO: 10455 - DNA, 80 bp, synthetic construct
  misc_feature 1..80: note = Synthetic: >NC_044853.1-cand-7480-7559
  source 1..80: mol_type = other DNA
gactgtgtgggtcacaccaccaggttcatcttccacttcatctgtgcaatctagcttttatggtgtttttaatacagata

SEQ ID NO: 10456 - DNA, 80 bp, synthetic construct
  misc_feature 1..80: note = Synthetic: >NC_044853.1-cand-7560-7639
  source 1..80: mol_type = other DNA
ggttacctctgttcgcaaacagaaggtgaggtttttgtaataagatgccagtgggcaccatattcaaatttaatttaatt

SEQ ID NO: 10457 - DNA, 80 bp, synthetic construct
  misc_feature 1..80: note = Synthetic: >NC_044854.1-cand-0-79
  source 1..80: mol_type = other DNA
atgatgatggcgtcgaaagacgtcgttgcgactaatgttgcaagcaacaacaatgctaacaacactagtgctacatctcg

SEQ ID NO: 10458 - DNA, 80 bp, synthetic construct
  misc_feature 1..80: note = Synthetic: >NC_044854.1-cand-100-179
  source 1..80: mol_type = other DNA
gtttgggtggtggcgcgagcccccccaaccccataaagatcaaaagcacagaaatggccttgggtttaattggcaagaca

SEQ ID NO: 10459 - DNA, 80 bp, synthetic construct
  misc_feature 1..80: note = Synthetic: >NC_044854.1-cand-160-239
  source 1..80: mol_type = other DNA
tgggtttaattggcaagacaacccaagaggtggcagggaccagtgacctaccacccaaacagcagagagaccgtcccccc

SEQ ID NO: 10460 - DNA, 80 bp, synthetic construct
  misc_feature 1..80: note = Synthetic: >NC_044854.1-cand-270-349
  source 1..80: mol_type = other DNA
gggtggactgaaaggcccatggaccaaaatgtcaagtcatgggaggagcttgacaccacaaccaaggaagagatcttgga

SEQ ID NO: 10461 - DNA, 80 bp, synthetic construct
  misc_feature 1..80: note = Synthetic: >NC_044854.1-cand-320-399
  source 1..80: mol_type = other DNA
tgacaccacaaccaaggaagagatcttggacagtcataaagagtggtttgatgccggcggcttaggcccatgcacaatgc

SEQ ID NO: 10462 - DNA, 80 bp, synthetic construct
  misc_feature 1..80: note = Synthetic: >NC_044854.1-cand-400-479
  source 1..80: mol_type = other DNA
cctcaacttgtgaacaagccaaagatgacagcccacctggtgaacaggtcaaatggtcagtgcgtgatggagttaatctt

SEQ ID NO: 10463 - DNA, 80 bp, synthetic construct
  misc_feature 1..80: note = Synthetic: >NC_044854.1-cand-490-569
  source 1..80: mol_type = other DNA
gcctcacaacggtgagtggtcctgaatggaacctctgtccgctaccccccattgacctaaggaatatggagccagctagt

SEQ ID NO: 10464 - DNA, 80 bp, synthetic construct
  misc_feature 1..80: note = Synthetic: >NC_044854.1-cand-560-639
  source 1..80: mol_type = other DNA
gccagctagtgaacccaccattggagacatgatagagttttatgaaggccatatctatcactactccatatacattgggc

SEQ ID NO: 10465 - DNA, 80 bp, synthetic construct
  misc_feature 1..80: note = Synthetic: >NC_044854.1-cand-640-719
  source 1..80: mol_type = other DNA
agggtaagacagttggtgtgcattccccacaggcggcattctcagtggctagagtgactatccaacctatagccgcttgg

SEQ ID NO: 10466 - DNA, 80 bp, synthetic construct
  misc_feature 1..80: note = Synthetic: >NC_044854.1-cand-720-799
  source 1..80: mol_type = other DNA
tggagggtttgttatataccccaacctaaacataggttgagttatgatcaactcaaagaattggaaaatgaaccttggcc

SEQ ID NO: 10467 - DNA, 80 bp, synthetic construct
  misc_feature 1..80: note = Synthetic: >NC_044854.1-cand-800-879
  source 1..80: mol_type = other DNA
atatgcagctatcaccaacaattgctttgacttttgctgccaaattatgaatcttgaggacacatggttacaaaggcggc

SEQ ID NO: 10468 - DNA, 80 bp, synthetic construct
  misc_feature 1..80: note = Synthetic: >NC_044854.1-cand-880-959
  source 1..80: mol_type = other DNA
taatcacatcgggcagatttcatcacccatcccagtcttggtcacagcaaacccctgaatttcagcaggatagcaagctg

SEQ ID NO: 10469 - DNA, 80 bp, synthetic construct
  misc_feature 1..80: note = Synthetic: >NC_044854.1-cand-960-1039
  source 1..80: mol_type = other DNA
gaactagttagggatgctatattggccgcagtgaatggcctagtttcacaacccttcaagaatttcctaggtaagctcaa

SEQ ID NO: 10470 - DNA, 80 bp, synthetic construct
  misc_feature 1..80: note = Synthetic: >NC_044854.1-cand-1010-1089
  source 1..80: mol_type = other DNA
acccttcaagaatttcctaggtaagctcaagccccttaatgtattaaacatcctatctaactgtgactggacttttatgg

SEQ ID NO: 10471 - DNA, 80 bp, synthetic construct
  misc_feature 1..80: note = Synthetic: >NC_003310.1-cand-195150-195229
  source 1..80: mol_type = other DNA
aattaatttctcgtaaaagtagaaaatatattctaatttattatatggtaagaaagtagaatcatctagaacagtaatca

SEQ ID NO: 10472 - DNA, 80 bp, synthetic construct
  misc_feature 1..80: note = Synthetic: >HCV.A11-cand-7290-7369
  source 1..80: mol_type = other DNA
aatttttagctaaaattagaagtgtgccaattggaagagcattattgctccctgagtactctacattgtaccgccgttgg

SEQ ID NO: 10473 - DNA, 80 bp, synthetic construct
  misc_feature 1..80: note = Synthetic: >HCV.B4-cand-7020-7099
  source 1..80: mol_type = other DNA
accttcctgaaaagatacttcagagcagatgagcaataccccttccttgtccacccagtgatgccaatgaaagacatcca

SEQ ID NO: 10474 - DNA, 80 bp, synthetic construct
  misc_feature 1..80: note = Synthetic: >HCV.A20-cand-5920-5999
  source 1..80: mol_type = other DNA
tcgggatgcatgttggtgggaacggttcacatgggtttgcagcagccctgaagcgatcatacttcactcagagtcaaggt

SEQ ID NO: 10475 - DNA, 80 bp, synthetic construct
  misc_feature 1..80: note = Synthetic: >NC_009823.1-cand-10-89
  source 1..80: mol_type = other DNA
ggggcgacactccgccatgaatcactcccctgtgaggaactactgtcttcacgcagaaagcgtctagccatggcgttagt

SEQ ID NO: 10476 - DNA, 80 bp, synthetic construct
  misc_feature 1..80: note = Synthetic: >HCV.A7-cand-4350-4429
  source 1..80: mol_type = other DNA
actatatgcaactgaagctaaaagagtctatgccctagagaagagaatgaacaactacatgcagttcaagagcaaacacc

SEQ ID NO: 10477 - DNA, 80 bp, synthetic construct
  misc_feature 1..80: note = Synthetic: >NC_001611.1-cand-182410-182489
  source 1..80: mol_type = other DNA
actatcatctaaacagtatgttgtacggaaagaaccattacaaatattatacatgataggaagaaaatatttaaaaaata

SEQ ID NO: 10478 - DNA, 80 bp, synthetic construct
  misc_feature 1..80: note = Synthetic: >AdVB3-cand-230-309
  source 1..80: mol_type = other DNA
actgacaggatatgaggtagttttgggcggatgcaagttaaaattctccattttggcgcgaaaactgaatgaggaagtga

SEQ ID NO: 10479 - DNA, 80 bp, synthetic construct
  misc_feature 1..80: note = Synthetic: >NC_007372.1-cand-40-119
  source 1..80: mol_type = other DNA
actgttcctaaaggttccagcgcaaaatgccataagcaccacattcccttatactggagatcctccatacagccatggaa

SEQ ID NO: 10480 - DNA, 80 bp, synthetic construct
  misc_feature 1..80: note = Synthetic: >NC_001611.1-cand-181610-181689
  source 1..80: mol_type = other DNA
actttatctattcataaaacataatcaaggatacggaagtcacgctttcaatatattacggtatctactagataggttcg

SEQ ID NO: 10481 - DNA, 80 bp, synthetic construct
  misc_feature 1..80: note = Synthetic: >HCV.A7-cand-7300-7379
  source 1..80: mol_type = other DNA
agaaattggcttgaattattttaaaacttacagcttgaagctgaaccccaccagaaatctggtcgtgttaatgactggtg

SEQ ID NO: 10482 - DNA, 80 bp, synthetic construct
  misc_feature 1..80: note = Synthetic: >AdVB7-cand-5670-5749
  source 1..80: mol_type = other DNA
agaggaacccagcccactctgatacaaaagcgcgtgtccaggccagcacaaaggaggccacgtgggaggggtagcggtcg

SEQ ID NO: 10483 - DNA, 80 bp, synthetic construct
  misc_feature 1..80: note = Synthetic: >NC_004907.1-cand-90-169
  source 1..80: mol_type = other DNA
agccgagatcgcgcagagacttgaggatgtttttgcagggaagaacacagatcttgaggctctcatggaatggctaaaga

SEQ ID NO: 10484 - DNA, 80 bp, synthetic construct
  misc_feature 1..80: note = Synthetic: >NC_003310.1-cand-3270-3349
  source 1..80: mol_type = other DNA
atacacttttatagtcctcgtttaaacagaatttagtatgtagttccgcaaatgactcgtcccttaataggcagtaggct

SEQ ID NO: 10485 - DNA, 80 bp, synthetic construct
  misc_feature 1..80: note = Synthetic: >EVB86-cand-7160-7239
  source 1..80: mol_type = other DNA
gtgtttattggcctggcacaatggagagcaagagtatgaggagtttgtgtccaaaatcagaagcgtcccagttgggcgct

SEQ ID NO: 10486 - DNA, 80 bp, synthetic construct
  misc_feature 1..80: note = Synthetic: >MG717391.1-cand-0-79
  source 1..80: mol_type = other DNA
agtagactccttgagaagctactacgactaaagctggaatgagcaccctcaaagaagtgcaagacaacatcacattacac

SEQ ID NO: 10487 - DNA, 80 bp, synthetic construct
  misc_feature 1..80: note = Synthetic: >AdVB3-cand-12240-12319
  source 1..80: mol_type = other DNA
agtgccctcccgctccaaccccacccacgagaaggtcctggctatcgtgaacgcgctggtggagaacaaggccatccgtc

SEQ ID NO: 10488 - DNA, 80 bp, synthetic construct
  misc_feature 1..80: note = Synthetic: >NC_003310.1-cand-51570-51649
  source 1..80: mol_type = other DNA
agtgctgcggacattaaacgatttgatgagttagatattaataacagttatatatctaatataatttatgaggtgaacga

SEQ ID NO: 10489 - DNA, 80 bp, synthetic construct
  misc_feature 1..80: note = Synthetic: >HCV.A9-cand-7040-7119
  source 1..80: mol_type = other DNA
agtgctttaatgaagttacctggaccaacgtcacctttctgaaaagatacttcagagcagatgagcaataccctttccta

SEQ ID NO: 10490 - DNA, 80 bp, synthetic construct
  misc_feature 1..80: note = Synthetic: >AdVB7-cand-29360-29439
  source 1..80: mol_type = other DNA
gttgctataaaaagtttcaacataaacaggatccactactaaattttaacatttaattttttatacagatgttttccact

SEQ ID NO: 10491 - DNA, 80 bp, synthetic construct
  misc_feature 1..80: note = Synthetic: >NC_001611.1-cand-24560-24639
  source 1..80: mol_type = other DNA
catgttttataaaatatttttcgtctggtgttagtttattccaatcattgatatctttagatatatccacttcttccact

SEQ ID NO: 10492 - DNA, 80 bp, synthetic construct
  misc_feature 1..80: note = Synthetic: >AdVB3-cand-17920-17999
  source 1..80: mol_type = other DNA
agtggaggaagaacttcctccgctggaaaagcggggcgacaagcgtccgcgacccgagctggagcagacgctggtgacgc

SEQ ID NO: 10493 - DNA, 80 bp, synthetic construct
  misc_feature 1..80: note = Synthetic: >NC_001611.1-cand-98260-98339
  source 1..80: mol_type = other DNA
gcaacgagtgaacgtaatagagagcttcgtatactctattcgaaaactctaagaacttattaatgaattccgtatccact

SEQ ID NO: 10494 - DNA, 80 bp, synthetic construct
  misc_feature 1..80: note = Synthetic: >NC_001611.1-cand-67250-67329
  source 1..80: mol_type = other DNA
agtggatcggttcagcatttaataggagtgatagaactgtagagggtcaacaatcgttaataaatctgtataataagatg

SEQ ID NO: 10495 - DNA, 80 bp, synthetic construct
  misc_feature 1..80: note = Synthetic: >NC_001611.1-cand-57110-57189
  source 1..80: mol_type = other DNA
tattcataaacgcgtcaaatttttcatgaatcgctaaggagtttaagaatctcatgtcaaattgtcctatataatccact

SEQ ID NO: 10496 - DNA, 80 bp, synthetic construct
  misc_feature 1..80: note = Synthetic: >AdVB7-cand-18210-18289
  source 1..80: mol_type = other DNA
ccgagctggagcagacgctggtgacgcgcgcagacgagcccccttcatacgaggaggcagtaaagctcggaatgcccact

SEQ ID NO: 10497 - DNA, 80 bp, synthetic construct
  misc_feature 1..80: note = Synthetic: >AdVB7-cand-18530-18609
  source 1..80: mol_type = other DNA
agtgtaaagcgccgtcgctgctattaattaaatatggagtagcgcttaacttgcttgtctgtgtgtatgtatcatcacca

SEQ ID NO: 10498 - DNA, 80 bp, synthetic construct
  misc_feature 1..80: note = Synthetic: >EVD70-cand-610-689
  source 1..80: mol_type = other DNA
catatagctattggattagccatccggtgatatcttgaaattttgccataactttttcacaaatcctacaacattacact

SEQ ID NO: 10499 - DNA, 80 bp, synthetic construct
  misc_feature 1..80: note = Synthetic: >NC_003310.1-cand-15950-16029
  source 1..80: mol_type = other DNA
agtgtcatttaacactatactcatattaatccatggactcataatctctatacgggattaacggatgttctatatacggg

SEQ ID NO: 10500 - DNA, 80 bp, synthetic construct
  misc_feature 1..80: note = Synthetic: >AdVB3-cand-24050-24129
  source 1..80: mol_type = other DNA
agtgtggaagagctcagccgcgcctacgagctgaacctcttttcgcctcaggtaccccccaagcggcagccaaacggcac

SEQ ID NO: 10501 - DNA, 80 bp, synthetic construct
  misc_feature 1..80: note = Synthetic: >AdVB3-cand-6230-6309
  source 1..80: mol_type = other DNA
tcagggaagatggttgtcagttcatccggaactattctgactcgccatcccctattgtgcagggttattacatccacact

SEQ ID NO: 10502 - DNA, 80 bp, synthetic construct
  misc_feature 1..80: note = Synthetic: >NC_039477.1-cand-330-409
  source 1..80: mol_type = other DNA
agtgttccaccactgagcttgagagaaaacagggaggccaaggaaccgctaacaggggcaatattagagatgtgggatgg

SEQ ID NO: 10503 - DNA, 80 bp, synthetic construct
  misc_feature 1..80: note = Synthetic: >NC_001611.1-cand-120730-120809
  source 1..80: mol_type = other DNA
gtattagataaatggaatactaattatacacattataataggtgtaaatctagaaattacataaaaaaaatgtaataacg

SEQ ID NO: 10504 - DNA, 80 bp, synthetic construct
  misc_feature 1..80: note = Synthetic: >NC_001611.1-cand-68430-68509
  source 1..80: mol_type = other DNA
gtttatgtactatgccaagcgtatgctgttcacgtccaccaatgataaaatcaaacttattttagccaataaggaaaacg

SEQ ID NO: 10505 - DNA, 80 bp, synthetic construct
  misc_feature 1..80: note = Synthetic: >NC_001611.1-cand-55910-55989
  source 1..80: mol_type = other DNA
gcttattccacaatacgagtcattatatactccaaaaaacaaaataactagtataaaatctgtatcgaatgggaaaaacg

SEQ ID NO: 10506 - DNA, 80 bp, synthetic construct
  misc_feature 1..80: note = Synthetic: >NC_003310.1-cand-55090-55169
  source 1..80: mol_type = other DNA
tttttgttttggagcaaataccttaccgccttcataaggaaacttttgttttgtttctgatctgactaagatagttttag

SEQ ID NO: 10507 - DNA, 80 bp, synthetic construct
  misc_feature 1..80: note = Synthetic: >NC_003310.1-cand-56640-56719
  source 1..80: mol_type = other DNA
tggatttcagatataaaaatctgttttcaccgtgactttcaaaccaattaatacacctaacatccatttctagaatttag

SEQ ID NO: 10508 - DNA, 80 bp, synthetic construct
  misc_feature 1..80: note = Synthetic: >NC_003310.1-cand-67290-67369
  source 1..80: mol_type = other DNA
tgaatgttatagttttctaaaatgtataacaaatacagaaatcaattcgttcgatgagtatatattaagaggactattag

SEQ ID NO: 10509 - DNA, 80 bp, synthetic construct
  misc_feature 1..80: note = Synthetic: >NC_001722.1-cand-9780-9859
  source 1..80: mol_type = other DNA
ctacaaggccttcactctgtacccagaagagtttgggcacaagtcaggattgccagagaaagaatggaaggcaaaactga

SEQ ID NO: 10510 - DNA, 80 bp, synthetic construct
  misc_feature 1..80: note = Synthetic: >NC_001611.1-cand-117360-117439
  source 1..80: mol_type = other DNA
tcttatggctacacacggaagaaaaaccgtcatttgtgtacccaataaaatgttaatacatcaatggaagacacaggtag

SEQ ID NO: 10511 - DNA, 80 bp, synthetic construct
  misc_feature 1..80: note = Synthetic: >AdVB3-cand-16720-16799
  source 1..80: mol_type = other DNA
ctagaagacgtactggagaaaatgaaagtggatcccgatatccagcctgaggtcaaagtaagacctatcaaggaagtggc

SEQ ID NO: 10512 - DNA, 80 bp, synthetic construct
  misc_feature 1..80: note = Synthetic: >NC_001611.1-cand-68110-68189
  source 1..80: mol_type = other DNA
gctgcgttaaacattcagacgagtgtaaacactgttgttagagattttgaaaattatgtgaaacagacttgtaattctag

SEQ ID NO: 10513 - DNA, 80 bp, synthetic construct
  misc_feature 1..80: note = Synthetic: >NC_005233.1-cand-280-359
  source 1..80: mol_type = other DNA
ctagaccctggagatcacctcaaagagaagtcaatgctcagttatggaaatgtcattgacctcaaccatcttgacattga

SEQ ID NO: 10514 - DNA, 80 bp, synthetic construct
  misc_feature 1..80: note = Synthetic: >NC_003310.1-cand-73540-73619
  source 1..80: mol_type = other DNA
ctagtcagtgtaaagaacgaatgttgtaggttaaaattatctacacaaatagaacctcaacgtaacttaacagtgcaacc

SEQ ID NO: 10515 - DNA, 80 bp, synthetic construct
  misc_feature 1..80: note = Synthetic: >NC_003310.1-cand-99430-99509
  source 1..80: mol_type = other DNA
ctatcaataagacatcaactacctaaggaatattcaagcgaattactctgtccgaggaaacgaaagactgtagaagctaa

SEQ ID NO: 10516 - DNA, 80 bp, synthetic construct
  misc_feature 1..80: note = Synthetic: >NC_001611.1-cand-13790-13869
  source 1..80: mol_type = other DNA
tcgcttcatcatttatatggtgtttctaaattcgtttaaaaaattatacggagacgccgtaataatttccccattgatag

SEQ ID NO: 10517 - DNA, 80 bp, synthetic construct
  misc_feature 1..80: note = Synthetic: >AdVB3-cand-15840-15919
  source 1..80: mol_type = other DNA
ctatgctcgccggaagagccgaaggaggcgcattgccaggcgccacagggctactaccgccatgcgagctgcaaaagcta

SEQ ID NO: 10518 - DNA, 80 bp, synthetic construct
  misc_feature 1..80: note = Synthetic: >NC_001611.1-cand-28000-28079
  source 1..80: mol_type = other DNA
gatactgtcctttctctcgttaaacgcctttagaaaaactttagaagaatatctcaatgagagttcctgaccgtccatag

SEQ ID NO: 10519 - DNA, 80 bp, synthetic construct
  misc_feature 1..80: note = Synthetic: >AdVB7-cand-24040-24119
  source 1..80: mol_type = other DNA
acaccggcggagcacgaggaggagctgaaacgttttctagacagagaggatgacgaccgcccagagcatcaagcagatgg

SEQ ID NO: 10520 - DNA, 80 bp, synthetic construct
  misc_feature 1..80: note = Synthetic: >AdVB7-cand-24180-24259
  source 1..80: mol_type = other DNA
ggaagacgtgctcctcaaacatctagcaaggcagtcgaacatagttaaagacgcactactcgacctcaccgaagtgccca

SEQ ID NO: 10521 - DNA, 80 bp, synthetic construct
  misc_feature 1..80: note = Synthetic: >AdVB7-cand-24200-24279
  source 1..80: mol_type = other DNA
atctagcaaggcagtcgaacatagttaaagacgcactactcgacctcaccgaagtgcccatcagtgtggaagagcttagc

SEQ ID NO: 10522 - DNA, 80 bp, synthetic construct
  misc_feature 1..80: note = Synthetic: >AdVB7-cand-24360-24439
  source 1..80: mol_type = other DNA
actgaacttctatccagcttttactgtccccgaagtgctggccacctaccacatcttttttaagaaccaaaagattccag

SEQ ID NO: 10523 - DNA, 80 bp, synthetic construct
  misc_feature 1..80: note = Synthetic: >AdVB7-cand-24560-24639
  source 1..80: mol_type = other DNA
atgagactcgggccgcaaatgctctgcaacagggagagaatggcatggatgaacatcacagcgctttagtggaactggag

SEQ ID NO: 10524 - DNA, 80 bp, synthetic construct
  misc_feature 1..80: note = Synthetic: >AdVB7-cand-25130-25209
  source 1..80: mol_type = other DNA
gggaggcccgccgtgactacatccgagactgtgtctacctttacctctgtcatacctggcagactggcatgggtgtgtgg

SEQ ID NO: 10525 - DNA, 80 bp, synthetic construct
  misc_feature 1..80: note = Synthetic: >AdVB7-cand-25210-25289
  source 1..80: mol_type = other DNA
caacagtgtttggaagagcagaacctaaaagagctggacaagctcttgcagagatccctcaaagccatgtggacaggttt

SEQ ID NO: 10526 - DNA, 80 bp, synthetic construct
  misc_feature 1..80: note = Synthetic: >AdVB7-cand-25760-25839
  source 1..80: mol_type = other DNA
ggacctccgcctacctgcgcaagtttcatcccgaggattaccacccctatgagatcaggttctatgaggaccagtcacat

SEQ ID NO: 10527 - DNA, 80 bp, synthetic construct
  misc_feature 1..80: note = Synthetic: >AdVB7-cand-25780-25859
  source 1..80: mol_type = other DNA
aagtttcatcccgaggattaccacccctatgagatcaggttctatgaggaccagtcacatcctcccaaagtcgagctctc

SEQ ID NO: 10528 - DNA, 80 bp, synthetic construct
  misc_feature 1..80: note = Synthetic: >AdVB7-cand-25860-25939
  source 1..80: mol_type = other DNA
agcctgcgtcatcacccagggagcaattctggcccaattgcaagccatccaaaaatcccgccaagaatttctactgaaaa

SEQ ID NO: 10529 - DNA, 80 bp, synthetic construct
  misc_feature 1..80: note = Synthetic: >AdVB7-cand-25950-26029
  source 1..80: mol_type = other DNA
ggtctaccttgacccccagaccggtgaggagctcaacacaaggttcccccaggatgtcccatcgccgaggaagcaagaag

SEQ ID NO: 10530 - DNA, 80 bp, synthetic construct
  misc_feature 1..80: note = Synthetic: >AdVB7-cand-26280-26359
  source 1..80: mol_type = other DNA
tccagcggcggcccaacagtagatgggacgagaccgggcgattcccaaacccgaccaccgcttccaagaccggtaagaag

SEQ ID NO: 10531 - DNA, 80 bp, synthetic construct
  misc_feature 1..80: note = Synthetic: >AdVB7-cand-26430-26509
  source 1..80: mol_type = other DNA
gcaacatatccttcacccggcgatacctgctcttccaccacggtgtgaacttcccccgcaatatcttgcattactaccgt

SEQ ID NO: 10532 - DNA, 80 bp, synthetic construct
  misc_feature 1..80: note = Synthetic: >AdVB7-cand-26640-26719
  source 1..80: mol_type = other DNA
atcacagcgaacgagccagcgcagaccagagagctgaggaaccggatctttccaaccctctatgccatcttccagcagag

SEQ ID NO: 10533 - DNA, 80 bp, synthetic construct
  misc_feature 1..80: note = Synthetic: >AdVB7-cand-26820-26899
  source 1..80: mol_type = other DNA
ctcgaggacgccgaggctctcttcaacaagtactgcgcgctgactcttaaagagtagcccttgcccgcgcttattcgaaa

SEQ ID NO: 10534 - DNA, 80 bp, synthetic construct
  misc_feature 1..80: note = Synthetic: >AdVB7-cand-26900-26979
  source 1..80: mol_type = other DNA
acggcgggaatcacgtcaccattggcacctgtcctttgccctagtcatgagtaaagagattcccacgccttacatgtgga

SEQ ID NO: 10535 - DNA, 80 bp, synthetic construct
  misc_feature 1..80: note = Synthetic: >AdVE4-cand-2230-2309
  source 1..80: mol_type = other DNA
ggagaggcatgatgagactaatcatagaactgaactaactgtgggtctaatgagccgcaagcgtccagaaacagtgtggt

SEQ ID NO: 10536 - DNA, 80 bp, synthetic construct
  misc_feature 1..80: note = Synthetic: >AdVE4-cand-2310-2389
  source 1..80: mol_type = other DNA
ggcatgaggtgcagttgactggcacagatgaggtgtcagtcatgcatgagaaattttccctagaacaagttaaaacttgt

SEQ ID NO: 10537 - DNA, 80 bp, synthetic construct
  misc_feature 1..80: note = Synthetic: >AdVE4-cand-2370-2449
  source 1..80: mol_type = other DNA
tagaacaagttaaaacttgttggttggagcctgaggatgattgggaggtagccatcaggaattatgctaagctggctcta

SEQ ID NO: 10538 - DNA, 80 bp, synthetic construct
  misc_feature 1..80: note = Synthetic: >AdVE4-cand-2440-2519
  source 1..80: mol_type = other DNA
gctggctctaaggccagatagaaagtacaagattactaagcttataaatattagaaatgcctgctacatctcagggaatg

SEQ ID NO: 10539 - DNA, 80 bp, synthetic construct
  misc_feature 1..80: note = Synthetic: >AdVE4-cand-2530-2609
  source 1..80: mol_type = other DNA
ggagatctgtccgcaggatagagtggctttcagatgctgcatgatgaatatgtacccgggggtggtgtacatggatgggg

SEQ ID NO: 10540 - DNA, 80 bp, synthetic construct
  misc_feature 1..80: note = Synthetic: >AdVE4-cand-2640-2719
  source 1..80: mol_type = other DNA
atgggtataatgggacggtctttatggccaataccaagctgacagtgcatggctgctccttctttgggtttaataacacc

SEQ ID NO: 10541 - DNA, 80 bp, synthetic construct
  misc_feature 1..80: note = Synthetic: >AdVE4-cand-2650-2729
  source 1..80: mol_type = other DNA
tgggacggtctttatggccaataccaagctgacagtgcatggctgctccttctttgggtttaataacacctgcattgagg

SEQ ID NO: 10542 - DNA, 80 bp, synthetic construct
  misc_feature 1..80: note = Synthetic: >AdVE4-cand-2770-2849
  source 1..80: mol_type = other DNA
caactggatgggggtagtgggcaggaccaagagtatgctgtctgtgaaaaaatgcttgtttgagaggtgccatctggggg

SEQ ID NO: 10543 - DNA, 80 bp, synthetic construct
  misc_feature 1..80: note = Synthetic: >AdVE4-cand-2850-2929
  source 1..80: mol_type = other DNA
tgatgagcgagggcgaagccagaatccgccactgtgcctctaccgagacgggctgttttgtgctgtgcaagggcaatgcc

SEQ ID NO: 10544 - DNA, 80 bp, synthetic construct
  misc_feature 1..80: note = Synthetic: >AdVE4-cand-2930-3009
  source 1..80: mol_type = other DNA
aagattaagcataatatgatctgtggagcctcggacgagcgcggctaccaaatgctaacatgcgccggtgggaacagtca

SEQ ID NO: 10545 - DNA, 80 bp, synthetic construct
  misc_feature 1..80: note = Synthetic: >AdVE4-cand-3010-3089
  source 1..80: mol_type = other DNA
tatgctggccaccgtgcatgtggcttcgcatccccgcaagccctggcctgagtttgagcacaatgtcatgaccaggtgca

SEQ ID NO: 10546 - DNA, 80 bp, synthetic construct
  misc_feature 1..80: note = Synthetic: >AdVE4-cand-3110-3189
  source 1..80: mol_type = other DNA
cgaggcatgttaatgctctaccagtgcaacctgaattatgtgaaggtgctcttggagcccgatgccatgtccagagtaag

SEQ ID NO: 10547 - DNA, 80 bp, synthetic construct
  misc_feature 1..80: note = Synthetic: >AdVE4-cand-3200-3279
  source 1..80: mol_type = other DNA
gtgtttgacatgaatgtggaagtgtggaaaattttaagatatgatgaatacaagaccaggtgccgagcctgcgagtgcgg

SEQ ID NO: 10548 - DNA, 80 bp, synthetic construct
  misc_feature 1..80: note = Synthetic: >AdVE4-cand-3250-3329
  source 1..80: mol_type = other DNA
caagaccaggtgccgagcctgcgagtgcggagggaagcatgccaggttccagcccgtgtgtgtggatgtgacggaggacc

SEQ ID NO: 10549 - DNA, 80 bp, synthetic construct
  misc_feature 1..80: note = Synthetic: >AdVE4-cand-3300-3379
  source 1..80: mol_type = other DNA
agcccgtgtgtgtggatgtgacggaggacctgcgacccgatcatttggtgttgtcctgcaccgggacggagtttggctcc

SEQ ID NO: 10550 - DNA, 80 bp, synthetic construct
  misc_feature 1..80: note = Synthetic: >AdVE4-cand-3440-3519
  source 1..80: mol_type = other DNA
gggcagaaatgactaaaatctgtgcttttctgtgtgttgcagcagcatgagcggaagcggctcctttgagggagggatat

SEQ ID NO: 10551 - DNA, 80 bp, synthetic construct
  misc_feature 1..80: note = Synthetic: >EVA76-cand-6800-6879
  source 1..80: mol_type = other DNA
gggtgggatgccatctggatgttctggtaccagcattttcaattccatgattaataacataataatcagaactctcctaa

SEQ ID NO: 10552 - DNA, 80 bp, synthetic construct
  misc_feature 1..80: note = Synthetic: >EVA76-cand-6850-6929
  source 1..80: mol_type = other DNA
ttaataacataataatcagaactctcctaatcaagacttttaaaggaattgatctagatgaattaaacatgattgcatat

SEQ ID NO: 10553 - DNA, 80 bp, synthetic construct
  misc_feature 1..80: note = Synthetic: >EVA89-cand-50-129
  source 1..80: mol_type = other DNA
ctggtatcacggtacctttgtgcgcctgttttatgcaccctttttccctgtaactcagaagaaacaaacaaacgatcaat

SEQ ID NO: 10554 - DNA, 80 bp, synthetic construct
  misc_feature 1..80: note = Synthetic: >EVA89-cand-130-209
  source 1..80: mol_type = other DNA
agtgggcttagcgctccagctaagtcttgatcaagcacttctgttaccccggaccgagtatcaataggctgtacccacgg

SEQ ID NO: 10555 - DNA, 80 bp, synthetic construct
  misc_feature 1..80: note = Synthetic: >EVA89-cand-210-289
  source 1..80: mol_type = other DNA
ctgaaagagaaaacgttcgttatccggctatctacttcgggaaacctagtaccatcatgaagattgcaaagcgtttcgct

SEQ ID NO: 10556 - DNA, 80 bp, synthetic construct
  misc_feature 1..80: note = Synthetic: >EVA89-cand-380-459
  source 1..80: mol_type = other DNA
ggaaacccataggacgctttaatattgacatggtgcgaagagtctactgagctaggtagtagtcctccggcccctgaatg

SEQ ID NO: 10557 - DNA, 80 bp, synthetic construct
  misc_feature 1..80: note = Synthetic: >EVA89-cand-610-689
  source 1..80: mol_type = other DNA
catatagctattggattggccatccggtgaattctagagacattatttacttgtttgttggttttaccacactgaacatt

SEQ ID NO: 10558 - DNA, 80 bp, synthetic construct
  misc_feature 1..80: note = Synthetic: >EVA89-cand-690-769
  source 1..80: mol_type = other DNA
accaatcacagaactctcctttacatcttgttgttaaacaatagaaagagaaaatgggagctcaagtgtccactcaaaag

SEQ ID NO: 10559 - DNA, 80 bp, synthetic construct
  misc_feature 1..80: note = Synthetic: >EVA89-cand-770-849
  source 1..80: mol_type = other DNA
accgggtcacatgagaatcagaacgttgctgccaatggttctacaataaattataccactatcaattactacaaagagtc

SEQ ID NO: 10560 - DNA, 80 bp, synthetic construct
  misc_feature 1..80: note = Synthetic: >EVA89-cand-850-929
  source 1..80: mol_type = other DNA
atatgcagcttcggccactaagcaggacttttcacaagacccatctaaatttacacaaccagtggtagatgcattgaaag

SEQ ID NO: 10561 - DNA, 80 bp, synthetic construct
  misc_feature 1..80: note = Synthetic: >EVA89-cand-930-1009
  source 1..80: mol_type = other DNA
agactgcacctcctctgaaatccccctcagctgaagcgtgcgggtacagcgacagagtggcacagctcacagttgggaac

SEQ ID NO: 10562 - DNA, 80 bp, synthetic construct
  misc_feature 1..80: note = Synthetic: >EVA89-cand-970-1049
  source 1..80: mol_type = other DNA
cgggtacagcgacagagtggcacagctcacagttgggaactccaccattaccacacaagaggctgccaacatcacttgtg

SEQ ID NO: 10563 - DNA, 80 bp, synthetic construct
  misc_feature 1..80: note = Synthetic: >EVA89-cand-1090-1169
  source 1..80: mol_type = other DNA
gactgcagttgacaagccgaccaagcctgatgtgtcagtaaacagattttacacattgtcagctaaattatggacaaaga

SEQ ID NO: 10564 - DNA, 80 bp, synthetic construct
  misc_feature 1..80: note = Synthetic: >EVA89-cand-1170-1249
  source 1..80: mol_type = other DNA
actcttctggttggtattggaaattccctgacgtattgactgaaattggtgtttttggtcaaaatgctcaattccattat

SEQ ID NO: 10565 - DNA, 80 bp, synthetic construct
  misc_feature 1..80: note = Synthetic: >EVA89-cand-1250-1329
  source 1..80: mol_type = other DNA
ctatataggtcaggcttttgcattcatgtccaatgtaatgccagcaagtttcatcaaggtgcactcttggtagtggcaat

SEQ ID NO: 10566 - DNA, 80 bp, synthetic construct
  misc_feature 1..80: note = Synthetic: >EVA89-cand-1330-1409
  source 1..80: mol_type = other DNA
tccagagtatgtacagggcaggtctagtaactcaaccactcctgcttcagcccctcacccaacataccaagcggtgcagc

SEQ ID NO: 10567 - DNA, 80 bp, synthetic construct
  misc_feature 1..80: note = Synthetic: >EVB69-cand-5670-5749
  source 1..80: mol_type = other DNA
tgctagcaatcaataccagtaagtttcccaacatgtatatcccagtgggacaagtcacggactacggctttctaaacctg

SEQ ID NO: 10568 - DNA, 80 bp, synthetic construct
  misc_feature 1..80: note = Synthetic: >EVB69-cand-5750-5829
  source 1..80: mol_type = other DNA
ggtggcacgcccactaagagaatgcttatgtacaatttccccacaagagcaggtcagtgtggtggagtgctcatgtccac

SEQ ID NO: 10569 - DNA, 80 bp, synthetic construct
  misc_feature 1..80: note = Synthetic: >EVB69-cand-5860-5939
  source 1..80: mol_type = other DNA
gaatggccatcaaggcttctcagcagcactcctcaagcactactttaatgatgtacaaggagaaatcgagttcatcgaag

SEQ ID NO: 10570 - DNA, 80 bp, synthetic construct
  misc_feature 1..80: note = Synthetic: >EVB69-cand-5910-5989
  source 1..80: mol_type = other DNA
atgtacaaggagaaatcgagttcatcgaagattcaaaggaagcaggattcccagtcatcaacacacctaacaagaccaaa

SEQ ID NO: 10571 - DNA, 80 bp, synthetic construct
  misc_feature 1..80: note = Synthetic: >EVB69-cand-5990-6069
  source 1..80: mol_type = other DNA
ctagagccgagcgtcttccaccaggtttttgagggcaataaagagccagcggtcctcaggagtggcgacccacgcctcaa

SEQ ID NO: 10572 - DNA, 80 bp, synthetic construct
  misc_feature 1..80: note = Synthetic: >EVB69-cand-6070-6149
  source 1..80: mol_type = other DNA
agccaactttgaggaagccatattttccaaatacatcggaaatgtcaacacacacgtggatgagtacatgctggaagctg

SEQ ID NO: 10573 - DNA, 80 bp, synthetic construct
  misc_feature 1..80: note = Synthetic: >EVB69-cand-6150-6229
  source 1..80: mol_type = other DNA
tcgaccattacgctgggcaattggttactttagacatcagcactgaaccaatgaaattggaggatgccgtgtatggaact

SEQ ID NO: 10574 - DNA, 80 bp, synthetic construct
  misc_feature 1..80: note = Synthetic: >EVB69-cand-6230-6309
  source 1..80: mol_type = other DNA
gaaggtcttgaagctcttgatttaacaaccagtgcaggttacccctatgtcgcactaggcatcaagaagagagacattct

SEQ ID NO: 10575 - DNA, 80 bp, synthetic construct
  misc_feature 1..80: note = Synthetic: >EVB69-cand-6310-6389
  source 1..80: mol_type = other DNA
ctcaaagaagaccaaggacttgaccaagctaaaagagtgcatggataagtatggtcttaacttgccaatggtaacttatg

SEQ ID NO: 10576 - DNA, 80 bp, synthetic construct
  misc_feature 1..80: note = Synthetic: >EVB69-cand-6390-6469
  source 1..80: mol_type = other DNA
tgaaagatgagcttagatctgcagagaaagtagcaaaaggaaaatctaggctgattgaagcatccagtctgaatgattca

SEQ ID NO: 10577 - DNA, 80 bp, synthetic construct
  misc_feature 1..80: note = Synthetic: >EVB69-cand-6440-6519
  source 1..80: mol_type = other DNA
ctgattgaagcatccagtctgaatgattcagtggcaatgagacagacatttggcaacttgtacaaaactttccacttgaa

SEQ ID NO: 10578 - DNA, 80 bp, synthetic construct
  misc_feature 1..80: note = Synthetic: >EVB69-cand-6540-6619
  source 1..80: mol_type = other DNA
gtgcggttgggtgcgacccagacctcttttggagcaaaataccagtgatgttggatggacatctcatagcatttgattac

SEQ ID NO: 10579 - DNA, 80 bp, synthetic construct
  misc_feature 1..80: note = Synthetic: >EVB69-cand-6620-6699
  source 1..80: mol_type = other DNA
tctgggtatgatgctagtttaagtcctgtctggtttgcttgtttaaaaatgctacttgaaaaacttggatatacacacaa

SEQ ID NO: 10580 - DNA, 80 bp, synthetic construct
  misc_feature 1..80: note = Synthetic: >EVB69-cand-6690-6769
  source 1..80: mol_type = other DNA
atacacacaatgagacaaactacattgactacttgtgcaactcccatcacctgtacagggacaagcattactttgtgagg

SEQ ID NO: 10581 - DNA, 80 bp, synthetic construct
  misc_feature 1..80: note = Synthetic: >EVB69-cand-6770-6849
  source 1..80: mol_type = other DNA
ggtggcatgccctcagggtgttctggcaccagtatctttaactcaatgatcaacaatatcattatcaggacattaatgct

SEQ ID NO: 10582 - DNA, 80 bp, synthetic construct
  misc_feature 1..80: note = Synthetic: >EVB69-cand-6850-6929
  source 1..80: mol_type = other DNA
gaaagtgtacaagggaattgacttagaccagttcaggatgatcgcatacggtgatgatgtaattgcatcatacccgtggc

SEQ ID NO: 10583 - DNA, 80 bp, synthetic construct
  misc_feature 1..80: note = Synthetic: >EVB79-cand-6080-6159
  source 1..80: mol_type = other DNA
ccaagattgaaggccaactttgaggaagccattttctccaagtacattggaaatgtaaacacacatgtggacgagtacat

SEQ ID NO: 10584 - DNA, 80 bp, synthetic construct
  misc_feature 1..80: note = Synthetic: >EVB79-cand-6130-6209
  source 1..80: mol_type = other DNA
aaatgtaaacacacatgtggacgagtacatgctggaagcagttgatcactatgcaggacagctagcaaccttggacatca

SEQ ID NO: 10585 - DNA, 80 bp, synthetic construct
  misc_feature 1..80: note = Synthetic: >EVB79-cand-6210-6289
  source 1..80: mol_type = other DNA
gtacagagcccatgaaactagaggatgcagtatacggcactgagggcctcgaagcactagacttgaccacaagtgcaggg

SEQ ID NO: 10586 - DNA, 80 bp, synthetic construct
  misc_feature 1..80: note = Synthetic: >EVB79-cand-6290-6369
  source 1..80: mol_type = other DNA
tacccctatgtagcacttggcatcaagaagagagatatattatccaagaagaccaaggacctgacaaaactgaaggagtg

SEQ ID NO: 10587 - DNA, 80 bp, synthetic construct
  misc_feature 1..80: note = Synthetic: >EVB79-cand-6370-6449
  source 1..80: mol_type = other DNA
catggacaagtatgggctgaacctacccatggttacttatgtgaaggatgaattgagatcagcagagaaggtggccaagg

SEQ ID NO: 10588 - DNA, 80 bp, synthetic construct
  misc_feature 1..80: note = Synthetic: >EVB79-cand-6450-6529
  source 1..80: mol_type = other DNA
gcaaatccaggctgattgaagcatcgagcctgaatgactcagtggccatgaggcagacctttggaaacttgtacaagaca

SEQ ID NO: 10589 - DNA, 80 bp, synthetic construct
  misc_feature 1..80: note = Synthetic: >EVB79-cand-6530-6609
  source 1..80: mol_type = other DNA
ttccacttgaacccaggcatagtgacaggcagtgcagttggatgtgatccagacttattctggagtaaaatcccagtgat

SEQ ID NO: 10590 - DNA, 80 bp, synthetic construct
  misc_feature 1..80: note = Synthetic: >EVB79-cand-6610-6689
  source 1..80: mol_type = other DNA
gctcgacggccacctcatagcctttgactatagtggatatgatgctagtttgagtccagtgtggtttgcttgcctgaaac

SEQ ID NO: 10591 - DNA, 80 bp, synthetic construct
  misc_feature 1..80: note = Synthetic: >EVB79-cand-6690-6769
  source 1..80: mol_type = other DNA
tgttgttagagaagatgggatactcacacaaggagaccaactacatagactatttgtgcaactcccaccatctgtataga

SEQ ID NO: 10592 - DNA, 80 bp, synthetic construct
  misc_feature 1..80: note = Synthetic: >EVB79-cand-6770-6849
  source 1..80: mol_type = other DNA
gacaagcactactttgtgagaggaggaatgccttcagggtgctcaggaaccagtatcttcaattcgatgattaacaacat

SEQ ID NO: 10593 - DNA, 80 bp, synthetic construct
  misc_feature 1..80: note = Synthetic: >EVB79-cand-6890-6969
  source 1..80: mol_type = other DNA
gacctagaccagttcaggatgatagcatatggtgatgacgtcatcgcgtcatatccacatcccattgatgcatcactgct

SEQ ID NO: 10594 - DNA, 80 bp, synthetic construct
  misc_feature 1..80: note = Synthetic: >EVB79-cand-6930-7009
  source 1..80: mol_type = other DNA
tcatcgcgtcatatccacatcccattgatgcatcactgctagctgaggccggcaaaggatacggattaatcatgacacca

SEQ ID NO: 10595 - DNA, 80 bp, synthetic construct
  misc_feature 1..80: note = Synthetic: >EVB79-cand-7010-7089
  source 1..80: mol_type = other DNA
gctgacaagggagaatgctttaatgaagtgacatggactaatgtcacgttcttgaaaagatacttcagagcagatgaaca

SEQ ID NO: 10596 - DNA, 80 bp, synthetic construct
  misc_feature 1..80: note = Synthetic: >EVB79-cand-7090-7169
  source 1..80: mol_type = other DNA
ataccctttccttgtccacccagtgatgccaatgaaagacatacatgagtcaataagatggactaaagatcccaagaaca

SEQ ID NO: 10597 - DNA, 80 bp, synthetic construct
  misc_feature 1..80: note = Synthetic: >EVB79-cand-7260-7339
  source 1..80: mol_type = other DNA
cagtagggcgctgcttgaccctgcctgcattctcaaccttacgcaggaagtggctagattctttttaaattagagtacaa

SEQ ID NO: 10598 - DNA, 80 bp, synthetic construct
  misc_feature 1..80: note = Synthetic: >EVB79-cand-7320-7399
  source 1..80: mol_type = other DNA
ctttttaaattagagtacaatttgatttaattctaattggcttaaccctaccacactcaccgaactagacaacggtgcag

SEQ ID NO: 10599 - DNA, 80 bp, synthetic construct
  misc_feature 1..80: note = Synthetic: >EVB84-cand-1220-1299
  source 1..80: mol_type = other DNA
tttggacagaacatgcattaccactacttgggacgatccggctatacaatacatgtgcaatgcaacgcgtccaagttcca

SEQ ID NO: 10600 - DNA, 80 bp, synthetic construct
  misc_feature 1..80: note = Synthetic: >EVB84-cand-1270-1349
  source 1..80: mol_type = other DNA
acatgtgcaatgcaacgcgtccaagttccatcaaggatgcattttggttgtttgcgtcccggaagccgagatgggatgcg

SEQ ID NO: 10601 - DNA, 80 bp, synthetic construct
  misc_feature 1..80: note = Synthetic: >EVB84-cand-1350-1429
  source 1..80: mol_type = other DNA
ccgacatagattccactttcgaacacactgcactaaccaagcaagagctaccatacgagttcaccgctaaccctgtaact

SEQ ID NO: 10602 - DNA, 80 bp, synthetic construct
  misc_feature 1..80: note = Synthetic: >EVB84-cand-1430-1509
  source 1..80: mol_type = other DNA
ggcaaggtggtccaaacagcagtttgtaatgcagggatgggcgtaggtgttggcaatttgacaatcttcccacatcagtg

SEQ ID NO: 10603 - DNA, 80 bp, synthetic construct
  misc_feature 1..80: note = Synthetic: >EVB84-cand-1510-1589
  source 1..80: mol_type = other DNA
gatcaatctgcgcaccaacaatagtgcaactatagttatcccatatatcaatagcgtcccaatggataatatgttcaggc

SEQ ID NO: 10604 - DNA, 80 bp, synthetic construct
  misc_feature 1..80: note = Synthetic: >EVB84-cand-1560-1639
  source 1..80: mol_type = other DNA
atagcgtcccaatggataatatgttcaggcactacaacttcaccctaatgatcataccgtttgcaccactgaaatatgac

SEQ ID NO: 10605 - DNA, 80 bp, synthetic construct
  misc_feature 1..80: note = Synthetic: >EVB84-cand-1670-1749
  source 1..80: mol_type = other DNA
gtcacagtggccccaatgtgctcagagtataatgggctaagacttgcatcccaccagggactaccagcgttgctgacacc

SEQ ID NO: 10606 - DNA, 80 bp, synthetic construct
  misc_feature 1..80: note = Synthetic: >EVB84-cand-1750-1829
  source 1..80: mol_type = other DNA
cggcagtaaccaattcttgacatctgacgatttccaatcaccctcagctatgccacagttcgacccaacaccgttaatgc

SEQ ID NO: 10607 - DNA, 80 bp, synthetic construct
  misc_feature 1..80: note = Synthetic: >EVB84-cand-1830-1909
  source 1..80: mol_type = other DNA
acatccctggtgaggtgcataatttaatggaaattgcagaggttgattcagtgatccccataaacaacacgactggaaag

SEQ ID NO: 10608 - DNA, 80 bp, synthetic construct
  misc_feature 1..80: note = Synthetic: >EVB84-cand-1910-1989
  source 1..80: mol_type = other DNA
tgcaaaacaatggaagcgtaccaggtaacagtcagggcaaacaattcacgcagcaaagaccccattttcagctttcaagt

SEQ ID NO: 10609 - DNA, 80 bp, synthetic construct
  misc_feature 1..80: note = Synthetic: >EVB84-cand-2000-2079
  source 1..80: mol_type = other DNA
tttagcgaggtgctcaatcgcacattgctgggtgagatgctaaattattacgcacactggtctggaagcatcaaattaac

SEQ ID NO: 10610 - DNA, 80 bp, synthetic construct
  misc_feature 1..80: note = Synthetic: >EVB84-cand-2080-2159
  source 1..80: mol_type = other DNA
gttcctcttctgcgggtcagccatggctacagggaaattgctgttagcatactcaccaccaggtgcctcagttcccacca

SEQ ID NO: 10611 - DNA, 80 bp, synthetic construct
  misc_feature 1..80: note = Synthetic: >EVB84-cand-2160-2239
  source 1..80: mol_type = other DNA
cccgaaaggacgcgatgctgggcacacacattatatgggacttgggactgcaatcaagctgcgtgctgtgtgtgccatgg

SEQ ID NO: 10612 - DNA, 80 bp, synthetic construct
  misc_feature 1..80: note = Synthetic: >EVB84-cand-2240-2319
  source 1..80: mol_type = other DNA
ataagccaatcacactatcgcatggtgcacaaggatgcctacaccactgcaggatacgtaacttgttggtatcaaaccaa

SEQ ID NO: 10613 - DNA, 80 bp, synthetic construct
  misc_feature 1..80: note = Synthetic: >EVB84-cand-2320-2399
  source 1..80: mol_type = other DNA
cattgtggtccccagtggaacaccaactgagtgtgtagtgttgggctttgtgtcggcatgcaatgatttctcagtgcgat

SEQ ID NO: 10614 - DNA, 80 bp, synthetic construct
  misc_feature 1..80: note = Synthetic: >EVB84-cand-2400-2479
  source 1..80: mol_type = other DNA
tgctgagggataccccgttcatcaaccaaccagcagaactgcaatccgacaagaatgacgcaacccccacagtggcagac

SEQ ID NO: 10615 - DNA, 80 bp, synthetic construct
  misc_feature 1..80: note = Synthetic: >HCV.A10-cand-5650-5729
  source 1..80: mol_type = other DNA
ccaagttcattccagagaatatcagtggagccagtgatgccacattagtaatcaacactgaacacatgccatcaatgttt

SEQ ID NO: 10616 - DNA, 80 bp, synthetic construct
  misc_feature 1..80: note = Synthetic: >HCV.A10-cand-5810-5889
  source 1..80: mol_type = other DNA
ccctacaaaggctggacagtgtggaggcgtggtaacatctgtcggtaaaatcattggcatccacattggaggcaatgggc

SEQ ID NO: 10617 - DNA, 80 bp, synthetic construct
  misc_feature 1..80: note = Synthetic: >HCV.A10-cand-5890-5969
  source 1..80: mol_type = other DNA
gacaagggttctgcgctggcctgaagaggagttactttgcaagtgaacaaggtgaaatccaatgggtgaaacctaacaag

SEQ ID NO: 10618 - DNA, 80 bp, synthetic construct
  misc_feature 1..80: note = Synthetic: >HCV.A10-cand-5980-6059
  source 1..80: mol_type = other DNA
gattaaatatcaatggtccaacacgcaccaagttagagcccagtgtgttccatgatgtgtttgagggcaacaaggagcca

SEQ ID NO: 10619 - DNA, 80 bp, synthetic construct
  misc_feature 1..80: note = Synthetic: >HCV.A10-cand-6060-6139
  source 1..80: mol_type = other DNA
gcagtcctaacaagcaaggatcccagattagaggttgactttgagcaagctctcttctccaagtatgtgggcaatgtcct

SEQ ID NO: 10620 - DNA, 80 bp, synthetic construct
  misc_feature 1..80: note = Synthetic: >HCV.A10-cand-6140-6219
  source 1..80: mol_type = other DNA
ccacgaacctgatgaatatgtgaagcaggcagccctccactacgcaaatcagctcaagcaactggatataaacaccaata

SEQ ID NO: 10621 - DNA, 80 bp, synthetic construct
  misc_feature 1..80: note = Synthetic: >HCV.A10-cand-6220-6299
  source 1..80: mol_type = other DNA
agatgagcatggaggaagcgtgctatggcacagagaacctggaagcaattgacctccacactagtgcagggtacccatac

SEQ ID NO: 10622 - DNA, 80 bp, synthetic construct
  misc_feature 1..80: note = Synthetic: >HCV.A10-cand-6300-6379
  source 1..80: mol_type = other DNA
agtgctctgggcataaagaagagggacatactagatcctaccactagggacataacaaaaatgaagttctacatggataa

SEQ ID NO: 10623 - DNA, 80 bp, synthetic construct
  misc_feature 1..80: note = Synthetic: >HCV.A10-cand-6380-6459
  source 1..80: mol_type = other DNA
gtatggcttggatttaccttactccacctatgttaaagatgaacttaggtctctggataagatcaagaaagggaagtccc

SEQ ID NO: 10624 - DNA, 80 bp, synthetic construct
  misc_feature 1..80: note = Synthetic: >HCV.A10-cand-6460-6539
  source 1..80: mol_type = other DNA
gcttgatagaagctagcagcctgaatgattcagtgtacctcagaatgacttttggccacctgtatgaagcattccatgca

SEQ ID NO: 10625 - DNA, 80 bp, synthetic construct
  misc_feature 1..80: note = Synthetic: >HCV.A10-cand-6540-6619
  source 1..80: mol_type = other DNA
aacccagggactgtgaccggatcagcagttgggtgcaatccggatgtgttctggagtaaactcccaatcctactcccagg

SEQ ID NO: 10626 - DNA, 80 bp, synthetic construct
  misc_feature 1..80: note = Synthetic: >HCV.A10-cand-6620-6699
  source 1..80: mol_type = other DNA
ctcgctatttgcctttgactattcaggctatgatgctagtcttagccccgtctggttcagggctttggagatggtcttac

SEQ ID NO: 10627 - DNA, 80 bp, synthetic construct
  misc_feature 1..80: note = Synthetic: >HCV.A10-cand-6700-6779
  source 1..80: mol_type = other DNA
gggacattggctactcagaggaagcagtgtcactcatagaaggaataaatcatacccatcatgtgtatcggaacaaaaca

SEQ ID NO: 10628 - DNA, 80 bp, synthetic construct
  misc_feature 1..80: note = Synthetic: >HCV.A10-cand-6780-6859
  source 1..80: mol_type = other DNA
tattgtgtccttggtgggatgccgtcaggatgttctggaacatccattttcaactcgatgatcaacaacatcatcatcag

SEQ ID NO: 10629 - DNA, 80 bp, synthetic construct
  misc_feature 1..80: note = Synthetic: >HCV.A10-cand-6860-6939
  source 1..80: mol_type = other DNA
gacgcttttaatcaaaacctttaaagggatagatctggacgagttgaatatggtggcctatggagatgatgtgctagcta

SEQ ID NO: 10630 - DNA, 80 bp, synthetic construct
  misc_feature 1..80: note = Synthetic: >HCV.A10-cand-6940-7019
  source 1..80: mol_type = other DNA
gttatcctttccctattgattgtcttgagctagctaagactggcaaagagtatgggctgaccatgacacctgcggacaaa

SEQ ID NO: 10631 - DNA, 80 bp, synthetic construct
  misc_feature 1..80: note = Synthetic: >HCV.A4-cand-7340-7419
  source 1..80: mol_type = other DNA
acgcaattggctcgaattattttagatttacggttaaacacacctcaaccccaccagaaatctggtcgtgaacatgactg

SEQ ID NO: 10632 - DNA, 80 bp, synthetic construct
  misc_feature 1..80: note = Synthetic: >HCV.A5-cand-60-139
  source 1..80: mol_type = other DNA
ccacggtacctttgtgcgcctgttttatccccccaaacccccgtaacgctacactagaagatagacaatgcgaccaatag

SEQ ID NO: 10633 - DNA, 80 bp, synthetic construct
  misc_feature 1..80: note = Synthetic: >HCV.A5-cand-140-219
  source 1..80: mol_type = other DNA
ccagtggggcaacccagcctcactctggtcaagcacctctgtttccccgggcttagtaccaataagctgctcgcgcggct

SEQ ID NO: 10634 - DNA, 80 bp, synthetic construct
  misc_feature 1..80: note = Synthetic: >HCV.A5-cand-230-309
  source 1..80: mol_type = other DNA
gcgcccgttatccggctaactacttcgagaaacctagtaccaccatggaagttgcagagtgtttcgctcagcacaacccc

SEQ ID NO: 10635 - DNA, 80 bp, synthetic construct
  misc_feature 1..80: note = Synthetic: >HCV.A5-cand-620-699
  source 1..80: mol_type = other DNA
atatagctattggattggccatccggtgtgtaacagagctatcatatattcttttgttggctttgtaccactaaattata

SEQ ID NO: 10636 - DNA, 80 bp, synthetic construct
  misc_feature 1..80: note = Synthetic: >HCV.A5-cand-700-779
  source 1..80: mol_type = other DNA
ctgtaattattactttaaggtacatcttgcttttaaacacagcaaaatgggagcacaggtgtcaacaactaaaaccgggt

SEQ ID NO: 10637 - DNA, 80 bp, synthetic construct
  misc_feature 1..80: note = Synthetic: >HCV.A5-cand-810-889
  source 1..80: mol_type = other DNA
gctctacaataaattacaccaatatcaactattatagggactcctacgctgcagctgctactcggcaggacttcactcaa

SEQ ID NO: 10638 - DNA, 80 bp, synthetic construct
  misc_feature 1..80: note = Synthetic: >HCV.A5-cand-860-939
  source 1..80: mol_type = other DNA
gcagctgctactcggcaggacttcactcaagatcctaataaatttactagccctgtcttagatgcattaagggaagttgc

SEQ ID NO: 10639 - DNA, 80 bp, synthetic construct
  misc_feature 1..80: note = Synthetic: >HCV.A5-cand-940-1019
  source 1..80: mol_type = other DNA
acctccactgaaatccccctcagcagaagcatgcggttacagtgacagggtggcacaactcacagttggcaattccacca

SEQ ID NO: 10640 - DNA, 80 bp, synthetic construct
  misc_feature 1..80: note = Synthetic: >HCV.A5-cand-1020-1099
  source 1..80: mol_type = other DNA
tcaccactcaggaggctgccaacatagtcgtgggatatggtgaatggccagaatactgccccgatgttgatgcaactgcc

SEQ ID NO: 10641 - DNA, 80 bp, synthetic construct
  misc_feature 1..80: note = Synthetic: >HCV.A5-cand-1100-1179
  source 1..80: mol_type = other DNA
gttgacaagcccacgagaccagacgtatcagtcaatcggttctacaccctatcagccaaaatgtggcaaaaagaatcgaa

SEQ ID NO: 10642 - DNA, 80 bp, synthetic construct
  misc_feature 1..80: note = Synthetic: >HCV.A5-cand-1180-1259
  source 1..80: mol_type = other DNA
gggttggtactggaagtttcctgatatcctcactgaaaagggagtatttggacaaaatgcccagtttcattacttgtata

SEQ ID NO: 10643 - DNA, 80 bp, synthetic construct
  misc_feature 1..80: note = Synthetic: >HCV.A5-cand-1260-1339
  source 1..80: mol_type = other DNA
gatcgggtttctgtgtccatgtccaatgtaatgctagtaagtttcatcaaggtgcactccttgttgcactcatgcctgaa

SEQ ID NO: 10644 - DNA, 80 bp, synthetic construct
  misc_feature 1..80: note = Synthetic: >HCV.A5-cand-1340-1419
  source 1..80: mol_type = other DNA
catgtgattgctggcatgggtgctggagacaaaccctcaacagctccgcatcctgactacaaagccacgcaacccggacc

SEQ ID NO: 10645 - DNA, 80 bp, synthetic construct
  misc_feature 1..80: note = Synthetic: >HCV.A5-cand-1380-1459
  source 1..80: mol_type = other DNA
cagctccgcatcctgactacaaagccacgcaacccggacccgatggagctgagctgcaatacccctatgtcttagattgc

SEQ ID NO: 10646 - DNA, 80 bp, synthetic construct
  misc_feature 1..80: note = Synthetic: >HCV.A5-cand-1500-1579
  source 1..80: mol_type = other DNA
ggattaatctcaggaccaacaattgcgctacaatcataatgccttacatcaacagcgtgccctacgattcggccattaat

SEQ ID NO: 10647 - DNA, 80 bp, synthetic construct
  misc_feature 1..80: note = Synthetic: >HCV.A5-cand-4130-4209
  source 1..80: mol_type = other DNA
tggatctccaacaaaatcagcaagtttattgattggcttaaagagaagatcatcccagccgcgagggagaaagtcgagtt

SEQ ID NO: 10648 - DNA, 80 bp, synthetic construct
  misc_feature 1..80: note = Synthetic: >HCV.A5-cand-4210-4289
  source 1..80: mol_type = other DNA
cctgagcaaccttaagcaattgcctctactggagaatcaaatttccaacttggaacaatctgccgcttcacaggaagatc

SEQ ID NO: 10649 - DNA, 80 bp, synthetic construct
  misc_feature 1..80: note = Synthetic: >HCV.A5-cand-4290-4369
  source 1..80: mol_type = other DNA
ttgaagccatgttcgggaatgtgtcatatctggctcacttttgccgtaagttccagcctctttatgcaactgaagcaaaa

SEQ ID NO: 10650 - DNA, 80 bp, synthetic construct
  misc_feature 1..80: note = Synthetic: >HCV.A5-cand-4370-4449
  source 1..80: mol_type = other DNA
agggtttacgccctggagaaaagaatgaataattatatgcagttcaagagcaaacaccgtattgaacctgtgtgtttaat

SEQ ID NO: 10651 - DNA, 80 bp, synthetic construct
  misc_feature 1..80: note = Synthetic: >HCV.A5-cand-4450-4529
  source 1..80: mol_type = other DNA
tattagaggctcaccaggaacaggcaaatcattagcgacaggcattattgcaagagcaattgccgataaataccactcca

SEQ ID NO: 10652 - DNA, 80 bp, synthetic construct
  misc_feature 1..80: note = Synthetic: >HCV.A5-cand-4530-4609
  source 1..80: mol_type = other DNA
gtgtgtactctctaccaccggacccagatcatttcgacgggtacaagcagcaggtggttacagttatggacgacttgtgt

SEQ ID NO: 10653 - DNA, 80 bp, synthetic construct
  misc_feature 1..80: note = Synthetic: >HCV.A5-cand-4610-4689
  source 1..80: mol_type = other DNA
caaaatcctgacggcaaggacatgtcattgttttgccaaatggtgtccacggttgacttcattcctccaatggcttcact

SEQ ID NO: 10654 - DNA, 80 bp, synthetic construct
  misc_feature 1..80: note = Synthetic: >HCV.A5-cand-4690-4769
  source 1..80: mol_type = other DNA
ggaagagaaaggtgtgtccttcacctctaaatttgttatcgcttcaactaatgccagtaacatcattgttccaacggtct

SEQ ID NO: 10655 - DNA, 80 bp, synthetic construct
  misc_feature 1..80: note = Synthetic: >HCV.A5-cand-4770-4849
  source 1..80: mol_type = other DNA
cagattccgatgcaatccgcagaagattttttatggactgcgacattgaggtgactgactcttacaaaacagaccttgga

SEQ ID NO: 10656 - DNA, 80 bp, synthetic construct
  misc_feature 1..80: note = Synthetic: >HCV.A5-cand-4870-4949
  source 1..80: mol_type = other DNA
tgcaaaactttgttcggagaacaacaccgccaatttcaagaagtgtagtccgctggtgtgcggcaaagccatccaattaa

SEQ ID NO: 10657 - DNA, 80 bp, synthetic construct
  misc_feature 1..80: note = Synthetic: >HCV.A5-cand-4950-5029
  source 1..80: mol_type = other DNA
gggacaggaagtccaaggttaggtacagtgttgatactgtggtgtcagagttaatcagggagtacaatagcaggtctgcc

SEQ ID NO: 10658 - DNA, 80 bp, synthetic construct
  misc_feature 1..80: note = Synthetic: >HCV.A5-cand-5060-5139
  source 1..80: mol_type = other DNA
gggcctcccaagtttaggccaataagaatcagtcttgaagagaagcctgctccagatgctatcagtgacttgctagctag

SEQ ID NO: 10659 - DNA, 80 bp, synthetic construct
  misc_feature 1..80: note = Synthetic: >HCV.A5-cand-5110-5189
  source 1..80: mol_type = other DNA
tccagatgctatcagtgacttgctagctagtgtcgacagcgaagaggttcgacagtactgcagggaccaagggtggataa

SEQ ID NO: 10660 - DNA, 80 bp, synthetic construct
  misc_feature 1..80: note = Synthetic: >HCV.A5-cand-5190-5269
  source 1..80: mol_type = other DNA
ttccggaaacgccaactaatgtggagcgacaccttaacagagcggtgttagtaatgcaatccatagccactgtagttgcg

SEQ ID NO: 10661 - DNA, 80 bp, synthetic construct
  misc_feature 1..80: note = Synthetic: >HCV.A5-cand-5270-5349
  source 1..80: mol_type = other DNA
gttgtgtctcttgtctatgtcatctataagctgttcgctggtttccagggcgcgtattctggagcgcccaaacaaactct

SEQ ID NO: 10662 - DNA, 80 bp, synthetic construct
  misc_feature 1..80: note = Synthetic: >HCV.A5-cand-5350-5429
  source 1..80: mol_type = other DNA
taagaagcctgtgttgagaacagccacagttcaagggcccagtttagactttgctttgtcccttttgagacgcaatatca

SEQ ID NO: 10663 - DNA, 80 bp, synthetic construct
  misc_feature 1..80: note = Synthetic: >JX443691.1-cand-1490-1569
  source 1..80: mol_type = other DNA
actatgggtctgggtgggtttgtatcaagttaagatcattagcgtaatctaggactaattagtataagttcataatgacc

SEQ ID NO: 10664 - DNA, 80 bp, synthetic construct
  misc_feature 1..80: note = Synthetic: >JX443691.1-cand-1580-1659
  source 1..80: mol_type = other DNA
aaatcattgattgatcagctagatcttatcgtagttgttaagtttatatataatcataggttaagtttgttaagtttttg

SEQ ID NO: 10665 - DNA, 80 bp, synthetic construct
  misc_feature 1..80: note = Synthetic: >JX443691.1-cand-1670-1749
  source 1..80: mol_type = other DNA
atttactaataattatatatgccattggatgtaaatttcgttccatgctctactgatgcttctgctctactaactccaca

SEQ ID NO: 10666 - DNA, 80 bp, synthetic construct
  misc_feature 1..80: note = Synthetic: >JX443691.1-cand-1750-1829
  source 1..80: mol_type = other DNA
acaacactacctcgtcccaaaccccctccctttactacctcaaatatactacctcaaatttgatttttcttgattgcttt

SEQ ID NO: 10667 - DNA, 80 bp, synthetic construct
  misc_feature 1..80: note = Synthetic: >KC470236.1-cand-10-89
  source 1..80: mol_type = other DNA
taagtatcttgtttaaaaaaagggagtaaccgaaaacggtcaggaccgaaatcggtggatataaaacgcagtcacagttt

SEQ ID NO: 10668 - DNA, 80 bp, synthetic construct
  misc_feature 1..80: note = Synthetic: >KC470236.1-cand-90-169
  source 1..80: mol_type = other DNA
ctgtccataccgatggcgcgatttcacaatcctgcagaacggccatacaaattgccagacctgtgcacaacgctggacac

SEQ ID NO: 10669 - DNA, 80 bp, synthetic construct
  misc_feature 1..80: note = Synthetic: >KC470236.1-cand-170-249
  source 1..80: mol_type = other DNA
caccttgcaggacattacaatagcctgtgtctattgcagacgaccactacagcaaaccgaggtatatgaatttgcattta

SEQ ID NO: 10670 - DNA, 80 bp, synthetic construct
  misc_feature 1..80: note = Synthetic: >KC470236.1-cand-280-359
  source 1..80: mol_type = other DNA
aaccactagctgcatgccaatcatgtataaaattttatgctaaaatacgggagctacgatattactcggactcggtgtat

SEQ ID NO: 10671 - DNA, 80 bp, synthetic construct
  misc_feature 1..80: note = Synthetic: >KC470236.1-cand-320-399
  source 1..80: mol_type = other DNA
taaaatacgggagctacgatattactcggactcggtgtatgcaactacattagaaaatataactaatacaaagttatata

SEQ ID NO: 10672 - DNA, 80 bp, synthetic construct
  misc_feature 1..80: note = Synthetic: >KC470236.1-cand-400-479
  source 1..80: mol_type = other DNA
atttattaataaggtgcatgtgttgtctgaaaccgctgtgtccagcagaaaaattaagacacctaaatagcaaacgaaga

SEQ ID NO: 10673 - DNA, 80 bp, synthetic construct
  misc_feature 1..80: note = Synthetic: >KC470236.1-cand-480-559
  source 1..80: mol_type = other DNA
tttcataaaatagcaggaagctatacaggacagtgtcgacggtgctggaccacaaaacgggaggaccgcagactaacacg

SEQ ID NO: 10674 - DNA, 80 bp, synthetic construct
  misc_feature 1..80: note = Synthetic: >KC470236.1-cand-560-639
  source 1..80: mol_type = other DNA
aagagaaacccaagtataacatcagatatgcgtggaccaaagcccaccttgcaggaaattgtattagatttatgtcctta

SEQ ID NO: 10675 - DNA, 80 bp, synthetic construct
  misc_feature 1..80: note = Synthetic: >KC470236.1-cand-640-719
  source 1..80: mol_type = other DNA
caatgaaatacagccggttgaccttgtatgtcacgagcaattaggagagtcagaggatgaaatagatgaacccgaccatg

SEQ ID NO: 10676 - DNA, 80 bp, synthetic construct
  misc_feature 1..80: note = Synthetic: >KC470236.1-cand-720-799
  source 1..80: mol_type = other DNA
cagttaatcaccaacatcaactactagccagacgggatgaaccacagcgtcacacaatacagtgttcgtgttgtaagtgt

SEQ ID NO: 10677 - DNA, 80 bp, synthetic construct
  misc_feature 1..80: note = Synthetic: >KC470236.1-cand-800-879
  source 1..80: mol_type = other DNA
aacaacacactgcagctggtagtagaagcctcacgggatactctgcgacaactacagcagctgtttatggactcactagg

SEQ ID NO: 10678 - DNA, 80 bp, synthetic construct
  misc_feature 1..80: note = Synthetic: >KC470236.1-cand-870-949
  source 1..80: mol_type = other DNA
actcactaggatttgtgtgtccgtggtgtgcaactgcaaaccagtaacctgctatggccaatcgtgaaggtacagacggg

SEQ ID NO: 10679 - DNA, 80 bp, synthetic construct
  misc_feature 1..80: note = Synthetic: >NC_001489.1-cand-6120-6199
  source 1..80: mol_type = other DNA
acctattgtagaagaaccagaggattataaagaggcttcaattttttatcaaaataaaatagtgggtaagactcagttag

SEQ ID NO: 10680 - DNA, 80 bp, synthetic construct
  misc_feature 1..80: note = Synthetic: >NC_001489.1-cand-6240-6319
  source 1..80: mol_type = other DNA
cccaggaattgatgctatcaacatggattcatctcctggatttccttatgtccaggagaagttgaccaaaagagatttaa

SEQ ID NO: 10681 - DNA, 80 bp, synthetic construct
  misc_feature 1..80: note = Synthetic: >NC_001489.1-cand-6280-6359
  source 1..80: mol_type = other DNA
tttccttatgtccaggagaagttgaccaaaagagatttaatttggttggatgaaaatggtttattgctgggagttcatcc

SEQ ID NO: 10682 - DNA, 80 bp, synthetic construct
  misc_feature 1..80: note = Synthetic: >NC_001489.1-cand-6360-6439
  source 1..80: mol_type = other DNA
aagattggctcagagaatcttattcaatactgtcatgatggaaaattgttctgatttggatgttgtttttacaacctgtc

SEQ ID NO: 10683 - DNA, 80 bp, synthetic construct
  misc_feature 1..80: note = Synthetic: >NC_001489.1-cand-6440-6519
  source 1..80: mol_type = other DNA
caaaagatgaattgagaccattagagaaagtgttggaatcaaaaacaagagctattgatgcttgtcctctggattactca

SEQ ID NO: 10684 - DNA, 80 bp, synthetic construct
  misc_feature 1..80: note = Synthetic: >NC_001489.1-cand-6540-6619
  source 1..80: mol_type = other DNA
gggtccagctattagttattttcatttgaatccaggtttccatacaggtgttgctattggcatagatcctgatagacagt

SEQ ID NO: 10685 - DNA, 80 bp, synthetic construct
  misc_feature 1..80: note = Synthetic: >NC_001489.1-cand-6600-6679
  source 1..80: mol_type = other DNA
catagatcctgatagacagtgggatgaattatttaaaacaatgataagattcggagatgttggtcttgatttagatttct

SEQ ID NO: 10686 - DNA, 80 bp, synthetic construct
  misc_feature 1..80: note = Synthetic: >NC_001489.1-cand-6680-6759
  source 1..80: mol_type = other DNA
ctgcttttgatgctagtcttagtccatttatgattagagaagcaggtagaatcatgagtgaactatctggaactccatcc

SEQ ID NO: 10687 - DNA, 80 bp, synthetic construct
  misc_feature 1..80: note = Synthetic: >NC_001489.1-cand-6760-6839
  source 1..80: mol_type = other DNA
cattttggcacagctcttatcaatactatcatttattccaagcatttgctgtataactgttgttaccatgtctgtggttc

SEQ ID NO: 10688 - DNA, 80 bp, synthetic construct
  misc_feature 1..80: note = Synthetic: >NC_001489.1-cand-6840-6919
  source 1..80: mol_type = other DNA
aatgccctctgggtctccttgtacagctttgctaaattcaattattaataatgtcaatttgtattatgtgttttccaaga

SEQ ID NO: 10689 - DNA, 80 bp, synthetic construct
  misc_feature 1..80: note = Synthetic: >NC_001489.1-cand-6930-7009
  source 1..80: mol_type = other DNA
gtctccagttttcttttgtcaggctttgaagattctctgttatggagatgatgttttaatagttttctctcgagatgttc

SEQ ID NO: 10690 - DNA, 80 bp, synthetic construct
  misc_feature 1..80: note = Synthetic: >NC_001489.1-cand-7010-7089
  source 1..80: mol_type = other DNA
agattgataatcttgatttgattggacaaaaaattgtagatgagtttaagaaacttggcatgacagctacttctgctgac

SEQ ID NO: 10691 - DNA, 80 bp, synthetic construct
  misc_feature 1..80: note = Synthetic: >NC_001489.1-cand-7090-7169
  source 1..80: mol_type = other DNA
aagaatgtacctcagctgaaaccagtttcggaattgacttttctcaaaagatctttcaatttggtagaggatagaattag

SEQ ID NO: 10692 - DNA, 80 bp, synthetic construct
  misc_feature 1..80: note = Synthetic: >NC_001489.1-cand-7170-7249
  source 1..80: mol_type = other DNA
acctgcaatttcggaaaaaacaatttggtctttaatagcatggcagagaagtaacgctgagtttgagcagaatttagaaa

SEQ ID NO: 10693 - DNA, 80 bp, synthetic construct
  misc_feature 1..80: note = Synthetic: >NC_001489.1-cand-7250-7329
  source 1..80: mol_type = other DNA
atgctcagtggtttgcttttatgcatggctatgagttttatcagaaattttattattttgttcagtcctgtttggagaaa

SEQ ID NO: 10694 - DNA, 80 bp, synthetic construct
  misc_feature 1..80: note = Synthetic: >NC_001489.1-cand-7330-7409
  source 1..80: mol_type = other DNA
gagatgatagaatacagacttaaatcttatgattggtggagaatgagattttatgaccagtgtttcatttgtgacctttc

SEQ ID NO: 10695 - DNA, 80 bp, synthetic construct
  misc_feature 1..80: note = Synthetic: >NC_001611.1-cand-154690-154769
  source 1..80: mol_type = other DNA
ttgcagaagagttcttcaatagatcagaacttcaggcgggtgaatcagtcaaattcggtaattccgttaatattaaaaat

SEQ ID NO: 10696 - DNA, 80 bp, synthetic construct
  misc_feature 1..80: note = Synthetic: >NC_001611.1-cand-154850-154929
  source 1..80: mol_type = other DNA
gggtggatatttgttcattggattggataataatacacacaaagtaattggattcatggcgggacacgactgcattaaac

SEQ ID NO: 10697 - DNA, 80 bp, synthetic construct
  misc_feature 1..80: note = Synthetic: >NC_001611.1-cand-154930-155009
  source 1..80: mol_type = other DNA
tgatagagaatgagatagaaaagtgtattagacgactcatgttgtacatttctgtgagaaaaagaggatatcaaatacgc

SEQ ID NO: 10698 - DNA, 80 bp, synthetic construct
  misc_feature 1..80: note = Synthetic: >NC_001611.1-cand-155040-155119
  source 1..80: mol_type = other DNA
ggaggagactacctcgacatacgtgtgcgctatcaaagtggaaagatgttgctgtgctgtgtttacagattggccagaat

SEQ ID NO: 10699 - DNA, 80 bp, synthetic construct
  misc_feature 1..80: note = Synthetic: >NC_001611.1-cand-155090-155169
  source 1..80: mol_type = other DNA
gctgtgctgtgtttacagattggccagaatcatggtatatggatactagtggtatcaagaagtattctccagatgaatgg

SEQ ID NO: 10700 - DNA, 80 bp, synthetic construct
  misc_feature 1..80: note = Synthetic: >NC_001611.1-cand-155170-155249
  source 1..80: mol_type = other DNA
gtgtcatctataaaattttaattaagaactatagagaacaaataataggttgtaatacatatagacaataactaacaatt

SEQ ID NO: 10701 - DNA, 80 bp, synthetic construct
  misc_feature 1..80: note = Synthetic: >NC_001611.1-cand-155250-155329
  source 1..80: mol_type = other DNA
aattagtaactgttatctctttttaactaactcttatatacctattaatacatcgtattatagttcttaatcattgattc

SEQ ID NO: 10702 - DNA, 80 bp, synthetic construct
  misc_feature 1..80: note = Synthetic: >NC_001611.1-cand-155330-155409
  source 1..80: mol_type = other DNA
acttattgttttaataaactaacattgttaattgaaaagggataacatgttatagaatataaattatatatggatttttt

SEQ ID NO: 10703 - DNA, 80 bp, synthetic construct
  misc_feature 1..80: note = Synthetic: >NC_001611.1-cand-155410-155489
  source 1..80: mol_type = other DNA
taaaaaggaaatacttgactggagtatatatttatctcttcattatatagcacatgcgtgttccaattcttccacatccc

SEQ ID NO: 10704 - DNA, 80 bp, synthetic construct
  misc_feature 1..80: note = Synthetic: >NC_001611.1-cand-155490-155569
  source 1..80: mol_type = other DNA
atataatacaggaatataatcttattcgaacatacaaaaaagtggataaaacaatagttgattttttatctaggtggcca

SEQ ID NO: 10705 - DNA, 80 bp, synthetic construct
  misc_feature 1..80: note = Synthetic: >NC_001611.1-cand-155600-155679
  source 1..80: mol_type = other DNA
aatattctacatatttattctatggatgatgctaatacgaatattataattttttttctagataacgtattaaatattaa

SEQ ID NO: 10706 - DNA, 80 bp, synthetic construct
  misc_feature 1..80: note = Synthetic: >NC_001611.1-cand-155650-155729
  source 1..80: mol_type = other DNA
tttttttctagataacgtattaaatattaataagaacgggtcatttatacacaatctcgggttatcatcatccattaata

SEQ ID NO: 10707 - DNA, 80 bp, synthetic construct
  misc_feature 1..80: note = Synthetic: >NC_001611.1-cand-155730-155809
  source 1..80: mol_type = other DNA
taaaagaatatgtatatcaattagttaataatgatcatctagataatgggataagactaatgcttgaaaatggacgtaga

SEQ ID NO: 10708 - DNA, 80 bp, synthetic construct
  misc_feature 1..80: note = Synthetic: >NC_001611.1-cand-155810-155889
  source 1..80: mol_type = other DNA
acaagacattttttatcctatatattagatacagttaatatctatatatgtattttaataaatcatggattttacataga

SEQ ID NO: 10709 - DNA, 80 bp, synthetic construct
  misc_feature 1..80: note = Synthetic: >NC_001611.1-cand-155890-155969
  source 1..80: mol_type = other DNA
tgctgtggacagttacggttgtacattattacatagatgtatatatcactataagaaatcagaatcagaatcatacaatg

SEQ ID NO: 10710 - DNA, 80 bp, synthetic construct
  misc_feature 1..80: note = Synthetic: >NC_001611.1-cand-155970-156049
  source 1..80: mol_type = other DNA
aattaattaaaatattgttaaataatggatcagatgtagataaaaaagatacgcatggaaacacgccatttatcctatta

SEQ ID NO: 10711 - DNA, 80 bp, synthetic construct
  misc_feature 1..80: note = Synthetic: >NC_001612.1-cand-50-129
  source 1..80: mol_type = other DNA
ctgattctacggaatccttgtgcgcctgttttatgtcccttcccccaatcagtaacttagaagcattgcacctctttcga

SEQ ID NO: 10712 - DNA, 80 bp, synthetic construct
  misc_feature 1..80: note = Synthetic: >NC_001612.1-cand-130-209
  source 1..80: mol_type = other DNA
ccgttagcaggcgtggcgcaccagccatgtcttggtcaagcacttctgtttccccggaccgagtatcaatagactgctca

SEQ ID NO: 10713 - DNA, 80 bp, synthetic construct
  misc_feature 1..80: note = Synthetic: >NC_001612.1-cand-210-289
  source 1..80: mol_type = other DNA
cgcggttgagggagaaaacgtccgttacccggctaactacttcgagaagcctagtagcaccatgaaagttgcagagtgtt

SEQ ID NO: 10714 - DNA, 80 bp, synthetic construct
  misc_feature 1..80: note = Synthetic: >NC_001612.1-cand-390-469
  source 1..80: mol_type = other DNA
cccacaggacgctctaatatggacatggtgcaaagagtctattgagctagttagtagtcctccggcccctgaatgcggct

SEQ ID NO: 10715 - DNA, 80 bp, synthetic construct
  misc_feature 1..80: note = Synthetic: >NC_001612.1-cand-420-499
  source 1..80: mol_type = other DNA
caaagagtctattgagctagttagtagtcctccggcccctgaatgcggctaatcctaactgcggagcacataccctcgac

SEQ ID NO: 10716 - DNA, 80 bp, synthetic construct
  misc_feature 1..80: note = Synthetic: >NC_001612.1-cand-620-699
  source 1..80: mol_type = other DNA
tagctattggattggccatccggtgtgcaacagagctattatttacctatttgttgggtatataccactcacatccagaa

SEQ ID NO: 10717 - DNA, 80 bp, synthetic construct
  misc_feature 1..80: note = Synthetic: >NC_001612.1-cand-670-749
  source 1..80: mol_type = other DNA
ttgttgggtatataccactcacatccagaaaaaccctcgacacactagtatacattctttacttgaattctagaaaatgg

SEQ ID NO: 10718 - DNA, 80 bp, synthetic construct
  misc_feature 1..80: note = Synthetic: >NC_001612.1-cand-780-859
  source 1..80: mol_type = other DNA
cccacgaaaattcgaactcagcatcagaaggatctactataaactacaccaccatcaactattacaaggatgcatatgct

SEQ ID NO: 10719 - DNA, 80 bp, synthetic construct
  misc_feature 1..80: note = Synthetic: >NC_001612.1-cand-870-949
  source 1..80: mol_type = other DNA
gtcgccaagatatgtctcaggaccctaagaaatttacagaccctgtgatggatgtcatacacgagatggctcctcccttg

SEQ ID NO: 10720 - DNA, 80 bp, synthetic construct
  misc_feature 1..80: note = Synthetic: >NC_001612.1-cand-950-1029
  source 1..80: mol_type = other DNA
aaatcacccagtgctgaagcttgtggttatagtgatcgagttgcccaactcacaattggaaactccacaatcactacaca

SEQ ID NO: 10721 - DNA, 80 bp, synthetic construct
  misc_feature 1..80: note = Synthetic: >NC_001612.1-cand-1060-1139
  source 1..80: mol_type = other DNA
ggaatggcccgagtattgcaaggacgctgatgccacagctgttgacaagcccaccagacccgatgtgtcggtaaataggt

SEQ ID NO: 10722 - DNA, 80 bp, synthetic construct
  misc_feature 1..80: note = Synthetic: >NC_001612.1-cand-1110-1189
  source 1..80: mol_type = other DNA
ccaccagacccgatgtgtcggtaaataggttcttcacccttgatactaaatcgtgggctaaagactcgaagggatggtac

SEQ ID NO: 10723 - DNA, 80 bp, synthetic construct
  misc_feature 1..80: note = Synthetic: >NC_001612.1-cand-1190-1269
  source 1..80: mol_type = other DNA
tggaaattcccggacgttttgacggaggtgggcgtgtttgggcagaatgcgcaattccattatctgtatagatccggatt

SEQ ID NO: 10724 - DNA, 80 bp, synthetic construct
  misc_feature 1..80: note = Synthetic: >NC_001612.1-cand-1270-1349
  source 1..80: mol_type = other DNA
ctgtgtgcacgtgcagtgcaatgccagcaaattccaccagggtgctctcttggttgccatactgcctgagtacgtgctgg

SEQ ID NO: 10725 - DNA, 80 bp, synthetic construct
  misc_feature 1..80: note = Synthetic: >NC_001612.1-cand-1370-1449
  source 1..80: mol_type = other DNA
ggtaacgagaactcacatcccccgtacgtcaccacccagccaggacaggtgggtgctgtacttacaaatccttatgtttt

SEQ ID NO: 10726 - DNA, 80 bp, synthetic construct
  misc_feature 1..80: note = Synthetic: >NC_001612.1-cand-1460-1539
  source 1..80: mol_type = other DNA
gtaccccttagtcaattgacggtgtgtccgcatcagtggattaacctacgaaccaacaactgtgcgaccatcatagtacc

SEQ ID NO: 10727 - DNA, 80 bp, synthetic construct
  misc_feature 1..80: note = Synthetic: >NC_001612.1-cand-5350-5429
  source 1..80: mol_type = other DNA
aacactcaagaaacctatactccgcacagcgacagtgcaaggcccaagtcttgattttgctctctcattgcttaggagga

SEQ ID NO: 10728 - DNA, 80 bp, synthetic construct
  misc_feature 1..80: note = Synthetic: >NC_001612.1-cand-5430-5509
  source 1..80: mol_type = other DNA
acatcagacaagtccagacagaccaaggccacttcactatgctaggtgttagagatcgcttggctgtcctcccgcgacac

SEQ ID NO: 10729 - DNA, 80 bp, synthetic construct
  misc_feature 1..80: note = Synthetic: >NC_001612.1-cand-5510-5589
  source 1..80: mol_type = other DNA
tcgcagcctgggaagacaatatgggtagaacacaagcttataaacatcttagatgctgttgagttggtggatgaacaagg

SEQ ID NO: 10730 - DNA, 80 bp, synthetic construct
  misc_feature 1..80: note = Synthetic: >NC_001612.1-cand-5590-5669
  source 1..80: mol_type = other DNA
ggtcaacttagaactgaccctggttactcttgataccaatgagaagttcagagacatcaccaagttcatcccagaaaaca

SEQ ID NO: 10731 - DNA, 80 bp, synthetic construct
  misc_feature 1..80: note = Synthetic: >NC_001612.1-cand-5670-5749
  source 1..80: mol_type = other DNA
ttagcgctgccagtgatgccaccctagtgatcaacacagagcacatgccctccatgttcgtgccagtgggtgacgttgtg

SEQ ID NO: 10732 - DNA, 80 bp, synthetic construct
  misc_feature 1..80: note = Synthetic: >NC_001612.1-cand-5750-5829
  source 1..80: mol_type = other DNA
caatacggtttcctaaacctcagcggaaaacccacccatcgtaccatgatgtacaactttcccactaaggctggacaatg

SEQ ID NO: 10733 - DNA, 80 bp, synthetic construct
  misc_feature 1..80: note = Synthetic: >NC_001612.1-cand-5830-5909
  source 1..80: mol_type = other DNA
tggtggagtggtgacatctgttggaaaggttatcggcatacatattggtggcaatggcaggcagggcttttgtgcaggac

SEQ ID NO: 10734 - DNA, 80 bp, synthetic construct
  misc_feature 1..80: note = Synthetic: >NC_001612.1-cand-5910-5989
  source 1..80: mol_type = other DNA
tcaagaggagttattttgccagtgagcaaggagagatccagtgggtcaagcccaataaagagacaggcagactcaacatc

SEQ ID NO: 10735 - DNA, 80 bp, synthetic construct
  misc_feature 1..80: note = Synthetic: >NC_001612.1-cand-5960-6039
  source 1..80: mol_type = other DNA
cccaataaagagacaggcagactcaacatcaatgggccgactcgcactaagctcgaacccagtgtgttccatgatgtctt

SEQ ID NO: 10736 - DNA, 80 bp, synthetic construct
  misc_feature 1..80: note = Synthetic: >NC_001612.1-cand-6070-6149
  source 1..80: mol_type = other DNA
tagcagagacccacgccttgaagtggactttgagcaggctttattctccaagtatgtagggaacacactgcatgagcctg

SEQ ID NO: 10737 - DNA, 80 bp, synthetic construct
  misc_feature 1..80: note = Synthetic: >NC_001612.1-cand-6150-6229
  source 1..80: mol_type = other DNA
acgagtacatcaaagaggcggccctccactatgcaaatcagttgaagcaactggacatcaacacttctcaaatgagtatg

SEQ ID NO: 10738 - DNA, 80 bp, synthetic construct
  misc_feature 1..80: note = Synthetic: >NC_001612.1-cand-6200-6279
  source 1..80: mol_type = other DNA
ctggacatcaacacttctcaaatgagtatggaggaagcttgctatggtactgagaaccttgaggccattgatctccacac

SEQ ID NO: 10739 - DNA, 80 bp, synthetic construct
  misc_feature 1..80: note = Synthetic: >NC_001612.1-cand-6280-6359
  source 1..80: mol_type = other DNA
cagcgcgggctacccctacagtgctctgggaataaagaagagagatattttagatcccactaccagagatgtgagtaaga

SEQ ID NO: 10740 - DNA, 80 bp, synthetic construct
  misc_feature 1..80: note = Synthetic: >NC_001612.1-cand-6360-6439
  source 1..80: mol_type = other DNA
tgaaattctatatggacaagtatggccttgaccttccttactctacctatgtcaaggatgagctccgctcgatagataag

SEQ ID NO: 10741 - DNA, 80 bp, synthetic construct
  misc_feature 1..80: note = Synthetic: >NC_001612.1-cand-6440-6519
  source 1..80: mol_type = other DNA
attaagaaaggaaaatcccgcctgatcgaggctagtagtctaaatgactcagtgtacctcagaatggcctttggtcactt

SEQ ID NO: 10742 - DNA, 80 bp, synthetic construct
  misc_feature 1..80: note = Synthetic: >NC_001612.1-cand-6520-6599
  source 1..80: mol_type = other DNA
gtacgagactttccacgcaaatccaggaaccataactggctcagctgtgggatgcaacccggatacattctggagtaaac

SEQ ID NO: 10743 - DNA, 80 bp, synthetic construct
  misc_feature 1..80: note = Synthetic: >NC_001672.1-cand-2010-2089
  source 1..80: mol_type = other DNA
gatctccagatgtgaacgtggccatgctgataacgccaaacccaacaattgaaaacaatggaggtggcttcatagagatg

SEQ ID NO: 10744 - DNA, 80 bp, synthetic construct
  misc_feature 1..80: note = Synthetic: >NC_001672.1-cand-2130-2209
  source 1..80: mol_type = other DNA
tgagtcatcaatggttccaaaaagggagcagcatcggaagggttttccaaaagaccaagaaaggcatagaaagactgaca

SEQ ID NO: 10745 - DNA, 80 bp, synthetic construct
  misc_feature 1..80: note = Synthetic: >NC_001672.1-cand-2170-2249
  source 1..80: mol_type = other DNA
ggttttccaaaagaccaagaaaggcatagaaagactgacagtgataggagagcacgcctgggacttcggttctgctggag

SEQ ID NO: 10746 - DNA, 80 bp, synthetic construct
  misc_feature 1..80: note = Synthetic: >NC_001672.1-cand-2230-2309
  source 1..80: mol_type = other DNA
ggacttcggttctgctggaggctttctgagttcaattgggaaggcggtacatacggtccttggtggcgctttcaacagca

SEQ ID NO: 10747 - DNA, 80 bp, synthetic construct
  misc_feature 1..80: note = Synthetic: >NC_001672.1-cand-2330-2409
  source 1..80: mol_type = other DNA
ctaccaaaacttttattaggagtggcattggcttggttgggcctgaacatgagaaaccctacaatgtccatgagctttct

SEQ ID NO: 10748 - DNA, 80 bp, synthetic construct
  misc_feature 1..80: note = Synthetic: >NC_001672.1-cand-2370-2449
  source 1..80: mol_type = other DNA
gcctgaacatgagaaaccctacaatgtccatgagctttctcttggctggaggtctggtcttggccatgacccttggagtg

SEQ ID NO: 10749 - DNA, 80 bp, synthetic construct
  misc_feature 1..80: note = Synthetic: >NC_001672.1-cand-2490-2569
  source 1..80: mol_type = other DNA
agctccgctgtggcgagggcctggtcgtgtggagagaggtctcagaatggtatgacaattatgcctactacccggagaca

SEQ ID NO: 10750 - DNA, 80 bp, synthetic construct
  misc_feature 1..80: note = Synthetic: >NC_001672.1-cand-2580-2659
  source 1..80: mol_type = other DNA
ttgcatcagccataaaggagacatttgaggagggaagctgtggtgtagtcccccagaacaggctcgagatggccatgtgg

SEQ ID NO: 10751 - DNA, 80 bp, synthetic construct
  misc_feature 1..80: note = Synthetic: >NC_001672.1-cand-2620-2699
  source 1..80: mol_type = other DNA
tggtgtagtcccccagaacaggctcgagatggccatgtggagaagctcggtcacagagctgaatttggctctggcggaag

SEQ ID NO: 10752 - DNA, 80 bp, synthetic construct
  misc_feature 1..80: note = Synthetic: >NC_001672.1-cand-2730-2809
  source 1..80: mol_type = other DNA
agtttgaccccactgactaccgaggtggtgtccctggtttactgaaaaaaggaaaggacataaaagtctcctggaaaagc

SEQ ID NO: 10753 - DNA, 80 bp, synthetic construct
  misc_feature 1..80: note = Synthetic: >NC_001672.1-cand-2820-2899
  source 1..80: mol_type = other DNA
caatgatctggagcattcctgaggccccccgtcgcttcatggtgggcacggaaggacaaagtgagtgtcccctagagaga

SEQ ID NO: 10754 - DNA, 80 bp, synthetic construct
  misc_feature 1..80: note = Synthetic: >NC_001672.1-cand-2850-2929
  source 1..80: mol_type = other DNA
gtcgcttcatggtgggcacggaaggacaaagtgagtgtcccctagagagacggaagacaggtgttttcacggtggcagaa

SEQ ID NO: 10755 - DNA, 80 bp, synthetic construct
  misc_feature 1..80: note = Synthetic: >NC_001672.1-cand-2970-3049
  source 1..80: mol_type = other DNA
gacaggaaccaacacatgagtgtgacacaggagtgatgggagctgcagtcaagaacggcatggcaatccacacagatcaa

SEQ ID NO: 10756 - DNA, 80 bp, synthetic construct
  misc_feature 1..80: note = Synthetic: >NC_001672.1-cand-3050-3129
  source 1..80: mol_type = other DNA
agtctctggatgagatcaatgaaaaatgacacaggcacttacatagttgaacttttggtcactgacctgaggaactgctc

SEQ ID NO: 10757 - DNA, 80 bp, synthetic construct
  misc_feature 1..80: note = Synthetic: >NC_001672.1-cand-3130-3209
  source 1..80: mol_type = other DNA
atggcctgctagccacactatcgataatgctgacgtggtggactcagagttattccttccggcgagcctggcaggaccca

SEQ ID NO: 10758 - DNA, 80 bp, synthetic construct
  misc_feature 1..80: note = Synthetic: >NC_001672.1-cand-3210-3289
  source 1..80: mol_type = other DNA
gatcctggtacaacaggatacctggctattcagaacaggtgaaagggccatggaagtacacgcctatccgagttatcaga

SEQ ID NO: 10759 - DNA, 80 bp, synthetic construct
  misc_feature 1..80: note = Synthetic: >NC_001672.1-cand-7070-7149
  source 1..80: mol_type = other DNA
atccaccaactgcagaccaaaatccaacaacttgtcaacagtgccgtggcatctggtgcacaggccatgagagaccttgg

SEQ ID NO: 10760 - DNA, 80 bp, synthetic construct
  misc_feature 1..80: note = Synthetic: >NC_001672.1-cand-7220-7299
  source 1..80: mol_type = other DNA
actcccacctcactgatggtgggcgttggcttggcggcactccatctggccattgtggtgtctggtctggaggctgaatt

SEQ ID NO: 10761 - DNA, 80 bp, synthetic construct
  misc_feature 1..80: note = Synthetic: >NC_001672.1-cand-7270-7349
  source 1..80: mol_type = other DNA
cattgtggtgtctggtctggaggctgaattaacacagagagctcataaggtctttttctctgcaatggtgcgcaacccca

SEQ ID NO: 10762 - DNA, 80 bp, synthetic construct
  misc_feature 1..80: note = Synthetic: >NC_001672.1-cand-7390-7469
  source 1..80: mol_type = other DNA
ggcaaaacctgctctatatgaaaggaaaatgagtctggtgttggccacagtgttgtgcctcatgtcggtggtcatgaacc

SEQ ID NO: 10763 - DNA, 80 bp, synthetic construct
  misc_feature 1..80: note = Synthetic: >NC_001672.1-cand-7430-7509
  source 1..80: mol_type = other DNA
ttggccacagtgttgtgcctcatgtcggtggtcatgaaccgaacggtggcctccataacagaggcttcagcagtgggact

SEQ ID NO: 10764 - DNA, 80 bp, synthetic construct
  misc_feature 1..80: note = Synthetic: >NC_001672.1-cand-7510-7589
  source 1..80: mol_type = other DNA
ggcagcagcgggacagctgcttagaccggaggctgacacgttgtggacgatgccggttgcttgtggcatgagtggtgtgg

SEQ ID NO: 10765 - DNA, 80 bp, synthetic construct
  misc_feature 1..80: note = Synthetic: >NC_001672.1-cand-7660-7739
  source 1..80: mol_type = other DNA
tggtggttctgagggagacacgcttggagatctctggaagcggaggctgaacaactgcacgagggaggaattctttgtgt

SEQ ID NO: 10766 - DNA, 80 bp, synthetic construct
  misc_feature 1..80: note = Synthetic: >NC_001672.1-cand-7670-7749
  source 1..80: mol_type = other DNA
gagggagacacgcttggagatctctggaagcggaggctgaacaactgcacgagggaggaattctttgtgtacaggcgcac

SEQ ID NO: 10767 - DNA, 80 bp, synthetic construct
  misc_feature 1..80: note = Synthetic: >NC_001672.1-cand-7750-7829
  source 1..80: mol_type = other DNA
cggcatcctggagacggaacgtgacaaggctagagagttgctcagaagaggagagaccaatgtgggattggctgtctctc

SEQ ID NO: 10768 - DNA, 80 bp, synthetic construct
  misc_feature 1..80: note = Synthetic: >NC_001672.1-cand-7830-7909
  source 1..80: mol_type = other DNA
ggggcacggcaaagcttgcctggcttgaggaacgcggatatgccaccctcaagggagaggtggtagatcttggatgtgga

SEQ ID NO: 10769 - DNA, 80 bp, synthetic construct
  misc_feature 1..80: note = Synthetic: >NC_001672.1-cand-7920-7999
  source 1..80: mol_type = other DNA
ggtcctattatgcggcatcccgaccggcagtcatgagtgtcagggcatataccattggtggaaaagggcacgaggctcca

SEQ ID NO: 10770 - DNA, 80 bp, synthetic construct
  misc_feature 1..80: note = Synthetic: >NC_001672.1-cand-7990-8069
  source 1..80: mol_type = other DNA
cgaggctccaaagatggtaacaagcctgggttggaacttgattaaattcagatcaggaatggacgtgttcagcatgcagc

SEQ ID NO: 10771 - DNA, 80 bp, synthetic construct
  misc_feature 1..80: note = Synthetic: >NC_001672.1-cand-8070-8149
  source 1..80: mol_type = other DNA
cacaccgggctgacactgtcatgtgtgacatcggagagagcagcccagatgccgctgtggagggtgagaggacaaggaaa

SEQ ID NO: 10772 - DNA, 80 bp, synthetic construct
  misc_feature 1..80: note = Synthetic: >NC_001672.1-cand-8150-8229
  source 1..80: mol_type = other DNA
gtgatactgctcatggagcaatggaaaaacaggaaccccacggctgcctgtgtgttcaaggtgctggccccatatcgccc

SEQ ID NO: 10773 - DNA, 80 bp, synthetic construct
  misc_feature 1..80: note = Synthetic: >NC_001672.1-cand-8190-8269
  source 1..80: mol_type = other DNA
cggctgcctgtgtgttcaaggtgctggccccatatcgcccagaagtgatagaggcactgcacagattccaactgcaatgg

SEQ ID NO: 10774 - DNA, 80 bp, synthetic construct
  misc_feature 1..80: note = Synthetic: >NC_001672.1-cand-8310-8389
  source 1..80: mol_type = other DNA
cccatgagatgtattactcaacagccgtcactgggaacatagtgaactccgtcaatgtacagtcgaggaaacttttggct

SEQ ID NO: 10775 - DNA, 80 bp, synthetic construct
  misc_feature 1..80: note = Synthetic: >NC_001672.1-cand-9660-9739
  source 1..80: mol_type = other DNA
tggtgaggcccttggatgacagatttggcaaagcactttactttctgaatgacatggccaagaccaggaaggacattggg

SEQ ID NO: 10776 - DNA, 80 bp, synthetic construct
  misc_feature 1..80: note = Synthetic: >NC_001672.1-cand-9780-9859
  source 1..80: mol_type = other DNA
tacccttttgttcacaccatttccacgagctagtgatgaaggatggacgcaccctggtggtgccgtgccgagaccaagat

SEQ ID NO: 10777 - DNA, 80 bp, synthetic construct
  misc_feature 1..80: note = Synthetic: >NC_001672.1-cand-9890-9969
  source 1..80: mol_type = other DNA
gggtgcggctggagtgtccgcgagacggcctgcctttcaaaagcctacgggcagatgtggctgctgagctacttccaccg

SEQ ID NO: 10778 - DNA, 80 bp, synthetic construct
  misc_feature 1..80: note = Synthetic: >NC_001672.1-cand-9940-10019
  source 1..80: mol_type = other DNA
gcagatgtggctgctgagctacttccaccgacgagacctgaggacgctcgggcttgccattaactcagcagtgcctgccg

SEQ ID NO: 10779 - DNA, 80 bp, synthetic construct
  misc_feature 1..80: note = Synthetic: >NC_001672.1-cand-9980-10059
  source 1..80: mol_type = other DNA
aggacgctcgggcttgccattaactcagcagtgcctgccgattgggttcctaccggccgcacgacgtggagcattcatgc

SEQ ID NO: 10780 - DNA, 80 bp, synthetic construct
  misc_feature 1..80: note = Synthetic: >NC_001672.1-cand-10100-10179
  source 1..80: mol_type = other DNA
tggaaccgggtgtggattctggacaaccctttcatgcagaacaaggaaagggtcatggagtggagggatgttccgtacct

SEQ ID NO: 10781 - DNA, 80 bp, synthetic construct
  misc_feature 1..80: note = Synthetic: >NC_001672.1-cand-10170-10249
  source 1..80: mol_type = other DNA
ttccgtacctccctaaagctcaggacatgttatgttcctcccttgttgggaggagagaaagagcagaatgggccaagaac

SEQ ID NO: 10782 - DNA, 80 bp, synthetic construct
  misc_feature 1..80: note = Synthetic: >NC_001672.1-cand-10260-10339
  source 1..80: mol_type = other DNA
cggtggaaaaggtgaggaagatgataggtcctgaaaagttcaaggactatctctcctgtatggaccgccatgacctgcac

SEQ ID NO: 10783 - DNA, 80 bp, synthetic construct
  misc_feature 1..80: note = Synthetic: >NC_001672.1-cand-10340-10419
  source 1..80: mol_type = other DNA
tgggagctcagactggagagctcaataatctaaacccagactgtgacagagcaaaacccggaaggctcgtaaaagattgt

SEQ ID NO: 10784 - DNA, 80 bp, synthetic construct
  misc_feature 1..80: note = Synthetic: >NC_001672.1-cand-10410-10489
  source 1..80: mol_type = other DNA
aaaagattgtccggaaccaaaagaaaagcaagcaactcacagagatagagctcggactggagagctctttaaacaaaaaa

SEQ ID NO: 10785 - DNA, 80 bp, synthetic construct
  misc_feature 1..80: note = Synthetic: >NC_001672.1-cand-10570-10649
  source 1..80: mol_type = other DNA
cagtccagacgaaacaaaacatgacaaagcaaagaggctgagctaaaagttcccactacgggactgcttcatagcggttt

SEQ ID NO: 10786 - DNA, 80 bp, synthetic construct
  misc_feature 1..80: note = Synthetic: >NC_001672.1-cand-10650-10729
  source 1..80: mol_type = other DNA
gtggggggaggctaggaggcgaagccacagatcatggaatgatgcggcagcgcgcgagagcgacggggaagtggtcgcac

SEQ ID NO: 10787 - DNA, 80 bp, synthetic construct
  misc_feature 1..80: note = Synthetic: >NC_001672.1-cand-10800-10879
  source 1..80: mol_type = other DNA
gggtgaggaatgcccccagagtgcattacggcagcacgccagtgagagtggcgacgggaaaatggtcgatcccgacgtag

SEQ ID NO: 10788 - DNA, 80 bp, synthetic construct
  misc_feature 1..80: note = Synthetic: >NC_001672.1-cand-10810-10889
  source 1..80: mol_type = other DNA
tgcccccagagtgcattacggcagcacgccagtgagagtggcgacgggaaaatggtcgatcccgacgtagggcactctga

SEQ ID NO: 10789 - DNA, 80 bp, synthetic construct
  misc_feature 1..80: note = Synthetic: >NC_001672.1-cand-10860-10939
  source 1..80: mol_type = other DNA
aatggtcgatcccgacgtagggcactctgaaaaattttgtgagaccccctgcatcatgataaggccgaacatggtgcatg

SEQ ID NO: 10790 - DNA, 80 bp, synthetic construct
  misc_feature 1..80: note = Synthetic: >NC_001672.1-cand-10960-11039
  source 1..80: mol_type = other DNA
cacgcttccgggaggagggaagagagaaattggcagctctcttcaggatttttcctcctcctatacaaaattccccctcg

SEQ ID NO: 10791 - DNA, 80 bp, synthetic construct
  misc_feature 1..80: note = Synthetic: >NC_001906.3-cand-13270-13349
  source 1..80: mol_type = other DNA
ctcaagagaacaacaggtaggcttctgaataatgaagttccttgtcgaatgaacattatgtcggctttaattgacaaaaa

SEQ ID NO: 10792 - DNA, 80 bp, synthetic construct
  misc_feature 1..80: note = Synthetic: >NC_001906.3-cand-13350-13429
  source 1..80: mol_type = other DNA
tcagtcagaccaaaagaagcataatattctcccaaacacacgaaatcgccacaagtgtgataacactagccaaacattcc

SEQ ID NO: 10793 - DNA, 80 bp, synthetic construct
  misc_feature 1..80: note = Synthetic: >NC_001906.3-cand-13430-13509
  source 1..80: mol_type = other DNA
ttgactatcatatggaattcagtccctacaagtcagacagaatggataggacagagacatctgatttctcgaaatatgat

SEQ ID NO: 10794 - DNA, 80 bp, synthetic construct
  misc_feature 1..80: note = Synthetic: >NC_001906.3-cand-13510-13589
  source 1..80: mol_type = other DNA
gatggaacaggaacaaaatttgacacggtgagtgctttcctaactactgacttgaagaaattctgtctcaattggcgata

SEQ ID NO: 10795 - DNA, 80 bp, synthetic construct
  misc_feature 1..80: note = Synthetic: >NC_001906.3-cand-13590-13669
  source 1..80: mol_type = other DNA
tgaatccatggctatttttgcagaaagacttgacgaaatttatggcttacccggtttctttaactggatgcacaaacgat

SEQ ID NO: 10796 - DNA, 80 bp, synthetic construct
  misc_feature 1..80: note = Synthetic: >NC_001906.3-cand-13670-13749
  source 1..80: mol_type = other DNA
tagagaagtcagtcatttatgtcgcagatcctaattgcccaccagacatcgggaaacatataaaccttgatgatactcct

SEQ ID NO: 10797 - DNA, 80 bp, synthetic construct
  misc_feature 1..80: note = Synthetic: >NC_001906.3-cand-13750-13829
  source 1..80: mol_type = other DNA
gaagatgacatatttatccattcaccaaaaggcgggattgaaggttatagtcagaagacttggacgatcgcaacaattcc

SEQ ID NO: 10798 - DNA, 80 bp, synthetic construct
  misc_feature 1..80: note = Synthetic: >NC_001906.3-cand-13830-13909
  source 1..80: mol_type = other DNA
ctttctgtttctcagtgcctacgaaacaaatacaaggattgcagctatagttcagggagacaatgagtcaattgccataa

SEQ ID NO: 10799 - DNA, 80 bp, synthetic construct
  misc_feature 1..80: note = Synthetic: >NC_001906.3-cand-13910-13989
  source 1..80: mol_type = other DNA
ctcagaaggtccaccctaatttaccttacaaagtcaagaaagaaatttgtgcaaggcaagctcaattatattttgacagg

SEQ ID NO: 10800 - DNA, 80 bp, synthetic construct
  misc_feature 1..80: note = Synthetic: >NC_001906.3-cand-13990-14069
  source 1..80: mol_type = other DNA
ctcagaatgaatcttagggccttaggactcaacttaaaagcaacagagaccattataagtacacacttatttgtctactc

SEQ ID NO: 10801 - DNA, 80 bp, synthetic construct
  misc_feature 1..80: note = Synthetic: >NC_001906.3-cand-14070-14149
  source 1..80: mol_type = other DNA
taagaaaatacattatgatggtgcagtattatcacaagccctcaaatcaatgtctaggtgttgtttttggtcagagacat

SEQ ID NO: 10802 - DNA, 80 bp, synthetic construct
  misc_feature 1..80: note = Synthetic: >NC_001906.3-cand-14150-14229
  source 1..80: mol_type = other DNA
tggtggacgagacaagatctgcttgcagcaatattagtactaccatagctaaggcgattgagaatggattatcaagaaat

SEQ ID NO: 10803 - DNA, 80 bp, synthetic construct
  misc_feature 1..80: note = Synthetic: >NC_001906.3-cand-14210-14289
  source 1..80: mol_type = other DNA
agaatggattatcaagaaatgtgggttactgcatcaacgtcttgaaggtcatacagcaactgcttatttctactgagttt

SEQ ID NO: 10804 - DNA, 80 bp, synthetic construct
  misc_feature 1..80: note = Synthetic: >NC_001906.3-cand-14290-14369
  source 1..80: mol_type = other DNA
agcatcaacgagacattgactgctgatgtaacatctccaatatccaataatctcgattggctggtaactgcatcccgaat

SEQ ID NO: 10805 - DNA, 80 bp, synthetic construct
  misc_feature 1..80: note = Synthetic: >NC_001906.3-cand-14370-14449
  source 1..80: mol_type = other DNA
tcccgcaccaattggaggtttcaattacttgaatttatcaagaatatttgtaagaaatataggagaccctgtgactgcat

SEQ ID NO: 10806 - DNA, 80 bp, synthetic construct
  misc_feature 1..80: note = Synthetic: >NC_001906.3-cand-14450-14529
  source 1..80: mol_type = other DNA
cactagccgatctaaagagaatgatagaacatgacttgatgacagataaagttctccaaaaagtgatgaatcaagaacca

SEQ ID NO: 10807 - DNA, 80 bp, synthetic construct
  misc_feature 1..80: note = Synthetic: >NC_001918.1-cand-170-249
  source 1..80: mol_type = other DNA
aacagctaggtccacatcctcccttcccctgggagggcccccgccctcccacatcctccccccagcctgacgtatcacag

SEQ ID NO: 10808 - DNA, 80 bp, synthetic construct
  misc_feature 1..80: note = Synthetic: >NC_001918.1-cand-250-329
  source 1..80: mol_type = other DNA
gctgtgtgaagcccccgcgaaagctgctcacgtggcaattgtgggtccccccttcatcaagacaccaggtctttcctcct

SEQ ID NO: 10809 - DNA, 80 bp, synthetic construct
  misc_feature 1..80: note = Synthetic: >NC_001918.1-cand-330-409
  source 1..80: mol_type = other DNA
taaggctagccccggcgtgtgaattcacgttgggcaactagtggtgtcactgtgcgctcccaatctcggccgcggagtgc

SEQ ID NO: 10810 - DNA, 80 bp, synthetic construct
  misc_feature 1..80: note = Synthetic: >NC_001918.1-cand-410-489
  source 1..80: mol_type = other DNA
tgttccccaagccaaacccctggcccttcactatgtgcctggcaagcatatctgagaaggtgttccgctgtggctgccaa

SEQ ID NO: 10811 - DNA, 80 bp, synthetic construct
  misc_feature 1..80: note = Synthetic: >NC_001918.1-cand-490-569
  source 1..80: mol_type = other DNA
cctggtaacaggtgccccagtgtgcgtaaccttcttccgtctccggacggtagtgattggttaagatttggtgtaaggtt

SEQ ID NO: 10812 - DNA, 80 bp, synthetic construct
  misc_feature 1..80: note = Synthetic: >NC_001918.1-cand-570-649
  source 1..80: mol_type = other DNA
catgtgccaacgccctgtgcgggatgaaacctctactgccctaggaatgccaggcaggtaccccacctccgggtgggatc

SEQ ID NO: 10813 - DNA, 80 bp, synthetic construct
  misc_feature 1..80: note = Synthetic: >NC_001918.1-cand-650-729
  source 1..80: mol_type = other DNA
tgagcctgggctaattgtctacgggtagtttcatttccaatccttttatgtcggagtcatggctgcaacacgggtttcac

SEQ ID NO: 10814 - DNA, 80 bp, synthetic construct
  misc_feature 1..80: note = Synthetic: >NC_001918.1-cand-730-809
  source 1..80: mol_type = other DNA
gatctgtgctcgctgctgtggctcactctgccgctcaccgcacctaccacactgtccttgactgctatgataggctttac

SEQ ID NO: 10815 - DNA, 80 bp, synthetic construct
  misc_feature 1..80: note = Synthetic: >NC_001918.1-cand-810-889
  source 1..80: mol_type = other DNA
ctcaacaccaacccccatctctcttatccccttcccaaaaactcttccttcccttgcccgttctgtcagtacgacgagca

SEQ ID NO: 10816 - DNA, 80 bp, synthetic construct
  misc_feature 1..80: note = Synthetic: >NC_001918.1-cand-890-969
  source 1..80: mol_type = other DNA
gaatgaggtcctctccccagagtctctctgtggcgagggagctgaaccctgctggaagtgctcacaggacaaaccccgcc

SEQ ID NO: 10817 - DNA, 80 bp, synthetic construct
  misc_feature 1..80: note = Synthetic: >NC_001918.1-cand-970-1049
  source 1..80: mol_type = other DNA
gcaagtacaacaccacccctcctgaagactggctctatgattctgatgtccaatcctggttctatcctgaaacatactac

SEQ ID NO: 10818 - DNA, 80 bp, synthetic construct
  misc_feature 1..80: note = Synthetic: >NC_001918.1-cand-1040-1119
  source 1..80: mol_type = other DNA
aacatactactctgaccttcagcaaaagttctttgacaaattggctctcctctctcttccaggtgcctaccaagcaaaga

SEQ ID NO: 10819 - DNA, 80 bp, synthetic construct
  misc_feature 1..80: note = Synthetic: >NC_001918.1-cand-1120-1199
  source 1..80: mol_type = other DNA
ccccggaggagcgtgccctcgcgggcgcgctcacccaactcctcaacttcccctccaccccccctctcacactccctacc

SEQ ID NO: 10820 - DNA, 80 bp, synthetic construct
  misc_feature 1..80: note = Synthetic: >NC_001918.1-cand-1200-1279
  source 1..80: mol_type = other DNA
actaacctccaacggcaaggcaactcggtcaccaacatctacggtaacggcaacaacgtcaacactgacgttggcgccaa

SEQ ID NO: 10821 - DNA, 80 bp, synthetic construct
  misc_feature 1..80: note = Synthetic: >NC_001918.1-cand-1280-1359
  source 1..80: mol_type = other DNA
cggttgggcccccacggtctcaactggcctaggtgatggtcccgtctcatgcactccgccgactccctccccgggcgata

SEQ ID NO: 10822 - DNA, 80 bp, synthetic construct
  misc_feature 1..80: note = Synthetic: >NC_001918.1-cand-1370-1449
  source 1..80: mol_type = other DNA
tcctccgagaaaacccacaacgtttccggctcctccaacaaagtctggatcccgcttttccaagtggtgggaaccagcag

SEQ ID NO: 10823 - DNA, 80 bp, synthetic construct
  misc_feature 1..80: note = Synthetic: >NC_002031.1-cand-8380-8459
  source 1..80: mol_type = other DNA
aagtgaccctggaggctgacgtcatcctcccaattgggacacgcagtgttgagacagacaagggacccctggacaaagag

SEQ ID NO: 10824 - DNA, 80 bp, synthetic construct
  misc_feature 1..80: note = Synthetic: >NC_002031.1-cand-8460-8539
  source 1..80: mol_type = other DNA
gccatagaagaaagggttgagaggataaaatctgagtacatgacctcttggttttatgacaatgacaacccctacaggac

SEQ ID NO: 10825 - DNA, 80 bp, synthetic construct
  misc_feature 1..80: note = Synthetic: >NC_002031.1-cand-8540-8619
  source 1..80: mol_type = other DNA
ctggcactactgtggctcctatgtcacaaaaacctcaggaagtgcggcgagcatggtaaatggtgttattaaaattctga

SEQ ID NO: 10826 - DNA, 80 bp, synthetic construct
  misc_feature 1..80: note = Synthetic: >NC_002031.1-cand-8620-8699
  source 1..80: mol_type = other DNA
catatccatgggacaggatagaggaggtcacaagaatggcaatgactgacacaaccccttttggacagcaaagagtgttt

SEQ ID NO: 10827 - DNA, 80 bp, synthetic construct
  misc_feature 1..80: note = Synthetic: >NC_002031.1-cand-8700-8779
  source 1..80: mol_type = other DNA
aaagaaaaagttgacaccagagcaaaggatccaccagcgggaactaggaagatcatgaaagttgtcaacaggtggctgtt

SEQ ID NO: 10828 - DNA, 80 bp, synthetic construct
  misc_feature 1..80: note = Synthetic: >NC_002031.1-cand-8790-8869
  source 1..80: mol_type = other DNA
gccagagaaaagaaccccagactgtgcacaaaggaagaatttattgcaaaagtccgaagtcatgcagccattggagctta

SEQ ID NO: 10829 - DNA, 80 bp, synthetic construct
  misc_feature 1..80: note = Synthetic: >NC_002031.1-cand-8870-8949
  source 1..80: mol_type = other DNA
cctggaagaacaagaacagtggaagactgccaatgaggctgtccaagacccaaagttctgggaactggtggatgaagaaa

SEQ ID NO: 10830 - DNA, 80 bp, synthetic construct
  misc_feature 1..80: note = Synthetic: >NC_002031.1-cand-8920-8999
  source 1..80: mol_type = other DNA
caaagttctgggaactggtggatgaagaaaggaagctgcaccaacaaggcaggtgtcggacttgtgtgtacaacatgatg

SEQ ID NO: 10831 - DNA, 80 bp, synthetic construct
  misc_feature 1..80: note = Synthetic: >NC_002031.1-cand-9030-9109
  source 1..80: mol_type = other DNA
gggaaagcaaagggaagccgtgccatatggtatatgtggctgggagcgcggtatcttgagtttgaggccctgggattcct

SEQ ID NO: 10832 - DNA, 80 bp, synthetic construct
  misc_feature 1..80: note = Synthetic: >NC_002031.1-cand-9110-9189
  source 1..80: mol_type = other DNA
gaatgaggaccattgggcttccagggaaaactcaggaggaggagtggaaggcattggcttacaatacctaggatatgtga

SEQ ID NO: 10833 - DNA, 80 bp, synthetic construct
  misc_feature 1..80: note = Synthetic: >NC_002031.1-cand-9190-9269
  source 1..80: mol_type = other DNA
tcagagacctggctgcaatggatggtggtggattctacgcggatgacaccgctggatgggacacgcgcatcacagaggca

SEQ ID NO: 10834 - DNA, 80 bp, synthetic construct
  misc_feature 1..80: note = Synthetic: >NC_002031.1-cand-9270-9349
  source 1..80: mol_type = other DNA
gaccttgatgatgaacaggagatcttgaactacatgagcccacatcacaaaaaactggcacaagcagtgatggaaatgac

SEQ ID NO: 10835 - DNA, 80 bp, synthetic construct
  misc_feature 1..80: note = Synthetic: >NC_002031.1-cand-9350-9429
  source 1..80: mol_type = other DNA
atacaagaacaaagtggtgaaagtgttgagaccagccccaggagggaaagcctacatggatgtcataagtcgacgagacc

SEQ ID NO: 10836 - DNA, 80 bp, synthetic construct
  misc_feature 1..80: note = Synthetic: >NC_002031.1-cand-9430-9509
  source 1..80: mol_type = other DNA
agagaggatccgggcaggtagtgacttatgctctgaacaccatcaccaacttgaaagtccaattgatcagaatggcagaa

SEQ ID NO: 10837 - DNA, 80 bp, synthetic construct
  misc_feature 1..80: note = Synthetic: >NC_002031.1-cand-9490-9569
  source 1..80: mol_type = other DNA
aattgatcagaatggcagaagcagagatggtgatacatcaccaacatgttcaagattgtgatgaatcagttctgaccagg

SEQ ID NO: 10838 - DNA, 80 bp, synthetic construct
  misc_feature 1..80: note = Synthetic: >NC_002031.1-cand-9570-9649
  source 1..80: mol_type = other DNA
ctggaggcatggctcactgagcacggatgtgacagactgaagaggatggcggtgagtggagacgactgtgtggtccggcc

SEQ ID NO: 10839 - DNA, 80 bp, synthetic construct
  misc_feature 1..80: note = Synthetic: >NC_003310.1-cand-22230-22309
  source 1..80: mol_type = other DNA
atctatctagcaatggaccgtcggatagcgtcattctcatgttcttaatcaatgtacatacatcgtcatcatctaccaat

SEQ ID NO: 10840 - DNA, 80 bp, synthetic construct
  misc_feature 1..80: note = Synthetic: >NC_003310.1-cand-22310-22389
  source 1..80: mol_type = other DNA
tcatcaaacaatataagctttttaaaatcatcattataataggatggatcgccgtcatttctccaaagaatatatctaat

SEQ ID NO: 10841 - DNA, 80 bp, synthetic construct
  misc_feature 1..80: note = Synthetic: >NC_003310.1-cand-22470-22549
  source 1..80: mol_type = other DNA
atgtttaatacttattcatattttagttttaggatcgagaatcaatacaaaaattaatacatcaattttggaaatactta

SEQ ID NO: 10842 - DNA, 80 bp, synthetic construct
  misc_feature 1..80: note = Synthetic: >NC_003310.1-cand-22700-22779
  source 1..80: mol_type = other DNA
taccgggttctttttattcttttaaacagatcgattgtgtgatgttgattaggtcttttacgaatttgatacagaatagc

SEQ ID NO: 10843 - DNA, 80 bp, synthetic construct
  misc_feature 1..80: note = Synthetic: >NC_003310.1-cand-22860-22939
  source 1..80: mol_type = other DNA
ttagttcgtccttgttcatcattaggaatctatccaatatggcaattatattagaactataactgcgttgtatgcgcatg

SEQ ID NO: 10844 - DNA, 80 bp, synthetic construct
  misc_feature 1..80: note = Synthetic: >NC_003310.1-cand-22920-22999
  source 1..80: mol_type = other DNA
aactgcgttgtatgcgcatgttgatgtgtctgtttatacaatcaattatactaggatccataccactacattcgggtaaa

SEQ ID NO: 10845 - DNA, 80 bp, synthetic construct
  misc_feature 1..80: note = Synthetic: >NC_003310.1-cand-23000-23079
  source 1..80: mol_type = other DNA
attgtagcatcatataccatttctagtactttaggttcattgttatccattgcagaggacgtcatgatcgaatccaaaaa

SEQ ID NO: 10846 - DNA, 80 bp, synthetic construct
  misc_feature 1..80: note = Synthetic: >NC_003310.1-cand-23240-23319
  source 1..80: mol_type = other DNA
aataataatagatttatctagtttatctttttctatctctttcatagttatatacatggtctcagaagtcggattatgta

SEQ ID NO: 10847 - DNA, 80 bp, synthetic construct
  misc_feature 1..80: note = Synthetic: >NC_003310.1-cand-23320-23399
  source 1..80: mol_type = other DNA
acatcagcttcgataaaatgactgggttatttagtcttacacattcgctaatacatgtatgaccgttaactatagagtct

SEQ ID NO: 10848 - DNA, 80 bp, synthetic construct
  misc_feature 1..80: note = Synthetic: >NC_003310.1-cand-23570-23649
  source 1..80: mol_type = other DNA
tttatcgttaataatttctagaacatcatctctatcataaaagatacaaatattaactgtttgatcagtaataacattgc

SEQ ID NO: 10849 - DNA, 80 bp, synthetic construct
  misc_feature 1..80: note = Synthetic: >NC_003310.1-cand-23650-23729
  source 1..80: mol_type = other DNA
tagtcgatatcaatttgttaataagatgcgctgggctcaatgtcttaataagaagtgtaagaggactatctccgaatttg

SEQ ID NO: 10850 - DNA, 80 bp, synthetic construct
  misc_feature 1..80: note = Synthetic: >NC_003310.1-cand-23810-23889
  source 1..80: mol_type = other DNA
gagaggcgtatttccatcatgatctggttttgagggactaattcctagtttcatcatccatgagattgtagaagcttttg

SEQ ID NO: 10851 - DNA, 80 bp, synthetic construct
  misc_feature 1..80: note = Synthetic: >NC_003310.1-cand-24130-24209
  source 1..80: mol_type = other DNA
tattatgtttatcacatgcgtttggatctgcgccgtgcaccagcagcatcgcgactattctattattattaattttagaa

SEQ ID NO: 10852 - DNA, 80 bp, synthetic construct
  misc_feature 1..80: note = Synthetic: >NC_003310.1-cand-24210-24289
  source 1..80: mol_type = other DNA
gctatatgcaatggataatttccatcatcatccgtctcatttggagagtatcctctatgaagaagttcttctataaatcg

SEQ ID NO: 10853 - DNA, 80 bp, synthetic construct
  misc_feature 1..80: note = Synthetic: >NC_003310.1-cand-24290-24369
  source 1..80: mol_type = other DNA
ttcatctagtcctttaatgccacaatacgcatgtagaatgtgataatttccagagggttcgataacttgtagcatattcc

SEQ ID NO: 10854 - DNA, 80 bp, synthetic construct
  misc_feature 1..80: note = Synthetic: >NC_003310.1-cand-24450-24529
  source 1..80: mol_type = other DNA
ttatagtataaaaattaatatttctatttctatttctatatatttgcaacaatttactctctataacaaatatcataact

SEQ ID NO: 10855 - DNA, 80 bp, synthetic construct
  misc_feature 1..80: note = Synthetic: >NC_003310.1-cand-101170-101249
  source 1..80: mol_type = other DNA
accgtgataaaaaataaaaacaagattccttttctactattgtctggatctcccattactaacacacctaatacgctggg

SEQ ID NO: 10856 - DNA, 80 bp, synthetic construct
  misc_feature 1..80: note = Synthetic: >NC_003310.1-cand-101330-101409
  source 1..80: mol_type = other DNA
ttcttaacgaacgcggagtgaatgtactcaaggatttgcttaaaggaagaatatcatattacgaaatgccggacaaagat

SEQ ID NO: 10857 - DNA, 80 bp, synthetic construct
  misc_feature 1..80: note = Synthetic: >NC_003310.1-cand-101650-101729
  source 1..80: mol_type = other DNA
aataatggagtgttatacggtgaagaattggtaacgttaaacattagttccaaatttaagtactttatcaatcggataca

SEQ ID NO: 10858 - DNA, 80 bp, synthetic construct
  misc_feature 1..80: note = Synthetic: >NC_003310.1-cand-101730-101809
  source 1..80: mol_type = other DNA
gacactcaagggaaaacactttatatacttctctaattctacatatggtggattggtaattaaatatatcatgctcagta

SEQ ID NO: 10859 - DNA, 80 bp, synthetic construct
  misc_feature 1..80: note = Synthetic: >NC_003310.1-cand-102130-102209
  source 1..80: mol_type = other DNA
gtatatcttttagcagccgtatattcagatttcaatgacgaagtgacgtcattaaacgattatacacaggatgaattgat

SEQ ID NO: 10860 - DNA, 80 bp, synthetic construct
  misc_feature 1..80: note = Synthetic: >NC_003310.1-cand-102510-102589
  source 1..80: mol_type = other DNA
atttgataaatctcttttatacaaatacgaaaacgatattattacagtaccgtttagactttcctacgaaccatttgttt

SEQ ID NO: 10861 - DNA, 80 bp, synthetic construct
  misc_feature 1..80: note = Synthetic: >NC_003310.1-cand-102690-102769
  source 1..80: mol_type = other DNA
cttccagttacattggaaccacatgagttgacattagacataaaaactaatattaggaatgccgtatataaggcgtatct

SEQ ID NO: 10862 - DNA, 80 bp, synthetic construct
  misc_feature 1..80: note = Synthetic: >NC_003310.1-cand-102820-102899
  source 1..80: mol_type = other DNA
acgtggaattacctctcggcgaaatagttaataattctgtagttataaacgttccgtgtgtaataacctacgcatattat

SEQ ID NO: 10863 - DNA, 80 bp, synthetic construct
  misc_feature 1..80: note = Synthetic: >NC_003310.1-cand-103250-103329
  source 1..80: mol_type = other DNA
ctcaaatcagacaaccatttcataaaatagttctctcgcactggtgaggtggttgcagctcgtataatctccccagaata

SEQ ID NO: 10864 - DNA, 80 bp, synthetic construct
  misc_feature 1..80: note = Synthetic: >NC_003310.1-cand-103330-103409
  source 1..80: mol_type = other DNA
atatacttgcgtgtcgtcgttcaatttatacggatttctataattctctgttatataatgaggtttaccctcatgattag

SEQ ID NO: 10865 - DNA, 80 bp, synthetic construct
  misc_feature 1..80: note = Synthetic: >NC_003310.1-cand-103410-103489
  source 1..80: mol_type = other DNA
acgacgacaatagtgttctgaatttagatagttgatcagaatgaatgtttattggtgttggaaaaattatccatgctgcg

SEQ ID NO: 10866 - DNA, 80 bp, synthetic construct
  misc_feature 1..80: note = Synthetic: >NC_003310.1-cand-103570-103649
  source 1..80: mol_type = other DNA
tgaatcaaatggcgcagacatattagcggatctaatggaatccaattgattgactatcttttgaaaatatacatttttat

SEQ ID NO: 10867 - DNA, 80 bp, synthetic construct
  misc_feature 1..80: note = Synthetic: >NC_003310.1-cand-103650-103729
  source 1..80: mol_type = other DNA
gatctgatacttgtaagaatatagcaataatgataattccatcatcgtgtttttttgcctcttcataagaactatatttt

SEQ ID NO: 10868 - DNA, 80 bp, synthetic construct
  misc_feature 1..80: note = Synthetic: >NC_003310.1-cand-103730-103809
  source 1..80: mol_type = other DNA
ttcttattccaatgaaccagattaatctctccagagtatttgtatacatctatcaagtgattggatccataatcgtcttc

SEQ ID NO: 10869 - DNA, 80 bp, synthetic construct
  misc_feature 1..80: note = Synthetic: >NC_003310.1-cand-103770-103849
  source 1..80: mol_type = other DNA
tgtatacatctatcaagtgattggatccataatcgtcttccttcccccaatatatatgtattgttgataacacatattca

SEQ ID NO: 10870 - DNA, 80 bp, synthetic construct
  misc_feature 1..80: note = Synthetic: >NC_003310.1-cand-103970-104049
  source 1..80: mol_type = other DNA
gtgtcagaaattgcttttttagtttctatattaataggagatagttgttgaggcatagtaaaaatgaaatgataactgtc

SEQ ID NO: 10871 - DNA, 80 bp, synthetic construct
  misc_feature 1..80: note = Synthetic: >NC_003310.1-cand-106470-106549
  source 1..80: mol_type = other DNA
gccatacgtctcagaattctaaatgatgatataccagtttttatttctgcgagtttagccttttgataaatctcttcttg

SEQ ID NO: 10872 - DNA, 80 bp, synthetic construct
  misc_feature 1..80: note = Synthetic: >NC_003310.1-cand-106550-106629
  source 1..80: mol_type = other DNA
cttttttgacatattaacgtatcgcattaatactgttttcttagcgaatgatgcagacccttccacatcatcaaaaatag

SEQ ID NO: 10873 - DNA, 80 bp, synthetic construct
  misc_feature 1..80: note = Synthetic: >NC_003310.1-cand-106710-106789
  source 1..80: mol_type = other DNA
tcaaatagcgattggtgttgtaaggatcctggtcgcagtaagttaaccaacatggtgaattcttgcacactattaacgat

SEQ ID NO: 10874 - DNA, 80 bp, synthetic construct
  misc_feature 1..80: note = Synthetic: >NC_003310.1-cand-106790-106869
  source 1..80: mol_type = other DNA
aggtgtagccgataaacaaatcatcttatggttttttaacgcagtggtcttagataaaaaattatatactgaccgagtag

SEQ ID NO: 10875 - DNA, 80 bp, synthetic construct
  misc_feature 1..80: note = Synthetic: >NC_003310.1-cand-107030-107109
  source 1..80: mol_type = other DNA
cgttatctctggagcgtatctgagtatagtgtttatccaaggatcttctatcaaagccttttttaccaataagataattg

SEQ ID NO: 10876 - DNA, 80 bp, synthetic construct
  misc_feature 1..80: note = Synthetic: >NC_003310.1-cand-107280-107359
  source 1..80: mol_type = other DNA
atttcaacgggcatattagtagttctgcgtaaggcataatcgatataggccgcgtgtgatttactcatttatgagtgata

SEQ ID NO: 10877 - DNA, 80 bp, synthetic construct
  misc_feature 1..80: note = Synthetic: >NC_003310.1-cand-107380-107459
  source 1..80: mol_type = other DNA
aatcacagcagtagtttaactagtcttctctgatgtttgttttcgatactttttgaatcagaagtcatactagaataaag

SEQ ID NO: 10878 - DNA, 80 bp, synthetic construct
  misc_feature 1..80: note = Synthetic: >NC_003310.1-cand-107540-107619
  source 1..80: mol_type = other DNA
gatcgtttaaaatactaaattgaacagtgttcacatccttccaagacgaagacttagtgacggacttaacatgagacata

SEQ ID NO: 10879 - DNA, 80 bp, synthetic construct
  misc_feature 1..80: note = Synthetic: >NC_003310.1-cand-107620-107699
  source 1..80: mol_type = other DNA
aataaatccaaattttttttataaacatcactagccaccataatggcgctatctttcaaccaactatcgcttacgcattt

SEQ ID NO: 10880 - DNA, 80 bp, synthetic construct
  misc_feature 1..80: note = Synthetic: >NC_003310.1-cand-107700-107779
  source 1..80: mol_type = other DNA
taacagtctaacatttttaaagagactacaatatattctcatagtatcgattacacctctaccgaatagagtgggaagtt

SEQ ID NO: 10881 - DNA, 80 bp, synthetic construct
  misc_feature 1..80: note = Synthetic: >NC_003310.1-cand-107860-107939
  source 1..80: mol_type = other DNA
tatagattgttttcagtgagatgattattagatttaatagcatctcgttcacgtttgaacagtttattgcgtgcgctgag

SEQ ID NO: 10882 - DNA, 80 bp, synthetic construct
  misc_feature 1..80: note = Synthetic: >NC_003310.1-cand-108100-108179
  source 1..80: mol_type = other DNA
ctagaaatctgaagaaagtaattagctccatattccagactaggtaatgggcttttacctaaagacaagttaagttctgg

SEQ ID NO: 10883 - DNA, 80 bp, synthetic construct
  misc_feature 1..80: note = Synthetic: >NC_003310.1-cand-108780-108859
  source 1..80: mol_type = other DNA
tatgtgagcaaagactgttctcttggtggcgtcgctatatgttccagtaatagcggaaaactttttagaaatgttatata

SEQ ID NO: 10884 - DNA, 80 bp, synthetic construct
  misc_feature 1..80: note = Synthetic: >NC_003310.1-cand-108940-109019
  source 1..80: mol_type = other DNA
tttacataaacatcggcatcttgaatagaaacaacaccatcttctggaacctctacgatctcggcagattccggataacc

SEQ ID NO: 10885 - DNA, 80 bp, synthetic construct
  misc_feature 1..80: note = Synthetic: >NC_003310.1-cand-109020-109099
  source 1..80: mol_type = other DNA
agtcggtggaccatcactaacaataactagatcatccaacaatctactcacatatgcgtctatataatctttttcatctt

SEQ ID NO: 10886 - DNA, 80 bp, synthetic construct
  misc_feature 1..80: note = Synthetic: >NC_003310.1-cand-109100-109179
  source 1..80: mol_type = other DNA
gtgagtaccctggatacgaaataaatttgttatccgtatttccataataaggtttagtataaacagagagagatgttgct

SEQ ID NO: 10887 - DNA, 80 bp, synthetic construct
  misc_feature 1..80: note = Synthetic: >NC_003310.1-cand-111420-111499
  source 1..80: mol_type = other DNA
atgtcttgaaatcatcgacatggcttcttccatagttagaagatcatcgtcaaagttagcaacgtgattcatcaacattt

SEQ ID NO: 10888 - DNA, 80 bp, synthetic construct
  misc_feature 1..80: note = Synthetic: >NC_003310.1-cand-111500-111579
  source 1..80: mol_type = other DNA
gctgttttgaggcagcaaatactgaaccatcaccattcaaccattcataaaaaccatcgtctgaatccattgataatttc

SEQ ID NO: 10889 - DNA, 80 bp, synthetic construct
  misc_feature 1..80: note = Synthetic: >NC_003310.1-cand-111660-111739
  source 1..80: mol_type = other DNA
gggtccattttctgtaaatagaatcgtataatgtcccttcaagaagatatcagacgatccacaatcaaagaattggtctc

SEQ ID NO: 10890 - DNA, 80 bp, synthetic construct
  misc_feature 1..80: note = Synthetic: >NC_003310.1-cand-111740-111819
  source 1..80: mol_type = other DNA
cgagtttgtaacagactgcggactttaacctatacatgataccgtttagcatgatttctggtgatacgtcaataggagta

SEQ ID NO: 10891 - DNA, 80 bp, synthetic construct
  misc_feature 1..80: note = Synthetic: >NC_003310.1-cand-111820-111899
  source 1..80: mol_type = other DNA
tcatctattagagatctaaagccggtgtaacattctccaccaaacatattcttattctgacgtcgttctacataaaacat

SEQ ID NO: 10892 - DNA, 80 bp, synthetic construct
  misc_feature 1..80: note = Synthetic: >NC_003310.1-cand-111900-111979
  source 1..80: mol_type = other DNA
cattgctccattaacgataacaggtgaatgaacagcactacccatcacattagttcccaatggatcaatgtgtgtaactc

SEQ ID NO: 10893 - DNA, 80 bp, synthetic construct
  misc_feature 1..80: note = Synthetic: >NC_003310.1-cand-111980-112059
  source 1..80: mol_type = other DNA
cagaacatcttccatagcctatgttaggaggagcgaacaccactcttccactattgccatcgaatgccatagaataaata

SEQ ID NO: 10894 - DNA, 80 bp, synthetic construct
  misc_feature 1..80: note = Synthetic: >NC_003310.1-cand-112060-112139
  source 1..80: mol_type = other DNA
tccttggaattgatagaaatcggactgtcggatgttgttatcatcttcataggattaacaacgatgtatggtgcagcctg

SEQ ID NO: 10895 - DNA, 80 bp, synthetic construct
  misc_feature 1..80: note = Synthetic: >NC_003310.1-cand-112140-112219
  source 1..80: mol_type = other DNA
aagtttcatatcataactgatgccgttcataggtctagccacagaaaccaacgtaggtctaaatccaactatagacaaaa

SEQ ID NO: 10896 - DNA, 80 bp, synthetic construct
  misc_feature 1..80: note = Synthetic: >NC_003310.1-cand-112210-112289
  source 1..80: mol_type = other DNA
atagacaaaatagaagctaatatctgttcctcatctgtcataacttgagagcatccagtatgaataatcttcattagatg

SEQ ID NO: 10897 - DNA, 80 bp, synthetic construct
  misc_feature 1..80: note = Synthetic: >NC_003310.1-cand-112290-112369
  source 1..80: mol_type = other DNA
gggatctaccgcatcatcatcgttacaataaaaaattcccattctaatgttcataattgcttttctaatcatggtatgaa

SEQ ID NO: 10898 - DNA, 80 bp, synthetic construct
  misc_feature 1..80: note = Synthetic: >NC_003310.1-cand-112370-112449
  source 1..80: mol_type = other DNA
tgtttgctctctgaatctctgtggaaattagatctgatacacctgtaatcactatcggattatcctccgtaagacgatta

SEQ ID NO: 10899 - DNA, 80 bp, synthetic construct
  misc_feature 1..80: note = Synthetic: >NC_003310.1-cand-112450-112529
  source 1..80: mol_type = other DNA
accaacaacatataattataagactttactcttctaaattcataaagttgctggattagactatatgtgtctccatgtac

SEQ ID NO: 10900 - DNA, 80 bp, synthetic construct
  misc_feature 1..80: note = Synthetic: >NC_003310.1-cand-112690-112769
  source 1..80: mol_type = other DNA
atatgatgattagatggagagtatattttatctaactctttgagttggtcaccgattctaggactagctcgagaatgaat

SEQ ID NO: 10901 - DNA, 80 bp, synthetic construct
  misc_feature 1..80: note = Synthetic: >NC_003310.1-cand-112770-112849
  source 1..80: mol_type = other DNA
aagtactaagggatgagtacatttcacagaaacactggcgttgttcaacgtactctttacatgggaaaggagttgaaata

SEQ ID NO: 10902 - DNA, 80 bp, synthetic construct
  misc_feature 1..80: note = Synthetic: >NC_003310.1-cand-112850-112929
  source 1..80: mol_type = other DNA
gctcgtttctatttgtcctgacaatatttagtttattcataatattaagcatatcctgaatagtaaagttagatgtgtca

SEQ ID NO: 10903 - DNA, 80 bp, synthetic construct
  misc_feature 1..80: note = Synthetic: >NC_003310.1-cand-119300-119379
  source 1..80: mol_type = other DNA
ttttaggacggatcaatgagtaagatttgactagatcgtcagtagtaatttgtgcatcatctattctgcatccgcttcgt

SEQ ID NO: 10904 - DNA, 80 bp, synthetic construct
  misc_feature 1..80: note = Synthetic: >NC_003310.1-cand-119370-119449
  source 1..80: mol_type = other DNA
tccgcttcgtcgaataatgtatagcatcgctttgagattctccatagctatcaagtctttatataatgacatggaaatat

SEQ ID NO: 10905 - DNA, 80 bp, synthetic construct
  misc_feature 1..80: note = Synthetic: >NC_003310.1-cand-119450-119529
  source 1..80: mol_type = other DNA
ctgtgaatgctttatacttctccaacatcgatgccttaacatcatcacatactttagcattgaaaatacgttctattgtg

SEQ ID NO: 10906 - DNA, 80 bp, synthetic construct
  misc_feature 1..80: note = Synthetic: >NC_003310.1-cand-119610-119689
  source 1..80: mol_type = other DNA
acgattagctacagagtccaatgcttggctaactagcatattattatctttagaaattgtattcttcaatgaggcgttta

SEQ ID NO: 10907 - DNA, 80 bp, synthetic construct
  misc_feature 1..80: note = Synthetic: >NC_003310.1-cand-119690-119769
  source 1..80: mol_type = other DNA
tcatatctgtgatttcgttagtcatattacagtctgactgggttgtaatgttatccaacatatcacctatggatacggta

SEQ ID NO: 10908 - DNA, 80 bp, synthetic construct
  misc_feature 1..80: note = Synthetic: >NC_003310.1-cand-119770-119849
  source 1..80: mol_type = other DNA
cacgtaccagcatttgtaataatcctatctaagatgttgtatggcattgcgcagaaaatatcttctcctgtaatatctcc

SEQ ID NO: 10909 - DNA, 80 bp, synthetic construct
  misc_feature 1..80: note = Synthetic: >NC_003310.1-cand-119850-119929
  source 1..80: mol_type = other DNA
actctcgataaatctactcagattattcttaaatgccttattctctggagaaaagatatcagtgtccatcatttcattaa

SEQ ID NO: 10910 - DNA, 80 bp, synthetic construct
  misc_feature 1..80: note = Synthetic: >NC_003310.1-cand-119930-120009
  source 1..80: mol_type = other DNA
tagtatacgcagaaaagataccacgagtatcaattctatccaagatacttatcggttccgagtcacagataatggtttcc

SEQ ID NO: 10911 - DNA, 80 bp, synthetic construct
  misc_feature 1..80: note = Synthetic: >NC_003310.1-cand-120010-120089
  source 1..80: mol_type = other DNA
tctccttcgggagatcctgcatagaaatatctaggacaatagtttctatactgtctgtaactctgataatctctaaagtc

SEQ ID NO: 10912 - DNA, 80 bp, synthetic construct
  misc_feature 1..80: note = Synthetic: >NC_003310.1-cand-120090-120169
  source 1..80: mol_type = other DNA
actaactgataccatgaaattgagaagatcaaacgctgaagtaatcaatttttctgcctcgtttttactacaactagttt

SEQ ID NO: 10913 - DNA, 80 bp, synthetic construct
  misc_feature 1..80: note = Synthetic: >NC_003310.1-cand-120170-120249
  source 1..80: mol_type = other DNA
tcatcaatgtagtgacgatgtattgtttagttactcttggtctaatactgatgatagagatattattgcttcccataatg

SEQ ID NO: 10914 - DNA, 80 bp, synthetic construct
  misc_feature 1..80: note = Synthetic: >NC_003310.1-cand-120250-120329
  source 1..80: mol_type = other DNA
gatcttctagtagtcaccttaaagcccattgatgcgaatagcagatagataaagtcttggtatgactcctttctaatata

SEQ ID NO: 10915 - DNA, 80 bp, synthetic construct
  misc_feature 1..80: note = Synthetic: >NC_003310.1-cand-120330-120409
  source 1..80: mol_type = other DNA
gtacggactacctttgtcacccaactttatacccacataagccataacaacctctttaatagccgtttcatgaggtttat

SEQ ID NO: 10916 - DNA, 80 bp, synthetic construct
  misc_feature 1..80: note = Synthetic: >NC_003310.1-cand-120410-120489
  source 1..80: mol_type = other DNA
cagccatgagcctgagtagttgaaagaatcgcatgaatcccgtctcagaaagtcctatatgcatgatagatttatctttc

SEQ ID NO: 10917 - DNA, 80 bp, synthetic construct
  misc_feature 1..80: note = Synthetic: >NC_003310.1-cand-120490-120569
  source 1..80: mol_type = other DNA
ctgggaaactctcgtatagttatagatgaaatactcttcaaagtttctgaaataagattagtaacagtcttacctccgac

SEQ ID NO: 10918 - DNA, 80 bp, synthetic construct
  misc_feature 1..80: note = Synthetic: >NC_003310.1-cand-120570-120649
  source 1..80: mol_type = other DNA
tactctgggtaacaaacatactctaataggtgttttctctgcggagataatatcagaaaggatagagcaataagtagtat

SEQ ID NO: 10919 - DNA, 80 bp, synthetic construct
  misc_feature 1..80: note = Synthetic: >NC_003310.1-cand-127710-127789
  source 1..80: mol_type = other DNA
taagagacgatccacatgctgagcaggccagtgtattacccctcatagtattaatataatccaatgatacttttgtgatg

SEQ ID NO: 10920 - DNA, 80 bp, synthetic construct
  misc_feature 1..80: note = Synthetic: >NC_003310.1-cand-127790-127869
  source 1..80: mol_type = other DNA
tcggaaatcttaaccaatttagactgacaggcagaacacgtcatgcaatcatcaccgtcatcgataactgtagtcttggg

SEQ ID NO: 10921 - DNA, 80 bp, synthetic construct
  misc_feature 1..80: note = Synthetic: >NC_003310.1-cand-127870-127949
  source 1..80: mol_type = other DNA
cttctttttgcgactcttcattccggaacgcatattggtgctatccatttaggtagtaaaaaataagtcagaatatgccc

SEQ ID NO: 10922 - DNA, 80 bp, synthetic construct
  misc_feature 1..80: note = Synthetic: >NC_003310.1-cand-127950-128029
  source 1..80: mol_type = other DNA
tataacacgatcgtgcaaaacctggtatatcgtctctatctttatcacaatatagtgtatcaacatctttattattgacc

SEQ ID NO: 10923 - DNA, 80 bp, synthetic construct
  misc_feature 1..80: note = Synthetic: >NC_003310.1-cand-128030-128109
  source 1..80: mol_type = other DNA
tcgtttatcttggaacatggaatgggaacatttttgttaacggccacctttgccttaattccagatgttgtaaaattata

SEQ ID NO: 10924 - DNA, 80 bp, synthetic construct
  misc_feature 1..80: note = Synthetic: >NC_003310.1-cand-128270-128349
  source 1..80: mol_type = other DNA
tctagtgctgatttaactaacttaaaagaattacttagtctgtacaaaagtttgagattttcagattctgtggctataga

SEQ ID NO: 10925 - DNA, 80 bp, synthetic construct
  misc_feature 1..80: note = Synthetic: >NC_003310.1-cand-128380-128459
  source 1..80: mol_type = other DNA
atctacttactggaaaataggcgtacaaaaggtaactaatgtcgagacgtccatatctgattattatgatgaggtaaaaa

SEQ ID NO: 10926 - DNA, 80 bp, synthetic construct
  misc_feature 1..80: note = Synthetic: >NC_003310.1-cand-128400-128479
  source 1..80: mol_type = other DNA
gcgtacaaaaggtaactaatgtcgagacgtccatatctgattattatgatgaggtaaaaaataaaccgttcaatattgat

SEQ ID NO: 10927 - DNA, 80 bp, synthetic construct
  misc_feature 1..80: note = Synthetic: >NC_003310.1-cand-128670-128749
  source 1..80: mol_type = other DNA
ggataatggaagacgctatatcaaaataccagtctccagttaatatatttaaactagctagtgagtacggattaaacata

SEQ ID NO: 10928 - DNA, 80 bp, synthetic construct
  misc_feature 1..80: note = Synthetic: >NC_003310.1-cand-128830-128909
  source 1..80: mol_type = other DNA
tgatacatttccaaaaatatctatatcgtatattaagttgggagaacttaaacggcaagttgtagactttttcaaattct

SEQ ID NO: 10929 - DNA, 80 bp, synthetic construct
  misc_feature 1..80: note = Synthetic: >NC_003310.1-cand-129150-129229
  source 1..80: mol_type = other DNA
ctataggacgagactattatgttaatggaaagtatttctctaaggttggtagtgcaggcttaaagcaattgactaataaa

SEQ ID NO: 10930 - DNA, 80 bp, synthetic construct
  misc_feature 1..80: note = Synthetic: >NC_003310.1-cand-129240-129319
  source 1..80: mol_type = other DNA
acgagtgcgcaactgtcgatgagttagttgatgagattaataaatccggaactgtaaaacgaaaaataaaaaaccaatca

SEQ ID NO: 10931 - DNA, 80 bp, synthetic construct
  misc_feature 1..80: note = Synthetic: >NC_003310.1-cand-129400-129479
  source 1..80: mol_type = other DNA
agaaaattgtaaggtcgtaaatttcaatattgaaaatactaattgtttaaataacccgagtattgaaactatatatggaa

SEQ ID NO: 10932 - DNA, 80 bp, synthetic construct
  misc_feature 1..80: note = Synthetic: >NC_003310.1-cand-129720-129799
  source 1..80: mol_type = other DNA
cagcctagaaggtcaccgtacgtcaaatttatctattttattaaaggctttttatatcatacatctgctgccaaagttat

SEQ ID NO: 10933 - DNA, 80 bp, synthetic construct
  misc_feature 1..80: note = Synthetic: >NC_003310.1-cand-129800-129879
  source 1..80: mol_type = other DNA
ttgcgtctcacctgtcatgtctggtaattcatatagagatcgaaaaaagagatctgttgaagcatttcttgattggatgg

SEQ ID NO: 10934 - DNA, 80 bp, synthetic construct
  misc_feature 1..80: note = Synthetic: >NC_003310.1-cand-130440-130519
  source 1..80: mol_type = other DNA
gaagagaaaggtcaattacggcgaaataaagaaaactgtacatggaggcactaatgcaaattacttttccggtaaaaagt

SEQ ID NO: 10935 - DNA, 80 bp, synthetic construct
  misc_feature 1..80: note = Synthetic: >NC_003310.1-cand-138170-138249
  source 1..80: mol_type = other DNA
atatatgattatcaagtcttatacgatcagcgtcttttttgacaggatcaggctcttctacaggaagaagtttcggcctc

SEQ ID NO: 10936 - DNA, 80 bp, synthetic construct
  misc_feature 1..80: note = Synthetic: >NC_003310.1-cand-138330-138409
  source 1..80: mol_type = other DNA
atcatcatcatcatcatcatcatcatcatcatcatcatcatcatcatcatcatcatcatctatgatatcatcatcatcat

SEQ ID NO: 10937 - DNA, 80 bp, synthetic construct
  misc_feature 1..80: note = Synthetic: >NC_003310.1-cand-138410-138489
  source 1..80: mol_type = other DNA
cttcgatatttattttgctatcttgatgatgtcctgtatcagttgcattttcagcactcgactgaatactagtacattca

SEQ ID NO: 10938 - DNA, 80 bp, synthetic construct
  misc_feature 1..80: note = Synthetic: >NC_003310.1-cand-138490-138569
  source 1..80: mol_type = other DNA
ttgtctattattaacgtatttctaaacccaaaatgtatgtgttgaacatcactactatagttgatgagtcttatagcatg

SEQ ID NO: 10939 - DNA, 80 bp, synthetic construct
  misc_feature 1..80: note = Synthetic: >NC_003310.1-cand-138570-138649
  source 1..80: mol_type = other DNA
aattcgcttatcgttatcgggtttatcttctgtcaccttaacaattccttttttattaaactctgcataatcataaccat

SEQ ID NO: 10940 - DNA, 80 bp, synthetic construct
  misc_feature 1..80: note = Synthetic: >NC_003310.1-cand-138650-138729
  source 1..80: mol_type = other DNA
ttctattgtttgttctaatataaacgagtatagcatcattgctaaatttttcaatcgtatcgaaaacagaatatcctaaa

SEQ ID NO: 10941 - DNA, 80 bp, synthetic construct
  misc_feature 1..80: note = Synthetic: >NC_003310.1-cand-138890-138969
  source 1..80: mol_type = other DNA
cattacgatcatatatttcgtgatatacatgtgacccgtttacgttaaaccataaatacatgggtgatcctataaacatg

SEQ ID NO: 10942 - DNA, 80 bp, synthetic construct
  misc_feature 1..80: note = Synthetic: >NC_003310.1-cand-139050-139129
  source 1..80: mol_type = other DNA
aagatttttatcattgctcgttatttcagaatcgtatatataaggagtaccatcatgattcttaccagatattatacaaa

SEQ ID NO: 10943 - DNA, 80 bp, synthetic construct
  misc_feature 1..80: note = Synthetic: >NC_003310.1-cand-139450-139529
  source 1..80: mol_type = other DNA
acattaacatcttgaaccgttggtacaattccgttccataaatttataatgttcgccatttatataactcattttttgaa

SEQ ID NO: 10944 - DNA, 80 bp, synthetic construct
  misc_feature 1..80: note = Synthetic: >NC_003310.1-cand-139880-139959
  source 1..80: mol_type = other DNA
agttccgtccatttaaagtacagattttagaaactgacactctgtgttatttatatttggcgcaatacatggattataaa

SEQ ID NO: 10945 - DNA, 80 bp, synthetic construct
  misc_feature 1..80: note = Synthetic: >NC_003310.1-cand-139930-140009
  source 1..80: mol_type = other DNA
ttatatttggcgcaatacatggattataaatatcgatgttaataacatcagaaaatgtaaagtctatacattgtcgcatc

SEQ ID NO: 10946 - DNA, 80 bp, synthetic construct
  misc_feature 1..80: note = Synthetic: >NC_003310.1-cand-140170-140249
  source 1..80: mol_type = other DNA
atgccggtgttccacctatagattttgaatactcgaatgctgcatgagtagcattgaattccttaatattgccataattt

SEQ ID NO: 10947 - DNA, 80 bp, synthetic construct
  misc_feature 1..80: note = Synthetic: >NC_003310.1-cand-140250-140329
  source 1..80: mol_type = other DNA
tcatatattgagtaactctggataaaaagtaaacacaccgcagccgtcgctactacaataaaaaaaattgatagagagtt

SEQ ID NO: 10948 - DNA, 80 bp, synthetic construct
  misc_feature 1..80: note = Synthetic: >NC_003310.1-cand-140410-140489
  source 1..80: mol_type = other DNA
ttgtcatatcgaaccgatggtatgattctaacctagaattacatccgaaaaagttgaccatgttcatagtcattaagtca

SEQ ID NO: 10949 - DNA, 80 bp, synthetic construct
  misc_feature 1..80: note = Synthetic: >NC_003310.1-cand-140490-140569
  source 1..80: mol_type = other DNA
ttaacaaacaacattccagactctggattataagacgatactgtttcgtcacaatcacccaccttaatcatgtgattatg

SEQ ID NO: 10950 - DNA, 80 bp, synthetic construct
  misc_feature 1..80: note = Synthetic: >NC_003310.1-cand-141130-141209
  source 1..80: mol_type = other DNA
aaactactccaatgtttaacaagggccattttacgagattattaaatccttgtttgataaatgtagccaatgcgggttcg

SEQ ID NO: 10951 - DNA, 80 bp, synthetic construct
  misc_feature 1..80: note = Synthetic: >NC_003443.1-cand-4690-4769
  source 1..80: mol_type = other DNA
ttaccaagatgttatcataggtccgaactgatcaatctaacaaaaaaactaaacgttccacaataaatcaacgttcaggc

SEQ ID NO: 10952 - DNA, 80 bp, synthetic construct
  misc_feature 1..80: note = Synthetic: >NC_003443.1-cand-4770-4849
  source 1..80: mol_type = other DNA
caaaatattcagccatgcatcacctgcatccaatgatagtatgcatctttgttatgtacactggaattgtaggttcagat

SEQ ID NO: 10953 - DNA, 80 bp, synthetic construct
  misc_feature 1..80: note = Synthetic: >NC_003443.1-cand-4890-4969
  source 1..80: mol_type = other DNA
aatcaaagataagatcactcatgtactatactgatggtggtgctagctttattgttgtaaaattgctacctaatcttccc

SEQ ID NO: 10954 - DNA, 80 bp, synthetic construct
  misc_feature 1..80: note = Synthetic: >NC_003443.1-cand-4930-5009
  source 1..80: mol_type = other DNA
tgctagctttattgttgtaaaattgctacctaatcttcccccaagcaatggaacatgcaacatcaccagtctagatgcat

SEQ ID NO: 10955 - DNA, 80 bp, synthetic construct
  misc_feature 1..80: note = Synthetic: >NC_003443.1-cand-5020-5099
  source 1..80: mol_type = other DNA
cctatttaagttactaacacccctgattgagaacctgagtaaaatttccactgttacagataccaaaacccgccaaaaac

SEQ ID NO: 10956 - DNA, 80 bp, synthetic construct
  misc_feature 1..80: note = Synthetic: >NC_003443.1-cand-5100-5179
  source 1..80: mol_type = other DNA
gatttgcaggagtagttgttggacttgctgcattaggagtagccacagccgcacaaataactgcagctgtagcaatagtg

SEQ ID NO: 10957 - DNA, 80 bp, synthetic construct
  misc_feature 1..80: note = Synthetic: >NC_003443.1-cand-5180-5259
  source 1..80: mol_type = other DNA
aaagctaatgcaaatgctgctgcgataaacaatcttgcatcttcaattcaatccaccaacaaggcagtatccgatgtgat

SEQ ID NO: 10958 - DNA, 80 bp, synthetic construct
  misc_feature 1..80: note = Synthetic: >NC_003443.1-cand-5260-5339
  source 1..80: mol_type = other DNA
agatgcatcaagaacaattgcaaccgcagttcaagcaattcaggatcgcatcaatggagctattgttaatgggataacat

SEQ ID NO: 10959 - DNA, 80 bp, synthetic construct
  misc_feature 1..80: note = Synthetic: >NC_003443.1-cand-5340-5419
  source 1..80: mol_type = other DNA
ctgcatcatgccgtgcccatgatgcactcattgggtcaatattaaatctttatctcactgagcttaccacaatatttcat

SEQ ID NO: 10960 - DNA, 80 bp, synthetic construct
  misc_feature 1..80: note = Synthetic: >NC_003443.1-cand-5420-5499
  source 1..80: mol_type = other DNA
aatcaaataacaaaccctgcgctgacaccactctccatccaagctttaagaatcctcctcggtagcaccttgccaattgt

SEQ ID NO: 10961 - DNA, 80 bp, synthetic construct
  misc_feature 1..80: note = Synthetic: >NC_003443.1-cand-5500-5579
  source 1..80: mol_type = other DNA
cattgagtccaaactcaacacaaacttcaacacagcagagctgctcagttccggactgttaactggtcaaataatttcca

SEQ ID NO: 10962 - DNA, 80 bp, synthetic construct
  misc_feature 1..80: note = Synthetic: >NC_003443.1-cand-5580-5659
  source 1..80: mol_type = other DNA
tttccccaatgtacatgcaaatgctaattcaaatcaatgttccgacatttataatgcaacccggtgcgaaggtaattgat

SEQ ID NO: 10963 - DNA, 80 bp, synthetic construct
  misc_feature 1..80: note = Synthetic: >NC_003443.1-cand-5660-5739
  source 1..80: mol_type = other DNA
ctaattgctatctccgcaaaccataaattgcaagaagtggttgtacaagttccgaataggattctagagtatgcaaatga

SEQ ID NO: 10964 - DNA, 80 bp, synthetic construct
  misc_feature 1..80: note = Synthetic: >NC_003443.1-cand-5740-5819
  source 1..80: mol_type = other DNA
actacaaaattacccagccaatgactgtgtcgtgacaccgaactctgtattttgtagatacaatgagggttcccctatcc

SEQ ID NO: 10965 - DNA, 80 bp, synthetic construct
  misc_feature 1..80: note = Synthetic: >NC_003443.1-cand-5850-5929
  source 1..80: mol_type = other DNA
atcttaattcttgcacttttacccctattatcgggaactttcttaagcgattcgcatttgctaatggtgtgctctatgcc

SEQ ID NO: 10966 - DNA, 80 bp, synthetic construct
  misc_feature 1..80: note = Synthetic: >NC_003443.1-cand-5900-5979
  source 1..80: mol_type = other DNA
ttcgcatttgctaatggtgtgctctatgccaactgcaaatctttgctatgtaggtgtgccgaccccccccatgttgtatc

SEQ ID NO: 10967 - DNA, 80 bp, synthetic construct
  misc_feature 1..80: note = Synthetic: >NC_004162.2-cand-100-179
  source 1..80: mol_type = other DNA
ctgacagcgcctttttgaaggccctgcaacgtgcgtaccccatgtttgaggtggaacctaggcaggtcacaccgaatgac

SEQ ID NO: 10968 - DNA, 80 bp, synthetic construct
  misc_feature 1..80: note = Synthetic: >NC_004162.2-cand-180-259
  source 1..80: mol_type = other DNA
catgctaatgctagagcgttctcgcatctagctataaaactaatagagcaggaaattgatcccgactcaaccatcctgga

SEQ ID NO: 10969 - DNA, 80 bp, synthetic construct
  misc_feature 1..80: note = Synthetic: >NC_004162.2-cand-260-339
  source 1..80: mol_type = other DNA
tattggtagtgcgccagcaaggaggatgatgtcggacaggaagtaccactgcgtttgcccgatgcgcagtgcagaagatc

SEQ ID NO: 10970 - DNA, 80 bp, synthetic construct
  misc_feature 1..80: note = Synthetic: >NC_004162.2-cand-340-419
  source 1..80: mol_type = other DNA
ccgagagactcgccaattatgcgagaaagctagcatctgccgcaggaaaagtcctggacagaaacatctctggaaagatc

SEQ ID NO: 10971 - DNA, 80 bp, synthetic construct
  misc_feature 1..80: note = Synthetic: >NC_004162.2-cand-430-509
  source 1..80: mol_type = other DNA
aagcagtaatggccgtgccagacacggagacgccaacattctgcttacacacagatgtatcatgtagacagagagcagac

SEQ ID NO: 10972 - DNA, 80 bp, synthetic construct
  misc_feature 1..80: note = Synthetic: >NC_004162.2-cand-490-569
  source 1..80: mol_type = other DNA
catgtagacagagagcagacgtcgcgatataccaagacgtctatgctgtacacgcacccacgtcgctataccaccaggcg

SEQ ID NO: 10973 - DNA, 80 bp, synthetic construct
  misc_feature 1..80: note = Synthetic: >NC_004162.2-cand-580-659
  source 1..80: mol_type = other DNA
tccgattggcgtactgggtagggtttgacacaaccccgttcatgtacaatgccatggcgggtgcctacccctcatactcg

SEQ ID NO: 10974 - DNA, 80 bp, synthetic construct
  misc_feature 1..80: note = Synthetic: >NC_004162.2-cand-660-739
  source 1..80: mol_type = other DNA
acaaattgggcagatgagcaggtactgaaggctaagaacataggattatgttcaacagacctgacggaaggtagacgagg

SEQ ID NO: 10975 - DNA, 80 bp, synthetic construct
  misc_feature 1..80: note = Synthetic: >NC_004162.2-cand-740-819
  source 1..80: mol_type = other DNA
caaattgtctattatgagaggaaaaaagctagaaccgtgcgaccgtgtgctgttctcagtagggtcaacgctctacccgg

SEQ ID NO: 10976 - DNA, 80 bp, synthetic construct
  misc_feature 1..80: note = Synthetic: >NC_004162.2-cand-820-899
  source 1..80: mol_type = other DNA
aaagccgtaagctacttaagagctggcacctaccatcggtgttccatttaaagggcaagctcagcttcacatgccgctgt

SEQ ID NO: 10977 - DNA, 80 bp, synthetic construct
  misc_feature 1..80: note = Synthetic: >NC_004162.2-cand-900-979
  source 1..80: mol_type = other DNA
gatacagtggtttcgtgcgaaggctacgtcgttaagagaataacgatgagcccaggcctttacggaaaaaccacagggta

SEQ ID NO: 10978 - DNA, 80 bp, synthetic construct
  misc_feature 1..80: note = Synthetic: >NC_004162.2-cand-980-1059
  source 1..80: mol_type = other DNA
tgcggtaacccaccacgcagacggattcctgatgtgcaagaccaccgacacggttgacggcgaaagagtgtcattctcgg

SEQ ID NO: 10979 - DNA, 80 bp, synthetic construct
  misc_feature 1..80: note = Synthetic: >NC_004162.2-cand-1060-1139
  source 1..80: mol_type = other DNA
tgtgcacgtacgtgccggcgaccatttgtgatcaaatgaccggcatccttgctacagaagtcacgccggaggatgcacag

SEQ ID NO: 10980 - DNA, 80 bp, synthetic construct
  misc_feature 1..80: note = Synthetic: >NC_004162.2-cand-1160-1239
  source 1..80: mol_type = other DNA
ccagagaatagtggttaacggcagaacgcaacggaatacgaacaccatgaaaaactatatgattcccgtggtcgcccaag

SEQ ID NO: 10981 - DNA, 80 bp, synthetic construct
  misc_feature 1..80: note = Synthetic: >NC_004162.2-cand-1210-1289
  source 1..80: mol_type = other DNA
aaaactatatgattcccgtggtcgcccaagccttcagtaagtgggcaaaggagtgccggaaagacatggaagatgaaaaa

SEQ ID NO: 10982 - DNA, 80 bp, synthetic construct
  misc_feature 1..80: note = Synthetic: >NC_004162.2-cand-1300-1379
  source 1..80: mol_type = other DNA
tcagagaaagaacactgacctgctgctgtctatgggcatttaagaagcagaaaacacacacggtctacaagaggcctgat

SEQ ID NO: 10983 - DNA, 80 bp, synthetic construct
  misc_feature 1..80: note = Synthetic: >NC_005078.1-cand-510-589
  source 1..80: mol_type = other DNA
tgggctattcattggttctcaaatgctttgggacatgactggcttatggatcctccaatgctatgtagaaacaagacaaa

SEQ ID NO: 10984 - DNA, 80 bp, synthetic construct
  misc_feature 1..80: note = Synthetic: >NC_005078.1-cand-600-679
  source 1..80: mol_type = other DNA
tctaacattcaattcaacatcagcaaagctgatgatgccagagtgtatggaaagaagataagaaatggtatgaggcatct

SEQ ID NO: 10985 - DNA, 80 bp, synthetic construct
  misc_feature 1..80: note = Synthetic: >NC_005078.1-cand-690-769
  source 1..80: mol_type = other DNA
ttccatgacccgtgtgaggaagggaaagtgtgctacctgaccatcaatcagtgtggtgaccccagttcctttgactactg

SEQ ID NO: 10986 - DNA, 80 bp, synthetic construct
  misc_feature 1..80: note = Synthetic: >NC_005078.1-cand-770-849
  source 1..80: mol_type = other DNA
tggcgtgaatcatctttccaaatgtcagtttgaccatgtgaacacccttcatttccttgtgagaagtaagacacatctca

SEQ ID NO: 10987 - DNA, 80 bp, synthetic construct
  misc_feature 1..80: note = Synthetic: >NC_005078.1-cand-850-929
  source 1..80: mol_type = other DNA
actttgagaggtctttgaaagcatttttctcatggtctctgacagactcctcaggaaaggacatgccaggaggttattgt

SEQ ID NO: 10988 - DNA, 80 bp, synthetic construct
  misc_feature 1..80: note = Synthetic: >NC_005078.1-cand-930-1009
  source 1..80: mol_type = other DNA
ctagaggaatggatgttgatagcagccaaaatgaaatgtttcggaaacactgctgttgctaaatgtaatcaaaatcatga

SEQ ID NO: 10989 - DNA, 80 bp, synthetic construct
  misc_feature 1..80: note = Synthetic: >NC_005078.1-cand-1010-1089
  source 1..80: mol_type = other DNA
ctcagagttctgtgatatgctgaggctattcgactataacaagaatgcaataaagaccctcaatgatgaatcaaagaaag

SEQ ID NO: 10990 - DNA, 80 bp, synthetic construct
  misc_feature 1..80: note = Synthetic: >NC_005078.1-cand-1100-1179
  source 1..80: mol_type = other DNA
tctaagccagacagtgaatgccttaatctcagataatttgttaatgaagaataaaattaaagagctaatgagcatccctt

SEQ ID NO: 10991 - DNA, 80 bp, synthetic construct
  misc_feature 1..80: note = Synthetic: >NC_005078.1-cand-1180-1259
  source 1..80: mol_type = other DNA
attgtaattacacaaagttttggtatgtcaatcataccctgacagggcagcacactcttccaagatgttggttgataagg

SEQ ID NO: 10992 - DNA, 80 bp, synthetic construct
  misc_feature 1..80: note = Synthetic: >NC_005078.1-cand-1260-1339
  source 1..80: mol_type = other DNA
aatggaagttatcttaacacttctgaattcaggaatgactggattttagagagtgatcacctcatctcagagatgttaag

SEQ ID NO: 10993 - DNA, 80 bp, synthetic construct
  misc_feature 1..80: note = Synthetic: >NC_005078.1-cand-1340-1419
  source 1..80: mol_type = other DNA
taaggaatatgctgaaaggcaaggcaaaaccccaatcacattagttgatatttgtttctggagcacaattttcttcacag

SEQ ID NO: 10994 - DNA, 80 bp, synthetic construct
  misc_feature 1..80: note = Synthetic: >NC_005078.1-cand-1420-1499
  source 1..80: mol_type = other DNA
catcattgttccttcatctagtcggaatacccacccatcgacacctcaaaggcgaagcctgtcctttgcctcataagctg

SEQ ID NO: 10995 - DNA, 80 bp, synthetic construct
  misc_feature 1..80: note = Synthetic: >NC_005078.1-cand-1500-1579
  source 1..80: mol_type = other DNA
gacagcttcggaggttgtagatgtggcaaatatcccagattgaagaaacccaccatctggcacaaaagacattaaacaca

SEQ ID NO: 10996 - DNA, 80 bp, synthetic construct
  misc_feature 1..80: note = Synthetic: >NC_005078.1-cand-1540-1619
  source 1..80: mol_type = other DNA
tgaagaaacccaccatctggcacaaaagacattaaacacagccaagacccctgccgacccgggcccagcccgggtcggcg

SEQ ID NO: 10997 - DNA, 80 bp, synthetic construct
  misc_feature 1..80: note = Synthetic: >NC_005078.1-cand-1680-1759
  source 1..80: mol_type = other DNA
tgccttgggtagaaatagaaggctgagaggtaaaagtgccactggttcttcatctaccattttgccatccatcactgatt

SEQ ID NO: 10998 - DNA, 80 bp, synthetic construct
  misc_feature 1..80: note = Synthetic: >NC_005078.1-cand-1760-1839
  source 1..80: mol_type = other DNA
gatacatgatacaatccaacagagcacagtgaggttcaccagaactcaatttgaatggagagtctttttctctctttttc

SEQ ID NO: 10999 - DNA, 80 bp, synthetic construct
  misc_feature 1..80: note = Synthetic: >NC_005226.1-cand-5020-5099
  source 1..80: mol_type = other DNA
ggtagatgtgttccttgataaaggtgtagttccagttgacccagaaatccaatgtatgggtttaatgatttatgatctga

SEQ ID NO: 11000 - DNA, 80 bp, synthetic construct
  misc_feature 1..80: note = Synthetic: >NC_005226.1-cand-5100-5179
  source 1..80: mol_type = other DNA
ctggacaaaaaaatctattgcaaatgcaagctaacagaagggcttattctggtaagcagtatgatgcctattgtgttcag

SEQ ID NO: 11001 - DNA, 80 bp, synthetic construct
  misc_feature 1..80: note = Synthetic: >NC_005226.1-cand-5220-5299
  source 1..80: mol_type = other DNA
gggtaacatttaacttcggaattgattgtgctcgattggagattttttgggacaagcaggattacttgctagagacatca

SEQ ID NO: 11002 - DNA, 80 bp, synthetic construct
  misc_feature 1..80: note = Synthetic: >NC_005226.1-cand-5250-5329
  source 1..80: mol_type = other DNA
ctcgattggagattttttgggacaagcaggattacttgctagagacatcaataacccaaaggcatgttttgaaaatcctg

SEQ ID NO: 11003 - DNA, 80 bp, synthetic construct
  misc_feature 1..80: note = Synthetic: >NC_005226.1-cand-5330-5409
  source 1..80: mol_type = other DNA
atggaggaagtgacaaaagaattattaagatgtgggatgagatttaagactgaacaagtaaattcttctagaagtgttgt

SEQ ID NO: 11004 - DNA, 80 bp, synthetic construct
  misc_feature 1..80: note = Synthetic: >NC_005226.1-cand-5440-5519
  source 1..80: mol_type = other DNA
gggtaagcccaatatcccttgtattgtgtttaggaattgtgcattacgtactgggcttagagttcgtcatcctattaata

SEQ ID NO: 11005 - DNA, 80 bp, synthetic construct
  misc_feature 1..80: note = Synthetic: >NC_005226.1-cand-5490-5569
  source 1..80: mol_type = other DNA
ctgggcttagagttcgtcatcctattaataaatcatttactattactatacaagcaggtggttttcgggcaatggcacaa

SEQ ID NO: 11006 - DNA, 80 bp, synthetic construct
  misc_feature 1..80: note = Synthetic: >NC_005226.1-cand-5570-5649
  source 1..80: mol_type = other DNA
cttgacgaggagaatcccaggttcttattggcacatgcttatcacaatttaaaagatatcaggtatcaagcattacaagc

SEQ ID NO: 11007 - DNA, 80 bp, synthetic construct
  misc_feature 1..80: note = Synthetic: >NC_005226.1-cand-5650-5729
  source 1..80: mol_type = other DNA
cataggaaacatctggtttaaaacacaacagcataaattgtttataaatcctatcatttctgctggacttctagagaatt

SEQ ID NO: 11008 - DNA, 80 bp, synthetic construct
  misc_feature 1..80: note = Synthetic: >NC_005226.1-cand-5730-5809
  source 1..80: mol_type = other DNA
ttatgaaagggctgcctgctgccattccacctgcagcctattcactaattatgaacaaagctaaaatatcagtagattta

SEQ ID NO: 11009 - DNA, 80 bp, synthetic construct
  misc_feature 1..80: note = Synthetic: >NC_005226.1-cand-5810-5889
  source 1..80: mol_type = other DNA
tttatgtttaatgaattgcttgcattaataaacccaaaaaatgttttaaacttagatgggatcgaggaaacaagtgaagg

SEQ ID NO: 11010 - DNA, 80 bp, synthetic construct
  misc_feature 1..80: note = Synthetic: >NC_005226.1-cand-5890-5969
  source 1..80: mol_type = other DNA
atacagtactgtctcaactatttcaagcacacaatggtctgaagaggtaagtttggttatggatgatagtgatgatgaag

SEQ ID NO: 11011 - DNA, 80 bp, synthetic construct
  misc_feature 1..80: note = Synthetic: >NC_005226.1-cand-5970-6049
  source 1..80: mol_type = other DNA
accaacctgattacacaattgacctagatgatattgatttcgaaacaattgatctgaaagaagatattgagcattttcta

SEQ ID NO: 11012 - DNA, 80 bp, synthetic construct
  misc_feature 1..80: note = Synthetic: >NC_005226.1-cand-6050-6129
  source 1..80: mol_type = other DNA
caagatgaatctgcatatactggtgatttgttgatacagactgatgacactgagataaaaaagttaagaggaatgacaag

SEQ ID NO: 11013 - DNA, 80 bp, synthetic construct
  misc_feature 1..80: note = Synthetic: >NC_005226.1-cand-6130-6209
  source 1..80: mol_type = other DNA
aatattagagcctataaaattgataaaaagttgggtttcaaagggtctttcaattgaaaaagtttacagccctgttggta

SEQ ID NO: 11014 - DNA, 80 bp, synthetic construct
  misc_feature 1..80: note = Synthetic: >NC_005226.1-cand-6210-6289
  source 1..80: mol_type = other DNA
ttattttgatggctagatatatgtctaagcactatgattttaataaagctccactatcactattaaatccttatgaccta

SEQ ID NO: 11015 - DNA, 80 bp, synthetic construct
  misc_feature 1..80: note = Synthetic: >NC_005831.2-cand-980-1059
  source 1..80: mol_type = other DNA
tgttaaaccagttttctttaatgcttttgttaaatgcaattgtggttctgagagttggagtgttggtgcatgggatggtt

SEQ ID NO: 11016 - DNA, 80 bp, synthetic construct
  misc_feature 1..80: note = Synthetic: >NC_005831.2-cand-1060-1139
  source 1..80: mol_type = other DNA
acttatcttcttgttgtggcacacctgctaagaaactttgtgttgttcctggtaatgtcgttcctggtgatgtgatcatc

SEQ ID NO: 11017 - DNA, 80 bp, synthetic construct
  misc_feature 1..80: note = Synthetic: >NC_005831.2-cand-1140-1219
  source 1..80: mol_type = other DNA
acctcaactagtgctggttgtggtgttaaatactatgctggcttagttgttaaacatattactaacattactggtgtgtc

SEQ ID NO: 11018 - DNA, 80 bp, synthetic construct
  misc_feature 1..80: note = Synthetic: >NC_005831.2-cand-1220-1299
  source 1..80: mol_type = other DNA
tttatggcgtgttacagctgttcattctgatggaatgtttgtggcatcatcttcttatgatgcactcttgcatagaaatt

SEQ ID NO: 11019 - DNA, 80 bp, synthetic construct
  misc_feature 1..80: note = Synthetic: >NC_005831.2-cand-1300-1379
  source 1..80: mol_type = other DNA
cattagaccctttttgctttgatgttaacactttactttctaatcaattacgtctagcttttcttggtgcttctgttaca

SEQ ID NO: 11020 - DNA, 80 bp, synthetic construct
  misc_feature 1..80: note = Synthetic: >NC_005831.2-cand-1380-1459
  source 1..80: mol_type = other DNA
gaagatgttaaatttgctgctagcactggtgttattgacattagtgctggtatgtttggtctttacgatgacatattgac

SEQ ID NO: 11021 - DNA, 80 bp, synthetic construct
  misc_feature 1..80: note = Synthetic: >NC_005831.2-cand-1460-1539
  source 1..80: mol_type = other DNA
aaacaataaaccttggtttgtacgcaaagcttctgggctttttgatgcaatctgggatgcttttgttgccgctattaagc

SEQ ID NO: 11022 - DNA, 80 bp, synthetic construct
  misc_feature 1..80: note = Synthetic: >NC_005831.2-cand-1540-1619
  source 1..80: mol_type = other DNA
ttgtaccaactactactggtgttttggttaggtttgttaagtctattgcttcaactgttttaactgtctctaatggtgtt

SEQ ID NO: 11023 - DNA, 80 bp, synthetic construct
  misc_feature 1..80: note = Synthetic: >NC_005831.2-cand-1620-1699
  source 1..80: mol_type = other DNA
attattatgtgtgcagatgttccagatgcttttcaatcagtttatcgcacatttacacaagctatttgtgctgcatttga

SEQ ID NO: 11024 - DNA, 80 bp, synthetic construct
  misc_feature 1..80: note = Synthetic: >NC_005831.2-cand-1700-1779
  source 1..80: mol_type = other DNA
tttttctttagatgtatttaaaattggtgatgttaaatttaaacgacttggtgattatgttcttactgaaaacgctcttg

SEQ ID NO: 11025 - DNA, 80 bp, synthetic construct
  misc_feature 1..80: note = Synthetic: >NC_005831.2-cand-1780-1859
  source 1..80: mol_type = other DNA
ttcgtttgactactgaagttgttcgtggtgttcgtgatgctcgcataaagaaagccatgtttactaaagtagttgtaggt

SEQ ID NO: 11026 - DNA, 80 bp, synthetic construct
  misc_feature 1..80: note = Synthetic: >NC_005831.2-cand-1860-1939
  source 1..80: mol_type = other DNA
cctacaactgaagttaagttttctgttattgaacttgccactgttaatttgcgtcttgttgattgtgcacctgtagtttg

SEQ ID NO: 11027 - DNA, 80 bp, synthetic construct
  misc_feature 1..80: note = Synthetic: >NC_005831.2-cand-1940-2019
  source 1..80: mol_type = other DNA
ccctaaaggtaagattgttgttattgctggacaagcttttttctatagtggtggtttttatcgttttatggttgatccta

SEQ ID NO: 11028 - DNA, 80 bp, synthetic construct
  misc_feature 1..80: note = Synthetic: >NC_005831.2-cand-2020-2099
  source 1..80: mol_type = other DNA
caactgtattaaatgatcctgtttttactggtgatttattctacactattaagtttagtggttttaagcttgatggtttt

SEQ ID NO: 11029 - DNA, 80 bp, synthetic construct
  misc_feature 1..80: note = Synthetic: >NC_005831.2-cand-2100-2179
  source 1..80: mol_type = other DNA
aaccatcagtttgttactgctagttctgctacagatgccattattgctgttgagctgttgttattggattttaaaactgc

SEQ ID NO: 11030 - DNA, 80 bp, synthetic construct
  misc_feature 1..80: note = Synthetic: >NC_005831.2-cand-2180-2259
  source 1..80: mol_type = other DNA
agtttttgtgtacacatgtgtggttgatggctgtagtgtcattgttagacgtgatgctacattcgctacacatgtgtgtt

SEQ ID NO: 11031 - DNA, 80 bp, synthetic construct
  misc_feature 1..80: note = Synthetic: >NC_005831.2-cand-8660-8739
  source 1..80: mol_type = other DNA
tactaggacagtgcgttatgcttggatttggcatattgcatacattgttgcatacttcttgttaataccatggtggcttc

SEQ ID NO: 11032 - DNA, 80 bp, synthetic construct
  misc_feature 1..80: note = Synthetic: >NC_005831.2-cand-8730-8809
  source 1..80: mol_type = other DNA
tggtggcttctcacatggtttagttttgctgcatttttagagcttttacctaatgtttttaagttaaaaatctctactca

SEQ ID NO: 11033 - DNA, 80 bp, synthetic construct
  misc_feature 1..80: note = Synthetic: >NC_005831.2-cand-8810-8889
  source 1..80: mol_type = other DNA
attgtttgaaggtgataagtttataggtacttttgagagtgctgctgcaggtacatttgttcttgacatgcgttcttatg

SEQ ID NO: 11034 - DNA, 80 bp, synthetic construct
  misc_feature 1..80: note = Synthetic: >NC_005831.2-cand-8890-8969
  source 1..80: mol_type = other DNA
aaaggctgataaatactatttcacctgagaaacttaagaattatgctgcaagttataataaatataaatattatagtggt

SEQ ID NO: 11035 - DNA, 80 bp, synthetic construct
  misc_feature 1..80: note = Synthetic: >NC_005831.2-cand-8970-9049
  source 1..80: mol_type = other DNA
agtgctagtgaggctgattatcgttgtgcttgttatgctcatttagccaaggctatgttagattatgcaaaagatcataa

SEQ ID NO: 11036 - DNA, 80 bp, synthetic construct
  misc_feature 1..80: note = Synthetic: >NC_005831.2-cand-9050-9129
  source 1..80: mol_type = other DNA
tgacatgttatattctccacctactattagctacaattccaccttacaatctggtcttaagaagatggcacaaccatctg

SEQ ID NO: 11037 - DNA, 80 bp, synthetic construct
  misc_feature 1..80: note = Synthetic: >NC_005831.2-cand-9130-9209
  source 1..80: mol_type = other DNA
gttgtgttgagagatgtgtggttcgcgtctgttatggtagtactgtgcttaatggagtttggttaggtgacactgttact

SEQ ID NO: 11038 - DNA, 80 bp, synthetic construct
  misc_feature 1..80: note = Synthetic: >NC_005831.2-cand-9210-9289
  source 1..80: mol_type = other DNA
tgtcctagacatgtcatagcaccatcaaccactgttcttattgattatgatcatgcatatagtactatgcgtttgcataa

SEQ ID NO: 11039 - DNA, 80 bp, synthetic construct
  misc_feature 1..80: note = Synthetic: >NC_005831.2-cand-9300-9379
  source 1..80: mol_type = other DNA
tctcataatggtgtcttcttgggagttgtcggtgttacaatgcatggttctgtgttgcgtattaaggtttcacaatctaa

SEQ ID NO: 11040 - DNA, 80 bp, synthetic construct
  misc_feature 1..80: note = Synthetic: >NC_005831.2-cand-9380-9459
  source 1..80: mol_type = other DNA
tgtacatacacctaaacatgtttttaaaacgttgaaacctggtgattcttttaatattttagcatgttatgaaggtattg

SEQ ID NO: 11041 - DNA, 80 bp, synthetic construct
  misc_feature 1..80: note = Synthetic: >NC_005831.2-cand-9460-9539
  source 1..80: mol_type = other DNA
catctggtgtttttggtgttaatttacgtacaaactttactattaaaggttcttttataaatggagcttgtggttctcct

SEQ ID NO: 11042 - DNA, 80 bp, synthetic construct
  misc_feature 1..80: note = Synthetic: >NC_005831.2-cand-9540-9619
  source 1..80: mol_type = other DNA
ggttataatgttagaaatgatggtactgttgagttttgttatttacaccaaattgagttaggtagtggtgctcatgttgg

SEQ ID NO: 11043 - DNA, 80 bp, synthetic construct
  misc_feature 1..80: note = Synthetic: >NC_005831.2-cand-9620-9699
  source 1..80: mol_type = other DNA
ttctgattttactggtagtgtttatggtaattttgatgaccaacctagtttgcaagttgagagtgccaaccttatgctat

SEQ ID NO: 11044 - DNA, 80 bp, synthetic construct
  misc_feature 1..80: note = Synthetic: >NC_005831.2-cand-9700-9779
  source 1..80: mol_type = other DNA
cagataatgttgttgcctttttgtatgctgctttgttgaatggttgtaggtggtggttgtgttcaactagagttaatgtt

SEQ ID NO: 11045 - DNA, 80 bp, synthetic construct
  misc_feature 1..80: note = Synthetic: >NC_005831.2-cand-9780-9859
  source 1..80: mol_type = other DNA
gatggttttaatgaatgggctatggctaatggttatacaagtgtttctagtgttgagtgctattctattttggcagcaaa

SEQ ID NO: 11046 - DNA, 80 bp, synthetic construct
  misc_feature 1..80: note = Synthetic: >NC_005831.2-cand-9860-9939
  source 1..80: mol_type = other DNA
aactggtgttagtgttgaacaattgttagcttccattcaacatcttcatgaaggttttggtggtaaaaacatacttggtt

SEQ ID NO: 11047 - DNA, 80 bp, synthetic construct
  misc_feature 1..80: note = Synthetic: >NC_006213.1-cand-19590-19669
  source 1..80: mol_type = other DNA
atttttattaataatacaacataccctactaatgtggccgttgaattatttgccaagcgcagtgttcgacaccacccaga

SEQ ID NO: 11048 - DNA, 80 bp, synthetic construct
  misc_feature 1..80: note = Synthetic: >NC_006213.1-cand-19660-19739
  source 1..80: mol_type = other DNA
accacccagagcttaagctctttagaaatttaaatatagacgtgtgttggaagcacgtcatttgggattatgctagagaa

SEQ ID NO: 11049 - DNA, 80 bp, synthetic construct
  misc_feature 1..80: note = Synthetic: >NC_006213.1-cand-19740-19819
  source 1..80: mol_type = other DNA
agtatattttgcagtaatacctatggtgtctgcatgtatacagatttaaagttcattgataaattgaatgtcctttttga

SEQ ID NO: 11050 - DNA, 80 bp, synthetic construct
  misc_feature 1..80: note = Synthetic: >NC_006213.1-cand-19820-19899
  source 1..80: mol_type = other DNA
tggtcgtgataatggtgctcttgaagcttttaaacgttctaataatggcgtttacatttccacgacaaaagttaagagtc

SEQ ID NO: 11051 - DNA, 80 bp, synthetic construct
  misc_feature 1..80: note = Synthetic: >NC_006213.1-cand-19900-19979
  source 1..80: mol_type = other DNA
tttcgatgataagaggtccaccgcgtgctgaattaaatggcgtagtggtggacaaggttggagacactgattgtgtgttt

SEQ ID NO: 11052 - DNA, 80 bp, synthetic construct
  misc_feature 1..80: note = Synthetic: >NC_006213.1-cand-19980-20059
  source 1..80: mol_type = other DNA
tattttgctgtgcgtaaagaaggtcaggatgtcatcttcagccaattcgacagcctgggagtcagctctaaccagagccc

SEQ ID NO: 11053 - DNA, 80 bp, synthetic construct
  misc_feature 1..80: note = Synthetic: >NC_006213.1-cand-20080-20159
  source 1..80: mol_type = other DNA
atggtaaacccggtaatgtcggtggtaatgatgctctgtcaatctctactatctttacacaaagccgtgttattagctct

SEQ ID NO: 11054 - DNA, 80 bp, synthetic construct
  misc_feature 1..80: note = Synthetic: >NC_006213.1-cand-20140-20219
  source 1..80: mol_type = other DNA
aaagccgtgttattagctcttttacatgtcgtactgatatggaaaaagattttatagctttagatcaagatgtgtttatt

SEQ ID NO: 11055 - DNA, 80 bp, synthetic construct
  misc_feature 1..80: note = Synthetic: >NC_006213.1-cand-20220-20299
  source 1..80: mol_type = other DNA
cagaagtatggtttggaggactatgcctttgaacacattgtttatggtaacttcaaccagaagattattggtggtttgca

SEQ ID NO: 11056 - DNA, 80 bp, synthetic construct
  misc_feature 1..80: note = Synthetic: >NC_006213.1-cand-20290-20369
  source 1..80: mol_type = other DNA
gtggtttgcatttgttaataggcttgtaccgaagacagcaaacttccaatctggttgttcaggagtttgtttcatatgac

SEQ ID NO: 11057 - DNA, 80 bp, synthetic construct
  misc_feature 1..80: note = Synthetic: >NC_006213.1-cand-20370-20449
  source 1..80: mol_type = other DNA
tccagcatacactcttattttatcactgacgagaagagtggtggtagtaagagtgtttgcactgttatagatattttgtt

SEQ ID NO: 11058 - DNA, 80 bp, synthetic construct
  misc_feature 1..80: note = Synthetic: >NC_006213.1-cand-20450-20529
  source 1..80: mol_type = other DNA
ggatgattttgtggctcttgttaagtcacttaatcttaattgtgtgagtaaggttgttaatgttaatgttgattttaaag

SEQ ID NO: 11059 - DNA, 80 bp, synthetic construct
  misc_feature 1..80: note = Synthetic: >NC_006213.1-cand-20530-20609
  source 1..80: mol_type = other DNA
attttcagtttatgctttggtgtaacgatgagaaagttatgactttctatcctcgtttgcaagctgcatctgactggaag

SEQ ID NO: 11060 - DNA, 80 bp, synthetic construct
  misc_feature 1..80: note = Synthetic: >NC_006213.1-cand-20610-20689
  source 1..80: mol_type = other DNA
cctggttattctatgcctgtattatataagtatttgaattctccaatggaaagagttagtctctggaattatgggaagcc

SEQ ID NO: 11061 - DNA, 80 bp, synthetic construct
  misc_feature 1..80: note = Synthetic: >NC_006213.1-cand-20690-20769
  source 1..80: mol_type = other DNA
agttactttgcctacaggctgtatgatgaatgttgctaagtatactcagttatgtcaatatctgaatactacaacattag

SEQ ID NO: 11062 - DNA, 80 bp, synthetic construct
  misc_feature 1..80: note = Synthetic: >NC_006213.1-cand-20770-20849
  source 1..80: mol_type = other DNA
ctgtacctgttaatatgcgagttttgcatttaggtgcaggttcagaaaaaggagtagcaccgggttctgcagttcttagg

SEQ ID NO: 11063 - DNA, 80 bp, synthetic construct
  misc_feature 1..80: note = Synthetic: >NC_006213.1-cand-24690-24769
  source 1..80: mol_type = other DNA
ttgggaacgtaagacattttcaaattgtaattttaatatgagcagcctgatgtcttttattcaggcagactcatttactt

SEQ ID NO: 11064 - DNA, 80 bp, synthetic construct
  misc_feature 1..80: note = Synthetic: >NC_006213.1-cand-24780-24859
  source 1..80: mol_type = other DNA
tgatgctgctaagatatatggtatgtgtttttccagcataactatagataagtttgctatacccaatggcaggaaggttg

SEQ ID NO: 11065 - DNA, 80 bp, synthetic construct
  misc_feature 1..80: note = Synthetic: >NC_006213.1-cand-24860-24939
  source 1..80: mol_type = other DNA
acctacaattgggtaatttgggctatttgcagtcatttaactatagaattgatactactgcaacaagttgtcagttgtat

SEQ ID NO: 11066 - DNA, 80 bp, synthetic construct
  misc_feature 1..80: note = Synthetic: >NC_006213.1-cand-24940-25019
  source 1..80: mol_type = other DNA
tataatttacctgctgctaatgtttctgttagcaggtttaatccttctacttggaataagagatttggttttatagaaga

SEQ ID NO: 11067 - DNA, 80 bp, synthetic construct
  misc_feature 1..80: note = Synthetic: >NC_006213.1-cand-25020-25099
  source 1..80: mol_type = other DNA
ttctgtttttaagcctcgacctgcaggtgttcttactaatcatgatgtagtttatgcacaacactgtttcaaagctccta

SEQ ID NO: 11068 - DNA, 80 bp, synthetic construct
  misc_feature 1..80: note = Synthetic: >NC_006213.1-cand-25100-25179
  source 1..80: mol_type = other DNA
aaaatttctgtccgtgtaaattgaatggttcgtgtgtaggtagtggtcctggtaaaaataatggtataggcacttgtcct

SEQ ID NO: 11069 - DNA, 80 bp, synthetic construct
  misc_feature 1..80: note = Synthetic: >NC_006213.1-cand-25180-25259
  source 1..80: mol_type = other DNA
gcaggtactaattatttaacttgtgataatttgtgcactcctgatcctattacatttacaggtacttataagtgccccca

SEQ ID NO: 11070 - DNA, 80 bp, synthetic construct
  misc_feature 1..80: note = Synthetic: >NC_006213.1-cand-25260-25339
  source 1..80: mol_type = other DNA
aactaaatctttagttggcataggtgagcactgttcgggtcttgctgttaaaagtgattattgtggaggcaattcttgta

SEQ ID NO: 11071 - DNA, 80 bp, synthetic construct
  misc_feature 1..80: note = Synthetic: >NC_006213.1-cand-25340-25419
  source 1..80: mol_type = other DNA
cttgccgaccacaagcatttttgggttggtctgcagactcttgtttacaaggagacaagtgtaatatttttgctaatttt

SEQ ID NO: 11072 - DNA, 80 bp, synthetic construct
  misc_feature 1..80: note = Synthetic: >NC_006213.1-cand-25420-25499
  source 1..80: mol_type = other DNA
attttgcatgatgttaatagtggtcttacttgttctactgatttacaaaaagctaacacagacataattcttggtgtttg

SEQ ID NO: 11073 - DNA, 80 bp, synthetic construct
  misc_feature 1..80: note = Synthetic: >NC_006213.1-cand-25510-25589
  source 1..80: mol_type = other DNA
gacctctatggtattttaggccaaggcatttttgttgaggttaatgcgacttattataatagttggcagaaccttttata

SEQ ID NO: 11074 - DNA, 80 bp, synthetic construct
  misc_feature 1..80: note = Synthetic: >NC_006213.1-cand-25590-25669
  source 1..80: mol_type = other DNA
tgattctaatggtaatctctacggttttagagactacataacaaacagaacttttatgattcgtagttgctatagcggtc

SEQ ID NO: 11075 - DNA, 80 bp, synthetic construct
  misc_feature 1..80: note = Synthetic: >NC_006213.1-cand-25670-25749
  source 1..80: mol_type = other DNA
gtgtttctgcggcctttcacgctaactcttccgaaccagcattgctatttcggaatattaaatgcaactacgtttttaat

SEQ ID NO: 11076 - DNA, 80 bp, synthetic construct
  misc_feature 1..80: note = Synthetic: >NC_006213.1-cand-25750-25829
  source 1..80: mol_type = other DNA
aatagtcttacacgacagctgcaacccattaactattttgatagttatcttggttgtgttgtcaatgcttataatagtac

SEQ ID NO: 11077 - DNA, 80 bp, synthetic construct
  misc_feature 1..80: note = Synthetic: >NC_006213.1-cand-25830-25909
  source 1..80: mol_type = other DNA
tgctatttctgttcaaacatgtgatctcacagtaggtagtggttactgtgtggattactctaaaaacagacgaagtcgtg

SEQ ID NO: 11078 - DNA, 80 bp, synthetic construct
  misc_feature 1..80: note = Synthetic: >NC_006213.1-cand-25900-25979
  source 1..80: mol_type = other DNA
cgaagtcgtggagcgattaccactggttatcggtttactaattttgagccatttactgttaattcagtaaacgatagttt

SEQ ID NO: 11079 - DNA, 80 bp, synthetic construct
  misc_feature 1..80: note = Synthetic: >NC_007374.1-cand-740-819
  source 1..80: mol_type = other DNA
tggactaggacgtagaatggaattctcttggaccctcttggatatgtgggacaccataaattttgagagcactggtaatc

SEQ ID NO: 11080 - DNA, 80 bp, synthetic construct
  misc_feature 1..80: note = Synthetic: >NC_007374.1-cand-820-899
  source 1..80: mol_type = other DNA
tagttgcaccagagtatgggttcaaaatatcgaaaagaggtagttcagggatcatgaagacagaaggaacacttgagaac

SEQ ID NO: 11081 - DNA, 80 bp, synthetic construct
  misc_feature 1..80: note = Synthetic: >NC_007374.1-cand-900-979
  source 1..80: mol_type = other DNA
tgtgaaaccaaatgccaaactcctttgggagcaataaatacaacactaccttttcacaatgtccacccactgacaatagg

SEQ ID NO: 11082 - DNA, 80 bp, synthetic construct
  misc_feature 1..80: note = Synthetic: >NC_007374.1-cand-980-1059
  source 1..80: mol_type = other DNA
tgaatgccccaaatatgtaaaatcggagaaattggtcttagcaacaggactaaggaatgttccccagattgaatcaagag

SEQ ID NO: 11083 - DNA, 80 bp, synthetic construct
  misc_feature 1..80: note = Synthetic: >NC_007374.1-cand-1070-1149
  source 1..80: mol_type = other DNA
ggcaatagctggttttatagaaggaggatggcaaggaatggttgatggttggtatggataccatcacagcaatgaccagg

SEQ ID NO: 11084 - DNA, 80 bp, synthetic construct
  misc_feature 1..80: note = Synthetic: >NC_007374.1-cand-1140-1219
  source 1..80: mol_type = other DNA
aatgaccagggatcagggtatgcagcagacaaagaatccactcaaaaggcatttaatggaatcaccaacaaggtaaattc

SEQ ID NO: 11085 - DNA, 80 bp, synthetic construct
  misc_feature 1..80: note = Synthetic: >NC_007374.1-cand-1220-1299
  source 1..80: mol_type = other DNA
tgtgattgaaaagatgaacacccaatttgaagctgttgggaaagaattcagtaacttagagaaaagactggagaacttga

SEQ ID NO: 11086 - DNA, 80 bp, synthetic construct
  misc_feature 1..80: note = Synthetic: >NC_007374.1-cand-1290-1369
  source 1..80: mol_type = other DNA
gagaacttgaacaaaaagatggaagacgggtttctagatgtgtggacatacaatgcagagcttctagttctgatggaaaa

SEQ ID NO: 11087 - DNA, 80 bp, synthetic construct
  misc_feature 1..80: note = Synthetic: >NC_007374.1-cand-1370-1449
  source 1..80: mol_type = other DNA
tgagaggacacttgactttcatgattctaatgtcaagaatctgtatgataaagtcagaatgcagctgagagacaacgtca

SEQ ID NO: 11088 - DNA, 80 bp, synthetic construct
  misc_feature 1..80: note = Synthetic: >NC_007374.1-cand-1450-1529
  source 1..80: mol_type = other DNA
aagaactaggaaatggatgttttgaattttatcacaaatgtgacaatgaatgcatggatagtgtgaaaaacgggacatat

SEQ ID NO: 11089 - DNA, 80 bp, synthetic construct
  misc_feature 1..80: note = Synthetic: >NC_007374.1-cand-1500-1579
  source 1..80: mol_type = other DNA
tgcatggatagtgtgaaaaacgggacatatgattatcccaagtatgaagaagaatctaaactaaatagaaatgaaatcaa

SEQ ID NO: 11090 - DNA, 80 bp, synthetic construct
  misc_feature 1..80: note = Synthetic: >NC_007374.1-cand-1610-1689
  source 1..80: mol_type = other DNA
tcaaatccttgccatttatgctacagtagcaggttctctgtcactggcaatcatgatggctgggatctctttctggatgt

SEQ ID NO: 11091 - DNA, 80 bp, synthetic construct
  misc_feature 1..80: note = Synthetic: >NC_007374.1-cand-1680-1759
  source 1..80: mol_type = other DNA
ttctggatgtgctccaacgggtctctgcagtgcagaatctgcatatgattgtaagtcattttataattaaaaacaccctt

SEQ ID NO: 11092 - DNA, 80 bp, synthetic construct
  misc_feature 1..80: note = Synthetic: >NC_007375.1-cand-70-149
  source 1..80: mol_type = other DNA
cataagtactacattcccttatactggagatcctccatacagccatgggacaggaacaggatacaccatggacacagtca

SEQ ID NO: 11093 - DNA, 80 bp, synthetic construct
  misc_feature 1..80: note = Synthetic: >NC_007375.1-cand-180-259
  source 1..80: mol_type = other DNA
agtggacaacaaacacggaaactggagcgccccaacttaacccaattgatggaccactacctgaggacaatgaaccaagt

SEQ ID NO: 11094 - DNA, 80 bp, synthetic construct
  misc_feature 1..80: note = Synthetic: >NC_007375.1-cand-230-309
  source 1..80: mol_type = other DNA
ggaccactacctgaggacaatgaaccaagtggatatgcacaaacagactgcgtcctggaagcaatggctttccttgagga

SEQ ID NO: 11095 - DNA, 80 bp, synthetic construct
  misc_feature 1..80: note = Synthetic: >NC_009823.1-cand-6230-6309
  source 1..80: mol_type = other DNA
caactggattactgaggactgccccatcccatgcggcggctcgtggctccgcgatgtgtgggactgggtttgcaccatcc

SEQ ID NO: 11096 - DNA, 80 bp, synthetic construct
  misc_feature 1..80: note = Synthetic: >NC_009823.1-cand-6300-6379
  source 1..80: mol_type = other DNA
tgcaccatcctaacagactttaaaaattggctgacctccaaattattcccaaagatgcccggcctcccctttgtctcctg

SEQ ID NO: 11097 - DNA, 80 bp, synthetic construct
  misc_feature 1..80: note = Synthetic: >NC_009823.1-cand-6390-6469
  source 1..80: mol_type = other DNA
tacaagggcgtgtgggccggcactggcatcatgaccacacggtgtccttgcggcgccaatatctctggcaatgtccgctt

SEQ ID NO: 11098 - DNA, 80 bp, synthetic construct
  misc_feature 1..80: note = Synthetic: >NC_009823.1-cand-6520-6599
  source 1..80: mol_type = other DNA
ggacctttcctatcaattgttacacggagggccagtgcgtgccgaaacccgcgccaaactttaaggtcgccatctggagg

SEQ ID NO: 11099 - DNA, 80 bp, synthetic construct
  misc_feature 1..80: note = Synthetic: >NC_009823.1-cand-6550-6629
  source 1..80: mol_type = other DNA
gccagtgcgtgccgaaacccgcgccaaactttaaggtcgccatctggagggtggcggcctcagagtacgcggaggtgacg

SEQ ID NO: 11100 - DNA, 80 bp, synthetic construct
  misc_feature 1..80: note = Synthetic: >NC_009823.1-cand-6630-6709
  source 1..80: mol_type = other DNA
cagcacgggtcataccactacataacaggactcaccactgataacttgaaagtcccctgccaactaccctctcccgagtt

SEQ ID NO: 11101 - DNA, 80 bp, synthetic construct
  misc_feature 1..80: note = Synthetic: >NC_009823.1-cand-6710-6789
  source 1..80: mol_type = other DNA
cttttcctgggtggacggagtgcagatccataggtttgcccccacaccgaagccgtttttccgggatgaggtctcgttct

SEQ ID NO: 11102 - DNA, 80 bp, synthetic construct
  misc_feature 1..80: note = Synthetic: >NC_009823.1-cand-6790-6869
  source 1..80: mol_type = other DNA
gcgttgggcttaattcatttgtcgtcgggtcccagcttccttgcgaccctgaacccgacacagacgtattgatgtccatg

SEQ ID NO: 11103 - DNA, 80 bp, synthetic construct
  misc_feature 1..80: note = Synthetic: >NC_009823.1-cand-6840-6919
  source 1..80: mol_type = other DNA
gaacccgacacagacgtattgatgtccatgctaacagatccatctcatatcacggcggagactgcagcgcggcgtttagc

SEQ ID NO: 11104 - DNA, 80 bp, synthetic construct
  misc_feature 1..80: note = Synthetic: >NC_009823.1-cand-6950-7029
  source 1..80: mol_type = other DNA
ctcggcgagccagctatcggcaccatcgctgcgagccacctgcaccacccacggcaaagcctatgatgtggacatggtgg

SEQ ID NO: 11105 - DNA, 80 bp, synthetic construct
  misc_feature 1..80: note = Synthetic: >NC_009823.1-cand-7050-7129
  source 1..80: mol_type = other DNA
ggcgatgtgactcggatagagtctgggtccaaagtggtcgttctggactctctcgacccaatggtcgaagaaaggagcga

SEQ ID NO: 11106 - DNA, 80 bp, synthetic construct
  misc_feature 1..80: note = Synthetic: >NC_009823.1-cand-7110-7189
  source 1..80: mol_type = other DNA
atggtcgaagaaaggagcgaccttgagccttcgataccatcagaatacatgctccccaagaagaggttcccaccagcttt

SEQ ID NO: 11107 - DNA, 80 bp, synthetic construct
  misc_feature 1..80: note = Synthetic: >NC_009823.1-cand-7190-7269
  source 1..80: mol_type = other DNA
accggcctgggcacggcctgattacaacccaccgcttgtggaatcgtggaaaaggccagattaccaaccggccactgttg

SEQ ID NO: 11108 - DNA, 80 bp, synthetic construct
  misc_feature 1..80: note = Synthetic: >NC_009823.1-cand-7270-7349
  source 1..80: mol_type = other DNA
cgggctgtgctctccctcctcctaggaaaaccccgacgcctcccccaaggaggcgccggacagtgggcctaagtgaggac

SEQ ID NO: 11109 - DNA, 80 bp, synthetic construct
  misc_feature 1..80: note = Synthetic: >NC_009823.1-cand-7350-7429
  source 1..80: mol_type = other DNA
tccataggagatgcccttcaacagctggccattaagtcctttggccagccccccccaagcggcgattcaggcctttccac

SEQ ID NO: 11110 - DNA, 80 bp, synthetic construct
  misc_feature 1..80: note = Synthetic: >NC_009823.1-cand-7440-7519
  source 1..80: mol_type = other DNA
gctgccgattccggcagtcagacgcctcctgatgagttggccctttcggagacaggttccatctcttccatgccccccct

SEQ ID NO: 11111 - DNA, 80 bp, synthetic construct
  misc_feature 1..80: note = Synthetic: >NC_010277.2-cand-2410-2489
  source 1..80: mol_type = other DNA
acaagaattatgagaattatttcatgcattcctattcagttaagtaggccccagaaaaacaaacacaggaaatatgaagc

SEQ ID NO: 11112 - DNA, 80 bp, synthetic construct
  misc_feature 1..80: note = Synthetic: >NC_010277.2-cand-2490-2569
  source 1..80: mol_type = other DNA
agatgcctttattgagaaaaagtaccagaatcttgggtttcttcagtttcctcagggccctcttcctcaataagaatatt

SEQ ID NO: 11113 - DNA, 80 bp, synthetic construct
  misc_feature 1..80: note = Synthetic: >NC_010277.2-cand-2570-2649
  source 1..80: mol_type = other DNA
gagcagagggtcctgaccagcttctacattttctatcatttgacaaaatttaccatatgatatttcactctgtaaaattt

SEQ ID NO: 11114 - DNA, 80 bp, synthetic construct
  misc_feature 1..80: note = Synthetic: >NC_010277.2-cand-2650-2729
  source 1..80: mol_type = other DNA
gcttccagtttttaatttcttcttgtaagcaaggcttaaaggttgtatcaggcaagcaccaaataagacaaagcaataaa

SEQ ID NO: 11115 - DNA, 80 bp, synthetic construct
  misc_feature 1..80: note = Synthetic: >NC_010277.2-cand-2720-2799
  source 1..80: mol_type = other DNA
aagcaataaagtggttccactttgaagaattcttctttttcttatttccatgttctgatccagggaatctcttagatttg

SEQ ID NO: 11116 - DNA, 80 bp, synthetic construct
  misc_feature 1..80: note = Synthetic: >NC_010277.2-cand-2810-2889
  source 1..80: mol_type = other DNA
aaagtgtaaagtataactaaatcttgctattaatgttttgggaataaaataatcattagcagtaacaatacaaggaggaa

SEQ ID NO: 11117 - DNA, 80 bp, synthetic construct
  misc_feature 1..80: note = Synthetic: >NC_010277.2-cand-2890-2969
  source 1..80: mol_type = other DNA
aaatctgatgctttttattcacatgcttcttctctaagcttacagctacagcaccatctagatgatctcttaagttatca

SEQ ID NO: 11118 - DNA, 80 bp, synthetic construct
  misc_feature 1..80: note = Synthetic: >NC_010277.2-cand-2970-3049
  source 1..80: mol_type = other DNA
aggttatttattccttgccctggttgcagatctttatttaggctattttgccctttcacatcctcaaaaacaaccataaa

SEQ ID NO: 11119 - DNA, 80 bp, synthetic construct
  misc_feature 1..80: note = Synthetic: >NC_010277.2-cand-3050-3129
  source 1..80: mol_type = other DNA
tttatccaaagcacatcctagttcaaaaggcagtttatcagatggacagtttatattcaaggccttcccttctagcaaat

SEQ ID NO: 11120 - DNA, 80 bp, synthetic construct
  misc_feature 1..80: note = Synthetic: >NC_010277.2-cand-3130-3209
  source 1..80: mol_type = other DNA
ctattaaggctgcagcaaagcttgtttttccactgttaataggccctttaaaccaaatgtttctatacttaggtatattc

SEQ ID NO: 11121 - DNA, 80 bp, synthetic construct
  misc_feature 1..80: note = Synthetic: >NC_010277.2-cand-3210-3289
  source 1..80: mol_type = other DNA
tctgttaataattgaataattttctgcagcttcttttcaaactcttcaaataagcagcagtaccaggccacaccacccat

SEQ ID NO: 11122 - DNA, 80 bp, synthetic construct
  misc_feature 1..80: note = Synthetic: >NC_010277.2-cand-3260-3339
  source 1..80: mol_type = other DNA
taagcagcagtaccaggccacaccacccatataatacagtagatctattgtatctaaatctcttaatctctctaggtgct

SEQ ID NO: 11123 - DNA, 80 bp, synthetic construct
  misc_feature 1..80: note = Synthetic: >NC_010277.2-cand-3340-3419
  source 1..80: mol_type = other DNA
tcttaaacttcttacatagcatttctgtcctggtcatttccagcatctctaacctccttttggctagaacagtgtctgcg

SEQ ID NO: 11124 - DNA, 80 bp, synthetic construct
  misc_feature 1..80: note = Synthetic: >NC_010277.2-cand-3420-3499
  source 1..80: mol_type = other DNA
gcttgttggcaaatggttttctgagatttagattcataaaatagcttagcattagaatgatgagcctcatgagccttgtg

SEQ ID NO: 11125 - DNA, 80 bp, synthetic construct
  misc_feature 1..80: note = Synthetic: >NC_010277.2-cand-3500-3579
  source 1..80: mol_type = other DNA
aggtttgaggcgagatctgttttcacacttttggcaaggaaatggttttgcaaagtctagataatgggctaagataataa

SEQ ID NO: 11126 - DNA, 80 bp, synthetic construct
  misc_feature 1..80: note = Synthetic: >NC_010277.2-cand-3580-3659
  source 1..80: mol_type = other DNA
agtggtcgtctagctcatattcacaagcaaattcagcaactaaattccaattacagctggcctctttttctttttcttga

SEQ ID NO: 11127 - DNA, 80 bp, synthetic construct
  misc_feature 1..80: note = Synthetic: >NC_014395.1-cand-1260-1339
  source 1..80: mol_type = other DNA
cagtgacaggaagccactcactcaagacgaccaaagcctggcatgtccagccagccaaggcggcagcaactcgtgataga

SEQ ID NO: 11128 - DNA, 80 bp, synthetic construct
  misc_feature 1..80: note = Synthetic: >NC_014395.1-cand-1340-1419
  source 1..80: mol_type = other DNA
gtcaactcatcccgggaaggattcccttcctttagcttatacttgttgatgagagcctccacagttgctttgccttcttt

SEQ ID NO: 11129 - DNA, 80 bp, synthetic construct
  misc_feature 1..80: note = Synthetic: >NC_014395.1-cand-1420-1499
  source 1..80: mol_type = other DNA
cgacattttcatcatcatcctcctgggcttgttgccacgagttagagccagaacaatcattttcttggcatccttctccc

SEQ ID NO: 11130 - DNA, 80 bp, synthetic construct
  misc_feature 1..80: note = Synthetic: >NC_014395.1-cand-1510-1589
  source 1..80: mol_type = other DNA
accatactgctttaagagttcgataactctacgggcatcaaacccttgataagcaaactctcggacccactgttcaatct

SEQ ID NO: 11131 - DNA, 80 bp, synthetic construct
  misc_feature 1..80: note = Synthetic: >NC_014395.1-cand-1600-1679
  source 1..80: mol_type = other DNA
cactgcttgagcagcaaactggatcgcaagctcttgatagttgtccattattgtaatagtgtttgtatctctagggagct

SEQ ID NO: 11132 - DNA, 80 bp, synthetic construct
  misc_feature 1..80: note = Synthetic: >NC_014396.1-cand-0-79
  source 1..80: mol_type = other DNA
aaagacggtgcattaaatgtatgttttattaacaattctaatctcggttctggtgtgtgaagcggttattagagtgtctc

SEQ ID NO: 11133 - DNA, 80 bp, synthetic construct
  misc_feature 1..80: note = Synthetic: >NC_014396.1-cand-80-159
  source 1..80: mol_type = other DNA
taagctccacaagagaagagacctgctttggtgactccactaacccagagatgattgaaggagcttgggattcactcaga

SEQ ID NO: 11134 - DNA, 80 bp, synthetic construct
  misc_feature 1..80: note = Synthetic: >NC_014396.1-cand-160-239
  source 1..80: mol_type = other DNA
gaggaggagatgccggaggagctctcctgttctatatcaggcataagagaggttaagacctcaagccaggagttatacag

SEQ ID NO: 11135 - DNA, 80 bp, synthetic construct
  misc_feature 1..80: note = Synthetic: >NC_014396.1-cand-240-319
  source 1..80: mol_type = other DNA
ggcattaaaagccatcattgctgctgatggcttgaacaacatcacctgccatggtaaggatcctgaggacaagatttccc

SEQ ID NO: 11136 - DNA, 80 bp, synthetic construct
  misc_feature 1..80: note = Synthetic: >NC_014396.1-cand-360-439
  source 1..80: mol_type = other DNA
tcggtgtgagagacgaagagatgctaagcaaatagggagagaaaccatggcagggattgcaatgacagtccttccagcct

SEQ ID NO: 11137 - DNA, 80 bp, synthetic construct
  misc_feature 1..80: note = Synthetic: >NC_014396.1-cand-400-479
  source 1..80: mol_type = other DNA
gaaaccatggcagggattgcaatgacagtccttccagccttagcagtttttgctttggcacctgttgtttttgctgaaga

SEQ ID NO: 11138 - DNA, 80 bp, synthetic construct
  misc_feature 1..80: note = Synthetic: >NC_014396.1-cand-430-509
  source 1..80: mol_type = other DNA
cttccagccttagcagtttttgctttggcacctgttgtttttgctgaagacccccatctcagaaacagaccagggaaggg

SEQ ID NO: 11139 - DNA, 80 bp, synthetic construct
  misc_feature 1..80: note = Synthetic: >NC_014396.1-cand-580-659
  source 1..80: mol_type = other DNA
agcagttttgatgtcttgcttgaaaagggaaaatttccccttttccagtcgtatgctcatcatagaactctactagaggc

SEQ ID NO: 11140 - DNA, 80 bp, synthetic construct
  misc_feature 1..80: note = Synthetic: >NC_014396.1-cand-640-719
  source 1..80: mol_type = other DNA
catagaactctactagaggcagttcacgacaccatcattgcaaaggctgatccacctagctgtgaccttctgagtgctca

SEQ ID NO: 11141 - DNA, 80 bp, synthetic construct
  misc_feature 1..80: note = Synthetic: >NC_014396.1-cand-720-799
  source 1..80: mol_type = other DNA
tgggaacccctgcatgaaagagaaactcgtgatgaagacacactgtccaaatgactaccagtcagctcattacctcaaca

SEQ ID NO: 11142 - DNA, 80 bp, synthetic construct
  misc_feature 1..80: note = Synthetic: >NC_014396.1-cand-800-879
  source 1..80: mol_type = other DNA
atgacgggaaaatggcttcagtcaagtgccctcctaagtatgagctcactgaggactgcaacttttgtaggcagatgaca

SEQ ID NO: 11143 - DNA, 80 bp, synthetic construct
  misc_feature 1..80: note = Synthetic: >NC_021551.1-cand-0-79
  source 1..80: mol_type = other DNA
cattatgtccaagctcattgagttttcagatcttggcgctgagatctcaaatagagaagaccttttcaaactgtctaatg

SEQ ID NO: 11144 - DNA, 80 bp, synthetic construct
  misc_feature 1..80: note = Synthetic: >NC_021551.1-cand-80-159
  source 1..80: mol_type = other DNA
acacatcatcttttaagattataaagccaacagtggctatcaaagattacattggaaccagtacgcattacgtagtttta

SEQ ID NO: 11145 - DNA, 80 bp, synthetic construct
  misc_feature 1..80: note = Synthetic: >NC_021551.1-cand-160-239
  source 1..80: mol_type = other DNA
gatagaagagataatgatgaaactgccgatgttcttactacattgtttcctacttcagttatttttaactgtgaggaagg

SEQ ID NO: 11146 - DNA, 80 bp, synthetic construct
  misc_feature 1..80: note = Synthetic: >NC_021551.1-cand-240-319
  source 1..80: mol_type = other DNA
ttataagtttggtggttgtagacatctccttaataatactcttcatattagcgatggcatgttcagttacggtgttaata

SEQ ID NO: 11147 - DNA, 80 bp, synthetic construct
  misc_feature 1..80: note = Synthetic: >NC_021551.1-cand-320-399
  source 1..80: mol_type = other DNA
gcatacaaaattggattcctcgtgggtggatcgttgataaatgtgatcgccttgatgatcatgtaggtgattatattatc

SEQ ID NO: 11148 - DNA, 80 bp, synthetic construct
  misc_feature 1..80: note = Synthetic: >NC_021551.1-cand-400-479
  source 1..80: mol_type = other DNA
aaattattggtcgactcttgttcatctcaaaccatccgtgaaatgaataaaatgagaccaggaacatatcccaggatgga

SEQ ID NO: 11149 - DNA, 80 bp, synthetic construct
  misc_feature 1..80: note = Synthetic: >NC_021551.1-cand-480-559
  source 1..80: mol_type = other DNA
gcgtgttgaggaagaattcactaactttcttaagaaaatgactactcctcagaaagagattgattttcaatcgtacaact

SEQ ID NO: 11150 - DNA, 80 bp, synthetic construct
  misc_feature 1..80: note = Synthetic: >NC_021551.1-cand-560-639
  source 1..80: mol_type = other DNA
atgctgttcaaagacgacaaataggatatgttgtgagaaaaaccgtgttctcattaattaaatccaacaattggaatgtg

SEQ ID NO: 11151 - DNA, 80 bp, synthetic construct
  misc_feature 1..80: note = Synthetic: >NC_021551.1-cand-650-729
  source 1..80: mol_type = other DNA
gacctgaattcgaatcatttaaagagatcataaatcttcttacagataaaaattacacagggaaatttattacattcaca

SEQ ID NO: 11152 - DNA, 80 bp, synthetic construct
  misc_feature 1..80: note = Synthetic: >NC_021551.1-cand-730-809
  source 1..80: mol_type = other DNA
tttaattcgtcaaaaaaacatagttataaacatcatatcagagaatatttaaacaaaaaagcaggttggaattatgtaca

SEQ ID NO: 11153 - DNA, 80 bp, synthetic construct
  misc_feature 1..80: note = Synthetic: >NC_021551.1-cand-810-889
  source 1..80: mol_type = other DNA
tagaatgcgtcataagtatgaaaatgccttctgtcatttaatttataatcatgtagcgaaacagagatcttactcaacta

SEQ ID NO: 11154 - DNA, 80 bp, synthetic construct
  misc_feature 1..80: note = Synthetic: >NC_021551.1-cand-890-969
  source 1..80: mol_type = other DNA
tatacgttaacaccctctacaatgttggaaactggacagaggcttaccaatggctcgacataaatgttgtagatcatctt

SEQ ID NO: 11155 - DNA, 80 bp, synthetic construct
  misc_feature 1..80: note = Synthetic: >NC_021551.1-cand-970-1049
  source 1..80: mol_type = other DNA
cctgtgattcagaagaattcaataatatttggatacatgttatcgtccaaagagtgttcattttctgtcaacgcagaatc

SEQ ID NO: 11156 - DNA, 80 bp, synthetic construct
  misc_feature 1..80: note = Synthetic: >NC_021551.1-cand-1030-1109
  source 1..80: mol_type = other DNA
ttttctgtcaacgcagaatcagacttagtagtatactctccttccccatatgatgatgattcaaacgtgtggacagtatc

SEQ ID NO: 11157 - DNA, 80 bp, synthetic construct
  misc_feature 1..80: note = Synthetic: >NC_021551.1-cand-1130-1209
  source 1..80: mol_type = other DNA
gtacaacttacaatgaagacgaccgtatcgctgtaaaaaccaataatttaccaaattatgttttcggtggtgtaccattt

SEQ ID NO: 11158 - DNA, 80 bp, synthetic construct
  misc_feature 1..80: note = Synthetic: >NC_021551.1-cand-1210-1289
  source 1..80: mol_type = other DNA
accgctgcggctttgaaattcgattatataaatattgctctatattcactatcaaattctgtaaactccccagaactaat

SEQ ID NO: 11159 - DNA, 80 bp, synthetic construct
  misc_feature 1..80: note = Synthetic: >NC_026436.1-cand-620-699
  source 1..80: mol_type = other DNA
ggtgaaaatggacgaaggacaagggttgcttatgaaagaatgtgcaatatcctcaaaggaaaatttcaaacagctgccca

SEQ ID NO: 11160 - DNA, 80 bp, synthetic construct
  misc_feature 1..80: note = Synthetic: >NC_026436.1-cand-710-789
  source 1..80: mol_type = other DNA
atggatcaagtaagagaaagtcgaaacccaggaaacgctgagattgaagacctcattttcctggcacggtcagcactcat

SEQ ID NO: 11161 - DNA, 80 bp, synthetic construct
  misc_feature 1..80: note = Synthetic: >NC_026436.1-cand-800-879
  source 1..80: mol_type = other DNA
tcagttgcacataaatcctgcctgcctgcttgtgtgtatgggcttgcagtagcaagtgggcatgactttgaaagggaagg

SEQ ID NO: 11162 - DNA, 80 bp, synthetic construct
  misc_feature 1..80: note = Synthetic: >NC_026436.1-cand-880-959
  source 1..80: mol_type = other DNA
gtactcactggtcgggatagacccattcaaattactccaaaacagccaagtggtcagcctgatgagaccaaatgaaaacc

SEQ ID NO: 11163 - DNA, 80 bp, synthetic construct
  misc_feature 1..80: note = Synthetic: >NC_026436.1-cand-960-1039
  source 1..80: mol_type = other DNA
cagctcacaagagtcaattggtgtggatggcatgccactctgctgcatttgaagatttaagagtatcaagtttcataaga

SEQ ID NO: 11164 - DNA, 80 bp, synthetic construct
  misc_feature 1..80: note = Synthetic: >NC_026436.1-cand-1000-1079
  source 1..80: mol_type = other DNA
tgctgcatttgaagatttaagagtatcaagtttcataagaggaaagaaagtgattccaagaggaaagctttccacaagag

SEQ ID NO: 11165 - DNA, 80 bp, synthetic construct
  misc_feature 1..80: note = Synthetic: >NC_026436.1-cand-1120-1199
  source 1..80: mol_type = other DNA
ctccaataccctggaactgagaagcagatactgggccataaggaccaggagtggaggaaataccaatcaacaaaaggcat

SEQ ID NO: 11166 - DNA, 80 bp, synthetic construct
  misc_feature 1..80: note = Synthetic: >NC_026436.1-cand-1210-1289
  source 1..80: mol_type = other DNA
gatcagtgtgcagcctacattctcagtgcagcggaatctcccttttgaaagagcaaccgttatggcagcattcagcggga

SEQ ID NO: 11167 - DNA, 80 bp, synthetic construct
  misc_feature 1..80: note = Synthetic: >NC_026436.1-cand-1290-1369
  source 1..80: mol_type = other DNA
acaatgaaggacggacatccgacatgcgaacagaagttataagaatgatggaaagtgcaaagccagaagatttgtccttc

SEQ ID NO: 11168 - DNA, 80 bp, synthetic construct
  misc_feature 1..80: note = Synthetic: >NC_026437.1-cand-70-149
  source 1..80: mol_type = other DNA
ggaagatccgaaaatcgaaactaacaagtttgctgcaatatgcacacatttggaagtttgtttcatgtattcggatttcc

SEQ ID NO: 11169 - DNA, 80 bp, synthetic construct
  misc_feature 1..80: note = Synthetic: >NC_026437.1-cand-80-159
  source 1..80: mol_type = other DNA
aaaatcgaaactaacaagtttgctgcaatatgcacacatttggaagtttgtttcatgtattcggatttccatttcatcga

SEQ ID NO: 11170 - DNA, 80 bp, synthetic construct
  misc_feature 1..80: note = Synthetic: >NC_026437.1-cand-170-249
  source 1..80: mol_type = other DNA
gaatcaataattgtagaatctggtgacccgaatgcactattgaagcaccgatttgagataattgaaggaagagaccgaat

SEQ ID NO: 11171 - DNA, 80 bp, synthetic construct
  misc_feature 1..80: note = Synthetic: >NC_026437.1-cand-210-289
  source 1..80: mol_type = other DNA
tgaagcaccgatttgagataattgaaggaagagaccgaatcatggcctggacagtggtgaacagtatatgtaacacaaca

SEQ ID NO: 11172 - DNA, 80 bp, synthetic construct
  misc_feature 1..80: note = Synthetic: >NC_026437.1-cand-400-479
  source 1..80: mol_type = other DNA
caacaaaataaaatctgagaagacacacattcacatcttttcattcactggagaggagatggccaccaaagcggactaca

SEQ ID NO: 11173 - DNA, 80 bp, synthetic construct
  misc_feature 1..80: note = Synthetic: >NC_026437.1-cand-490-569
  source 1..80: mol_type = other DNA
agagagcagggcaagaatcaaaactaggcttttcactataagacaagaaatggccagtaggagtctatgggattcctttc

SEQ ID NO: 11174 - DNA, 80 bp, synthetic construct
  misc_feature 1..80: note = Synthetic: >NC_026437.1-cand-580-659
  source 1..80: mol_type = other DNA
aagaggcgaagagacaattgaagaaaaatttgagattacaggaactatgcgcaagcttgccgaccaaagtctcccaccga

SEQ ID NO: 11175 - DNA, 80 bp, synthetic construct
  misc_feature 1..80: note = Synthetic: >NC_027026.1-cand-2990-3069
  source 1..80: mol_type = other DNA
cttatgaaggtatcatcaatgaccgcacccagcggtacaacacctggcttaacctgcgcaacatgcgcttaggcgctgga

SEQ ID NO: 11176 - DNA, 80 bp, synthetic construct
  misc_feature 1..80: note = Synthetic: >NC_027026.1-cand-3070-3149
  source 1..80: mol_type = other DNA
gcgtaccaacatgcaacaatcataggcaagggtggtgtgcgcaatgagatcatacgcacccaagtgctgaaggctcccag

SEQ ID NO: 11177 - DNA, 80 bp, synthetic construct
  misc_feature 1..80: note = Synthetic: >NC_027026.1-cand-3150-3229
  source 1..80: mol_type = other DNA
gaaaggaaaatggtcacacattgattcttctggccccatgaattattttgatgaggcaccgaccccactagtggaatttg

SEQ ID NO: 11178 - DNA, 80 bp, synthetic construct
  misc_feature 1..80: note = Synthetic: >NC_027026.1-cand-3260-3339
  source 1..80: mol_type = other DNA
tgcaccttgggaacgggcgcgtggtgacagtcacccatgtggccacatcatctaacactgtgaacgggctgccatttaag

SEQ ID NO: 11179 - DNA, 80 bp, synthetic construct
  misc_feature 1..80: note = Synthetic: >NC_027026.1-cand-3270-3349
  source 1..80: mol_type = other DNA
gaacgggcgcgtggtgacagtcacccatgtggccacatcatctaacactgtgaacgggctgccatttaaggtcaaggaca

SEQ ID NO: 11180 - DNA, 80 bp, synthetic construct
  misc_feature 1..80: note = Synthetic: >NC_027026.1-cand-3410-3489
  source 1..80: mol_type = other DNA
gggatggtgcgcctgtttactacacaaccaggtaccaccctgtgcttgtgattggtgaagggcaatttgacacacctaca

SEQ ID NO: 11181 - DNA, 80 bp, synthetic construct
  misc_feature 1..80: note = Synthetic: >NC_027026.1-cand-3470-3549
  source 1..80: mol_type = other DNA
ggcaatttgacacacctacaacgactgtcaacggtttccacgttcgcattaccaattcatatccaacaaagaaaggtgat

SEQ ID NO: 11182 - DNA, 80 bp, synthetic construct
  misc_feature 1..80: note = Synthetic: >NC_027026.1-cand-3550-3629
  source 1..80: mol_type = other DNA
tgtggactaccatacttcaatgcactgcgccaggtggttgcccttcatgctgctggcagtacagatgggtcaaccaagtt

SEQ ID NO: 11183 - DNA, 80 bp, synthetic construct
  misc_feature 1..80: note = Synthetic: >NC_027026.1-cand-3670-3749
  source 1..80: mol_type = other DNA
ttcgtctggaagggattgcccgttgttcgtggtagtgatgtcggcggactccccactggcactcgctaccatcgctcccc

SEQ ID NO: 11184 - DNA, 80 bp, synthetic construct
  misc_feature 1..80: note = Synthetic: >NC_027026.1-cand-3710-3789
  source 1..80: mol_type = other DNA
tcggcggactccccactggcactcgctaccatcgctccccagcttggccagagatgcgatctgacgagactcattcacca

SEQ ID NO: 11185 - DNA, 80 bp, synthetic construct
  misc_feature 1..80: note = Synthetic: >NC_027026.1-cand-3790-3869
  source 1..80: mol_type = other DNA
gctccttttggttctggtgacaagcggtatgaattctcacaagtggagatgcttgttaacaacttgagaccataccttga

SEQ ID NO: 11186 - DNA, 80 bp, synthetic construct
  misc_feature 1..80: note = Synthetic: >NC_027026.1-cand-3890-3969
  source 1..80: mol_type = other DNA
cagcattacttaatagagctattgttcacacccgcaattacctacaatcaataattggcactgaacaaagtgaaccactt

SEQ ID NO: 11187 - DNA, 80 bp, synthetic construct
  misc_feature 1..80: note = Synthetic: >NC_027026.1-cand-3950-4029
  source 1..80: mol_type = other DNA
ctgaacaaagtgaaccacttacttatgccatggcatcatcaatgttggaaaaaggcacctcctgtggtccccacattact

SEQ ID NO: 11188 - DNA, 80 bp, synthetic construct
  misc_feature 1..80: note = Synthetic: >NC_027026.1-cand-4030-4109
  source 1..80: mol_type = other DNA
ggccttaagggtgattactgggatgatgaaacacaacagtacacagggtcacttcgagaacatctggaagcggtctggaa

SEQ ID NO: 11189 - DNA, 80 bp, synthetic construct
  misc_feature 1..80: note = Synthetic: >NC_027026.1-cand-4110-4189
  source 1..80: mol_type = other DNA
caaggctatgttagggacaccaccaagccacgattacaaattggcactcaaagatgagttaagaccaaatgagaaaaatg

SEQ ID NO: 11190 - DNA, 80 bp, synthetic construct
  misc_feature 1..80: note = Synthetic: >NC_027026.1-cand-4220-4299
  source 1..80: mol_type = other DNA
ctgatgctgggcttactctcgtgtgttgtgctgctctcaaaccagcagccgcacgactgcaaactgttgtgcctatgaca

SEQ ID NO: 11191 - DNA, 80 bp, synthetic construct
  misc_feature 1..80: note = Synthetic: >NC_035889.1-cand-3360-3439
  source 1..80: mol_type = other DNA
aacaagaggaccatctctgagatcaaccactgcaagcggaagggtgatcgaggaatggtgctgcagggagtgcacaatgc

SEQ ID NO: 11192 - DNA, 80 bp, synthetic construct
  misc_feature 1..80: note = Synthetic: >NC_035889.1-cand-3440-3519
  source 1..80: mol_type = other DNA
ccccactgtcgttccgggctaaagatggctgttggtatggaatggagataaggcccaggaaagaaccagaaagcaactta

SEQ ID NO: 11193 - DNA, 80 bp, synthetic construct
  misc_feature 1..80: note = Synthetic: >NC_035889.1-cand-3520-3599
  source 1..80: mol_type = other DNA
gtaaggtcagtggtgactgcaggatcaactgatcacatggatcacttctcccttggagtgcttgtgattctgctcatggt

SEQ ID NO: 11194 - DNA, 80 bp, synthetic construct
  misc_feature 1..80: note = Synthetic: >NC_035889.1-cand-3600-3679
  source 1..80: mol_type = other DNA
gcaggaagggctgaagaagagaatgaccacaaagatcatcataagcacatcaatggcagtgctggtagctatgatcctgg

SEQ ID NO: 11195 - DNA, 80 bp, synthetic construct
  misc_feature 1..80: note = Synthetic: >NC_035889.1-cand-3680-3759
  source 1..80: mol_type = other DNA
gaggattttcaatgagtgacctggctaagcttgcaattttgatgggcgccaccttcgcggaaatgaacactggaggagat

SEQ ID NO: 11196 - DNA, 80 bp, synthetic construct
  misc_feature 1..80: note = Synthetic: >NC_035889.1-cand-3760-3839
  source 1..80: mol_type = other DNA
gtagctcatctggcgctgatagcggcattcaaagtcagaccagcgttgctggtatctttcatcttcagagctaattggac

SEQ ID NO: 11197 - DNA, 80 bp, synthetic construct
  misc_feature 1..80: note = Synthetic: >NC_035889.1-cand-3840-3919
  source 1..80: mol_type = other DNA
accccgtgaaagcatgctgctggccttggcctcgtgtcttttgcaaactgcgatctccgccttggaaggcgacctgatgg

SEQ ID NO: 11198 - DNA, 80 bp, synthetic construct
  misc_feature 1..80: note = Synthetic: >NC_035889.1-cand-3920-3999
  source 1..80: mol_type = other DNA
ttctcatcaatggttttgctttggcctggttggcaatacgagcgatggttgttccacgcactgataacatcaccttggca

SEQ ID NO: 11199 - DNA, 80 bp, synthetic construct
  misc_feature 1..80: note = Synthetic: >NC_035889.1-cand-3950-4029
  source 1..80: mol_type = other DNA
tggcaatacgagcgatggttgttccacgcactgataacatcaccttggcaatcctggctgctctgacaccactggcccgg

SEQ ID NO: 11200 - DNA, 80 bp, synthetic construct
  misc_feature 1..80: note = Synthetic: >NC_035889.1-cand-4080-4159
  source 1..80: mol_type = other DNA
tatgctcctctctctgaagggaaaaggcagtgtgaagaagaacttaccatttgtcatggccctgggactaaccgctgtga

SEQ ID NO: 11201 - DNA, 80 bp, synthetic construct
  misc_feature 1..80: note = Synthetic: >NC_035889.1-cand-4160-4239
  source 1..80: mol_type = other DNA
ggctggtcgaccccatcaacgtggtgggactgctgttgctcacaaggagtgggaagcggagctggccccctagcgaagta

SEQ ID NO: 11202 - DNA, 80 bp, synthetic construct
  misc_feature 1..80: note = Synthetic: >NC_035889.1-cand-4240-4319
  source 1..80: mol_type = other DNA
ctcacagctgttggcctgatatgcgcattggctggagggttcgccaaggcagatatagagatggctgggcccatggccgc

SEQ ID NO: 11203 - DNA, 80 bp, synthetic construct
  misc_feature 1..80: note = Synthetic: >NC_035889.1-cand-4320-4399
  source 1..80: mol_type = other DNA
ggtcggtctgctaattgtcagttacgtggtctcaggaaagagtgtggacatgtacattgaaagagcaggtgacatcacat

SEQ ID NO: 11204 - DNA, 80 bp, synthetic construct
  misc_feature 1..80: note = Synthetic: >NC_035889.1-cand-4400-4479
  source 1..80: mol_type = other DNA
gggaaaaagatgcggaagtcactggaaacagtccccggctcgatgtggcgctagatgagagtggtgatttctccctggtg

SEQ ID NO: 11205 - DNA, 80 bp, synthetic construct
  misc_feature 1..80: note = Synthetic: >NC_035889.1-cand-4480-4559
  source 1..80: mol_type = other DNA
gaggatgacggtccccccatgagagagatcatactcaaggtggtcctgatgaccatctgtggcatgaacccaatagccat

SEQ ID NO: 11206 - DNA, 80 bp, synthetic construct
  misc_feature 1..80: note = Synthetic: >NC_035889.1-cand-4560-4639
  source 1..80: mol_type = other DNA
accctttgcagctggagcgtggtacgtatacgtgaagactggaaaaaggagtggtgctctatgggatgtgcctgctccca

SEQ ID NO: 11207 - DNA, 80 bp, synthetic construct
  misc_feature 1..80: note = Synthetic: >NC_039218.1-cand-2650-2729
  source 1..80: mol_type = other DNA
ttcaggcaaggaaatgaagacgtcatggaagggatggagccaatcctttgtgtggagtgtcccagaagcgccacggcgtt

SEQ ID NO: 11208 - DNA, 80 bp, synthetic construct
  misc_feature 1..80: note = Synthetic: >NC_039218.1-cand-2750-2829
  source 1..80: mol_type = other DNA
gctggagagtgtcctcttgacaaacgccgaacaggagtcttcacagtggcagagtttgggatgggaatgaggaccaaggt

SEQ ID NO: 11209 - DNA, 80 bp, synthetic construct
  misc_feature 1..80: note = Synthetic: >NC_039218.1-cand-2800-2879
  source 1..80: mol_type = other DNA
agagtttgggatgggaatgaggaccaaggtcttcttggacctacgtgagactgcctcctcagactgtgataccggagtca

SEQ ID NO: 11210 - DNA, 80 bp, synthetic construct
  misc_feature 1..80: note = Synthetic: >NC_039218.1-cand-2890-2969
  source 1..80: mol_type = other DNA
agtcaaaagcggtcatgccgtccacaccgaccaaagtctttggatgaggtcgcacaggaatgcaacgggagtgttcatat

SEQ ID NO: 11211 - DNA, 80 bp, synthetic construct
  misc_feature 1..80: note = Synthetic: >NC_039218.1-cand-2970-3049
  source 1..80: mol_type = other DNA
ctgagttgatagtgaccgacctacggaactgcacatggccagccagccacaccttggacaacgccggtgtcgtggactca

SEQ ID NO: 11212 - DNA, 80 bp, synthetic construct
  misc_feature 1..80: note = Synthetic: >NC_039218.1-cand-3050-3129
  source 1..80: mol_type = other DNA
aaactcttccttccagcaggcctggctggaccacggtcgcactacaatcacattcctgggtacgcagaacaggttaaggg

SEQ ID NO: 11213 - DNA, 80 bp, synthetic construct
  misc_feature 1..80: note = Synthetic: >NC_039218.1-cand-3130-3209
  source 1..80: mol_type = other DNA
gccatggagccaaacgcccctacgggtggtaagggaaccctgccctgggactgcggttaagattgaccagagttgtgaca

SEQ ID NO: 11214 - DNA, 80 bp, synthetic construct
  misc_feature 1..80: note = Synthetic: >NC_039218.1-cand-3220-3299
  source 1..80: mol_type = other DNA
gtcgctgcgtagcacgacggaaagcgggaaggccataccagaatggtgttgccgcacatgtgagctgcccccagtcacat

SEQ ID NO: 11215 - DNA, 80 bp, synthetic construct
  misc_feature 1..80: note = Synthetic: >NC_039218.1-cand-3290-3369
  source 1..80: mol_type = other DNA
ccagtcacattccgtagtgggactgattgctggtatgccatggaaattagaccagtccaccaacagggtggtctggtgag

SEQ ID NO: 11216 - DNA, 80 bp, synthetic construct
  misc_feature 1..80: note = Synthetic: >NC_039218.1-cand-3370-3449
  source 1..80: mol_type = other DNA
gtcgatggtgctggctgacaacggagccatgctaagtgaaggtggagtccctggcattgtggctgtgttcgtggtcctgg

SEQ ID NO: 11217 - DNA, 80 bp, synthetic construct
  misc_feature 1..80: note = Synthetic: >NC_039218.1-cand-3450-3529
  source 1..80: mol_type = other DNA
agctggtcatcaggagacgcccaacaactggcacctcagtggtgtggtgtgggatggttgtccttggccttgttgtgact

SEQ ID NO: 11218 - DNA, 80 bp, synthetic construct
  misc_feature 1..80: note = Synthetic: >NC_039218.1-cand-3530-3609
  source 1..80: mol_type = other DNA
gggctagtcaccattgagggcctatgccgctatgtggtggccgtcggcatcttgatgagcatggagctcggaccagagat

SEQ ID NO: 11219 - DNA, 80 bp, synthetic construct
  misc_feature 1..80: note = Synthetic: >NC_039218.1-cand-3610-3689
  source 1..80: mol_type = other DNA
tgtggcactagttctgctacaggcagtgtttgacatgaggactggcctcctggtggcttttgcagtcaaaagggcctaca

SEQ ID NO: 11220 - DNA, 80 bp, synthetic construct
  misc_feature 1..80: note = Synthetic: >NC_039218.1-cand-3690-3769
  source 1..80: mol_type = other DNA
caactagagaggctgtggcaacctatttcttgctcctcgtgctggaacttgggtttccggaggcctcactgagtaacatc

SEQ ID NO: 11221 - DNA, 80 bp, synthetic construct
  misc_feature 1..80: note = Synthetic: >NC_039218.1-cand-3770-3849
  source 1..80: mol_type = other DNA
tggaagtgggccgactccttggcaatgggagcactgattctccaggcgtgtggtcaggagggtagaactcgagtgggcta

SEQ ID NO: 11222 - DNA, 80 bp, synthetic construct
  misc_feature 1..80: note = Synthetic: >NC_039218.1-cand-3850-3929
  source 1..80: mol_type = other DNA
tctcctggcagctatgatgacccaaaaggacatggtaataatccacacaggcttgaccatttttctatcagctgccacgg

SEQ ID NO: 11223 - DNA, 80 bp, synthetic construct
  misc_feature 1..80: note = Synthetic: >NC_039475.1-cand-6430-6509
  source 1..80: mol_type = other DNA
attatagattgtcttattccccaagaatggatccaacacttctatcaggaatcagcaccctcccagtcagacgtggccct

SEQ ID NO: 11224 - DNA, 80 bp, synthetic construct
  misc_feature 1..80: note = Synthetic: >NC_039475.1-cand-6510-6589
  source 1..80: mol_type = other DNA
aatcaggtatgtcaaccccgatacgggacgtacactgtttgaagcaaaattgcacagatctggttacattactgtggctc

SEQ ID NO: 11225 - DNA, 80 bp, synthetic construct
  misc_feature 1..80: note = Synthetic: >NC_039475.1-cand-6590-6669
  source 1..80: mol_type = other DNA
actctggagactatcctcttgttgttccggctaatggacactttagatttgattcttgggtaaatcagttttactcactc

SEQ ID NO: 11226 - DNA, 80 bp, synthetic construct
  misc_feature 1..80: note = Synthetic: >NC_039475.1-cand-6640-6719
  source 1..80: mol_type = other DNA
gattcttgggtaaatcagttttactcactcgccccaatgggaactgggaatgggcgaaggagggctcagtaatggctggg

SEQ ID NO: 11227 - DNA, 80 bp, synthetic construct
  misc_feature 1..80: note = Synthetic: >NC_039475.1-cand-6790-6869
  source 1..80: mol_type = other DNA
acgccatcaaccaaaagatagactttgaaaacaacaaacaactccagtctgcttcctttcagcatgataaagagatgctc

SEQ ID NO: 11228 - DNA, 80 bp, synthetic construct
  misc_feature 1..80: note = Synthetic: >NC_039475.1-cand-6800-6879
  source 1..80: mol_type = other DNA
ccaaaagatagactttgaaaacaacaaacaactccagtctgcttcctttcagcatgataaagagatgctccaagcgcagg

SEQ ID NO: 11229 - DNA, 80 bp, synthetic construct
  misc_feature 1..80: note = Synthetic: >NC_039475.1-cand-6840-6919
  source 1..80: mol_type = other DNA
gcttcctttcagcatgataaagagatgctccaagcgcaggtgagggcgaccaagcagctgcaatctgaaatgatagccct

SEQ ID NO: 11230 - DNA, 80 bp, synthetic construct
  misc_feature 1..80: note = Synthetic: >NC_039475.1-cand-6980-7059
  source 1..80: mol_type = other DNA
tggtgcacccatgacaaaggtgcttgactggtctggcactcgatactgggcgcccaattccacaaagacaactggctatt

SEQ ID NO: 11231 - DNA, 80 bp, synthetic construct
  misc_feature 1..80: note = Synthetic: >NC_039475.1-cand-7040-7119
  source 1..80: mol_type = other DNA
cacaaagacaactggctattcgggacaattcacctcttcacctgtgcatatgtctagcccaaatgctccacaatcaaaac

SEQ ID NO: 11232 - DNA, 80 bp, synthetic construct
  misc_feature 1..80: note = Synthetic: >NC_039475.1-cand-7120-7199
  source 1..80: mol_type = other DNA
ctgcaaagcctaggtctctagctccttcctcttcttctagcagtgtctatagtatgtatactcaatctactcatttaaca

SEQ ID NO: 11233 - DNA, 80 bp, synthetic construct
  misc_feature 1..80: note = Synthetic: >NC_039475.1-cand-7200-7279
  source 1..80: mol_type = other DNA
tctggctcttctagtaatgcttcttctgcctccacaaaattgacaaatttaagctctggctcctctcaaaacagaacagc

SEQ ID NO: 11234 - DNA, 80 bp, synthetic construct
  misc_feature 1..80: note = Synthetic: >NC_039475.1-cand-7280-7359
  source 1..80: mol_type = other DNA
agagtgggtaaatcaacagagaagtcttagccctttcatgagtggcgcacttaacatctcacatgtcacgccaccctcaa

SEQ ID NO: 11235 - DNA, 80 bp, synthetic construct
  misc_feature 1..80: note = Synthetic: >NC_039475.1-cand-7360-7439
  source 1..80: mol_type = other DNA
gtagggcttccagttctgggacggtctcgaccgtgcccaaggaagttttggactcctggacgtctgcgtttaacacacac

SEQ ID NO: 11236 - DNA, 80 bp, synthetic construct
  misc_feature 1..80: note = Synthetic: >NC_039475.1-cand-7390-7469
  source 1..80: mol_type = other DNA
ccgtgcccaaggaagttttggactcctggacgtctgcgtttaacacacacagacagccgctcttcgcacacctcagagtg

SEQ ID NO: 11237 - DNA, 80 bp, synthetic construct
  misc_feature 1..80: note = Synthetic: >NC_039476.1-cand-130-209
  source 1..80: mol_type = other DNA
ccaaacagcccgccccgagagacaaaccacaaaagcccccaagaccaccaactcccgagttggtcaagaggataccccct

SEQ ID NO: 11238 - DNA, 80 bp, synthetic construct
  misc_feature 1..80: note = Synthetic: >NC_039476.1-cand-250-329
  source 1..80: mol_type = other DNA
ggtatgaggttaagagtgggatctctggcctgcccgagctcacaacagtcccccaaccggacgtggccaacacagcattc

SEQ ID NO: 11239 - DNA, 80 bp, synthetic construct
  misc_feature 1..80: note = Synthetic: >NC_044045.1-cand-480-559
  source 1..80: mol_type = other DNA
gcagcaatcagccttgcaacgatagatttaacacctatatcgttgtattggagaccggtgtatacaccgccgtaccttgt

SEQ ID NO: 11240 - DNA, 80 bp, synthetic construct
  misc_feature 1..80: note = Synthetic: >NC_044045.1-cand-560-639
  source 1..80: mol_type = other DNA
ccacccagagacactcaaagggctggctggtgaaaagtttccctatacagctttcaacaacaactgctacaacttctgtt

SEQ ID NO: 11241 - DNA, 80 bp, synthetic construct
  misc_feature 1..80: note = Synthetic: >NC_044045.1-cand-640-719
  source 1..80: mol_type = other DNA
gctgggttctggacctcaatgattcatggttgaatcggaggtccataaacaggacaactggatttttcaaaccctaccaa

SEQ ID NO: 11242 - DNA, 80 bp, synthetic construct
  misc_feature 1..80: note = Synthetic: >NC_044045.1-cand-720-799
  source 1..80: mol_type = other DNA
gcctggaacaggaagcccctcccaactgtggatgatggtaagatcaagaaggttgcgaatgcagttctgtgcgccctagg

SEQ ID NO: 11243 - DNA, 80 bp, synthetic construct
  misc_feature 1..80: note = Synthetic: >NC_044045.1-cand-800-879
  source 1..80: mol_type = other DNA
atcacttttctcaaaacccatcaaggacctccttgggaagctaaaaccccttaacctcctaaatctgctcgcatcatgtg

SEQ ID NO: 11244 - DNA, 80 bp, synthetic construct
  misc_feature 1..80: note = Synthetic: >NC_044045.1-cand-880-959
  source 1..80: mol_type = other DNA
actggacctttgctggtgtagtagaaacagttattcttgcagcagagctcttcaatgtcttttggaccccccctgatgtc

SEQ ID NO: 11245 - DNA, 80 bp, synthetic construct
  misc_feature 1..80: note = Synthetic: >NC_044045.1-cand-960-1039
  source 1..80: mol_type = other DNA
tctaacttcattgcctccataattggtgactttgagatgcaaggaccagaaaacctcgctgtggagcttgtccccgttat

SEQ ID NO: 11246 - DNA, 80 bp, synthetic construct
  misc_feature 1..80: note = Synthetic: >NC_044045.1-cand-1050-1129
  source 1..80: mol_type = other DNA
attggcatggtgttaggattcacagctgagaagatagggcgcatgttgtcatctgcagcatccactcttagagcttgtaa

SEQ ID NO: 11247 - DNA, 80 bp, synthetic construct
  misc_feature 1..80: note = Synthetic: >NC_044045.1-cand-1130-1209
  source 1..80: mol_type = other DNA
ggatcttggtaattacgccctggacattctaaagctggtcatgaaatggttcttccccaagaaggaggagaaggccgaga

SEQ ID NO: 11248 - DNA, 80 bp, synthetic construct
  misc_feature 1..80: note = Synthetic: >NC_044045.1-cand-1210-1289
  source 1..80: mol_type = other DNA
tggaaactctaagagccattgaggatgccgtccttgacatggaggcaattggcaacaaccatctcacaacattgctcaaa

SEQ ID NO: 11249 - DNA, 80 bp, synthetic construct
  misc_feature 1..80: note = Synthetic: >NC_044045.1-cand-1290-1369
  source 1..80: mol_type = other DNA
gacaaggacagcctaaacgcctacatgaagaccttagacatggaggaggaaaaggccaggaaactctcaaccaaatcatc

SEQ ID NO: 11250 - DNA, 80 bp, synthetic construct
  misc_feature 1..80: note = Synthetic: >NC_044045.1-cand-1370-1449
  source 1..80: mol_type = other DNA
atcacccgacattgttggcaccatcaacgcaatccttgcccgcatcgccgcagcaagatcactcctgcataaagccaaag

SEQ ID NO: 11251 - DNA, 80 bp, synthetic construct
  misc_feature 1..80: note = Synthetic: >NC_044045.1-cand-1450-1529
  source 1..80: mol_type = other DNA
aggagatgttcagtcgggcgaggcctgttgtcgtaatggtctccgggagaccagggatcgggaagacttacctggctaga

SEQ ID NO: 11252 - DNA, 80 bp, synthetic construct
  misc_feature 1..80: note = Synthetic: >NC_044045.1-cand-1530-1609
  source 1..80: mol_type = other DNA
caacttgctaagtcaatagcaagcagcatgagtggtgatcagagggtaggacttgtcccccgcaatggtgttgaccattg

SEQ ID NO: 11253 - DNA, 80 bp, synthetic construct
  misc_feature 1..80: note = Synthetic: >NC_044045.1-cand-1630-1709
  source 1..80: mol_type = other DNA
gagtcgtcctgtgggatgactatggtatgggaaacacaattaaagacgccctgactctacaggagttggcagacacctgc

SEQ ID NO: 11254 - DNA, 80 bp, synthetic construct
  misc_feature 1..80: note = Synthetic: >NC_044045.1-cand-1660-1739
  source 1..80: mol_type = other DNA
gaaacacaattaaagacgccctgactctacaggagttggcagacacctgcccagtcaccctcaattgtgacaggatcgag

SEQ ID NO: 11255 - DNA, 80 bp, synthetic construct
  misc_feature 1..80: note = Synthetic: >NC_044046.1-cand-3170-3249
  source 1..80: mol_type = other DNA
gttctgccgcctcagattcccaaagccaattagaactgatgtgactggtatgatactcgaggagggagcgcctgaaggaa

SEQ ID NO: 11256 - DNA, 80 bp, synthetic construct
  misc_feature 1..80: note = Synthetic: >NC_044046.1-cand-3250-3329
  source 1..80: mol_type = other DNA
ccgtggcctcccttctcatcaagagaccaacaggtgaactcatgccacttgcagccagaatgggcactcacgccacaatg

SEQ ID NO: 11257 - DNA, 80 bp, synthetic construct
  misc_feature 1..80: note = Synthetic: >NC_044046.1-cand-3370-3449
  source 1..80: mol_type = other DNA
tcttgacaggatccaatgctaaaggtatggaccttggcacgaccccgggcgactgtgggtgtccctacatttacaaaagg

SEQ ID NO: 11258 - DNA, 80 bp, synthetic construct
  misc_feature 1..80: note = Synthetic: >NC_044046.1-cand-3450-3529
  source 1..80: mol_type = other DNA
ggtaatgattatgtggttattggagtacacacagctgccgcacgtggtggcaacacggtcatctgtgccacccaaggcgt

SEQ ID NO: 11259 - DNA, 80 bp, synthetic construct
  misc_feature 1..80: note = Synthetic: >NC_044046.1-cand-3490-3569
  source 1..80: mol_type = other DNA
cacgtggtggcaacacggtcatctgtgccacccaaggcgttgaaggtgaagcaacactcgagggtggtgacggcctgggc

SEQ ID NO: 11260 - DNA, 80 bp, synthetic construct
  misc_feature 1..80: note = Synthetic: >NC_044046.1-cand-3570-3649
  source 1..80: mol_type = other DNA
acatactgtggagcaccaatactaggacctggtaatgcacctaaactaagtacaaagaccaaattttggcgatcatccaa

SEQ ID NO: 11261 - DNA, 80 bp, synthetic construct
  misc_feature 1..80: note = Synthetic: >NC_044046.1-cand-3610-3689
  source 1..80: mol_type = other DNA
ctaaactaagtacaaagaccaaattttggcgatcatccaacgccccactgccaccaggaacgtatgagcctgcgtacctt

SEQ ID NO: 11262 - DNA, 80 bp, synthetic construct
  misc_feature 1..80: note = Synthetic: >NC_044046.1-cand-3730-3809
  source 1..80: mol_type = other DNA
aacaagtcatgagggaacagctcaaaccattcactgaaccacgtggaaagccaccaaaacccagtgtcctggaagcagcc

SEQ ID NO: 11263 - DNA, 80 bp, synthetic construct
  misc_feature 1..80: note = Synthetic: >NC_044046.1-cand-3810-3889
  source 1..80: mol_type = other DNA
aaaaacaccataataaatgttctggagcagacaatagacccaccaccaaaatggtcatacgcacaggcttgtgcatcact

SEQ ID NO: 11264 - DNA, 80 bp, synthetic construct
  misc_feature 1..80: note = Synthetic: >NC_044046.1-cand-3890-3969
  source 1..80: mol_type = other DNA
agacaagacaacctccagcggttacccacaccacgtgaaaaagaacgattactggaatggtgaatctttcacaggaaagc

SEQ ID NO: 11265 - DNA, 80 bp, synthetic construct
  misc_feature 1..80: note = Synthetic: >NC_044046.1-cand-3970-4049
  source 1..80: mol_type = other DNA
tggcagatcagggctcaaaggccaaccttatgtatgaagaaggaaaacacatgcaacctgtgtacacagcagcactcaaa

SEQ ID NO: 11266 - DNA, 80 bp, synthetic construct
  misc_feature 1..80: note = Synthetic: >NC_044046.1-cand-4020-4099
  source 1..80: mol_type = other DNA
atgcaacctgtgtacacagcagcactcaaagatgagctggttaaaacagaaaagatttatgacaagatcaaaaagagact

SEQ ID NO: 11267 - DNA, 80 bp, synthetic construct
  misc_feature 1..80: note = Synthetic: >NC_044046.1-cand-4130-4209
  source 1..80: mol_type = other DNA
acggtgtgctagggcttttggtggcctcatggatgagatgaaggcacactgcacaaccctaccagtcagagtgggcatga

SEQ ID NO: 11268 - DNA, 80 bp, synthetic construct
  misc_feature 1..80: note = Synthetic: >NC_044046.1-cand-4210-4289
  source 1..80: mol_type = other DNA
atatgaatgaggatggaccagtgatcttcgaaaaacactccaggtataagtgccattatgatgcagactattcgagatgg

SEQ ID NO: 11269 - DNA, 80 bp, synthetic construct
  misc_feature 1..80: note = Synthetic: >NC_044046.1-cand-4290-4369
  source 1..80: mol_type = other DNA
gattccactcaacaaagggcggtgttggccgcggccttggaaatcatggtcaaattctctgcagaaccacaattggcaca

SEQ ID NO: 11270 - DNA, 80 bp, synthetic construct
  misc_feature 1..80: note = Synthetic: >NC_044046.1-cand-4370-4449
  source 1..80: mol_type = other DNA
aatagtggcggaagacctcctcgcccctagtgttgttgatgttggcgacttcaaagtgtcgatcaacgaaggtctaccat

SEQ ID NO: 11271 - DNA, 80 bp, synthetic construct
  misc_feature 1..80: note = Synthetic: >NC_044853.1-cand-2100-2179
  source 1..80: mol_type = other DNA
agagtgatttctcccatctaaaaatggaccttgcgccccaaggtggatttgataaccagggtaatacgccttttggcaag

SEQ ID NO: 11272 - DNA, 80 bp, synthetic construct
  misc_feature 1..80: note = Synthetic: >NC_044853.1-cand-2190-2269
  source 1..80: mol_type = other DNA
ggcccaccacattaaaccgactactaatacaggcagtggccctcaccatggagcggcaagatgaattccagatgcaaggc

SEQ ID NO: 11273 - DNA, 80 bp, synthetic construct
  misc_feature 1..80: note = Synthetic: >NC_044853.1-cand-2270-2349
  source 1..80: mol_type = other DNA
ccaacttatgactttgatgctgatagagtgtcagctttcaccagtctcgcccgtgcaaacggcttgggccttgttggcat

SEQ ID NO: 11274 - DNA, 80 bp, synthetic construct
  misc_feature 1..80: note = Synthetic: >NC_044853.1-cand-2360-2439
  source 1..80: mol_type = other DNA
gggaagaagctgagaaacgtggactcagtccatggcctcaagaatgcactcgctgggtacactataaccccatgcagcat

SEQ ID NO: 11275 - DNA, 80 bp, synthetic construct
  misc_feature 1..80: note = Synthetic: >NC_044853.1-cand-2430-2509
  source 1..80: mol_type = other DNA
catgcagcataaaatggcaggcaaggatctatgacatcgagtctgatggcaccacagtcactatcaaggaaaatgctact

SEQ ID NO: 11276 - DNA, 80 bp, synthetic construct
  misc_feature 1..80: note = Synthetic: >NC_044853.1-cand-2510-2589
  source 1..80: mol_type = other DNA
gctcaaacccagcgccagcacgcaattgacacagccgtgttggccctcacccgcctgagagctgctagggctatggcgta

SEQ ID NO: 11277 - DNA, 80 bp, synthetic construct
  misc_feature 1..80: note = Synthetic: >NC_044853.1-cand-2590-2669
  source 1..80: mol_type = other DNA
tgcatcctgtctgcaaagtgctgttacaactatattgcaaatggcgggttcagcactagtcataaatcgtgccgtaaaac

SEQ ID NO: 11278 - DNA, 80 bp, synthetic construct
  misc_feature 1..80: note = Synthetic: >NC_044853.1-cand-2670-2749
  source 1..80: mol_type = other DNA
gcatgtttggcacgcatactggtaccataacactagaaggtcctgcccgggaacaccgctgcagggcccacgtagccaag

SEQ ID NO: 11279 - DNA, 80 bp, synthetic construct
  misc_feature 1..80: note = Synthetic: >NC_044853.1-cand-2750-2829
  source 1..80: mol_type = other DNA
gctaacggaggtggcccaattggacacgatgatgtcatagacaaatatggcctttgtgagacagaggaagacgacgaagg

SEQ ID NO: 11280 - DNA, 80 bp, synthetic construct
  misc_feature 1..80: note = Synthetic: >NC_044853.1-cand-2810-2889
  source 1..80: mol_type = other DNA
acagaggaagacgacgaaggccaagacataaaagctgtcattccctctgctgcccccgaaggtaagaataagggaaaaac

SEQ ID NO: 11281 - DNA, 80 bp, synthetic construct
  misc_feature 1..80: note = Synthetic: >NC_044853.1-cand-2940-3019
  source 1..80: mol_type = other DNA
ggctcagtgatgaagagtatgaggagtataagaaaataagagaagaaaagaatggcaactatagcatacaagagtatctt

SEQ ID NO: 11282 - DNA, 80 bp, synthetic construct
  misc_feature 1..80: note = Synthetic: >NC_044853.1-cand-2990-3069
  source 1..80: mol_type = other DNA
aatggcaactatagcatacaagagtatcttgaagacaggcaacgctatgaagaagagatggctgaagtccaggctggtgg

SEQ ID NO: 11283 - DNA, 80 bp, synthetic construct
  misc_feature 1..80: note = Synthetic: >NC_044853.1-cand-3080-3159
  source 1..80: mol_type = other DNA
attggcgaaactgagatggaaatccgtcatagagtcttctataaatccaagagcaaaaagaaccgccaagaagaacgcca

SEQ ID NO: 11284 - DNA, 80 bp, synthetic construct
  misc_feature 1..80: note = Synthetic: >NC_044853.1-cand-3170-3249
  source 1..80: mol_type = other DNA
cttgtaactggtagcgatatcaggaagaggaagccaattgattggaccccccctaagaatgagtgggctgatgatgatag

SEQ ID NO: 11285 - DNA, 80 bp, synthetic construct
  misc_feature 1..80: note = Synthetic: >NC_044853.1-cand-3250-3329
  source 1..80: mol_type = other DNA
ggaagtggattataatgaaaagatcagttttgaagccccaccaaccctctggagccgtgtggtaaaatttggttctggat

SEQ ID NO: 11286 - DNA, 80 bp, synthetic construct
  misc_feature 1..80: note = Synthetic: >NC_044853.1-cand-3340-3419
  source 1..80: mol_type = other DNA
ggttagccctacagttttcataactaccacacatgtcatcccttcaaatgttagggaattctttggtgagccaattgata

SEQ ID NO: 11287 - DNA, 80 bp, synthetic construct
  misc_feature 1..80: note = Synthetic: >NC_044854.1-cand-3710-3789
  source 1..80: mol_type = other DNA
ttgtggagctccttatgtctacaagagagcaaatgactgggtggtctgtggtgtacacgctgccgctactaaatcaggca

SEQ ID NO: 11288 - DNA, 80 bp, synthetic construct
  misc_feature 1..80: note = Synthetic: >NC_044854.1-cand-3740-3819
  source 1..80: mol_type = other DNA
aaatgactgggtggtctgtggtgtacacgctgccgctactaaatcaggcaacacagtagtgtgcgccgtccaagccagtg

SEQ ID NO: 11289 - DNA, 80 bp, synthetic construct
  misc_feature 1..80: note = Synthetic: >NC_044854.1-cand-3840-3919
  source 1..80: mol_type = other DNA
ggaggtgacaaaggccactatgccggacatgagatagtcaaacatggatgtggaccagccctatcaaccaaaacaaaatt

SEQ ID NO: 11290 - DNA, 80 bp, synthetic construct
  misc_feature 1..80: note = Synthetic: >NC_044854.1-cand-3960-4039
  source 1..80: mol_type = other DNA
gagcccgcataccttggtggccgggatccaagggtgagtggtggtccttcgctccaacaggtgttacgggatcagttgaa

SEQ ID NO: 11291 - DNA, 80 bp, synthetic construct
  misc_feature 1..80: note = Synthetic: >NC_044854.1-cand-3980-4059
  source 1..80: mol_type = other DNA
ccgggatccaagggtgagtggtggtccttcgctccaacaggtgttacgggatcagttgaagccatttgctgagccacggg

SEQ ID NO: 11292 - DNA, 80 bp, synthetic construct
  misc_feature 1..80: note = Synthetic: >NC_044854.1-cand-4080-4159
  source 1..80: mol_type = other DNA
ctcttggaggccgcagttgagactgtgacctcatcactagagcaggttatggacaccccagtgccgtggagttacagcga

SEQ ID NO: 11293 - DNA, 80 bp, synthetic construct
  misc_feature 1..80: note = Synthetic: >NC_044854.1-cand-4160-4239
  source 1..80: mol_type = other DNA
tgcgtgccaatccctcgataaaaccaccagttctggtttcccccaccataagaggaagaatgatgactggaatggcaccg

SEQ ID NO: 11294 - DNA, 80 bp, synthetic construct
  misc_feature 1..80: note = Synthetic: >NC_044854.1-cand-4240-4319
  source 1..80: mol_type = other DNA
ccttcattagggaactaggagaacaagcagcgcacgctaacaacatgtatgaacaagccaaaagcatgaagcctatgtac

SEQ ID NO: 11295 - DNA, 80 bp, synthetic construct
  misc_feature 1..80: note = Synthetic: >NC_044854.1-cand-4310-4389
  source 1..80: mol_type = other DNA
gcctatgtacacggcagcgcttaaggatgaattagtgaagccagaaaaagtgtaccaaaaagtgaaaaagcgcttgctct

SEQ ID NO: 11296 - DNA, 80 bp, synthetic construct
  misc_feature 1..80: note = Synthetic: >NC_044854.1-cand-4400-4479
  source 1..80: mol_type = other DNA
cctaggaacagtgatccgggctgcacgagcttttggcccattttgtgatgccataaagtctcacacaatcaaactaccta

SEQ ID NO: 11297 - DNA, 80 bp, synthetic construct
  misc_feature 1..80: note = Synthetic: >NC_044854.1-cand-4480-4559
  source 1..80: mol_type = other DNA
tcaaagttgggatgaattcaattgaggacgggccactaatctatgcagaacattcaaagtataagtaccactttgatgca

SEQ ID NO: 11298 - DNA, 80 bp, synthetic construct
  misc_feature 1..80: note = Synthetic: >NC_044854.1-cand-4560-4639
  source 1..80: mol_type = other DNA
gattatacagcttgggattcgacacaaaacaggcaaattatgacagagtcattctccatcatgtgccgtttgactgcttc

SEQ ID NO: 11299 - DNA, 80 bp, synthetic construct
  misc_feature 1..80: note = Synthetic: >NC_044854.1-cand-4640-4719
  source 1..80: mol_type = other DNA
tccagaattggcctcagtggtagcgcaagacctgcttgcaccctcagaaatggacgttggtgactacgtcattagggtga

SEQ ID NO: 11300 - DNA, 80 bp, synthetic construct
  misc_feature 1..80: note = Synthetic: >NC_044854.1-cand-4710-4789
  source 1..80: mol_type = other DNA
attagggtgaaggaaggccttccatctggttttccatgtacatcacaggtcaatagcataaatcactggttaataacctt

SEQ ID NO: 11301 - DNA, 80 bp, synthetic construct
  misc_feature 1..80: note = Synthetic: >NC_044854.1-cand-4790-4869
  source 1..80: mol_type = other DNA
atgtgccctctctgaagtgactggtctatcaccagatgttattcagtccatgtcatacttttctttctatggtgatgatg

SEQ ID NO: 11302 - DNA, 80 bp, synthetic construct
  misc_feature 1..80: note = Synthetic: >NC_044854.1-cand-4870-4949
  source 1..80: mol_type = other DNA
aaatagtttccactgacatagagtttgacccagcaaagttgacacaagtcctcaaagaatacggcctcaaacctacccga

SEQ ID NO: 11303 - DNA, 80 bp, synthetic construct
  misc_feature 1..80: note = Synthetic: >EVB79-cand-150-229
  source 1..80: mol_type = other DNA
cagttgagtcttgaccaagcacttctgttaccccggactgagtatcaataggctgctcacgcggctgaaggagaaaacgt

SEQ ID NO: 11304 - DNA, 80 bp, synthetic construct
  misc_feature 1..80: note = Synthetic: >EVA91-cand-300-379
  source 1..80: mol_type = other DNA
agagtgtagcttaggtcgatgagtctggacgatcctcactggtgacagtggtccaggctgcgttggcggcctacctgtgg

SEQ ID NO: 11305 - DNA, 80 bp, synthetic construct
  misc_feature 1..80: note = Synthetic: >HCV.A4-cand-240-319
  source 1..80: mol_type = other DNA
aaaacgttcgttacccggctaactacttcgagaaacctagtagcaccatcgaaactgcagagtgtttcgctcagcacttt

SEQ ID NO: 11306 - DNA, 80 bp, synthetic construct
  misc_feature 1..80: note = Synthetic: >HCV.A13-cand-7360-7439
  source 1..80: mol_type = other DNA
aacattgtaccgccgttggctcgactcattttagtaaccctacctcagtcgaattggattgggttatactgttgtagggg

SEQ ID NO: 11307 - DNA, 80 bp, synthetic construct
  misc_feature 1..80: note = Synthetic: >HCV.A14-cand-160-239
  source 1..80: mol_type = other DNA
atgtctcgatcaagcacttctgtttccccggactgagtatcaataaactgctcacgcggttgaaggagaaaacgttcgtt

SEQ ID NO: 11308 - DNA, 80 bp, synthetic construct
  misc_feature 1..80: note = Synthetic: >HCV.A13-cand-7050-7129
  source 1..80: mol_type = other DNA
aagactatggactaaccatgactccagctgacaagtcagcaacatttgaaacagtcacatgggagaatgtaacattcttg

SEQ ID NO: 11309 - DNA, 80 bp, synthetic construct
  misc_feature 1..80: note = Synthetic: >HCV.A15-cand-6920-6999
  source 1..80: mol_type = other DNA
acaagggcatagatttagaccacctaaaaatgatagcctatggtgatgatgtaattgcttcctacccccatgaggttgac

SEQ ID NO: 11310 - DNA, 80 bp, synthetic construct
  misc_feature 1..80: note = Synthetic: >HCV.A3-cand-4390-4469
  source 1..80: mol_type = other DNA
acatgcagttcaagagcaaacaccgtattgaacctgtgtgtttaatcatcaggggatccccaggaacagggaaatcactc

SEQ ID NO: 11311 - DNA, 80 bp, synthetic construct
  misc_feature 1..80: note = Synthetic: >HCV.A13-cand-240-319
  source 1..80: mol_type = other DNA
tgtacttcgagaagcctagtaccaccttggaatcttcgatgcgttgcgctcagcactcaaccccagagtgtagcttaggt

SEQ ID NO: 11312 - DNA, 80 bp, synthetic construct
  misc_feature 1..80: note = Synthetic: >NC_009824.1-cand-250-329
  source 1..80: mol_type = other DNA
agtagtgttgggtcgcgaaaggccttgtggtactgcctgatagggtgcttgcgagtgccccgggaggtctcgtagaccgt

SEQ ID NO: 11313 - DNA, 80 bp, synthetic construct
  misc_feature 1..80: note = Synthetic: >NC_007363.1-cand-0-79
  source 1..80: mol_type = other DNA
aaagcaggtagatattgaaaaatgagtcttctaaccgaggtcgaaacgtacgttctctctatcgtcccgtcaggccccct

SEQ ID NO: 11314 - DNA, 80 bp, synthetic construct
  misc_feature 1..80: note = Synthetic: >HCV.B5-cand-4360-4439
  source 1..80: mol_type = other DNA
aatgagcaattacatacagttcaagtccaaatgccgtattgaacctgtatgcttgctcctgcatgggagccctggggctg

SEQ ID NO: 11315 - DNA, 80 bp, synthetic construct
  misc_feature 1..80: note = Synthetic: >NC_004910.1-cand-2250-2329
  source 1..80: mol_type = other DNA
tacttactgacagccagacagcgaccaaaagaattcggatggccatcaattagtgtcgaattgtttaaaaacgaccttgt

SEQ ID NO: 11316 - DNA, 80 bp, synthetic construct
  misc_feature 1..80: note = Synthetic: >NC_006577.2-cand-3420-3499
  source 1..80: mol_type = other DNA
gacaatgacgatgaagatgttgttactggtgacaataacgatgaagagattgttactggtgacaatgatgaccaaattgt

SEQ ID NO: 11317 - DNA, 80 bp, synthetic construct
  misc_feature 1..80: note = Synthetic: >HCV.A9-cand-4350-4429
  source 1..80: mol_type = other DNA
aaagtatgcacccctgtacgctgctgaggcaaaaagggtgttctcccttgaaaagaaaatgagcaactacatacagttca

SEQ ID NO: 11318 - DNA, 80 bp, synthetic construct
  misc_feature 1..80: note = Synthetic: >NC_004906.1-cand-800-879
  source 1..80: mol_type = other DNA
ttacaactattgcttgaagtggagcaagagataagaactttctcgtttcagcttatttaatgataaaaaacacccttgtt

SEQ ID NO: 11319 - DNA, 80 bp, synthetic construct
  misc_feature 1..80: note = Synthetic: >NC_003310.1-cand-105090-105169
  source 1..80: mol_type = other DNA
aaaggggtgagaacgttccagagtgtttatccagggaaatcaaagaagaagttaatatagacaattcttttgtattcata

SEQ ID NO: 11320 - DNA, 80 bp, synthetic construct
  misc_feature 1..80: note = Synthetic: >AdVB7-cand-1340-1419
  source 1..80: mol_type = other DNA
attcctgtaaagcctaagcctgggaaacgccctgctgtggataagcttgaggacttgttggagggtggggatggaccttt

SEQ ID NO: 11321 - DNA, 80 bp, synthetic construct
  misc_feature 1..80: note = Synthetic: >NC_007378.1-cand-390-469
  source 1..80: mol_type = other DNA
aaaggttaaaacatggaacctttggccctgtccattttagaaaccaagtcaaaatacgccgaagagttgacataaaccct

SEQ ID NO: 11322 - DNA, 80 bp, synthetic construct
  misc_feature 1..80: note = Synthetic: >AdVB7-cand-9450-9529
  source 1..80: mol_type = other DNA
tatgcattttatcaattgccccgtaggtactccgcgcaaggacctgatcgtttcaagatccacgggatctgaaaaccttt

SEQ ID NO: 11323 - DNA, 80 bp, synthetic construct
  misc_feature 1..80: note = Synthetic: >EVD70-cand-6420-6499
  source 1..80: mol_type = other DNA
aaagtagagaagggcaagtctagattgattgaagctagttctttaaatgattcagttgccatgcgagtggcatttggaaa

SEQ ID NO: 11324 - DNA, 80 bp, synthetic construct
  misc_feature 1..80: note = Synthetic: >NC_003310.1-cand-73860-73939
  source 1..80: mol_type = other DNA
aaagtatacatgttagagaatattcaagttatgaaaatagcagctgatatgtcgttaactttactaggtattccatatgg

SEQ ID NO: 11325 - DNA, 80 bp, synthetic construct
  misc_feature 1..80: note = Synthetic: >NC_001611.1-cand-132660-132739
  source 1..80: mol_type = other DNA
ttatataaacatttgtgtttgtatcttattcgtcttttatggaatagtttttaactagtaaagctgtaattacatacttt

SEQ ID NO: 11326 - DNA, 80 bp, synthetic construct
  misc_feature 1..80: note = Synthetic: >EVB80-cand-4620-4699
  source 1..80: mol_type = other DNA
tgattatggacgacctgtgtcaaaacccagacgggaaggatgtgtccctattctgccaaatggtgtcaagtgttgacttt

SEQ ID NO: 11327 - DNA, 80 bp, synthetic construct
  misc_feature 1..80: note = Synthetic: >AdVB3-cand-11680-11759
  source 1..80: mol_type = other DNA
aagaccccctacgtacccatagacaaggaggtaaagatagatgggttttacatgcgcatgactctgaaggtgctgacttt

SEQ ID NO: 11328 - DNA, 80 bp, synthetic construct
  misc_feature 1..80: note = Synthetic: >NC_001611.1-cand-74540-74619
  source 1..80: mol_type = other DNA
aaagtcatgttggaatagcgaatgtatgcaaccgtatcaaaaaatttctttttcaaagaaaaaggtttgtttcgtcaaca

SEQ ID NO: 11329 - DNA, 80 bp, synthetic construct
  misc_feature 1..80: note = Synthetic: >AdVB7-cand-3340-3419
  source 1..80: mol_type = other DNA
tgcactggagcggagttcggttccagtggtgaagaaactgactaaagtgagtagtggggcaagatgtggatggggacttt

SEQ ID NO: 11330 - DNA, 80 bp, synthetic construct
  misc_feature 1..80: note = Synthetic: >NC_003310.1-cand-88640-88719
  source 1..80: mol_type = other DNA
ttatttgcctgttaatcttcatttcgttttcgattctggctatttcaaaataaaatcccgatgatagacctccagacttt

SEQ ID NO: 11331 - DNA, 80 bp, synthetic construct
  misc_feature 1..80: note = Synthetic: >NC_001611.1-cand-68940-69019
  source 1..80: mol_type = other DNA
aaagtcttctatttctaacactattccatctgtggaaaataatactctgacattatcgctaattgacacatcggtgagtg

SEQ ID NO: 11332 - DNA, 80 bp, synthetic construct
  misc_feature 1..80: note = Synthetic: >HCV.A1-cand-6580-6659
  source 1..80: mol_type = other DNA
tgtcttttggagtaaagtaccagtaatgttagatggaaaactttttgcctttgattacacaggttatgatgcttcacttt

SEQ ID NO: 11333 - DNA, 80 bp, synthetic construct
  misc_feature 1..80: note = Synthetic: >EVD70-cand-5850-5929
  source 1..80: mol_type = other DNA
aaagtgattggcattcacgttggtggcaatggtgcgcaaggctttgctgccatgctattgcaaaattactttactgagaa

SEQ ID NO: 11334 - DNA, 80 bp, synthetic construct
  misc_feature 1..80: note = Synthetic: >EVA89-cand-4040-4119
  source 1..80: mol_type = other DNA
aaagtgtcaacactcttggacatccctatggcagagaagcaaagcgattcttggctcaaaaagttcactgaattcgccaa

SEQ ID NO: 11335 - DNA, 80 bp, synthetic construct
  misc_feature 1..80: note = Synthetic: >NC_001611.1-cand-145690-145769
  source 1..80: mol_type = other DNA
actatctaactcgtaaaaaaacctataatgatcatatagttaatctattattttgtgcaaatagatgggagtttgcatct

SEQ ID NO: 11336 - DNA, 80 bp, synthetic construct
  misc_feature 1..80: note = Synthetic: >NC_003310.1-cand-30320-30399
  source 1..80: mol_type = other DNA
actatggtattgataaaattaatgagattgtcgaggctatgagtgaaggagaccactacatcaatcttacagaagtccat

SEQ ID NO: 11337 - DNA, 80 bp, synthetic construct
  misc_feature 1..80: note = Synthetic: >AdVB3-cand-8060-8139
  source 1..80: mol_type = other DNA
actatgttgtctgcatcggcatgaccatcttctgtctcgatggtggtcatgctgacgagccctcgcgggaggcaagtcca

SEQ ID NO: 11338 - DNA, 80 bp, synthetic construct
  misc_feature 1..80: note = Synthetic: >NC_001611.1-cand-93570-93649
  source 1..80: mol_type = other DNA
ctccataaagaaattagtggtaaaatggccaagaaaatagaaatttgtaaagacgtggaattacctctcggcgaaatagt

SEQ ID NO: 11339 - DNA, 80 bp, synthetic construct
  misc_feature 1..80: note = Synthetic: >NC_003310.1-cand-81280-81359
  source 1..80: mol_type = other DNA
actcataatattatattttttatctaaaaaactaaaaataaacattgattaaattttaatataatacttaaaaatggatg

SEQ ID NO: 11340 - DNA, 80 bp, synthetic construct
  misc_feature 1..80: note = Synthetic: >NC_003310.1-cand-117820-117899
  source 1..80: mol_type = other DNA
atttccggccgttgtatatttaaatgacttcgtaagaaataatatataggcgacttctcatctatgtaatcatatggagt

SEQ ID NO: 11341 - DNA, 80 bp, synthetic construct
  misc_feature 1..80: note = Synthetic: >NC_001611.1-cand-28230-28309
  source 1..80: mol_type = other DNA
actccgccgtagtttccatgggactatataattttgtggcctcgaatacaaattttactacatagttatctatcttaaag

SEQ ID NO: 11342 - DNA, 80 bp, synthetic construct
  misc_feature 1..80: note = Synthetic: >AdVB3-cand-1590-1669
  source 1..80: mol_type = other DNA
ctgccatccatggaggtttgggctatcttggaagacctcagacagactaggctactgctagaaaacgcctcggacggagt

SEQ ID NO: 11343 - DNA, 80 bp, synthetic construct
  misc_feature 1..80: note = Synthetic: >NC_003310.1-cand-54370-54449
  source 1..80: mol_type = other DNA
attaatcagtcgttctaactcctttgctatttctatggacttatctacatcttgactgtctatctctgtaaacacggagt

SEQ ID NO: 11344 - DNA, 80 bp, synthetic construct
  misc_feature 1..80: note = Synthetic: >NC_001611.1-cand-49230-49309
  source 1..80: mol_type = other DNA
tcattggcaaattgtctatatctaaaatcataatatgagatgtttacctctacaaatatctgttcgtccaatgttagagt

SEQ ID NO: 11345 - DNA, 80 bp, synthetic construct
  misc_feature 1..80: note = Synthetic: >NC_001611.1-cand-115050-115129
  source 1..80: mol_type = other DNA
actctaatctttaatagatctatagacgacgggtttaccaacaatatagattttatcgattcatctaatttaaacccttc

SEQ ID NO: 11346 - DNA, 80 bp, synthetic construct
  misc_feature 1..80: note = Synthetic: >AdVB3-cand-35010-35089
  source 1..80: mol_type = other DNA
caagctctaaagaagctctaaaaacactctccaacctctccacaatatatacacaagccctaaactgacgtaatgagagt

SEQ ID NO: 11347 - DNA, 80 bp, synthetic construct
  misc_feature 1..80: note = Synthetic: >HCV.A24-cand-240-319
  source 1..80: mol_type = other DNA
ttatccgctcttgtacttcgagaagcctagtaagaccttgggatcctcgatgcgttgcgctcaacactcaaccccagagt

SEQ ID NO: 11348 - DNA, 80 bp, synthetic construct
  misc_feature 1..80: note = Synthetic: >NC_001611.1-cand-130970-131049
  source 1..80: mol_type = other DNA
ttattgtctccatcggctttaacaattgcttcgcgtttagcctctggctttttagcagcctttgtagagaaaaattcagt

SEQ ID NO: 11349 - DNA, 80 bp, synthetic construct
  misc_feature 1..80: note = Synthetic: >AdVB7-cand-480-559
  source 1..80: mol_type = other DNA
tttaaacctgacgagttccgtcaagaggccactcttgagtgccagcgagaagagttttctcctccgcgccgcaagtcagt

SEQ ID NO: 11350 - DNA, 80 bp, synthetic construct
  misc_feature 1..80: note = Synthetic: >NC_001611.1-cand-109160-109239
  source 1..80: mol_type = other DNA
agaactatataatgaacatagtaagaaattcaaattcaactctcaagtatccatcatccaagaaaaacttggatatcagt

SEQ ID NO: 11351 - DNA, 80 bp, synthetic construct
  misc_feature 1..80: note = Synthetic: >NC_001611.1-cand-52230-52309
  source 1..80: mol_type = other DNA
ctgtaatagtttccaccaaaagactatgcaaagaatttggaatgcgttccttgtgcttaatgtttccatagacagcttct

SEQ ID NO: 11352 - DNA, 80 bp, synthetic construct
  misc_feature 1..80: note = Synthetic: >NC_001611.1-cand-118960-119039
  source 1..80: mol_type = other DNA
tttcagatattgcaggtactataatattaaaaataagaatgaaataacataggattaaaaataaagttatcatgacttct

SEQ ID NO: 11353 - DNA, 80 bp, synthetic construct
  misc_feature 1..80: note = Synthetic: >NC_002019.1-cand-580-659
  source 1..80: mol_type = other DNA
tgctgcagtcaaaggagttggaacaatggtgatggaattggtcaggatgatcaaacgtgggatcaatgatcggaacttct

SEQ ID NO: 11354 - DNA, 80 bp, synthetic construct
  misc_feature 1..80: note = Synthetic: >AdVB7-cand-35040-35119
  source 1..80: mol_type = other DNA
agaataaaaaatataattatttctctgctgctgttcaggcaacgtcgcccccggtccctctaaatacacatacaaagcct

SEQ ID NO: 11355 - DNA, 80 bp, synthetic construct
  misc_feature 1..80: note = Synthetic: >NC_001611.1-cand-31950-32029
  source 1..80: mol_type = other DNA
agaatatacgtcgttcttatcccaattaccaactaaaagtctgatcttaactcctctattaatggctgcttctataatgg

SEQ ID NO: 11356 - DNA, 80 bp, synthetic construct
  misc_feature 1..80: note = Synthetic: >NC_007377.1-cand-930-1009
  source 1..80: mol_type = other DNA
agaatatcgaaaggaacagcagagtgctgtggatgctgacgatagtcattttgtcagcatagagctggagtaaaaaacta

SEQ ID NO: 11357 - DNA, 80 bp, synthetic construct
  misc_feature 1..80: note = Synthetic: >NC_003310.1-cand-61280-61359
  source 1..80: mol_type = other DNA
tttccgttccggatctatagaaaactacaggtgtgataattgccttggctaattgtctttctcttttactgagtgattct

SEQ ID NO: 11358 - DNA, 80 bp, synthetic construct
  misc_feature 1..80: note = Synthetic: >NC_001611.1-cand-94990-95069
  source 1..80: mol_type = other DNA
gtgacggatatccgctaataggagctagaagaacttcattcgcattccaggcgatattatctcaacaaaattcagattct

SEQ ID NO: 11359 - DNA, 80 bp, synthetic construct
  misc_feature 1..80: note = Synthetic: >NC_003310.1-cand-115590-115669
  source 1..80: mol_type = other DNA
agaatgaaaaactctgataactacaatatttcatcatagttacgattttatcatcttctatagttggtgtgataacacat

SEQ ID NO: 11360 - DNA, 80 bp, synthetic construct
  misc_feature 1..80: note = Synthetic: >NC_003310.1-cand-118300-118379
  source 1..80: mol_type = other DNA
tatcgtggcgccttatatagcacttttaactatcgcatcaaaaggatgcaaacttacagaaacaatgattgaagcattct

SEQ ID NO: 11361 - DNA, 80 bp, synthetic construct
  misc_feature 1..80: note = Synthetic: >EVD70-cand-4180-4259
  source 1..80: mol_type = other DNA
ccagagaaaagcatgaatttgtacaaaagctcaagcaactgcccgtcattgaaagtcagattaatactatagaacattct

SEQ ID NO: 11362 - DNA, 80 bp, synthetic construct
  misc_feature 1..80: note = Synthetic: >AdVB3-cand-2450-2529
  source 1..80: mol_type = other DNA
agaattactaagaagattaatattagaaatgcatgctacatatcagggaatggggcagaggttataatagatacacaaga

SEQ ID NO: 11363 - DNA, 80 bp, synthetic construct
  misc_feature 1..80: note = Synthetic: >NC_001611.1-cand-39880-39959
  source 1..80: mol_type = other DNA
agtactttgatgatttttccatggcccattctattaagtcttccaagttggcatcatccacatattgtgatagtaattct

SEQ ID NO: 11364 - DNA, 80 bp, synthetic construct
  misc_feature 1..80: note = Synthetic: >HCV.B1-cand-7290-7369
  source 1..80: mol_type = other DNA
gcacaatttgaaataatttcaattggcttaaccctaccgcactaaccgaactagataacggtgcagtaggggtaaattct

SEQ ID NO: 11365 - DNA, 80 bp, synthetic construct
  misc_feature 1..80: note = Synthetic: >HCV.A8-cand-7000-7079
  source 1..80: mol_type = other DNA
agacaagtccccctgcttcaatgaggttaattggggaaatgcaacctttctcaaaagaggcttcttgcctgatgagcaat

SEQ ID NO: 11366 - DNA, 80 bp, synthetic construct
  misc_feature 1..80: note = Synthetic: >NC_006573.1-cand-810-889
  source 1..80: mol_type = other DNA
attagtagaagattgctaggcacattcacatggacactgtcagattctgaaggtgaagacacaccagggggatattgtct

SEQ ID NO: 11367 - DNA, 80 bp, synthetic construct
  misc_feature 1..80: note = Synthetic: >NC_039477.1-cand-3500-3579
  source 1..80: mol_type = other DNA
agcagcccgtggtggaaacaccgtcatttgtgccacacagggaagtgagggtgaggcaactcttgagggtggagatgaca

SEQ ID NO: 11368 - DNA, 80 bp, synthetic construct
  misc_feature 1..80: note = Synthetic: >EVD70-cand-1010-1089
  source 1..80: mol_type = other DNA
agcagctaacatttgttgtgcctatggagagtggcccacctatctacctgataatgaggcagtggctattgataaaccta

SEQ ID NO: 11369 - DNA, 80 bp, synthetic construct
  misc_feature 1..80: note = Synthetic: >KC470236.1-cand-4930-5009
  source 1..80: mol_type = other DNA
gagcacatcagcaggttcgtgttagtaattttgattttgtaactcacccttcatcatttgtaacatttgataatcctgct

SEQ ID NO: 11370 - DNA, 80 bp, synthetic construct
  misc_feature 1..80: note = Synthetic: >NC_003310.1-cand-77270-77349
  source 1..80: mol_type = other DNA
ctgtgttatcagccgctacagaaacatatagtggattaacaccggaacaaaaagcatacgtaccagctatgtttactgct

SEQ ID NO: 11371 - DNA, 80 bp, synthetic construct
  misc_feature 1..80: note = Synthetic: >AdVB3-cand-25490-25569
  source 1..80: mol_type = other DNA
agcagtgaaggcgaggggtcttctccggggcagagtctgaaactgacaccggggctgtggacctccgcctacctgcgcaa

SEQ ID NO: 11372 - DNA, 80 bp, synthetic construct
  misc_feature 1..80: note = Synthetic: >NC_001430.1-cand-3460-3539
  source 1..80: mol_type = other DNA
gaaacatcaaattgcgcgatgtaggtgcaatactggagtgtactactgtaaacacaagaacagaagttacccagtatgct

SEQ ID NO: 11373 - DNA, 80 bp, synthetic construct
  misc_feature 1..80: note = Synthetic: >AdVB3-cand-710-789
  source 1..80: mol_type = other DNA
gatctgtatgatttagaggtagacgggccggaggatcccaatgaggaagctgtgaatgggttttttactgattctatgct

SEQ ID NO: 11374 - DNA, 80 bp, synthetic construct
  misc_feature 1..80: note = Synthetic: >NC_006573.1-cand-490-569
  source 1..80: mol_type = other DNA
tcaatcagtatgaggcaatgagctgcgattttaatgggggaaagattagtgtgcagtacaacctgagtcacagctatgct

SEQ ID NO: 11375 - DNA, 80 bp, synthetic construct
  misc_feature 1..80: note = Synthetic: >NC_026428.1-cand-180-259
  source 1..80: mol_type = other DNA
agcatatagtggagcggattttagaggaagagtcagatgaagcatttaaaatgagtattgcttcagtgccagctccacgc

SEQ ID NO: 11376 - DNA, 80 bp, synthetic construct
  misc_feature 1..80: note = Synthetic: >NC_001611.1-cand-110270-110349
  source 1..80: mol_type = other DNA
agcattgaaaatacgttctattgtgtagatggatgtagcaagatttttaaacaacaatgccatcttacatgatgattgcc

SEQ ID NO: 11377 - DNA, 80 bp, synthetic construct
  misc_feature 1..80: note = Synthetic: >AdVB3-cand-4550-4629
  source 1..80: mol_type = other DNA
agccattttaataaactttgggcggagggtgccagattggggaatgaaagttccctctggcccgggagcatagtttccct

SEQ ID NO: 11378 - DNA, 80 bp, synthetic construct
  misc_feature 1..80: note = Synthetic: >NC_001611.1-cand-115770-115849
  source 1..80: mol_type = other DNA
agccggtttccgttttacacgtaaccattctaaacaattggggtttccaggatcgtttctacaaaatccagtcataaaat

SEQ ID NO: 11379 - DNA, 80 bp, synthetic construct
  misc_feature 1..80: note = Synthetic: >NC_001611.1-cand-159730-159809
  source 1..80: mol_type = other DNA
cgtatgccactagaggtagcaagaagattcctatttacaaacgtaatgacatgtgtgatatctacttgttgtatacggct

SEQ ID NO: 11380 - DNA, 80 bp, synthetic construct
  misc_feature 1..80: note = Synthetic: >NC_003310.1-cand-179390-179469
  source 1..80: mol_type = other DNA
agcgccgtccattttaaagcaatgtggaaatatccattttctaaacatcttacatatacagacaagttttatatttctaa

SEQ ID NO: 11381 - DNA, 80 bp, synthetic construct
  misc_feature 1..80: note = Synthetic: >NC_001611.1-cand-54200-54279
  source 1..80: mol_type = other DNA
agcggtgttattataaactctcaacattggaataataccattggatgcaccattggtcccggagatatagcttccactgg

SEQ ID NO: 11382 - DNA, 80 bp, synthetic construct
  misc_feature 1..80: note = Synthetic: >AdVB7-cand-1500-1579
  source 1..80: mol_type = other DNA
tatgtcagctgctgagtgttttattacttcttgggtggggacttggatatataagtaggagcagatctgtgtggttagct

SEQ ID NO: 11383 - DNA, 80 bp, synthetic construct
  misc_feature 1..80: note = Synthetic: >NC_006573.1-cand-2180-2259
  source 1..80: mol_type = other DNA
agggtcatcagctgagaataggtaagcccagcggtaaaccctgccgactgcagggatttactggaattgttgctgtcagc

SEQ ID NO: 11384 - DNA, 80 bp, synthetic construct
  misc_feature 1..80: note = Synthetic: >NC_001611.1-cand-89840-89919
  source 1..80: mol_type = other DNA
agggtttatttcattcgaagacgctataaaaagagtttcaaaaatattcattaattctataataaactttaatgatctcg

SEQ ID NO: 11385 - DNA, 80 bp, synthetic construct
  misc_feature 1..80: note = Synthetic: >AdVB3-cand-2770-2849
  source 1..80: mol_type = other DNA
aggtagggtgaagagtcagttgtctgtaaagaaatgcatgtttgagagatgtaatcttggcatactgaatgaaggtgaag

SEQ ID NO: 11386 - DNA, 80 bp, synthetic construct
  misc_feature 1..80: note = Synthetic: >AdVB3-cand-18400-18479
  source 1..80: mol_type = other DNA
aggtcgcgcgccgaggctgagttgctttcaagatggccaccccatcgatgatgccccaatgggcatacatgcacatcgcc

SEQ ID NO: 11387 - DNA, 80 bp, synthetic construct
  misc_feature 1..80: note = Synthetic: >NC_003310.1-cand-110220-110299
  source 1..80: mol_type = other DNA
aggtctaaaaaccaaatcttgattacaaaaccaacacttatcaattacactatttgtcttaatagacatatctgccatag

SEQ ID NO: 11388 - DNA, 80 bp, synthetic construct
  misc_feature 1..80: note = Synthetic: >HCV.B4-cand-6780-6859
  source 1..80: mol_type = other DNA
ggaaccagcatcttcaactcaatgattaacaacataatcatcagaacactaatgttgaaggtgtacaaggggatagacct

SEQ ID NO: 11389 - DNA, 80 bp, synthetic construct
  misc_feature 1..80: note = Synthetic: >AdVB3-cand-2290-2369
  source 1..80: mol_type = other DNA
gtggcatgaggttcagagcgaaggcagggatgaagtttcaatattgcaggagaaatattcactagaacaacttaagacct

SEQ ID NO: 11390 - DNA, 80 bp, synthetic construct
  misc_feature 1..80: note = Synthetic: >AdVB3-cand-7900-7979
  source 1..80: mol_type = other DNA
ctccctgcgacgcgccgagcattcatgcttgtgcttgtacagacggccgcagtaatcgcagcgattcacgggatgcacct

SEQ ID NO: 11391 - DNA, 80 bp, synthetic construct
  misc_feature 1..80: note = Synthetic: >NC_003310.1-cand-85960-86039
  source 1..80: mol_type = other DNA
aggttaaggatctgtacgatatgattcataacgtcattgatgatgtgagagagaaatacttctttacggtatctaatata

SEQ ID NO: 11392 - DNA, 80 bp, synthetic construct
  misc_feature 1..80: note = Synthetic: >AdVB3-cand-24770-24849
  source 1..80: mol_type = other DNA
gaggagaacctgcactacacctttagacatggcttcgtgcggcaggcatgcaagatctccaacgtggagcttaccaacct

SEQ ID NO: 11393 - DNA, 80 bp, synthetic construct
  misc_feature 1..80: note = Synthetic: >NC_001611.1-cand-36820-36899
  source 1..80: mol_type = other DNA
gatgccaatctagcaatgtcgaataactgtaattttattcttcgctcttcattatgaattgattcttgaggtataaacct

SEQ ID NO: 11394 - DNA, 80 bp, synthetic construct
  misc_feature 1..80: note = Synthetic: >AdVB7-cand-17040-17119
  source 1..80: mol_type = other DNA
aggtttgggagtacaaaccttcgacatcaagattcccaccgagtccatggaagtgcagaccgaacctgcaaaacccacaa

SEQ ID NO: 11395 - DNA, 80 bp, synthetic construct
  misc_feature 1..80: note = Synthetic: >NC_001611.1-cand-83420-83499
  source 1..80: mol_type = other DNA
aggttttgcaacatgttaaaattcctactcatttaacagatgtagtagtatatggacaaacgtgggaggaggcgttaact

SEQ ID NO: 11396 - DNA, 80 bp, synthetic construct
  misc_feature 1..80: note = Synthetic: >NC_003310.1-cand-65440-65519
  source 1..80: mol_type = other DNA
agtaaaataaatatcattaatatatgctctagatattagtatttttattaatcctttgattatcatcttctcgtacgcga

SEQ ID NO: 11397 - DNA, 80 bp, synthetic construct
  misc_feature 1..80: note = Synthetic: >AdVB3-cand-1810-1889
  source 1..80: mol_type = other DNA
ctcattttaaggagaaggttttatcagttttagatttttctactcctggtagaactgctgctgctgtagcttttcttact

SEQ ID NO: 11398 - DNA, 80 bp, synthetic construct
  misc_feature 1..80: note = Synthetic: >NC_003310.1-cand-97700-97779
  source 1..80: mol_type = other DNA
agtaatgagtcaattggtagagttttataacgaagtagccagttggctgctacgagacgagacgtcgcctattcctgata

SEQ ID NO: 11399 - DNA, 80 bp, synthetic construct
  misc_feature 1..80: note = Synthetic: >NC_001611.1-cand-65010-65089
  source 1..80: mol_type = other DNA
atcggacgcagaaattggtataaatgttgtaattgtattatttcccgtcaatggactagtcacagctccatcagttttat

SEQ ID NO: 11400 - DNA, 80 bp, synthetic construct
  misc_feature 1..80: note = Synthetic: >NC_001611.1-cand-138820-138899
  source 1..80: mol_type = other DNA
ataaacatatcaaaagaaggaattaaacgatggagaagatttgacggaccatgtggttatgatttatttatacacggcgg

SEQ ID NO: 11401 - DNA, 80 bp, synthetic construct
  misc_feature 1..80: note = Synthetic: >NC_003310.1-cand-79920-79999
  source 1..80: mol_type = other DNA
ttgattactataaatggagaatgttcctaatgtatactttaatcctgtgtttatagagcccacgtttaaacattctttat

SEQ ID NO: 11402 - DNA, 80 bp, synthetic construct
  misc_feature 1..80: note = Synthetic: >NC_001611.1-cand-71020-71099
  source 1..80: mol_type = other DNA
ataaagattgtgcaaagcttttgcgatcaataaatggatcacaaccagtatctcttaacgatgttcttcgcagatgatga

SEQ ID NO: 11403 - DNA, 80 bp, synthetic construct
  misc_feature 1..80: note = Synthetic: >NC_003310.1-cand-107940-108019
  source 1..80: mol_type = other DNA
gtcggcaactacggcatccgctctagtactcctcccataatactttacgctattaatctttaaaatttcatagactttat

SEQ ID NO: 11404 - DNA, 80 bp, synthetic construct
  misc_feature 1..80: note = Synthetic: >NC_001611.1-cand-121850-121929
  source 1..80: mol_type = other DNA
ataaattacgtgactaaatccgagaatatgatagaaatgatgaaggaaagatcgactattttaaatagcatagatataga

SEQ ID NO: 11405 - DNA, 80 bp, synthetic construct
  misc_feature 1..80: note = Synthetic: >NC_001611.1-cand-1630-1709
  source 1..80: mol_type = other DNA
tcccttgtgtaacgttagacattctaaatctatagtattatctattacagcgtaaaacacattcaatattgtattgttat

SEQ ID NO: 11406 - DNA, 80 bp, synthetic construct
  misc_feature 1..80: note = Synthetic: >AdVB7-cand-30340-30419
  source 1..80: mol_type = other DNA
tgtataggaccatttgcttcctatgcactttttgccttcgttacttgcatctgcgtgtgtagcatagtctgcctggttat

SEQ ID NO: 11407 - DNA, 80 bp, synthetic construct
  misc_feature 1..80: note = Synthetic: >NC_001611.1-cand-83740-83819
  source 1..80: mol_type = other DNA
tatcttaaggagaatgaaacagtagggttattaacactaaaaaataaacacatagaaataagtcccgataaaatagttat

SEQ ID NO: 11408 - DNA, 80 bp, synthetic construct
  misc_feature 1..80: note = Synthetic: >NC_001611.1-cand-3310-3389
  source 1..80: mol_type = other DNA
attccttatacaatcaaattcattattaaacagtttaatagtctgtagacctttatcgttgtaaatatccattgtcttat

SEQ ID NO: 11409 - DNA, 80 bp, synthetic construct
  misc_feature 1..80: note = Synthetic: >NC_003310.1-cand-73060-73139
  source 1..80: mol_type = other DNA
ttcctccttgtcaatgcactgttcaagaatttatattctccgcattagatgaaaaatggaatgaatttaaatcatcttat

SEQ ID NO: 11410 - DNA, 80 bp, synthetic construct
  misc_feature 1..80: note = Synthetic: >NC_001611.1-cand-124970-125049
  source 1..80: mol_type = other DNA
ataagccttatgcatccaaagtattttttggaccaatttattacttgcgtctgagacatttaactcaggacaaggcaacc

SEQ ID NO: 11411 - DNA, 80 bp, synthetic construct
  misc_feature 1..80: note = Synthetic: >EVD70-cand-2920-2999
  source 1..80: mol_type = other DNA
gcaatcctagtgtctttttcaagatcaatgacccaccagcgcgtctaacaattccattcatgagcattaactcagcttat

SEQ ID NO: 11412 - DNA, 80 bp, synthetic construct
  misc_feature 1..80: note = Synthetic: >NC_001611.1-cand-95550-95629
  source 1..80: mol_type = other DNA
ataatagacgactagctaagtctattatttgcgaggatgactctcaaattattacacttacggcattcgttaaccaatgc

SEQ ID NO: 11413 - DNA, 80 bp, synthetic construct
  misc_feature 1..80: note = Synthetic: >NC_001611.1-cand-44030-44109
  source 1..80: mol_type = other DNA
ataatatcttgttctggtttaaaaatactcagtttgatattactaaacacacattattcagatacgtctatacagataat

SEQ ID NO: 11414 - DNA, 80 bp, synthetic construct
  misc_feature 1..80: note = Synthetic: >NC_003310.1-cand-56960-57039
  source 1..80: mol_type = other DNA
ttatttaacaatttggcatttgatcccaaatacgcaatcgatgtgtcaaaggttaaacctttataaacttaacccattat

SEQ ID NO: 11415 - DNA, 80 bp, synthetic construct
  misc_feature 1..80: note = Synthetic: >NC_001611.1-cand-15150-15229
  source 1..80: mol_type = other DNA
tttccacgtagtcaatgaaacatttgagctcatcgtacagaacgttctcgtacaggacgtaactataaactggtttatat

SEQ ID NO: 11416 - DNA, 80 bp, synthetic construct
  misc_feature 1..80: note = Synthetic: >NC_001611.1-cand-107330-107409
  source 1..80: mol_type = other DNA
atatacggacttactatctttttctcaacgtcgatttgatgaacacacgatgaaaatgtgcttctatgagattgatcatg

SEQ ID NO: 11417 - DNA, 80 bp, synthetic construct
  misc_feature 1..80: note = Synthetic: >NC_003310.1-cand-179550-179629
  source 1..80: mol_type = other DNA
gattctctattatcgatattccatacgagggaaactctagtatggtgattatactgccggacgacatagaaggtatatat

SEQ ID NO: 11418 - DNA, 80 bp, synthetic construct
  misc_feature 1..80: note = Synthetic: >NC_003310.1-cand-167180-167259
  source 1..80: mol_type = other DNA
atatatcccttaaaaattatggcatcaagacgtggcaaacaatgtatacaaatgtaccagaaggaacatacgacatatcc

SEQ ID NO: 11419 - DNA, 80 bp, synthetic construct
  misc_feature 1..80: note = Synthetic: >NC_001611.1-cand-122490-122569
  source 1..80: mol_type = other DNA
tacaacatggccaaaatttagggttgttaagccaaactcattcacgttctcgttttcctccgtatcccctcctaatatat

SEQ ID NO: 11420 - DNA, 80 bp, synthetic construct
  misc_feature 1..80: note = Synthetic: >NC_001611.1-cand-108210-108289
  source 1..80: mol_type = other DNA
atatattgttaaactttgattctacagtaatgtccaaatctagttgtggaaatacgtccatcagcattgtttcaaacttg

SEQ ID NO: 11421 - DNA, 80 bp, synthetic construct
  misc_feature 1..80: note = Synthetic: >NC_001611.1-cand-2990-3069
  source 1..80: mol_type = other DNA
atatccttatccgactttatatttcctgtagggtggtataattttattttgcctccacatatcggtgtttccaaatatat

SEQ ID NO: 11422 - DNA, 80 bp, synthetic construct
  misc_feature 1..80: note = Synthetic: >NC_001611.1-cand-119280-119359
  source 1..80: mol_type = other DNA
ggaagcgtctttatttattcgaagggtaaaaatatggtagaacttggatctggaaactcttttcaaataccagatgatat

SEQ ID NO: 11423 - DNA, 80 bp, synthetic construct
  misc_feature 1..80: note = Synthetic: >NC_001611.1-cand-37710-37789
  source 1..80: mol_type = other DNA
ttcagttctatcttctaaaaaatcttcaacgtatggaatataataatctattttacctcttctgatatcattaatgatat

SEQ ID NO: 11424 - DNA, 80 bp, synthetic construct
  misc_feature 1..80: note = Synthetic: >NC_001611.1-cand-45620-45699
  source 1..80: mol_type = other DNA
tatcgaaaattgctatttcagagatgaggttaggtagtctaggttcacaatgaaccgtaatatatctaggcggtggatat

SEQ ID NO: 11425 - DNA, 80 bp, synthetic construct
  misc_feature 1..80: note = Synthetic: >NC_001611.1-cand-85660-85739
  source 1..80: mol_type = other DNA
atatccagttaagagaataatagattctgaagtagtagtctttggtgaggcagttaaggataagaactggactgtatatc

SEQ ID NO: 11426 - DNA, 80 bp, synthetic construct
  misc_feature 1..80: note = Synthetic: >NC_001611.1-cand-75860-75939
  source 1..80: mol_type = other DNA
atatctatctatttacggttttggggtgacattcaaagatttgagaccaaattcgacgttcactaataaattggaggcca

SEQ ID NO: 11427 - DNA, 80 bp, synthetic construct
  misc_feature 1..80: note = Synthetic: >NC_003310.1-cand-175980-176059
  source 1..80: mol_type = other DNA
ctaatgatgtatctacacaaacatgggaaaagaaatcagagttagatagatacatggaaatgtatcctcgtcatagatat

SEQ ID NO: 11428 - DNA, 80 bp, synthetic construct
  misc_feature 1..80: note = Synthetic: >NC_001611.1-cand-37470-37549
  source 1..80: mol_type = other DNA
tgttgattcgcaaactattctaatacataattcttctgttaatacgtcttgcacgtaatctattatagatgccaagatat

SEQ ID NO: 11429 - DNA, 80 bp, synthetic construct
  misc_feature 1..80: note = Synthetic: >EVD70-cand-6820-6899
  source 1..80: mol_type = other DNA
tcaacaacattataatcagaacccttttacttaaagtttacaaaggtattgatttagatcagttcaaaatgatagcatat

SEQ ID NO: 11430 - DNA, 80 bp, synthetic construct
  misc_feature 1..80: note = Synthetic: >NC_001611.1-cand-5560-5639
  source 1..80: mol_type = other DNA
atatgttggaggatattcgagttcattgttttcaatatcaaagagatggtttccttatcatttctccatagtggtacaat

SEQ ID NO: 11431 - DNA, 80 bp, synthetic construct
  misc_feature 1..80: note = Synthetic: >NC_003310.1-cand-12500-12579
  source 1..80: mol_type = other DNA
atctgtcattacataattttctataactgaacgatggttttcacatttaacactcaagtcaaatccatgttctaccaaca

SEQ ID NO: 11432 - DNA, 80 bp, synthetic construct
  misc_feature 1..80: note = Synthetic: >NC_026434.1-cand-680-759
  source 1..80: mol_type = other DNA
tctgaatgtgcatgtgtaaatggttcttgctttactgtaatgaccgatggaccaagtaatggacaggcctcatacaagat

SEQ ID NO: 11433 - DNA, 80 bp, synthetic construct
  misc_feature 1..80: note = Synthetic: >NC_003310.1-cand-85150-85229
  source 1..80: mol_type = other DNA
cgttcactaataaattggaggctatcaacgtagaaaaaatagaacttatcaaagaagcatacgccaaatatctcaaagat

SEQ ID NO: 11434 - DNA, 80 bp, synthetic construct
  misc_feature 1..80: note = Synthetic: >NC_001611.1-cand-122410-122489
  source 1..80: mol_type = other DNA
cttgtccctaacgtcataggtggggtatttatcaataaacaatctgtcgaaaaagtaggaattaatctagtagaaaagat

SEQ ID NO: 11435 - DNA, 80 bp, synthetic construct
  misc_feature 1..80: note = Synthetic: >NC_001611.1-cand-89920-89999
  source 1..80: mol_type = other DNA
atgaaaataattttacgacggtaccactggtcatagattacgtaacaccttgtgcattatgtaaaaaacgatcgcataaa

SEQ ID NO: 11436 - DNA, 80 bp, synthetic construct
  misc_feature 1..80: note = Synthetic: >NC_003310.1-cand-84100-84179
  source 1..80: mol_type = other DNA
atgaacaggttatccagaaggcggtaatagaatacgatgatattaaaattatttctaataacactaccagtatcaattta

SEQ ID NO: 11437 - DNA, 80 bp, synthetic construct
  misc_feature 1..80: note = Synthetic: >NC_039477.1-cand-0-79
  source 1..80: mol_type = other DNA
atgaagatggcgtctaacgacgctaccgttgccgttgcttgcaacaacaacaacgacaaggaaaaatcttcaggtgaagg

SEQ ID NO: 11438 - DNA, 80 bp, synthetic construct
  misc_feature 1..80: note = Synthetic: >NC_003310.1-cand-39470-39549
  source 1..80: mol_type = other DNA
gactatcgaatatcctgctctgatagcagtttcaatatcgacggacgtcaatactgtaataaaggtggtagtattgtcat

SEQ ID NO: 11439 - DNA, 80 bp, synthetic construct
  misc_feature 1..80: note = Synthetic: >EVA90-cand-6490-6569
  source 1..80: mol_type = other DNA
atgactcagtttaccttagaatgtgctttggtcacctgtatgagaaattccatgcaaatccagggacaatcactggctca

SEQ ID NO: 11440 - DNA, 80 bp, synthetic construct
  misc_feature 1..80: note = Synthetic: >NC_003310.1-cand-61600-61679
  source 1..80: mol_type = other DNA
tatccatcgcttctatcttgtttagatttatttttataaagtttagtctctccttccaacataataaaagtggaagtcat

SEQ ID NO: 11441 - DNA, 80 bp, synthetic construct
  misc_feature 1..80: note = Synthetic: >AF482713.1-cand-240-319
  source 1..80: mol_type = other DNA
ggtggcagctcaaaaactggctacaaaaccagttgatccaacagggcttgagcctgatgatcatctaaaggaaaagtcat

SEQ ID NO: 11442 - DNA, 80 bp, synthetic construct
  misc_feature 1..80: note = Synthetic: >AdVB3-cand-23730-23809
  source 1..80: mol_type = other DNA
atgaggaggaggtcaacgcagcccaggagatgcaggcgcaggataatgtgaaaacggaagagattgaggcagatgtcgag

SEQ ID NO: 11443 - DNA, 80 bp, synthetic construct
  misc_feature 1..80: note = Synthetic: >AdVB3-cand-13600-13679
  source 1..80: mol_type = other DNA
atgagtagatggaagacctatgcgcaggatcacagagacgagcccaaaatcttgggggctacaagcagaccgacccgtag

SEQ ID NO: 11444 - DNA, 80 bp, synthetic construct
  misc_feature 1..80: note = Synthetic: >NC_001611.1-cand-121290-121369
  source 1..80: mol_type = other DNA
atgagtatctgagcactacagtcaggtccaatattaatcaaccttggatcaaaaccatctctaagaggatgagagtcaat

SEQ ID NO: 11445 - DNA, 80 bp, synthetic construct
  misc_feature 1..80: note = Synthetic: >NC_039476.1-cand-2520-2599
  source 1..80: mol_type = other DNA
tggtcgaagccacaactagatcaaaatgaatcagagactaaggtagaggcccccaagtcagaagatgacgagttcatcat

SEQ ID NO: 11446 - DNA, 80 bp, synthetic construct
  misc_feature 1..80: note = Synthetic: >NC_044856.1-cand-0-79
  source 1..80: mol_type = other DNA
atgatgatggcgtctaacgacgctattgccgttgctgatgtcagcaataacaatgctaacaccaacaatgaaaacattgg

SEQ ID NO: 11447 - DNA, 80 bp, synthetic construct
  misc_feature 1..80: note = Synthetic: >NC_003310.1-cand-76650-76729
  source 1..80: mol_type = other DNA
caaagagatgatcgattatattctaagacaacagtcggcggactttaaacagaaatatatgagatgtagttatcccacta

SEQ ID NO: 11448 - DNA, 80 bp, synthetic construct
  misc_feature 1..80: note = Synthetic: >AdVB7-cand-25540-25619
  source 1..80: mol_type = other DNA
tacctctcctaccactcggatgttatagaggatgtgagcggagacggtctgctggaatgccactgccgctgcaatctttg

SEQ ID NO: 11449 - DNA, 80 bp, synthetic construct
  misc_feature 1..80: note = Synthetic: >AdVB7-cand-24720-24799
  source 1..80: mol_type = other DNA
caaagttatgagcgctgttatggaccatctgctcatcaaacgagcaagacccctttcagaaaaccagaacatgcaggatc

SEQ ID NO: 11450 - DNA, 80 bp, synthetic construct
  misc_feature 1..80: note = Synthetic: >NC_003310.1-cand-114370-114449
  source 1..80: mol_type = other DNA
tgcgcattccaatcttaaacatatagggaatcatatatctgctcttaaacgacgctatactagacgtataagtctatttg

SEQ ID NO: 11451 - DNA, 80 bp, synthetic construct
  misc_feature 1..80: note = Synthetic: >NC_001611.1-cand-66300-66379
  source 1..80: mol_type = other DNA
gtaaaactttctagttatcatgtagtaagtgtcgattgtaacaaggaactgatgcctattaggacagatactactatttg

SEQ ID NO: 11452 - DNA, 80 bp, synthetic construct
  misc_feature 1..80: note = Synthetic: >NC_003310.1-cand-38590-38669
  source 1..80: mol_type = other DNA
ttgacagatattggaccgaactacggaagtacctggaatgtaaagccctgaaaccccctcattttttaagcagattgttg

SEQ ID NO: 11453 - DNA, 80 bp, synthetic construct
  misc_feature 1..80: note = Synthetic: >NC_007372.1-cand-1320-1399
  source 1..80: mol_type = other DNA
caacatactggtgggatgggctccaatcctccgacgattttgccctcatagtgaatgcaccaaatcatgagggaatacaa

SEQ ID NO: 11454 - DNA, 80 bp, synthetic construct
  misc_feature 1..80: note = Synthetic: >AdVB3-cand-20390-20469
  source 1..80: mol_type = other DNA
caacattccaatttccatcccatctcgcaactgggcagccttcaggggctggtccttcaccaggctcaaaaccaaggaga

SEQ ID NO: 11455 - DNA, 80 bp, synthetic construct
  misc_feature 1..80: note = Synthetic: >AdVB3-cand-21420-21499
  source 1..80: mol_type = other DNA
gcccccgacaagctcgcctgcgccatagtcaacactgccggacgcgagacggggggagagcactggctggcttttggttg

SEQ ID NO: 11456 - DNA, 80 bp, synthetic construct
  misc_feature 1..80: note = Synthetic: >AdVB3-cand-16880-16959
  source 1..80: mol_type = other DNA
caaccacctcaattgaggtgcaaacggaaccctggacgcccgcgcccgttgtcgcccccagcaccactcgaagatcacga

SEQ ID NO: 11457 - DNA, 80 bp, synthetic construct
  misc_feature 1..80: note = Synthetic: >NC_003310.1-cand-99730-99809
  source 1..80: mol_type = other DNA
caaccattaacggatgaaaataagaaaaatagagagctgtatgaaaaaacattatctagttgtttatgtggtgctaccaa

SEQ ID NO: 11458 - DNA, 80 bp, synthetic construct
  misc_feature 1..80: note = Synthetic: >AdVB7-cand-24480-24559
  source 1..80: mol_type = other DNA
caacttgggtccgggagctcgcttacctgatatagcttccttggaagaggttccaaaaatctttgagggtctgggaagtg

SEQ ID NO: 11459 - DNA, 80 bp, synthetic construct
  misc_feature 1..80: note = Synthetic: >NC_003310.1-cand-84430-84509
  source 1..80: mol_type = other DNA
caagaatacgtcaaggaaagtttatcaaaaataaaatacatttattgcctggtgattgggtagaagtagctgttcaagaa

SEQ ID NO: 11460 - DNA, 80 bp, synthetic construct
  misc_feature 1..80: note = Synthetic: >HCV.A8-cand-7160-7239
  source 1..80: mol_type = other DNA
caagatcatgtgcgatccctgtgtctcctagcatggcacaatggtaagcaagaatatgaaaaatttgtgagcacaattag

SEQ ID NO: 11461 - DNA, 80 bp, synthetic construct
  misc_feature 1..80: note = Synthetic: >NC_007381.1-cand-740-819
  source 1..80: mol_type = other DNA
ggaaatgctgagatcgaagatctaatctttctggcacggtctgcactcatattgagagggtcagttgctcacaaatcttg

SEQ ID NO: 11462 - DNA, 80 bp, synthetic construct
  misc_feature 1..80: note = Synthetic: >AdVB3-cand-22380-22459
  source 1..80: mol_type = other DNA
gtctgcctgcccatcacgggagcgcagcctggcttgtggttgcaatcacaatgaatggggatcagcatcatcctggcttg

SEQ ID NO: 11463 - DNA, 80 bp, synthetic construct
  misc_feature 1..80: note = Synthetic: >AdVB3-cand-24450-24529
  source 1..80: mol_type = other DNA
tgctcaagcgcagtatcgtggtcacccattttgcctaccccgctgttaacctgccccccaaagttatgagcgctgtcatg

SEQ ID NO: 11464 - DNA, 80 bp, synthetic construct
  misc_feature 1..80: note = Synthetic: >AdVB7-cand-21320-21399
  source 1..80: mol_type = other DNA
catgacttttgaggtggatcccatggatgagcccaccctgctttatcttcttttcgaagtcttcgacgtggtcagagtgc

SEQ ID NO: 11465 - DNA, 80 bp, synthetic construct
  misc_feature 1..80: note = Synthetic: >NC_001430.1-cand-6660-6739
  source 1..80: mol_type = other DNA
catgcctaaagaaaactctggtaaaattaggttatactcatcaaacagcatttgttgattacttgtgtcactcggttcac

SEQ ID NO: 11466 - DNA, 80 bp, synthetic construct
  misc_feature 1..80: note = Synthetic: >AdVB7-cand-8470-8549
  source 1..80: mol_type = other DNA
cccggcggcatggctggcagtggtacgtcggcgccgcgcgcgggtaggttctggtactgcgccctgagaagactcgcatg

SEQ ID NO: 11467 - DNA, 80 bp, synthetic construct
  misc_feature 1..80: note = Synthetic: >NC_001430.1-cand-1560-1639
  source 1..80: mol_type = other DNA
ttattccggtatgtccattggcaggaggtactggcaacacaaacacctatgtgccaattaccatctccattgctcccatg

SEQ ID NO: 11468 - DNA, 80 bp, synthetic construct
  misc_feature 1..80: note = Synthetic: >NC_001611.1-cand-28080-28159
  source 1..80: mol_type = other DNA
tttgtatcaataatagtaacatattaagaacccgtttatacagtgtatgtaaaaatgttaatttatagtttaatcccatg

SEQ ID NO: 11469 - DNA, 80 bp, synthetic construct
  misc_feature 1..80: note = Synthetic: >AdVB7-cand-6550-6629
  source 1..80: mol_type = other DNA
catggggtgggtgagcgcggaggcatacatgccacagatatcgtatacatagaggggctcttcgaggatgccgatgtaag

SEQ ID NO: 11470 - DNA, 80 bp, synthetic construct
  misc_feature 1..80: note = Synthetic: >AdVB7-cand-12810-12889
  source 1..80: mol_type = other DNA
catggtagctgaggtgcctcagagcgaggtgtaccagtccgggccagattacttcttccagaccagcagacagggcttgc

SEQ ID NO: 11471 - DNA, 80 bp, synthetic construct
  misc_feature 1..80: note = Synthetic: >NC_015783.1-cand-920-999
  source 1..80: mol_type = other DNA
tgtaaatgtaactttcagtctagaggccatctatgaacaattcctgtaccacagaaacaggtggtccagatctaaccatg

SEQ ID NO: 11472 - DNA, 80 bp, synthetic construct
  misc_feature 1..80: note = Synthetic: >AdVB3-cand-11280-11359
  source 1..80: mol_type = other DNA
ggcagcggccaacctagtctcggcctacgagcagaccgtgaaggaggagcgcaacttccaaaaatcttttaacaaccatg

SEQ ID NO: 11473 - DNA, 80 bp, synthetic construct
  misc_feature 1..80: note = Synthetic: >NC_001430.1-cand-2180-2259
  source 1..80: mol_type = other DNA
ccttggatctcagggtctcattacaggatgtttaacacagatgccaaagcaataaatgctaatgttggttatgttacatg

SEQ ID NO: 11474 - DNA, 80 bp, synthetic construct
  misc_feature 1..80: note = Synthetic: >NC_003310.1-cand-44470-44549
  source 1..80: mol_type = other DNA
catgtaccttccccttatcactaaggagaatagtatttgagaaatatgtatacatgatattatcatgaattagatataca

SEQ ID NO: 11475 - DNA, 80 bp, synthetic construct
  misc_feature 1..80: note = Synthetic: >NC_001611.1-cand-65650-65729
  source 1..80: mol_type = other DNA
gtattaaagaatgcggtagtatgagtaaaccgttttaacgaattatatagtctccagaaatctgtggcgttgcatacatg

SEQ ID NO: 11476 - DNA, 80 bp, synthetic construct
  misc_feature 1..80: note = Synthetic: >NC_004296.1-cand-1540-1619
  source 1..80: mol_type = other DNA
ttgatattgccctcagcaaaactgattccaggaagtatgaaaatgcagtctgggaccagtataaagacttatgccacatg

SEQ ID NO: 11477 - DNA, 80 bp, synthetic construct
  misc_feature 1..80: note = Synthetic: >NC_011501.2-cand-980-1059
  source 1..80: mol_type = other DNA
catgttgaacaatcaaatacagtgttagtatgttgtcatctatgcataaccctctatgagcacaatagttaaaagctaac

SEQ ID NO: 11478 - DNA, 80 bp, synthetic construct
  misc_feature 1..80: note = Synthetic: >NC_004296.1-cand-1700-1779
  source 1..80: mol_type = other DNA
catgtttgatgcagcagtgtcaggaggactgaacacatcggttttgagagcagtgctgcccagagatatggtgttcagaa

SEQ ID NO: 11479 - DNA, 80 bp, synthetic construct
  misc_feature 1..80: note = Synthetic: >NC_001611.1-cand-66780-66859
  source 1..80: mol_type = other DNA
tttttagattaatactttcaatgagataaatatgggtggcggagtaagtgttgagctccctaaacgggatccgcctccgg

SEQ ID NO: 11480 - DNA, 80 bp, synthetic construct
  misc_feature 1..80: note = Synthetic: >NC_009825.1-cand-110-189
  source 1..80: mol_type = other DNA
ccgggatgaccgggtcctttcttggattaacccgctcaatgcccggaaatttgggcgtgcccccgcaagactgctagccg

SEQ ID NO: 11481 - DNA, 80 bp, synthetic construct
  misc_feature 1..80: note = Synthetic: >AdVB3-cand-34240-34319
  source 1..80: mol_type = other DNA
ggctctaagttcttctctaagttctagttgtagatactctctcatattatcaccaaactgcttagccagaagccccccgg

SEQ ID NO: 11482 - DNA, 80 bp, synthetic construct
  misc_feature 1..80: note = Synthetic: >AdVB7-cand-10490-10569
  source 1..80: mol_type = other DNA
ggatcaggctggagccgcagctaacgtggtactggcactcccgtctcgacccaggcctgcacaaaacctccaggatacgg

SEQ ID NO: 11483 - DNA, 80 bp, synthetic construct
  misc_feature 1..80: note = Synthetic: >NC_001611.1-cand-74460-74539
  source 1..80: mol_type = other DNA
ccgtattccaacgatattaacctaaaagagttatcgggacacgctcttaggagattaaaggataaaatattatccaagaa

SEQ ID NO: 11484 - DNA, 80 bp, synthetic construct
  misc_feature 1..80: note = Synthetic: >NC_001611.1-cand-53250-53329
  source 1..80: mol_type = other DNA
ggtgccaccaataaactatttctaagaccgtatgttctgattttatcttttagaggttcccaattccaaagatccgacgg

SEQ ID NO: 11485 - DNA, 80 bp, synthetic construct
  misc_feature 1..80: note = Synthetic: >NC_003310.1-cand-104850-104929
  source 1..80: mol_type = other DNA
ccgtgtccgctattttattaactactgataacaaaatattagtatgtaacagacgagatagttttctctattctgaaata

SEQ ID NO: 11486 - DNA, 80 bp, synthetic construct
  misc_feature 1..80: note = Synthetic: >AdVB3-cand-28830-28909
  source 1..80: mol_type = other DNA
tgcaacaaaactaaaccaatatttgtaatctgtaacagacaaaatctcacgttaattaatgttagcaaaatttataacgg

SEQ ID NO: 11487 - DNA, 80 bp, synthetic construct
  misc_feature 1..80: note = Synthetic: >NC_003310.1-cand-104130-104209
  source 1..80: mol_type = other DNA
cgaataaaagatattccaagatcaaaagacacgcacgtgtttgctgcgtgtataacaagtgacggatatccgttaatagg

SEQ ID NO: 11488 - DNA, 80 bp, synthetic construct
  misc_feature 1..80: note = Synthetic: >NC_003310.1-cand-78820-78899
  source 1..80: mol_type = other DNA
ctttctggatctcaccaacgacgatagttctgaccagcaactcatttcttcatcatccacctgttttaacatataatagg

SEQ ID NO: 11489 - DNA, 80 bp, synthetic construct
  misc_feature 1..80: note = Synthetic: >NC_001611.1-cand-117200-117279
  source 1..80: mol_type = other DNA
ctagtatcaatccaacaaatgcaccaaagttatatcctcttcaacacaaagtcgtatctgaagtagtttctaatatgagg

SEQ ID NO: 11490 - DNA, 80 bp, synthetic construct
  misc_feature 1..80: note = Synthetic: >AdVB3-cand-23250-23329
  source 1..80: mol_type = other DNA
tcttcactatcctgactgatgtcttgcagagggacatgcttggtcttcctgggcttcttcttgggagggatcgggggagg

SEQ ID NO: 11491 - DNA, 80 bp, synthetic construct
  misc_feature 1..80: note = Synthetic: >NC_004911.1-cand-2060-2139
  source 1..80: mol_type = other DNA
gaattcttgaggatgaacaaatgtaccagaagtgctgcactctattcgagaaattcttccctagcagttcatatcggagg

SEQ ID NO: 11492 - DNA, 80 bp, synthetic construct
  misc_feature 1..80: note = Synthetic: >NC_001611.1-cand-34090-34169
  source 1..80: mol_type = other DNA
ttcattaggattatcaaatctttaatcttattacgattgtatgcgttaatattacaagacgtcattctaaaagacggagg

SEQ ID NO: 11493 - DNA, 80 bp, synthetic construct
  misc_feature 1..80: note = Synthetic: >NC_003310.1-cand-99280-99359
  source 1..80: mol_type = other DNA
gttccgttggatggtaataaactgtttaatattgcacaaagaattttagacactaactctgttttattaaccgaacgagg

SEQ ID NO: 11494 - DNA, 80 bp, synthetic construct
  misc_feature 1..80: note = Synthetic: >AdVB3-cand-34940-35019
  source 1..80: mol_type = other DNA
cctctaaatacacatacaaagcctcattagccatggcttaccaggcaaagtacagccaacgcgcaaagcacaagctctaa

SEQ ID NO: 11495 - DNA, 80 bp, synthetic construct
  misc_feature 1..80: note = Synthetic: >NC_007368.1-cand-110-189
  source 1..80: mol_type = other DNA
tgtaacattgcatttcaagcaatatgaattcaactcccccccaaacaaccaagtgatgctgtgtgaaccaacaataatag

SEQ ID NO: 11496 - DNA, 80 bp, synthetic construct
  misc_feature 1..80: note = Synthetic: >NC_001611.1-cand-89280-89359
  source 1..80: mol_type = other DNA
ctattcgaaagtcttagggatgaggaagcatattctatagtcagaattttcatggatgtagatttagacgcgtgtctaga

SEQ ID NO: 11497 - DNA, 80 bp, synthetic construct
  misc_feature 1..80: note = Synthetic: >NC_003310.1-cand-75610-75689
  source 1..80: mol_type = other DNA
ctatttgtttaagtatagatcaaaagaaatcttacgtatttaattttcacaagtatgaagaaaaatgttgtggtagaacc

SEQ ID NO: 11498 - DNA, 80 bp, synthetic construct
  misc_feature 1..80: note = Synthetic: >AdVB3-cand-30570-30649
  source 1..80: mol_type = other DNA
ctcaatcacaatataccccacatttaattttgggtggaattctcccaatgcactgggttacccacaagaaccaaatgaac

SEQ ID NO: 11499 - DNA, 80 bp, synthetic construct
  misc_feature 1..80: note = Synthetic: >NC_006573.1-cand-1210-1289
  source 1..80: mol_type = other DNA
ttgtatcaaatggttcatacttgaacgagacccacttttctgatgatattgaacaacaagctgacaatatgatcactgag

SEQ ID NO: 11500 - DNA, 80 bp, synthetic construct
  misc_feature 1..80: note = Synthetic: >NC_007376.1-cand-1170-1249
  source 1..80: mol_type = other DNA
gtagagacataagcgatttgaagcaatatgatagtgacgaacctgaattaaggtcactttcaagctggatccagaatgag

SEQ ID NO: 11501 - DNA, 80 bp, synthetic construct
  misc_feature 1..80: note = Synthetic: >NC_003310.1-cand-81360-81439
  source 1..80: mol_type = other DNA
ttgtgtcgttagataaaccgtttatgtattttgaggaaattgataatgagttagattacgaaccagaaagtgcaaatgag

SEQ ID NO: 11502 - DNA, 80 bp, synthetic construct
  misc_feature 1..80: note = Synthetic: >EVA76-cand-6080-6159
  source 1..80: mol_type = other DNA
ctccaaggacaagagacttgaagttgattttgaaaccgccctcttctccaaatatatagggaacaagatccatgaaccag

SEQ ID NO: 11503 - DNA, 80 bp, synthetic construct
  misc_feature 1..80: note = Synthetic: >NC_001722.1-cand-10100-10179
  source 1..80: mol_type = other DNA
ctccagcactagcaggtagagcctgggtgttccctgctggactctcaccagtacttggccggtactgggcagacggctcc

SEQ ID NO: 11504 - DNA, 80 bp, synthetic construct
  misc_feature 1..80: note = Synthetic: >U31794.1-cand-840-919
  source 1..80: mol_type = other DNA
ggtgcgttaacagtaacgtgcccactctgcgcatcatctaaataactgcaatggcatcacctgaaggtacagatggggag

SEQ ID NO: 11505 - DNA, 80 bp, synthetic construct
  misc_feature 1..80: note = Synthetic: >AdVB7-cand-32700-32779
  source 1..80: mol_type = other DNA
gtcagtgatacataaaaatgcattgggatagtcttttaaagcgctttcacagtccaactgctgcggatgcgactccggag

SEQ ID NO: 11506 - DNA, 80 bp, synthetic construct
  misc_feature 1..80: note = Synthetic: >NC_039476.1-cand-2680-2759
  source 1..80: mol_type = other DNA
gcaagggcttgagcgatgaggagtatgacgagtacaagaggataagagaagagagaaatgggaagtactctatagaggag

SEQ ID NO: 11507 - DNA, 80 bp, synthetic construct
  misc_feature 1..80: note = Synthetic: >AdVB7-cand-27220-27299
  source 1..80: mol_type = other DNA
ctcgagacgcccaggccgaagttcagatgactaacgcaggtgtacagctggcgggcggttccgccctatgtcgtcaccga

SEQ ID NO: 11508 - DNA, 80 bp, synthetic construct
  misc_feature 1..80: note = Synthetic: >AdVB3-cand-4870-4949
  source 1..80: mol_type = other DNA
tttgccttacatggatattttcccgcaccaagtccgttaggaggcgctctcccccaagggatagaagctcctggagcgag

SEQ ID NO: 11509 - DNA, 80 bp, synthetic construct
  misc_feature 1..80: note = Synthetic: >AdVB7-cand-12170-12249
  source 1..80: mol_type = other DNA
ggcaacccagtcgcagggccatggaggctgcagggtgtgagcttccttacatagaagaggtggatgaagtcgaggacgag

SEQ ID NO: 11510 - DNA, 80 bp, synthetic construct
  misc_feature 1..80: note = Synthetic: >NC_001611.1-cand-62150-62229
  source 1..80: mol_type = other DNA
gtgtatacgaccgtgttataaattaggagataatctaaaaggcatagttgttataaaggacagaaatatatatattagag

SEQ ID NO: 11511 - DNA, 80 bp, synthetic construct
  misc_feature 1..80: note = Synthetic: >AJ410618.2-cand-5230-5309
  source 1..80: mol_type = other DNA
ttaattttggactggactgtgctcgtctagaaatattttgggacaaacagacatatatccttgagacttcaataacacaa

SEQ ID NO: 11512 - DNA, 80 bp, synthetic construct
  misc_feature 1..80: note = Synthetic: >AJ410618.2-cand-5310-5389
  source 1..80: mol_type = other DNA
aaacatgtccttaagatcatgatggatgaagtaacaaaggagctgttaagatgtggtatgagatttaaaactgagcaagt

SEQ ID NO: 11513 - DNA, 80 bp, synthetic construct
  misc_feature 1..80: note = Synthetic: >AJ410618.2-cand-5360-5439
  source 1..80: mol_type = other DNA
atgtggtatgagatttaaaactgagcaagtttctaatgtgaagcaccttgtgttgtttaaaacagaggcaggttttgaat

SEQ ID NO: 11514 - DNA, 80 bp, synthetic construct
  misc_feature 1..80: note = Synthetic: >AJ410618.2-cand-5480-5559
  source 1..80: mol_type = other DNA
tgcattgcgtacaggtcttagaacaaatcaaactatcaaccacaaattcatgatatcgattaaagacaatggtcttagag

SEQ ID NO: 11515 - DNA, 80 bp, synthetic construct
  misc_feature 1..80: note = Synthetic: >AJ410618.2-cand-5560-5639
  source 1..80: mol_type = other DNA
ccattgcccaatatgatgatgaaagccctaggttcttacttgcgcatgcatttcatacaataagagatattaggtatcag

SEQ ID NO: 11516 - DNA, 80 bp, synthetic construct
  misc_feature 1..80: note = Synthetic: >AJ410618.2-cand-5600-5679
  source 1..80: mol_type = other DNA
tgcgcatgcatttcatacaataagagatattaggtatcaggcagttgatgctgtaagtaatgtatggtttatacataaag

SEQ ID NO: 11517 - DNA, 80 bp, synthetic construct
  misc_feature 1..80: note = Synthetic: >AJ410618.2-cand-5720-5799
  source 1..80: mol_type = other DNA
attggaaaactttatgaaaaacctaccagctgcaatacctcctgctgcctactcattaatcatgaatagagcaaaaatat

SEQ ID NO: 11518 - DNA, 80 bp, synthetic construct
  misc_feature 1..80: note = Synthetic: >AJ410618.2-cand-5800-5879
  source 1..80: mol_type = other DNA
ctgttgatttatttatgtttaatgatttactcaggcttattaatccgtcaaacactttggatttatctggtttgcagcca

SEQ ID NO: 11519 - DNA, 80 bp, synthetic construct
  misc_feature 1..80: note = Synthetic: >AJ410618.2-cand-5880-5959
  source 1..80: mol_type = other DNA
actgaggatggatttagtactgtaagctgcatgtcaagtcggctatggtcagaagaggtaagctttgttgatgaggatga

SEQ ID NO: 11520 - DNA, 80 bp, synthetic construct
  misc_feature 1..80: note = Synthetic: >AJ410618.2-cand-5960-6039
  source 1..80: mol_type = other DNA
ggaggttgatgatgagttcacaatagacttacaggatgtagattttgaaaatattgatgttgaagctgacattgagcatt

SEQ ID NO: 11521 - DNA, 80 bp, synthetic construct
  misc_feature 1..80: note = Synthetic: >AJ410618.2-cand-6040-6119
  source 1..80: mol_type = other DNA
tcctacaagatgaaagctcatatacgggtgatttacttatcatgtcagaagaaactgaggttaaaaaaatgagaggtatt

SEQ ID NO: 11522 - DNA, 80 bp, synthetic construct
  misc_feature 1..80: note = Synthetic: >AJ410618.2-cand-6120-6199
  source 1..80: mol_type = other DNA
ataaaattgttagaacctgttcggctcataaagagctgggtatccaaaggtttatgtattgaaaaggtttatagtccaac

SEQ ID NO: 11523 - DNA, 80 bp, synthetic construct
  misc_feature 1..80: note = Synthetic: >AJ410618.2-cand-6200-6279
  source 1..80: mol_type = other DNA
caatattatactgatgactaggtatctatcaaagaacttcaacttctctagtagacaggtttctctcttagatccatatg

SEQ ID NO: 11524 - DNA, 80 bp, synthetic construct
  misc_feature 1..80: note = Synthetic: >AJ410618.2-cand-6320-6399
  source 1..80: mol_type = other DNA
atgtgttgttgatcagtttagcacatttgatcaggaagcacagcttttggtgtctcagaaaggtatttgcccagaggatg

SEQ ID NO: 11525 - DNA, 80 bp, synthetic construct
  misc_feature 1..80: note = Synthetic: >AJ410618.2-cand-6360-6439
  source 1..80: mol_type = other DNA
cagcttttggtgtctcagaaaggtatttgcccagaggatgtggtacctgattctttgttttcattcagacatactatagt

SEQ ID NO: 11526 - DNA, 80 bp, synthetic construct
  misc_feature 1..80: note = Synthetic: >AJ410618.2-cand-6440-6519
  source 1..80: mol_type = other DNA
tcttctgcgtagactctttcctcaggactctgtttcaactttttactaattgcttatattcattttcattttccggagca

SEQ ID NO: 11527 - DNA, 80 bp, synthetic construct
  misc_feature 1..80: note = Synthetic: >AdVE4-cand-29400-29479
  source 1..80: mol_type = other DNA
ccgcaatgtccagggttagtagtcagcggcatcgtcggtgtgctttgtgggttagcagttataatcatgtgcatgttcat

SEQ ID NO: 11528 - DNA, 80 bp, synthetic construct
  misc_feature 1..80: note = Synthetic: >AdVE4-cand-29480-29559
  source 1..80: mol_type = other DNA
ttttgcttgctgctacagaaggcttcatcggcagaaatcagacccactgctgaacctctatgtttaatttttgattttcc

SEQ ID NO: 11529 - DNA, 80 bp, synthetic construct
  misc_feature 1..80: note = Synthetic: >AdVE4-cand-29560-29639
  source 1..80: mol_type = other DNA
agaaccaatgaatgcacttagcactttagtttttttgaccttgattggctttgttttcagtaatcctattcctagagtta

SEQ ID NO: 11530 - DNA, 80 bp, synthetic construct
  misc_feature 1..80: note = Synthetic: >AdVE4-cand-29680-29759
  source 1..80: mol_type = other DNA
aatactggtaggtgtagagggtgctaaaaacaccacttggacaaaatatcaccttaatgggtggaaaaatatctgcaatt

SEQ ID NO: 11531 - DNA, 80 bp, synthetic construct
  misc_feature 1..80: note = Synthetic: >AdVE4-cand-29710-29789
  source 1..80: mol_type = other DNA
caccacttggacaaaatatcaccttaatgggtggaaaaatatctgcaattggagtgtaacagtttatacatgcgagggag

SEQ ID NO: 11532 - DNA, 80 bp, synthetic construct
  misc_feature 1..80: note = Synthetic: >AdVE4-cand-29790-29869
  source 1..80: mol_type = other DNA
ttaatcttatcattgccaatgcaacctcagctcaaaatggtagaattcaagggcaaagtgttagtgattctaatgggtat

SEQ ID NO: 11533 - DNA, 80 bp, synthetic construct
  misc_feature 1..80: note = Synthetic: >AdVE4-cand-29870-29949
  source 1..80: mol_type = other DNA
tatacccaacatacttttatttatgacattaaggttataccactgccaacacccagcccacctagcactactcaaaccac

SEQ ID NO: 11534 - DNA, 80 bp, synthetic construct
  misc_feature 1..80: note = Synthetic: >AdVE4-cand-29950-30029
  source 1..80: mol_type = other DNA
tacattaactgagcccaccaccgccacaacagcagaggcaagcagttcgtctaggatccaaatggcatttttgttgccac

SEQ ID NO: 11535 - DNA, 80 bp, synthetic construct
  misc_feature 1..80: note = Synthetic: >AdVE4-cand-30030-30109
  source 1..80: mol_type = other DNA
catctagcagtcccactgctagtaccaataagcagtctactaaatttttgtccattactaaaagccacaccacagctacc

SEQ ID NO: 11536 - DNA, 80 bp, synthetic construct
  misc_feature 1..80: note = Synthetic: >AdVE4-cand-30110-30189
  source 1..80: mol_type = other DNA
tcgagagccttctctagcaccgctaatctcacttcgctttcctatacattaatcagttctgttactacctctaccccagc

SEQ ID NO: 11537 - DNA, 80 bp, synthetic construct
  misc_feature 1..80: note = Synthetic: >AdVE4-cand-30180-30259
  source 1..80: mol_type = other DNA
ctaccccagcttcttttcccactcccctaaagcaaacccaaggcggcttgcaatggcagatcaccctgctcattgtaatc

SEQ ID NO: 11538 - DNA, 80 bp, synthetic construct
  misc_feature 1..80: note = Synthetic: >AdVE4-cand-30270-30349
  source 1..80: mol_type = other DNA
tcctggcggtgctgctctacttcatcttttgccgccgcatccccaacgcgaaaccggtctacaagcccatcgttatcggg

SEQ ID NO: 11539 - DNA, 80 bp, synthetic construct
  misc_feature 1..80: note = Synthetic: >AdVE4-cand-30350-30429
  source 1..80: mol_type = other DNA
cagccggagccgcttcaggtggatggaggtctaaggaatcttcttttctcttttacagtatggtgatttgaactatgatt

SEQ ID NO: 11540 - DNA, 80 bp, synthetic construct
  misc_feature 1..80: note = Synthetic: >AdVE4-cand-30400-30479
  source 1..80: mol_type = other DNA
ttttacagtatggtgatttgaactatgattcctagacagttctttatcattggtcttctctgtgcgctccaagtctgtgc

SEQ ID NO: 11541 - DNA, 80 bp, synthetic construct
  misc_feature 1..80: note = Synthetic: >AdVE4-cand-30480-30559
  source 1..80: mol_type = other DNA
caccctcgctttggtggctaacgcaagtccagactgcattggaccgttcgcctcctacgtgctctttgcctttatcacct

SEQ ID NO: 11542 - DNA, 80 bp, synthetic construct
  misc_feature 1..80: note = Synthetic: >AdVE4-cand-30560-30639
  source 1..80: mol_type = other DNA
gcatctgctgttgtagcatagtctgcctgcttatcaccttcttccagttcgttgactgggtctttgtgcgcattgcctac

SEQ ID NO: 11543 - DNA, 80 bp, synthetic construct
  misc_feature 1..80: note = Synthetic: >EF397003.1-cand-1710-1789
  source 1..80: mol_type = other DNA
agtaatgagcatagacttaaacagattattagccttgaatatagcctttgagaaagcattattagcgacagccacatggt

SEQ ID NO: 11544 - DNA, 80 bp, synthetic construct
  misc_feature 1..80: note = Synthetic: >EF397003.1-cand-1790-1869
  source 1..80: mol_type = other DNA
ttcagtactacactgaagatcaagggcattttcctttacagcatgctttaaggtcggtattttctttccattttcttctg

SEQ ID NO: 11545 - DNA, 80 bp, synthetic construct
  misc_feature 1..80: note = Synthetic: >EF397003.1-cand-1870-1949
  source 1..80: mol_type = other DNA
tgcgtttcccaaaagatgaaattatgtgcgatttttgataatcttagatacttgatacctgctgtcacatcactgtactc

SEQ ID NO: 11546 - DNA, 80 bp, synthetic construct
  misc_feature 1..80: note = Synthetic: >EF397003.1-cand-1950-2029
  source 1..80: mol_type = other DNA
aggctatgagctcttgatcgaaaagttctttgagagaccattcaaaagtgcacttgatgtgtatttatattctgtaatta

SEQ ID NO: 11547 - DNA, 80 bp, synthetic construct
  misc_feature 1..80: note = Synthetic: >EF397003.1-cand-2040-2119
  source 1..80: mol_type = other DNA
gataaacttagctcagaataataaagttaggttctattcaaaagtcaggttgttaggactcactgttgatcaatcaacag

SEQ ID NO: 11548 - DNA, 80 bp, synthetic construct
  misc_feature 1..80: note = Synthetic: >EF397003.1-cand-2120-2199
  source 1..80: mol_type = other DNA
ttggtgcaagtggtgtttatccatcgttgatgtcaagagttgtatacaaacattatcgaagtcttatctcagaggcaacc

SEQ ID NO: 11549 - DNA, 80 bp, synthetic construct
  misc_feature 1..80: note = Synthetic: >EF397003.1-cand-2200-2279
  source 1..80: mol_type = other DNA
acttgttttttcttgtttgaaaaagggttacatggaaacttatcggaggaggcgaaaatacacctcgaaacaattgaatg

SEQ ID NO: 11550 - DNA, 80 bp, synthetic construct
  misc_feature 1..80: note = Synthetic: >EF397003.1-cand-2280-2359
  source 1..80: mol_type = other DNA
ggctcgtaagtttagaattaaggaagataagtatggtgatatcttaatgaaagagggatatgatatagaatctgtaagga

SEQ ID NO: 11551 - DNA, 80 bp, synthetic construct
  misc_feature 1..80: note = Synthetic: >EF397003.1-cand-2360-2439
  source 1..80: mol_type = other DNA
agggtaacgtccaagttgaacaacagttattttgcaaagaggttgtagagcttagtgcacaggagttgaataaatatctt

SEQ ID NO: 11552 - DNA, 80 bp, synthetic construct
  misc_feature 1..80: note = Synthetic: >EF397003.1-cand-2440-2519
  source 1..80: mol_type = other DNA
caagcaaaatcccaggtattatgtgctaatataatgaataaacattgggatcgcccttattttagtcaaactcgtaatat

SEQ ID NO: 11553 - DNA, 80 bp, synthetic construct
  misc_feature 1..80: note = Synthetic: >EF397003.1-cand-2520-2599
  source 1..80: mol_type = other DNA
aagtttaaagggtatgtcagggtctttgcaagaagatgggtatttatctgctagtgtaacattaatcgaagccattcgtt

SEQ ID NO: 11554 - DNA, 80 bp, synthetic construct
  misc_feature 1..80: note = Synthetic: >EF397003.1-cand-2600-2679
  source 1..80: mol_type = other DNA
ttttgaataggtcacaattaaatcccaatgtgattgacatgtatgagcagacaaaacactgcaaagcacaagcaaggatt

SEQ ID NO: 11555 - DNA, 80 bp, synthetic construct
  misc_feature 1..80: note = Synthetic: >EF397003.1-cand-2680-2759
  source 1..80: mol_type = other DNA
gttagaaaataccagcgtactgaagcagatcgtgggttctttatcacaactttaccaacaagggttagattggaaataat

SEQ ID NO: 11556 - DNA, 80 bp, synthetic construct
  misc_feature 1..80: note = Synthetic: >EF397003.1-cand-2760-2839
  source 1..80: mol_type = other DNA
agaagattattttgatgccattgcaaaggtagtgccagaagaatatatatcatatggaggtgatcggaaagtattaaata

SEQ ID NO: 11557 - DNA, 80 bp, synthetic construct
  misc_feature 1..80: note = Synthetic: >EF397003.1-cand-2840-2919
  source 1..80: mol_type = other DNA
tacaagttgcactagaaaaggcattgaggtgggcttcaggagtgtcagaaatatcaacaagcacaggtaagttgattaaa

SEQ ID NO: 11558 - DNA, 80 bp, synthetic construct
  misc_feature 1..80: note = Synthetic: >EF397003.1-cand-2920-2999
  source 1..80: mol_type = other DNA
tttagaagaaaattgatgtatgtgagtgctgatgccaccaaatggtcccctggtgacaactcagcaaaatttcgtagatt

SEQ ID NO: 11559 - DNA, 80 bp, synthetic construct
  misc_feature 1..80: note = Synthetic: >EVA90-cand-4290-4369
  source 1..80: mol_type = other DNA
gctagtcaggaggatttagaaaatctattcagcaatgttgcctacctagcccattactgtagaaaattccaaccactcta

SEQ ID NO: 11560 - DNA, 80 bp, synthetic construct
  misc_feature 1..80: note = Synthetic: >EVA90-cand-4370-4449
  source 1..80: mol_type = other DNA
cgcctcagaggcaaagaggatctatgccatggagaaaagaatcaacaattacatgcagttcaagagcaaacaccgaattg

SEQ ID NO: 11561 - DNA, 80 bp, synthetic construct
  misc_feature 1..80: note = Synthetic: >EVA90-cand-4450-4529
  source 1..80: mol_type = other DNA
aacctgtatgtttaataattagaggaccccctggcaccggtaaatcactagctacaggcatcattggtagagctattgca

SEQ ID NO: 11562 - DNA, 80 bp, synthetic construct
  misc_feature 1..80: note = Synthetic: >EVA90-cand-4530-4609
  source 1..80: mol_type = other DNA
gaaaagtaccattctagtgtatactccctgcctccagacccggaccattttgatggttacaagcagcaagtggtcacagt

SEQ ID NO: 11563 - DNA, 80 bp, synthetic construct
  misc_feature 1..80: note = Synthetic: >EVA90-cand-4610-4689
  source 1..80: mol_type = other DNA
gatggatgacctttgtcaaaatccagatgggaaagacatgtcactcttttgccagatggtctccacagtagaattcatcc

SEQ ID NO: 11564 - DNA, 80 bp, synthetic construct
  misc_feature 1..80: note = Synthetic: >EVA90-cand-4690-4769
  source 1..80: mol_type = other DNA
cacccatggctagcttggaggaaaaaggtgtttcattcacttcaaaatttgtgattgcctccaccaactcatccaacatc

SEQ ID NO: 11565 - DNA, 80 bp, synthetic construct
  misc_feature 1..80: note = Synthetic: >EVA90-cand-4770-4849
  source 1..80: mol_type = other DNA
atagtcccaactgtctcagacagtgatgccattagaagaaggttctatatggattgtgacatcgaggttcccgaatcatt

SEQ ID NO: 11566 - DNA, 80 bp, synthetic construct
  misc_feature 1..80: note = Synthetic: >EVA90-cand-4850-4929
  source 1..80: mol_type = other DNA
tagaacaccccagggaaggctagatgctgctagagctgccaaactttgttcagaaaacaacactgctaactttaaaaagt

SEQ ID NO: 11567 - DNA, 80 bp, synthetic construct
  misc_feature 1..80: note = Synthetic: >EVA90-cand-4920-4999
  source 1..80: mol_type = other DNA
tttaaaaagtgtagccccctggtttgtggtaaagccattcaacttagggacaggaaatcaggagtcagatatggtttgga

SEQ ID NO: 11568 - DNA, 80 bp, synthetic construct
  misc_feature 1..80: note = Synthetic: >EVA90-cand-5000-5079
  source 1..80: mol_type = other DNA
ttctgttgtatcagaattaatcagagaatacaacaaccgctcagcagttggtaacaccattgaggcacttttccaaggcc

SEQ ID NO: 11569 - DNA, 80 bp, synthetic construct
  misc_feature 1..80: note = Synthetic: >EVA90-cand-5080-5159
  source 1..80: mol_type = other DNA
caccccaattcaaaccaattaggataacccttgacaaaccagcgccagatgcaattagtgatcttctagcaagtgtggat

SEQ ID NO: 11570 - DNA, 80 bp, synthetic construct
  misc_feature 1..80: note = Synthetic: >EVA90-cand-5200-5279
  source 1..80: mol_type = other DNA
ttattccagaaaagcccaccaacattgagaggcacgtgaacagggctctaatgattctacaatcagtcactactgtggtt

SEQ ID NO: 11571 - DNA, 80 bp, synthetic construct
  misc_feature 1..80: note = Synthetic: >EVA90-cand-5240-5319
  source 1..80: mol_type = other DNA
cagggctctaatgattctacaatcagtcactactgtggttgcagtgatttcacttgtgtatgtcatctataaactctttg

SEQ ID NO: 11572 - DNA, 80 bp, synthetic construct
  misc_feature 1..80: note = Synthetic: >EVA90-cand-5320-5399
  source 1..80: mol_type = other DNA
ctggattccaaggtgcctactcagggatgcccaaaacagcagtcaagaaaccagtgctgagaactgctgtggcccaagga

SEQ ID NO: 11573 - DNA, 80 bp, synthetic construct
  misc_feature 1..80: note = Synthetic: >EVA90-cand-5380-5459
  source 1..80: mol_type = other DNA
gaactgctgtggcccaaggacctggattagactttgctctctctctattgaagaagaacatcagaaaatgccaaacagac

SEQ ID NO: 11574 - DNA, 80 bp, synthetic construct
  misc_feature 1..80: note = Synthetic: >EVA90-cand-5480-5559
  source 1..80: mol_type = other DNA
aggaattagagacagactggctgtgctcccaagacatgcttcaccaggagattcaatttggattgaacacaagcaaatta

SEQ ID NO: 11575 - DNA, 80 bp, synthetic construct
  misc_feature 1..80: note = Synthetic: >EVB73-cand-3840-3919
  source 1..80: mol_type = other DNA
aaggaatcgctagtgggccaagattccattttagagaagtctctaaaagcactagtaaagatcatatcagcattggtgat

SEQ ID NO: 11576 - DNA, 80 bp, synthetic construct
  misc_feature 1..80: note = Synthetic: >EVB73-cand-3920-3999
  source 1..80: mol_type = other DNA
agtggtgagaaaccacgatgacttaatcacggtgactgccacactcgctctcattggctgtacctcatccccgtggcgat

SEQ ID NO: 11577 - DNA, 80 bp, synthetic construct
  misc_feature 1..80: note = Synthetic: >EVB73-cand-4000-4079
  source 1..80: mol_type = other DNA
ggctaaaacaaaaggtgtcacaatattacggaatacccatggccgaacgccagaacaacgggtggctcaagaaattcaca

SEQ ID NO: 11578 - DNA, 80 bp, synthetic construct
  misc_feature 1..80: note = Synthetic: >EVB73-cand-4080-4159
  source 1..80: mol_type = other DNA
gaaatgaccaatgcttgtaagggaatggaatggatagccatcaagatccagaaattcattgagtggctcaaggttaaaat

SEQ ID NO: 11579 - DNA, 80 bp, synthetic construct
  misc_feature 1..80: note = Synthetic: >EVB73-cand-4160-4239
  source 1..80: mol_type = other DNA
cttgccagaggtcaaggagaaacatgaattcctaaacagactcaaacagctccccctactagaaagccaaatcgccacaa

SEQ ID NO: 11580 - DNA, 80 bp, synthetic construct
  misc_feature 1..80: note = Synthetic: >EVB73-cand-4240-4319
  source 1..80: mol_type = other DNA
ttgagcaaagtgcaccatctcagagtgatcaggagcaactcttctcaaatgtccaatactttgcacactattgcaggaaa

SEQ ID NO: 11581 - DNA, 80 bp, synthetic construct
  misc_feature 1..80: note = Synthetic: >EVB73-cand-4400-4479
  source 1..80: mol_type = other DNA
caaatgccgtattgaacctgtatgtttactcttgcatggaagccccggtgcaggaaagtcggtcgccaccaacctaatcg

SEQ ID NO: 11582 - DNA, 80 bp, synthetic construct
  misc_feature 1..80: note = Synthetic: >EVB73-cand-4480-4559
  source 1..80: mol_type = other DNA
ggcgatcactagccgagaagctaaatagttcagtgtattccctaccaccagacccagatcacttcgatggctacaagcaa

SEQ ID NO: 11583 - DNA, 80 bp, synthetic construct
  misc_feature 1..80: note = Synthetic: >EVB73-cand-4560-4639
  source 1..80: mol_type = other DNA
caagccgtagtgatcatggatgatctatgtcaaaacccagatggaaaagatgtatcattgttctgccagatggtctcaag

SEQ ID NO: 11584 - DNA, 80 bp, synthetic construct
  misc_feature 1..80: note = Synthetic: >EVB73-cand-4640-4719
  source 1..80: mol_type = other DNA
tgtggattttgtaccaccaatggccgccctggaggagaaaggcatcttgttcacttctcccttcgtcctggcctcaacca

SEQ ID NO: 11585 - DNA, 80 bp, synthetic construct
  misc_feature 1..80: note = Synthetic: >EVB73-cand-4720-4799
  source 1..80: mol_type = other DNA
atgcaggttccatcaatgctccaacagtctcagacagcagggccttagcaaggagattccactttgatatgaacattgaa

SEQ ID NO: 11586 - DNA, 80 bp, synthetic construct
  misc_feature 1..80: note = Synthetic: >EVB73-cand-4800-4879
  source 1..80: mol_type = other DNA
gttatgtcaatgtatagccaaaatggcaagatcaacatgccaatgtcagtaaagacatgtgacgaagagtgttgcccagc

SEQ ID NO: 11587 - DNA, 80 bp, synthetic construct
  misc_feature 1..80: note = Synthetic: >EVB73-cand-4880-4959
  source 1..80: mol_type = other DNA
taatttcaagagatgttgcccacttgtgtgcggaaaggccattcaattcattgacagaagaacccaagtcagatactccc

SEQ ID NO: 11588 - DNA, 80 bp, synthetic construct
  misc_feature 1..80: note = Synthetic: >EVB73-cand-4930-5009
  source 1..80: mol_type = other DNA
ttgacagaagaacccaagtcagatactccctagacatgctggtaactgagatgtttagagaatacaaccacagacacagt

SEQ ID NO: 11589 - DNA, 80 bp, synthetic construct
  misc_feature 1..80: note = Synthetic: >EVB73-cand-5040-5119
  source 1..80: mol_type = other DNA
ggcccgccagtatacagagagatcaagattagcgtagcgccagaaacaccaccaccaccggccatcgcagacttactcaa

SEQ ID NO: 11590 - DNA, 80 bp, synthetic construct
  misc_feature 1..80: note = Synthetic: >EVB73-cand-5120-5199
  source 1..80: mol_type = other DNA
atcagtggacagtgaagcagtcagagagtattgcaaggaaaagggatggttagttccagagattaactccaccctccaaa

SEQ ID NO: 11591 - DNA, 80 bp, synthetic construct
  misc_feature 1..80: note = Synthetic: >EVB80-cand-4130-4209
  source 1..80: mol_type = other DNA
gagatgaccaatgcttgcaagggcatggaatggatagctacaaaaatccagaagtttattgagtggttgaaagtcaaaat

SEQ ID NO: 11592 - DNA, 80 bp, synthetic construct
  misc_feature 1..80: note = Synthetic: >EVB80-cand-4210-4289
  source 1..80: mol_type = other DNA
attaccagaagtcaaggagaaacacgaatttctaaacagactaaagcaattgcctctgctggaaagccaaattgccacca

SEQ ID NO: 11593 - DNA, 80 bp, synthetic construct
  misc_feature 1..80: note = Synthetic: >EVB80-cand-4290-4369
  source 1..80: mol_type = other DNA
ttgaacagagtgcaccttcacagagcgaccaagagcaattattctccaatgtccagtactttgcgcattactgcagaaag

SEQ ID NO: 11594 - DNA, 80 bp, synthetic construct
  misc_feature 1..80: note = Synthetic: >EVB80-cand-4450-4529
  source 1..80: mol_type = other DNA
caaatgccgtattgaacctgtctgtctgttgctccacggaagccccggtgcagggaaatcagtagcaacaaacctgatcg

SEQ ID NO: 11595 - DNA, 80 bp, synthetic construct
  misc_feature 1..80: note = Synthetic: >EVB80-cand-4540-4619
  source 1..80: mol_type = other DNA
cgctgaaaaactcaacagctcagtgtattccctaccaccagaccctgaccatttcgatggatacaaacaacaagctgtcg

SEQ ID NO: 11596 - DNA, 80 bp, synthetic construct
  misc_feature 1..80: note = Synthetic: >EVB80-cand-4690-4769
  source 1..80: mol_type = other DNA
tgttgactttgttccacccatggcagcgctagaagagaaaggcatcctcttcacctcaccttttgtcctcgcctctacaa

SEQ ID NO: 11597 - DNA, 80 bp, synthetic construct
  misc_feature 1..80: note = Synthetic: >EVB80-cand-4780-4859
  source 1..80: mol_type = other DNA
aattaacgcacccaccgtttcagacagtagagccttggccagaagattccactttgatatgaatattgaagtcatctcaa

SEQ ID NO: 11598 - DNA, 80 bp, synthetic construct
  misc_feature 1..80: note = Synthetic: >EVB80-cand-4860-4939
  source 1..80: mol_type = other DNA
tgtatagccagaatgggaaaatcaacatgccaatgtcagtgaagacttgtgatgaggagtgttgcccagtaaacttcaag

SEQ ID NO: 11599 - DNA, 80 bp, synthetic construct
  misc_feature 1..80: note = Synthetic: >EVB80-cand-4940-5019
  source 1..80: mol_type = other DNA
aagtgttgcccactagtgtgtggcaaggccatccaattcattgacagaagaacccaggtgaggtactccctggacatgct

SEQ ID NO: 11600 - DNA, 80 bp, synthetic construct
  misc_feature 1..80: note = Synthetic: >EVB80-cand-5020-5099
  source 1..80: mol_type = other DNA
agtaacggagatgtttagagaatacaaccacagacacagtgtgggtgcaacacttgaggctcttttccaaggtccaccag

SEQ ID NO: 11601 - DNA, 80 bp, synthetic construct
  misc_feature 1..80: note = Synthetic: >EVB80-cand-5100-5179
  source 1..80: mol_type = other DNA
tgtatagagagatcaagatcagcgttgctccggaaacccccccgccaccagctattgcagacctgttaaaatcagtggat

SEQ ID NO: 11602 - DNA, 80 bp, synthetic construct
  misc_feature 1..80: note = Synthetic: >EVB80-cand-5180-5259
  source 1..80: mol_type = other DNA
agtgaagctgttagagagtactgcaaggaaaagggatggctagtgcccgaggtaaactccaccctgcaaattgaaaagca

SEQ ID NO: 11603 - DNA, 80 bp, synthetic construct
  misc_feature 1..80: note = Synthetic: >EVB80-cand-5260-5339
  source 1..80: mol_type = other DNA
cgtgagtagggctttcatttgcctgcaagcactcaccacctttgtctcagtggcagggatcatctacattatatacaaat

SEQ ID NO: 11604 - DNA, 80 bp, synthetic construct
  misc_feature 1..80: note = Synthetic: >EVB80-cand-5320-5399
  source 1..80: mol_type = other DNA
catctacattatatacaaattgttcgcaggattccagggagcgtacactggcatgcctaatcaaaaacccaaggttccaa

SEQ ID NO: 11605 - DNA, 80 bp, synthetic construct
  misc_feature 1..80: note = Synthetic: >EVB80-cand-5400-5479
  source 1..80: mol_type = other DNA
ccttgagacaagcaaaagtgcagggccctgcctttgaatttgccgtggctatgatgaagagaaatgctagcactgtaaaa

SEQ ID NO: 11606 - DNA, 80 bp, synthetic construct
  misc_feature 1..80: note = Synthetic: >EVB80-cand-5460-5539
  source 1..80: mol_type = other DNA
gaaatgctagcactgtaaaaacagagtacggtgaattcacaatgcttggaatctatgataggtgggcagtgttgccccgc

SEQ ID NO: 11607 - DNA, 80 bp, synthetic construct
  misc_feature 1..80: note = Synthetic: >EVB86-cand-1490-1569
  source 1..80: mol_type = other DNA
cctgacaatcttccctcaccagtggataaatttacgcacgaacaactgtgcaaccatcgtaatgccgtacattaatagtg

SEQ ID NO: 11608 - DNA, 80 bp, synthetic construct
  misc_feature 1..80: note = Synthetic: >EVB86-cand-1570-1649
  source 1..80: mol_type = other DNA
taccaatggacaacatgttcagacattacaacttcaccttaatggtgattccgtttgttccattagagacaacgggaggg

SEQ ID NO: 11609 - DNA, 80 bp, synthetic construct
  misc_feature 1..80: note = Synthetic: >EVB86-cand-1650-1729
  source 1..80: mol_type = other DNA
accccttacgtgccaataacggttaccatagcaccaatgtatgctgagtacaacgggttgcgactttcgtcacatcaagg

SEQ ID NO: 11610 - DNA, 80 bp, synthetic construct
  misc_feature 1..80: note = Synthetic: >EVB86-cand-1730-1809
  source 1..80: mol_type = other DNA
gctgccaacgttagctaccccaggaagcaaccagttcctgacatccgatgattaccaatccccgtgcgccatgccggagt

SEQ ID NO: 11611 - DNA, 80 bp, synthetic construct
  misc_feature 1..80: note = Synthetic: >EVB86-cand-1840-1919
  source 1..80: mol_type = other DNA
gggaggtgcgtaatcttatggagatcgctgaggtagattctgtggtgccgatgaacaacataccggccaatgaaaagaaa

SEQ ID NO: 11612 - DNA, 80 bp, synthetic construct
  misc_feature 1..80: note = Synthetic: >EVB86-cand-1890-1969
  source 1..80: mol_type = other DNA
atgaacaacataccggccaatgaaaagaaaatggagacctaccagatctgggtggaggcacgcgatcatgaaacgactga

SEQ ID NO: 11613 - DNA, 80 bp, synthetic construct
  misc_feature 1..80: note = Synthetic: >EVB86-cand-1970-2049
  source 1..80: mol_type = other DNA
agcagtctttaaatttcagttagacccaggaaatgatagtgtgttgaaccgcaccctgttgggtgagattttgaactact

SEQ ID NO: 11614 - DNA, 80 bp, synthetic construct
  misc_feature 1..80: note = Synthetic: >EVB86-cand-2050-2129
  source 1..80: mol_type = other DNA
atgcacactggtcaggcagtataaagtttacattcctgttttgtggttcagctatggcaacaggcaagttgttaatagct

SEQ ID NO: 11615 - DNA, 80 bp, synthetic construct
  misc_feature 1..80: note = Synthetic: >EVB86-cand-2130-2209
  source 1..80: mol_type = other DNA
tactcgccccctggagcaaaccccccaacagacagaaagcaggcgatgctaggaacgcacattatttgggacttgggttt

SEQ ID NO: 11616 - DNA, 80 bp, synthetic construct
  misc_feature 1..80: note = Synthetic: >EVB86-cand-2210-2289
  source 1..80: mol_type = other DNA
acaatccagttgtgtcttgtgtgtaccatggataagtcaaacacactacaggctagtaaagcaagatcagtactcagctg

SEQ ID NO: 11617 - DNA, 80 bp, synthetic construct
  misc_feature 1..80: note = Synthetic: >EVB86-cand-2290-2369
  source 1..80: mol_type = other DNA
ctggttttatcacgtgctggtaccagacaaatataatagtgccccctgacacaccgaccaggtgtgcgatgttgtgtttt

SEQ ID NO: 11618 - DNA, 80 bp, synthetic construct
  misc_feature 1..80: note = Synthetic: >EVB86-cand-2370-2449
  source 1..80: mol_type = other DNA
gtatctgcgtgcaacgacttttctgtaaggatgttaaaagactcacccttcatagagcaaactgcagatttacaaaacga

SEQ ID NO: 11619 - DNA, 80 bp, synthetic construct
  misc_feature 1..80: note = Synthetic: >EVB86-cand-2450-2529
  source 1..80: mol_type = other DNA
ccccaatacaggtcggcgtgacacggttgcggatacgactagtagtggcccatctaattcagagcgcgttcctgcactga

SEQ ID NO: 11620 - DNA, 80 bp, synthetic construct
  misc_feature 1..80: note = Synthetic: >EVB86-cand-2530-2609
  source 1..80: mol_type = other DNA
cagctgctgagactgggcacacctcccaagttcaacccagtgatacaatacagaccaggcatgtgataaacttccattct

SEQ ID NO: 11621 - DNA, 80 bp, synthetic construct
  misc_feature 1..80: note = Synthetic: >EVB86-cand-2610-2689
  source 1..80: mol_type = other DNA
aggtcagaatcatccatagagaacttcttgtgcaggtcagcatgcgcacgaatgttcacatatgaggcatttggtgaaga

SEQ ID NO: 11622 - DNA, 80 bp, synthetic construct
  misc_feature 1..80: note = Synthetic: >EVB86-cand-2690-2769
  source 1..80: mol_type = other DNA
taccagtgataagagatatgccaactgggccataagtgtgaaagatatggttcaactgcgcaggaagtgtgaattgttta

SEQ ID NO: 11623 - DNA, 80 bp, synthetic construct
  misc_feature 1..80: note = Synthetic: >EVB88-cand-3470-3549
  source 1..80: mol_type = other DNA
acagctcatggttgtgataccatagccagatgtcagtgcacaacaggagtgtacttctgtcaatccaaaaacaaacacta

SEQ ID NO: 11624 - DNA, 80 bp, synthetic construct
  misc_feature 1..80: note = Synthetic: >EVB88-cand-3550-3629
  source 1..80: mol_type = other DNA
cccagtaagcttcgagggcccgggcctggtggaagttcaagagagtgagtactaccccaaaaggtaccaatcccacgtgc

SEQ ID NO: 11625 - DNA, 80 bp, synthetic construct
  misc_feature 1..80: note = Synthetic: >EVB88-cand-3630-3709
  source 1..80: mol_type = other DNA
tgcttgctgtgggtttctcagaaccaggtgattgtggaggcatcttgaggtgtgagcatggtgtcatcgggcttgtgacc

SEQ ID NO: 11626 - DNA, 80 bp, synthetic construct
  misc_feature 1..80: note = Synthetic: >EVB88-cand-3710-3789
  source 1..80: mol_type = other DNA
atgggaggtgagggtgttgtcggctttgctgacgttcgcgacctcctgtggttggaagatgatgccatggagcaaggcgt

SEQ ID NO: 11627 - DNA, 80 bp, synthetic construct
  misc_feature 1..80: note = Synthetic: >EVB88-cand-3790-3869
  source 1..80: mol_type = other DNA
caaagactatgttgagcagcttggaaatgcctttgggtccggtttcaccaatcaaatttgtgaacaggtcaacctcctca

SEQ ID NO: 11628 - DNA, 80 bp, synthetic construct
  misc_feature 1..80: note = Synthetic: >EVB88-cand-3870-3949
  source 1..80: mol_type = other DNA
aggaatcgctcgtagggcaagattccatcctagagaagtcactcaaagctctagtcaagatcatatcagcactggttatt

SEQ ID NO: 11629 - DNA, 80 bp, synthetic construct
  misc_feature 1..80: note = Synthetic: >EVB88-cand-4030-4109
  source 1..80: mol_type = other DNA
gctaaaacagaaagtgtcccagtattacggaatccccatggcggagaggcaaaacaatggctggctgaagaaattcacag

SEQ ID NO: 11630 - DNA, 80 bp, synthetic construct
  misc_feature 1..80: note = Synthetic: >EVB88-cand-4100-4179
  source 1..80: mol_type = other DNA
aaattcacagagatgaccaacgcctgcaagggcatggagtggatagccatcaagatccaaaagtttatagaatggttgaa

SEQ ID NO: 11631 - DNA, 80 bp, synthetic construct
  misc_feature 1..80: note = Synthetic: >EVB88-cand-4180-4259
  source 1..80: mol_type = other DNA
ggtgaaaattttgccagaagtcaaagagaaacatgagttcctaaacagactaaaacagctgcccttgctggagagtcaga

SEQ ID NO: 11632 - DNA, 80 bp, synthetic construct
  misc_feature 1..80: note = Synthetic: >EVB88-cand-4260-4339
  source 1..80: mol_type = other DNA
ttgccaccattgaacagagtgcaccctcacagagtgatcaagaacaattattttccaatgtccaatactttgcacactac

SEQ ID NO: 11633 - DNA, 80 bp, synthetic construct
  misc_feature 1..80: note = Synthetic: >EVB88-cand-4420-4499
  source 1..80: mol_type = other DNA
gttcaagtccaaatgccgtattgaacctgtctgtctattgctccacggaagccccggagctggcaaatctgtggcaacca

SEQ ID NO: 11634 - DNA, 80 bp, synthetic construct
  misc_feature 1..80: note = Synthetic: >EVB88-cand-4500-4579
  source 1..80: mol_type = other DNA
acctgattgggcgctcacttgcagaaaaactcaacagttcagtatattccctaccaccagatcctgaccactttgatggc

SEQ ID NO: 11635 - DNA, 80 bp, synthetic construct
  misc_feature 1..80: note = Synthetic: >EVB88-cand-4580-4659
  source 1..80: mol_type = other DNA
tacaaacaacaagctgtcgtgatcatggatgatttgtgccaaaacccagacggtaaagatgtgtccttgttttgccaaat

SEQ ID NO: 11636 - DNA, 80 bp, synthetic construct
  misc_feature 1..80: note = Synthetic: >EVB88-cand-4660-4739
  source 1..80: mol_type = other DNA
ggtgtcaagtgttgactttgttccaccaatggcagcactagaggaaaaaggcattctcttcacatcaccatttgtcctcg

SEQ ID NO: 11637 - DNA, 80 bp, synthetic construct
  misc_feature 1..80: note = Synthetic: >EVB88-cand-4740-4819
  source 1..80: mol_type = other DNA
cctccaccaatgcagggtccatcaacgctcccacagtgtcagacagcagagcccttgccagaagattccactttgacatg

SEQ ID NO: 11638 - DNA, 80 bp, synthetic construct
  misc_feature 1..80: note = Synthetic: >EVB88-cand-4900-4979
  source 1..80: mol_type = other DNA
ttgcccagtcaactttaaaaagtgttgtccattagtgtgtggtaaagccatccagttcattgacaggagaacacaggtga

SEQ ID NO: 11639 - DNA, 80 bp, synthetic construct
  misc_feature 1..80: note = Synthetic: >HCV.A16-cand-2010-2089
  source 1..80: mol_type = other DNA
atactaggtcaactctgcaggtactacacccagtggtcaggttcactggaggtgacattcatgtttgcaggctcattcat

SEQ ID NO: 11640 - DNA, 80 bp, synthetic construct
  misc_feature 1..80: note = Synthetic: >HCV.A16-cand-2050-2129
  source 1..80: mol_type = other DNA
gttcactggaggtgacattcatgtttgcaggctcattcatggccacaggtaaaatgctcatcgcctacaccccacctggg

SEQ ID NO: 11641 - DNA, 80 bp, synthetic construct
  misc_feature 1..80: note = Synthetic: >HCV.A16-cand-2170-2249
  source 1..80: mol_type = other DNA
cacatgtgatctgggacttcggattgcagtcttctgtgacgttggtcgtgccatggatcagtaatacacactacagggca

SEQ ID NO: 11642 - DNA, 80 bp, synthetic construct
  misc_feature 1..80: note = Synthetic: >HCV.A16-cand-2260-2339
  source 1..80: mol_type = other DNA
ctgggtactttgactattacaccactggcatcataaccatatggtatcaaactaactatgtcgtacccattggtgctccc

SEQ ID NO: 11643 - DNA, 80 bp, synthetic construct
  misc_feature 1..80: note = Synthetic: >HCV.A16-cand-2340-2419
  source 1..80: mol_type = other DNA
actacagcatatatcgtggctttggcagcagctcaggacaacttcactatgaaactgtgcaaggatacggaggacattga

SEQ ID NO: 11644 - DNA, 80 bp, synthetic construct
  misc_feature 1..80: note = Synthetic: >HCV.A16-cand-2440-2519
  source 1..80: mol_type = other DNA
gggatcccattgcagacatgattgaccaaactgtgaacaatcaagtgaaccgctccttgactgcgttgcaagtactacct

SEQ ID NO: 11645 - DNA, 80 bp, synthetic construct
  misc_feature 1..80: note = Synthetic: >HCV.A16-cand-2500-2579
  source 1..80: mol_type = other DNA
ctgcgttgcaagtactacctacagctgccaacactgaggcaagtagtcacagattaggcactggtgttgtaccagcacta

SEQ ID NO: 11646 - DNA, 80 bp, synthetic construct
  misc_feature 1..80: note = Synthetic: >HCV.A16-cand-2600-2679
  source 1..80: mol_type = other DNA
gtcgtctaatgctagtgacaagaatctcattgagactagatgtgtgttgaaccatcactccacacaggagacagccattg

SEQ ID NO: 11647 - DNA, 80 bp, synthetic construct
  misc_feature 1..80: note = Synthetic: >HCV.A16-cand-2660-2739
  source 1..80: mol_type = other DNA
cacacaggagacagccattgggaatttctttagccgtgctggtcttgtcagcatcatcacaatgcccaccacgggtacac

SEQ ID NO: 11648 - DNA, 80 bp, synthetic construct
  misc_feature 1..80: note = Synthetic: >HCV.A16-cand-2740-2819
  source 1..80: mol_type = other DNA
agaatacagatggttatgttaattgggacattgatttgatgggatatgctcagctgcggcggaaatgcgagttgttcacc

SEQ ID NO: 11649 - DNA, 80 bp, synthetic construct
  misc_feature 1..80: note = Synthetic: >HCV.A16-cand-2820-2899
  source 1..80: mol_type = other DNA
tacatgcgctttgatgctgaattcacatttgtcgtagccaaacccaatggtgagctagtcccccaattactgcagtacat

SEQ ID NO: 11650 - DNA, 80 bp, synthetic construct
  misc_feature 1..80: note = Synthetic: >HCV.A16-cand-2920-2999
  source 1..80: mol_type = other DNA
cgaaacctacttccagagattcgtttgcttggcagactgccaccaacccatctgtgtttgtgaaaatgacggacccacca

SEQ ID NO: 11651 - DNA, 80 bp, synthetic construct
  misc_feature 1..80: note = Synthetic: >HCV.A16-cand-2980-3059
  source 1..80: mol_type = other DNA
tgaaaatgacggacccaccagctcaagtgtcagtccccttcatgtcaccagctagtgcataccaatggttttatgatggt

SEQ ID NO: 11652 - DNA, 80 bp, synthetic construct
  misc_feature 1..80: note = Synthetic: >HCV.A16-cand-3060-3139
  source 1..80: mol_type = other DNA
tatcccaccttcggtgagcacctccaagcaaatgacctagattatggccaatgcccgaataatatgatgggcacttttag

SEQ ID NO: 11653 - DNA, 80 bp, synthetic construct
  misc_feature 1..80: note = Synthetic: >HCV.A16-cand-3140-3219
  source 1..80: mol_type = other DNA
cattaggacagtagggactgagaagtcaccacactccattaccctgagggtatacatgagaatcaaacacgtcagggcat

SEQ ID NO: 11654 - DNA, 80 bp, synthetic construct
  misc_feature 1..80: note = Synthetic: >HCV.A16-cand-3220-3299
  source 1..80: mol_type = other DNA
ggatcccaagacctctgagaaatcaaccctatttgtttaagaccaacccaaattataaaggaaatgatattaagtgcacc

SEQ ID NO: 11655 - DNA, 80 bp, synthetic construct
  misc_feature 1..80: note = Synthetic: >HCV.A18-cand-5030-5109
  source 1..80: mol_type = other DNA
agacagaggtttagtgttgatgaactaaccactttagtcattaatgaaaaggttaggagggccaatattggcaattgcat

SEQ ID NO: 11656 - DNA, 80 bp, synthetic construct
  misc_feature 1..80: note = Synthetic: >HCV.A18-cand-5110-5189
  source 1..80: mol_type = other DNA
ggaagctttgttccaaggaccaatcagctacaaggatctcaaaatagatataaaaacaagcccacccccagaatgcatca

SEQ ID NO: 11657 - DNA, 80 bp, synthetic construct
  misc_feature 1..80: note = Synthetic: >HCV.A18-cand-5190-5269
  source 1..80: mol_type = other DNA
gtgacctattacaatctgttgattctcaggaagtcagggactattgtgagaagaagggatggatagttaatgtatcaagt

SEQ ID NO: 11658 - DNA, 80 bp, synthetic construct
  misc_feature 1..80: note = Synthetic: >HCV.A18-cand-5270-5349
  source 1..80: mol_type = other DNA
gatgtcaccattgaaaggaatctgaaccgagccatgacaatcttgcaggcgttaacaacctttgcagctgtggctggagt

SEQ ID NO: 11659 - DNA, 80 bp, synthetic construct
  misc_feature 1..80: note = Synthetic: >HCV.A18-cand-5350-5429
  source 1..80: mol_type = other DNA
tgtttatgtcatgtacaggttgtttgctggacaacaaggagcatacaccggcttacctaacaagaggccaaacgtcccaa

SEQ ID NO: 11660 - DNA, 80 bp, synthetic construct
  misc_feature 1..80: note = Synthetic: >HCV.A18-cand-5430-5509
  source 1..80: mol_type = other DNA
ccattagaactgctaaggtacaaggtccagggtttgattatgctgtagctatggctaaaagaaacattctgactgccacc

SEQ ID NO: 11661 - DNA, 80 bp, synthetic construct
  misc_feature 1..80: note = Synthetic: >HCV.A18-cand-5510-5589
  source 1..80: mol_type = other DNA
actagcaaaggagagttcaccatgctaggtgttcatgacaatgtcgccattctaccaacacatgcttcaccaggcgagag

SEQ ID NO: 11662 - DNA, 80 bp, synthetic construct
  misc_feature 1..80: note = Synthetic: >HCV.A18-cand-5590-5669
  source 1..80: mol_type = other DNA
tattgtcatcgatggcaaggaagtggaaattctagatgctaaggcccttgaagaccaggcagggaccaaccttgaaatca

SEQ ID NO: 11663 - DNA, 80 bp, synthetic construct
  misc_feature 1..80: note = Synthetic: >HCV.A18-cand-5670-5749
  source 1..80: mol_type = other DNA
ccatcataactctcaagagaaatgagaaattcagagacattaggcctcacataccaacacaaatcaccgagaccaacgat

SEQ ID NO: 11664 - DNA, 80 bp, synthetic construct
  misc_feature 1..80: note = Synthetic: >HCV.A18-cand-5750-5829
  source 1..80: mol_type = other DNA
ggagttttgattgtgaacactagtaagtaccccaatatgtatgtacccgtcggtgctgtaaccgaacagggctacctgaa

SEQ ID NO: 11665 - DNA, 80 bp, synthetic construct
  misc_feature 1..80: note = Synthetic: >HCV.A18-cand-5830-5909
  source 1..80: mol_type = other DNA
tctcggagggcgccagactgcgcgcactcttatgtacaacttccctacccgagctggtcagtgtggtggcgtcatcacat

SEQ ID NO: 11666 - DNA, 80 bp, synthetic construct
  misc_feature 1..80: note = Synthetic: >HCV.A18-cand-5910-5989
  source 1..80: mol_type = other DNA
gcactggtaaggtgatcgggatgcatgttggagggaacggttcacatgggtttgcagcagccctaaaacggtcatacttc

SEQ ID NO: 11667 - DNA, 80 bp, synthetic construct
  misc_feature 1..80: note = Synthetic: >HCV.A18-cand-5990-6069
  source 1..80: mol_type = other DNA
actcaaagtcaaggtgaaatacagtggatgagaccatctaaagaagtgggataccccattatcaacgccccttctaaaac

SEQ ID NO: 11668 - DNA, 80 bp, synthetic construct
  misc_feature 1..80: note = Synthetic: >HCV.A18-cand-6070-6149
  source 1..80: mol_type = other DNA
caaactagaacccagtgctttccactatgtttttgagggcgtgaaagaaccagctgtgcttactaaaaatgaccctagac

SEQ ID NO: 11669 - DNA, 80 bp, synthetic construct
  misc_feature 1..80: note = Synthetic: >HCV.A18-cand-6110-6189
  source 1..80: mol_type = other DNA
gtgaaagaaccagctgtgcttactaaaaatgaccctagactgaaaacagactttgaagaggccatcttctccaagtatgt

SEQ ID NO: 11670 - DNA, 80 bp, synthetic construct
  misc_feature 1..80: note = Synthetic: >HCV.A18-cand-6230-6309
  source 1..80: mol_type = other DNA
gcagtagatcactatgcaggccaactaatgtcattggacatcaacacagagcagatgtgtcttgaggacgccatgtatgg

SEQ ID NO: 11671 - DNA, 80 bp, synthetic construct
  misc_feature 1..80: note = Synthetic: >HCV.A19-cand-680-759
  source 1..80: mol_type = other DNA
ctaaacactcatttgtttatcaaatcttatagtacacaatgggagctcaggtgtccactcaaaagtctgggtcgcatgaa

SEQ ID NO: 11672 - DNA, 80 bp, synthetic construct
  misc_feature 1..80: note = Synthetic: >HCV.A19-cand-760-839
  source 1..80: mol_type = other DNA
aaccagaacgttgctgctggtggttctactattaactacaccactataaactactacaaagatagtgctagtaattcagc

SEQ ID NO: 11673 - DNA, 80 bp, synthetic construct
  misc_feature 1..80: note = Synthetic: >HCV.A19-cand-840-919
  source 1..80: mol_type = other DNA
agcaaaacaagacttctcccaggatccatctaaattcacagaaccagtaaaagatgttatgattaaaacagcacctgcat

SEQ ID NO: 11674 - DNA, 80 bp, synthetic construct
  misc_feature 1..80: note = Synthetic: >HCV.A19-cand-920-999
  source 1..80: mol_type = other DNA
tgaattcacccaatattgaagcatgtgggtacagtgacagagttctgcaattaacacttggaaattcaaccataactacg

SEQ ID NO: 11675 - DNA, 80 bp, synthetic construct
  misc_feature 1..80: note = Synthetic: >HCV.A19-cand-1000-1079
  source 1..80: mol_type = other DNA
caagaggcagctaatgcagttatagcatatggagaatggcctagctttatcaatgacaaggaagcaaatccagtggatgc

SEQ ID NO: 11676 - DNA, 80 bp, synthetic construct
  misc_feature 1..80: note = Synthetic: >HCV.A19-cand-1050-1129
  source 1..80: mol_type = other DNA
caatgacaaggaagcaaatccagtggatgctccaactgaacctgatgcatccgcaaacagattttacacccttgatagtg

SEQ ID NO: 11677 - DNA, 80 bp, synthetic construct
  misc_feature 1..80: note = Synthetic: >HCV.A19-cand-1200-1279
  source 1..80: mol_type = other DNA
tggacaaaacatgttttaccattacttaggtagagctggatatactgtgcatgtacagtgcaatgcttcaaagtttcacc

SEQ ID NO: 11678 - DNA, 80 bp, synthetic construct
  misc_feature 1..80: note = Synthetic: >HCV.A19-cand-1240-1319
  source 1..80: mol_type = other DNA
tatactgtgcatgtacagtgcaatgcttcaaagtttcaccagggcgcacttatggttgcagcaatcccagaattcatgat

SEQ ID NO: 11679 - DNA, 80 bp, synthetic construct
  misc_feature 1..80: note = Synthetic: >HCV.A19-cand-1320-1399
  source 1..80: mol_type = other DNA
ggcaagcaattcaggaactaatactggtggtgtcacttatgagaatgctaatccaggtgagaagggtggtaggttttcaa

SEQ ID NO: 11680 - DNA, 80 bp, synthetic construct
  misc_feature 1..80: note = Synthetic: >HCV.A19-cand-1390-1469
  source 1..80: mol_type = other DNA
aggttttcaaacaagtttatcccagatgcaactgcaccaggtaaaaacaagtttgcaccgctagattggcttctgggttg

SEQ ID NO: 11681 - DNA, 80 bp, synthetic construct
  misc_feature 1..80: note = Synthetic: >HCV.A19-cand-1480-1559
  source 1..80: mol_type = other DNA
gctggcaacatcacagtgttccctcaccaaatcattaacttgagaaccaacaactgtgccacactcgtattaccatacgt

SEQ ID NO: 11682 - DNA, 80 bp, synthetic construct
  misc_feature 1..80: note = Synthetic: >HCV.A19-cand-1520-1599
  source 1..80: mol_type = other DNA
tgagaaccaacaactgtgccacactcgtattaccatacgtaaattctgtggtaactgattcaatggccaaacacaacaat

SEQ ID NO: 11683 - DNA, 80 bp, synthetic construct
  misc_feature 1..80: note = Synthetic: >HCV.A19-cand-1640-1719
  source 1..80: mol_type = other DNA
ttaatggagcaactaccaaggtacctatcacaatgactatagcaccaatgtgctgtgaatttaatgggctcagatctctc

SEQ ID NO: 11684 - DNA, 80 bp, synthetic construct
  misc_feature 1..80: note = Synthetic: >HCV.A19-cand-1720-1799
  source 1..80: mol_type = other DNA
acagtgcccttcacacaaggattaccagtgatggcaacaccagggtcaaatcagtttttaacatcagataatttccaatc

SEQ ID NO: 11685 - DNA, 80 bp, synthetic construct
  misc_feature 1..80: note = Synthetic: >HCV.A19-cand-1770-1849
  source 1..80: mol_type = other DNA
tcagtttttaacatcagataatttccaatcaccatgtgctctcccggattttgatgtcactcccgagatacacataccag

SEQ ID NO: 11686 - DNA, 80 bp, synthetic construct
  misc_feature 1..80: note = Synthetic: >HCV.A19-cand-1880-1959
  source 1..80: mol_type = other DNA
aaatagacacaattatccctatgaatgcaatcccaaccaaagtaaacaccatggaagcatatccaatacctctagcagca

SEQ ID NO: 11687 - DNA, 80 bp, synthetic construct
  misc_feature 1..80: note = Synthetic: >HCV.B2-cand-6080-6159
  source 1..80: mol_type = other DNA
agccattttctccaaatacattggaaatgtaaatacacatgtggatgagtacatggtggaagccgtcgaccactatgctg

SEQ ID NO: 11688 - DNA, 80 bp, synthetic construct
  misc_feature 1..80: note = Synthetic: >HCV.B2-cand-6160-6239
  source 1..80: mol_type = other DNA
ggcaattggcaaccctagacattagcacagaacccatgaagcttgaggacgctgtctatggtactgaaggtctggaagca

SEQ ID NO: 11689 - DNA, 80 bp, synthetic construct
  misc_feature 1..80: note = Synthetic: >HCV.B2-cand-6240-6319
  source 1..80: mol_type = other DNA
ctggatctaaccactagtgcaggttacccctatgtagctcttggcattaagaagagagacatcctatctaagaagactaa

SEQ ID NO: 11690 - DNA, 80 bp, synthetic construct
  misc_feature 1..80: note = Synthetic: >HCV.B2-cand-6280-6359
  source 1..80: mol_type = other DNA
ttggcattaagaagagagacatcctatctaagaagactaaggacttgacaaagttgaaggagtgcatggacaaatatgga

SEQ ID NO: 11691 - DNA, 80 bp, synthetic construct
  misc_feature 1..80: note = Synthetic: >HCV.B2-cand-6360-6439
  source 1..80: mol_type = other DNA
ttgaacctccccatggtcacctatgtaaaggatgaattgagatcagcagagaaggtagccaaaggcaagtccaggttaat

SEQ ID NO: 11692 - DNA, 80 bp, synthetic construct
  misc_feature 1..80: note = Synthetic: >HCV.B2-cand-6440-6519
  source 1..80: mol_type = other DNA
tgaggcgtcaagcctcaatgactcagtggccatgagacagacttttgggaacctgtacaaaacattccaccttaatccag

SEQ ID NO: 11693 - DNA, 80 bp, synthetic construct
  misc_feature 1..80: note = Synthetic: >HCV.B2-cand-6520-6599
  source 1..80: mol_type = other DNA
gcatagtgacaggcagcgcagtcggttgtgatcctgacctgttttggagcaagatcccagtcatgcttgatggccatctc

SEQ ID NO: 11694 - DNA, 80 bp, synthetic construct
  misc_feature 1..80: note = Synthetic: >HCV.B2-cand-6600-6679
  source 1..80: mol_type = other DNA
attgcctttgattacagtggatatgacgccagcctgagcccagtgtggttcgcttgtttgaaactgttattagagaaact

SEQ ID NO: 11695 - DNA, 80 bp, synthetic construct
  misc_feature 1..80: note = Synthetic: >HCV.B2-cand-6680-6759
  source 1..80: mol_type = other DNA
ggggtacacacacaaagagaccaattatatagattacctatgcaactctcaccacctgtacagggacaaacactattttg

SEQ ID NO: 11696 - DNA, 80 bp, synthetic construct
  misc_feature 1..80: note = Synthetic: >HCV.B2-cand-6770-6849
  source 1..80: mol_type = other DNA
gatgccatcagggtgttctggaaccagtatcttcaactccatgatcaataacataattattagaacactgatgttaaaag

SEQ ID NO: 11697 - DNA, 80 bp, synthetic construct
  misc_feature 1..80: note = Synthetic: >HCV.B2-cand-6860-6939
  source 1..80: mol_type = other DNA
gattgacctagatcagttcaggatgatagcgtatggagacgatgtcattgcatcgtacccgcatcccatcgacgcttcat

SEQ ID NO: 11698 - DNA, 80 bp, synthetic construct
  misc_feature 1..80: note = Synthetic: >HCV.B2-cand-6920-6999
  source 1..80: mol_type = other DNA
gcatcccatcgacgcttcattactggctgaggcaggcaaagggtatggtctaatcatgacaccagctgataagggagagt

SEQ ID NO: 11699 - DNA, 80 bp, synthetic construct
  misc_feature 1..80: note = Synthetic: >HCV.B2-cand-7000-7079
  source 1..80: mol_type = other DNA
gttttaatgaagtgacatggaccaacgtcaccttcctgaaaaggtactttagggcagatgagcagtaccccttcctcgtt

SEQ ID NO: 11700 - DNA, 80 bp, synthetic construct
  misc_feature 1..80: note = Synthetic: >HCV.B2-cand-7190-7269
  source 1..80: mol_type = other DNA
ggagcaggaatatgaagaatttgtatccaagatcaggagtgtcccagtagggcgctgtctgaccttacctgcattctcaa

SEQ ID NO: 11701 - DNA, 80 bp, synthetic construct
  misc_feature 1..80: note = Synthetic: >HCV.B2-cand-7240-7319
  source 1..80: mol_type = other DNA
ggcgctgtctgaccttacctgcattctcaactctgcgcaggaagtggctagattctttttaaattagagcacaatttgat

SEQ ID NO: 11702 - DNA, 80 bp, synthetic construct
  misc_feature 1..80: note = Synthetic: >HCV.B2-cand-7290-7369
  source 1..80: mol_type = other DNA
gattctttttaaattagagcacaatttgatttaatttcaattggcttaaccctaccacatccaccgaactagataacggt

SEQ ID NO: 11703 - DNA, 80 bp, synthetic construct
  misc_feature 1..80: note = Synthetic: >HCV.B4-cand-3270-3349
  source 1..80: mol_type = other DNA
gcaagcttaataaccacaggcccccatggacaacagtcaggagctgtatatgtgggcaactacaaaataataaatagaca

SEQ ID NO: 11704 - DNA, 80 bp, synthetic construct
  misc_feature 1..80: note = Synthetic: >HCV.B4-cand-3340-3419
  source 1..80: mol_type = other DNA
taaatagacacttggcaacacattttgattggcaaaattgcgtgtgggaagactacaacagagacctcctcgtaagcaca

SEQ ID NO: 11705 - DNA, 80 bp, synthetic construct
  misc_feature 1..80: note = Synthetic: >HCV.B4-cand-3420-3499
  source 1..80: mol_type = other DNA
actacagctcacgggtgtgacacaattgctagatgccaatgcacaacaggtgtttacttctgtgcatcaagaaacaagca

SEQ ID NO: 11706 - DNA, 80 bp, synthetic construct
  misc_feature 1..80: note = Synthetic: >HCV.B4-cand-3500-3579
  source 1..80: mol_type = other DNA
ctatccagttagctttgagggcccaggcttagtggaagtgcaagaaagtgaatattaccccaagagataccagtcccatg

SEQ ID NO: 11707 - DNA, 80 bp, synthetic construct
  misc_feature 1..80: note = Synthetic: >HCV.B4-cand-3580-3659
  source 1..80: mol_type = other DNA
tattactcgcagcagggttctcagaaccgggagactgtggtggaatcctcaggtgtgaacatggtgtcattggcttagtg

SEQ ID NO: 11708 - DNA, 80 bp, synthetic construct
  misc_feature 1..80: note = Synthetic: >HCV.B4-cand-3660-3739
  source 1..80: mol_type = other DNA
accatgggaggcgagggtgttgttggctttgctgatgtccgcgacctactgtggttagaggatgatgcaatggagcaggg

SEQ ID NO: 11709 - DNA, 80 bp, synthetic construct
  misc_feature 1..80: note = Synthetic: >HCV.B4-cand-3740-3819
  source 1..80: mol_type = other DNA
agtcaaagactatgtggaacagcttggaaatgccttcgggtctgggttcaccaaccagatctgtgagcaggtcaacctcc

SEQ ID NO: 11710 - DNA, 80 bp, synthetic construct
  misc_feature 1..80: note = Synthetic: >HCV.B4-cand-3820-3899
  source 1..80: mol_type = other DNA
taaaggagtcactggtgggccaagattccatcctagagaagtcactcaaagcacttgtgaagatcatatcagcattagtg

SEQ ID NO: 11711 - DNA, 80 bp, synthetic construct
  misc_feature 1..80: note = Synthetic: >HCV.B4-cand-3900-3979
  source 1..80: mol_type = other DNA
attgtggtgagaaatcatgatgacctgataacagtgactgccactctcgcccttattggatgcacctcgtcaccatggcg

SEQ ID NO: 11712 - DNA, 80 bp, synthetic construct
  misc_feature 1..80: note = Synthetic: >HCV.B4-cand-3980-4059
  source 1..80: mol_type = other DNA
ctggctcaaacagaaagtgtcacaatactatggaatacccatggccgagagccaaaacaatgggtggctcaagaaattca

SEQ ID NO: 11713 - DNA, 80 bp, synthetic construct
  misc_feature 1..80: note = Synthetic: >HCV.B4-cand-4090-4169
  source 1..80: mol_type = other DNA
agtggatcgccatcaaaattcaaaagttcatagagtggctcaaggttaaaattttaccagaggtaaaggagaaacatgaa

SEQ ID NO: 11714 - DNA, 80 bp, synthetic construct
  misc_feature 1..80: note = Synthetic: >HCV.B4-cand-4140-4219
  source 1..80: mol_type = other DNA
attttaccagaggtaaaggagaaacatgaattcctaaacagacttaaacaactccccctgttggaaagtcaaattgccac

SEQ ID NO: 11715 - DNA, 80 bp, synthetic construct
  misc_feature 1..80: note = Synthetic: >HCV.B4-cand-4220-4299
  source 1..80: mol_type = other DNA
cattgaacaaagtgcaccctcacagagtgaccaggaacaactcttctccaatgtccaatactttgcccactattgcagaa

SEQ ID NO: 11716 - DNA, 80 bp, synthetic construct
  misc_feature 1..80: note = Synthetic: >HCV.B4-cand-4530-4609
  source 1..80: mol_type = other DNA
ggctacaaacagcaggctgttgtgatcatggatgatctgtgccaaaacccagatgggaaggatgtgtcattgttttgcca

SEQ ID NO: 11717 - DNA, 80 bp, synthetic construct
  misc_feature 1..80: note = Synthetic: >HCV.B4-cand-4690-4769
  source 1..80: mol_type = other DNA
ttgcttccaccaatgcaggatccatcaatgcccccactgtgtcagacagcagggctctggccagaaggttccactttgac

SEQ ID NO: 11718 - DNA, 80 bp, synthetic construct
  misc_feature 1..80: note = Synthetic: >HCV.B4-cand-4850-4929
  source 1..80: mol_type = other DNA
gtgttgcccagtcaacttcaagaagtgctgcccactggtgtgtggaaaggccatccagttcattgataggagaacacaag

SEQ ID NO: 11719 - DNA, 80 bp, synthetic construct
  misc_feature 1..80: note = Synthetic: >LR861845.1-cand-5800-5879
  source 1..80: mol_type = other DNA
cctaaggtatccgcatatcagtatagggtgtttagagtaactttacccgatcctaataaatttggattacctgattctac

SEQ ID NO: 11720 - DNA, 80 bp, synthetic construct
  misc_feature 1..80: note = Synthetic: >LR861845.1-cand-5880-5959
  source 1..80: mol_type = other DNA
tatatataatcctgaaacacaacgtttggtttgggcatgtgtaggtatggaaattggtcgtgggcagcctttaggtattg

SEQ ID NO: 11721 - DNA, 80 bp, synthetic construct
  misc_feature 1..80: note = Synthetic: >LR861845.1-cand-5960-6039
  source 1..80: mol_type = other DNA
gcctaagtggccatccattttataataaattggatgatacagaaagtgctcatgcagctacagctgttattacgcaggat

SEQ ID NO: 11722 - DNA, 80 bp, synthetic construct
  misc_feature 1..80: note = Synthetic: >LR861845.1-cand-6040-6119
  source 1..80: mol_type = other DNA
gttagggataatgtgtcagttgattataagcaaacacagctgtgtattttaggttgtgtacctgctattggtgagcactg

SEQ ID NO: 11723 - DNA, 80 bp, synthetic construct
  misc_feature 1..80: note = Synthetic: >LR861845.1-cand-6130-6209
  source 1..80: mol_type = other DNA
acactttgtaaacctgcacaattgcaacctggtgactgtcctcctttggaacttaaaaacaccattattgaggatggtga

SEQ ID NO: 11724 - DNA, 80 bp, synthetic construct
  misc_feature 1..80: note = Synthetic: >LR861845.1-cand-6230-6309
  source 1..80: mol_type = other DNA
gggcaatggattttagtacattgcaggatacaaagtgcgaggttccattagacatttgtcaatccatctgtaaatatcca

SEQ ID NO: 11725 - DNA, 80 bp, synthetic construct
  misc_feature 1..80: note = Synthetic: >LR861845.1-cand-6260-6339
  source 1..80: mol_type = other DNA
caaagtgcgaggttccattagacatttgtcaatccatctgtaaatatccagattatttgcaaatgtctgctgatccctat

SEQ ID NO: 11726 - DNA, 80 bp, synthetic construct
  misc_feature 1..80: note = Synthetic: >LR861845.1-cand-6370-6449
  source 1..80: mol_type = other DNA
gaacaactgtttgcaagacatttttggaatagggcaggtgttatgggtgacacagtacctacggacctatatattaaagg

SEQ ID NO: 11727 - DNA, 80 bp, synthetic construct
  misc_feature 1..80: note = Synthetic: >LR861845.1-cand-6460-6539
  source 1..80: mol_type = other DNA
aatatgcgtgaaacccctggcagttgtgtgtattccccttctcccagtggctctattattacttctgattctcaattatt

SEQ ID NO: 11728 - DNA, 80 bp, synthetic construct
  misc_feature 1..80: note = Synthetic: >LR861845.1-cand-6540-6619
  source 1..80: mol_type = other DNA
taataagccatattggttacataaggcccagggccataacaatggtatttgttggcataatcagttgtttgttactgtag

SEQ ID NO: 11729 - DNA, 80 bp, synthetic construct
  misc_feature 1..80: note = Synthetic: >LR861845.1-cand-6620-6699
  source 1..80: mol_type = other DNA
tggacactacccgcagtactaatttaacattatgtgcctctacacaaaattctgtgccaagtacatatgaccctactaag

SEQ ID NO: 11730 - DNA, 80 bp, synthetic construct
  misc_feature 1..80: note = Synthetic: >LR861845.1-cand-6700-6779
  source 1..80: mol_type = other DNA
tttaagcagtatagtagacatgtggaggaatatgatttacagtttatttttcagttgtgcactattactttaactgcaga

SEQ ID NO: 11731 - DNA, 80 bp, synthetic construct
  misc_feature 1..80: note = Synthetic: >LR861845.1-cand-6780-6859
  source 1..80: mol_type = other DNA
ggttatgtcatatatccatagtatgaatagtagtatattagaaaattggaattttggtgtccctccaccacctactacaa

SEQ ID NO: 11732 - DNA, 80 bp, synthetic construct
  misc_feature 1..80: note = Synthetic: >LR861845.1-cand-6860-6939
  source 1..80: mol_type = other DNA
gtttggtggatacatatcgttttgtgcaatcagttgctgttacctgtcaaaaggatactacacctccagaaaagcaggat

SEQ ID NO: 11733 - DNA, 80 bp, synthetic construct
  misc_feature 1..80: note = Synthetic: >LR861845.1-cand-6940-7019
  source 1..80: mol_type = other DNA
ccatatgataaattaaagttttggactgttgacctaaaggaaaaattttcctccgatttggatcaatatccccttggtcg

SEQ ID NO: 11734 - DNA, 80 bp, synthetic construct
  misc_feature 1..80: note = Synthetic: >LR861845.1-cand-7020-7099
  source 1..80: mol_type = other DNA
aaagtttttagttcaggctgggttacgtcgtaggcctaccataggacctcgtaagcgtcctgctgcttccacgtctactg

SEQ ID NO: 11735 - DNA, 80 bp, synthetic construct
  misc_feature 1..80: note = Synthetic: >LR862007.1-cand-7170-7249
  source 1..80: mol_type = other DNA
tgcatgttgtatgttttgtattgtttgcctgtttgtatgttgtgtatatgtacatgtttgtttgtctgctgtatgtgtgt

SEQ ID NO: 11736 - DNA, 80 bp, synthetic construct
  misc_feature 1..80: note = Synthetic: >LR862007.1-cand-7260-7339
  source 1..80: mol_type = other DNA
gtacataataaagtatgcatgacagtttcatgtgtggttgcacccaatgagtaaggtactgtccctttattgtttctttg

SEQ ID NO: 11737 - DNA, 80 bp, synthetic construct
  misc_feature 1..80: note = Synthetic: >LR862007.1-cand-7340-7419
  source 1..80: mol_type = other DNA
tccttattacacattattacacattgccctacttacataggtgtgtttgttccttcattttgtcctgaatgtccagtttt

SEQ ID NO: 11738 - DNA, 80 bp, synthetic construct
  misc_feature 1..80: note = Synthetic: >LR862007.1-cand-7420-7499
  source 1..80: mol_type = other DNA
gcatttgcacattatatggcgtccattttatcctttaaatcctccattttgctgtgcaaccgttttcggttaccttggtt

SEQ ID NO: 11739 - DNA, 80 bp, synthetic construct
  misc_feature 1..80: note = Synthetic: >LR862007.1-cand-7500-7579
  source 1..80: mol_type = other DNA
taaccttacctttttgaacaattaatctgtttaaacatcagcaaaacagttaatccccatcttgtttcctcctacacgcc

SEQ ID NO: 11740 - DNA, 80 bp, synthetic construct
  misc_feature 1..80: note = Synthetic: >LR862007.1-cand-7580-7659
  source 1..80: mol_type = other DNA
tagactactaacacaacttacaaacgccaaatagttagtcatcatcctgtccaggtgcactctaacaataccttgcataa

SEQ ID NO: 11741 - DNA, 80 bp, synthetic construct
  misc_feature 1..80: note = Synthetic: >LR862007.1-cand-7660-7739
  source 1..80: mol_type = other DNA
ctttggtggcgcccttgttaataaaacagcttttaggcacatattttcactgtttttactactttaattgcataattggc

SEQ ID NO: 11742 - DNA, 80 bp, synthetic construct
  misc_feature 1..80: note = Synthetic: >LR862007.1-cand-7740-7819
  source 1..80: mol_type = other DNA
ttgcaaaactactgtgcaatccaagaatgtgtctataatttattgtaaaaaacatgactaaggtttttgtcattgttaag

SEQ ID NO: 11743 - DNA, 80 bp, synthetic construct
  misc_feature 1..80: note = Synthetic: >LR862007.1-cand-7820-7899
  source 1..80: mol_type = other DNA
caaccgaaaaaggtcgggcaagtacatgcacactttctacttattactttttacaatcatagtaataaaaaagggtgtaa

SEQ ID NO: 11744 - DNA, 80 bp, synthetic construct
  misc_feature 1..80: note = Synthetic: >MG717391.1-cand-90-169
  source 1..80: mol_type = other DNA
tcgtaactgccaggcagaagcttaaggatgcagaaaaggcagtgggagtggacccagatgacgttaacaaaagcacatta

SEQ ID NO: 11745 - DNA, 80 bp, synthetic construct
  misc_feature 1..80: note = Synthetic: >MG717391.1-cand-180-259
  source 1..80: mol_type = other DNA
gggcggctgtgtctgcattggaaaccaaactcggagaactcaaacgacagctggcagaccttattgcagctcagaaattg

SEQ ID NO: 11746 - DNA, 80 bp, synthetic construct
  misc_feature 1..80: note = Synthetic: >MG717391.1-cand-260-339
  source 1..80: mol_type = other DNA
gcttcaaaacctattgatccaacagggattgaacctgatgaccatttaaaggagaaatcatcactgagatacgggaatgt

SEQ ID NO: 11747 - DNA, 80 bp, synthetic construct
  misc_feature 1..80: note = Synthetic: >MG717391.1-cand-320-399
  source 1..80: mol_type = other DNA
tcactgagatacgggaatgttcttgatgtgaattcaattgatttggaagaaccaagtggccaaacagcagattggaaagc

SEQ ID NO: 11748 - DNA, 80 bp, synthetic construct
  misc_feature 1..80: note = Synthetic: >MG717391.1-cand-390-469
  source 1..80: mol_type = other DNA
attggaaagctattggaatgtatatcctgagctttgcaataccaatcatcttaaaggccctctatatgttatcaaccagg

SEQ ID NO: 11749 - DNA, 80 bp, synthetic construct
  misc_feature 1..80: note = Synthetic: >MG717391.1-cand-480-559
  source 1..80: mol_type = other DNA
cagttaaggaaaataaagggacaagaatcaggttcaaggatgactcatcttatgaagaagtcaatggaatccgaaagcca

SEQ ID NO: 11750 - DNA, 80 bp, synthetic construct
  misc_feature 1..80: note = Synthetic: >MG717391.1-cand-560-639
  source 1..80: mol_type = other DNA
agacatttatatgtatcaatgcctacagcccagtccacaatgaaggcagatgagatcactccagggcgtttccgcacgat

SEQ ID NO: 11751 - DNA, 80 bp, synthetic construct
  misc_feature 1..80: note = Synthetic: >NC_001611.1-cand-19700-19779
  source 1..80: mol_type = other DNA
ttatctacgaaactttgataagttagatcagtgtacgtatatttagatgtttttggcttagctaatcctgatattaattc

SEQ ID NO: 11752 - DNA, 80 bp, synthetic construct
  misc_feature 1..80: note = Synthetic: >NC_001611.1-cand-19780-19859
  source 1..80: mol_type = other DNA
tgtaaatgctggacccagatctatttttctcaaatccatagtcttcaataattctactttagtattacctgatgcaggca

SEQ ID NO: 11753 - DNA, 80 bp, synthetic construct
  misc_feature 1..80: note = Synthetic: >NC_001611.1-cand-19850-19929
  source 1..80: mol_type = other DNA
gatgcaggcaatagtgacataaacatagaaaacgaatagccaaacggcgagaagacaatattatcatcctcattcccatc

SEQ ID NO: 11754 - DNA, 80 bp, synthetic construct
  misc_feature 1..80: note = Synthetic: >NC_001611.1-cand-19930-20009
  source 1..80: mol_type = other DNA
ttgaatatttttatacgctactataccggcattggtaaatccttgcaggcgataggtgaacgctgtacacgctaacgata

SEQ ID NO: 11755 - DNA, 80 bp, synthetic construct
  misc_feature 1..80: note = Synthetic: >NC_001611.1-cand-20010-20089
  source 1..80: mol_type = other DNA
gtatcaataacacaatcatgattttatggtattaatattttaccttattttttatatttggtataaaaattattgatgtc

SEQ ID NO: 11756 - DNA, 80 bp, synthetic construct
  misc_feature 1..80: note = Synthetic: >NC_001611.1-cand-20090-20169
  source 1..80: mol_type = other DNA
tacacatccttttgtaattgacatctatatatccttttgtataatcaattctaatcactttaacttttacagttttccct

SEQ ID NO: 11757 - DNA, 80 bp, synthetic construct
  misc_feature 1..80: note = Synthetic: >NC_001611.1-cand-20170-20249
  source 1..80: mol_type = other DNA
accagtttatccctatatttaaaatatctattcatatgcatctgagtactctctaccaagatagcttcagagtgaggata

SEQ ID NO: 11758 - DNA, 80 bp, synthetic construct
  misc_feature 1..80: note = Synthetic: >NC_001611.1-cand-20250-20329
  source 1..80: mol_type = other DNA
gtcaaaaagatcaacatatagaacataaccattctcgtatactttgccctttaatacatcacccacattgggcaacgaat

SEQ ID NO: 11759 - DNA, 80 bp, synthetic construct
  misc_feature 1..80: note = Synthetic: >NC_001611.1-cand-20330-20409
  source 1..80: mol_type = other DNA
aacaaaatacaagcatcttgttaacgggctcgtaaattgggataaaaattatgtttttattattttatattcatttaata

SEQ ID NO: 11760 - DNA, 80 bp, synthetic construct
  misc_feature 1..80: note = Synthetic: >NC_001611.1-cand-20410-20489
  source 1..80: mol_type = other DNA
ttcattcaatatttacaatatatgtaatcattatccagattgaacatacagtttgcacttgccatgattcgttatataac

SEQ ID NO: 11761 - DNA, 80 bp, synthetic construct
  misc_feature 1..80: note = Synthetic: >NC_001611.1-cand-20490-20569
  source 1..80: mol_type = other DNA
tattaatattaacagttcgtttaacgatcatattatttttatgttttattaataattgtaaaacatacaattaaatcaat

SEQ ID NO: 11762 - DNA, 80 bp, synthetic construct
  misc_feature 1..80: note = Synthetic: >NC_001611.1-cand-20570-20649
  source 1..80: mol_type = other DNA
atagaggaagggacggatactgtcttttgtgagatatagttatggcgactaaatcagattatgaggatgctgttttttac

SEQ ID NO: 11763 - DNA, 80 bp, synthetic construct
  misc_feature 1..80: note = Synthetic: >NC_001611.1-cand-20730-20809
  source 1..80: mol_type = other DNA
tatagtgtttaacaaagatattaccagttgtggaagactctacaaggaattgatgaagttcgatgatgctgctatacgat

SEQ ID NO: 11764 - DNA, 80 bp, synthetic construct
  misc_feature 1..80: note = Synthetic: >NC_001611.1-cand-20860-20939
  source 1..80: mol_type = other DNA
gaccactacatcaatcttacagaagttcatgatcaggaaagtctattcgctaccataggaatatgtgctaaaatcactga

SEQ ID NO: 11765 - DNA, 80 bp, synthetic construct
  misc_feature 1..80: note = Synthetic: >NC_001611.1-cand-21050-21129
  source 1..80: mol_type = other DNA
aattgaattgatgatatagggttctttataatgcattcgtattctatatccggtgttaaaaaaattatcctatcatgtat

SEQ ID NO: 11766 - DNA, 80 bp, synthetic construct
  misc_feature 1..80: note = Synthetic: >NC_001611.1-cand-21120-21199
  source 1..80: mol_type = other DNA
tatcatgtatttgagagtcttatatgtagcaaacatgatagctgtgataccaataagttttagatattcacgcgtgctaa

SEQ ID NO: 11767 - DNA, 80 bp, synthetic construct
  misc_feature 1..80: note = Synthetic: >NC_001611.1-cand-29840-29919
  source 1..80: mol_type = other DNA
tatggtttccataattgagtaaataaatgctctgcaataactaatggcaaatgtataaaacaacaaaattatactagagt

SEQ ID NO: 11768 - DNA, 80 bp, synthetic construct
  misc_feature 1..80: note = Synthetic: >NC_001611.1-cand-29920-29999
  source 1..80: mol_type = other DNA
tgttaaagttaatattttctattagttgttccaataaattatttgttgtgactgtgttcaagtcataaatcattttgata

SEQ ID NO: 11769 - DNA, 80 bp, synthetic construct
  misc_feature 1..80: note = Synthetic: >NC_001611.1-cand-30000-30079
  source 1..80: mol_type = other DNA
ctatccaataaacagtctttaagttctggaatattatcatcccattgtaaagcccctaattcgactatcgaataccctgc

SEQ ID NO: 11770 - DNA, 80 bp, synthetic construct
  misc_feature 1..80: note = Synthetic: >NC_001611.1-cand-30160-30239
  source 1..80: mol_type = other DNA
gaatatggtcgttagtaggtacggtgactttacacaacgcgatatataactttccttttgtgccatttttaacgtagttg

SEQ ID NO: 11771 - DNA, 80 bp, synthetic construct
  misc_feature 1..80: note = Synthetic: >NC_001611.1-cand-30400-30479
  source 1..80: mol_type = other DNA
cagtattcttggatactctattgatgacactagttaagaacatgtcttcaattctagaaaacgaaaacatcctacacgga

SEQ ID NO: 11772 - DNA, 80 bp, synthetic construct
  misc_feature 1..80: note = Synthetic: >NC_001611.1-cand-30480-30559
  source 1..80: mol_type = other DNA
ctcattaaaacttctagcgctcctgattgtgtctcaaatgcctcatacaatgatttcaaggatgtcatagattctttaac

SEQ ID NO: 11773 - DNA, 80 bp, synthetic construct
  misc_feature 1..80: note = Synthetic: >NC_001611.1-cand-30560-30639
  source 1..80: mol_type = other DNA
ccacgatttaatattgcgtttagcatctattttttttattaaatcgaatggtcggctctctggtttgctaccccaatgat

SEQ ID NO: 11774 - DNA, 80 bp, synthetic construct
  misc_feature 1..80: note = Synthetic: >NC_001611.1-cand-30680-30759
  source 1..80: mol_type = other DNA
cgcatccatccaaataactcttgcaccatcagatgatatcagtatattattatagattttccatccacaattattgggcc

SEQ ID NO: 11775 - DNA, 80 bp, synthetic construct
  misc_feature 1..80: note = Synthetic: >NC_001611.1-cand-30840-30919
  source 1..80: mol_type = other DNA
tctttaatccaatctaagaaatttaaaattagatcttttacactgttaaagttaacaaaggtattacccgggtacgtgga

SEQ ID NO: 11776 - DNA, 80 bp, synthetic construct
  misc_feature 1..80: note = Synthetic: >NC_001611.1-cand-30920-30999
  source 1..80: mol_type = other DNA
tatcatatatggcattggtccattatcagtaatagctccataaactgatacggtgatggtttttatatgtgtttgatcta

SEQ ID NO: 11777 - DNA, 80 bp, synthetic construct
  misc_feature 1..80: note = Synthetic: >NC_001611.1-cand-31000-31079
  source 1..80: mol_type = other DNA
acgaggaagaaatttgcgcccataattcatctctagatatgtatttaatatcaaacggtaacacatcaatttcgggacgc

SEQ ID NO: 11778 - DNA, 80 bp, synthetic construct
  misc_feature 1..80: note = Synthetic: >NC_001611.1-cand-31150-31229
  source 1..80: mol_type = other DNA
tagtacacttagagaacttacgatacatctgtttcctataatcgttaaattttacaaatctataacatgctaaacctttt

SEQ ID NO: 11779 - DNA, 80 bp, synthetic construct
  misc_feature 1..80: note = Synthetic: >NC_001611.1-cand-31230-31309
  source 1..80: mol_type = other DNA
gacgacaaccattcattaatttctgatatggaatctgtattctcgatacagtatcgttttaaagccagtgctatatctcc

SEQ ID NO: 11780 - DNA, 80 bp, synthetic construct
  misc_feature 1..80: note = Synthetic: >NC_001611.1-cand-31310-31389
  source 1..80: mol_type = other DNA
ctgttcgtgagaacgctttcgtataatatcaatcaacggataatctgaggtttttggagaataatatgactcatgatcta

SEQ ID NO: 11781 - DNA, 80 bp, synthetic construct
  misc_feature 1..80: note = Synthetic: >NC_001611.1-cand-31390-31469
  source 1..80: mol_type = other DNA
tttcgtccataaacaatctagacataggaattggaggcgatgatcttaattttgtgcaatgagtagttaatcctataact

SEQ ID NO: 11782 - DNA, 80 bp, synthetic construct
  misc_feature 1..80: note = Synthetic: >NC_001611.1-cand-31470-31549
  source 1..80: mol_type = other DNA
tctaatcttgtaatattcatcatcgacataatactatctatgttatcatcgtatattagtataccatgaccttcttcatt

SEQ ID NO: 11783 - DNA, 80 bp, synthetic construct
  misc_feature 1..80: note = Synthetic: >NC_001803.1-cand-2340-2419
  source 1..80: mol_type = other DNA
atcatggaaaagtttgctcctgaattccatggagaagatgcaaacaacagagctaccaaattcctagaatcaataaaggg

SEQ ID NO: 11784 - DNA, 80 bp, synthetic construct
  misc_feature 1..80: note = Synthetic: >NC_001803.1-cand-2420-2499
  source 1..80: mol_type = other DNA
caaattcacatcacctaaagatcccaagaaaaaagatagtatcatatctgtcaactcaatagatatagaagtaaccaaag

SEQ ID NO: 11785 - DNA, 80 bp, synthetic construct
  misc_feature 1..80: note = Synthetic: >NC_001803.1-cand-2500-2579
  source 1..80: mol_type = other DNA
aaagccctataacatcaaattcaaccattataaacccaacaaatgagacagatgatactgtagggaacaagcccaattat

SEQ ID NO: 11786 - DNA, 80 bp, synthetic construct
  misc_feature 1..80: note = Synthetic: >NC_001803.1-cand-2580-2659
  source 1..80: mol_type = other DNA
caaagaaaacctctagtaagtttcaaagaagaccctacgccaagtgataatcccttttcaaaactatacaaagaaaccat

SEQ ID NO: 11787 - DNA, 80 bp, synthetic construct
  misc_feature 1..80: note = Synthetic: >NC_001803.1-cand-2660-2739
  source 1..80: mol_type = other DNA
agaaacatttgataacaatgaagaagaatctagctattcatatgaagaaataaatgatcagacaaacgataatataacag

SEQ ID NO: 11788 - DNA, 80 bp, synthetic construct
  misc_feature 1..80: note = Synthetic: >NC_001803.1-cand-2740-2819
  source 1..80: mol_type = other DNA
caagattagataggattgatgaaaaattaagtgaaatactaggaatgcttcacacattagtagtagcgagtgcaggacct

SEQ ID NO: 11789 - DNA, 80 bp, synthetic construct
  misc_feature 1..80: note = Synthetic: >NC_001803.1-cand-2820-2899
  source 1..80: mol_type = other DNA
acatctgctcgggatggtataagagatgccatggttggtttaagagaagacatgatagaaaaaatcagaactgaagcatt

SEQ ID NO: 11790 - DNA, 80 bp, synthetic construct
  misc_feature 1..80: note = Synthetic: >NC_001803.1-cand-2900-2979
  source 1..80: mol_type = other DNA
aatgaccaatgacagactagaagctatggcaagactcaggaatgaggaaagtgaaaagatggcaaaagacacatcagatg

SEQ ID NO: 11791 - DNA, 80 bp, synthetic construct
  misc_feature 1..80: note = Synthetic: >NC_001803.1-cand-2980-3059
  source 1..80: mol_type = other DNA
aagtgtctctcaatccaacatcagagaaattgaacaacctgttggaagggaatgatagtgacaatgatctatcacttgat

SEQ ID NO: 11792 - DNA, 80 bp, synthetic construct
  misc_feature 1..80: note = Synthetic: >NC_001803.1-cand-3060-3139
  source 1..80: mol_type = other DNA
gatttctgatcagttaccaatctgtacatcaacacacaacaccaacagaagaccaacaaacaaaccaactcacccatcca

SEQ ID NO: 11793 - DNA, 80 bp, synthetic construct
  misc_feature 1..80: note = Synthetic: >NC_001803.1-cand-3140-3219
  source 1..80: mol_type = other DNA
accaaacatctatacgccaatcagccaatccaaaactagccacccggaaaaaatagatactatagttacaaaaaaagatg

SEQ ID NO: 11794 - DNA, 80 bp, synthetic construct
  misc_feature 1..80: note = Synthetic: >NC_001803.1-cand-3230-3309
  source 1..80: mol_type = other DNA
ggaaacatacgtgaacaaacttcacgaaggctccacatacacagctgctgttcaatacaatgtcttagaaaaagacgatg

SEQ ID NO: 11795 - DNA, 80 bp, synthetic construct
  misc_feature 1..80: note = Synthetic: >NC_001803.1-cand-3310-3389
  source 1..80: mol_type = other DNA
accctgcatcacttacaatatgggtgcccatgttccaatcatccatgccagcagatttacttataaaagaactagctaat

SEQ ID NO: 11796 - DNA, 80 bp, synthetic construct
  misc_feature 1..80: note = Synthetic: >NC_001803.1-cand-3390-3469
  source 1..80: mol_type = other DNA
gtcaacatactagtgaaacaaatatccacacccaatggaccttcattaagagtcatgataaactcaagaagtgcagtgct

SEQ ID NO: 11797 - DNA, 80 bp, synthetic construct
  misc_feature 1..80: note = Synthetic: >NC_001803.1-cand-3470-3549
  source 1..80: mol_type = other DNA
agcacaaatgcccagcaaatttaccatatgtgccaatgtgtccttggatgaaagaagcaagctggcatatgatgtaacca

SEQ ID NO: 11798 - DNA, 80 bp, synthetic construct
  misc_feature 1..80: note = Synthetic: >NC_001803.1-cand-3550-3629
  source 1..80: mol_type = other DNA
caccctgtgaaatcaaggcatgtagtctaacatgcctaaaatcaaaaaatatgttaactacagttaaagatctcactatg

SEQ ID NO: 11799 - DNA, 80 bp, synthetic construct
  misc_feature 1..80: note = Synthetic: >NC_002645.1-cand-13630-13709
  source 1..80: mol_type = other DNA
gcctgccttggtggataaacgcactgtttgtttttctgtcgctgctttgagtacaggattaacatcccaaacagtaaaac

SEQ ID NO: 11800 - DNA, 80 bp, synthetic construct
  misc_feature 1..80: note = Synthetic: >NC_002645.1-cand-13670-13749
  source 1..80: mol_type = other DNA
gctgctttgagtacaggattaacatcccaaacagtaaaacctggccattttaataaggagttttatgacttcttacgttc

SEQ ID NO: 11801 - DNA, 80 bp, synthetic construct
  misc_feature 1..80: note = Synthetic: >NC_002645.1-cand-13810-13889
  source 1..80: mol_type = other DNA
gggtgatgctgcaattaaagattttgattattatcgttacaacagacctactatgctggatattggacaagctcgcgtag

SEQ ID NO: 11802 - DNA, 80 bp, synthetic construct
  misc_feature 1..80: note = Synthetic: >NC_002645.1-cand-13890-13969
  source 1..80: mol_type = other DNA
catatcaagtggcagctcgctattttgactgttacgagggtggctgtattacatctagagaggttgttgttacaaacctt

SEQ ID NO: 11803 - DNA, 80 bp, synthetic construct
  misc_feature 1..80: note = Synthetic: >NC_002645.1-cand-13970-14049
  source 1..80: mol_type = other DNA
aataaaagcgctggttggccccttaataagtttggtaaagctggtttatattatgagtctattagttatgaggaacaaga

SEQ ID NO: 11804 - DNA, 80 bp, synthetic construct
  misc_feature 1..80: note = Synthetic: >NC_002645.1-cand-14050-14129
  source 1..80: mol_type = other DNA
tgctattttttcattaacaaagcgtaatattctccctactatgactcagttaaatcttaaatacgccatatctggtaagg

SEQ ID NO: 11805 - DNA, 80 bp, synthetic construct
  misc_feature 1..80: note = Synthetic: >NC_002645.1-cand-14130-14209
  source 1..80: mol_type = other DNA
aacgcgcacgtacagtgggtggcgtctctttattagctactatgactacaagacagtttcatcagaaatgtctgaaatcc

SEQ ID NO: 11806 - DNA, 80 bp, synthetic construct
  misc_feature 1..80: note = Synthetic: >NC_002645.1-cand-14210-14289
  source 1..80: mol_type = other DNA
atagtagctaccagaaatgccaccgttgttatcggcactaccaagttttatggcgggtgggataatatgttaaagaacct

SEQ ID NO: 11807 - DNA, 80 bp, synthetic construct
  misc_feature 1..80: note = Synthetic: >NC_002645.1-cand-14290-14369
  source 1..80: mol_type = other DNA
gatggccgatgttgatgatcctaaattgatgggatgggactatcctaagtgtgatagagctatgccctcaatgattcgta

SEQ ID NO: 11808 - DNA, 80 bp, synthetic construct
  misc_feature 1..80: note = Synthetic: >NC_002645.1-cand-14370-14449
  source 1..80: mol_type = other DNA
tgttgtcggctatgatcttaggttctaagcatgtcacatgttgtacggctagtgataaattttatagacttagtaatgag

SEQ ID NO: 11809 - DNA, 80 bp, synthetic construct
  misc_feature 1..80: note = Synthetic: >NC_002645.1-cand-14450-14529
  source 1..80: mol_type = other DNA
cttgctcaagttttgaccgaggttgtttattcaaatggtgggttttattttaaacctggtggtacaacttctggtgatgc

SEQ ID NO: 11810 - DNA, 80 bp, synthetic construct
  misc_feature 1..80: note = Synthetic: >NC_002645.1-cand-14530-14609
  source 1..80: mol_type = other DNA
aactacagcctacgccaattctgtctttaatatatttcaggctgtaagttctaacattaattgcgttttgagcgttaact

SEQ ID NO: 11811 - DNA, 80 bp, synthetic construct
  misc_feature 1..80: note = Synthetic: >NC_002645.1-cand-14610-14689
  source 1..80: mol_type = other DNA
cgtcaaattgcaataattttaatgttaagaagttacagagacaactttatgataattgctatagaaatagtaatgttgat

SEQ ID NO: 11812 - DNA, 80 bp, synthetic construct
  misc_feature 1..80: note = Synthetic: >NC_002645.1-cand-14690-14769
  source 1..80: mol_type = other DNA
gaatcttttgtggatgacttttatggttatttgcaaaagcatttttctatgatgattctttctgatgatagtgttgtgtg

SEQ ID NO: 11813 - DNA, 80 bp, synthetic construct
  misc_feature 1..80: note = Synthetic: >NC_002645.1-cand-14770-14849
  source 1..80: mol_type = other DNA
ctataataaaacttatgctggacttggttacattgctgatattagtgcttttaaagccactttgtattatcagaatggtg

SEQ ID NO: 11814 - DNA, 80 bp, synthetic construct
  misc_feature 1..80: note = Synthetic: >NC_002645.1-cand-14850-14929
  source 1..80: mol_type = other DNA
tgtttatgagtacagctaagtgttggactgaggaagatctttctataggacctcatgaattttgctcacagcacactatg

SEQ ID NO: 11815 - DNA, 80 bp, synthetic construct
  misc_feature 1..80: note = Synthetic: >NC_002645.1-cand-17480-17559
  source 1..80: mol_type = other DNA
gcaccacctggagaacaattcactcacattgtacctctgttacgcaagggacaaccttggagtgtgttgagaaaacgtat

SEQ ID NO: 11816 - DNA, 80 bp, synthetic construct
  misc_feature 1..80: note = Synthetic: >NC_002645.1-cand-17560-17639
  source 1..80: mol_type = other DNA
tgttcaaatgatagcagattttcttgctggctcatctgatgtactggtgtttgtactttgggctggcggtttagagttga

SEQ ID NO: 11817 - DNA, 80 bp, synthetic construct
  misc_feature 1..80: note = Synthetic: >NC_002645.1-cand-17640-17719
  source 1..80: mol_type = other DNA
ccactatgcgttattttgttaagattggagctgttaaacattgccaatgtggtactgttgcaacatgctacaattctgtt

SEQ ID NO: 11818 - DNA, 80 bp, synthetic construct
  misc_feature 1..80: note = Synthetic: >NC_002645.1-cand-17720-17799
  source 1..80: mol_type = other DNA
agtaatgactattgttgctttaaacatgcattgggctgtgactatgtttataatccatatgtcatagatattcaacaatg

SEQ ID NO: 11819 - DNA, 80 bp, synthetic construct
  misc_feature 1..80: note = Synthetic: >NC_002645.1-cand-17800-17879
  source 1..80: mol_type = other DNA
gggttatgttggttcactctccactaatcaccatgcaatttgtaatgttcatagaaatgagcatgttgcttctggtgatg

SEQ ID NO: 11820 - DNA, 80 bp, synthetic construct
  misc_feature 1..80: note = Synthetic: >NC_002645.1-cand-17880-17959
  source 1..80: mol_type = other DNA
ctattatgactagatgtttggctgtgtatgactgctttgttaagaatgtggattggtcaattacctaccctatgatagct

SEQ ID NO: 11821 - DNA, 80 bp, synthetic construct
  misc_feature 1..80: note = Synthetic: >NC_002645.1-cand-17960-18039
  source 1..80: mol_type = other DNA
aatgaaaatgccataaacaagggcggtcgcactgtgcagagtcatattatgcgtgctgctattaaattgtacaaccctaa

SEQ ID NO: 11822 - DNA, 80 bp, synthetic construct
  misc_feature 1..80: note = Synthetic: >NC_002645.1-cand-18040-18119
  source 1..80: mol_type = other DNA
agcaatccatgacattggtaatcctaagggtattcgttgtgctgtaactgatgccaagtggtattgttatgacaagaacc

SEQ ID NO: 11823 - DNA, 80 bp, synthetic construct
  misc_feature 1..80: note = Synthetic: >NC_002645.1-cand-18130-18209
  source 1..80: mol_type = other DNA
taatgtgaaaacattggagtatgattacatgacacatggccaaatggatggcttgtgtttgttttggaattgtaatgtgg

SEQ ID NO: 11824 - DNA, 80 bp, synthetic construct
  misc_feature 1..80: note = Synthetic: >NC_002645.1-cand-18210-18289
  source 1..80: mol_type = other DNA
atatgtaccctgaattctcaattgtttgcaggtttgacacacgtacacgatctacattgaaccttgaaggtgtaaatggt

SEQ ID NO: 11825 - DNA, 80 bp, synthetic construct
  misc_feature 1..80: note = Synthetic: >NC_002645.1-cand-18290-18369
  source 1..80: mol_type = other DNA
gggtcattgtatgtcaataatcatgcatttcacactcctgcttatgataaacgtgctatggctaaattgaaaccagcacc

SEQ ID NO: 11826 - DNA, 80 bp, synthetic construct
  misc_feature 1..80: note = Synthetic: >NC_002645.1-cand-18370-18449
  source 1..80: mol_type = other DNA
gtttttctactatgacgacggttcatgtgaggttgttcacgatcaagttaactatgttcctttgagagccactaattgca

SEQ ID NO: 11827 - DNA, 80 bp, synthetic construct
  misc_feature 1..80: note = Synthetic: >NC_002645.1-cand-18450-18529
  source 1..80: mol_type = other DNA
ttaccaagtgtaatattggtggtgctgtatgttctaagcacgctaatctctatagagcatatgttgagtcatataacatt

SEQ ID NO: 11828 - DNA, 80 bp, synthetic construct
  misc_feature 1..80: note = Synthetic: >NC_002645.1-cand-18530-18609
  source 1..80: mol_type = other DNA
tttactcaagctggttttaatatttgggttcctaccacgtttgattgttataatttgtggcagacattcacagaggtcaa

SEQ ID NO: 11829 - DNA, 80 bp, synthetic construct
  misc_feature 1..80: note = Synthetic: >NC_002645.1-cand-18610-18689
  source 1..80: mol_type = other DNA
tttacaaggtttagagaacattgcttttaacgttgttaataaaggttcatttgttggtgctgatggtgaattaccagtag

SEQ ID NO: 11830 - DNA, 80 bp, synthetic construct
  misc_feature 1..80: note = Synthetic: >NC_002645.1-cand-18690-18769
  source 1..80: mol_type = other DNA
ccattagtggtgataaagtgttcgtacgtgatggtaacactgataatttagtctttgttaacaaaacatcactgcctaca

SEQ ID NO: 11831 - DNA, 80 bp, synthetic construct
  misc_feature 1..80: note = Synthetic: >NC_002645.1-cand-20050-20129
  source 1..80: mol_type = other DNA
gtacgatggtaggacaaaggcaattgatggtgaaaatgtttcgaaagaaggatttttcacttacatcaatggtttcattt

SEQ ID NO: 11832 - DNA, 80 bp, synthetic construct
  misc_feature 1..80: note = Synthetic: >NC_002645.1-cand-20130-20209
  source 1..80: mol_type = other DNA
gtgaaaaacttgccatcggaggttcgattgctattaaagtaacagagtatagctggaataagaaattgtatgaacttgta

SEQ ID NO: 11833 - DNA, 80 bp, synthetic construct
  misc_feature 1..80: note = Synthetic: >NC_002645.1-cand-20210-20289
  source 1..80: mol_type = other DNA
caaagattttctttttggactatgttttgcacttctgttaatacgtcatcatcagaagcctttgttgtcggaattaacta

SEQ ID NO: 11834 - DNA, 80 bp, synthetic construct
  misc_feature 1..80: note = Synthetic: >NC_002645.1-cand-20290-20369
  source 1..80: mol_type = other DNA
tcttggtgatttcgcacaaggaccttttatagatggtaacataatacacgcaaattatgtattttggcgtaactccactg

SEQ ID NO: 11835 - DNA, 80 bp, synthetic construct
  misc_feature 1..80: note = Synthetic: >NC_002645.1-cand-20370-20449
  source 1..80: mol_type = other DNA
ttatgagtttgtcctacaactctgttttagacctgagtaaatttaattgcaaacacaaagcgactgttgttgtgcaatta

SEQ ID NO: 11836 - DNA, 80 bp, synthetic construct
  misc_feature 1..80: note = Synthetic: >NC_002645.1-cand-20430-20509
  source 1..80: mol_type = other DNA
cgactgttgttgtgcaattaaaggatagtgatattaatgaaatggtgcttagtcttgttaggagtggtaagttgcttgta

SEQ ID NO: 11837 - DNA, 80 bp, synthetic construct
  misc_feature 1..80: note = Synthetic: >NC_002645.1-cand-20530-20609
  source 1..80: mol_type = other DNA
gagttttagtaatcatttagtctcaactaaataaaatgtttgttttgcttgttgcatatgccttgttgcatattgctggt

SEQ ID NO: 11838 - DNA, 80 bp, synthetic construct
  misc_feature 1..80: note = Synthetic: >NC_002645.1-cand-20610-20689
  source 1..80: mol_type = other DNA
tgtcaaactacaaatgggctgaacactagttactctgtttgcaacggctgtgttggttattcagaaaatgtatttgctgt

SEQ ID NO: 11839 - DNA, 80 bp, synthetic construct
  misc_feature 1..80: note = Synthetic: >NC_002645.1-cand-20690-20769
  source 1..80: mol_type = other DNA
tgagagtggtggttatataccctccgactttgcattcaataattggttccttctaactaatacctcatctgttgtagatg

SEQ ID NO: 11840 - DNA, 80 bp, synthetic construct
  misc_feature 1..80: note = Synthetic: >NC_002645.1-cand-20770-20849
  source 1..80: mol_type = other DNA
gtgttgtgaggagttttcagcctttgttgcttaattgcttatggtctgtttctggcttgcggtttactactggttttgtc

SEQ ID NO: 11841 - DNA, 80 bp, synthetic construct
  misc_feature 1..80: note = Synthetic: >NC_002645.1-cand-20850-20929
  source 1..80: mol_type = other DNA
tattttaatggtactgggagaggtgattgtaaaggtttttcctcagatgttttgtctgatgtcatacgttacaacctcaa

SEQ ID NO: 11842 - DNA, 80 bp, synthetic construct
  misc_feature 1..80: note = Synthetic: >NC_002645.1-cand-20930-21009
  source 1..80: mol_type = other DNA
ttttgaagaaaaccttagacgtggaaccattttgtttaaaacatcttatggtgttgttgtgttttattgtaccaacaaca

SEQ ID NO: 11843 - DNA, 80 bp, synthetic construct
  misc_feature 1..80: note = Synthetic: >NC_002645.1-cand-21010-21089
  source 1..80: mol_type = other DNA
ctttagtttcaggtgatgctcacataccatttggtacagttttgggcaatttttattgctttgtaaatactactattggc

SEQ ID NO: 11844 - DNA, 80 bp, synthetic construct
  misc_feature 1..80: note = Synthetic: >NC_002645.1-cand-21090-21169
  source 1..80: mol_type = other DNA
aatgaaactacgtctgcttttgtgggtgcactacctaagacagttcgtgagtttgttatttcacgcacaggacattttta

SEQ ID NO: 11845 - DNA, 80 bp, synthetic construct
  misc_feature 1..80: note = Synthetic: >NC_002645.1-cand-21170-21249
  source 1..80: mol_type = other DNA
tattaatggctatcgctatttcactttaggtaatgtagaagccgttaatttcaatgtcactactgcagaaaccactgatt

SEQ ID NO: 11846 - DNA, 80 bp, synthetic construct
  misc_feature 1..80: note = Synthetic: >NC_002645.1-cand-21250-21329
  source 1..80: mol_type = other DNA
tttgtactgttgcgttagcttcttatgctgacgttttggttaatgtgtcacaaacctctattgctaatataatttattgc

SEQ ID NO: 11847 - DNA, 80 bp, synthetic construct
  misc_feature 1..80: note = Synthetic: >NC_003310.1-cand-167580-167659
  source 1..80: mol_type = other DNA
catagactttgccacaacagaaaaagtgtgtgtgacagcacagggagccacagaagggtttctcgaaaaaattactccat

SEQ ID NO: 11848 - DNA, 80 bp, synthetic construct
  misc_feature 1..80: note = Synthetic: >NC_003310.1-cand-167660-167739
  source 1..80: mol_type = other DNA
ggagttcggaagtatgtctgacacctaaaaagaatgtatatacgtgcgcaattagatctaaagaagatgttcccaatttc

SEQ ID NO: 11849 - DNA, 80 bp, synthetic construct
  misc_feature 1..80: note = Synthetic: >NC_003310.1-cand-167740-167819
  source 1..80: mol_type = other DNA
aaggacaaaatagccagagttatcacgagaaaatttaataaacagtctcaatcttatttgactaaatttctcggtagcac

SEQ ID NO: 11850 - DNA, 80 bp, synthetic construct
  misc_feature 1..80: note = Synthetic: >NC_003310.1-cand-167820-167899
  source 1..80: mol_type = other DNA
atcgaatgatgttacaacttttcttagcattcttgactaaatattcataactaatttttattaatgatacaaaaatgaaa

SEQ ID NO: 11851 - DNA, 80 bp, synthetic construct
  misc_feature 1..80: note = Synthetic: >NC_003310.1-cand-167900-167979
  source 1..80: mol_type = other DNA
taaaactgcatattatacactggttaacgcccttggcctaaccatttttaagatgaggtccctgattatagtccttctgt

SEQ ID NO: 11852 - DNA, 80 bp, synthetic construct
  misc_feature 1..80: note = Synthetic: >NC_003310.1-cand-167960-168039
  source 1..80: mol_type = other DNA
cctgattatagtccttctgttcccctctatcatctactccatgtctattagacgatgcgagaagactgaagaggaaacat

SEQ ID NO: 11853 - DNA, 80 bp, synthetic construct
  misc_feature 1..80: note = Synthetic: >NC_003310.1-cand-168060-168139
  source 1..80: mol_type = other DNA
tgtataattgccaaagatttctatcccgaaagaactgattgcagtgttcatcgcccaactgcaagtggaggattgataac

SEQ ID NO: 11854 - DNA, 80 bp, synthetic construct
  misc_feature 1..80: note = Synthetic: >NC_003310.1-cand-168140-168219
  source 1..80: mol_type = other DNA
tgaaggcaatggattcagagtagttatatatgatcaatgtacagaaccacatgactttattatcaccgatactcaacaaa

SEQ ID NO: 11855 - DNA, 80 bp, synthetic construct
  misc_feature 1..80: note = Synthetic: >NC_003310.1-cand-168220-168299
  source 1..80: mol_type = other DNA
cacgtcttggatcatctcatacatatattaaattcagtaacatgaatacaggtgtcccatctagtattccaaaatgttcc

SEQ ID NO: 11856 - DNA, 80 bp, synthetic construct
  misc_feature 1..80: note = Synthetic: >NC_003310.1-cand-168300-168379
  source 1..80: mol_type = other DNA
agaactctctctatttctgtatattgtgatcaagaggcgggagacataaaatttgaggagtatactcaagaatcaagtga

SEQ ID NO: 11857 - DNA, 80 bp, synthetic construct
  misc_feature 1..80: note = Synthetic: >NC_003310.1-cand-168380-168459
  source 1..80: mol_type = other DNA
tatcagtattagagttaagtatgattcatcatgtattgattatctgggtattaatcaaagtttcatgaatgaatgtattc

SEQ ID NO: 11858 - DNA, 80 bp, synthetic construct
  misc_feature 1..80: note = Synthetic: >NC_003310.1-cand-168460-168539
  source 1..80: mol_type = other DNA
gaagaattacaacatgggatagagaatcatgtgtcagaattgatacacagactataaataaatatcttaagtcttgcacc

SEQ ID NO: 11859 - DNA, 80 bp, synthetic construct
  misc_feature 1..80: note = Synthetic: >NC_003310.1-cand-168530-168609
  source 1..80: mol_type = other DNA
gtcttgcaccaacacaaaattcgaccgtaatgtctacaaaaggtacatactgaagagtaaagcactccatgctaaaacag

SEQ ID NO: 11860 - DNA, 80 bp, synthetic construct
  misc_feature 1..80: note = Synthetic: >NC_003310.1-cand-168610-168689
  source 1..80: mol_type = other DNA
agttgtaatagatataaaatactttttataataattaggctagaaaaatctcactcacatgtaatcttaaaaaatgatat

SEQ ID NO: 11861 - DNA, 80 bp, synthetic construct
  misc_feature 1..80: note = Synthetic: >NC_003310.1-cand-168660-168739
  source 1..80: mol_type = other DNA
tcactcacatgtaatcttaaaaaatgatatgatagttcttacaagtagagattgagttttaaatggattctattaattac

SEQ ID NO: 11862 - DNA, 80 bp, synthetic construct
  misc_feature 1..80: note = Synthetic: >NC_003310.1-cand-168760-168839
  source 1..80: mol_type = other DNA
ctgatctacagacattggttaataaatcatcttattttgccgatatattaaaatgtggaaactccactaataatattaca

SEQ ID NO: 11863 - DNA, 80 bp, synthetic construct
  misc_feature 1..80: note = Synthetic: >NC_004421.1-cand-6440-6519
  source 1..80: mol_type = other DNA
gacccctacctcccgccagtatcgtgacctccgtcgctttctgggctcccacccctaccctactggccacctcatctctg

SEQ ID NO: 11864 - DNA, 80 bp, synthetic construct
  misc_feature 1..80: note = Synthetic: >NC_004421.1-cand-6520-6599
  source 1..80: mol_type = other DNA
ctttccaaggcgttccgatgttcatacggttctccaagaatcatatggtcactctggacgtcgaatctgttgtccacgaa

SEQ ID NO: 11865 - DNA, 80 bp, synthetic construct
  misc_feature 1..80: note = Synthetic: >NC_004421.1-cand-6600-6679
  source 1..80: mol_type = other DNA
cccgtcgcatatggttacaagacacccagctttgagggtatgtgtggtgctccactcataaccgatgaccctgctgggat

SEQ ID NO: 11866 - DNA, 80 bp, synthetic construct
  misc_feature 1..80: note = Synthetic: >NC_004421.1-cand-6680-6759
  source 1..80: mol_type = other DNA
caagctccttggtttccatgtggccggaatcgtgggctctactggcttctctgtccctttctatccctacctgcctgaga

SEQ ID NO: 11867 - DNA, 80 bp, synthetic construct
  misc_feature 1..80: note = Synthetic: >NC_004421.1-cand-6760-6839
  source 1..80: mol_type = other DNA
ttgaacagttcgctacggaatgccaatccctgatcataccaggtccggaaacccatccgggcgtgaatgtgaacaggaaa

SEQ ID NO: 11868 - DNA, 80 bp, synthetic construct
  misc_feature 1..80: note = Synthetic: >NC_004421.1-cand-6840-6919
  source 1..80: mol_type = other DNA
tcacagcttgggcactctcctgcctatggcgcattcccagtgaagaagcaacccgctgtcctccaccagcgtgatgctcg

SEQ ID NO: 11869 - DNA, 80 bp, synthetic construct
  misc_feature 1..80: note = Synthetic: >NC_004421.1-cand-6920-6999
  source 1..80: mol_type = other DNA
tctcgagcctggaaccaaattggatggccaactcttccttaaacacaacaagggagatatggacaaaccatggcccggtc

SEQ ID NO: 11870 - DNA, 80 bp, synthetic construct
  misc_feature 1..80: note = Synthetic: >NC_004421.1-cand-7020-7099
  source 1..80: mol_type = other DNA
tacttctctaagtttcccactctcatccgaacgctgactcaggaagaagcaatcaatggcactccaaacctggatggaat

SEQ ID NO: 11871 - DNA, 80 bp, synthetic construct
  misc_feature 1..80: note = Synthetic: >NC_004421.1-cand-7100-7179
  source 1..80: mol_type = other DNA
ggacatgaatcaggccgccgggtacccctggaacaccatgggcaaatcacgccgctcattgttcatcgaagaggcccccg

SEQ ID NO: 11872 - DNA, 80 bp, synthetic construct
  misc_feature 1..80: note = Synthetic: >NC_004421.1-cand-7180-7259
  source 1..80: mol_type = other DNA
ggtactatgtccccacatccgaactccaggctgaaattgacaaaaccctggagaatccagattacttctactcaaccttc

SEQ ID NO: 11873 - DNA, 80 bp, synthetic construct
  misc_feature 1..80: note = Synthetic: >NC_004421.1-cand-7260-7339
  source 1..80: mol_type = other DNA
ctcaaagacgagctcaggccgactcccaaagtcaccgccggcctgactcgtgtggttgaggcagctccagtgcacgccat

SEQ ID NO: 11874 - DNA, 80 bp, synthetic construct
  misc_feature 1..80: note = Synthetic: >NC_004421.1-cand-7340-7419
  source 1..80: mol_type = other DNA
cgtcgccgggcgcatgctcctcggtggtctcatcgagtacatgcaagcctaccccggccggcatggcagtgctgtgggct

SEQ ID NO: 11875 - DNA, 80 bp, synthetic construct
  misc_feature 1..80: note = Synthetic: >NC_004421.1-cand-7420-7499
  source 1..80: mol_type = other DNA
gcaacccagacctccactggtccaaattcttcttcaaattcgccaaattcgatcaagtgtatgacttggactacaagtgt

SEQ ID NO: 11876 - DNA, 80 bp, synthetic construct
  misc_feature 1..80: note = Synthetic: >NC_004421.1-cand-7480-7559
  source 1..80: mol_type = other DNA
atgacttggactacaagtgttttgatgccaccctcccttcctgcgcattcagaattgttgaagattacctcgtgaaattg

SEQ ID NO: 11877 - DNA, 80 bp, synthetic construct
  misc_feature 1..80: note = Synthetic: >NC_004421.1-cand-7560-7639
  source 1..80: mol_type = other DNA
actggcgacgagcgcgtccgcgcgtacgtcgaaaccatcaggcattccaagcatgtctatggtagtcagacttacgagat

SEQ ID NO: 11878 - DNA, 80 bp, synthetic construct
  misc_feature 1..80: note = Synthetic: >NC_004421.1-cand-7640-7719
  source 1..80: mol_type = other DNA
gatcggcggcaatccctctggatgtgtcggcacctccatcatcaacaccatcatcaacaacatctgtgtcctgtcagcac

SEQ ID NO: 11879 - DNA, 80 bp, synthetic construct
  misc_feature 1..80: note = Synthetic: >NC_005238.1-cand-800-879
  source 1..80: mol_type = other DNA
ttctctttctttgaagtaaaaggttcagctgtgtttgattgttttaatgagaatgaacaagggcacattgtaaaataccc

SEQ ID NO: 11880 - DNA, 80 bp, synthetic construct
  misc_feature 1..80: note = Synthetic: >NC_005238.1-cand-880-959
  source 1..80: mol_type = other DNA
aatgtcccggcacccgaggaactttttactcatccaatgcactgtattaacagcatacaaacctgcaactatactttctg

SEQ ID NO: 11881 - DNA, 80 bp, synthetic construct
  misc_feature 1..80: note = Synthetic: >NC_005238.1-cand-960-1039
  source 1..80: mol_type = other DNA
atcagcttgatagccgtagggcctgcattcaatttttaaacctcatcccagaaacccctgcatctattcttgcacatgat

SEQ ID NO: 11882 - DNA, 80 bp, synthetic construct
  misc_feature 1..80: note = Synthetic: >NC_005238.1-cand-1040-1119
  source 1..80: mol_type = other DNA
atggcacacagatacatcaatttgactagagatgatttattagcatattatgcacctagaatccaatttaacccaaccca

SEQ ID NO: 11883 - DNA, 80 bp, synthetic construct
  misc_feature 1..80: note = Synthetic: >NC_005238.1-cand-1130-1209
  source 1..80: mol_type = other DNA
gaaccaggcacctttaaattaacatcaaatatgatgaggcctgagtcaaagattatgctggatatgctaagtcaacatga

SEQ ID NO: 11884 - DNA, 80 bp, synthetic construct
  misc_feature 1..80: note = Synthetic: >NC_005238.1-cand-1230-1309
  source 1..80: mol_type = other DNA
agtcaatagaaagtttaaacatcagtagtcatattgtacagtcagattgtgttagcctaatcacaaaaattttgtcagat

SEQ ID NO: 11885 - DNA, 80 bp, synthetic construct
  misc_feature 1..80: note = Synthetic: >NC_005238.1-cand-1290-1369
  source 1..80: mol_type = other DNA
tcacaaaaattttgtcagatttagagcttaatatttctgaacctagtagccatgagcagattacagctaaacacacacat

SEQ ID NO: 11886 - DNA, 80 bp, synthetic construct
  misc_feature 1..80: note = Synthetic: >NC_005238.1-cand-1370-1449
  source 1..80: mol_type = other DNA
gttgatactgtattggataaattttttcaaaacgagactcagaagtatctaattgatattctaaagaagaccacagcatg

SEQ ID NO: 11887 - DNA, 80 bp, synthetic construct
  misc_feature 1..80: note = Synthetic: >NC_005238.1-cand-1450-1529
  source 1..80: mol_type = other DNA
gcatatcgggcatttagttagggatattactgagagcttgattgcacattctggattgaggaggtctaaatattggtcaa

SEQ ID NO: 11888 - DNA, 80 bp, synthetic construct
  misc_feature 1..80: note = Synthetic: >NC_005238.1-cand-1530-1609
  source 1..80: mol_type = other DNA
tccatgcttataataatggaagtgtaatattgttcatactcccttcaaaatctcttgaggttgcaggttcgtttgtgcga

SEQ ID NO: 11889 - DNA, 80 bp, synthetic construct
  misc_feature 1..80: note = Synthetic: >NC_005238.1-cand-1610-1689
  source 1..80: mol_type = other DNA
tttatgactgcttttaaattaggtcctgggctagttgataaagacaatttggattcaatacttgcagatggtgatatctt

SEQ ID NO: 11890 - DNA, 80 bp, synthetic construct
  misc_feature 1..80: note = Synthetic: >NC_005238.1-cand-1700-1779
  source 1..80: mol_type = other DNA
tcaaaaattatgagtctagatctgaacaggttacttgctttgaatatagcttttgagaaagcactacttgcaacagctac

SEQ ID NO: 11891 - DNA, 80 bp, synthetic construct
  misc_feature 1..80: note = Synthetic: >NC_005238.1-cand-1770-1849
  source 1..80: mol_type = other DNA
caacagctacatggttccaatattacactgaggatcagtcacaatttccattgcaacattctatccggtcagtatttgct

SEQ ID NO: 11892 - DNA, 80 bp, synthetic construct
  misc_feature 1..80: note = Synthetic: >NC_005238.1-cand-1850-1929
  source 1..80: mol_type = other DNA
tatcattttttgcttgctatttgccaaaagatgaaattatgtgcaatctttgacaacctaaggtatctgatacctgctgt

SEQ ID NO: 11893 - DNA, 80 bp, synthetic construct
  misc_feature 1..80: note = Synthetic: >NC_005238.1-cand-1930-2009
  source 1..80: mol_type = other DNA
gacatctttgtattctggctttccttctttggttgaaaaactgtttgagagaccttttaaaagtgctttagaagtctatg

SEQ ID NO: 11894 - DNA, 80 bp, synthetic construct
  misc_feature 1..80: note = Synthetic: >NC_005238.1-cand-2010-2089
  source 1..80: mol_type = other DNA
tgtattataacatcaaaagtctgcttgtcgcactggctcaaaataataaggctagattttattcgaaagttaaacttctc

SEQ ID NO: 11895 - DNA, 80 bp, synthetic construct
  misc_feature 1..80: note = Synthetic: >NC_006577.2-cand-24160-24239
  source 1..80: mol_type = other DNA
tctgcaatcttctaattataaaattgacactacttctagttcttgtcaattgtattatagtttgcctgcaattaatgtta

SEQ ID NO: 11896 - DNA, 80 bp, synthetic construct
  misc_feature 1..80: note = Synthetic: >NC_006577.2-cand-24240-24319
  source 1..80: mol_type = other DNA
ctattaataattataatccttcttcttggaatagaaggtatggttttaataattttaatttgagctctcatagtgttgtt

SEQ ID NO: 11897 - DNA, 80 bp, synthetic construct
  misc_feature 1..80: note = Synthetic: >NC_006577.2-cand-24320-24399
  source 1..80: mol_type = other DNA
tactcacgttattgtttttctgttaataatactttttgtccttgtgctaaaccttcttttgcttcaagttgcaagagtca

SEQ ID NO: 11898 - DNA, 80 bp, synthetic construct
  misc_feature 1..80: note = Synthetic: >NC_006577.2-cand-24400-24479
  source 1..80: mol_type = other DNA
taaaccaccttctgcttcctgtcctattggtactaattatcgttcttgtgagagtactactgtactcgaccacactgact

SEQ ID NO: 11899 - DNA, 80 bp, synthetic construct
  misc_feature 1..80: note = Synthetic: >NC_006577.2-cand-24480-24559
  source 1..80: mol_type = other DNA
ggtgtaggtgttcttgtttacctgatcctataactgcttatgaccctaggtcttgttctcaaaaaaagtctctggttggt

SEQ ID NO: 11900 - DNA, 80 bp, synthetic construct
  misc_feature 1..80: note = Synthetic: >NC_006577.2-cand-24560-24639
  source 1..80: mol_type = other DNA
gttggtgaacattgtgcagggttcggtgttgatgaagaaaagtgtggtgtattggatggatcatataatgtttcttgtct

SEQ ID NO: 11901 - DNA, 80 bp, synthetic construct
  misc_feature 1..80: note = Synthetic: >NC_006577.2-cand-24640-24719
  source 1..80: mol_type = other DNA
ttgtagtactgatgcctttctaggttggtcttatgacacttgcgtcagtaacaaccgttgtaatattttttctaatttta

SEQ ID NO: 11902 - DNA, 80 bp, synthetic construct
  misc_feature 1..80: note = Synthetic: >NC_006577.2-cand-24720-24799
  source 1..80: mol_type = other DNA
ttttaaatggtatcaatagtggtaccacttgttctaatgatttattgcagcctaatactgaagtttttactgatgtttgt

SEQ ID NO: 11903 - DNA, 80 bp, synthetic construct
  misc_feature 1..80: note = Synthetic: >NC_006577.2-cand-24800-24879
  source 1..80: mol_type = other DNA
gttgattacgacctttatggtattacaggacaaggtatttttaaagaagtttctgctgtttattataatagttggcaaaa

SEQ ID NO: 11904 - DNA, 80 bp, synthetic construct
  misc_feature 1..80: note = Synthetic: >NC_006577.2-cand-24880-24959
  source 1..80: mol_type = other DNA
tcttttgtatgattctaatggcaacattattggttttaaagattttgttactaataaaacatataatattttcccttgtt

SEQ ID NO: 11905 - DNA, 80 bp, synthetic construct
  misc_feature 1..80: note = Synthetic: >NC_006577.2-cand-24960-25039
  source 1..80: mol_type = other DNA
atgcaggaagagtttctgctgcttttcatcaaaatgcttcctctttggctttactttatcgtaatttaaaatgtagctat

SEQ ID NO: 11906 - DNA, 80 bp, synthetic construct
  misc_feature 1..80: note = Synthetic: >NC_006577.2-cand-25040-25119
  source 1..80: mol_type = other DNA
gttttgaataatatttctttaactactcagccatattttgatagttatcttggttgcgtttttaatgctgataatttaac

SEQ ID NO: 11907 - DNA, 80 bp, synthetic construct
  misc_feature 1..80: note = Synthetic: >NC_006577.2-cand-25120-25199
  source 1..80: mol_type = other DNA
tgattattctgtttcttcttgtgctcttcgcatgggtagtggtttttgtgttgattataactcaccttcttcttcctctt

SEQ ID NO: 11908 - DNA, 80 bp, synthetic construct
  misc_feature 1..80: note = Synthetic: >NC_006577.2-cand-25200-25279
  source 1..80: mol_type = other DNA
cgcgtcgtaaacgtagaagtatttctgcttcttatcgttttgttacttttgaaccctttaatgtcagttttgttaatgac

SEQ ID NO: 11909 - DNA, 80 bp, synthetic construct
  misc_feature 1..80: note = Synthetic: >NC_006577.2-cand-25280-25359
  source 1..80: mol_type = other DNA
agtattgagtctgtgggtggtctttatgagatcaaaattcccactaactttactatagttggtcaagaggaatttattca

SEQ ID NO: 11910 - DNA, 80 bp, synthetic construct
  misc_feature 1..80: note = Synthetic: >NC_006577.2-cand-25370-25449
  source 1..80: mol_type = other DNA
cctaaagttactattgattgttctttatttgtctgttctaattatgcagcttgccatgacttattgtcagagtatggcac

SEQ ID NO: 11911 - DNA, 80 bp, synthetic construct
  misc_feature 1..80: note = Synthetic: >NC_009826.1-cand-5650-5729
  source 1..80: mol_type = other DNA
gtctttcaccgccgcggtgacctcccctcttacaacacatcagaccctcctttttaatattctaggagggtgggtggcct

SEQ ID NO: 11912 - DNA, 80 bp, synthetic construct
  misc_feature 1..80: note = Synthetic: >NC_009826.1-cand-5700-5779
  source 1..80: mol_type = other DNA
tttttaatattctaggagggtgggtggcctcacagatcgcgccacccacggccgccaccgcgttcgtcgttagtggaatg

SEQ ID NO: 11913 - DNA, 80 bp, synthetic construct
  misc_feature 1..80: note = Synthetic: >NC_009826.1-cand-5810-5889
  source 1..80: mol_type = other DNA
ggtagggtccttattgacatcctagctgggtatggaacaggggtggctggggcgctcgtcgccttcaagatcatgtgtgg

SEQ ID NO: 11914 - DNA, 80 bp, synthetic construct
  misc_feature 1..80: note = Synthetic: >NC_009826.1-cand-5890-5969
  source 1..80: mol_type = other DNA
ggaaaggccgacagccgaagaactggtaaacctcctgccttcaatactctgccctggagccctagtggttggtgtcatat

SEQ ID NO: 11915 - DNA, 80 bp, synthetic construct
  misc_feature 1..80: note = Synthetic: >NC_009826.1-cand-5930-6009
  source 1..80: mol_type = other DNA
tcaatactctgccctggagccctagtggttggtgtcatatgcgccgccgttctgcggcgccacattggcccaggcgaggg

SEQ ID NO: 11916 - DNA, 80 bp, synthetic construct
  misc_feature 1..80: note = Synthetic: >NC_009826.1-cand-6060-6139
  source 1..80: mol_type = other DNA
atgggtctccgacacactacgtgcccgagacggacgcgtcggctaaggtcacgcaactgctcagctccctcacagtaaca

SEQ ID NO: 11917 - DNA, 80 bp, synthetic construct
  misc_feature 1..80: note = Synthetic: >NC_009826.1-cand-6130-6209
  source 1..80: mol_type = other DNA
cacagtaacatctcttctgaagaggctccacacgtggatcggtgaagactattccacgccctgtgatggtacatggctta

SEQ ID NO: 11918 - DNA, 80 bp, synthetic construct
  misc_feature 1..80: note = Synthetic: >NC_009826.1-cand-6210-6289
  source 1..80: mol_type = other DNA
gggccatttgggactgggtctgcacggcactgacagacttcaaagcctggctgcaggcaaaactcctcccgcaactcccc

SEQ ID NO: 11919 - DNA, 80 bp, synthetic construct
  misc_feature 1..80: note = Synthetic: >NC_009826.1-cand-6340-6419
  source 1..80: mol_type = other DNA
ggatggagtgaactccaccaagtgtccttgcggagcgacgatatctggtcacgtgaagaacggaaccatgagaatcgtcg

SEQ ID NO: 11920 - DNA, 80 bp, synthetic construct
  misc_feature 1..80: note = Synthetic: >NC_009826.1-cand-6370-6449
  source 1..80: mol_type = other DNA
cggagcgacgatatctggtcacgtgaagaacggaaccatgagaatcgtcggcccgaagctgtgcagtaacacctggcaag

SEQ ID NO: 11921 - DNA, 80 bp, synthetic construct
  misc_feature 1..80: note = Synthetic: >NC_009826.1-cand-6450-6529
  source 1..80: mol_type = other DNA
gcaccttcccaatcaacgccacaacaacagggcccagcgtacctgccccggcccccaactacaagttcgccttgtggagg

SEQ ID NO: 11922 - DNA, 80 bp, synthetic construct
  misc_feature 1..80: note = Synthetic: >NC_009826.1-cand-6480-6559
  source 1..80: mol_type = other DNA
ggcccagcgtacctgccccggcccccaactacaagttcgccttgtggagggtgggcgccgcggactacgcggaggtgcgc

SEQ ID NO: 11923 - DNA, 80 bp, synthetic construct
  misc_feature 1..80: note = Synthetic: >NC_009826.1-cand-6610-6689
  source 1..80: mol_type = other DNA
gtgtccctgccaggtaccatctccagagttcttcacggagctggatggcgtgaggattcaccgcttcgcgccaccctgta

SEQ ID NO: 11924 - DNA, 80 bp, synthetic construct
  misc_feature 1..80: note = Synthetic: >NC_009826.1-cand-6730-6809
  source 1..80: mol_type = other DNA
gcactcctacgtggtagggtcccaactaccctgtgagccagaacctgatgtgaccgtcttaacatcaatgctgtcagatc

SEQ ID NO: 11925 - DNA, 80 bp, synthetic construct
  misc_feature 1..80: note = Synthetic: >NC_009826.1-cand-6770-6849
  source 1..80: mol_type = other DNA
gaacctgatgtgaccgtcttaacatcaatgctgtcagatcccgcccacatcacggcggaaacggccaagcgcaggctaaa

SEQ ID NO: 11926 - DNA, 80 bp, synthetic construct
  misc_feature 1..80: note = Synthetic: >NC_009826.1-cand-6850-6929
  source 1..80: mol_type = other DNA
tcgagggtctccaccctctctggcaaactcctcggccagtcagctctcagccccctctctcaaggccacctgcactatac

SEQ ID NO: 11927 - DNA, 80 bp, synthetic construct
  misc_feature 1..80: note = Synthetic: >NC_009827.1-cand-1600-1679
  source 1..80: mol_type = other DNA
aaataggaccgctctaaactgtatcgacagtctccaaactgggtttcttagcgcgttgttctaccgcagcaatttcaact

SEQ ID NO: 11928 - DNA, 80 bp, synthetic construct
  misc_feature 1..80: note = Synthetic: >NC_009827.1-cand-1660-1739
  source 1..80: mol_type = other DNA
ctaccgcagcaatttcaactccacgggttgctcagaacggcttggcgcatgcaagcccttggaacacttccagcagggat

SEQ ID NO: 11929 - DNA, 80 bp, synthetic construct
  misc_feature 1..80: note = Synthetic: >NC_009827.1-cand-1760-1839
  source 1..80: mol_type = other DNA
tccaacatcacagggccgtctgaggaccggccctactgctggcactatgctcctagggagtgtagtgtagtgccggcgtc

SEQ ID NO: 11930 - DNA, 80 bp, synthetic construct
  misc_feature 1..80: note = Synthetic: >NC_009827.1-cand-1840-1919
  source 1..80: mol_type = other DNA
atcagtgtgtggtcctgtttactgcttcacacctagccctgtcgtggtgggcaccaccgacaggctgggcaaccctactt

SEQ ID NO: 11931 - DNA, 80 bp, synthetic construct
  misc_feature 1..80: note = Synthetic: >NC_009827.1-cand-1930-2009
  source 1..80: mol_type = other DNA
agaaaacgagacggatgtgttcatgctagagagcctgcggcctccgcaaggaggttggttcgggtgcacgtggatgaact

SEQ ID NO: 11932 - DNA, 80 bp, synthetic construct
  misc_feature 1..80: note = Synthetic: >NC_009827.1-cand-2000-2079
  source 1..80: mol_type = other DNA
tggatgaactctacgggcttcaccaagacctgcggagccccgccttgccagttaatcccaggagactataatagttcttc

SEQ ID NO: 11933 - DNA, 80 bp, synthetic construct
  misc_feature 1..80: note = Synthetic: >NC_009827.1-cand-2070-2149
  source 1..80: mol_type = other DNA
atagttcttctaaccagctcctgtgccctactgactgcttccggaaacatccggaggccacatatcagaagtgtgggtcg

SEQ ID NO: 11934 - DNA, 80 bp, synthetic construct
  misc_feature 1..80: note = Synthetic: >NC_009827.1-cand-2160-2239
  source 1..80: mol_type = other DNA
tgacccccaggtgtctggtggactatccctacagattgtggcactatccatgcactgtcaactacacaatacacaaggtt

SEQ ID NO: 11935 - DNA, 80 bp, synthetic construct
  misc_feature 1..80: note = Synthetic: >NC_009827.1-cand-2260-2339
  source 1..80: mol_type = other DNA
tgagcacaggttcgatgccgcctgtaattggacgcgtggcgaccgttgcgacttgtatgacagagataggattgagatga

SEQ ID NO: 11936 - DNA, 80 bp, synthetic construct
  misc_feature 1..80: note = Synthetic: >NC_009827.1-cand-2320-2399
  source 1..80: mol_type = other DNA
cagagataggattgagatgagtcccctcctcttttcaaccacgcagcttgctatcttgccttgcagctttaccaccatgc

SEQ ID NO: 11937 - DNA, 80 bp, synthetic construct
  misc_feature 1..80: note = Synthetic: >NC_009827.1-cand-2400-2479
  source 1..80: mol_type = other DNA
ccgccttgtcaacaggacttatacatctccatcaaaacattgtagatgtgcaatacctctacggagtctcctcgagcata

SEQ ID NO: 11938 - DNA, 80 bp, synthetic construct
  misc_feature 1..80: note = Synthetic: >NC_009827.1-cand-2480-2559
  source 1..80: mol_type = other DNA
gtatcgtgggccgtgaagtgggagtatgtcgtcctcatgtttttggtcctggcggatgctcgaatatgcacttgcctttg

SEQ ID NO: 11939 - DNA, 80 bp, synthetic construct
  misc_feature 1..80: note = Synthetic: >NC_009827.1-cand-2560-2639
  source 1..80: mol_type = other DNA
gttgatgctgctcgtcggcaaggtcgaagcagcattggagcggctcgtcgtcctcaatgcagccagcgccgcgggtaccg

SEQ ID NO: 11940 - DNA, 80 bp, synthetic construct
  misc_feature 1..80: note = Synthetic: >NC_009827.1-cand-2610-2689
  source 1..80: mol_type = other DNA
tcctcaatgcagccagcgccgcgggtaccgccggttggtgttggaccctcatcttcctgtgctgcgtgtggcacgtgaag

SEQ ID NO: 11941 - DNA, 80 bp, synthetic construct
  misc_feature 1..80: note = Synthetic: >NC_009827.1-cand-2720-2799
  source 1..80: mol_type = other DNA
gctctaggcatgtggccgattctcctggtgattctggccctgccccaacgggcatatgcctgggacaatagtcaggctgc

SEQ ID NO: 11942 - DNA, 80 bp, synthetic construct
  misc_feature 1..80: note = Synthetic: >NC_009827.1-cand-2810-2889
  source 1..80: mol_type = other DNA
gtcgttgcccttctggtgttgacaatctttaccctcagccctatgtacaaacagctgctcacacacgctatctggtggaa

SEQ ID NO: 11943 - DNA, 80 bp, synthetic construct
  misc_feature 1..80: note = Synthetic: >NC_009827.1-cand-9290-9369
  source 1..80: mol_type = other DNA
gggggggacatttatcacagcgtgtcccgggctcgaccccgtctgttactccttggcctactcctactcactgtaggggt

SEQ ID NO: 11944 - DNA, 80 bp, synthetic construct
  misc_feature 1..80: note = Synthetic: >NC_009827.1-cand-9370-9449
  source 1..80: mol_type = other DNA
aggcatctttttactccccgctcggtagacgagcggccctaaacaacactccataacatttttttttttttttttttttt

SEQ ID NO: 11945 - DNA, 80 bp, synthetic construct
  misc_feature 1..80: note = Synthetic: >NC_009827.1-cand-9530-9609
  source 1..80: mol_type = other DNA
gctccatcttagccctagtcacggctagctgtgaaaggtccgtgagccgcatgactgcagagagtgctgatactggcctc

SEQ ID NO: 11946 - DNA, 80 bp, synthetic construct
  misc_feature 1..80: note = Synthetic: >NC_009942.1-cand-80-159
  source 1..80: mol_type = other DNA
acgaagatctcgatgtctaagaaaccaggagggcccggcaagagccgggctgtcaatatgctaaaacgcggaatgccccg

SEQ ID NO: 11947 - DNA, 80 bp, synthetic construct
  misc_feature 1..80: note = Synthetic: >NC_009942.1-cand-130-209
  source 1..80: mol_type = other DNA
tgtcaatatgctaaaacgcggaatgccccgcgtgttgtccttgattggactgaagagggctatgttgagcctgatcgacg

SEQ ID NO: 11948 - DNA, 80 bp, synthetic construct
  misc_feature 1..80: note = Synthetic: >NC_009942.1-cand-240-319
  source 1..80: mol_type = other DNA
tcttggcgttcttcaggttcacagcaattgctccgacccgagcagtgctggatcgatggagaggtgtgaacaaacaaaca

SEQ ID NO: 11949 - DNA, 80 bp, synthetic construct
  misc_feature 1..80: note = Synthetic: >NC_009942.1-cand-320-399
  source 1..80: mol_type = other DNA
gcgatgaaacaccttctgagttttaagaaggaactagggaccttgaccagtgctatcaatcggcggagctcaaaacaaaa

SEQ ID NO: 11950 - DNA, 80 bp, synthetic construct
  misc_feature 1..80: note = Synthetic: >NC_009942.1-cand-400-479
  source 1..80: mol_type = other DNA
gaaaagaggaggaaagaccggaattgcagtcatgattggcctgatcgccagcgtaggagcagttaccctctctaacttcc

SEQ ID NO: 11951 - DNA, 80 bp, synthetic construct
  misc_feature 1..80: note = Synthetic: >NC_009942.1-cand-480-559
  source 1..80: mol_type = other DNA
aagggaaggtgatgatgacggtaaatgctactgacgtcacagatgtcatcacgattccaacagctgctggaaagaaccta

SEQ ID NO: 11952 - DNA, 80 bp, synthetic construct
  misc_feature 1..80: note = Synthetic: >NC_009942.1-cand-560-639
  source 1..80: mol_type = other DNA
tgcattgtcagagcaatggatgtgggatacatgtgcgatgatactatcacttatgaatgcccagtactgtcggctggtaa

SEQ ID NO: 11953 - DNA, 80 bp, synthetic construct
  misc_feature 1..80: note = Synthetic: >NC_009942.1-cand-640-719
  source 1..80: mol_type = other DNA
tgatccagaagacatcgactgttggtgcacaaagtcagcagtctacgtcaggtatggaagatgcaccaagacacgccact

SEQ ID NO: 11954 - DNA, 80 bp, synthetic construct
  misc_feature 1..80: note = Synthetic: >NC_009942.1-cand-700-779
  source 1..80: mol_type = other DNA
atgcaccaagacacgccactcaagacgcagtcggaggtcactgacagtgcagacacacggagaaagcactctagcgaaca

SEQ ID NO: 11955 - DNA, 80 bp, synthetic construct
  misc_feature 1..80: note = Synthetic: >NC_009942.1-cand-800-879
  source 1..80: mol_type = other DNA
agcaccaaggccacaaggtatttggtaaaaacagaatcatggatcttgaggaaccctggatatgccctggtggcagccgt

SEQ ID NO: 11956 - DNA, 80 bp, synthetic construct
  misc_feature 1..80: note = Synthetic: >NC_009942.1-cand-880-959
  source 1..80: mol_type = other DNA
cattggttggatgcttgggagcaacaccatgcagagagttgtgtttgtcgtgctattgcttttggtggccccagcttaca

SEQ ID NO: 11957 - DNA, 80 bp, synthetic construct
  misc_feature 1..80: note = Synthetic: >NC_009942.1-cand-960-1039
  source 1..80: mol_type = other DNA
gcttcaactgccttggaatgagcaacagagacttcttggaaggagtgtctggagcaacatgggtggatttggttctcgaa

SEQ ID NO: 11958 - DNA, 80 bp, synthetic construct
  misc_feature 1..80: note = Synthetic: >NC_009942.1-cand-1040-1119
  source 1..80: mol_type = other DNA
ggcgacagctgcgtgactatcatgtctaaggacaagcctaccatcgatgtgaagatgatgaatatggaggcggccaacct

SEQ ID NO: 11959 - DNA, 80 bp, synthetic construct
  misc_feature 1..80: note = Synthetic: >NC_009942.1-cand-3770-3849
  source 1..80: mol_type = other DNA
aagatacaaccagtgtttatggtggcatcgtttctcaaagcgagatggaccaaccaggagaacattttgttgatgttggc

SEQ ID NO: 11960 - DNA, 80 bp, synthetic construct
  misc_feature 1..80: note = Synthetic: >NC_009942.1-cand-3850-3929
  source 1..80: mol_type = other DNA
ggctgttttctttcaaatggcttatcacgatgcccgccaaattctgctctgggagatccctgatgtgttgaattcactgg

SEQ ID NO: 11961 - DNA, 80 bp, synthetic construct
  misc_feature 1..80: note = Synthetic: >NC_009942.1-cand-3930-4009
  source 1..80: mol_type = other DNA
cggtagcttggatgatactgagagccataacattcacaacgacatcaaacgtggttgttccgctgctagccctgctaaca

SEQ ID NO: 11962 - DNA, 80 bp, synthetic construct
  misc_feature 1..80: note = Synthetic: >NC_009942.1-cand-4010-4089
  source 1..80: mol_type = other DNA
cccgggctgagatgcttgaatctggatgtgtacaggatactgctgttgatggtcggaataggcagcttgatcagggagaa

SEQ ID NO: 11963 - DNA, 80 bp, synthetic construct
  misc_feature 1..80: note = Synthetic: >NC_009942.1-cand-4090-4169
  source 1..80: mol_type = other DNA
gaggagtgcagccgcaaaaaagaaaggagcaagtctgctatgcttggctctagcctcaacaggacttttcaaccccatga

SEQ ID NO: 11964 - DNA, 80 bp, synthetic construct
  misc_feature 1..80: note = Synthetic: >NC_009942.1-cand-4170-4249
  source 1..80: mol_type = other DNA
tccttgctgctggactgattgcatgtgatcccaaccgtaaacgcggatggcccgcaactgaagtgatgacagctgtcggc

SEQ ID NO: 11965 - DNA, 80 bp, synthetic construct
  misc_feature 1..80: note = Synthetic: >NC_009942.1-cand-4240-4319
  source 1..80: mol_type = other DNA
agctgtcggcctaatgtttgccatcgtcggagggctggcagagcttgacattgactccatggccattccaatgactatcg

SEQ ID NO: 11966 - DNA, 80 bp, synthetic construct
  misc_feature 1..80: note = Synthetic: >NC_009942.1-cand-4330-4409
  source 1..80: mol_type = other DNA
gtttgctgctttcgtgatttctgggaaatcaacagatatgtggattgagagaacggcggacatttcctgggaaagtgatg

SEQ ID NO: 11967 - DNA, 80 bp, synthetic construct
  misc_feature 1..80: note = Synthetic: >NC_009942.1-cand-4410-4489
  source 1..80: mol_type = other DNA
cagaaattacaggctcgagcgaaagagttgatgtgcggcttgatgatgatggaaacttccagctcatgaatgatccagga

SEQ ID NO: 11968 - DNA, 80 bp, synthetic construct
  misc_feature 1..80: note = Synthetic: >NC_009942.1-cand-4490-4569
  source 1..80: mol_type = other DNA
gcaccttggaagatatggatgctcagaatggtctgtctcgcgattagtgcgtacaccccctgggcaatcttgccctcagt

SEQ ID NO: 11969 - DNA, 80 bp, synthetic construct
  misc_feature 1..80: note = Synthetic: >NC_009942.1-cand-4570-4649
  source 1..80: mol_type = other DNA
agttggattttggataactctccaatacacaaagagaggaggcgtgttgtgggacactccctcaccaaaggagtacaaaa

SEQ ID NO: 11970 - DNA, 80 bp, synthetic construct
  misc_feature 1..80: note = Synthetic: >NC_009942.1-cand-4660-4739
  source 1..80: mol_type = other DNA
gaccaccggcgtctacaggatcatgactcgtgggctgctcggcagttatcaagcaggagcgggcgtgatggttgaaggtg

SEQ ID NO: 11971 - DNA, 80 bp, synthetic construct
  misc_feature 1..80: note = Synthetic: >NC_009942.1-cand-4730-4809
  source 1..80: mol_type = other DNA
gttgaaggtgttttccacaccctttggcatacaacaaaaggagccgctttgatgagcggagagggccgcctggacccata

SEQ ID NO: 11972 - DNA, 80 bp, synthetic construct
  misc_feature 1..80: note = Synthetic: >NC_009942.1-cand-4820-4899
  source 1..80: mol_type = other DNA
gtcaaggaggatcgactttgttacggaggaccctggaaattgcagcacaagtggaacgggcaggatgaggtgcagatgat

SEQ ID NO: 11973 - DNA, 80 bp, synthetic construct
  misc_feature 1..80: note = Synthetic: >NC_009942.1-cand-4860-4939
  source 1..80: mol_type = other DNA
tgcagcacaagtggaacgggcaggatgaggtgcagatgattgtggtggaacctggcaagaacgttaagaacgtccagacg

SEQ ID NO: 11974 - DNA, 80 bp, synthetic construct
  misc_feature 1..80: note = Synthetic: >NC_009942.1-cand-4980-5059
  source 1..80: mol_type = other DNA
ccgtgactttggacttccccactggaacatcaggctcaccaatagtggacaaaaacggtgatgtgattgggctttatggc

SEQ ID NO: 11975 - DNA, 80 bp, synthetic construct
  misc_feature 1..80: note = Synthetic: >NC_014407.1-cand-3800-3879
  source 1..80: mol_type = other DNA
acagcttttaccataataaaagaaacagtacagtgttttttacaagcatttaaaatagctgataccctatgtctgcttcc

SEQ ID NO: 11976 - DNA, 80 bp, synthetic construct
  misc_feature 1..80: note = Synthetic: >NC_014407.1-cand-3880-3959
  source 1..80: mol_type = other DNA
actaataaaaaacaccagggcaccactaccatctacacagttgtaggccccaataaacagagcattaaactcaacaccta

SEQ ID NO: 11977 - DNA, 80 bp, synthetic construct
  misc_feature 1..80: note = Synthetic: >NC_014407.1-cand-3960-4039
  source 1..80: mol_type = other DNA
atttctcataaagcaacatacttttctcataagttgtgtagcacaaaaagcaggtatagcacttgttacctaaagtagca

SEQ ID NO: 11978 - DNA, 80 bp, synthetic construct
  misc_feature 1..80: note = Synthetic: >NC_014407.1-cand-4000-4079
  source 1..80: mol_type = other DNA
gcacaaaaagcaggtatagcacttgttacctaaagtagcatggcttaaaaactcagacaggcattcaggaaagtcttggg

SEQ ID NO: 11979 - DNA, 80 bp, synthetic construct
  misc_feature 1..80: note = Synthetic: >NC_014407.1-cand-4120-4199
  source 1..80: mol_type = other DNA
atatttactatcttggctgcatccctcctcaggattcacagaagcagatgctgcaggttcttcttcatcagatgatgaca

SEQ ID NO: 11980 - DNA, 80 bp, synthetic construct
  misc_feature 1..80: note = Synthetic: >NC_014407.1-cand-4200-4279
  source 1..80: mol_type = other DNA
gctcttctgtacagtaaagatcttcatcccatcccttgttgaagtcctgccaccattggtcccacgcagggcttccatat

SEQ ID NO: 11981 - DNA, 80 bp, synthetic construct
  misc_feature 1..80: note = Synthetic: >NC_014407.1-cand-4290-4369
  source 1..80: mol_type = other DNA
gtctcacctacaaaaagataattagtaaggttgctttgtttactccccttagtcaggcttttaggccttggattacttac

SEQ ID NO: 11982 - DNA, 80 bp, synthetic construct
  misc_feature 1..80: note = Synthetic: >NC_014407.1-cand-4360-4439
  source 1..80: mol_type = other DNA
gattacttacagtagatttagctgtccccaaaggttaagtacatccattggagtttggaaaataatgtggctccaccaca

SEQ ID NO: 11983 - DNA, 80 bp, synthetic construct
  misc_feature 1..80: note = Synthetic: >NC_014407.1-cand-4440-4519
  source 1..80: mol_type = other DNA
taaaggattcctcagatctttctactccaaaccagtctaaatagcagtcaaagcaccagcatttgccccataaaagaggc

SEQ ID NO: 11984 - DNA, 80 bp, synthetic construct
  misc_feature 1..80: note = Synthetic: >NC_014407.1-cand-4520-4599
  source 1..80: mol_type = other DNA
ccccggtggtctttagcatactctttggccttcttcttatgctttctctttaaaatgcaatgaatacaacagcaggctct

SEQ ID NO: 11985 - DNA, 80 bp, synthetic construct
  misc_feature 1..80: note = Synthetic: >NC_014407.1-cand-4600-4679
  source 1..80: mol_type = other DNA
taaaccttgcactacacacaaattgtagttccacaccttttttctgttaaactctggccccaaaaactcccctacagtca

SEQ ID NO: 11986 - DNA, 80 bp, synthetic construct
  misc_feature 1..80: note = Synthetic: >NC_014407.1-cand-4640-4719
  source 1..80: mol_type = other DNA
tttctgttaaactctggccccaaaaactcccctacagtcaattctatatcccaaaaactgacctcatcagagctgtaatg

SEQ ID NO: 11987 - DNA, 80 bp, synthetic construct
  misc_feature 1..80: note = Synthetic: >NC_014407.1-cand-4760-4839
  source 1..80: mol_type = other DNA
tgcagcttgtcttttaagacattcagtctttgcattttctggggatctccacctttatctggatgatactttttgctggc

SEQ ID NO: 11988 - DNA, 80 bp, synthetic construct
  misc_feature 1..80: note = Synthetic: >NC_014407.1-cand-4840-4919
  source 1..80: mol_type = other DNA
taatctaaccttatgctgtatgaggggcaaattcccccaacaggccatgttcaggcctattaattccataagctccttga

SEQ ID NO: 11989 - DNA, 80 bp, synthetic construct
  misc_feature 1..80: note = Synthetic: >NC_015150.1-cand-20-99
  source 1..80: mol_type = other DNA
cttactacctgagaatcaagttaattaagtttcaaataggtggagaacttcttaccttaatgagttttggaaaagcctcc

SEQ ID NO: 11990 - DNA, 80 bp, synthetic construct
  misc_feature 1..80: note = Synthetic: >NC_015150.1-cand-60-139
  source 1..80: mol_type = other DNA
tggagaacttcttaccttaatgagttttggaaaagcctccaaagcctctctctttgttgcaacaagagaaggaggcaagg

SEQ ID NO: 11991 - DNA, 80 bp, synthetic construct
  misc_feature 1..80: note = Synthetic: >NC_019843.3-cand-15990-16069
  source 1..80: mol_type = other DNA
ttggctatagatgcttaccctctcacaaagcatgaagatatagaataccagaatgtattctgggtctacttacagtatat

SEQ ID NO: 11992 - DNA, 80 bp, synthetic construct
  misc_feature 1..80: note = Synthetic: >NC_019843.3-cand-16070-16149
  source 1..80: mol_type = other DNA
agaaaaactgtataaagaccttacaggacacatgcttgacagttattctgtcatgctatgtggtgataattctgctaagt

SEQ ID NO: 11993 - DNA, 80 bp, synthetic construct
  misc_feature 1..80: note = Synthetic: >NC_019843.3-cand-16150-16229
  source 1..80: mol_type = other DNA
tttgggaagaggcattctatagagatctctatagttcgcctaccactttgcaggctgtcggttcatgcgttgtatgccat

SEQ ID NO: 11994 - DNA, 80 bp, synthetic construct
  misc_feature 1..80: note = Synthetic: >NC_019843.3-cand-16230-16309
  source 1..80: mol_type = other DNA
tcacagacttccctacgctgtgggacatgcatccgtagaccatttctctgctgtaaatgctgctatgatcatgttatagc

SEQ ID NO: 11995 - DNA, 80 bp, synthetic construct
  misc_feature 1..80: note = Synthetic: >NC_019843.3-cand-16310-16389
  source 1..80: mol_type = other DNA
aactccacataagatggttttgtctgtttctccttacgtttgtaatgcccctggttgtggcgtttcagacgttactaagc

SEQ ID NO: 11996 - DNA, 80 bp, synthetic construct
  misc_feature 1..80: note = Synthetic: >NC_019843.3-cand-16390-16469
  source 1..80: mol_type = other DNA
tatatttaggtggtatgagctacttttgtgtagatcatagacctgtgtgtagttttccactttgcgctaatggtcttgta

SEQ ID NO: 11997 - DNA, 80 bp, synthetic construct
  misc_feature 1..80: note = Synthetic: >NC_019843.3-cand-16470-16549
  source 1..80: mol_type = other DNA
ttcggcttatacaagaatatgtgcacaggtagtccttctatagttgaatttaataggttggctacctgtgactggactga

SEQ ID NO: 11998 - DNA, 80 bp, synthetic construct
  misc_feature 1..80: note = Synthetic: >NC_019843.3-cand-16550-16629
  source 1..80: mol_type = other DNA
aagtggtgattacacccttgccaatactacaacagaaccactcaaactttttgctgctgagactttacgtgccactgaag

SEQ ID NO: 11999 - DNA, 80 bp, synthetic construct
  misc_feature 1..80: note = Synthetic: >NC_019843.3-cand-16630-16709
  source 1..80: mol_type = other DNA
aggcgtctaagcagtcttatgctattgccaccatcaaagaaattgttggtgagcgccaactattacttgtgtgggaggct

SEQ ID NO: 12000 - DNA, 80 bp, synthetic construct
  misc_feature 1..80: note = Synthetic: >NC_019843.3-cand-16710-16789
  source 1..80: mol_type = other DNA
ggcaagtccaaaccaccactcaatcgtaattatgtttttactggttatcatataaccaaaaatagtaaagtgcagctcgg

SEQ ID NO: 12001 - DNA, 80 bp, synthetic construct
  misc_feature 1..80: note = Synthetic: >NC_019843.3-cand-16790-16869
  source 1..80: mol_type = other DNA
tgagtacattttcgagcgcattgattatagtgatgctgtatcctacaagtctagtacaacgtataaactgactgtaggtg

SEQ ID NO: 12002 - DNA, 80 bp, synthetic construct
  misc_feature 1..80: note = Synthetic: >NC_019843.3-cand-16870-16949
  source 1..80: mol_type = other DNA
acatcttcgtacttacctctcactctgtggctaccttgacggcgcccacaattgtgaatcaagagaggtatgttaaaatt

SEQ ID NO: 12003 - DNA, 80 bp, synthetic construct
  misc_feature 1..80: note = Synthetic: >NC_019843.3-cand-16940-17019
  source 1..80: mol_type = other DNA
tgttaaaattactgggttgtacccaaccattacggtacctgaagagttcgcaagtcatgttgccaacttccaaaaatcag

SEQ ID NO: 12004 - DNA, 80 bp, synthetic construct
  misc_feature 1..80: note = Synthetic: >NC_019843.3-cand-17020-17099
  source 1..80: mol_type = other DNA
gttatagtaaatatgtcactgttcagggaccacctggcactggcaaaagtcattttgctatagggttagcgatttactac

SEQ ID NO: 12005 - DNA, 80 bp, synthetic construct
  misc_feature 1..80: note = Synthetic: >NC_019843.3-cand-17100-17179
  source 1..80: mol_type = other DNA
cctacagcacgtgttgtttatacagcatgttcacacgcagctgttgatgctttgtgtgaaaaagcttttaaatatttgaa

SEQ ID NO: 12006 - DNA, 80 bp, synthetic construct
  misc_feature 1..80: note = Synthetic: >NC_019843.3-cand-17180-17259
  source 1..80: mol_type = other DNA
cattgctaaatgttcccgtatcattcctgcaaaggcacgtgttgagtgctatgacaggtttaaagttaatgagacaaatt

SEQ ID NO: 12007 - DNA, 80 bp, synthetic construct
  misc_feature 1..80: note = Synthetic: >NC_029647.1-cand-880-959
  source 1..80: mol_type = other DNA
tcctgattgcagagctctttgacgtctattgggaaccaccagacgtcacagggttcttaatgccactcctggatgactac

SEQ ID NO: 12008 - DNA, 80 bp, synthetic construct
  misc_feature 1..80: note = Synthetic: >NC_029647.1-cand-1020-1099
  source 1..80: mol_type = other DNA
gggatggtagtgggtttcaccgcagagaaggcaggaaagctgttgtcctccgctgcagcaacactgagggcgacaaggga

SEQ ID NO: 12009 - DNA, 80 bp, synthetic construct
  misc_feature 1..80: note = Synthetic: >NC_029647.1-cand-1040-1119
  source 1..80: mol_type = other DNA
cgcagagaaggcaggaaagctgttgtcctccgctgcagcaacactgagggcgacaagggagcttggcaattatggcctag

SEQ ID NO: 12010 - DNA, 80 bp, synthetic construct
  misc_feature 1..80: note = Synthetic: >NC_029647.1-cand-1120-1199
  source 1..80: mol_type = other DNA
agatcgtgaaactagtgatgaagtggtttttccctaagaaggagagtgacatgaatgcaatggtcagaaacatagaggat

SEQ ID NO: 12011 - DNA, 80 bp, synthetic construct
  misc_feature 1..80: note = Synthetic: >NC_029647.1-cand-1200-1279
  source 1..80: mol_type = other DNA
gctgtactagatctggaagcagttgagagcaaccatatcactcacctactcaaagataaggaaaacatggcagtcttcct

SEQ ID NO: 12012 - DNA, 80 bp, synthetic construct
  misc_feature 1..80: note = Synthetic: >NC_029647.1-cand-1280-1359
  source 1..80: mol_type = other DNA
tcgcaccttggaccttgaggaagaaaaggccaggaaactatccactaaggctgcttcccccaacataattgcatctgtca

SEQ ID NO: 12013 - DNA, 80 bp, synthetic construct
  misc_feature 1..80: note = Synthetic: >NC_029647.1-cand-1360-1439
  source 1..80: mol_type = other DNA
atgccttgctcgcccgcatcgctgccgtcaggtcccttgcgtttaaagcgaaagaggagatgtgcgcccggcagcggcca

SEQ ID NO: 12014 - DNA, 80 bp, synthetic construct
  misc_feature 1..80: note = Synthetic: >NC_029647.1-cand-1440-1519
  source 1..80: mol_type = other DNA
gtggtggttatgctgtcaggtcgaccaggcattggcaagacacactatgccagagagcttgcttctaggatctccaagct

SEQ ID NO: 12015 - DNA, 80 bp, synthetic construct
  misc_feature 1..80: note = Synthetic: >NC_029647.1-cand-1500-1579
  source 1..80: mol_type = other DNA
gcttctaggatctccaagctgctcagttcagatggtcgcgttgggctcgtgccaagaaatggagttgaccattgggactc

SEQ ID NO: 12016 - DNA, 80 bp, synthetic construct
  misc_feature 1..80: note = Synthetic: >NC_029647.1-cand-1600-1679
  source 1..80: mol_type = other DNA
tcgtttgggacgactatggcatgggaaacatcattaaggatgccatgatgcttcaagaattggctgacacctgccccctt

SEQ ID NO: 12017 - DNA, 80 bp, synthetic construct
  misc_feature 1..80: note = Synthetic: >NC_029647.1-cand-1710-1789
  source 1..80: mol_type = other DNA
ggtaaaatgtttgaaagcgatgtcatcgtcttgaccaccaattcgcccaacccaagcccgatggattatgtcaacatgga

SEQ ID NO: 12018 - DNA, 80 bp, synthetic construct
  misc_feature 1..80: note = Synthetic: >NC_029647.1-cand-1770-1849
  source 1..80: mol_type = other DNA
atggattatgtcaacatggaggccgtcgctagaagggtggatttcttggtgtatgctgagtccccggatgttgagaaggc

SEQ ID NO: 12019 - DNA, 80 bp, synthetic construct
  misc_feature 1..80: note = Synthetic: >NC_029647.1-cand-1850-1929
  source 1..80: mol_type = other DNA
aaaaagggactttccaggcgatcccaaagcctggaagcctttcttcaaagatgatcactcccacctcgttctcacattag

SEQ ID NO: 12020 - DNA, 80 bp, synthetic construct
  misc_feature 1..80: note = Synthetic: >NC_029647.1-cand-1930-2009
  source 1..80: mol_type = other DNA
ctccacaaggtgggtttgacaagagtggtaacaccccccacggaaaaggtatgactagaaacatcacaccaaatggacta

SEQ ID NO: 12021 - DNA, 80 bp, synthetic construct
  misc_feature 1..80: note = Synthetic: >NC_029647.1-cand-2010-2089
  source 1..80: mol_type = other DNA
gtcgccagagcggttgcgttggctgtggaacgtaaggatgagttccagctccagggcccagatccaatcacctacaactt

SEQ ID NO: 12022 - DNA, 80 bp, synthetic construct
  misc_feature 1..80: note = Synthetic: >NC_029647.1-cand-2090-2169
  source 1..80: mol_type = other DNA
tgattcctcacaggtggctgcatttcgaaagcttgcagctgacaacaagtacggccttgctgaaactctccgcgtgggca

SEQ ID NO: 12023 - DNA, 80 bp, synthetic construct
  misc_feature 1..80: note = Synthetic: >NC_030791.1-cand-1530-1609
  source 1..80: mol_type = other DNA
ttgtcagcctgctcaatccagggcccagtcagcgcctgcagctgatcaacaccaatgggtcatggcacatcaaccggacc

SEQ ID NO: 12024 - DNA, 80 bp, synthetic construct
  misc_feature 1..80: note = Synthetic: >NC_030791.1-cand-1610-1689
  source 1..80: mol_type = other DNA
gctttgaactgcaatgactctttgcagacagggttcatagcggccctcttctacacacataggttcaattctagtggctg

SEQ ID NO: 12025 - DNA, 80 bp, synthetic construct
  misc_feature 1..80: note = Synthetic: >NC_030791.1-cand-1650-1729
  source 1..80: mol_type = other DNA
cggccctcttctacacacataggttcaattctagtggctgtcccgagaggatggcttcttgtaaacctctcagtgacttt

SEQ ID NO: 12026 - DNA, 80 bp, synthetic construct
  misc_feature 1..80: note = Synthetic: >NC_030791.1-cand-1770-1849
  source 1..80: mol_type = other DNA
gaccttcggaccagcgaccctattgctggcactacgcgccatcgccgtgtggtattgtgccggctaaggatgtttgcggt

SEQ ID NO: 12027 - DNA, 80 bp, synthetic construct
  misc_feature 1..80: note = Synthetic: >NC_030791.1-cand-1820-1899
  source 1..80: mol_type = other DNA
ggtattgtgccggctaaggatgtttgcggtccggtctactgctttacaccaagcccggttgtggtgggcaccacggatcg

SEQ ID NO: 12028 - DNA, 80 bp, synthetic construct
  misc_feature 1..80: note = Synthetic: >NC_030791.1-cand-1930-2009
  source 1..80: mol_type = other DNA
aaatgagtctgatgtcttcytgctcaacagcacaaggccgccgcaaggcagttggtttgggtgctcatggatgaacacaa

SEQ ID NO: 12029 - DNA, 80 bp, synthetic construct
  misc_feature 1..80: note = Synthetic: >NC_030791.1-cand-2020-2099
  source 1..80: mol_type = other DNA
gaagacctgcggaggtcctccgtgcaagatacgtccccagggtgcccagagtaacacctctctcacttgtcccacagact

SEQ ID NO: 12030 - DNA, 80 bp, synthetic construct
  misc_feature 1..80: note = Synthetic: >NC_030791.1-cand-2100-2179
  source 1..80: mol_type = other DNA
gcttcaggaaacatccgcgtgccacatactccgcttgcggatctggtccgtggttgacacctagatgcatggtccattac

SEQ ID NO: 12031 - DNA, 80 bp, synthetic construct
  misc_feature 1..80: note = Synthetic: >NC_030791.1-cand-2160-2239
  source 1..80: mol_type = other DNA
ctagatgcatggtccattacccctatagactgtggcactacccgtgtacagtcaacttcaccatacacaaagtcaggtta

SEQ ID NO: 12032 - DNA, 80 bp, synthetic construct
  misc_feature 1..80: note = Synthetic: >NC_030791.1-cand-2290-2369
  source 1..80: mol_type = other DNA
gggtgagcgatgcgacctggaggaccgagacagggtggacatgtcccccctgctccattccactacggagctcgcaatac

SEQ ID NO: 12033 - DNA, 80 bp, synthetic construct
  misc_feature 1..80: note = Synthetic: >NC_030791.1-cand-2340-2419
  source 1..80: mol_type = other DNA
tgctccattccactacggagctcgcaatacttccgtgttcctttgtgccgcttccggccttatctacgggactgatccac

SEQ ID NO: 12034 - DNA, 80 bp, synthetic construct
  misc_feature 1..80: note = Synthetic: >NC_030791.1-cand-2420-2499
  source 1..80: mol_type = other DNA
ctgcaccaaaacatcgttgacgcccagtacctttatggtctttctcccgctataataagctgggccatcagatgggagtg

SEQ ID NO: 12035 - DNA, 80 bp, synthetic construct
  misc_feature 1..80: note = Synthetic: >NC_030791.1-cand-2500-2579
  source 1..80: mol_type = other DNA
ggtagtcctcgttttcctactcctggcggacgcgcggatctgcgcctgcctttggatgatgatgcttatggcccaggctg

SEQ ID NO: 12036 - DNA, 80 bp, synthetic construct
  misc_feature 1..80: note = Synthetic: >NC_030791.1-cand-2580-2659
  source 1..80: mol_type = other DNA
aagccgctctggagaacttgatccacctcaacgcggccagccttgcgggaacccatggtatctggtggctccttttagtc

SEQ ID NO: 12037 - DNA, 80 bp, synthetic construct
  misc_feature 1..80: note = Synthetic: >NC_030791.1-cand-2660-2739
  source 1..80: mol_type = other DNA
ttttgtgcctcttggcatctacgaggcagggttgtccctctggtgacgtatgggatatgcgggatgtggcccttcttcct

SEQ ID NO: 12038 - DNA, 80 bp, synthetic construct
  misc_feature 1..80: note = Synthetic: >NC_030791.1-cand-2740-2819
  source 1..80: mol_type = other DNA
catgttgctgagcctccccccacgagcgtatgctctggacagggaagtgagcgcagcgttgggaacgggcatgctcgcca

SEQ ID NO: 12039 - DNA, 80 bp, synthetic construct
  misc_feature 1..80: note = Synthetic: >NC_030791.1-cand-6730-6809
  source 1..80: mol_type = other DNA
gcggatacacagattcgcccctgaacccaagcccatgatccgggaagaagccgctttcgtggtgggtctgcactcatatg

SEQ ID NO: 12040 - DNA, 80 bp, synthetic construct
  misc_feature 1..80: note = Synthetic: >NC_030791.1-cand-6820-6899
  source 1..80: mol_type = other DNA
tcagctcccttgtgaaccggagccggacgtccaaactgtctcgcagctcctaaccgacccctcacacatcaccgcagaaa

SEQ ID NO: 12041 - DNA, 80 bp, synthetic construct
  misc_feature 1..80: note = Synthetic: >NC_030791.1-cand-6870-6949
  source 1..80: mol_type = other DNA
taaccgacccctcacacatcaccgcagaaaccgcggctagaaggctcaggagaggttcccccccatccaacgccagttct

SEQ ID NO: 12042 - DNA, 80 bp, synthetic construct
  misc_feature 1..80: note = Synthetic: >NC_030791.1-cand-6950-7029
  source 1..80: mol_type = other DNA
tctgctagtcaactctcagctccatctctaaaagccacccacacaactctgccacaacatcctgacgcagaactgataga

SEQ ID NO: 12043 - DNA, 80 bp, synthetic construct
  misc_feature 1..80: note = Synthetic: >NC_030791.1-cand-7030-7109
  source 1..80: mol_type = other DNA
ggccaacctcatgtgggaacataaggttggtgccatcagaaggatggagacagacaccaaagtcatcatacttgactcct

SEQ ID NO: 12044 - DNA, 80 bp, synthetic construct
  misc_feature 1..80: note = Synthetic: >NC_030791.1-cand-7110-7189
  source 1..80: mol_type = other DNA
ttgattcagcttcttccgtygaggatgacatggaaccgtccaccgccgcggagtgtctgcgtacgcgtaaggtcttccca

SEQ ID NO: 12045 - DNA, 80 bp, synthetic construct
  misc_feature 1..80: note = Synthetic: >NC_030791.1-cand-7190-7269
  source 1..80: mol_type = other DNA
ccggccatgcccatatgggcgaggccagactacaatcctcctgttgtggagaattggaaggaccccgagtacgcacctcc

SEQ ID NO: 12046 - DNA, 80 bp, synthetic construct
  misc_feature 1..80: note = Synthetic: >NC_030791.1-cand-7270-7349
  source 1..80: mol_type = other DNA
ccaggtgtctgggtgcgctctaccacctgcgcagacccctcctgttccaccacccaggcggaagcgggcggttatccaac

SEQ ID NO: 12047 - DNA, 80 bp, synthetic construct
  misc_feature 1..80: note = Synthetic: >NC_030791.1-cand-7350-7429
  source 1..80: mol_type = other DNA
tcacagagtccgcggtttccacggcactggcggaactcgctgagaggtccttcccaaaggaggaggcaccccccagcgac

SEQ ID NO: 12048 - DNA, 80 bp, synthetic construct
  misc_feature 1..80: note = Synthetic: >NC_030791.1-cand-7430-7509
  source 1..80: mol_type = other DNA
tccgccattagtctggattcaccggcggcaaatgaccctccatctgattgtgaccaaggcagtgagatctctttctcatc

SEQ ID NO: 12049 - DNA, 80 bp, synthetic construct
  misc_feature 1..80: note = Synthetic: >NC_030791.1-cand-7530-7609
  source 1..80: mol_type = other DNA
agccgggtgatccagacttgtctgatggctcttggtcaacagtcagcaccagatctgacgtgatttgctgttccatgtcc

SEQ ID NO: 12050 - DNA, 80 bp, synthetic construct
  misc_feature 1..80: note = Synthetic: >NC_030791.1-cand-7590-7669
  source 1..80: mol_type = other DNA
tgatttgctgttccatgtcctactcatggacgggagccttagtgacgccctccggtccggaggaggaaaggctcccaata

SEQ ID NO: 12051 - DNA, 80 bp, synthetic construct
  misc_feature 1..80: note = Synthetic: >NC_030791.1-cand-7670-7749
  source 1..80: mol_type = other DNA
aatgccctyagtaacaccatgcttcggcattataacatggtttacagcacaacatcacgctcagcttcacaaagagcaaa

SEQ ID NO: 12052 - DNA, 80 bp, synthetic construct
  misc_feature 1..80: note = Synthetic: >NC_030791.1-cand-7750-7829
  source 1..80: mol_type = other DNA
aaaagtgacttttgacagattgcaagtcctagacgaccactacaaaagggcgctcgccgacgtgaaagcggatgcttcca

SEQ ID NO: 12053 - DNA, 80 bp, synthetic construct
  misc_feature 1..80: note = Synthetic: >NC_030791.1-cand-7830-7909
  source 1..80: mol_type = other DNA
cggttaaggcgcagttgctctcagtagaggaagctgctgccctcacccctgcccactcagccagatctaagtttgggtac

SEQ ID NO: 12054 - DNA, 80 bp, synthetic construct
  misc_feature 1..80: note = Synthetic: >NC_030791.1-cand-7920-7999
  source 1..80: mol_type = other DNA
aagtcagatctcttgcgcccaaggcaatgtctcacatcaaagaggtctggaaggacttgctacaggacatgaccaccccg

SEQ ID NO: 12055 - DNA, 80 bp, synthetic construct
  misc_feature 1..80: note = Synthetic: >NC_039897.1-cand-4100-4179
  source 1..80: mol_type = other DNA
gcccgaagcgggcctgctggaagctgcagttgaaacggtcaccaatgcaattgaacaggtcatggacacaccggtggcat

SEQ ID NO: 12056 - DNA, 80 bp, synthetic construct
  misc_feature 1..80: note = Synthetic: >NC_039897.1-cand-4180-4259
  source 1..80: mol_type = other DNA
ggagctacagtgatgcttgcatgtccctagataaaacaaccagttctggccacccccatcataagaagaaaaatgatgac

SEQ ID NO: 12057 - DNA, 80 bp, synthetic construct
  misc_feature 1..80: note = Synthetic: >NC_039897.1-cand-4260-4339
  source 1..80: mol_type = other DNA
tggaatgggaactcatttgtgagggaattgggcgaccaggcggcgcatgctaacagcatgtatgaacttggtaagtccat

SEQ ID NO: 12058 - DNA, 80 bp, synthetic construct
  misc_feature 1..80: note = Synthetic: >NC_039897.1-cand-4340-4419
  source 1..80: mol_type = other DNA
gaaacctgtgtatacagcagctctgaaggatgagctagtcaagccagacaaggtgtacacaaaaatcaaaaagagactgc

SEQ ID NO: 12059 - DNA, 80 bp, synthetic construct
  misc_feature 1..80: note = Synthetic: >NC_039897.1-cand-4430-4509
  source 1..80: mol_type = other DNA
agaccttggcaccgtcattcgcgctgccagagcatttgggccgttctgtgaggccataaaaccccatgtaatcaaattgc

SEQ ID NO: 12060 - DNA, 80 bp, synthetic construct
  misc_feature 1..80: note = Synthetic: >NC_039897.1-cand-4500-4579
  source 1..80: mol_type = other DNA
atcaaattgcctatcaaggtgggtatgaatgccatagaggatggtcctttgatttatgcagagcactccaaatataagtt

SEQ ID NO: 12061 - DNA, 80 bp, synthetic construct
  misc_feature 1..80: note = Synthetic: >NC_039897.1-cand-4580-4659
  source 1..80: mol_type = other DNA
tcattatgacgctgactatacagcttgggactcaacacaaaacagggaggtcatgatggaatccttcaacattatgtgta

SEQ ID NO: 12062 - DNA, 80 bp, synthetic construct
  misc_feature 1..80: note = Synthetic: >NC_039897.1-cand-4670-4749
  source 1..80: mol_type = other DNA
caacccctccttggccgcagtggtggcacaggatttactctccccatctgaaatggacgttggcgactacgtgatcagtg

SEQ ID NO: 12063 - DNA, 80 bp, synthetic construct
  misc_feature 1..80: note = Synthetic: >NC_039897.1-cand-4750-4829
  source 1..80: mol_type = other DNA
tcaaagatggtctgccatctggctttccatgcacttcacaggtgaatagcattaaccactggatcctaaccctatgtgca

SEQ ID NO: 12064 - DNA, 80 bp, synthetic construct
  misc_feature 1..80: note = Synthetic: >NC_039897.1-cand-4830-4909
  source 1..80: mol_type = other DNA
ctgtcagaagtcactggcttgtccccagatgtgatacaatcacaatcctacttctcattctatggtgatgatgaaatagt

SEQ ID NO: 12065 - DNA, 80 bp, synthetic construct
  misc_feature 1..80: note = Synthetic: >NC_039897.1-cand-4910-4989
  source 1..80: mol_type = other DNA
ctcaacagatatagaatttgacccaataaggttgacacaaatactaaaggagtatggtctgaagcctacaagacctgaca

SEQ ID NO: 12066 - DNA, 80 bp, synthetic construct
  misc_feature 1..80: note = Synthetic: >NC_039897.1-cand-4990-5069
  source 1..80: mol_type = other DNA
aaactgatggcccaattattgtcagacaacaggtcgatggtctggttttcctccggcgtaccatctctaaggatgccatt

SEQ ID NO: 12067 - DNA, 80 bp, synthetic construct
  misc_feature 1..80: note = Synthetic: >NC_039897.1-cand-5080-5159
  source 1..80: mol_type = other DNA
ggcgactcgaccgcaattctattgaaagacagctttggtggactcgcggaccaaaccacgaggacccatttgagacactg

SEQ ID NO: 12068 - DNA, 80 bp, synthetic construct
  misc_feature 1..80: note = Synthetic: >NC_039897.1-cand-5150-5229
  source 1..80: mol_type = other DNA
tgagacactggtcccacattcacagagaaagatccaattaatatccctattgggtgaagcagcactccatggtgaaaagt

SEQ ID NO: 12069 - DNA, 80 bp, synthetic construct
  misc_feature 1..80: note = Synthetic: >NC_039897.1-cand-5190-5269
  source 1..80: mol_type = other DNA
atatccctattgggtgaagcagcactccatggtgaaaagttctacaggaagatagctggtagggtcattcaagaagtcaa

SEQ ID NO: 12070 - DNA, 80 bp, synthetic construct
  misc_feature 1..80: note = Synthetic: >NC_039897.1-cand-5310-5389
  source 1..80: mol_type = other DNA
atgttccgctggatgcgattccatgatctaagtctgtggacaggagaccgcgatctcctgcccgattatgtaaatgatga

SEQ ID NO: 12071 - DNA, 80 bp, synthetic construct
  misc_feature 1..80: note = Synthetic: >NC_040876.1-cand-6700-6779
  source 1..80: mol_type = other DNA
cgtagaaggaatcaataatggctagtgcttttcttgcaggtcttgttggcgacgtcataacaaatggcgttggatctcta

SEQ ID NO: 12072 - DNA, 80 bp, synthetic construct
  misc_feature 1..80: note = Synthetic: >NC_040876.1-cand-6760-6839
  source 1..80: mol_type = other DNA
caaatggcgttggatctctaataaatgctggagctaatgcagttaatcagaaagttgaatatgatttcaataaacagctt

SEQ ID NO: 12073 - DNA, 80 bp, synthetic construct
  misc_feature 1..80: note = Synthetic: >NC_040876.1-cand-6840-6919
  source 1..80: mol_type = other DNA
caaatggcatcgtttaaacatgataaagagatgttgcaatcacaagtgttggcaaccaaacagttgcagcaggagatgat

SEQ ID NO: 12074 - DNA, 80 bp, synthetic construct
  misc_feature 1..80: note = Synthetic: >NC_040876.1-cand-6980-7059
  source 1..80: mol_type = other DNA
ggccgtcaatgccccaatgacaaagattttggactggaatggcaccagatattgggcacctaacagcatgaaaaccacaa

SEQ ID NO: 12075 - DNA, 80 bp, synthetic construct
  misc_feature 1..80: note = Synthetic: >NC_040876.1-cand-7000-7079
  source 1..80: mol_type = other DNA
caaagattttggactggaatggcaccagatattgggcacctaacagcatgaaaaccacaagttattcaggacagttttct

SEQ ID NO: 12076 - DNA, 80 bp, synthetic construct
  misc_feature 1..80: note = Synthetic: >NC_040876.1-cand-7090-7169
  source 1..80: mol_type = other DNA
ttcacaagtcccctgctccttctcacactgctttgccaaagagtagattgcaaaacgattctgctagtgtatatagcttt

SEQ ID NO: 12077 - DNA, 80 bp, synthetic construct
  misc_feature 1..80: note = Synthetic: >NC_040876.1-cand-7170-7249
  source 1..80: mol_type = other DNA
ccttcctctgcttcctcacaatcaacccattcaacagtactgtcagcaggaaccgggtcttctaggtccacctccacatc

SEQ ID NO: 12078 - DNA, 80 bp, synthetic construct
  misc_feature 1..80: note = Synthetic: >NC_040876.1-cand-7300-7379
  source 1..80: mol_type = other DNA
acgagaggctcagcccgtttatggatggtgctctccaaactgcctttgtcacacctccatcgagcaaagcttcttcaaat

SEQ ID NO: 12079 - DNA, 80 bp, synthetic construct
  misc_feature 1..80: note = Synthetic: >NC_040876.1-cand-7340-7419
  source 1..80: mol_type = other DNA
tgcctttgtcacacctccatcgagcaaagcttcttcaaatggtacggtctcaaccgttcccaaagctgttttggactcct

SEQ ID NO: 12080 - DNA, 80 bp, synthetic construct
  misc_feature 1..80: note = Synthetic: >NC_040876.1-cand-7390-7469
  source 1..80: mol_type = other DNA
caaccgttcccaaagctgttttggactcctggacccctatgttcaacacacataggcagcctctcttcgcccatctacgt

SEQ ID NO: 12081 - DNA, 80 bp, synthetic construct
  misc_feature 1..80: note = Synthetic: >NC_044045.1-cand-0-79
  source 1..80: mol_type = other DNA
atgaggatggcgtcgagtgacgtcgctactgcctttggcagccagaaagctaccaatgacagctataacacaccccctcc

SEQ ID NO: 12082 - DNA, 80 bp, synthetic construct
  misc_feature 1..80: note = Synthetic: >NC_044045.1-cand-60-139
  source 1..80: mol_type = other DNA
agctataacacaccccctcccaacaaggaggaggctagtgtgctcaccaacgttaaagttggttttaagaagatcctcgg

SEQ ID NO: 12083 - DNA, 80 bp, synthetic construct
  misc_feature 1..80: note = Synthetic: >NC_044045.1-cand-160-239
  source 1..80: mol_type = other DNA
gacagcatggcaacacacaaaaaccgtcgaccgttgagatcgatggtgtggccatgcgtgtgccctctccccccccaaac

SEQ ID NO: 12084 - DNA, 80 bp, synthetic construct
  misc_feature 1..80: note = Synthetic: >NC_044045.1-cand-240-319
  source 1..80: mol_type = other DNA
ggcgaggacgcggttcactttgtgaaggaaacggagaccatcaagggattgccagatttgtccaccgtggaaaacgaatc

SEQ ID NO: 12085 - DNA, 80 bp, synthetic construct
  misc_feature 1..80: note = Synthetic: >NC_044045.1-cand-320-399
  source 1..80: mol_type = other DNA
tgaacactccccatacacagtcccaccactgagtgagagggaacacaggccagcaacagaacccctgcctggcactatac

SEQ ID NO: 12086 - DNA, 80 bp, synthetic construct
  misc_feature 1..80: note = Synthetic: >NC_044045.1-cand-400-479
  source 1..80: mol_type = other DNA
ttgaaatgtgggatggtgagttctaccactactccatatatgtggacaatggcaaggcccttggtgtgcacaaaccacca

SEQ ID NO: 12087 - DNA, 80 bp, synthetic construct
  misc_feature 1..80: note = Synthetic: >NC_044046.1-cand-1930-2009
  source 1..80: mol_type = other DNA
tcaagctccaactggcaccccaaggtgggtttgataaaaatggcaacacaccccatggtaagggcttaatgaagacttta

SEQ ID NO: 12088 - DNA, 80 bp, synthetic construct
  misc_feature 1..80: note = Synthetic: >NC_044046.1-cand-2010-2089
  source 1..80: mol_type = other DNA
accctgagctcgctcgttgcaagggcctctggcttactacatgagaggctagacgagtttgagctgcagggcccatcaat

SEQ ID NO: 12089 - DNA, 80 bp, synthetic construct
  misc_feature 1..80: note = Synthetic: >NC_044046.1-cand-2090-2169
  source 1..80: mol_type = other DNA
cacaaccttcaacttcgatagaaacaaagtcttggctttcagacaacttgccgcggaaaacaaatatgggttggtggaaa

SEQ ID NO: 12090 - DNA, 80 bp, synthetic construct
  misc_feature 1..80: note = Synthetic: >NC_044046.1-cand-2170-2249
  source 1..80: mol_type = other DNA
ccatgagagttggcaaccatctaaagggtgtgaaaacgatggaggagttaaagcaagccatcaagggcgtcaccattaaa

SEQ ID NO: 12091 - DNA, 80 bp, synthetic construct
  misc_feature 1..80: note = Synthetic: >NC_044046.1-cand-2250-2329
  source 1..80: mol_type = other DNA
aggtgtcaaatcatatatggtggttccacatacaccttggagtctgatggtcagggaagagtcttagtggacaaagtcat

SEQ ID NO: 12092 - DNA, 80 bp, synthetic construct
  misc_feature 1..80: note = Synthetic: >NC_044046.1-cand-2330-2409
  source 1..80: mol_type = other DNA
cagcaccactgtccaaactaacaacgagttggctggcgtcctatcacacctcagaaatgcaaggattagatattatgtaa

SEQ ID NO: 12093 - DNA, 80 bp, synthetic construct
  misc_feature 1..80: note = Synthetic: >NC_044046.1-cand-2370-2449
  source 1..80: mol_type = other DNA
ctatcacacctcagaaatgcaaggattagatattatgtaaaatgtgtgcaggaaactctgtactcgatcctgcaaatcgc

SEQ ID NO: 12094 - DNA, 80 bp, synthetic construct
  misc_feature 1..80: note = Synthetic: >NC_044046.1-cand-2470-2549
  source 1..80: mol_type = other DNA
ctcgcattgccaagcgaatgaacatcagcaatctctggtcaaaaccactcagggaggaggatgtgcaagaggaggtcaga

SEQ ID NO: 12095 - DNA, 80 bp, synthetic construct
  misc_feature 1..80: note = Synthetic: >NC_044046.1-cand-2550-2629
  source 1..80: mol_type = other DNA
aaaccagaacccaaatgcgatgaggaattcatcgttgtgtccgaagaaataaaaacagagggcaagaagggcaaaaacaa

SEQ ID NO: 12096 - DNA, 80 bp, synthetic construct
  misc_feature 1..80: note = Synthetic: >NC_044046.1-cand-2630-2709
  source 1..80: mol_type = other DNA
gactgggcgtggcaagaaacacaccgccttctccagtaagggcctcagcgatgaggagtacgaggagtacaagcggatca

SEQ ID NO: 12097 - DNA, 80 bp, synthetic construct
  misc_feature 1..80: note = Synthetic: >NC_044046.1-cand-2710-2789
  source 1..80: mol_type = other DNA
gggaagagagaaacggaaaatactcaatagaagagtaccttcaggacagagacaaatactatgaggaactggctattgcc

SEQ ID NO: 12098 - DNA, 80 bp, synthetic construct
  misc_feature 1..80: note = Synthetic: >NC_044046.1-cand-2790-2869
  source 1..80: mol_type = other DNA
agggccactgaggaagacttctgtgaagaagaggaaatcaaaatccgacagagaattttccgtccaaccaggaaacagag

SEQ ID NO: 12099 - DNA, 80 bp, synthetic construct
  misc_feature 1..80: note = Synthetic: >NC_044046.1-cand-2870-2949
  source 1..80: mol_type = other DNA
gaaagaggaaagggcaaaccttggccttgtgaccggctctgaaatcaggaaaagaaacccagatgattttaaaccaaaag

SEQ ID NO: 12100 - DNA, 80 bp, synthetic construct
  misc_feature 1..80: note = Synthetic: >NC_044046.1-cand-2930-3009
  source 1..80: mol_type = other DNA
agatgattttaaaccaaaaggagacctttgggcggatgacaccaggagtgtgaactataatgaaaagatagactttgaag

SEQ ID NO: 12101 - DNA, 80 bp, synthetic construct
  misc_feature 1..80: note = Synthetic: >NC_044046.1-cand-2970-3049
  source 1..80: mol_type = other DNA
accaggagtgtgaactataatgaaaagatagactttgaagcccccccaagcatttggtccagaatagtcaattttgggtc

SEQ ID NO: 12102 - DNA, 80 bp, synthetic construct
  misc_feature 1..80: note = Synthetic: >NC_044046.1-cand-3090-3169
  source 1..80: mol_type = other DNA
tcaacccatgtgataccaccaggcataacagaggctttcggtgtacccatcaagcaaatccagatacataagtctggaga

SEQ ID NO: 12103 - DNA, 80 bp, synthetic construct
  misc_feature 1..80: note = Synthetic: >NC_044853.1-cand-840-919
  source 1..80: mol_type = other DNA
acacctggctagaacggcggcttatcacatctggccgcttcaaccaccccacccaagattggtctaaggagactccagac

SEQ ID NO: 12104 - DNA, 80 bp, synthetic construct
  misc_feature 1..80: note = Synthetic: >NC_044853.1-cand-890-969
  source 1..80: mol_type = other DNA
acccaagattggtctaaggagactccagacttccagcaagatagcaaactggagatagtcagggacgccgttcttgccgc

SEQ ID NO: 12105 - DNA, 80 bp, synthetic construct
  misc_feature 1..80: note = Synthetic: >NC_044853.1-cand-970-1049
  source 1..80: mol_type = other DNA
cattaacgggcttgtctcaaaaccattcaagaatctcctcaacaagctgaagccccttaacgtccttaacttgttgtcaa

SEQ ID NO: 12106 - DNA, 80 bp, synthetic construct
  misc_feature 1..80: note = Synthetic: >NC_044853.1-cand-1110-1189
  source 1..80: mol_type = other DNA
gggtgttttgggatccccctgatgtatcgggtttcatcgcttcacttttacctgatatgcacttgcagggtcctgaagac

SEQ ID NO: 12107 - DNA, 80 bp, synthetic construct
  misc_feature 1..80: note = Synthetic: >NC_044853.1-cand-1130-1209
  source 1..80: mol_type = other DNA
gatgtatcgggtttcatcgcttcacttttacctgatatgcacttgcagggtcctgaagacctggctagggatctgatacc

SEQ ID NO: 12108 - DNA, 80 bp, synthetic construct
  misc_feature 1..80: note = Synthetic: >NC_044853.1-cand-1230-1309
  source 1..80: mol_type = other DNA
ggcttgcaattgggttcaccaaagacaaagtcaccaaggtcatgaagagtgcagtggagggcctccgtgcagccacccaa

SEQ ID NO: 12109 - DNA, 80 bp, synthetic construct
  misc_feature 1..80: note = Synthetic: >NC_044853.1-cand-1300-1379
  source 1..80: mol_type = other DNA
agccacccaacttggtcagtatggcttggagatctttgcagtcatcaagaaatacttctttggtggagaccaaacagaaa

SEQ ID NO: 12110 - DNA, 80 bp, synthetic construct
  misc_feature 1..80: note = Synthetic: >NC_044853.1-cand-1380-1459
  source 1..80: mol_type = other DNA
agacactcaaggatatagaggccgctgtcatagacatggaggttatctcgacgactgccataacccaactggttagggat

SEQ ID NO: 12111 - DNA, 80 bp, synthetic construct
  misc_feature 1..80: note = Synthetic: >NC_044853.1-cand-1460-1539
  source 1..80: mol_type = other DNA
aagcagtctgcacgcacatacatggcaatcctcgatgctgaggaagagaaagctagaaggttatcagtaaagcatgctga

SEQ ID NO: 12112 - DNA, 80 bp, synthetic construct
  misc_feature 1..80: note = Synthetic: >NC_044853.1-cand-1540-1619
  source 1..80: mol_type = other DNA
cccccacgttgtatcaaccacaaacgccctcatctcacggatatcattggctcggtccgcgctagctaaggcgcaggcag

SEQ ID NO: 12113 - DNA, 80 bp, synthetic construct
  misc_feature 1..80: note = Synthetic: >NC_044853.1-cand-1620-1699
  source 1..80: mol_type = other DNA
aaatgactaacagggtgaaacctgtcgtcataatgatgtgtggcccaccaggaattggcaagaccaaggcagcagaatat

SEQ ID NO: 12114 - DNA, 80 bp, synthetic construct
  misc_feature 1..80: note = Synthetic: >NC_044853.1-cand-1700-1779
  source 1..80: mol_type = other DNA
ttggccaagcggctagctaatgaaataagaccgggtggcaaggtcgggctggtcccacgtgaggctgtggaccactggga

SEQ ID NO: 12115 - DNA, 80 bp, synthetic construct
  misc_feature 1..80: note = Synthetic: >NC_044853.1-cand-1780-1859
  source 1..80: mol_type = other DNA
cggataccatggcgaggaagtgatgctgtgggatgattatggtatgtcaaaaattgcggaggactgcaacaaactacagg

SEQ ID NO: 12116 - DNA, 80 bp, synthetic construct
  misc_feature 1..80: note = Synthetic: >NC_044853.1-cand-1860-1939
  source 1..80: mol_type = other DNA
ctattgcagacacagcccccttgaccctaaattgtgacagaattgaaaagaagggactccagtttgtgtctgatgccata

SEQ ID NO: 12117 - DNA, 80 bp, synthetic construct
  misc_feature 1..80: note = Synthetic: >NC_044853.1-cand-1940-2019
  source 1..80: mol_type = other DNA
atcataactacaaatgcccccggccctgcgcctgttgactttgtgaaccttggccccgtttgtcggcgtgtggatttcct

SEQ ID NO: 12118 - DNA, 80 bp, synthetic construct
  misc_feature 1..80: note = Synthetic: >NC_044853.1-cand-1990-2069
  source 1..80: mol_type = other DNA
tggccccgtttgtcggcgtgtggatttcctcgtctactgcacagctccagaggtcgagcaggtccggcgcaccagccctg

SEQ ID NO: 12119 - DNA, 80 bp, synthetic construct
  misc_feature 1..80: note = Synthetic: >EVD70-cand-4900-4979
  source 1..80: mol_type = other DNA
aaaagtgttgtccactgatttgtggaaaggccattcagtttagagacaagagaacaaacgtcaggtactcagtagatatg

SEQ ID NO: 12120 - DNA, 80 bp, synthetic construct
  misc_feature 1..80: note = Synthetic: >NC_001611.1-cand-90850-90929
  source 1..80: mol_type = other DNA
aaaagttgacagaaccttgtgtcattggaagaccgtgtttctccaataaaattaataatagaaaccatgctacaatcatt

SEQ ID NO: 12121 - DNA, 80 bp, synthetic construct
  misc_feature 1..80: note = Synthetic: >NC_001611.1-cand-106850-106929
  source 1..80: mol_type = other DNA
aaaagttttccatctatgtagaatccatcggttgttaacaccattcccgcgtcagattgaataggagtttgaatagtttg

SEQ ID NO: 12122 - DNA, 80 bp, synthetic construct
  misc_feature 1..80: note = Synthetic: >NC_003310.1-cand-75850-75929
  source 1..80: mol_type = other DNA
aaaagttttctttcaaaatagctatctcgtctctcaacaaactacgaggattcaaaaagagagtcaatgtttttgaaact

SEQ ID NO: 12123 - DNA, 80 bp, synthetic construct
  misc_feature 1..80: note = Synthetic: >NC_003310.1-cand-118140-118219
  source 1..80: mol_type = other DNA
gtagacgtctattcgcccatagatctaaggatgatgagagaaaactagcactacgattctttttacaaagactttatttt

SEQ ID NO: 12124 - DNA, 80 bp, synthetic construct
  misc_feature 1..80: note = Synthetic: >NC_001611.1-cand-62930-63009
  source 1..80: mol_type = other DNA
aaaataaatcactgacgatattagatgataatttatacaaagtatacaatggaatatttgtggatacaatgagtatttat

SEQ ID NO: 12125 - DNA, 80 bp, synthetic construct
  misc_feature 1..80: note = Synthetic: >NC_003310.1-cand-72110-72189
  source 1..80: mol_type = other DNA
aaaataatcagtacgttcttcatttatgggtatcaaaaacttaaaatcgttactgttggaaaataaatcactgacgatat

SEQ ID NO: 12126 - DNA, 80 bp, synthetic construct
  misc_feature 1..80: note = Synthetic: >NC_001611.1-cand-81260-81339
  source 1..80: mol_type = other DNA
gcgctgactatgcacgaaatagctatatggttcgctcaagaatatagtcttgttaaacgtggaaacgataactgtatttt

SEQ ID NO: 12127 - DNA, 80 bp, synthetic construct
  misc_feature 1..80: note = Synthetic: >NC_001611.1-cand-124090-124169
  source 1..80: mol_type = other DNA
aaaatagacaatggaattcatttgatgtatccagagaggccaattgtcattagtaaggctttagaaacttcaaagattgc

SEQ ID NO: 12128 - DNA, 80 bp, synthetic construct
  misc_feature 1..80: note = Synthetic: >NC_001611.1-cand-57190-57269
  source 1..80: mol_type = other DNA
tcggatccataagcaaactgagagactaagttcttaatacttcgattgctcatccaggctcctctctcaggctctatttt

SEQ ID NO: 12129 - DNA, 80 bp, synthetic construct
  misc_feature 1..80: note = Synthetic: >NC_001611.1-cand-119200-119279
  source 1..80: mol_type = other DNA
tatctgattattatgatgaggtaaaaaataaaccgtttaatattgatccagggtattatattttcttaccggtatatttt

SEQ ID NO: 12130 - DNA, 80 bp, synthetic construct
  misc_feature 1..80: note = Synthetic: >NC_001611.1-cand-65980-66059
  source 1..80: mol_type = other DNA
taactttaaataatttacaaaaatttaaaatgagtatccgtataaaaatcgataaactgcgccaaattgtggcatatttt

SEQ ID NO: 12131 - DNA, 80 bp, synthetic construct
  misc_feature 1..80: note = Synthetic: >AdVB3-cand-29610-29689
  source 1..80: mol_type = other DNA
aaaatcgctttaagtaattccacagccgctcccaatacaattcctaaatcaacaattggcatcattactgccgtggtagt

SEQ ID NO: 12132 - DNA, 80 bp, synthetic construct
  misc_feature 1..80: note = Synthetic: >NC_003310.1-cand-64400-64479
  source 1..80: mol_type = other DNA
aaaatcgttacggttcgattaaactttaatgattgcatagtgaatatatcattaggatttaactccttgactatcatggc

SEQ ID NO: 12133 - DNA, 80 bp, synthetic construct
  misc_feature 1..80: note = Synthetic: >NC_001611.1-cand-89200-89279
  source 1..80: mol_type = other DNA
aaaatgaagatccaagatttgtagaagcatttaaatgcgacgagttagaaagatatattaagaataatccagaatgtaca

SEQ ID NO: 12134 - DNA, 80 bp, synthetic construct
  misc_feature 1..80: note = Synthetic: >NC_001611.1-cand-117280-117359
  source 1..80: mol_type = other DNA
aaaatgattaaattaaaacgtcctctatacatcactcttcacttggcgtgtggatttggtaagactattaccacgtgtta

SEQ ID NO: 12135 - DNA, 80 bp, synthetic construct
  misc_feature 1..80: note = Synthetic: >NC_001611.1-cand-4830-4909
  source 1..80: mol_type = other DNA
caaatttattagtatcggttacatgaaggactttacgtagagtggtgattccaccatctgtggtacgaatggtttcatct

SEQ ID NO: 12136 - DNA, 80 bp, synthetic construct
  misc_feature 1..80: note = Synthetic: >NC_001430.1-cand-7060-7139
  source 1..80: mol_type = other DNA
agatgaacagtatccctttttgatccacccagttatgccaatgaaggaaatccatgagtcaattagatggacaaaagatc

SEQ ID NO: 12137 - DNA, 80 bp, synthetic construct
  misc_feature 1..80: note = Synthetic: >EVD70-cand-6340-6419
  source 1..80: mol_type = other DNA
agatgaccaaaatgttggacaaatatggtgtggatttgccctttgtcacatttgtcaaagatgaactcagaagcagagag

SEQ ID NO: 12138 - DNA, 80 bp, synthetic construct
  misc_feature 1..80: note = Synthetic: >NC_007367.1-cand-760-839
  source 1..80: mol_type = other DNA
agatgcaacgattcaagtgacccgcttgttgttgccgcgagtatcattgggatcttgcacttgatattgtggattcttga

SEQ ID NO: 12139 - DNA, 80 bp, synthetic construct
  misc_feature 1..80: note = Synthetic: >NC_001611.1-cand-124650-124729
  source 1..80: mol_type = other DNA
gtatatcgcagatgaaacggaacttccatacgacgaaaatggtatcacaccagatgtcattattaattctacatccatct

SEQ ID NO: 12140 - DNA, 80 bp, synthetic construct
  misc_feature 1..80: note = Synthetic: >AdVB3-cand-25970-26049
  source 1..80: mol_type = other DNA
ggaagaagcaaccgccgccaaacagttgtcatcggcggcggagacaagcaagtccccagacagcagcacggctaccatct

SEQ ID NO: 12141 - DNA, 80 bp, synthetic construct
  misc_feature 1..80: note = Synthetic: >NC_001611.1-cand-87280-87359
  source 1..80: mol_type = other DNA
agatgtcgaagacttacttagttactatgttgtttatgtcttttctaagcggtaaataataatatggtatgggttctgat

SEQ ID NO: 12142 - DNA, 80 bp, synthetic construct
  misc_feature 1..80: note = Synthetic: >NC_001611.1-cand-12590-12669
  source 1..80: mol_type = other DNA
agtatttgattttggataatattcgtattttgcatctgctataattaagatataatcgccacaaaaacacgcgaacatct

SEQ ID NO: 12143 - DNA, 80 bp, synthetic construct
  misc_feature 1..80: note = Synthetic: >NC_001611.1-cand-83500-83579
  source 1..80: mol_type = other DNA
agattaatttttgtgggaagtgattcaaaaggacgtagacaatacttttacggaaaaatgcatgtacagaatcgcaacgc

SEQ ID NO: 12144 - DNA, 80 bp, synthetic construct
  misc_feature 1..80: note = Synthetic: >NC_003310.1-cand-56480-56559
  source 1..80: mol_type = other DNA
agattataacttattgtctcgtcaatgtctatagttctcatctttcccatcggcctcgcattaaatggaggaggagataa

SEQ ID NO: 12145 - DNA, 80 bp, synthetic construct
  misc_feature 1..80: note = Synthetic: >NC_003310.1-cand-67690-67769
  source 1..80: mol_type = other DNA
agattgcatagcaataccattttaaaatcattgggatttaaggtactagatggatctcctatctctttacggtacggatc

SEQ ID NO: 12146 - DNA, 80 bp, synthetic construct
  misc_feature 1..80: note = Synthetic: >NC_003310.1-cand-66000-66079
  source 1..80: mol_type = other DNA
ccacattcagattccaacaattgattaacttccacattaatacagcctattttcgctccaaatgtacattcgaaaaatct

SEQ ID NO: 12147 - DNA, 80 bp, synthetic construct
  misc_feature 1..80: note = Synthetic: >EVA90-cand-6170-6249
  source 1..80: mol_type = other DNA
ccaggctgcaaaccactatgcagaccagctcaaacaattggacattgatacatcaaaaatgagcatggaggatgcttgct

SEQ ID NO: 12148 - DNA, 80 bp, synthetic construct
  misc_feature 1..80: note = Synthetic: >NC_011503.2-cand-190-269
  source 1..80: mol_type = other DNA
agcacaaaattatggtattaatcttccaatcacaggctccatggacactgcatacgctaattcaacgcaagaagaaacat

SEQ ID NO: 12149 - DNA, 80 bp, synthetic construct
  misc_feature 1..80: note = Synthetic: >AdVB7-cand-34010-34089
  source 1..80: mol_type = other DNA
gcgcagatggcatctatcgcccccactgtgttggtgaaaaagcacagctaaatcaaaagaaatgcgattttcaaggtgct

SEQ ID NO: 12150 - DNA, 80 bp, synthetic construct
  misc_feature 1..80: note = Synthetic: >NC_001802.1-cand-10-89
  source 1..80: mol_type = other DNA
gaccagatctgagcctgggagctctctggctaactagggaacccactgcttaagcctcaataaagcttgccttgagtgct

SEQ ID NO: 12151 - DNA, 80 bp, synthetic construct
  misc_feature 1..80: note = Synthetic: >NC_001611.1-cand-141120-141199
  source 1..80: mol_type = other DNA
atatttcaaaaaataataatttcgaggatgccgccatcgttgattacaagactacaaagaatgttctagcggctattcct

SEQ ID NO: 12152 - DNA, 80 bp, synthetic construct
  misc_feature 1..80: note = Synthetic: >NC_001611.1-cand-93410-93489
  source 1..80: mol_type = other DNA
aggaatataacgtggtatcttctccataaaactgataaaatatataaagaaataaatgtcgagctttgttaccaatggat

SEQ ID NO: 12153 - DNA, 80 bp, synthetic construct
  misc_feature 1..80: note = Synthetic: >AdVB7-cand-23240-23319
  source 1..80: mol_type = other DNA
ctgtacctttccattagcacagccatcacttccatgcccttctcccaggcagataccaggggcaagctcaaaggattcct

SEQ ID NO: 12154 - DNA, 80 bp, synthetic construct
  misc_feature 1..80: note = Synthetic: >AdVB7-cand-3180-3259
  source 1..80: mol_type = other DNA
aggaatctttgatatgaatattcaactatggaagatcctgagatatgatgacactaaaccgagggtgcgcgcatgcgaat

SEQ ID NO: 12155 - DNA, 80 bp, synthetic construct
  misc_feature 1..80: note = Synthetic: >NC_003310.1-cand-63680-63759
  source 1..80: mol_type = other DNA
gagaagcgtgcgtaaaccatttttcagaaagtagattgtacgtctcaatagctgagtctatatcccattgatgaattcct

SEQ ID NO: 12156 - DNA, 80 bp, synthetic construct
  misc_feature 1..80: note = Synthetic: >NC_006573.1-cand-970-1049
  source 1..80: mol_type = other DNA
aggaattttgtgacatgctgaggctgtttgacttcaacaaacaagccattcaaaggttgaaagctgaagcacaaatgagc

SEQ ID NO: 12157 - DNA, 80 bp, synthetic construct
  misc_feature 1..80: note = Synthetic: >NC_007569.1-cand-280-359
  source 1..80: mol_type = other DNA
aggagaaagatgaaactgttccgcaaatggaccatcgtattatgaagtggatgttggattctcacgatggagttagtttg

SEQ ID NO: 12158 - DNA, 80 bp, synthetic construct
  misc_feature 1..80: note = Synthetic: >NC_001611.1-cand-69020-69099
  source 1..80: mol_type = other DNA
atatgcctataaagtaataatcttctttgggcacatataccagtgtaccaggttctaacaacctatttactggtgctcct

SEQ ID NO: 12159 - DNA, 80 bp, synthetic construct
  misc_feature 1..80: note = Synthetic: >AdVB7-cand-10010-10089
  source 1..80: mol_type = other DNA
aggagcagttggccatgactgaccagttgactgtctggtgcccagggcgcacgagctcggtgtacttgaggcgcgagtat

SEQ ID NO: 12160 - DNA, 80 bp, synthetic construct
  misc_feature 1..80: note = Synthetic: >NC_039476.1-cand-570-649
  source 1..80: mol_type = other DNA
aggaggctcaacggagaggcattcccttacaccgcctttgacaacaactgctatgccttttgctgctgggtgttagacct

SEQ ID NO: 12161 - DNA, 80 bp, synthetic construct
  misc_feature 1..80: note = Synthetic: >AdVB7-cand-14010-14089
  source 1..80: mol_type = other DNA
aggagggggcaacccgttcgctcatctgcgtcccagattcgggcgcatgttgtaaaagtgaaagtaaaataaaaatgcaa

SEQ ID NO: 12162 - DNA, 80 bp, synthetic construct
  misc_feature 1..80: note = Synthetic: >AdVB7-cand-2130-2209
  source 1..80: mol_type = other DNA
aggagtagctgacctgtttcctgaactgcgacgggtgcttactaggtctacgaccagtggacagaacagaggcattaaga

SEQ ID NO: 12163 - DNA, 80 bp, synthetic construct
  misc_feature 1..80: note = Synthetic: >NC_003310.1-cand-104290-104369
  source 1..80: mol_type = other DNA
tattacggtttatgtactacaatgaactaagagaaatctttagacggttgagaaaaggttctatcaacaatatcgatcct

SEQ ID NO: 12164 - DNA, 80 bp, synthetic construct
  misc_feature 1..80: note = Synthetic: >NC_003310.1-cand-113410-113489
  source 1..80: mol_type = other DNA
atcatatacgttcgtcaccagatcgtttgtttcggcctgaagttgacgcatatctttttcaacactcgacatgagatcct

SEQ ID NO: 12165 - DNA, 80 bp, synthetic construct
  misc_feature 1..80: note = Synthetic: >NC_004905.2-cand-1370-1449
  source 1..80: mol_type = other DNA
aggatgatggaaagtgccagaccagaagatgtgtctttccaggggcggggagtcttcgagctctcggacgaaaaggcaac

SEQ ID NO: 12166 - DNA, 80 bp, synthetic construct
  misc_feature 1..80: note = Synthetic: >NC_003310.1-cand-111100-111179
  source 1..80: mol_type = other DNA
tcatgttaacactctacgtatctcgtcgtccaatattttatataaaaacattttatttctagacgttgtcagaaaatcct

SEQ ID NO: 12167 - DNA, 80 bp, synthetic construct
  misc_feature 1..80: note = Synthetic: >NC_035889.1-cand-10710-10789
  source 1..80: mol_type = other DNA
gaaagaccagagactccatgagtttccaccacgctggccgccaggcacagatcgccgaatagcggcggccggtgtgggga

SEQ ID NO: 12168 - DNA, 80 bp, synthetic construct
  misc_feature 1..80: note = Synthetic: >NC_001611.1-cand-53800-53879
  source 1..80: mol_type = other DNA
gattactctttttgttacacgcatccttataaagaatgaatggcgtaccagtttcaatctgggattctataatcgctttc

SEQ ID NO: 12169 - DNA, 80 bp, synthetic construct
  misc_feature 1..80: note = Synthetic: >NC_004911.1-cand-1280-1359
  source 1..80: mol_type = other DNA
tctcaatcttaaatcttgggcagaagaggtacaccaaaaccacatactggtgggatgggctccaatcctctgatgatttc

SEQ ID NO: 12170 - DNA, 80 bp, synthetic construct
  misc_feature 1..80: note = Synthetic: >NC_001611.1-cand-142680-142759
  source 1..80: mol_type = other DNA
tcccaatggtttcatcaatagaagattaaacatatcgtacgaacacgatggagagtaaccgtagcaaaagtaagcatttc

SEQ ID NO: 12171 - DNA, 80 bp, synthetic construct
  misc_feature 1..80: note = Synthetic: >NC_001611.1-cand-42190-42269
  source 1..80: mol_type = other DNA
ttacaaagctaattttattaacggtaatacatttattagcgatagaacgtttaacgaggatttattcagagttgttgttc

SEQ ID NO: 12172 - DNA, 80 bp, synthetic construct
  misc_feature 1..80: note = Synthetic: >NC_039477.1-cand-4490-4569
  source 1..80: mol_type = other DNA
gaactccatcgcacactggctgctaactctctgtgccttgtctgaagtcaccaaactgtcccctgacattatacaagcaa

SEQ ID NO: 12173 - DNA, 80 bp, synthetic construct
  misc_feature 1..80: note = Synthetic: >HCV.A5-cand-220-299
  source 1..80: mol_type = other DNA
gaaggggaacgcgcccgttatccggctaactacttcgagaaacctagtaccaccatggaagttgcagagtgtttcgctca

SEQ ID NO: 12174 - DNA, 80 bp, synthetic construct
  misc_feature 1..80: note = Synthetic: >NC_001611.1-cand-103730-103809
  source 1..80: mol_type = other DNA
ttgttagtagttagatatttagcaattgcattcccatcatttctcaatctcgtactccaatcatgtgtggatgctacttc

SEQ ID NO: 12175 - DNA, 80 bp, synthetic construct
  misc_feature 1..80: note = Synthetic: >NC_001611.1-cand-108850-108929
  source 1..80: mol_type = other DNA
taggggaggtaaatatagatcaaacaacacctatgataaaggagaatatcggttttatatcccgcagtagacgtctattc

SEQ ID NO: 12176 - DNA, 80 bp, synthetic construct
  misc_feature 1..80: note = Synthetic: >NC_003310.1-cand-80080-80159
  source 1..80: mol_type = other DNA
gaattaaatatgttcttcatgcctaaacgaaaaatacccgatcctattgatagattacgacgtgctaatctagcgtgtga

SEQ ID NO: 12177 - DNA, 80 bp, synthetic construct
  misc_feature 1..80: note = Synthetic: >AdVB3-cand-18720-18799
  source 1..80: mol_type = other DNA
gccagcacattctttgacattcggggggtgcttgatagaggtcctagcttcaagccatattccggcacagcttacaattc

SEQ ID NO: 12178 - DNA, 80 bp, synthetic construct
  misc_feature 1..80: note = Synthetic: >NC_003310.1-cand-151790-151869
  source 1..80: mol_type = other DNA
gacaaagtagttgatacgtttatttcatataatagacataatgactccatagagataagaggggtgcttccagaggaaac

SEQ ID NO: 12179 - DNA, 80 bp, synthetic construct
  misc_feature 1..80: note = Synthetic: >AdVB7-cand-5990-6069
  source 1..80: mol_type = other DNA
tcagtttctaggaacgaggaggatttgatattgacagtaccagcagagatgcctttcataagactctcgtccatttggtc

SEQ ID NO: 12180 - DNA, 80 bp, synthetic construct
  misc_feature 1..80: note = Synthetic: >AdVB3-cand-26370-26449
  source 1..80: mol_type = other DNA
gaccagaaaaccagcagttaaaaaatccacaacaagtgcagcaggaggaggactgaggatcacagcgaacgagccagcgc

SEQ ID NO: 12181 - DNA, 80 bp, synthetic construct
  misc_feature 1..80: note = Synthetic: >AdVB7-cand-4070-4149
  source 1..80: mol_type = other DNA
gtctcgggggtggagatagctccattgaagagcctcttgctccggggtagtgttataaatcacccagtcatagcaaggtc

SEQ ID NO: 12182 - DNA, 80 bp, synthetic construct
  misc_feature 1..80: note = Synthetic: >AdVB7-cand-16720-16799
  source 1..80: mol_type = other DNA
gacgatattcttgagcaggcggcagaccgccttgatgagtttgcttatggcaagcgcactagatccagtcccaaagagga

SEQ ID NO: 12183 - DNA, 80 bp, synthetic construct
  misc_feature 1..80: note = Synthetic: >AdVB3-cand-14480-14559
  source 1..80: mol_type = other DNA
ttgacctgatgaacaatgccatcattgacaactacctggaaattggcagacaaaatggagtgctggaaagtgacattggt

SEQ ID NO: 12184 - DNA, 80 bp, synthetic construct
  misc_feature 1..80: note = Synthetic: >AdVB3-cand-14560-14639
  source 1..80: mol_type = other DNA
gttaagtttgacactagaaactttaggctcgggtgggaccccgaaactaagttgattatgccaggagtctacacttatga

SEQ ID NO: 12185 - DNA, 80 bp, synthetic construct
  misc_feature 1..80: note = Synthetic: >AdVB3-cand-14600-14679
  source 1..80: mol_type = other DNA
ccgaaactaagttgattatgccaggagtctacacttatgaggcattccatcctgacattgttttgctgcctggttgcggg

SEQ ID NO: 12186 - DNA, 80 bp, synthetic construct
  misc_feature 1..80: note = Synthetic: >AdVB3-cand-14690-14769
  source 1..80: mol_type = other DNA
ctgaaagccgacttagcaacttgcttggcatcaggaaaagacatccattccaggagggtttcaaaattatgtatgaagat

SEQ ID NO: 12187 - DNA, 80 bp, synthetic construct
  misc_feature 1..80: note = Synthetic: >AdVB3-cand-14800-14879
  source 1..80: mol_type = other DNA
gatgtcactgcctatgaggaaagcaaaaaggataccactactgaaacaaccacactggctgttgcagaggaaactagtga

SEQ ID NO: 12188 - DNA, 80 bp, synthetic construct
  misc_feature 1..80: note = Synthetic: >AdVB3-cand-14960-15039
  source 1..80: mol_type = other DNA
agttaaagatccaacctctagaaaaagacagcaagagtagaagctacaatgtcttggaagacaaaatcaacacggcctac

SEQ ID NO: 12189 - DNA, 80 bp, synthetic construct
  misc_feature 1..80: note = Synthetic: >AdVB3-cand-15040-15119
  source 1..80: mol_type = other DNA
cgcagctggtacctgtcctacaattacggtaaccccgagaaaggaataaggtcttggacactgcttaccacttcagatgt

SEQ ID NO: 12190 - DNA, 80 bp, synthetic construct
  misc_feature 1..80: note = Synthetic: >AdVB3-cand-15130-15209
  source 1..80: mol_type = other DNA
gcagagcaggtctactggtcgctccctgacatgatgcaagacccagtcaccttccgctccacaagacaagtcaacaacta

SEQ ID NO: 12191 - DNA, 80 bp, synthetic construct
  misc_feature 1..80: note = Synthetic: >AdVB3-cand-15200-15279
  source 1..80: mol_type = other DNA
tcaacaactacccagtggtgggtgcagagcttatgcccgtcttctcaaagagtttctacaatgagcaagccgtgtactct

SEQ ID NO: 12192 - DNA, 80 bp, synthetic construct
  misc_feature 1..80: note = Synthetic: >AdVB3-cand-15440-15519
  source 1..80: mol_type = other DNA
gagtccagcgcgtgaccgttactgacgccagacgccgcacctgtccctacgtttacaaggccctgggcatagtcgcgccg

SEQ ID NO: 12193 - DNA, 80 bp, synthetic construct
  misc_feature 1..80: note = Synthetic: >AdVB3-cand-15520-15599
  source 1..80: mol_type = other DNA
cgcgttctttcaagccgcactttctaaaaaaaaaaaaaaaaaatgtccattctcatctcgcccagtaataataccggttg

SEQ ID NO: 12194 - DNA, 80 bp, synthetic construct
  misc_feature 1..80: note = Synthetic: >AdVB3-cand-15700-15779
  source 1..80: mol_type = other DNA
ctcaagggtcgtacccgcactcggaccacggtcgatgatgtgatcgaccaggtggtcgccgatgctcgtaattatactcc

SEQ ID NO: 12195 - DNA, 80 bp, synthetic construct
  misc_feature 1..80: note = Synthetic: >AdVB3-cand-15950-16029
  source 1..80: mol_type = other DNA
gagccatgcttagagcggccagacgcgcggctttaggtgccagcagcggcaggtcccgcaggcgcgcggccacggcggca

SEQ ID NO: 12196 - DNA, 80 bp, synthetic construct
  misc_feature 1..80: note = Synthetic: >AdVB3-cand-17260-17339
  source 1..80: mol_type = other DNA
agatatggccctcacttgccgccttcgcgtccccattactggctaccgaggaagaaactcgcgccgtagaaggatgttgg

SEQ ID NO: 12197 - DNA, 80 bp, synthetic construct
  misc_feature 1..80: note = Synthetic: >AdVB3-cand-17580-17659
  source 1..80: mol_type = other DNA
atttttcatccctggctccgcgacacggcacgaggccgtacatgggcacctggagcgacatcggcacgagccaactgaac

SEQ ID NO: 12198 - DNA, 80 bp, synthetic construct
  misc_feature 1..80: note = Synthetic: >AdVB3-cand-17960-18039
  source 1..80: mol_type = other DNA
aagcgtccgcgacccgagctggagcagacgctggtgacgcgcgcagacgagcccccttcatacgaggaggcagtaaagct

SEQ ID NO: 12199 - DNA, 80 bp, synthetic construct
  misc_feature 1..80: note = Synthetic: >EVA71-cand-6700-6779
  source 1..80: mol_type = other DNA
taagggagatagggtatagtgaagaggcagtctcactcattgagggaatcaaccacacacaccatgtgtatcgtaataag

SEQ ID NO: 12200 - DNA, 80 bp, synthetic construct
  misc_feature 1..80: note = Synthetic: >EVA71-cand-6780-6859
  source 1..80: mol_type = other DNA
acctattgtgtgcttggtgggatgccctcaggttgttcgggaacatccatcttcaactcaatgatcaacaacattattat

SEQ ID NO: 12201 - DNA, 80 bp, synthetic construct
  misc_feature 1..80: note = Synthetic: >EVA71-cand-6860-6939
  source 1..80: mol_type = other DNA
cagagcactgctcataaaaacatttaagggcattgatttggatgaactcaacatggtcgcttatggagacgatgtgctcg

SEQ ID NO: 12202 - DNA, 80 bp, synthetic construct
  misc_feature 1..80: note = Synthetic: >EVA71-cand-6940-7019
  source 1..80: mol_type = other DNA
ctagctatcccttcccaattgattgcttggaattagcaaagactggtaaggagtatggtctgaccatgactcctgctgat

SEQ ID NO: 12203 - DNA, 80 bp, synthetic construct
  misc_feature 1..80: note = Synthetic: >EVA71-cand-6990-7069
  source 1..80: mol_type = other DNA
gagtatggtctgaccatgactcctgctgataaatctccttgctttaatgaagttaattgggataatgcgaccttcctcaa

SEQ ID NO: 12204 - DNA, 80 bp, synthetic construct
  misc_feature 1..80: note = Synthetic: >EVA71-cand-7100-7179
  source 1..80: mol_type = other DNA
attcttgattcaccctactatgccaatgagggagatccatgagtccattcgatggaccaaggacgcacgaaacactcaag

SEQ ID NO: 12205 - DNA, 80 bp, synthetic construct
  misc_feature 1..80: note = Synthetic: >EVA71-cand-7180-7259
  source 1..80: mol_type = other DNA
atcatgtgcggtccttgtgcctcctagcatggcataatggtaagcaagaatatgagaaatttgtgagcacaattagatct

SEQ ID NO: 12206 - DNA, 80 bp, synthetic construct
  misc_feature 1..80: note = Synthetic: >EVA71-cand-7310-7389
  source 1..80: mol_type = other DNA
caattggctcgaattattttagaggttacagtacacacctcaaccccaccagaaatctggtcgtgaatatgactggtggg

SEQ ID NO: 12207 - DNA, 80 bp, synthetic construct
  misc_feature 1..80: note = Synthetic: >EVA76-cand-60-139
  source 1..80: mol_type = other DNA
tgtgcgcctgttttatacaccctcccccctatatgtaacttagaagaaacaaacactaacgatcaatagtaggcttagcg

SEQ ID NO: 12208 - DNA, 80 bp, synthetic construct
  misc_feature 1..80: note = Synthetic: >EVA76-cand-140-219
  source 1..80: mol_type = other DNA
cgccagctaagtcttgatcaagcacttctgttaccccggactgagtatcaataggctgtacccacggctgaaagagaaaa

SEQ ID NO: 12209 - DNA, 80 bp, synthetic construct
  misc_feature 1..80: note = Synthetic: >EVA76-cand-220-299
  source 1..80: mol_type = other DNA
cgttcgttacccggctatctacttcgggaaacctagtaccatcatgaagactgcaaagcgtttcgctcagcacaacccca

SEQ ID NO: 12210 - DNA, 80 bp, synthetic construct
  misc_feature 1..80: note = Synthetic: >EVA76-cand-290-369
  source 1..80: mol_type = other DNA
cacaaccccagtgtagatcaggtcgatgagtcactgcattcctcacaggcgactgtggcagtggctgcgttggcggcctg

SEQ ID NO: 12211 - DNA, 80 bp, synthetic construct
  misc_feature 1..80: note = Synthetic: >EVA76-cand-620-699
  source 1..80: mol_type = other DNA
ggattggccatccggtgaactctagagatattatctatttgtttgttggttttaccaagttaaatatcaccagttacacc

SEQ ID NO: 12212 - DNA, 80 bp, synthetic construct
  misc_feature 1..80: note = Synthetic: >EVA76-cand-700-779
  source 1..80: mol_type = other DNA
accctactttacattatactactgaacaatagaaagagaaaatgggagctcaagtgtctactcaaaagaccggatctcac

SEQ ID NO: 12213 - DNA, 80 bp, synthetic construct
  misc_feature 1..80: note = Synthetic: >EVA76-cand-780-859
  source 1..80: mol_type = other DNA
gagaaccagaatgttgctgctaatggttccaccataaattacaccaccattaattattacaaagagtcttatgcagcatc

SEQ ID NO: 12214 - DNA, 80 bp, synthetic construct
  misc_feature 1..80: note = Synthetic: >EVA76-cand-860-939
  source 1..80: mol_type = other DNA
tgccaccaaacaggatttttctcaagatccatcaaagtttacacaaccagtagtggatgcattaaaagaaactgcaccac

SEQ ID NO: 12215 - DNA, 80 bp, synthetic construct
  misc_feature 1..80: note = Synthetic: >EVB87-cand-2710-2789
  source 1..80: mol_type = other DNA
gggtggacaatttcagtgcgtgatttggtacagcttaggcggaaatttgagatgttcacttacctcagatttgacattga

SEQ ID NO: 12216 - DNA, 80 bp, synthetic construct
  misc_feature 1..80: note = Synthetic: >EVB87-cand-2790-2869
  source 1..80: mol_type = other DNA
attaaccattgtgatcaccagcagccaaatccctagtactagcgtgaaccaagacatgcctgtgcttactcaccaaataa

SEQ ID NO: 12217 - DNA, 80 bp, synthetic construct
  misc_feature 1..80: note = Synthetic: >EVB87-cand-2800-2879
  source 1..80: mol_type = other DNA
gtgatcaccagcagccaaatccctagtactagcgtgaaccaagacatgcctgtgcttactcaccaaataatgtatgtccc

SEQ ID NO: 12218 - DNA, 80 bp, synthetic construct
  misc_feature 1..80: note = Synthetic: >EVB87-cand-2960-3039
  source 1..80: mol_type = other DNA
ggaatgcaccagccagaatgtccattccatttataagcgtcggtaatgcatacagcagtttttacgacggttggtcccat

SEQ ID NO: 12219 - DNA, 80 bp, synthetic construct
  misc_feature 1..80: note = Synthetic: >EVB87-cand-2970-3049
  source 1..80: mol_type = other DNA
agccagaatgtccattccatttataagcgtcggtaatgcatacagcagtttttacgacggttggtcccatttcacacaaa

SEQ ID NO: 12220 - DNA, 80 bp, synthetic construct
  misc_feature 1..80: note = Synthetic: >EVB87-cand-3110-3189
  source 1..80: mol_type = other DNA
acaagcaaagtccatacacaattgagagcacggccaggatatacatgaaaccaaaacacgtccaagtgtgggtcccaaga

SEQ ID NO: 12221 - DNA, 80 bp, synthetic construct
  misc_feature 1..80: note = Synthetic: >EVB87-cand-3200-3279
  source 1..80: mol_type = other DNA
tgtgcccatacctgtacaaggccaacaccaatttcaacccagcacccgtggcggagcaccggcgcgatttaaatgacgtg

SEQ ID NO: 12222 - DNA, 80 bp, synthetic construct
  misc_feature 1..80: note = Synthetic: >EVB87-cand-3280-3359
  source 1..80: mol_type = other DNA
cctgggttggcgcacccgagtttgacaaatactggagcttttggacaacagtcaggtgctgtgtatgtcggaaactacag

SEQ ID NO: 12223 - DNA, 80 bp, synthetic construct
  misc_feature 1..80: note = Synthetic: >EVB87-cand-3360-3439
  source 1..80: mol_type = other DNA
ggtggtgaacagacaccttgcaacccacaccgattggcaaaactgtgtgtgggaggattacaacagggatttgctagtca

SEQ ID NO: 12224 - DNA, 80 bp, synthetic construct
  misc_feature 1..80: note = Synthetic: >EVB87-cand-3440-3519
  source 1..80: mol_type = other DNA
gcacaaccacggcccatgggtgtgataccatagctagatgccagtgcacagcgggagtgtatttctgcgcctcgaggaac

SEQ ID NO: 12225 - DNA, 80 bp, synthetic construct
  misc_feature 1..80: note = Synthetic: >EVB87-cand-3520-3599
  source 1..80: mol_type = other DNA
aaacactatccagtcagctttgaagggccgggactagtagaagtccaagaaagtgaatactaccctaaaagatatcaatc

SEQ ID NO: 12226 - DNA, 80 bp, synthetic construct
  misc_feature 1..80: note = Synthetic: >EVB87-cand-3550-3629
  source 1..80: mol_type = other DNA
ggactagtagaagtccaagaaagtgaatactaccctaaaagatatcaatcccacgtgctgcttgccgcgggcttctccga

SEQ ID NO: 12227 - DNA, 80 bp, synthetic construct
  misc_feature 1..80: note = Synthetic: >EVB87-cand-3680-3759
  source 1..80: mol_type = other DNA
tcgtaaccatgggtggtgagggcgttgttggctttgctgacgtgcgcgacctcttgtggttggaggatgacgcaatggaa

SEQ ID NO: 12228 - DNA, 80 bp, synthetic construct
  misc_feature 1..80: note = Synthetic: >EVB87-cand-3770-3849
  source 1..80: mol_type = other DNA
gagactatgtcgagcagctaggaaatgcctttggctcgggctttaccaaccaaatatgcgaacaagtaaacctcctaaaa

SEQ ID NO: 12229 - DNA, 80 bp, synthetic construct
  misc_feature 1..80: note = Synthetic: >EVB87-cand-3850-3929
  source 1..80: mol_type = other DNA
gaatcgctggttggtcaggactctatcctagagaagtcccttaaagctttagttaaaattatttcagcactagtcatagt

SEQ ID NO: 12230 - DNA, 80 bp, synthetic construct
  misc_feature 1..80: note = Synthetic: >EVB87-cand-3930-4009
  source 1..80: mol_type = other DNA
agtaaggaaccatgatgacctcatcacagtgacagccacccttgctctcataggttgcaccacatcaccgtggcgctggc

SEQ ID NO: 12231 - DNA, 80 bp, synthetic construct
  misc_feature 1..80: note = Synthetic: >EVD68-cand-5600-5679
  source 1..80: mol_type = other DNA
ttggatcgcaatcaaaaatttagagacatcagacactttttacccagatgtgaggatgattacaatgatgctgtgcttag

SEQ ID NO: 12232 - DNA, 80 bp, synthetic construct
  misc_feature 1..80: note = Synthetic: >EVD68-cand-5680-5759
  source 1..80: mol_type = other DNA
tgtacatacatcaaaattccctaacatgtacattccagttggacaagtcactaactacggcttcttgaacctgggcggca

SEQ ID NO: 12233 - DNA, 80 bp, synthetic construct
  misc_feature 1..80: note = Synthetic: >EVD68-cand-5760-5839
  source 1..80: mol_type = other DNA
caccaacacatcggattttaatgtataattttccaacaagagctggtcagtgtggtggtgtggtgacaaccacaggtaaa

SEQ ID NO: 12234 - DNA, 80 bp, synthetic construct
  misc_feature 1..80: note = Synthetic: >EVD68-cand-5840-5919
  source 1..80: mol_type = other DNA
gtgataggaatacacgtgggcgggaatggagctcagggattcgcagcaatgttgctccactcttactttactgatacaca

SEQ ID NO: 12235 - DNA, 80 bp, synthetic construct
  misc_feature 1..80: note = Synthetic: >EVD68-cand-5920-5999
  source 1..80: mol_type = other DNA
aggtgagatagttagcaatgagaagagtgggatgtgtattaatgcaccagcaaaaacaaaactccaacccagtgtcttcc

SEQ ID NO: 12236 - DNA, 80 bp, synthetic construct
  misc_feature 1..80: note = Synthetic: >EVD68-cand-6000-6079
  source 1..80: mol_type = other DNA
atcaagtttttgaaggttcaaaggaaccagcagtactcaattcaaaagatcctagactcaagactgatttcgaggaggct

SEQ ID NO: 12237 - DNA, 80 bp, synthetic construct
  misc_feature 1..80: note = Synthetic: >EVD68-cand-6080-6159
  source 1..80: mol_type = other DNA
attttctcaaaatatacaggtaacaaaattatgttaatggatgagtacatggaagaagcagtggatcattatgtgggatg

SEQ ID NO: 12238 - DNA, 80 bp, synthetic construct
  misc_feature 1..80: note = Synthetic: >EVD68-cand-6160-6239
  source 1..80: mol_type = other DNA
tttagaaccactggatattagtgtagatcccataccccttgaaaatgctatgtatggaatggagggtcttgaagcattgg

SEQ ID NO: 12239 - DNA, 80 bp, synthetic construct
  misc_feature 1..80: note = Synthetic: >EVD68-cand-6240-6319
  source 1..80: mol_type = other DNA
acttaaccaccagtgcgggcttcccttatttgttacaagggaaaaagaaaagggacatattcaacagacaaaccagagat

SEQ ID NO: 12240 - DNA, 80 bp, synthetic construct
  misc_feature 1..80: note = Synthetic: >EVD68-cand-6320-6399
  source 1..80: mol_type = other DNA
actagtgagatgacaaagatgttggaaaaatacggagttgacctacctttcgtgactttcgtgaaagacgagcttagatc

SEQ ID NO: 12241 - DNA, 80 bp, synthetic construct
  misc_feature 1..80: note = Synthetic: >EVD68-cand-6420-6499
  source 1..80: mol_type = other DNA
ggaagtcacgcctgattgaagccagttccttgaacgactcagttgccatgagggttgcctttggaaatctctacgctaca

SEQ ID NO: 12242 - DNA, 80 bp, synthetic construct
  misc_feature 1..80: note = Synthetic: >EVD68-cand-6480-6559
  source 1..80: mol_type = other DNA
ttggaaatctctacgctacatttcataacaatccaggcacagcaactggtagtgcagttggttgtgatccagatatattc

SEQ ID NO: 12243 - DNA, 80 bp, synthetic construct
  misc_feature 1..80: note = Synthetic: >EVD68-cand-6560-6639
  source 1..80: mol_type = other DNA
tggtcaaaaatccctattttgttagatggagagatttttgcttttgattacactggttatgacgctagtttatcaccagt

SEQ ID NO: 12244 - DNA, 80 bp, synthetic construct
  misc_feature 1..80: note = Synthetic: >EVD68-cand-6640-6719
  source 1..80: mol_type = other DNA
gtggtttgcctgtttgaaaaaggttctgattaaattaggttacacccaccaaacatcttttatagattatctatgccact

SEQ ID NO: 12245 - DNA, 80 bp, synthetic construct
  misc_feature 1..80: note = Synthetic: >EVD68-cand-6710-6789
  source 1..80: mol_type = other DNA
ctatgccactcagtgcatttgtacaaggatagaaaatatgtaattaatggtggaatgccctctggttcttcaggtactag

SEQ ID NO: 12246 - DNA, 80 bp, synthetic construct
  misc_feature 1..80: note = Synthetic: >EVD68-cand-6790-6869
  source 1..80: mol_type = other DNA
tatatttaacactatgattaataacataattataagaactttattaattaaggtttacaaaggcatagatctggaccagt

SEQ ID NO: 12247 - DNA, 80 bp, synthetic construct
  misc_feature 1..80: note = Synthetic: >HCV.A14-cand-6490-6569
  source 1..80: mol_type = other DNA
atgactcagtctacctcagaatgacttttgggcacctctatgaaaccttccacgcaaaccctggaactgtgactggatca

SEQ ID NO: 12248 - DNA, 80 bp, synthetic construct
  misc_feature 1..80: note = Synthetic: >HCV.A14-cand-6690-6769
  source 1..80: mol_type = other DNA
ctggagctagtcctaagggagataggctatactgaggaggcggtttcactcattgaagggatcaatcacacacaccatgt

SEQ ID NO: 12249 - DNA, 80 bp, synthetic construct
  misc_feature 1..80: note = Synthetic: >HCV.A14-cand-6770-6849
  source 1..80: mol_type = other DNA
gtaccgcaacaaaacatattgcgtgcttggtgggatgccctcagggtgctcaggaacatccatctttaactcaatgatta

SEQ ID NO: 12250 - DNA, 80 bp, synthetic construct
  misc_feature 1..80: note = Synthetic: >HCV.A14-cand-6850-6929
  source 1..80: mol_type = other DNA
acaacatcatcatcagaacactcctgattaaaacattcaaaggtatagacctagatgagctgaatatggtggcctacggg

SEQ ID NO: 12251 - DNA, 80 bp, synthetic construct
  misc_feature 1..80: note = Synthetic: >HCV.A14-cand-6930-7009
  source 1..80: mol_type = other DNA
gacgacgtactcgccagttaccctttcccaattgactgcctagaactagcaaaaacaggtaaagaatatggactgaccat

SEQ ID NO: 12252 - DNA, 80 bp, synthetic construct
  misc_feature 1..80: note = Synthetic: >HCV.A14-cand-7010-7089
  source 1..80: mol_type = other DNA
gacacctgcagacaaatcaccttgcttcaatgaagtgaaatgggagaacgcaacctttctcaaaagaggcttcttgcctg

SEQ ID NO: 12253 - DNA, 80 bp, synthetic construct
  misc_feature 1..80: note = Synthetic: >HCV.A14-cand-7090-7169
  source 1..80: mol_type = other DNA
atcatcaattcccattcttaatccaccctaccatgccaatgaaagagatccatgaatccattcgatggaccaaggatgca

SEQ ID NO: 12254 - DNA, 80 bp, synthetic construct
  misc_feature 1..80: note = Synthetic: >HCV.A14-cand-7170-7249
  source 1..80: mol_type = other DNA
cgcaacactcaagatcacgtgcgatccctgtgcctattggcatggcataatggcaagcaagaatatgaaaaatttgtgag

SEQ ID NO: 12255 - DNA, 80 bp, synthetic construct
  misc_feature 1..80: note = Synthetic: >HCV.A14-cand-7240-7319
  source 1..80: mol_type = other DNA
aatttgtgagcacaatcagatcagtcccagtaggaaaagcattggcaattccaaattatgagaatctgagaagaaattgg

SEQ ID NO: 12256 - DNA, 80 bp, synthetic construct
  misc_feature 1..80: note = Synthetic: >HCV.A14-cand-7310-7389
  source 1..80: mol_type = other DNA
aagaaattggctcgaattattttaaaggttacagtttacacctcaaccccaccagaaatctggtcgtgtaaatgactggt

SEQ ID NO: 12257 - DNA, 80 bp, synthetic construct
  misc_feature 1..80: note = Synthetic: >HCV.A15-cand-10-89
  source 1..80: mol_type = other DNA
gggttgttcccaccccagaggcccacgtggcggctagtacaccggtattacggtacccttgtacgcctgttttatactcc

SEQ ID NO: 12258 - DNA, 80 bp, synthetic construct
  misc_feature 1..80: note = Synthetic: >HCV.A15-cand-50-129
  source 1..80: mol_type = other DNA
accggtattacggtacccttgtacgcctgttttatactccctcccccccgtaacttagaagtacaaaactcaagttcaat

SEQ ID NO: 12259 - DNA, 80 bp, synthetic construct
  misc_feature 1..80: note = Synthetic: >HCV.A15-cand-160-239
  source 1..80: mol_type = other DNA
acgagcacttctgtctccccggtgaggttacatagactgtccccgcggttgaaagtaaccgatccgttatccgctcttgt

SEQ ID NO: 12260 - DNA, 80 bp, synthetic construct
  misc_feature 1..80: note = Synthetic: >HCV.A15-cand-640-719
  source 1..80: mol_type = other DNA
gagaatcagatcagttacttacctgtttgttggattcactccgttgacactttacatactaacccttgtcaatacacctg

SEQ ID NO: 12261 - DNA, 80 bp, synthetic construct
  misc_feature 1..80: note = Synthetic: >HCV.A15-cand-720-799
  source 1..80: mol_type = other DNA
tattatcataatgggtgctcaggtatcatcacaaaaagtcggtgctcatgagaatactaatgtggccactggcgggtcga

SEQ ID NO: 12262 - DNA, 80 bp, synthetic construct
  misc_feature 1..80: note = Synthetic: >HCV.A15-cand-800-879
  source 1..80: mol_type = other DNA
cagtcaactatactaccatcaattactataaagactccgccagcaatgctgcttccaaacaagacttttcacaagatccg

SEQ ID NO: 12263 - DNA, 80 bp, synthetic construct
  misc_feature 1..80: note = Synthetic: >HCV.A2-cand-6770-6849
  source 1..80: mol_type = other DNA
tcttggtgggatgccctcaggttgctctggcacttcaattttcaattccatgatcaacaacataatcattagaacccttt

SEQ ID NO: 12264 - DNA, 80 bp, synthetic construct
  misc_feature 1..80: note = Synthetic: >HCV.A2-cand-6850-6929
  source 1..80: mol_type = other DNA
tgattaaaacgttcaaaggaatagacttggatgaactgaacatggtggcttacggagatgatgtactggctagctaccca

SEQ ID NO: 12265 - DNA, 80 bp, synthetic construct
  misc_feature 1..80: note = Synthetic: >HCV.A2-cand-6930-7009
  source 1..80: mol_type = other DNA
ttccccattgattgctcggaattggcgagaactggtaaggagtacgggctgactatgactcctgctgacaagtcaccctg

SEQ ID NO: 12266 - DNA, 80 bp, synthetic construct
  misc_feature 1..80: note = Synthetic: >HCV.A2-cand-6970-7049
  source 1..80: mol_type = other DNA
agtacgggctgactatgactcctgctgacaagtcaccctgctttaatgaagtcacctgggagaacgcaaccttcttgaag

SEQ ID NO: 12267 - DNA, 80 bp, synthetic construct
  misc_feature 1..80: note = Synthetic: >HCV.A2-cand-7090-7169
  source 1..80: mol_type = other DNA
accccaccatgcccatgagggaaatccacgagtccattcgttggaccaaggacgcacgaaacactcaagaccacgtgcgt

SEQ ID NO: 12268 - DNA, 80 bp, synthetic construct
  misc_feature 1..80: note = Synthetic: >HCV.A2-cand-7170-7249
  source 1..80: mol_type = other DNA
tccctttgcttgttggcgtggcacaatggaaaggaggaatatgaaaaatttgtgagcacaatcagatcagttcccattgg

SEQ ID NO: 12269 - DNA, 80 bp, synthetic construct
  misc_feature 1..80: note = Synthetic: >HCV.A2-cand-7220-7299
  source 1..80: mol_type = other DNA
tgtgagcacaatcagatcagttcccattggaaaagctttggcgataccaaattttgagaacttaagaaggaattggctcg

SEQ ID NO: 12270 - DNA, 80 bp, synthetic construct
  misc_feature 1..80: note = Synthetic: >HCV.A2-cand-7280-7359
  source 1..80: mol_type = other DNA
cttaagaaggaattggctcgaattgttttaaacttacagctcaaagctgaaccccaccagaaatctggtcgtgtgaatta

SEQ ID NO: 12271 - DNA, 80 bp, synthetic construct
  misc_feature 1..80: note = Synthetic: >HCV.A20-cand-50-129
  source 1..80: mol_type = other DNA
tctggtatcacggtacctttgtacgcctgtttttatactcccttcccctatgtaacttagaaacaaataaaacaagttca

SEQ ID NO: 12272 - DNA, 80 bp, synthetic construct
  misc_feature 1..80: note = Synthetic: >HCV.A20-cand-160-239
  source 1..80: mol_type = other DNA
gaacaagcacttctgttttccccggtgacgttgtattagactgtacccacggttgaaagcgactgatccgttatccgctt

SEQ ID NO: 12273 - DNA, 80 bp, synthetic construct
  misc_feature 1..80: note = Synthetic: >HCV.A20-cand-320-399
  source 1..80: mol_type = other DNA
ctgatgagtctggacattcctcaccggcgacggtggcccaggctgcgttggcggcctacctatggcctaacgccatagga

SEQ ID NO: 12274 - DNA, 80 bp, synthetic construct
  misc_feature 1..80: note = Synthetic: >HCV.A20-cand-640-719
  source 1..80: mol_type = other DNA
cggtgaaagtcaaacatattatttacttgtttagttggatttactccactcactccattcactccaagtataataaatat

SEQ ID NO: 12275 - DNA, 80 bp, synthetic construct
  misc_feature 1..80: note = Synthetic: >HCV.A20-cand-730-809
  source 1..80: mol_type = other DNA
ataagacattaatatcacaatgggtgcacaagtttcatcacagaaagtgggtgctcatgaaaacaccaatgtggccactg

SEQ ID NO: 12276 - DNA, 80 bp, synthetic construct
  misc_feature 1..80: note = Synthetic: >HCV.A20-cand-810-889
  source 1..80: mol_type = other DNA
gtgggtcaacagtcaactacaccacaattaattattacaaggactctgctagcaatgcagcaaccaaacaagatttctct

SEQ ID NO: 12277 - DNA, 80 bp, synthetic construct
  misc_feature 1..80: note = Synthetic: >HCV.A20-cand-890-969
  source 1..80: mol_type = other DNA
caagatccctccaaattcactgaaccagtaaaagacatcatgttgaagtcagcacctgctttgaattcacccaatgtaga

SEQ ID NO: 12278 - DNA, 80 bp, synthetic construct
  misc_feature 1..80: note = Synthetic: >HCV.A20-cand-980-1059
  source 1..80: mol_type = other DNA
tacagtgatagggtgttgcaattgacactgggaaattccacaatcaccacacaagaagctgctaattcagtggttgggta

SEQ ID NO: 12279 - DNA, 80 bp, synthetic construct
  misc_feature 1..80: note = Synthetic: >HCV.B1-cand-2200-2279
  source 1..80: mol_type = other DNA
tgttgggctgcaatcaagctgcgtgctgtgtgtaccgtggattagccaaacacactacaggtacgtggttgaggatgagt

SEQ ID NO: 12280 - DNA, 80 bp, synthetic construct
  misc_feature 1..80: note = Synthetic: >HCV.B1-cand-2280-2359
  source 1..80: mol_type = other DNA
atacagcagctgggtatgtcacatgctggtatcagacaaacatagttgttccagctgatgtgcaaagctcatgtgacatc

SEQ ID NO: 12281 - DNA, 80 bp, synthetic construct
  misc_feature 1..80: note = Synthetic: >HCV.B1-cand-2360-2439
  source 1..80: mol_type = other DNA
ttgtgctttgtatcagcttgcaatgacttctctgtgcggatgttaaaggacaccccttttataagacaggacacattcta

SEQ ID NO: 12282 - DNA, 80 bp, synthetic construct
  misc_feature 1..80: note = Synthetic: >HCV.B1-cand-2440-2519
  source 1..80: mol_type = other DNA
ccaaggtccagtggaggagtctgtggagcgtgcagtggcacgcgtggcggacacggttagctcacggcccaccaattcag

SEQ ID NO: 12283 - DNA, 80 bp, synthetic construct
  misc_feature 1..80: note = Synthetic: >HCV.B1-cand-2520-2599
  source 1..80: mol_type = other DNA
agtccattcccgctctcaccgctgcggagactgggcatacctcccaagtcgtacctagcgacaccatgcaaacaaggcat

SEQ ID NO: 12284 - DNA, 80 bp, synthetic construct
  misc_feature 1..80: note = Synthetic: >HCV.B1-cand-2600-2679
  source 1..80: mol_type = other DNA
gtgaagaattaccactcaagatcggaatcatccattgaaaatttcctgtgccgatctgcctgtgtgtattatgccaccta

SEQ ID NO: 12285 - DNA, 80 bp, synthetic construct
  misc_feature 1..80: note = Synthetic: >HCV.B1-cand-2680-2759
  source 1..80: mol_type = other DNA
cacgaacaactcagaaaagggatacgcagagtgggtcatcaacaccagacaggtggcccaactaaggagaaagctggaac

SEQ ID NO: 12286 - DNA, 80 bp, synthetic construct
  misc_feature 1..80: note = Synthetic: >HCV.B1-cand-2760-2839
  source 1..80: mol_type = other DNA
tgttcacttatctaaggtttgacttagaactaacatttgtgataacgagtgcccaacaacccagcactgccaccagtgtg

SEQ ID NO: 12287 - DNA, 80 bp, synthetic construct
  misc_feature 1..80: note = Synthetic: >HCV.B1-cand-2840-2919
  source 1..80: mol_type = other DNA
gatgcacctgtgcaaacccaccagattatgtatgtacccccaggtggtcctgtgccaacaaaggtcacagattatgcttg

SEQ ID NO: 12288 - DNA, 80 bp, synthetic construct
  misc_feature 1..80: note = Synthetic: >HCV.B1-cand-2960-3039
  source 1..80: mol_type = other DNA
aatgccccaccaaggatgtccattccattcattagcattggtaatgcgtacagttgcttttatgatggatggacacagtt

SEQ ID NO: 12289 - DNA, 80 bp, synthetic construct
  misc_feature 1..80: note = Synthetic: >HCV.B1-cand-3010-3089
  source 1..80: mol_type = other DNA
cagttgcttttatgatggatggacacagttctcaagaaatggagtctacgggatcaacaccctaaacaacatgggcacat

SEQ ID NO: 12290 - DNA, 80 bp, synthetic construct
  misc_feature 1..80: note = Synthetic: >HCV.B1-cand-3090-3169
  source 1..80: mol_type = other DNA
tgtacatgaggcatgtcaacgaggcagggcaaggcccaatcaaaagcactgttagaatatatttcaaacccaagcatgtg

SEQ ID NO: 12291 - DNA, 80 bp, synthetic construct
  misc_feature 1..80: note = Synthetic: >HCV.B1-cand-3180-3259
  source 1..80: mol_type = other DNA
tgcctcgaccaccaaggttgtgtcagtatgagaaacaaaagaatgttaatttcaaccccacaggagtcaccacaagcaga

SEQ ID NO: 12292 - DNA, 80 bp, synthetic construct
  misc_feature 1..80: note = Synthetic: >HCV.B1-cand-3260-3339
  source 1..80: mol_type = other DNA
ctggacattacaacaacaggcgcatttggccagcaatcaggagcaatatacgtaggcaattatagggtggtcaacaggca

SEQ ID NO: 12293 - DNA, 80 bp, synthetic construct
  misc_feature 1..80: note = Synthetic: >HCV.B1-cand-3340-3419
  source 1..80: mol_type = other DNA
tctcgcaacccactccgactggcagaactgcgtgtgggaagactacaacagggacctactagtcagcactaccacagccc

SEQ ID NO: 12294 - DNA, 80 bp, synthetic construct
  misc_feature 1..80: note = Synthetic: >HCV.B1-cand-3420-3499
  source 1..80: mol_type = other DNA
atggttgtgataccatagcaagatgccaatgcacaacaggagtgtatttctgtgcctcaaggagcaagcactacccagtg

SEQ ID NO: 12295 - DNA, 80 bp, synthetic construct
  misc_feature 1..80: note = Synthetic: >HCV.B6-cand-3600-3679
  source 1..80: mol_type = other DNA
gttctccgaaccaggagattgtggtggcatccttaggtgcgaacatggtgtcatcggtctcgtgactatgggaggtgagg

SEQ ID NO: 12296 - DNA, 80 bp, synthetic construct
  misc_feature 1..80: note = Synthetic: >HCV.B6-cand-3680-3759
  source 1..80: mol_type = other DNA
gtgttgttggctttgccgatgtgcgtgacctgctgtggttggaggacgatgccatggaacagggagtgagagattatgtg

SEQ ID NO: 12297 - DNA, 80 bp, synthetic construct
  misc_feature 1..80: note = Synthetic: >HCV.B6-cand-3760-3839
  source 1..80: mol_type = other DNA
gaacaacttggcaacgcttttggctcaggattcacaaatcagatctgtgaacaagttaaccttctgaaggaatcactagt

SEQ ID NO: 12298 - DNA, 80 bp, synthetic construct
  misc_feature 1..80: note = Synthetic: >HCV.B6-cand-3840-3919
  source 1..80: mol_type = other DNA
gggtcaggactccatcctggaaaaatccctcaaagctctcgtgaagatcatctcagcactggtaatagtagtgagaaatc

SEQ ID NO: 12299 - DNA, 80 bp, synthetic construct
  misc_feature 1..80: note = Synthetic: >HCV.B6-cand-3920-3999
  source 1..80: mol_type = other DNA
acgatgacttaataacagtgactgccactcttgccctcataggatgcaccacatctccatggcgctggctcaaacaaaag

SEQ ID NO: 12300 - DNA, 80 bp, synthetic construct
  misc_feature 1..80: note = Synthetic: >HCV.B6-cand-4000-4079
  source 1..80: mol_type = other DNA
gtgtctcagtactatggcattcccatggctgagcgccagagcaacgggtggctcaagaaattcacggaaatgaccaatgc

SEQ ID NO: 12301 - DNA, 80 bp, synthetic construct
  misc_feature 1..80: note = Synthetic: >HCV.B6-cand-4080-4159
  source 1..80: mol_type = other DNA
ttgcaagggcatggagtggatcgctatcaagattcagaagttcatagagtggctcaaagcaaggattctaccagaggtca

SEQ ID NO: 12302 - DNA, 80 bp, synthetic construct
  misc_feature 1..80: note = Synthetic: >HCV.B6-cand-4160-4239
  source 1..80: mol_type = other DNA
aggagaaacacgagttcctcaacagacttaaacaactccccctcttggaaagtcaaattgctaccattgaacagagcgca

SEQ ID NO: 12303 - DNA, 80 bp, synthetic construct
  misc_feature 1..80: note = Synthetic: >HCV.B6-cand-4240-4319
  source 1..80: mol_type = other DNA
ccgtcccagagtgaccaggagcaactcttctcaaacgtccaatactttgctcactactgcaggaagtacgcgcccttgta

SEQ ID NO: 12304 - DNA, 80 bp, synthetic construct
  misc_feature 1..80: note = Synthetic: >HCV.B6-cand-4320-4399
  source 1..80: mol_type = other DNA
cgcagctgaagccaaaagggtgttctctcttgaaaagaaaatgagtaattacatacagttcaagtccaaatgccgtattg

SEQ ID NO: 12305 - DNA, 80 bp, synthetic construct
  misc_feature 1..80: note = Synthetic: >HCV.B6-cand-4400-4479
  source 1..80: mol_type = other DNA
aacctgtatgcttgctactacatggcagccccggagcagggaaatcagttgctaccagcctcattgggcgatcactagct

SEQ ID NO: 12306 - DNA, 80 bp, synthetic construct
  misc_feature 1..80: note = Synthetic: >HCV.B6-cand-4480-4559
  source 1..80: mol_type = other DNA
gaaaaattgaatagctcagtgtactcattaccaccagacccagatcactttgatggttacaagcaacaagccgttgtgat

SEQ ID NO: 12307 - DNA, 80 bp, synthetic construct
  misc_feature 1..80: note = Synthetic: >HCV.B6-cand-4560-4639
  source 1..80: mol_type = other DNA
catggacgatctgtgccaaaatccagatggaaaagatgtgtctttgttctgtcaaatggtgtctagtgtagattttgtac

SEQ ID NO: 12308 - DNA, 80 bp, synthetic construct
  misc_feature 1..80: note = Synthetic: >HCV.B6-cand-4650-4729
  source 1..80: mol_type = other DNA
cgcgctagaggaaaaaggcattctgttcacctctccattcgttctagcctcaaccaatgcaggatccattaacgcaccaa

SEQ ID NO: 12309 - DNA, 80 bp, synthetic construct
  misc_feature 1..80: note = Synthetic: >HCV.B6-cand-4730-4809
  source 1..80: mol_type = other DNA
cagtttcagacagcagagccctagctaggaggttccactttgacatgaacattgaagttatctctatgtacagtcaaaat

SEQ ID NO: 12310 - DNA, 80 bp, synthetic construct
  misc_feature 1..80: note = Synthetic: >HCV.B6-cand-4810-4889
  source 1..80: mol_type = other DNA
ggaaaaataaatatgcccatgtcagtcaaaacgtgtgatgaagagtgctgtccagtcaacttcaagaagtgctgccctct

SEQ ID NO: 12311 - DNA, 80 bp, synthetic construct
  misc_feature 1..80: note = Synthetic: >LC270039.1-cand-500-579
  source 1..80: mol_type = other DNA
gctgttcagagtgttggagaccccgacctgtgacccaagtgtaacgtcatgcgtggagacaaagcaactataaaagatta

SEQ ID NO: 12312 - DNA, 80 bp, synthetic construct
  misc_feature 1..80: note = Synthetic: >LC270039.1-cand-580-659
  source 1..80: mol_type = other DNA
tatattagatctgcaacctgaaacaactgacctacactgctatgagcaattaggtgacagctcagatgaggaggatacag

SEQ ID NO: 12313 - DNA, 80 bp, synthetic construct
  misc_feature 1..80: note = Synthetic: >LC270039.1-cand-660-739
  source 1..80: mol_type = other DNA
atggtgtggaccggccagatggacaagcagaacaagccacaagcaattactacattgtgacatattgtcacagttgtgat

SEQ ID NO: 12314 - DNA, 80 bp, synthetic construct
  misc_feature 1..80: note = Synthetic: >LC270039.1-cand-740-819
  source 1..80: mol_type = other DNA
agcacattacggctatgcattcatagcactgcgacggaccttcgtactctacagcagatgctgttgggcacattacaagt

SEQ ID NO: 12315 - DNA, 80 bp, synthetic construct
  misc_feature 1..80: note = Synthetic: >LC270039.1-cand-820-899
  source 1..80: mol_type = other DNA
tgtgtgccccggctgtgcacggctataaacaaccctgcaatggaggaccctgaaggtacagagggcgaaagggagggatg

SEQ ID NO: 12316 - DNA, 80 bp, synthetic construct
  misc_feature 1..80: note = Synthetic: >LC270039.1-cand-900-979
  source 1..80: mol_type = other DNA
tacaggctggtttgaagtagaggcaataatagaaaaacaaacaggagataacatttcagaggacgaggatgaaaatgcat

SEQ ID NO: 12317 - DNA, 80 bp, synthetic construct
  misc_feature 1..80: note = Synthetic: >LC270039.1-cand-980-1059
  source 1..80: mol_type = other DNA
atgatagtggaacagatctaatagattttatagatgattcaaatataaataatgaacaggcagaacatgaggcagcccgg

SEQ ID NO: 12318 - DNA, 80 bp, synthetic construct
  misc_feature 1..80: note = Synthetic: >LC270039.1-cand-1090-1169
  source 1..80: mol_type = other DNA
gatgtacatgctgtgtctgcagtaaaacgaaagtttacaagcagtccggaaagtgctgggcaagatggtgtagaaaaaca

SEQ ID NO: 12319 - DNA, 80 bp, synthetic construct
  misc_feature 1..80: note = Synthetic: >LC270039.1-cand-1140-1219
  source 1..80: mol_type = other DNA
aagtgctgggcaagatggtgtagaaaaacatggtagtccgcgtgcaaaacacatttgtgtaaatacagagtgtgttttac

SEQ ID NO: 12320 - DNA, 80 bp, synthetic construct
  misc_feature 1..80: note = Synthetic: >LC270039.1-cand-1220-1299
  source 1..80: mol_type = other DNA
caaaacgcaaaccatgtcaagtagaagacagcggctatggcaatagtgaagtggaagcgcagcagatggcagaccaggta

SEQ ID NO: 12321 - DNA, 80 bp, synthetic construct
  misc_feature 1..80: note = Synthetic: >LC270039.1-cand-1260-1339
  source 1..80: mol_type = other DNA
caatagtgaagtggaagcgcagcagatggcagaccaggtagacgggcaaaatggcgactggcaaagtaacagtagtcaat

SEQ ID NO: 12322 - DNA, 80 bp, synthetic construct
  misc_feature 1..80: note = Synthetic: >LC270039.1-cand-1390-1469
  source 1..80: mol_type = other DNA
gacaatgaggaaaatagtaatagaacgctaaaaagcatacaaaatattatgtgcgaaaatagcataaaaacaactgtatt

SEQ ID NO: 12323 - DNA, 80 bp, synthetic construct
  misc_feature 1..80: note = Synthetic: >LC270039.1-cand-1470-1549
  source 1..80: mol_type = other DNA
atttaaatttaaagaaacatatggtgttagctttatggaattagtaagaccatttaaaagtaatagaagtagttgcacag

SEQ ID NO: 12324 - DNA, 80 bp, synthetic construct
  misc_feature 1..80: note = Synthetic: >LC270039.1-cand-1550-1629
  source 1..80: mol_type = other DNA
attggtgtattataggaatgggagtagcaccatcagttgcagaaggattaaaagtattaatacagccctatagcatatat

SEQ ID NO: 12325 - DNA, 80 bp, synthetic construct
  misc_feature 1..80: note = Synthetic: >LC270039.1-cand-1630-1709
  source 1..80: mol_type = other DNA
gcccatttgcaatgtttaacatgtgacagaggcgtgcttatactgctgctaattaggtttaaatgtgggaaaaacagatt

SEQ ID NO: 12326 - DNA, 80 bp, synthetic construct
  misc_feature 1..80: note = Synthetic: >LC270039.1-cand-1710-1789
  source 1..80: mol_type = other DNA
aacagtgtccaaactaatgtcacagctgttaaatataccagaaacacatatggtaatagaaccaccaaaattacgaagtg

SEQ ID NO: 12327 - DNA, 80 bp, synthetic construct
  misc_feature 1..80: note = Synthetic: >LC270039.1-cand-4440-4519
  source 1..80: mol_type = other DNA
gttttttggaggtttgggtataggtacaggtgcaggctctggtggtagggcgggctatgtgcctttgtccactcgtcctc

SEQ ID NO: 12328 - DNA, 80 bp, synthetic construct
  misc_feature 1..80: note = Synthetic: >LC270039.1-cand-4500-4579
  source 1..80: mol_type = other DNA
gcctttgtccactcgtcctcccactagtagtattaccacgtccactattcgtccccctgtaactgtagaacccattggtc

SEQ ID NO: 12329 - DNA, 80 bp, synthetic construct
  misc_feature 1..80: note = Synthetic: >LC270039.1-cand-4580-4659
  source 1..80: mol_type = other DNA
ccttagaaccatctatagtttctatgatagaagaaacaacatttattgagtctggcgcacctgctccatctattccatca

SEQ ID NO: 12330 - DNA, 80 bp, synthetic construct
  misc_feature 1..80: note = Synthetic: >LC270039.1-cand-4660-4739
  source 1..80: mol_type = other DNA
gcaacagggtttgatgttacaacatctgcaaataatactcctgcaataattaatgtaacatctataggtgaatcatctgt

SEQ ID NO: 12331 - DNA, 80 bp, synthetic construct
  misc_feature 1..80: note = Synthetic: >LC270039.1-cand-4740-4819
  source 1..80: mol_type = other DNA
acaatcagtttctatcatctgtacaatcagtttctacacatttaaatcctacattcactgaaccatctataatacagccc

SEQ ID NO: 12332 - DNA, 80 bp, synthetic construct
  misc_feature 1..80: note = Synthetic: >LC270039.1-cand-4820-4899
  source 1..80: mol_type = other DNA
ccggcacctgcagaagcatctggtcatgtattgttttctagtccaactattagtacacacacctatgaagaaatccctat

SEQ ID NO: 12333 - DNA, 80 bp, synthetic construct
  misc_feature 1..80: note = Synthetic: >LC270039.1-cand-4900-4979
  source 1..80: mol_type = other DNA
ggatacatttgttacctctactgacagcagcagtgtaacaagtagtacacctattccagggtctcgccctacgacacgcc

SEQ ID NO: 12334 - DNA, 80 bp, synthetic construct
  misc_feature 1..80: note = Synthetic: >LC270039.1-cand-4980-5059
  source 1..80: mol_type = other DNA
ttggtttatatagccgtgccacacaacaggttaaggtagtcgaccctgcttttatgtcatcaccacaaaaattagtaaca

SEQ ID NO: 12335 - DNA, 80 bp, synthetic construct
  misc_feature 1..80: note = Synthetic: >LC270039.1-cand-5060-5139
  source 1..80: mol_type = other DNA
tataacaatcctgtttttgagggcgttgatacagatgaaactataatttttgatcgttcacaacttttacctgccccgga

SEQ ID NO: 12336 - DNA, 80 bp, synthetic construct
  misc_feature 1..80: note = Synthetic: >LC270039.1-cand-5140-5219
  source 1..80: mol_type = other DNA
tcctgattttttagacattatagctttgcataggcctgcattaacctctcgaagaggtactgttaggtttagcaggcttg

SEQ ID NO: 12337 - DNA, 80 bp, synthetic construct
  misc_feature 1..80: note = Synthetic: >LC270039.1-cand-5180-5259
  source 1..80: mol_type = other DNA
ttaacctctcgaagaggtactgttaggtttagcaggcttggtaataaggccaccctacgtacacgtagtggaaaacaaat

SEQ ID NO: 12338 - DNA, 80 bp, synthetic construct
  misc_feature 1..80: note = Synthetic: >LC270039.1-cand-5300-5379
  source 1..80: mol_type = other DNA
cagcctgctgaagttcaggaagacatagaattgcaacctttattaccacagtctgtgtccccttacactattaatgatgg

SEQ ID NO: 12339 - DNA, 80 bp, synthetic construct
  misc_feature 1..80: note = Synthetic: >LC270039.1-cand-5380-5459
  source 1..80: mol_type = other DNA
tttgtatgatgtgtatgcagagtctttgcagcaacccacgtttcacttaccttccacactttctacccataataatactt

SEQ ID NO: 12340 - DNA, 80 bp, synthetic construct
  misc_feature 1..80: note = Synthetic: >LC270039.1-cand-5460-5539
  source 1..80: mol_type = other DNA
tcactgtacctattaatagtggtattgactttgtatatcaacccactatgtccattgagtcaggtcctgacattccatta

SEQ ID NO: 12341 - DNA, 80 bp, synthetic construct
  misc_feature 1..80: note = Synthetic: >LC270039.1-cand-5540-5619
  source 1..80: mol_type = other DNA
ccttcgttacccacacatactccttttgttcctatagcccctacagctccatctacatctattattgttgatggtacaga

SEQ ID NO: 12342 - DNA, 80 bp, synthetic construct
  misc_feature 1..80: note = Synthetic: >LC270039.1-cand-5700-5779
  source 1..80: mol_type = other DNA
cggcctagtgaggccactgtgtacctgcctcctgtacctgtctctaaggttgtaagcactgatgagtatgtgtctcgcac

SEQ ID NO: 12343 - DNA, 80 bp, synthetic construct
  misc_feature 1..80: note = Synthetic: >MH539865.1-cand-240-319
  source 1..80: mol_type = other DNA
gattcagggaatggagaagaaggtcattccaacaagtccctcaggacaaattttaaagagtttctttcgtatgacacctg

SEQ ID NO: 12344 - DNA, 80 bp, synthetic construct
  misc_feature 1..80: note = Synthetic: >MH539865.1-cand-330-409
  source 1..80: mol_type = other DNA
gatcacaggtgcattgattgagtttattgaagtcacagtgacagctgatgttgcaaaaggaattcgtgaaaagaaactga

SEQ ID NO: 12345 - DNA, 80 bp, synthetic construct
  misc_feature 1..80: note = Synthetic: >MH539865.1-cand-410-489
  source 1..80: mol_type = other DNA
agtatgaaagtgggcttcagtatattgaattgttgttagatcaggaatataagagaggcaacttaggacaggcatacagg

SEQ ID NO: 12346 - DNA, 80 bp, synthetic construct
  misc_feature 1..80: note = Synthetic: >MH539865.1-cand-490-569
  source 1..80: mol_type = other DNA
atcacatttaatgtagtggctgtcaaaacagatggttcaaatatctccacccagtggccaagtaggcgtaatgatggagt

SEQ ID NO: 12347 - DNA, 80 bp, synthetic construct
  misc_feature 1..80: note = Synthetic: >MH539865.1-cand-570-649
  source 1..80: mol_type = other DNA
ggtgcaacatatgagattgatacaggccgatattaattatgttagagaacatcttataaggtctgatgaacgtgcttcac

SEQ ID NO: 12348 - DNA, 80 bp, synthetic construct
  misc_feature 1..80: note = Synthetic: >MH539865.1-cand-650-729
  source 1..80: mol_type = other DNA
tggaggctatgtttaatttaaagttccacataggaggtcccaaattgagatacttcaatatacctgattacaagccacag

SEQ ID NO: 12349 - DNA, 80 bp, synthetic construct
  misc_feature 1..80: note = Synthetic: >MH539865.1-cand-730-809
  source 1..80: mol_type = other DNA
tcactttgtcaaccagaaattaacaacctactacagtattgtaaacattggcttacagaagatcatgactttgtgtataa

SEQ ID NO: 12350 - DNA, 80 bp, synthetic construct
  misc_feature 1..80: note = Synthetic: >MH539865.1-cand-810-889
  source 1..80: mol_type = other DNA
agaagtcacaggtactagtgtgatgaattcttttgaaaataatgaggagttatatatgtccagataccgagaatctcgta

SEQ ID NO: 12351 - DNA, 80 bp, synthetic construct
  misc_feature 1..80: note = Synthetic: >MH539865.1-cand-890-969
  source 1..80: mol_type = other DNA
aaccgcgtaattttttgttgatacaagggtctattcaagggccttacctcccttctacaattagctctgatcaatgtgat

SEQ ID NO: 12352 - DNA, 80 bp, synthetic construct
  misc_feature 1..80: note = Synthetic: >MH539865.1-cand-970-1049
  source 1..80: mol_type = other DNA
acaagaattggttgtctagaagttttaaaagtaaaccctgaaacaccagtacaagcaatcgcagttgatatggcatacaa

SEQ ID NO: 12353 - DNA, 80 bp, synthetic construct
  misc_feature 1..80: note = Synthetic: >MH539865.1-cand-1050-1129
  source 1..80: mol_type = other DNA
gtacatggagctcaataaagacgagattataaactattataaccctagggtccattttcagtcaacgcagtcagtaaaag

SEQ ID NO: 12354 - DNA, 80 bp, synthetic construct
  misc_feature 1..80: note = Synthetic: >MH539865.1-cand-1130-1209
  source 1..80: mol_type = other DNA
agcctggaactttcaaattaggcctttcacaattgaatcccatgtctaaggcaatattggatcaagtagggaaacataaa

SEQ ID NO: 12355 - DNA, 80 bp, synthetic construct
  misc_feature 1..80: note = Synthetic: >MH539865.1-cand-1230-1309
  source 1..80: mol_type = other DNA
ggagttactagagagtattaatattgcaagtcaaatccaacagaatgaatgttcacgtgttattgaatctatcctttcca

SEQ ID NO: 12356 - DNA, 80 bp, synthetic construct
  misc_feature 1..80: note = Synthetic: >MH539865.1-cand-1330-1409
  source 1..80: mol_type = other DNA
gaggtcacaatgaatttagcaaatccaaggaaaacaactggtgtggatgagctgctgggaaaattttatgagaatgaact

SEQ ID NO: 12357 - DNA, 80 bp, synthetic construct
  misc_feature 1..80: note = Synthetic: >MH539865.1-cand-1380-1459
  source 1..80: mol_type = other DNA
gctgctgggaaaattttatgagaatgaacttctaaaatatttaattagtattttaaggaagactgcagcttggcatttag

SEQ ID NO: 12358 - DNA, 80 bp, synthetic construct
  misc_feature 1..80: note = Synthetic: >MH539865.1-cand-1460-1539
  source 1..80: mol_type = other DNA
ggcaccttgtgagagacataactgagagtttaattgcacatgctggcttgaagagatctaaatattggtctattcatgca

SEQ ID NO: 12359 - DNA, 80 bp, synthetic construct
  misc_feature 1..80: note = Synthetic: >MH539865.1-cand-5450-5529
  source 1..80: mol_type = other DNA
caaatgtaccatgtatagtgtttaagcattgtgcactacgtaccgggctaaggacaaagcaggccataaataaagaattt

SEQ ID NO: 12360 - DNA, 80 bp, synthetic construct
  misc_feature 1..80: note = Synthetic: >MH539865.1-cand-5530-5609
  source 1..80: mol_type = other DNA
atgataaatgtgcaagcagatggttttagggctattgcacagatggatgtcgaaagtccaagatttttgctggcacatgc

SEQ ID NO: 12361 - DNA, 80 bp, synthetic construct
  misc_feature 1..80: note = Synthetic: >MH539865.1-cand-5610-5689
  source 1..80: mol_type = other DNA
atatcatactttacgtgatgttaggtatcaggctgttcaagctgtaggtaatgtgtggtttcaaactactcaacacaagt

SEQ ID NO: 12362 - DNA, 80 bp, synthetic construct
  misc_feature 1..80: note = Synthetic: >MH539865.1-cand-5690-5769
  source 1..80: mol_type = other DNA
tattcataaatcctattatatcatcaggtttgttggagaactttatgaaaggactccctgcagccatccctcctgcagct

SEQ ID NO: 12363 - DNA, 80 bp, synthetic construct
  misc_feature 1..80: note = Synthetic: >MH539865.1-cand-5770-5849
  source 1..80: mol_type = other DNA
tattctttgataatgaataaagctaagatatctgtagacctttttatgtttaatgaattattagctctagtcaatcctaa

SEQ ID NO: 12364 - DNA, 80 bp, synthetic construct
  misc_feature 1..80: note = Synthetic: >MH539865.1-cand-5850-5929
  source 1..80: mol_type = other DNA
aaatgttcttaatcttgatgggatagaagaaacatcagaaggttatagtactgttacttctgtgtctagtcgtcaatggt

SEQ ID NO: 12365 - DNA, 80 bp, synthetic construct
  misc_feature 1..80: note = Synthetic: >MH539865.1-cand-5930-6009
  source 1..80: mol_type = other DNA
cagaagaggtgagtttgatggctgatgatgacatagatgatgatgaagagttcactattgcactggatgatatcgatttt

SEQ ID NO: 12366 - DNA, 80 bp, synthetic construct
  misc_feature 1..80: note = Synthetic: >MH539865.1-cand-6010-6089
  source 1..80: mol_type = other DNA
gagcaaattgatcttgatgaggatatacaacattttctgcaggatgagtcagcatatactggtgacttgacaatccagac

SEQ ID NO: 12367 - DNA, 80 bp, synthetic construct
  misc_feature 1..80: note = Synthetic: >MH539865.1-cand-6120-6199
  source 1..80: mol_type = other DNA
tgtcacacgtgtattagaaccagttaagttaataaaaagttgggtgtccaaaggcctagctattgataaagtgtataatc

SEQ ID NO: 12368 - DNA, 80 bp, synthetic construct
  misc_feature 1..80: note = Synthetic: >MH539865.1-cand-6170-6249
  source 1..80: mol_type = other DNA
aaggcctagctattgataaagtgtataatcccgttgggattgtattgatggcaaggtatatgtctaagaactataatttt

SEQ ID NO: 12369 - DNA, 80 bp, synthetic construct
  misc_feature 1..80: note = Synthetic: >MH539865.1-cand-6240-6319
  source 1..80: mol_type = other DNA
ctataattttaataagataccattggccttattaaatccttatgatttgacagaatttgagagtgttgtaaagggctggg

SEQ ID NO: 12370 - DNA, 80 bp, synthetic construct
  misc_feature 1..80: note = Synthetic: >MH539865.1-cand-6330-6409
  source 1..80: mol_type = other DNA
gaatgataggtttttagaggttgatggcgatgcacagaggctagttagggaaaagaatatattacctgaggacatattgc

SEQ ID NO: 12371 - DNA, 80 bp, synthetic construct
  misc_feature 1..80: note = Synthetic: >MH539865.1-cand-6390-6469
  source 1..80: mol_type = other DNA
attacctgaggacatattgccagactcactgttctcattcagacatgttgatgtgttattaaagaggttattccctcgtg

SEQ ID NO: 12372 - DNA, 80 bp, synthetic construct
  misc_feature 1..80: note = Synthetic: >MH539865.1-cand-6470-6549
  source 1..80: mol_type = other DNA
atcctgtctcatcattttattgataattgtcatttgtttatgctatatacggttatctctagtgctctgttctcggagca

SEQ ID NO: 12373 - DNA, 80 bp, synthetic construct
  misc_feature 1..80: note = Synthetic: >MH539866.1-cand-60-139
  source 1..80: mol_type = other DNA
tttgcatcttcatcgtggtccttactactgctactgctggactgacacggaatctttatgagttaaaaatagaatgtcca

SEQ ID NO: 12374 - DNA, 80 bp, synthetic construct
  misc_feature 1..80: note = Synthetic: >MH539866.1-cand-90-169
  source 1..80: mol_type = other DNA
ctactgctggactgacacggaatctttatgagttaaaaatagaatgtccacatacagtaggtttaggccaaggttatgtg

SEQ ID NO: 12375 - DNA, 80 bp, synthetic construct
  misc_feature 1..80: note = Synthetic: >NC_001563.2-cand-8480-8559
  source 1..80: mol_type = other DNA
ctcaattctgatactagcaagatcaagaaccgaattgagaggctgaagaaagaatacagctccacatggcaccaggatgc

SEQ ID NO: 12376 - DNA, 80 bp, synthetic construct
  misc_feature 1..80: note = Synthetic: >NC_001563.2-cand-8560-8639
  source 1..80: mol_type = other DNA
gaaccacccctacaggacctggaactaccacggaagctatgaagtgaaaccaaccggctcagccagctcccttgtgaatg

SEQ ID NO: 12377 - DNA, 80 bp, synthetic construct
  misc_feature 1..80: note = Synthetic: >NC_001563.2-cand-8640-8719
  source 1..80: mol_type = other DNA
gggtagtcagattactctcaaaaccatgggacactatcaccaatgtgaccacgatggccatgacagacaccactcctttc

SEQ ID NO: 12378 - DNA, 80 bp, synthetic construct
  misc_feature 1..80: note = Synthetic: >NC_001563.2-cand-8720-8799
  source 1..80: mol_type = other DNA
ggtcaacaacgagtgttcaaggaaaaggtggacacaaaggctccagagcctccagaaggagtcaaatacgtcctcaatga

SEQ ID NO: 12379 - DNA, 80 bp, synthetic construct
  misc_feature 1..80: note = Synthetic: >NC_001563.2-cand-8800-8879
  source 1..80: mol_type = other DNA
gaccacgaactggctgtgggcttttttagcccgcgataagaaacccaggatgtgttcccgggaggaatttattggaaaag

SEQ ID NO: 12380 - DNA, 80 bp, synthetic construct
  misc_feature 1..80: note = Synthetic: >NC_001563.2-cand-8880-8959
  source 1..80: mol_type = other DNA
tcaacagtaatgccgccctaggagcgatgtttgaagaacagaaccaatggaagaacgcccgggaagctgtagaggatcca

SEQ ID NO: 12381 - DNA, 80 bp, synthetic construct
  misc_feature 1..80: note = Synthetic: >NC_001563.2-cand-8960-9039
  source 1..80: mol_type = other DNA
aagttttgggagatggtggatgaggagcgtgaagcgcatctccgtggagaatgcaacacctgcatctacaacatgatggg

SEQ ID NO: 12382 - DNA, 80 bp, synthetic construct
  misc_feature 1..80: note = Synthetic: >NC_001563.2-cand-9030-9109
  source 1..80: mol_type = other DNA
acatgatgggaaagagagagaagaagcctggagagttcggcaaagctaaaggcagcagagccatctggttcatgtggctg

SEQ ID NO: 12383 - DNA, 80 bp, synthetic construct
  misc_feature 1..80: note = Synthetic: >NC_001563.2-cand-9120-9199
  source 1..80: mol_type = other DNA
tcctggagtttgaagctctcggattcctcaatgaagaccactggctgggtaggaagaactcaggaggaggagttgaaggc

SEQ ID NO: 12384 - DNA, 80 bp, synthetic construct
  misc_feature 1..80: note = Synthetic: >NC_001563.2-cand-9200-9279
  source 1..80: mol_type = other DNA
ttaggactgcagaagctcgggtacatcttgaaggaagttggaacaaagcctggaggaaaggtttacgctgatgataccgc

SEQ ID NO: 12385 - DNA, 80 bp, synthetic construct
  misc_feature 1..80: note = Synthetic: >NC_001563.2-cand-9280-9359
  source 1..80: mol_type = other DNA
aggctgggacacacgcatcaccaaagctgacctcgagaatgaagcgaaggttcttgaactgctggatggagaacatcgac

SEQ ID NO: 12386 - DNA, 80 bp, synthetic construct
  misc_feature 1..80: note = Synthetic: >NC_001563.2-cand-9360-9439
  source 1..80: mol_type = other DNA
gtttagcgcggtccatcatcgagctcacataccgacacaaagtcgtgaaagtgatgaggccagcggccgacgggaaaact

SEQ ID NO: 12387 - DNA, 80 bp, synthetic construct
  misc_feature 1..80: note = Synthetic: >NC_001563.2-cand-9440-9519
  source 1..80: mol_type = other DNA
gtgatggacgtcatctctagagaggatcagagaggaagcggtcaggtagtgacttacgccctgaacaccttcaccaatct

SEQ ID NO: 12388 - DNA, 80 bp, synthetic construct
  misc_feature 1..80: note = Synthetic: >NC_001563.2-cand-9560-9639
  source 1..80: mol_type = other DNA
attggacccgatgatgttgaaaaactgggaaaaggaaaaggccctaaggtcagaacctggctgtttgagaatggcgagga

SEQ ID NO: 12389 - DNA, 80 bp, synthetic construct
  misc_feature 1..80: note = Synthetic: >NC_001563.2-cand-9600-9679
  source 1..80: mol_type = other DNA
gccctaaggtcagaacctggctgtttgagaatggcgaggagcgtctcagtcgcatggccgtcagcggtgatgactgcgtg

SEQ ID NO: 12390 - DNA, 80 bp, synthetic construct
  misc_feature 1..80: note = Synthetic: >NC_001563.2-cand-9680-9759
  source 1..80: mol_type = other DNA
gtgaaacctttggacgaccgcttcgccacatcactacacttcctaaatgctatgtcaaaggtccgcaaagacatccagga

SEQ ID NO: 12391 - DNA, 80 bp, synthetic construct
  misc_feature 1..80: note = Synthetic: >NC_001611.1-cand-3070-3149
  source 1..80: mol_type = other DNA
tactagacaatattccatatagttattagttaagggtacccaattagaacacgtacgcttattatcatcattcggatcgt

SEQ ID NO: 12392 - DNA, 80 bp, synthetic construct
  misc_feature 1..80: note = Synthetic: >NC_001611.1-cand-3390-3469
  source 1..80: mol_type = other DNA
tagttacgcttatttttatgtgttttatgttgatttattatatttataagaatgattgtttgacaaatcacgagaactat

SEQ ID NO: 12393 - DNA, 80 bp, synthetic construct
  misc_feature 1..80: note = Synthetic: >NC_001611.1-cand-3470-3549
  source 1..80: mol_type = other DNA
taagacatatattattagaggtatatattataaaaaagtttttgattacgatgttataagaggaaaaaggacacattaac

SEQ ID NO: 12394 - DNA, 80 bp, synthetic construct
  misc_feature 1..80: note = Synthetic: >NC_001611.1-cand-3550-3629
  source 1..80: mol_type = other DNA
atcatacatcaattaacattcttataacatcgtaatcaaaagaattgcaattttgatgtataacaactgtcaatgaatta

SEQ ID NO: 12395 - DNA, 80 bp, synthetic construct
  misc_feature 1..80: note = Synthetic: >NC_001611.1-cand-3630-3709
  source 1..80: mol_type = other DNA
tggaattgtatattacacattatacggtatgttggcaacgacaaataccgattggtaattgtttaccggtgtaatagaat

SEQ ID NO: 12396 - DNA, 80 bp, synthetic construct
  misc_feature 1..80: note = Synthetic: >NC_001611.1-cand-3710-3789
  source 1..80: mol_type = other DNA
ttatatatctattacaccggccaagtatgcataataataagttgtgggtagtatcatccacatatttataatttaggact

SEQ ID NO: 12397 - DNA, 80 bp, synthetic construct
  misc_feature 1..80: note = Synthetic: >NC_001611.1-cand-3790-3869
  source 1..80: mol_type = other DNA
ttgtattcagtatttttggaatcataaaaaaaagttttaccattttaaaatttaaaaagtatttacatttttttcactgt

SEQ ID NO: 12398 - DNA, 80 bp, synthetic construct
  misc_feature 1..80: note = Synthetic: >NC_001611.1-cand-3870-3949
  source 1..80: mol_type = other DNA
ttagtcgcggatatggaatttgatcctaccaaaatcaatatatcatctatagatcatgtaacaatattacaatacataga

SEQ ID NO: 12399 - DNA, 80 bp, synthetic construct
  misc_feature 1..80: note = Synthetic: >NC_001611.1-cand-4030-4109
  source 1..80: mol_type = other DNA
taaatccacatttggctaatcaatttcgggcttggaaaaaacgtatcgctggaagggactatatgactaacttatctaga

SEQ ID NO: 12400 - DNA, 80 bp, synthetic construct
  misc_feature 1..80: note = Synthetic: >NC_001611.1-cand-4110-4189
  source 1..80: mol_type = other DNA
gatacaggaatacaacaatcaaaccttactgaaactatacgtaactgtcaaaaaaatagaaacatatatggtctatatat

SEQ ID NO: 12401 - DNA, 80 bp, synthetic construct
  misc_feature 1..80: note = Synthetic: >NC_001611.1-cand-4270-4349
  source 1..80: mol_type = other DNA
attggtacatagataataatacctatactccaaatacacccaataatacaacaaccatttctgagttggatatcatcaaa

SEQ ID NO: 12402 - DNA, 80 bp, synthetic construct
  misc_feature 1..80: note = Synthetic: >NC_001611.1-cand-4510-4589
  source 1..80: mol_type = other DNA
atagaacacgaagagaaactggtgcgtcggataattgtcctatatgtcgtacccgttttagaaacataacaatgagtaag

SEQ ID NO: 12403 - DNA, 80 bp, synthetic construct
  misc_feature 1..80: note = Synthetic: >NC_001611.1-cand-4590-4669
  source 1..80: mol_type = other DNA
ttctataagctagttaactaataaataaaaagtttaatttgttgacgacatatatcgttatttttctcgtatgaaagatt

SEQ ID NO: 12404 - DNA, 80 bp, synthetic construct
  misc_feature 1..80: note = Synthetic: >NC_001611.1-cand-4670-4749
  source 1..80: mol_type = other DNA
aatttgattctaatataatctttagtattagatgaactttaattcaaatttccattagattatatcataaataaaaatag

SEQ ID NO: 12405 - DNA, 80 bp, synthetic construct
  misc_feature 1..80: note = Synthetic: >NC_001611.1-cand-4750-4829
  source 1..80: mol_type = other DNA
tagcacgtgctactttagccaaatattcttttttgaaacgccatttagcgtagtgaggacacaagtgaacctataatgag

SEQ ID NO: 12406 - DNA, 80 bp, synthetic construct
  misc_feature 1..80: note = Synthetic: >NC_001611.1-cand-5000-5079
  source 1..80: mol_type = other DNA
ggcatatgttccacacatcctgaacaataaaattctccagatgatgttacaatgtctagatttggacatttggtttcaac

SEQ ID NO: 12407 - DNA, 80 bp, synthetic construct
  misc_feature 1..80: note = Synthetic: >NC_001611.1-cand-86070-86149
  source 1..80: mol_type = other DNA
tagagtataagaaatttaccaacgataaaggctttcctaaagaatatggttctggtaaaattgtgttatacaacggcgtt

SEQ ID NO: 12408 - DNA, 80 bp, synthetic construct
  misc_feature 1..80: note = Synthetic: >NC_001611.1-cand-86150-86229
  source 1..80: mol_type = other DNA
aattatctaaataatatctattgtttggaatatattaatacacataatgaagtgggtattaagtccgtggttgtacctat

SEQ ID NO: 12409 - DNA, 80 bp, synthetic construct
  misc_feature 1..80: note = Synthetic: >NC_001611.1-cand-86240-86319
  source 1..80: mol_type = other DNA
gcagaattcttagtcaatggagaaatacttaaacctagaatcgataaaaccatgaaatatattaactcagaagactatta

SEQ ID NO: 12410 - DNA, 80 bp, synthetic construct
  misc_feature 1..80: note = Synthetic: >NC_001611.1-cand-86320-86399
  source 1..80: mol_type = other DNA
tggaaatcaacataatgtcatagttgaacatttaagagatcaaagcatcaaaataggagatgtctttaacgaggacaaac

SEQ ID NO: 12411 - DNA, 80 bp, synthetic construct
  misc_feature 1..80: note = Synthetic: >NC_001611.1-cand-86400-86479
  source 1..80: mol_type = other DNA
tatctgatgtaggacatcaatatgccaataatgataaatttagattaaatccagaagttagttattttacgaataaaaga

SEQ ID NO: 12412 - DNA, 80 bp, synthetic construct
  misc_feature 1..80: note = Synthetic: >NC_001611.1-cand-86800-86879
  source 1..80: mol_type = other DNA
ttattttggaaagtttaatatcatcgactggcagtttgctatccattattctttccatccgagacattatgctaccatca

SEQ ID NO: 12413 - DNA, 80 bp, synthetic construct
  misc_feature 1..80: note = Synthetic: >NC_001611.1-cand-87440-87519
  source 1..80: mol_type = other DNA
attgttaatagatatattaatacttttgtcgggtaacaaaggttctacgtcttctaaaaataaaagtttgataacatctg

SEQ ID NO: 12414 - DNA, 80 bp, synthetic construct
  misc_feature 1..80: note = Synthetic: >NC_001611.1-cand-87840-87919
  source 1..80: mol_type = other DNA
ttaaaggagcatgtatttttttctaaatatattgtaactccagatacatatggatctttatgtgtagaattaaatggatc

SEQ ID NO: 12415 - DNA, 80 bp, synthetic construct
  misc_feature 1..80: note = Synthetic: >NC_001611.1-cand-88000-88079
  source 1..80: mol_type = other DNA
ccaatcatatatctgaagatatacccgaagatatacacactaataaatttattatttatgatatttatacgtttgattcg

SEQ ID NO: 12416 - DNA, 80 bp, synthetic construct
  misc_feature 1..80: note = Synthetic: >NC_001611.1-cand-88080-88159
  source 1..80: mol_type = other DNA
ttcaaaaataaacgattggtatttgtacaggtacctacatcattaggagatgatagctatttaactaacccgttattgtc

SEQ ID NO: 12417 - DNA, 80 bp, synthetic construct
  misc_feature 1..80: note = Synthetic: >NC_001611.1-cand-88320-88399
  source 1..80: mol_type = other DNA
ctaacgagaatatgttataatagagataagtttaaggcgtttgcattcgcttggtttaacggcgttttggaaaatgaaaa

SEQ ID NO: 12418 - DNA, 80 bp, synthetic construct
  misc_feature 1..80: note = Synthetic: >NC_001611.1-cand-88560-88639
  source 1..80: mol_type = other DNA
agacgtcgcctattcctgataagttctttatacagttgaaacaaccgcttagaaataagcgcgtatgtgtgtgtggtata

SEQ ID NO: 12419 - DNA, 80 bp, synthetic construct
  misc_feature 1..80: note = Synthetic: >NC_001611.1-cand-88640-88719
  source 1..80: mol_type = other DNA
gatccgtatccgaaagatggaactggtgtaccgttcgagtcaccaaattttacaaaaaaatcaattaaggagatagcatc

SEQ ID NO: 12420 - DNA, 80 bp, synthetic construct
  misc_feature 1..80: note = Synthetic: >NC_001611.1-cand-88700-88779
  source 1..80: mol_type = other DNA
tcaattaaggagatagcatcttctatatctagattaaccggagtaattgattataaaggttataaccttaatataataga

SEQ ID NO: 12421 - DNA, 80 bp, synthetic construct
  misc_feature 1..80: note = Synthetic: >NC_001611.1-cand-88960-89039
  source 1..80: mol_type = other DNA
aactaccatagtgggatatcatccagcagctagagaccgtcaattcgagaaagatagatcatttgaaattatcaacgttt

SEQ ID NO: 12422 - DNA, 80 bp, synthetic construct
  misc_feature 1..80: note = Synthetic: >NC_001611.1-cand-89520-89599
  source 1..80: mol_type = other DNA
agttttcatatcatctttttagatacgtataccactatggataccttgatagccatgaaacgaacactattagaattaag

SEQ ID NO: 12423 - DNA, 80 bp, synthetic construct
  misc_feature 1..80: note = Synthetic: >NC_001722.1-cand-7130-7209
  source 1..80: mol_type = other DNA
tgaaacttctaactgcatagaaaacaacacatgcgcaggattagggtatgaggagatgatgcaatgtgagttcaatatga

SEQ ID NO: 12424 - DNA, 80 bp, synthetic construct
  misc_feature 1..80: note = Synthetic: >NC_001722.1-cand-7230-7309
  source 1..80: mol_type = other DNA
aaaaggaggtataaggacacatggtatttagaagatgtggtttgtgacaacacaacagctggcacatgttacatgagaca

SEQ ID NO: 12425 - DNA, 80 bp, synthetic construct
  misc_feature 1..80: note = Synthetic: >NC_001722.1-cand-7310-7389
  source 1..80: mol_type = other DNA
ttgcaacacatcaatcatcaaagagtcatgtgataagcactattgggatgctatgaggtttagatactgtgcaccaccgg

SEQ ID NO: 12426 - DNA, 80 bp, synthetic construct
  misc_feature 1..80: note = Synthetic: >NC_001722.1-cand-7390-7469
  source 1..80: mol_type = other DNA
gctttgccctattaagatgtaatgataccaactattcaggctttgaacctaagtgcactaaagtagtagctgcttcatgc

SEQ ID NO: 12427 - DNA, 80 bp, synthetic construct
  misc_feature 1..80: note = Synthetic: >NC_001722.1-cand-7470-7549
  source 1..80: mol_type = other DNA
acaaggatgatggaaacgcaaacttctacttggtttggctttaatggcactagagcagaaaatagaacatatatctattg

SEQ ID NO: 12428 - DNA, 80 bp, synthetic construct
  misc_feature 1..80: note = Synthetic: >NC_001722.1-cand-7550-7629
  source 1..80: mol_type = other DNA
gcatggcagagataataggactatcattagcttaaacaagtattataatctcacaatgcgttgtaagagaccaggaaata

SEQ ID NO: 12429 - DNA, 80 bp, synthetic construct
  misc_feature 1..80: note = Synthetic: >NC_001722.1-cand-7630-7709
  source 1..80: mol_type = other DNA
agacagttttaccaataacacttatgtcaggattagtgtttcactctcagccaatcaacacaaggcctaggcaggcatgg

SEQ ID NO: 12430 - DNA, 80 bp, synthetic construct
  misc_feature 1..80: note = Synthetic: >NC_001722.1-cand-7710-7789
  source 1..80: mol_type = other DNA
tgccggtttggaggcagatggagggaagccatgcaggaggtgaagcaaacccttgtacaacatcccagatacaaaggaat

SEQ ID NO: 12431 - DNA, 80 bp, synthetic construct
  misc_feature 1..80: note = Synthetic: >NC_001722.1-cand-7780-7859
  source 1..80: mol_type = other DNA
acaaaggaatcaatgatacagggaaaattaactttacgaaaccgggagcaggctcagacccggaagtggcatttatgtgg

SEQ ID NO: 12432 - DNA, 80 bp, synthetic construct
  misc_feature 1..80: note = Synthetic: >NC_001722.1-cand-7860-7939
  source 1..80: mol_type = other DNA
actaactgcagaggagaatttctctactgtaacatgacttggttcctcaattgggtagaagacaagaaccaaacacggcg

SEQ ID NO: 12433 - DNA, 80 bp, synthetic construct
  misc_feature 1..80: note = Synthetic: >NC_001722.1-cand-7930-8009
  source 1..80: mol_type = other DNA
aaacacggcgcaactattgccatataaagcagataattaatacctggcataaagtagggaaaaatgtatatttgcctcct

SEQ ID NO: 12434 - DNA, 80 bp, synthetic construct
  misc_feature 1..80: note = Synthetic: >NC_001722.1-cand-8020-8099
  source 1..80: mol_type = other DNA
agttggcctgtgaatcaacagtaaccagcataattgctaacattgacatagataaaaatcggactcataccaacattacc

SEQ ID NO: 12435 - DNA, 80 bp, synthetic construct
  misc_feature 1..80: note = Synthetic: >NC_001722.1-cand-8100-8179
  source 1..80: mol_type = other DNA
tttagtgcagaagtggcagaactgtaccgattagaactgggagactacaaattaatagaaataacaccaattggcttcgc

SEQ ID NO: 12436 - DNA, 80 bp, synthetic construct
  misc_feature 1..80: note = Synthetic: >NC_001722.1-cand-8180-8259
  source 1..80: mol_type = other DNA
acctacagatcagagaaggtactcctcaactccagtgaggaacaaaagaggtgtgttcgtgctagggttcttgggttttc

SEQ ID NO: 12437 - DNA, 80 bp, synthetic construct
  misc_feature 1..80: note = Synthetic: >NC_001722.1-cand-8260-8339
  source 1..80: mol_type = other DNA
tcgcgacagcaggttctgcaatgggcgcgcggtccctgacgctgtcagcccagtcccggactttactggccgggatagtg

SEQ ID NO: 12438 - DNA, 80 bp, synthetic construct
  misc_feature 1..80: note = Synthetic: >NC_001722.1-cand-8320-8399
  source 1..80: mol_type = other DNA
ctttactggccgggatagtgcagcaacagcaacagctgttggacgtagtcaagagacaacaagaaatgttgcgactgacc

SEQ ID NO: 12439 - DNA, 80 bp, synthetic construct
  misc_feature 1..80: note = Synthetic: >NC_001906.3-cand-3010-3089
  source 1..80: mol_type = other DNA
gagtattactatggatctgggaggagaggagatctctcaaaatctcctcctagaggtaatgtcaatctggacagcatcaa

SEQ ID NO: 12440 - DNA, 80 bp, synthetic construct
  misc_feature 1..80: note = Synthetic: >NC_001906.3-cand-3090-3169
  source 1..80: mol_type = other DNA
gatttacacttcggacgacgaggatgaaaatcagctggagtatgaggatgagtttgccaaaagctcaagtgaggttgtca

SEQ ID NO: 12441 - DNA, 80 bp, synthetic construct
  misc_feature 1..80: note = Synthetic: >NC_001906.3-cand-3140-3219
  source 1..80: mol_type = other DNA
agtttgccaaaagctcaagtgaggttgtcattgacactactcctgaggacaatgattctatcaaccaggaggaagtagtt

SEQ ID NO: 12442 - DNA, 80 bp, synthetic construct
  misc_feature 1..80: note = Synthetic: >NC_001906.3-cand-3270-3349
  source 1..80: mol_type = other DNA
cccggagaaagaagaaactcctgatgtacgcagaaaggattccctaatgcaggacagttgtaagagaggaggagtaccga

SEQ ID NO: 12443 - DNA, 80 bp, synthetic construct
  misc_feature 1..80: note = Synthetic: >NC_001906.3-cand-3330-3409
  source 1..80: mol_type = other DNA
taagagaggaggagtaccgaaaagactgcccatgttatctgaagagttcgagtgctccggatcagatgatccaataatac

SEQ ID NO: 12444 - DNA, 80 bp, synthetic construct
  misc_feature 1..80: note = Synthetic: >NC_001906.3-cand-3410-3489
  source 1..80: mol_type = other DNA
aagaattagaacgagaagggtctcatccaggaggttcattacgtttgagggaaccacctcagtcgtcagggaattccaga

SEQ ID NO: 12445 - DNA, 80 bp, synthetic construct
  misc_feature 1..80: note = Synthetic: >NC_001906.3-cand-3490-3569
  source 1..80: mol_type = other DNA
aatcaacctgaccgtcagctgaagacaggtgatgcagcatcacccggaggcgtccagagaccaggcacaccgatgcctaa

SEQ ID NO: 12446 - DNA, 80 bp, synthetic construct
  misc_feature 1..80: note = Synthetic: >NC_001906.3-cand-3570-3649
  source 1..80: mol_type = other DNA
atcaaggatcatgcccattaaaaagggcacagacgcgaagtctcaatatgttgggacggaagacgtgcctgggtcgaaga

SEQ ID NO: 12447 - DNA, 80 bp, synthetic construct
  misc_feature 1..80: note = Synthetic: >NC_001906.3-cand-3650-3729
  source 1..80: mol_type = other DNA
gtggtgcaacccggtatgttcgcggattaccccccaaccaagaaagcaagagtgttactgcggagaatgtccaactgagt

SEQ ID NO: 12448 - DNA, 80 bp, synthetic construct
  misc_feature 1..80: note = Synthetic: >NC_001906.3-cand-3730-3809
  source 1..80: mol_type = other DNA
gctcccagtgctgtcacgaggaatgaaggacacgaccaggaagttaccagcaacgaagatagtctggatgacaaatatat

SEQ ID NO: 12449 - DNA, 80 bp, synthetic construct
  misc_feature 1..80: note = Synthetic: >NC_001906.3-cand-3810-3889
  source 1..80: mol_type = other DNA
tatgccatcagatgattttgctaacactttcttaccccatgacactgataggttaaattatcatgcagaccatctcaatg

SEQ ID NO: 12450 - DNA, 80 bp, synthetic construct
  misc_feature 1..80: note = Synthetic: >NC_001906.3-cand-3890-3969
  source 1..80: mol_type = other DNA
attacgatttagagaccttgtgtgaggagtcagtattgatgggcatcgttaacgcaatcaaactcatcaacattgatatg

SEQ ID NO: 12451 - DNA, 80 bp, synthetic construct
  misc_feature 1..80: note = Synthetic: >NC_001906.3-cand-3970-4049
  source 1..80: mol_type = other DNA
aggttgaatcacattgaggaacagatgaaagagatacccaagatcatcaacaaaatagactccattgatcgagtgttggc

SEQ ID NO: 12452 - DNA, 80 bp, synthetic construct
  misc_feature 1..80: note = Synthetic: >NC_001906.3-cand-4050-4129
  source 1..80: mol_type = other DNA
taagaccaatactgcattgtcgacaatagaaggacacctagtctcgatgatgatcatgataccagggaaaggcaagggtg

SEQ ID NO: 12453 - DNA, 80 bp, synthetic construct
  misc_feature 1..80: note = Synthetic: >NC_001906.3-cand-4130-4209
  source 1..80: mol_type = other DNA
aaaggaaagggaaaacaaatccggagctaaaacctgtaattgggagaaatatcctagaacagcaagagttattttcattc

SEQ ID NO: 12454 - DNA, 80 bp, synthetic construct
  misc_feature 1..80: note = Synthetic: >NC_001906.3-cand-4180-4259
  source 1..80: mol_type = other DNA
atcctagaacagcaagagttattttcattcgacaatctcaagaatttcagagatgggtcattgactgatgagccctatgg

SEQ ID NO: 12455 - DNA, 80 bp, synthetic construct
  misc_feature 1..80: note = Synthetic: >NC_002209.1-cand-970-1049
  source 1..80: mol_type = other DNA
gaaactgatacagctgaaataagattgatgtgcacaaagacttatctagacactcccagaccggatgatggaagcatagc

SEQ ID NO: 12456 - DNA, 80 bp, synthetic construct
  misc_feature 1..80: note = Synthetic: >NC_002209.1-cand-1060-1139
  source 1..80: mol_type = other DNA
gaatctaatggagacaagtggcttggaggcatcaaaggaggattcgtccatcaaagaatggcatctaagattggaagatg

SEQ ID NO: 12457 - DNA, 80 bp, synthetic construct
  misc_feature 1..80: note = Synthetic: >NC_002209.1-cand-1180-1259
  source 1..80: mol_type = other DNA
gaactgtatgtaaagtatgatggtgacccatggactgacagtgatgctcttactcttagtggagtaatggtttccataga

SEQ ID NO: 12458 - DNA, 80 bp, synthetic construct
  misc_feature 1..80: note = Synthetic: >NC_002209.1-cand-1220-1299
  source 1..80: mol_type = other DNA
gtgatgctcttactcttagtggagtaatggtttccatagaagaacctggttggtattcttttggcttcgaaataaaggac

SEQ ID NO: 12459 - DNA, 80 bp, synthetic construct
  misc_feature 1..80: note = Synthetic: >NC_002209.1-cand-1300-1379
  source 1..80: mol_type = other DNA
aagaaatgtgatgtcccttgtattgggatagagatggtacacgatggtggaaaagatacttggcattcagctgcaacagc

SEQ ID NO: 12460 - DNA, 80 bp, synthetic construct
  misc_feature 1..80: note = Synthetic: >NC_002209.1-cand-1380-1459
  source 1..80: mol_type = other DNA
catttactgtttgatgggctcaggacaattgctatgggacactgtcacaggcgttgatatggctttataatagaggaatg

SEQ ID NO: 12461 - DNA, 80 bp, synthetic construct
  misc_feature 1..80: note = Synthetic: >NC_002209.1-cand-1460-1539
  source 1..80: mol_type = other DNA
gttggatctgttctaaaccctttgttcctattttatttgaacagttgttcttactagatttaattgtttctgaaaaatgc

SEQ ID NO: 12462 - DNA, 80 bp, synthetic construct
  misc_feature 1..80: note = Synthetic: >NC_002210.1-cand-10-89
  source 1..80: mol_type = other DNA
ctttcttaaaatgtcgctgtttggagacacaattgcctacctgctttcactaatagaagatggagaaggcaaagcagaac

SEQ ID NO: 12463 - DNA, 80 bp, synthetic construct
  misc_feature 1..80: note = Synthetic: >NC_002210.1-cand-100-179
  source 1..80: mol_type = other DNA
attacactgttggttcggtgggaaagaatttgacctagattctgctttggaatggataaaaaacaaaaggtgcctaactg

SEQ ID NO: 12464 - DNA, 80 bp, synthetic construct
  misc_feature 1..80: note = Synthetic: >NC_002210.1-cand-190-269
  source 1..80: mol_type = other DNA
agcactaattggtgcctctatatgctttttaaaacccaaagaccaagaaagaaaaaggagattcatcacagagcccctgt

SEQ ID NO: 12465 - DNA, 80 bp, synthetic construct
  misc_feature 1..80: note = Synthetic: >NC_002210.1-cand-280-359
  source 1..80: mol_type = other DNA
aacaacagcaacaaagaagaaaggcctaattctagctgagagaaaaatgagaagatgtgtaagctttcatgaagcatttg

SEQ ID NO: 12466 - DNA, 80 bp, synthetic construct
  misc_feature 1..80: note = Synthetic: >NC_002210.1-cand-330-409
  source 1..80: mol_type = other DNA
gaagatgtgtaagctttcatgaagcatttgaaatagcagaaggccacgaaagctcagcattactatattgtcttatggtc

SEQ ID NO: 12467 - DNA, 80 bp, synthetic construct
  misc_feature 1..80: note = Synthetic: >NC_002210.1-cand-420-499
  source 1..80: mol_type = other DNA
accctgaaaactattcaatgcaagtaaaactaggaacgctctgtgctttatgcgagaaacaagcatcgcactcgcataga

SEQ ID NO: 12468 - DNA, 80 bp, synthetic construct
  misc_feature 1..80: note = Synthetic: >NC_002210.1-cand-510-589
  source 1..80: mol_type = other DNA
gagcagcaaggtcttcggtacctggagtaagacgagaaatgcagatggtttcagctatgaacacagcaaagacaatgaat

SEQ ID NO: 12469 - DNA, 80 bp, synthetic construct
  misc_feature 1..80: note = Synthetic: >NC_002210.1-cand-600-679
  source 1..80: mol_type = other DNA
agggagaagacgtccaaaaactagcagaagagctgcaaaacaacattggagtgttgagatctctaggagcaagtcaaaag

SEQ ID NO: 12470 - DNA, 80 bp, synthetic construct
  misc_feature 1..80: note = Synthetic: >NC_002210.1-cand-680-759
  source 1..80: mol_type = other DNA
aatggagaaggaattgccaaagatgtaatggaagtgctaaaacagagctctatgggaaattcagctcttgtgaggaaata

SEQ ID NO: 12471 - DNA, 80 bp, synthetic construct
  misc_feature 1..80: note = Synthetic: >NC_002728.1-cand-17200-17279
  source 1..80: mol_type = other DNA
cgaagtataggtcttgtccattctgacatggagtctgggattgacaaaaatgtagaggagatactagtagaacattccca

SEQ ID NO: 12472 - DNA, 80 bp, synthetic construct
  misc_feature 1..80: note = Synthetic: >NC_002728.1-cand-17250-17329
  source 1..80: mol_type = other DNA
tgtagaggagatactagtagaacattcccatctaatatctatcgcgataaatgttatgatggaggacggactattagtat

SEQ ID NO: 12473 - DNA, 80 bp, synthetic construct
  misc_feature 1..80: note = Synthetic: >NC_002728.1-cand-17330-17409
  source 1..80: mol_type = other DNA
ccaagatagcatacacccctggattcccaatctcaagattatttaacatgtacagatcatatttcggactagtactggtg

SEQ ID NO: 12474 - DNA, 80 bp, synthetic construct
  misc_feature 1..80: note = Synthetic: >NC_002728.1-cand-17410-17489
  source 1..80: mol_type = other DNA
tgtttcccagtatatagtaatccagattctactgaagtatatcttctttgcttacagaagacggtcaagactattgttcc

SEQ ID NO: 12475 - DNA, 80 bp, synthetic construct
  misc_feature 1..80: note = Synthetic: >NC_002728.1-cand-17490-17569
  source 1..80: mol_type = other DNA
cccgcaaaaagtccttgagcactctaatttgcacgatgaagtcaatgaccagggaataacatcagtgatttttaaaatca

SEQ ID NO: 12476 - DNA, 80 bp, synthetic construct
  misc_feature 1..80: note = Synthetic: >NC_002728.1-cand-17570-17649
  source 1..80: mol_type = other DNA
agaattcacagtctaagcagttccacgatgatctaaagaagtactatcagattgaccaacctttttttgtaccaactaaa

SEQ ID NO: 12477 - DNA, 80 bp, synthetic construct
  misc_feature 1..80: note = Synthetic: >NC_002728.1-cand-17650-17729
  source 1..80: mol_type = other DNA
atcactagtgatgaacaagtacttctccaagcagggctgaaactcaatgggccagaaattcttaagagtgaaatcagtta

SEQ ID NO: 12478 - DNA, 80 bp, synthetic construct
  misc_feature 1..80: note = Synthetic: >NC_002728.1-cand-17730-17809
  source 1..80: mol_type = other DNA
tgatatcggttcagatatcaatacattaagagacaccatcataattatgttaaatgaggctatgaattattttgatgaca

SEQ ID NO: 12479 - DNA, 80 bp, synthetic construct
  misc_feature 1..80: note = Synthetic: >NC_002728.1-cand-17810-17889
  source 1..80: mol_type = other DNA
acagatcaccttcacaccacctagaaccctatccagttttggagagaactagaattaaaacaataatgaattgtgtgact

SEQ ID NO: 12480 - DNA, 80 bp, synthetic construct
  misc_feature 1..80: note = Synthetic: >NC_002728.1-cand-17890-17969
  source 1..80: mol_type = other DNA
aaaaaagtgattgtctactcacttatcaagttcaaggacaccaaaagctcagaactttatcacatcaaaaataacatcag

SEQ ID NO: 12481 - DNA, 80 bp, synthetic construct
  misc_feature 1..80: note = Synthetic: >NC_002728.1-cand-17970-18049
  source 1..80: mol_type = other DNA
aagaaaagttctaatcttagatttcagatcgaagctcatgacaaagactctacctaaagggatgcaagagagaagagaaa

SEQ ID NO: 12482 - DNA, 80 bp, synthetic construct
  misc_feature 1..80: note = Synthetic: >NC_002728.1-cand-18050-18129
  source 1..80: mol_type = other DNA
aaaacggtttcaaagaagtttggatagtagatttatcgaatcgagaagttaaaatctggtggaagataatcggatacata

SEQ ID NO: 12483 - DNA, 80 bp, synthetic construct
  misc_feature 1..80: note = Synthetic: >NC_002728.1-cand-18130-18209
  source 1..80: mol_type = other DNA
tctattatctgatttaaccttccaaatccaagaccaactgataacttatgttgatctaaggttcagttattaagaaaaac

SEQ ID NO: 12484 - DNA, 80 bp, synthetic construct
  misc_feature 1..80: note = Synthetic: >NC_003310.1-cand-0-79
  source 1..80: mol_type = other DNA
gtaaattatatacataattttataattaatttaattttactattttatttagtgtctagaaaaaaatgtgtgacccacga

SEQ ID NO: 12485 - DNA, 80 bp, synthetic construct
  misc_feature 1..80: note = Synthetic: >NC_003310.1-cand-650-729
  source 1..80: mol_type = other DNA
caagagagaaagagaatacgaatagtgatcatatcgtatcacatattgaaacagaaagaagaagtaacgagaggtaactt

SEQ ID NO: 12486 - DNA, 80 bp, synthetic construct
  misc_feature 1..80: note = Synthetic: >NC_003310.1-cand-730-809
  source 1..80: mol_type = other DNA
tttgtgaatgtagttaaacatttttgttttgcaaaccggaatatagtacccggtacacttttttaattcgtggtgcggtg

SEQ ID NO: 12487 - DNA, 80 bp, synthetic construct
  misc_feature 1..80: note = Synthetic: >NC_003310.1-cand-4160-4239
  source 1..80: mol_type = other DNA
tacagaacgtaatagtttaagctcccattgaatttatatctaagataacacagcaatagatcggatgatttactaaagtc

SEQ ID NO: 12488 - DNA, 80 bp, synthetic construct
  misc_feature 1..80: note = Synthetic: >NC_003310.1-cand-4440-4519
  source 1..80: mol_type = other DNA
gtcgtttattcagatcgcagtgtttaataactaatttaaacagatgagatgatatatccacatcaaagaatgcgagatac

SEQ ID NO: 12489 - DNA, 80 bp, synthetic construct
  misc_feature 1..80: note = Synthetic: >NC_003310.1-cand-4520-4599
  source 1..80: mol_type = other DNA
atatgacagacattattgacagaaatgtgaccttcattatcaccgtcgtccataaatgcgttaggtacgtaccacatact

SEQ ID NO: 12490 - DNA, 80 bp, synthetic construct
  misc_feature 1..80: note = Synthetic: >NC_003310.1-cand-4600-4679
  source 1..80: mol_type = other DNA
atcgttaacgatgcgcacaatctcgtccattttcatccatcttcataatgatttactttttcataattagagaaaaagat

SEQ ID NO: 12491 - DNA, 80 bp, synthetic construct
  misc_feature 1..80: note = Synthetic: >NC_003310.1-cand-4680-4759
  source 1..80: mol_type = other DNA
caaggtataaaaattagaagtgttagactataaactaacttataaaactaacttatgacttaactaacttatgactatta

SEQ ID NO: 12492 - DNA, 80 bp, synthetic construct
  misc_feature 1..80: note = Synthetic: >NC_003310.1-cand-4760-4839
  source 1..80: mol_type = other DNA
actcatttcaagaaaggtgggtggagagaactctatatgacagcttgtgaaacaattagatccctaatttctaatggaag

SEQ ID NO: 12493 - DNA, 80 bp, synthetic construct
  misc_feature 1..80: note = Synthetic: >NC_003310.1-cand-4840-4919
  source 1..80: mol_type = other DNA
ttttgataggagattgtcatcagttgatacattgtttattatctcatctattagagcacgtctgtttagagctttagtga

SEQ ID NO: 12494 - DNA, 80 bp, synthetic construct
  misc_feature 1..80: note = Synthetic: >NC_003310.1-cand-4920-4999
  source 1..80: mol_type = other DNA
cctgctcggttacttctgtgtaaatcttgaatcctttagtgatacactgtgtcaaaactggatgtttagaatacctatgt

SEQ ID NO: 12495 - DNA, 80 bp, synthetic construct
  misc_feature 1..80: note = Synthetic: >NC_003310.1-cand-5000-5079
  source 1..80: mol_type = other DNA
agaatatgggaagcatgcttgtttttgtctctattatagattaactcatacatggttgtattatgaattttcatctgcct

SEQ ID NO: 12496 - DNA, 80 bp, synthetic construct
  misc_feature 1..80: note = Synthetic: >NC_003310.1-cand-5080-5159
  source 1..80: mol_type = other DNA
aatgtactccaattcttgtttacaatcaattatataatcaaagagtgatgatgcatacacattacaaagtgaataatcta

SEQ ID NO: 12497 - DNA, 80 bp, synthetic construct
  misc_feature 1..80: note = Synthetic: >NC_003310.1-cand-5160-5239
  source 1..80: mol_type = other DNA
ccatcataaaatacttgatacagagctttatcacatcatggttttcaattgtattattaagtatagctaattttatacag

SEQ ID NO: 12498 - DNA, 80 bp, synthetic construct
  misc_feature 1..80: note = Synthetic: >NC_003310.1-cand-5240-5319
  source 1..80: mol_type = other DNA
tcaatagacaatggttctctaagcaatatttctaatattttaagatgtgtttccctacgggcgatgacagatcccctatc

SEQ ID NO: 12499 - DNA, 80 bp, synthetic construct
  misc_feature 1..80: note = Synthetic: >NC_003310.1-cand-5320-5399
  source 1..80: mol_type = other DNA
cacggccacgtcaagacatgtatatccattactcattactgcgttgacatttgctccattttctaatagccatgatacta

SEQ ID NO: 12500 - DNA, 80 bp, synthetic construct
  misc_feature 1..80: note = Synthetic: >NC_003310.1-cand-5360-5439
  source 1..80: mol_type = other DNA
gcgttgacatttgctccattttctaatagccatgatactaaatctatataacctgcatagatagcgcgataaagcaaggt

SEQ ID NO: 12501 - DNA, 80 bp, synthetic construct
  misc_feature 1..80: note = Synthetic: >NC_003310.1-cand-8200-8279
  source 1..80: mol_type = other DNA
gtatccgattgagattttgcatacaatactagtctagaaagaaatttataatcatcttctgtgacaggagtccatatatc

SEQ ID NO: 12502 - DNA, 80 bp, synthetic construct
  misc_feature 1..80: note = Synthetic: >NC_003310.1-cand-8350-8429
  source 1..80: mol_type = other DNA
tctcgtgcttcagaaaagtcaaatattgtatccatacatctccaaaactatcacttatacgtttatctttaacgaacata

SEQ ID NO: 12503 - DNA, 80 bp, synthetic construct
  misc_feature 1..80: note = Synthetic: >NC_003310.1-cand-8430-8509
  source 1..80: mol_type = other DNA
tacctgatggttatttactaacagacatttttcaagatctattgacaataactcctatagtttccacatcaaccaagtaa

SEQ ID NO: 12504 - DNA, 80 bp, synthetic construct
  misc_feature 1..80: note = Synthetic: >NC_003310.1-cand-8510-8589
  source 1..80: mol_type = other DNA
tgatcatctattgttatataacaataacataactcttttccatttttatcagtatatatatatatatatatatatcaacg

SEQ ID NO: 12505 - DNA, 80 bp, synthetic construct
  misc_feature 1..80: note = Synthetic: >NC_003310.1-cand-8590-8669
  source 1..80: mol_type = other DNA
tcgttgtagtgaatagtagtcattgatctattatatgaaacggatatgtctagttaatattttctttgatttaaagtcta

SEQ ID NO: 12506 - DNA, 80 bp, synthetic construct
  misc_feature 1..80: note = Synthetic: >NC_003310.1-cand-8750-8829
  source 1..80: mol_type = other DNA
gtgtttccaaatatattactagacaatattccatatggttattagttaagggacccgattagaacacgtacgcgcttatt

SEQ ID NO: 12507 - DNA, 80 bp, synthetic construct
  misc_feature 1..80: note = Synthetic: >NC_003310.1-cand-9070-9149
  source 1..80: mol_type = other DNA
tatccattgtcttattagttacgcttatttttatgggttttacattgctttattatattttataagaatgattgtttgac

SEQ ID NO: 12508 - DNA, 80 bp, synthetic construct
  misc_feature 1..80: note = Synthetic: >NC_003310.1-cand-9150-9229
  source 1..80: mol_type = other DNA
aatgtcgtagtatagatatattattagaggaggtataattataaaaagtttctgagtacgatgttataagaggagaggac

SEQ ID NO: 12509 - DNA, 80 bp, synthetic construct
  misc_feature 1..80: note = Synthetic: >NC_003310.1-cand-9220-9299
  source 1..80: mol_type = other DNA
aggagaggacacattaacaatcatacatcaattaactcattcttataacattgtaatcaaaagaattgcaattttgatgt

SEQ ID NO: 12510 - DNA, 80 bp, synthetic construct
  misc_feature 1..80: note = Synthetic: >NC_003310.1-cand-9300-9379
  source 1..80: mol_type = other DNA
ataacaactgtcaatggaattgtatattacaaattacggtatgttgtaacgacaaataccgatcggtaattgtctctgtc

SEQ ID NO: 12511 - DNA, 80 bp, synthetic construct
  misc_feature 1..80: note = Synthetic: >NC_003310.1-cand-9380-9459
  source 1..80: mol_type = other DNA
gctgtaatagaattaattatatatctattacaccgaccttgtatcataataaagttgtggtagtatgatctccatattta

SEQ ID NO: 12512 - DNA, 80 bp, synthetic construct
  misc_feature 1..80: note = Synthetic: >NC_003310.1-cand-9460-9539
  source 1..80: mol_type = other DNA
taatttagtactttgtatttagtatttttggaatcataaaaaagttttactaatttaaaatttaaaaagtatttacattt

SEQ ID NO: 12513 - DNA, 80 bp, synthetic construct
  misc_feature 1..80: note = Synthetic: >NC_003310.1-cand-9540-9619
  source 1..80: mol_type = other DNA
ttttcactgtttagtcgcggatatggaattcgatcctgtcaaaatcaatacatcatctatagatcatgtaacaatattac

SEQ ID NO: 12514 - DNA, 80 bp, synthetic construct
  misc_feature 1..80: note = Synthetic: >NC_003310.1-cand-9700-9779
  source 1..80: mol_type = other DNA
atcacaaaaataaatccacatttggctaatcgatttcgggcttggaaaaaacgtatcgccggaagggactatatgactaa

SEQ ID NO: 12515 - DNA, 80 bp, synthetic construct
  misc_feature 1..80: note = Synthetic: >NC_003310.1-cand-9780-9859
  source 1..80: mol_type = other DNA
cttatctagagatacaggaatacaacaatcaaaacttactgaaactatacgtaactgtcaaaaaaataaaaacatatatg

SEQ ID NO: 12516 - DNA, 80 bp, synthetic construct
  misc_feature 1..80: note = Synthetic: >NC_003310.1-cand-9940-10019
  source 1..80: mol_type = other DNA
gggttggtaaattggtacatagctaataatacatatactccaaatacacccaataatactacaaccatttctgagttgga

SEQ ID NO: 12517 - DNA, 80 bp, synthetic construct
  misc_feature 1..80: note = Synthetic: >NC_003310.1-cand-130840-130919
  source 1..80: mol_type = other DNA
gctaatgttgtaaaccatgtactcatggctacggcattagatgagaaattattcctaattaagaaaatggctgaacacga

SEQ ID NO: 12518 - DNA, 80 bp, synthetic construct
  misc_feature 1..80: note = Synthetic: >NC_003310.1-cand-131040-131119
  source 1..80: mol_type = other DNA
gaaaaagctcaatattgtagcattacgatctctggaggattgtacaaattacgtgactaaatccgagaatatgatagaaa

SEQ ID NO: 12519 - DNA, 80 bp, synthetic construct
  misc_feature 1..80: note = Synthetic: >NC_003310.1-cand-131160-131239
  source 1..80: mol_type = other DNA
agaaacggaatcggtagatcgtctaaaagaattgcttctaaaatgaaaaaaaacactgtttcagaaatggatcaacgact

SEQ ID NO: 12520 - DNA, 80 bp, synthetic construct
  misc_feature 1..80: note = Synthetic: >NC_003310.1-cand-131320-131399
  source 1..80: mol_type = other DNA
attttatattgcatcgattgcatgaaatcttgaccgtcaagcggccactcttatcgtttaagaataatacagaacgaatt

SEQ ID NO: 12521 - DNA, 80 bp, synthetic construct
  misc_feature 1..80: note = Synthetic: >NC_003310.1-cand-131880-131959
  source 1..80: mol_type = other DNA
acatttataacggtcaatattgttttgctgtctcaatatttatctagagtgagtctagaattcattagacgtagtttatc

SEQ ID NO: 12522 - DNA, 80 bp, synthetic construct
  misc_feature 1..80: note = Synthetic: >NC_003310.1-cand-132200-132279
  source 1..80: mol_type = other DNA
tttactaagaaagtttctctactgtatctaccacacttctagatatccagatagagattcgatggtttgtcatcgcatcc

SEQ ID NO: 12523 - DNA, 80 bp, synthetic construct
  misc_feature 1..80: note = Synthetic: >NC_003310.1-cand-132280-132359
  source 1..80: mol_type = other DNA
taacgtacggcaaatattttgagacgttggcacatgatgaattagagaattacataggtaacatccgaaacgatatcatg

SEQ ID NO: 12524 - DNA, 80 bp, synthetic construct
  misc_feature 1..80: note = Synthetic: >NC_003310.1-cand-132360-132439
  source 1..80: mol_type = other DNA
aacaatcacaagaacagaggcacttacgcagtaaacattcatgtactaacaactcctggacttaatcatgcattttctag

SEQ ID NO: 12525 - DNA, 80 bp, synthetic construct
  misc_feature 1..80: note = Synthetic: >NC_003310.1-cand-132520-132599
  source 1..80: mol_type = other DNA
ttcctagaagtgttggattttatccggatcaagtaaagatttcaaagatgttttctgtcagaaaataccatccaagccaa

SEQ ID NO: 12526 - DNA, 80 bp, synthetic construct
  misc_feature 1..80: note = Synthetic: >NC_003310.1-cand-132600-132679
  source 1..80: mol_type = other DNA
tatctttacttttgttcatcagacgttccggaaagaggtcctcaggtaggtttagtatctcaattgtctgtcttgagttc

SEQ ID NO: 12527 - DNA, 80 bp, synthetic construct
  misc_feature 1..80: note = Synthetic: >NC_003310.1-cand-132930-133009
  source 1..80: mol_type = other DNA
gaaattcgcattaatattggagcaggaagattagtcagaccattcttggttgtggataacggagagctcatgacggatgt

SEQ ID NO: 12528 - DNA, 80 bp, synthetic construct
  misc_feature 1..80: note = Synthetic: >NC_003310.1-cand-133010-133089
  source 1..80: mol_type = other DNA
gtgtccggagttagaaagcagattagacgacatgacattctctgacattcagaaagagtttccacatgtcatcgaaatgg

SEQ ID NO: 12529 - DNA, 80 bp, synthetic construct
  misc_feature 1..80: note = Synthetic: >NC_003310.1-cand-133490-133569
  source 1..80: mol_type = other DNA
atttattcagagaggcggtctcgatattgttacagccaagaaacatcaagtagaaattccattggaaaactttaataaca

SEQ ID NO: 12530 - DNA, 80 bp, synthetic construct
  misc_feature 1..80: note = Synthetic: >NC_003310.1-cand-133730-133809
  source 1..80: mol_type = other DNA
cgagaaatatacagatatgtacaaatctcgcgttgaacgagtacaagtagaacttactgacaaagttaaggtgcgagtat

SEQ ID NO: 12531 - DNA, 80 bp, synthetic construct
  misc_feature 1..80: note = Synthetic: >NC_003310.1-cand-134130-134209
  source 1..80: mol_type = other DNA
aatccgaaattgtccgaggaagaattatcggataaaatcttttgtgaaaagattctctatgatcctgaaacggataagcc

SEQ ID NO: 12532 - DNA, 80 bp, synthetic construct
  misc_feature 1..80: note = Synthetic: >NC_003310.1-cand-134670-134749
  source 1..80: mol_type = other DNA
gatcttaaaccgtcttttctggtataatattgtttagtagatactcatcaagattatcaagataagctaattcactaaac

SEQ ID NO: 12533 - DNA, 80 bp, synthetic construct
  misc_feature 1..80: note = Synthetic: >NC_003443.1-cand-5980-6059
  source 1..80: mol_type = other DNA
ccaggatgatacccaaggcatcagcataattgatattaagagatgctctgagatgatgcttgacactttttcatttagga

SEQ ID NO: 12534 - DNA, 80 bp, synthetic construct
  misc_feature 1..80: note = Synthetic: >NC_003443.1-cand-6060-6139
  source 1..80: mol_type = other DNA
tcacatctactttcaatgctacgtacgtgacagacttctcaatgattaatgcaaatattgtacatctaagtcctctagat

SEQ ID NO: 12535 - DNA, 80 bp, synthetic construct
  misc_feature 1..80: note = Synthetic: >NC_003443.1-cand-6140-6219
  source 1..80: mol_type = other DNA
ttgtcaaatcaaatcaattcaataaacaaatctcttaaaagtgctgaggattggattgcagatagcaacttctttgctaa

SEQ ID NO: 12536 - DNA, 80 bp, synthetic construct
  misc_feature 1..80: note = Synthetic: >NC_003443.1-cand-6220-6299
  source 1..80: mol_type = other DNA
tcaagccaggacagccaagacactttattcactaagtgcaatagcattaatactatcagtgattactttggttgtcgtgg

SEQ ID NO: 12537 - DNA, 80 bp, synthetic construct
  misc_feature 1..80: note = Synthetic: >NC_003443.1-cand-6300-6379
  source 1..80: mol_type = other DNA
gattgctgattgcctacatcatcaagctggtttctcaaatccatcaattcagatcgctagctgctacaacaatgttccac

SEQ ID NO: 12538 - DNA, 80 bp, synthetic construct
  misc_feature 1..80: note = Synthetic: >NC_003443.1-cand-6380-6459
  source 1..80: mol_type = other DNA
agggaaaatcctgccttcttttccaagaataaccatggaaacatatatgggatatcttaagaaatctatcacaagtctat

SEQ ID NO: 12539 - DNA, 80 bp, synthetic construct
  misc_feature 1..80: note = Synthetic: >NC_003443.1-cand-6460-6539
  source 1..80: mol_type = other DNA
atatgtccacaattgacccttaagaaccaacttccaacgattatccgttaaatttaagtataatagtttaaaaattaaca

SEQ ID NO: 12540 - DNA, 80 bp, synthetic construct
  misc_feature 1..80: note = Synthetic: >NC_003443.1-cand-6540-6619
  source 1..80: mol_type = other DNA
ttaagcctccagataccaatgaatatgaatatatctcttagaaaacctgattattatgtgatagcgtagtacaatttaag

SEQ ID NO: 12541 - DNA, 80 bp, synthetic construct
  misc_feature 1..80: note = Synthetic: >NC_003443.1-cand-6620-6699
  source 1..80: mol_type = other DNA
aaaaaacctaaaataagcacgaacccttaaggtgtcgtaacgtctcgtgacaccgggttcagttcaaatatcgacctcta

SEQ ID NO: 12542 - DNA, 80 bp, synthetic construct
  misc_feature 1..80: note = Synthetic: >NC_003443.1-cand-6700-6779
  source 1..80: mol_type = other DNA
acccaatttaacacccattcttatataagaacacagtataatttaatcacaaaagacctcaaaaactgacacagcttgat

SEQ ID NO: 12543 - DNA, 80 bp, synthetic construct
  misc_feature 1..80: note = Synthetic: >NC_003443.1-cand-6780-6859
  source 1..80: mol_type = other DNA
ccactcaacatataattgtaagattaataataatggaagattacagcaatctatctcttaaatcaattcctaaaaggaca

SEQ ID NO: 12544 - DNA, 80 bp, synthetic construct
  misc_feature 1..80: note = Synthetic: >NC_003443.1-cand-6860-6939
  source 1..80: mol_type = other DNA
tgtagaatcattttccgaactgccacaattcttggaatatgcacattgattgttctatgttcaagtattcttcatgagat

SEQ ID NO: 12545 - DNA, 80 bp, synthetic construct
  misc_feature 1..80: note = Synthetic: >NC_003443.1-cand-6940-7019
  source 1..80: mol_type = other DNA
aattcatcttgatgtttcctctggtctcatggattccgatgattcacagcaaggcattattcagcctattatagaatcat

SEQ ID NO: 12546 - DNA, 80 bp, synthetic construct
  misc_feature 1..80: note = Synthetic: >NC_003443.1-cand-7020-7099
  source 1..80: mol_type = other DNA
taaaatcattaattgctttggctaaccagattctgtacaatgttgcaataataattcctcttaaaattgacagtatcgag

SEQ ID NO: 12547 - DNA, 80 bp, synthetic construct
  misc_feature 1..80: note = Synthetic: >NC_003443.1-cand-7100-7179
  source 1..80: mol_type = other DNA
actgtaatattctctgctttaaaggatatgcatactgggagcatgtccaacaccaactgtacacccggaaatctgcttct

SEQ ID NO: 12548 - DNA, 80 bp, synthetic construct
  misc_feature 1..80: note = Synthetic: >NC_003443.1-cand-7180-7259
  source 1..80: mol_type = other DNA
gcatgatgcagcgtacatcaatggaataaacaaattccttgtacttaaatcatacaatgggacgcctaaatatggacctc

SEQ ID NO: 12549 - DNA, 80 bp, synthetic construct
  misc_feature 1..80: note = Synthetic: >NC_003443.1-cand-12400-12479
  source 1..80: mol_type = other DNA
attattgatggaaatcctgaaactaatccacccatcagagttccatacattgggtctagaacagaggaaagaagagttgc

SEQ ID NO: 12550 - DNA, 80 bp, synthetic construct
  misc_feature 1..80: note = Synthetic: >NC_003443.1-cand-12460-12539
  source 1..80: mol_type = other DNA
acagaggaaagaagagttgcatcaatggcatatattaaaggtgccacacacagtttgaaggctgctcttagaggcgcagg

SEQ ID NO: 12551 - DNA, 80 bp, synthetic construct
  misc_feature 1..80: note = Synthetic: >NC_003443.1-cand-12560-12639
  source 1..80: mol_type = other DNA
gggatactgtagtgaactggaatgatgcacttgatatcgcaaatactagggttaagatatccctagagcaacttcagacc

SEQ ID NO: 12552 - DNA, 80 bp, synthetic construct
  misc_feature 1..80: note = Synthetic: >NC_003443.1-cand-12630-12709
  source 1..80: mol_type = other DNA
acttcagacccttacacctcttcctacatctgcaaacattacacaccgtttagatgatggagccacaacacttaaattca

SEQ ID NO: 12553 - DNA, 80 bp, synthetic construct
  misc_feature 1..80: note = Synthetic: >NC_003443.1-cand-12710-12789
  source 1..80: mol_type = other DNA
ctccagctagttcctatgcattttctagttatactcatatatcaaatgatcaacaatatttagaaatagatcagagagta

SEQ ID NO: 12554 - DNA, 80 bp, synthetic construct
  misc_feature 1..80: note = Synthetic: >NC_003443.1-cand-12790-12869
  source 1..80: mol_type = other DNA
gtcgattctaatattatttatcaacaattaatgataacaggacttgggattattgagacctaccataacccacctataag

SEQ ID NO: 12555 - DNA, 80 bp, synthetic construct
  misc_feature 1..80: note = Synthetic: >NC_003443.1-cand-12870-12949
  source 1..80: mol_type = other DNA
gacttctacacaagaaatcactctccatttgcacactagctcatcttgttgtgttagaagtgtagatggttgccttatat

SEQ ID NO: 12556 - DNA, 80 bp, synthetic construct
  misc_feature 1..80: note = Synthetic: >NC_003443.1-cand-12950-13029
  source 1..80: mol_type = other DNA
gtgagagcaatggagaggttcctcagatcactgttccctatactaatacatttgtatatgatcctgatccactagcagat

SEQ ID NO: 12557 - DNA, 80 bp, synthetic construct
  misc_feature 1..80: note = Synthetic: >NC_003443.1-cand-13030-13109
  source 1..80: mol_type = other DNA
tatgagattgcacacctagattatctctcctaccaagctaaaattggaagtacagattactactcactcactgataaaat

SEQ ID NO: 12558 - DNA, 80 bp, synthetic construct
  misc_feature 1..80: note = Synthetic: >NC_003443.1-cand-13110-13189
  source 1..80: mol_type = other DNA
tgacctattagcacatttaactgcaaaacaaatgataaactcaataattgggttagatgaaacagtatcaattgtcaatg

SEQ ID NO: 12559 - DNA, 80 bp, synthetic construct
  misc_feature 1..80: note = Synthetic: >NC_003443.1-cand-13190-13269
  source 1..80: mol_type = other DNA
atgcggttatcctatctgactatactaataactggattagtgaatgttcttatactaagatagatttagtttttaaatta

SEQ ID NO: 12560 - DNA, 80 bp, synthetic construct
  misc_feature 1..80: note = Synthetic: >NC_003443.1-cand-13270-13349
  source 1..80: mol_type = other DNA
atggcatggaatttccttcttgagcttgcattccagatgtactacttaaggatatcatcttggacaaatatatttgacta

SEQ ID NO: 12561 - DNA, 80 bp, synthetic construct
  misc_feature 1..80: note = Synthetic: >NC_003443.1-cand-13350-13429
  source 1..80: mol_type = other DNA
tacttatatgactttgcgcaggatacccggaactgctctaaataatattgcagctactattagccatccaaaattattaa

SEQ ID NO: 12562 - DNA, 80 bp, synthetic construct
  misc_feature 1..80: note = Synthetic: >NC_003443.1-cand-13430-13509
  source 1..80: mol_type = other DNA
gacgtgcaatgaatcttgatattatcactcctatacatgcaccgtatttagcttcattagattatgtcaaattaagtatt

SEQ ID NO: 12563 - DNA, 80 bp, synthetic construct
  misc_feature 1..80: note = Synthetic: >NC_003443.1-cand-13530-13609
  source 1..80: mol_type = other DNA
taaacaagttcttgctgatttatcaaatggaattgatcttgaaatcttgattctttcagaggattcaatggaaattagtg

SEQ ID NO: 12564 - DNA, 80 bp, synthetic construct
  misc_feature 1..80: note = Synthetic: >NC_003443.1-cand-13590-13669
  source 1..80: mol_type = other DNA
ggattcaatggaaattagtgatagggcaatgaatctcattgctagaaaactaactctccttgcacttgttaaaggtgaga

SEQ ID NO: 12565 - DNA, 80 bp, synthetic construct
  misc_feature 1..80: note = Synthetic: >NC_003461.1-cand-1980-2059
  source 1..80: mol_type = other DNA
agctggctccatggtatcatcgacaacccaaaagaaaacaagccatcatgcaaagccgacgataacaacaaagacagagc

SEQ ID NO: 12566 - DNA, 80 bp, synthetic construct
  misc_feature 1..80: note = Synthetic: >NC_003461.1-cand-2100-2179
  source 1..80: mol_type = other DNA
agtggaatctctaggagaacaagtgagtcaaaaacagagacacatgctagaatccttgatcaacaaggtatacacagggc

SEQ ID NO: 12567 - DNA, 80 bp, synthetic construct
  misc_feature 1..80: note = Synthetic: >NC_003461.1-cand-2140-2219
  source 1..80: mol_type = other DNA
cacatgctagaatccttgatcaacaaggtatacacagggcctctaggcgaggaactagtccaaaccctctacctgagaat

SEQ ID NO: 12568 - DNA, 80 bp, synthetic construct
  misc_feature 1..80: note = Synthetic: >NC_003461.1-cand-2220-2299
  source 1..80: mol_type = other DNA
atgggcaatgaaagaaacaccagaatcgacgaagattctccaaatgagagaagacatcagagatcagtacttacggatga

SEQ ID NO: 12569 - DNA, 80 bp, synthetic construct
  misc_feature 1..80: note = Synthetic: >NC_003461.1-cand-2300-2379
  source 1..80: mol_type = other DNA
agacagaaagatggctgagaactctaataagagggaagaagaccaagttgagggatttccagaagaggtacgaagaagta

SEQ ID NO: 12570 - DNA, 80 bp, synthetic construct
  misc_feature 1..80: note = Synthetic: >NC_003461.1-cand-2380-2459
  source 1..80: mol_type = other DNA
cacccttatctgatgatggagagggtagaacaaataataatggaagaagcatggaaactagcagcacacatagtacaaga

SEQ ID NO: 12571 - DNA, 80 bp, synthetic construct
  misc_feature 1..80: note = Synthetic: >NC_003461.1-cand-2460-2539
  source 1..80: mol_type = other DNA
ataactgatgtcattaccaacccaagtccagagcttgaagatgccgttctacaaaggaacaaaagacggccgacgaccat

SEQ ID NO: 12572 - DNA, 80 bp, synthetic construct
  misc_feature 1..80: note = Synthetic: >NC_003461.1-cand-2540-2619
  source 1..80: mol_type = other DNA
caagcgtaaccaaacaagatcagagagaacacagagttcagaactccacaaatcaacaagtgaaaatagctccaacctcg

SEQ ID NO: 12573 - DNA, 80 bp, synthetic construct
  misc_feature 1..80: note = Synthetic: >NC_003461.1-cand-2620-2699
  source 1..80: mol_type = other DNA
aagaccacaacaccaaaaccagcccaaaagttccaccgtcaaagaacgaagagtcagcagccactccaaagaacaaccac

SEQ ID NO: 12574 - DNA, 80 bp, synthetic construct
  misc_feature 1..80: note = Synthetic: >NC_003461.1-cand-2700-2779
  source 1..80: mol_type = other DNA
aaccacagaaaaacaagatacacaacaaacaatgcaaacaacaacacaaaaagtccaccaactcccgaacacgacgcaac

SEQ ID NO: 12575 - DNA, 80 bp, synthetic construct
  misc_feature 1..80: note = Synthetic: >NC_003461.1-cand-2780-2859
  source 1..80: mol_type = other DNA
cgcaaatgaagaggaaaccagcaacacatcggtcgatgagatggccaagttattagtaagtcttggtgtaatgaaatcac

SEQ ID NO: 12576 - DNA, 80 bp, synthetic construct
  misc_feature 1..80: note = Synthetic: >NC_003461.1-cand-2860-2939
  source 1..80: mol_type = other DNA
aacatgaatttgaattatctaggagtgcaagtcatgtatttgctaagcgcatgttaaaatctgcaaattacaaagaaatg

SEQ ID NO: 12577 - DNA, 80 bp, synthetic construct
  misc_feature 1..80: note = Synthetic: >NC_003461.1-cand-2940-3019
  source 1..80: mol_type = other DNA
acatttaatctctgtggtatgcttatatcagttgaaaaatcacttgagaataaagtagaagaaaatagaacattacttaa

SEQ ID NO: 12578 - DNA, 80 bp, synthetic construct
  misc_feature 1..80: note = Synthetic: >NC_003461.1-cand-3020-3099
  source 1..80: mol_type = other DNA
acaaattcaagaggaaataaattcatccagggatcttcacaaacggttctcggaataccaaaaagaacagaactcactca

SEQ ID NO: 12579 - DNA, 80 bp, synthetic construct
  misc_feature 1..80: note = Synthetic: >NC_003461.1-cand-3100-3179
  source 1..80: mol_type = other DNA
tgatggccaatctatccacactccatataattacagatagaggcgggaaaacgggaaatcccagtgatactacaaggtca

SEQ ID NO: 12580 - DNA, 80 bp, synthetic construct
  misc_feature 1..80: note = Synthetic: >NC_003461.1-cand-3180-3259
  source 1..80: mol_type = other DNA
ccatcagtcttcacaaaagggaaagacaataaggtcaaaaagacaaggtttgacccctctatggaagctctaggaggtca

SEQ ID NO: 12581 - DNA, 80 bp, synthetic construct
  misc_feature 1..80: note = Synthetic: >NC_003908.1-cand-8010-8089
  source 1..80: mol_type = other DNA
gggcttctacaactggcaccacggcgcagtccagtatgagaatgggagatttaccgtaccgagaggagtgggcgggaaag

SEQ ID NO: 12582 - DNA, 80 bp, synthetic construct
  misc_feature 1..80: note = Synthetic: >NC_003908.1-cand-8090-8169
  source 1..80: mol_type = other DNA
gcgacagcggaagaccgatcctggacaacagaggcagagttgtggctattgttctaggaggtgcaaatgagggcacgcgt

SEQ ID NO: 12583 - DNA, 80 bp, synthetic construct
  misc_feature 1..80: note = Synthetic: >NC_003908.1-cand-8210-8289
  source 1..80: mol_type = other DNA
ccattagggatacccccgaaggttctgaaccgtggtcactagttacagcgctatgcgtgctttcgaatgtcacgttccca

SEQ ID NO: 12584 - DNA, 80 bp, synthetic construct
  misc_feature 1..80: note = Synthetic: >NC_003908.1-cand-8250-8329
  source 1..80: mol_type = other DNA
agttacagcgctatgcgtgctttcgaatgtcacgttcccatgcgacaaaccacccgtgtgctattcactgacgccagaac

SEQ ID NO: 12585 - DNA, 80 bp, synthetic construct
  misc_feature 1..80: note = Synthetic: >NC_003908.1-cand-8330-8409
  source 1..80: mol_type = other DNA
gaacactcgacgtgctcgaagagaacgtcgacaatccaaattacgacacgctgctggagaacgtcttgaaatgtccatca

SEQ ID NO: 12586 - DNA, 80 bp, synthetic construct
  misc_feature 1..80: note = Synthetic: >NC_003908.1-cand-8380-8459
  source 1..80: mol_type = other DNA
ctgctggagaacgtcttgaaatgtccatcacgccggcccaaacgaagcattaccgatgacttcacactgaccagtcccta

SEQ ID NO: 12587 - DNA, 80 bp, synthetic construct
  misc_feature 1..80: note = Synthetic: >NC_003908.1-cand-8500-8579
  source 1..80: mol_type = other DNA
ttcagcccaataaaaattgagaacgtgtgggacgaatctgatgatggatcgattagaatccaggtctcggcacaattcgg

SEQ ID NO: 12588 - DNA, 80 bp, synthetic construct
  misc_feature 1..80: note = Synthetic: >NC_003908.1-cand-8580-8659
  source 1..80: mol_type = other DNA
ctacaatcaggcaggcactgcggatgtcaccaaattccgttacatgtctttcgaccacgaccatgacatcaaggaagaca

SEQ ID NO: 12589 - DNA, 80 bp, synthetic construct
  misc_feature 1..80: note = Synthetic: >NC_003908.1-cand-8660-8739
  source 1..80: mol_type = other DNA
gtatggagaaaatagctatcagcacatctggaccctgccgtcgtcttggccacaaagggtacttcctgttagctcaatgt

SEQ ID NO: 12590 - DNA, 80 bp, synthetic construct
  misc_feature 1..80: note = Synthetic: >NC_003908.1-cand-8740-8819
  source 1..80: mol_type = other DNA
cctccaggtgacagtgtaaccgtcagtatcacgagcggagcatctgagaattcatgcaccgtggagaaaaagatcaggag

SEQ ID NO: 12591 - DNA, 80 bp, synthetic construct
  misc_feature 1..80: note = Synthetic: >NC_003908.1-cand-8820-8899
  source 1..80: mol_type = other DNA
gaagtttgtcggtagagaggagtacttgttcccacccgtccatggaaagctggtaaagtgccacgtttacgatcacttga

SEQ ID NO: 12592 - DNA, 80 bp, synthetic construct
  misc_feature 1..80: note = Synthetic: >NC_003908.1-cand-8900-8979
  source 1..80: mol_type = other DNA
aggagacgtctgccgggtacataaccatgcacaggccaggcccacacgcgtataagtcctatctggaggaagcgtcaggc

SEQ ID NO: 12593 - DNA, 80 bp, synthetic construct
  misc_feature 1..80: note = Synthetic: >NC_003908.1-cand-8980-9059
  source 1..80: mol_type = other DNA
gaagtgtacattaaaccaccttctggcaagaacgtcacctacgaatgtaagtgtggcgactacagcacaggtatcgtgag

SEQ ID NO: 12594 - DNA, 80 bp, synthetic construct
  misc_feature 1..80: note = Synthetic: >NC_003908.1-cand-9060-9139
  source 1..80: mol_type = other DNA
cacgcgaacgaagatgaacggctgcactaaagcaaaacagtgcattgcctacaagagcgaccaaacgaaatgggtcttca

SEQ ID NO: 12595 - DNA, 80 bp, synthetic construct
  misc_feature 1..80: note = Synthetic: >NC_003908.1-cand-9140-9219
  source 1..80: mol_type = other DNA
actcgccggatcttattaggcacacagaccactcagtgcaaggtaaattgcacattccattccgcttgacaccgacagtc

SEQ ID NO: 12596 - DNA, 80 bp, synthetic construct
  misc_feature 1..80: note = Synthetic: >NC_003908.1-cand-9220-9299
  source 1..80: mol_type = other DNA
tgcccggttccgttagctcacacgcctacagtcacgaagtggttcaaaggcatcaccctccacctgactgcaatgcgacc

SEQ ID NO: 12597 - DNA, 80 bp, synthetic construct
  misc_feature 1..80: note = Synthetic: >NC_005080.1-cand-5400-5479
  source 1..80: mol_type = other DNA
gatggatagatagatagaatagcaccttgacttctcacctgttttttggtaaaacaagagaccaaatgtgttctttgtca

SEQ ID NO: 12598 - DNA, 80 bp, synthetic construct
  misc_feature 1..80: note = Synthetic: >NC_005080.1-cand-5490-5569
  source 1..80: mol_type = other DNA
ttgtacataacactctcttagtctaacattcccaaaatatctagaatactctctttcattgattaacaatcgggaggaaa

SEQ ID NO: 12599 - DNA, 80 bp, synthetic construct
  misc_feature 1..80: note = Synthetic: >NC_005080.1-cand-5570-5649
  source 1..80: mol_type = other DNA
atgatgtcttcatcgagttgaccaatgcaagggaaatggaggacaaaatcctaaataatttcttctgctcaccttccact

SEQ ID NO: 12600 - DNA, 80 bp, synthetic construct
  misc_feature 1..80: note = Synthetic: >NC_005080.1-cand-5650-5729
  source 1..80: mol_type = other DNA
aagctgctgaatggctgatgtctacagattttctcaaattccttgtcaatagtatatctcatcactggtctgtcagaaac

SEQ ID NO: 12601 - DNA, 80 bp, synthetic construct
  misc_feature 1..80: note = Synthetic: >NC_005080.1-cand-5730-5809
  source 1..80: mol_type = other DNA
aagtgcctgagctaaaatcatcaagctatccatatcagggtgttttattagtttttccagctgtgaccagagatcttgat

SEQ ID NO: 12602 - DNA, 80 bp, synthetic construct
  misc_feature 1..80: note = Synthetic: >NC_005080.1-cand-5770-5849
  source 1..80: mol_type = other DNA
tgttttattagtttttccagctgtgaccagagatcttgatgagagttcttcaatgttctggaacacacttgaacccactt

SEQ ID NO: 12603 - DNA, 80 bp, synthetic construct
  misc_feature 1..80: note = Synthetic: >NC_005080.1-cand-5890-5969
  source 1..80: mol_type = other DNA
tccagaatatctagaagtctgtcattgactaacattaacatttgtccaacaactattcccgcatttcttagccttacaat

SEQ ID NO: 12604 - DNA, 80 bp, synthetic construct
  misc_feature 1..80: note = Synthetic: >NC_005080.1-cand-5970-6049
  source 1..80: mol_type = other DNA
tgcatcatcatgcgttttgaaaagatcacaaagtaaattgagtaaaactaagtccagaaacagtaaagtgtttctcctgg

SEQ ID NO: 12605 - DNA, 80 bp, synthetic construct
  misc_feature 1..80: note = Synthetic: >NC_005080.1-cand-6050-6129
  source 1..80: mol_type = other DNA
tgttgaaaacttttagacctttcactttgttacacacggaaagggcttgaagataacacctctctacagcatcaatagat

SEQ ID NO: 12606 - DNA, 80 bp, synthetic construct
  misc_feature 1..80: note = Synthetic: >NC_005080.1-cand-6130-6209
  source 1..80: mol_type = other DNA
atagaattctcatctgactggctttccatgttgacttcatctattggatgcaatgcgatagagtagactacatccatcaa

SEQ ID NO: 12607 - DNA, 80 bp, synthetic construct
  misc_feature 1..80: note = Synthetic: >NC_005080.1-cand-6210-6289
  source 1..80: mol_type = other DNA
cttgtttgcacaaaaagggcagctgggcacatcactgtctttgtggcttcctaataagatcaagtcatttataagcttag

SEQ ID NO: 12608 - DNA, 80 bp, synthetic construct
  misc_feature 1..80: note = Synthetic: >NC_005080.1-cand-6290-6369
  source 1..80: mol_type = other DNA
acttttgtgaaaatttgaatttccccaactgcttgtcaaaaatctccttcttaaaccaaaaccttaactttatgagttct

SEQ ID NO: 12609 - DNA, 80 bp, synthetic construct
  misc_feature 1..80: note = Synthetic: >NC_005080.1-cand-6370-6449
  source 1..80: mol_type = other DNA
tctcttatgacagattctctaatgtctcctctaaccccaacaaagagggattcatttaacctctcatcataacccaaaga

SEQ ID NO: 12610 - DNA, 80 bp, synthetic construct
  misc_feature 1..80: note = Synthetic: >NC_005080.1-cand-6450-6529
  source 1..80: mol_type = other DNA
attctttttcaagcattcgatgttttctaatcccaagctctggttttttgtgttggacaaactatggatcaatcgctggt

SEQ ID NO: 12611 - DNA, 80 bp, synthetic construct
  misc_feature 1..80: note = Synthetic: >NC_005080.1-cand-6530-6609
  source 1..80: mol_type = other DNA
attcttgttcttcaatattaatctcttgcataaattttgatttctttaggatgtcgatcagcaaccaccgaactctttca

SEQ ID NO: 12612 - DNA, 80 bp, synthetic construct
  misc_feature 1..80: note = Synthetic: >NC_005080.1-cand-6610-6689
  source 1..80: mol_type = other DNA
acaacccaatcagcaaggaatctattgctgtagctagatctgccatcaactacaggaaccaacgtaatccctgcccttag

SEQ ID NO: 12613 - DNA, 80 bp, synthetic construct
  misc_feature 1..80: note = Synthetic: >NC_005224.1-cand-1740-1819
  source 1..80: mol_type = other DNA
tatatgcaagtagcatatatataagtacacaatatactacctcaacatgctgatttcttgattgcttttcaaggagtcta

SEQ ID NO: 12614 - DNA, 80 bp, synthetic construct
  misc_feature 1..80: note = Synthetic: >NC_005225.1-cand-0-79
  source 1..80: mol_type = other DNA
agtagactccgagatagagaaatttactacaaatggagaaatacagagatattcatgagagagtcaaggaggcagtccca

SEQ ID NO: 12615 - DNA, 80 bp, synthetic construct
  misc_feature 1..80: note = Synthetic: >NC_005225.1-cand-90-169
  source 1..80: mol_type = other DNA
cagcagtagaatgtttagatttattggatagattgtatgcagtgaggcatgatgttgtagaccagatgataaaacatgac

SEQ ID NO: 12616 - DNA, 80 bp, synthetic construct
  misc_feature 1..80: note = Synthetic: >NC_005225.1-cand-160-239
  source 1..80: mol_type = other DNA
aaaacatgactggtctgacaataaagatagagaacagcctataggccttgtcttactaatggcaggtgttccaaatgatg

SEQ ID NO: 12617 - DNA, 80 bp, synthetic construct
  misc_feature 1..80: note = Synthetic: >NC_005225.1-cand-240-319
  source 1..80: mol_type = other DNA
taattcagagtatggagaaaagagtcatcccaggaagtcccagtggtcagatccttagatcattttttaaaatgacacct

SEQ ID NO: 12618 - DNA, 80 bp, synthetic construct
  misc_feature 1..80: note = Synthetic: >NC_005225.1-cand-310-389
  source 1..80: mol_type = other DNA
aatgacacctgacaattataaaataacagggaaccttatagagttcattgaggtcacagtgacagctgatgtggcaaggg

SEQ ID NO: 12619 - DNA, 80 bp, synthetic construct
  misc_feature 1..80: note = Synthetic: >NC_005225.1-cand-450-529
  source 1..80: mol_type = other DNA
agatagaagctcagaaaggtaattgtcaatctggttttaagataaagtttaatgtggtagcagttaggactgatggttca

SEQ ID NO: 12620 - DNA, 80 bp, synthetic construct
  misc_feature 1..80: note = Synthetic: >NC_005225.1-cand-530-609
  source 1..80: mol_type = other DNA
aacatatcaacacagtggcctagtagaaggaatgaaggcgttgttcaagcaatgagattaatacaagcagacattaattt

SEQ ID NO: 12621 - DNA, 80 bp, synthetic construct
  misc_feature 1..80: note = Synthetic: >NC_005225.1-cand-610-689
  source 1..80: mol_type = other DNA
tgtcagagaacacctgataaagaatgatgagagaggagcacttgaggcaatgtttaatctaaaatttcatgtaacaggtc

SEQ ID NO: 12622 - DNA, 80 bp, synthetic construct
  misc_feature 1..80: note = Synthetic: >NC_005225.1-cand-690-769
  source 1..80: mol_type = other DNA
ctaaggttcgtacatttgatattccgaattatagacctcagccattatgccaacctatattagaaaatctagtagattat

SEQ ID NO: 12623 - DNA, 80 bp, synthetic construct
  misc_feature 1..80: note = Synthetic: >NC_005225.1-cand-770-849
  source 1..80: mol_type = other DNA
tgtaaaaattggcttggaacagatcatgcatttgcatttaaggaagtgactggtcaacgtgttttcaatgtctttaggga

SEQ ID NO: 12624 - DNA, 80 bp, synthetic construct
  misc_feature 1..80: note = Synthetic: >NC_005225.1-cand-850-929
  source 1..80: mol_type = other DNA
ggaggaagaaatacatgcatccaaatatggacactctagaaagcctaggaattttcttttatgtcaaattagcttgcagt

SEQ ID NO: 12625 - DNA, 80 bp, synthetic construct
  misc_feature 1..80: note = Synthetic: >NC_005225.1-cand-930-1009
  source 1..80: mol_type = other DNA
caccatatttaccatcaacaattgcatctgatcagtatgatacacgattagcttgtagtgaaattttaaaaaactatcct

SEQ ID NO: 12626 - DNA, 80 bp, synthetic construct
  misc_feature 1..80: note = Synthetic: >NC_005225.1-cand-1010-1089
  source 1..80: mol_type = other DNA
gagacaccattacagctattggctagagatatggcctataaatacatcacattagatcatgatgacattatcaattatta

SEQ ID NO: 12627 - DNA, 80 bp, synthetic construct
  misc_feature 1..80: note = Synthetic: >NC_005225.1-cand-1090-1169
  source 1..80: mol_type = other DNA
taatccaagggtttactttaagccaacacagaatattaaagaaccaggtaccttcaaattgaatctatctaacatggatc

SEQ ID NO: 12628 - DNA, 80 bp, synthetic construct
  misc_feature 1..80: note = Synthetic: >NC_005225.1-cand-6380-6459
  source 1..80: mol_type = other DNA
aaagttactgaagagagagtactgcctgaggatgtactcccagactccttcttttcatttagacatgctgatatcttatt

SEQ ID NO: 12629 - DNA, 80 bp, synthetic construct
  misc_feature 1..80: note = Synthetic: >NC_005225.1-cand-6460-6539
  source 1..80: mol_type = other DNA
aaagagattgttccctagggattcagcctcttctttttattaacagattatacttcttattgctcttttctcggagcata

SEQ ID NO: 12630 - DNA, 80 bp, synthetic construct
  misc_feature 1..80: note = Synthetic: >NC_005226.1-cand-0-79
  source 1..80: mol_type = other DNA
agtagactccgagatagagaagtctactaaaaatggagaaatacacagagatccacaatagaatgagagaatgtgtgcca

SEQ ID NO: 12631 - DNA, 80 bp, synthetic construct
  misc_feature 1..80: note = Synthetic: >NC_005226.1-cand-90-169
  source 1..80: mol_type = other DNA
ctgcagtagagtgcctggatctattagatcggttttacgctgtgagacatgatgttgtggatcagatgataaagcatgat

SEQ ID NO: 12632 - DNA, 80 bp, synthetic construct
  misc_feature 1..80: note = Synthetic: >NC_005226.1-cand-150-229
  source 1..80: mol_type = other DNA
atcagatgataaagcatgattggtctgacaacaaagacaaagaacagcctataggccatgtcttgctgatggcaggagta

SEQ ID NO: 12633 - DNA, 80 bp, synthetic construct
  misc_feature 1..80: note = Synthetic: >NC_005226.1-cand-230-309
  source 1..80: mol_type = other DNA
ccgaatgaagtcatacaaggtatggaaaagaagatcatacctggaagtcctagtgggcagattctgagatcattttttaa

SEQ ID NO: 12634 - DNA, 80 bp, synthetic construct
  misc_feature 1..80: note = Synthetic: >NC_005226.1-cand-310-389
  source 1..80: mol_type = other DNA
gatgacaccagataactacaagattacagggagtttaattgagtttattgaggtgacagttacagctgatgtggcaagag

SEQ ID NO: 12635 - DNA, 80 bp, synthetic construct
  misc_feature 1..80: note = Synthetic: >NC_005226.1-cand-390-469
  source 1..80: mol_type = other DNA
gaacacgtgagaaaatcttgaagtatcaagcaggtctagagtacatagaacagttgctgcatcaggagtcagaaagaggc

SEQ ID NO: 12636 - DNA, 80 bp, synthetic construct
  misc_feature 1..80: note = Synthetic: >NC_005226.1-cand-470-549
  source 1..80: mol_type = other DNA
aatctgccaggtggttatagaataaagtttgatgtagtggcagtgaggactgatggctcaaatatatcaacacaatggcc

SEQ ID NO: 12637 - DNA, 80 bp, synthetic construct
  misc_feature 1..80: note = Synthetic: >NC_005226.1-cand-550-629
  source 1..80: mol_type = other DNA
aagtcaacgaaatgagggtgtcgttcaaacaatgaggttaattcaggcagatatcaattacgtgagagaacatttaataa

SEQ ID NO: 12638 - DNA, 80 bp, synthetic construct
  misc_feature 1..80: note = Synthetic: >NC_005226.1-cand-630-709
  source 1..80: mol_type = other DNA
aaaatgatgagagatcagcactagaagccatgttcaatttaaaattccatgtcagtggacctaaagccaggacctttgac

SEQ ID NO: 12639 - DNA, 80 bp, synthetic construct
  misc_feature 1..80: note = Synthetic: >NC_005226.1-cand-710-789
  source 1..80: mol_type = other DNA
attcctgattatcggccccaacaactgtgtaacccaaacatagataatctcttgaactactgtaaaaattggttgacacg

SEQ ID NO: 12640 - DNA, 80 bp, synthetic construct
  misc_feature 1..80: note = Synthetic: >NC_005226.1-cand-790-869
  source 1..80: mol_type = other DNA
agagcatgaatttgcctttgatgaggttaaagggcaaagagttttcaacatatttgaagcagaagaaattaagcataaag

SEQ ID NO: 12641 - DNA, 80 bp, synthetic construct
  misc_feature 1..80: note = Synthetic: >NC_005226.1-cand-870-949
  source 1..80: mol_type = other DNA
aaagatacaatccatcacgtaaaccaaggaattttttattgatacaaggaaccgttcaaggtccatacttgccctcaact

SEQ ID NO: 12642 - DNA, 80 bp, synthetic construct
  misc_feature 1..80: note = Synthetic: >NC_005226.1-cand-950-1029
  source 1..80: mol_type = other DNA
atagcatccgaccagtacgatacaaaagttggctgtctggagatattaaaaaaccatcctgaaactccgatacaaatatt

SEQ ID NO: 12643 - DNA, 80 bp, synthetic construct
  misc_feature 1..80: note = Synthetic: >NC_005226.1-cand-1030-1109
  source 1..80: mol_type = other DNA
agctagagatatggcattgaaatatataatgttggataaagatgaccttataaactactataaccctagagcatatttca

SEQ ID NO: 12644 - DNA, 80 bp, synthetic construct
  misc_feature 1..80: note = Synthetic: >NC_005831.2-cand-3530-3609
  source 1..80: mol_type = other DNA
gcaattgtttaaagttggtaaagttgattcaattgtccaaaagtgttatgagttgtctcatttaattagtggttcacttg

SEQ ID NO: 12645 - DNA, 80 bp, synthetic construct
  misc_feature 1..80: note = Synthetic: >NC_005831.2-cand-3610-3689
  source 1..80: mol_type = other DNA
gtgatagtggtaaacttcttagtgaacttcttaaagaaaaatatacatgttctataacttttgagatgtcttgtgattgt

SEQ ID NO: 12646 - DNA, 80 bp, synthetic construct
  misc_feature 1..80: note = Synthetic: >NC_005831.2-cand-3690-3769
  source 1..80: mol_type = other DNA
ggtaaaaagtttgatgatcaggttggttgtttgttttggattatgccttacacaaaactttttcaaaaaggtgagtgttg

SEQ ID NO: 12647 - DNA, 80 bp, synthetic construct
  misc_feature 1..80: note = Synthetic: >NC_005831.2-cand-3770-3849
  source 1..80: mol_type = other DNA
tatttgtcataaaatgcagacttataagcttgttagtatgaaaggtactggtgtgtttgtacaggatccagcacctattg

SEQ ID NO: 12648 - DNA, 80 bp, synthetic construct
  misc_feature 1..80: note = Synthetic: >NC_005831.2-cand-3850-3929
  source 1..80: mol_type = other DNA
acattgatgctttccctgtgaaacctatatgttcatctgtatatttaggtgttaagggttctggtcattatcaaacaaat

SEQ ID NO: 12649 - DNA, 80 bp, synthetic construct
  misc_feature 1..80: note = Synthetic: >NC_005831.2-cand-3930-4009
  source 1..80: mol_type = other DNA
ttatacagttttaacaaagctattgatggttttggtgtctttgacattaaaaatagtagtgttaatactgtttgttttgt

SEQ ID NO: 12650 - DNA, 80 bp, synthetic construct
  misc_feature 1..80: note = Synthetic: >NC_005831.2-cand-4010-4089
  source 1..80: mol_type = other DNA
tgatgttgattttcatagtgtagaaatagaagctggtgaagttaaaccttttgctgtatataaaaatgttaaattttatt

SEQ ID NO: 12651 - DNA, 80 bp, synthetic construct
  misc_feature 1..80: note = Synthetic: >NC_005831.2-cand-4090-4169
  source 1..80: mol_type = other DNA
taggtgatatttcacaccttgtaaactgtgtttcttttgactttgttgtcaatgctgctaatgaaaatctcttgcatgga

SEQ ID NO: 12652 - DNA, 80 bp, synthetic construct
  misc_feature 1..80: note = Synthetic: >NC_005831.2-cand-4170-4249
  source 1..80: mol_type = other DNA
ggcggtgttgcacgtgctattgatattttgactgaaggtcaacttcagtcattatctaaagattacattagtagtaatgg

SEQ ID NO: 12653 - DNA, 80 bp, synthetic construct
  misc_feature 1..80: note = Synthetic: >NC_005831.2-cand-4250-4329
  source 1..80: mol_type = other DNA
tccacttaaggttggagcaggtgttatgttggagtgtgaaaaattcaacgtatttaatgttgttggtccgcgaactggta

SEQ ID NO: 12654 - DNA, 80 bp, synthetic construct
  misc_feature 1..80: note = Synthetic: >NC_005831.2-cand-4330-4409
  source 1..80: mol_type = other DNA
aacatgagcattcattacttgttgaagcttataattctattttatttgaaaatggtattccacttatgcctcttcttagt

SEQ ID NO: 12655 - DNA, 80 bp, synthetic construct
  misc_feature 1..80: note = Synthetic: >NC_005831.2-cand-4410-4489
  source 1..80: mol_type = other DNA
tgtggtatttttggtgtaaggattgaaaattctcttaaagctttgtttagttgtgacattaataaaccattgcaagtttt

SEQ ID NO: 12656 - DNA, 80 bp, synthetic construct
  misc_feature 1..80: note = Synthetic: >NC_005831.2-cand-4490-4569
  source 1..80: mol_type = other DNA
tgtttattcttcaaatgaagaacaagctgttcttaagtttttagatggtttagatttaacaccagtcattgatgatgttg

SEQ ID NO: 12657 - DNA, 80 bp, synthetic construct
  misc_feature 1..80: note = Synthetic: >NC_005831.2-cand-4570-4649
  source 1..80: mol_type = other DNA
atgttgttaaaccttttagagttgaaggtaatttttcattctttgattgtggtgtcaatgccttggatggtgatatttac

SEQ ID NO: 12658 - DNA, 80 bp, synthetic construct
  misc_feature 1..80: note = Synthetic: >NC_005831.2-cand-4650-4729
  source 1..80: mol_type = other DNA
ttattatttactaactctattttaatgttggataaacaaggacaattattggacacaaaacttaatggtattttgcaaca

SEQ ID NO: 12659 - DNA, 80 bp, synthetic construct
  misc_feature 1..80: note = Synthetic: >NC_005831.2-cand-4730-4809
  source 1..80: mol_type = other DNA
ggcagctcttgattatcttgctacagttaaaactgtaccagctggtaatttggttaaactttttgttgagagttgtacca

SEQ ID NO: 12660 - DNA, 80 bp, synthetic construct
  misc_feature 1..80: note = Synthetic: >NC_006213.1-cand-29780-29859
  source 1..80: mol_type = other DNA
ttgctagtcttgttctggcaaaacttggcaaggatgccactaaacctcagcaagtaactaagcatactgccaaagaagtc

SEQ ID NO: 12661 - DNA, 80 bp, synthetic construct
  misc_feature 1..80: note = Synthetic: >NC_006213.1-cand-29860-29939
  source 1..80: mol_type = other DNA
agacagaaaattttgaataagccccgccagaagaggagccccaataaacaatgcactgttcagcagtgttttggtaagag

SEQ ID NO: 12662 - DNA, 80 bp, synthetic construct
  misc_feature 1..80: note = Synthetic: >NC_006213.1-cand-29940-30019
  source 1..80: mol_type = other DNA
aggccctaatcagaattttggtggtggagaaatgttaaaacttggaactagtgacccacagttccccattcttgcagaac

SEQ ID NO: 12663 - DNA, 80 bp, synthetic construct
  misc_feature 1..80: note = Synthetic: >NC_006213.1-cand-30020-30099
  source 1..80: mol_type = other DNA
tcgcacccacagctggtgcgtttttctttggatcaagattagagttggccaaagtgcagaatttatctgggaatcctgac

SEQ ID NO: 12664 - DNA, 80 bp, synthetic construct
  misc_feature 1..80: note = Synthetic: >NC_006213.1-cand-30100-30179
  source 1..80: mol_type = other DNA
gagccccagaaggatgtttatgaattgcgctataacggcgcaattaggtttgacagtacactttcaggttttgagaccat

SEQ ID NO: 12665 - DNA, 80 bp, synthetic construct
  misc_feature 1..80: note = Synthetic: >NC_006213.1-cand-30180-30259
  source 1..80: mol_type = other DNA
aatgaaggtgctgaatgagaatttgaatgcctatcaacaacaagatggtatgatgaatatgagtccaaaaccacagcgtc

SEQ ID NO: 12666 - DNA, 80 bp, synthetic construct
  misc_feature 1..80: note = Synthetic: >NC_006213.1-cand-30260-30339
  source 1..80: mol_type = other DNA
agcgtggtcataagaatggacaaggagaaaatgataatataagtgttgcagtgcccaaaagccgcgtgcagcaaaataag

SEQ ID NO: 12667 - DNA, 80 bp, synthetic construct
  misc_feature 1..80: note = Synthetic: >NC_006213.1-cand-30340-30419
  source 1..80: mol_type = other DNA
agtagagagttgactgcagaggacatcagccttcttaagaagatggatgagccctatactgaagacacctcagaaatata

SEQ ID NO: 12668 - DNA, 80 bp, synthetic construct
  misc_feature 1..80: note = Synthetic: >NC_006213.1-cand-30390-30469
  source 1..80: mol_type = other DNA
gccctatactgaagacacctcagaaatataagagaatgaaccttatgtcggcatctggtggtaacccctcgcagaaaagt

SEQ ID NO: 12669 - DNA, 80 bp, synthetic construct
  misc_feature 1..80: note = Synthetic: >NC_006213.1-cand-30470-30549
  source 1..80: mol_type = other DNA
cgagataaggcactctctatcagaatggatgtcttgctgctataatagatagagaaggttatagcagactatagattaat

SEQ ID NO: 12670 - DNA, 80 bp, synthetic construct
  misc_feature 1..80: note = Synthetic: >NC_006213.1-cand-30550-30629
  source 1..80: mol_type = other DNA
tagttgaaagttttgtgttgtaatgtatagtgttggagaaagtgaaagacttgcggaagtaattgccgacaagtgcccaa

SEQ ID NO: 12671 - DNA, 80 bp, synthetic construct
  misc_feature 1..80: note = Synthetic: >NC_006213.1-cand-30630-30709
  source 1..80: mol_type = other DNA
gggaagagccagcatgttaagttaccacccagtaattagtaaatgaatgaagttaattatggccaattggaagaatcaca

SEQ ID NO: 12672 - DNA, 80 bp, synthetic construct
  misc_feature 1..80: note = Synthetic: >NC_006313.1-cand-10-89
  source 1..80: mol_type = other DNA
ctaggcattgctttcacgctttgaggtgaaccacctcactggagcaccagatttcatctaatgggtaactccaagtcaaa

SEQ ID NO: 12673 - DNA, 80 bp, synthetic construct
  misc_feature 1..80: note = Synthetic: >NC_006313.1-cand-90-169
  source 1..80: mol_type = other DNA
atcaaagctgtctgctaaccagtatgaacagcaaacagtcaatagcaccaaacaggtagccattttaaagagacaggctg

SEQ ID NO: 12674 - DNA, 80 bp, synthetic construct
  misc_feature 1..80: note = Synthetic: >NC_006313.1-cand-170-249
  source 1..80: mol_type = other DNA
aacctagtctgtatggaagacacaactgcaggtgctgctggttcgccaatacaaatctaataaaatgttccgaccattat

SEQ ID NO: 12675 - DNA, 80 bp, synthetic construct
  misc_feature 1..80: note = Synthetic: >NC_006313.1-cand-280-359
  source 1..80: mol_type = other DNA
gggaagtcttctttttgtgacatttgtggtgaagagctccccacatccattgtggtgcccatcgaaccaagtgctccacc

SEQ ID NO: 12676 - DNA, 80 bp, synthetic construct
  misc_feature 1..80: note = Synthetic: >NC_007370.1-cand-300-379
  source 1..80: mol_type = other DNA
gactattgaggaattgtcaagaaactggttcatgctaatgcccaagcagaaagtggaaggacctctttgcatcagaatgg

SEQ ID NO: 12677 - DNA, 80 bp, synthetic construct
  misc_feature 1..80: note = Synthetic: >NC_007370.1-cand-390-469
  source 1..80: mol_type = other DNA
catggagaaaaacatcatgttgaaagcgaatttcagtgtgatttttgaccgactagagaccatagtattactaagggctt

SEQ ID NO: 12678 - DNA, 80 bp, synthetic construct
  misc_feature 1..80: note = Synthetic: >NC_007370.1-cand-470-549
  source 1..80: mol_type = other DNA
tcaccgaagagggagcaattgttggcgaaatctcaccattgccttcttttccaggacatactattgaggatgtcaaaaat

SEQ ID NO: 12679 - DNA, 80 bp, synthetic construct
  misc_feature 1..80: note = Synthetic: >NC_007370.1-cand-750-829
  source 1..80: mol_type = other DNA
gactaaaaacaactgaaaatagctttgaacaaataacattcatgcaagcattacaactgctgtttgaagtggaacaggag

SEQ ID NO: 12680 - DNA, 80 bp, synthetic construct
  misc_feature 1..80: note = Synthetic: >NC_007371.1-cand-90-169
  source 1..80: mol_type = other DNA
atggagaggatctgaaaattgaaacaaacaaatttgcagcaatatgcacccacttggaggtatgtttcatgtattcagat

SEQ ID NO: 12681 - DNA, 80 bp, synthetic construct
  misc_feature 1..80: note = Synthetic: >NC_007371.1-cand-180-259
  source 1..80: mol_type = other DNA
tcaatgaacaaggcgaatcaatagtggtagaacttgatgatccaaatgcactgttaaagcacagatttgaaataatcgag

SEQ ID NO: 12682 - DNA, 80 bp, synthetic construct
  misc_feature 1..80: note = Synthetic: >NC_007371.1-cand-270-349
  source 1..80: mol_type = other DNA
gaacaatggcctggacagtagtaaacagtatctgcaacactactggagcagaaaaaccaaagtttctaccagatttgtat

SEQ ID NO: 12683 - DNA, 80 bp, synthetic construct
  misc_feature 1..80: note = Synthetic: >NC_007371.1-cand-350-429
  source 1..80: mol_type = other DNA
gattacaaggagaatagattcatcgaaattggagtgacaagaagagaagtccacatatattaccttgaaaaggccaataa

SEQ ID NO: 12684 - DNA, 80 bp, synthetic construct
  misc_feature 1..80: note = Synthetic: >NC_007371.1-cand-390-469
  source 1..80: mol_type = other DNA
gaagagaagtccacatatattaccttgaaaaggccaataaaattaaatctgagaacacacacattcacatcttctcattc

SEQ ID NO: 12685 - DNA, 80 bp, synthetic construct
  misc_feature 1..80: note = Synthetic: >NC_007371.1-cand-510-589
  source 1..80: mol_type = other DNA
acgaggaaagcagggctaggattaaaaccaggctatttaccataagacaagaaatggccaacagaggcctctgggattcc

SEQ ID NO: 12686 - DNA, 80 bp, synthetic construct
  misc_feature 1..80: note = Synthetic: >NC_007371.1-cand-740-819
  source 1..80: mol_type = other DNA
tgcattgagggcaagctttctcaaatgtccaaagaagtgaatgccaaaattgaaccttttctgaagacaacaccaagacc

SEQ ID NO: 12687 - DNA, 80 bp, synthetic construct
  misc_feature 1..80: note = Synthetic: >NC_007371.1-cand-820-899
  source 1..80: mol_type = other DNA
aatcaaacttcctaatggacctccttgttatcagcggtccaaattcctcctgatggatgctttgaaattgagcattgaag

SEQ ID NO: 12688 - DNA, 80 bp, synthetic construct
  misc_feature 1..80: note = Synthetic: >NC_007371.1-cand-900-979
  source 1..80: mol_type = other DNA
acccaagtcatgaaggagaagggattccattatatgatgcgatcaagtgcataaaaacattctttggatggaaagaacct

SEQ ID NO: 12689 - DNA, 80 bp, synthetic construct
  misc_feature 1..80: note = Synthetic: >NC_007371.1-cand-980-1059
  source 1..80: mol_type = other DNA
tatatagtcaaaccacacgaaaagggaataaattcaaattacctgctgtcatggaagcaagtattgtcagaattgcagga

SEQ ID NO: 12690 - DNA, 80 bp, synthetic construct
  misc_feature 1..80: note = Synthetic: >NC_007371.1-cand-1060-1139
  source 1..80: mol_type = other DNA
cattgaaaatgaggagaagatcccaaggactaaaaacatgaagaaaacgagtcaactaaagtgggctcttggtgaaaaca

SEQ ID NO: 12691 - DNA, 80 bp, synthetic construct
  misc_feature 1..80: note = Synthetic: >NC_007371.1-cand-1230-1309
  source 1..80: mol_type = other DNA
caagctggatacagaatgagttcaacaaggcctgcgagctaactgattcaatctggatagagctcgatgaaattggagag

SEQ ID NO: 12692 - DNA, 80 bp, synthetic construct
  misc_feature 1..80: note = Synthetic: >NC_009824.1-cand-4610-4689
  source 1..80: mol_type = other DNA
ggtctcgatgtgtccgtcataccaacaacaggagacgtcgtagtttgcgctactgacgccctcatgactggattcaccgg

SEQ ID NO: 12693 - DNA, 80 bp, synthetic construct
  misc_feature 1..80: note = Synthetic: >NC_009824.1-cand-4690-4769
  source 1..80: mol_type = other DNA
ggacttcgattctgtcatagattgcaacgtggctgttgaacagtacgttgacttcagcctggaccccaccttttccattg

SEQ ID NO: 12694 - DNA, 80 bp, synthetic construct
  misc_feature 1..80: note = Synthetic: >NC_009824.1-cand-4760-4839
  source 1..80: mol_type = other DNA
ttttccattgagacccgcactgctccccaagatgcggtttcccgcagccaacgtcgcggccgaacgggtcgaggtagact

SEQ ID NO: 12695 - DNA, 80 bp, synthetic construct
  misc_feature 1..80: note = Synthetic: >NC_009824.1-cand-4840-4919
  source 1..80: mol_type = other DNA
cggtacgtaccgatatgtcgcctccggtgaaagaccgtctggaatgtttgactcggtcgtcctctgtgagtgctatgacg

SEQ ID NO: 12696 - DNA, 80 bp, synthetic construct
  misc_feature 1..80: note = Synthetic: >NC_009824.1-cand-4920-4999
  source 1..80: mol_type = other DNA
cgggctgctcatggtacgatctgcagcccgctgagaccacagttagactgagagcttacttgtccacacccgggttaccc

SEQ ID NO: 12697 - DNA, 80 bp, synthetic construct
  misc_feature 1..80: note = Synthetic: >NC_009824.1-cand-5000-5079
  source 1..80: mol_type = other DNA
gtctgccaagaccatttagacttttgggagagcgtcttcactggactaactcacatagatgcccactttctgtcacagac

SEQ ID NO: 12698 - DNA, 80 bp, synthetic construct
  misc_feature 1..80: note = Synthetic: >NC_009824.1-cand-5080-5159
  source 1..80: mol_type = other DNA
taagcagcagggacttaacttctcgtacctaactgcctaccaagccactgtgtgcgcccgcgcgcaggctcctcccccaa

SEQ ID NO: 12699 - DNA, 80 bp, synthetic construct
  misc_feature 1..80: note = Synthetic: >NC_009824.1-cand-5150-5229
  source 1..80: mol_type = other DNA
cctcccccaagttgggacgagatgtggaagtgtctcgtgcggcttaagccaacactacatggacctacgccccttctata

SEQ ID NO: 12700 - DNA, 80 bp, synthetic construct
  misc_feature 1..80: note = Synthetic: >NC_009824.1-cand-5240-5319
  source 1..80: mol_type = other DNA
cctgtccaaaatgaaacctgcttgacacaccccatcacaaaatacctcatggcatgcatgtcagccgatctggaagtaac

SEQ ID NO: 12701 - DNA, 80 bp, synthetic construct
  misc_feature 1..80: note = Synthetic: >NC_009824.1-cand-5350-5429
  source 1..80: mol_type = other DNA
cctcgcagccctagcggcctactgcttgtcagtcggctgcgttgtgattgtgggtcatattgagctggagggcaagccag

SEQ ID NO: 12702 - DNA, 80 bp, synthetic construct
  misc_feature 1..80: note = Synthetic: >NC_009824.1-cand-5400-5479
  source 1..80: mol_type = other DNA
tgggtcatattgagctggagggcaagccagcactcgttccagacaaagaggtgttgtatcaacaatacgatgagatggag

SEQ ID NO: 12703 - DNA, 80 bp, synthetic construct
  misc_feature 1..80: note = Synthetic: >NC_009824.1-cand-5480-5559
  source 1..80: mol_type = other DNA
gagtgctcacaagctgccccatatatcgaacaagctcaggtaatagcccaccagttcaaggaaaaaatccttggattgct

SEQ ID NO: 12704 - DNA, 80 bp, synthetic construct
  misc_feature 1..80: note = Synthetic: >NC_009824.1-cand-5550-5629
  source 1..80: mol_type = other DNA
ttggattgctgcagcgagccacccagcaacaagctgtcattgagcccatagtaactaccaactggcaaaagcttgaggcc

SEQ ID NO: 12705 - DNA, 80 bp, synthetic construct
  misc_feature 1..80: note = Synthetic: >NC_009824.1-cand-5630-5709
  source 1..80: mol_type = other DNA
ttctggcacaagcatatgtggaattttgtgagtgggatccaatacctagcaggcctctccactttgcctggcaaccctgc

SEQ ID NO: 12706 - DNA, 80 bp, synthetic construct
  misc_feature 1..80: note = Synthetic: >NC_009824.1-cand-5710-5789
  source 1..80: mol_type = other DNA
tgtggcgtctcttatggcgttcactgcttcagtcaccagtcccctgacgaccaaccaaactatgttttttaacatactcg

SEQ ID NO: 12707 - DNA, 80 bp, synthetic construct
  misc_feature 1..80: note = Synthetic: >NC_009824.1-cand-5790-5869
  source 1..80: mol_type = other DNA
gggggtgggttgccacccatttggcagggccccagagctcctccgcgttcgtggtaagcggcttggcaggcgctgccata

SEQ ID NO: 12708 - DNA, 80 bp, synthetic construct
  misc_feature 1..80: note = Synthetic: >NC_009996.1-cand-4340-4419
  source 1..80: mol_type = other DNA
caagaagtggtaattatggatgatctgggccaaaaccctgatggtaaggacctttctatgttctgtcagatggtgtcaac

SEQ ID NO: 12709 - DNA, 80 bp, synthetic construct
  misc_feature 1..80: note = Synthetic: >NC_009996.1-cand-4380-4459
  source 1..80: mol_type = other DNA
atggtaaggacctttctatgttctgtcagatggtgtcaaccactaatttcattcccccaatggcagctctggaagataag

SEQ ID NO: 12710 - DNA, 80 bp, synthetic construct
  misc_feature 1..80: note = Synthetic: >NC_009996.1-cand-4500-4579
  source 1..80: mol_type = other DNA
atcttttaaatctccaaccacccacagtaacagtccccgaagccattgacaggcgcttctacttagatttagatcttaag

SEQ ID NO: 12711 - DNA, 80 bp, synthetic construct
  misc_feature 1..80: note = Synthetic: >NC_009996.1-cand-4570-4649
  source 1..80: mol_type = other DNA
agatcttaagatcttgcaagggtaccaaaatcaagtaggcttgctagatactgccaaagcacttcagccctgtgcgaact

SEQ ID NO: 12712 - DNA, 80 bp, synthetic construct
  misc_feature 1..80: note = Synthetic: >NC_009996.1-cand-4650-4729
  source 1..80: mol_type = other DNA
gtagtaagccaccacattacaaacaatgttgtcctttgctatgtggtaaagctgtagtactggtgaacaggagaactaag

SEQ ID NO: 12713 - DNA, 80 bp, synthetic construct
  misc_feature 1..80: note = Synthetic: >NC_009996.1-cand-4730-4809
  source 1..80: mol_type = other DNA
ggcagttatgctatcaacatggtggttcagcaacttatagaggagagcaaatccagaaagagtgttggcaataatttaac

SEQ ID NO: 12714 - DNA, 80 bp, synthetic construct
  misc_feature 1..80: note = Synthetic: >NC_009996.1-cand-4810-4889
  source 1..80: mol_type = other DNA
agctatatttcagggcttgggtgataaggaaaccccaggtttcataatagatcttctatcatcatctaaagaccctaaag

SEQ ID NO: 12715 - DNA, 80 bp, synthetic construct
  misc_feature 1..80: note = Synthetic: >NC_009996.1-cand-4890-4969
  source 1..80: mol_type = other DNA
tcattcaatactgccaagaccagggctacatctcaccagtccatggctcaattgagcgagattttgcttatgtcacatat

SEQ ID NO: 12716 - DNA, 80 bp, synthetic construct
  misc_feature 1..80: note = Synthetic: >NC_009996.1-cand-4970-5049
  source 1..80: mol_type = other DNA
gctctaaattgtctaggtagtcttgtgattattctgggtaccatatacgcattatatcgcttgatgtgtattgcccaagg

SEQ ID NO: 12717 - DNA, 80 bp, synthetic construct
  misc_feature 1..80: note = Synthetic: >NC_009996.1-cand-5050-5129
  source 1..80: mol_type = other DNA
accatacacaggcatgcctactacacccaagaagaaacctgagttaagaagagcaaccttgcaaggtcctgaacatgaat

SEQ ID NO: 12718 - DNA, 80 bp, synthetic construct
  misc_feature 1..80: note = Synthetic: >NC_009996.1-cand-5130-5209
  source 1..80: mol_type = other DNA
ttttgaatgcccttattagaagaaactgccatatcattaccactgacaaaggagaatttaacctactaggtatatactct

SEQ ID NO: 12719 - DNA, 80 bp, synthetic construct
  misc_feature 1..80: note = Synthetic: >NC_009996.1-cand-5210-5289
  source 1..80: mol_type = other DNA
aactgtgctgtagtaccaacacatgctgaacctggtgacgtggtagatattgatggaaggttagttagagtgcttaaaca

SEQ ID NO: 12720 - DNA, 80 bp, synthetic construct
  misc_feature 1..80: note = Synthetic: >NC_009996.1-cand-5290-5369
  source 1..80: mol_type = other DNA
acaagtcctcactgatatgaatgatgtggatacggaagtaactgtgttgtggcttgaccagaatgaaaagttcagagaca

SEQ ID NO: 12721 - DNA, 80 bp, synthetic construct
  misc_feature 1..80: note = Synthetic: >NC_009996.1-cand-5370-5449
  source 1..80: mol_type = other DNA
taagaagatttatacctgaacatcagcaagattggcacaatatacatttagctaccaatgtcaccaaattccctatgctc

SEQ ID NO: 12722 - DNA, 80 bp, synthetic construct
  misc_feature 1..80: note = Synthetic: >NC_009996.1-cand-5490-5569
  source 1..80: mol_type = other DNA
atcttagtggtaatgctacatgcaggttgtacaaatatgactatccaacccaaccaggtcaatgtggtgcagtgctggcc

SEQ ID NO: 12723 - DNA, 80 bp, synthetic construct
  misc_feature 1..80: note = Synthetic: >NC_009996.1-cand-5530-5609
  source 1..80: mol_type = other DNA
ctatccaacccaaccaggtcaatgtggtgcagtgctggccaacacaggtaatatcataggaatacatgtgggtggaaatg

SEQ ID NO: 12724 - DNA, 80 bp, synthetic construct
  misc_feature 1..80: note = Synthetic: >NC_010277.2-cand-3620-3699
  source 1..80: mol_type = other DNA
taaattccaattacagctggcctctttttctttttcttgaaattcataattgagcagtggcttattctcttgcagtaatt

SEQ ID NO: 12725 - DNA, 80 bp, synthetic construct
  misc_feature 1..80: note = Synthetic: >NC_010277.2-cand-3740-3819
  source 1..80: mol_type = other DNA
cttattcactcctttacaaattaaaaagcttatagtgcagaaggtagagcaaaaattcttaatagcagatactctatgct

SEQ ID NO: 12726 - DNA, 80 bp, synthetic construct
  misc_feature 1..80: note = Synthetic: >NC_010277.2-cand-3820-3899
  source 1..80: mol_type = other DNA
ttgataaagttataaacaataaaatacatcctaattcacaggcatgcctgcttttaaaatcaactttaaatttctcaatc

SEQ ID NO: 12727 - DNA, 80 bp, synthetic construct
  misc_feature 1..80: note = Synthetic: >NC_010277.2-cand-3900-3979
  source 1..80: mol_type = other DNA
ttatcatataactctatagctttatcagaagtagtataaatggcaaaacaacttactgttttattactatatacagcatg

SEQ ID NO: 12728 - DNA, 80 bp, synthetic construct
  misc_feature 1..80: note = Synthetic: >NC_010277.2-cand-3980-4059
  source 1..80: mol_type = other DNA
gctaagataatcagaaagatcaataggaaaatcagtaggaacaggagtttctctgttcttttttggctttggtggagtgc

SEQ ID NO: 12729 - DNA, 80 bp, synthetic construct
  misc_feature 1..80: note = Synthetic: >NC_010277.2-cand-4060-4139
  source 1..80: mol_type = other DNA
ttgtaaaacttgctgaactagcagagcttgcagagcttcgggaccccccaaattttcgctttcttgagaatggaggaggg

SEQ ID NO: 12730 - DNA, 80 bp, synthetic construct
  misc_feature 1..80: note = Synthetic: >NC_010277.2-cand-4140-4219
  source 1..80: mol_type = other DNA
gtcttcggggtggtgaaggaggaggatctgtattcctcatctgtaaactgagatgacgaggcctcctcggcagaggaaga

SEQ ID NO: 12731 - DNA, 80 bp, synthetic construct
  misc_feature 1..80: note = Synthetic: >NC_010277.2-cand-4220-4299
  source 1..80: mol_type = other DNA
cgggggctgccggggcgagcttcttgaggaggggggctcctcaggctcctcagaggacgagggaggctcaggggaggaaa

SEQ ID NO: 12732 - DNA, 80 bp, synthetic construct
  misc_feature 1..80: note = Synthetic: >NC_010277.2-cand-4300-4379
  source 1..80: mol_type = other DNA
gtgattcatcgcagaagagatcctcccaggtgccatccgttctggaagaatttctaggtacactggttccattgggtgtg

SEQ ID NO: 12733 - DNA, 80 bp, synthetic construct
  misc_feature 1..80: note = Synthetic: >NC_010277.2-cand-4380-4459
  source 1..80: mol_type = other DNA
ctggattctcttcctgaattggtggtctcctctctgctactggatccagaggatgaggtgggttcctcatggtgttcggg

SEQ ID NO: 12734 - DNA, 80 bp, synthetic construct
  misc_feature 1..80: note = Synthetic: >NC_010277.2-cand-4460-4539
  source 1..80: mol_type = other DNA
aggtatatcgggtcctctggactgggagtctgaagcctgggacgctgagaaggacccatacccagaggaagagctctggc

SEQ ID NO: 12735 - DNA, 80 bp, synthetic construct
  misc_feature 1..80: note = Synthetic: >NC_010277.2-cand-4570-4649
  source 1..80: mol_type = other DNA
ccctggatgcattggaggaaggctttctggatcttgagttggtcccgtgtggattgggcccatattcgtatgccttcccg

SEQ ID NO: 12736 - DNA, 80 bp, synthetic construct
  misc_feature 1..80: note = Synthetic: >NC_010277.2-cand-4620-4699
  source 1..80: mol_type = other DNA
ggattgggcccatattcgtatgccttcccgaagctgaatcctcctgatctccaccattctttgaatttagtggtcccata

SEQ ID NO: 12737 - DNA, 80 bp, synthetic construct
  misc_feature 1..80: note = Synthetic: >NC_010277.2-cand-4710-4789
  source 1..80: mol_type = other DNA
tcgtcaacctagatgggaaagtacagaaaatctgtcataaataacctttctttgatattttgccttatagacttttccat

SEQ ID NO: 12738 - DNA, 80 bp, synthetic construct
  misc_feature 1..80: note = Synthetic: >NC_010277.2-cand-4780-4859
  source 1..80: mol_type = other DNA
acttttccatatctaatacttacagaggaaggaagtaggagtctagaaaaggtgcagatgcagtaagcagtagtcagttt

SEQ ID NO: 12739 - DNA, 80 bp, synthetic construct
  misc_feature 1..80: note = Synthetic: >NC_010277.2-cand-4860-4939
  source 1..80: mol_type = other DNA
cttctaaagttttttgccaccagtcaaaactttcccaagtaggaggaaatccaaaccaaagaataaagcactgatagcaa

SEQ ID NO: 12740 - DNA, 80 bp, synthetic construct
  misc_feature 1..80: note = Synthetic: >NC_014396.1-cand-820-899
  source 1..80: mol_type = other DNA
gtcaagtgccctcctaagtatgagctcactgaggactgcaacttttgtaggcagatgacaggtgctagcctgaagaaggg

SEQ ID NO: 12741 - DNA, 80 bp, synthetic construct
  misc_feature 1..80: note = Synthetic: >NC_014396.1-cand-990-1069
  source 1..80: mol_type = other DNA
ggttcaagcactcaaaaagtgtgatggccaactcagcactgcacatgaggttgtgccctttgcagtgtttaagaactcaa

SEQ ID NO: 12742 - DNA, 80 bp, synthetic construct
  misc_feature 1..80: note = Synthetic: >NC_014396.1-cand-1030-1109
  source 1..80: mol_type = other DNA
gcacatgaggttgtgccctttgcagtgtttaagaactcaaagaaggtttatcttgataagcttgaccttaagactgagga

SEQ ID NO: 12743 - DNA, 80 bp, synthetic construct
  misc_feature 1..80: note = Synthetic: >NC_014396.1-cand-1110-1189
  source 1..80: mol_type = other DNA
gaatctgctaccagactcatttgtctgtttcgagcataagggacagtacaaaggaacaatggactctggtcagactaaga

SEQ ID NO: 12744 - DNA, 80 bp, synthetic construct
  misc_feature 1..80: note = Synthetic: >NC_014396.1-cand-1180-1259
  source 1..80: mol_type = other DNA
cagactaagagggagctcaaaagctttgatatctctcagtgccccaagattggaggacatggtagtaagaagtgcactgg

SEQ ID NO: 12745 - DNA, 80 bp, synthetic construct
  misc_feature 1..80: note = Synthetic: >NC_014396.1-cand-1280-1359
  source 1..80: mol_type = other DNA
cttatgagtgcactgctcagtacgccaatgcctattgttcacatgctaatgggtcagggattgtgcagatacaagtatca

SEQ ID NO: 12746 - DNA, 80 bp, synthetic construct
  misc_feature 1..80: note = Synthetic: >NC_014396.1-cand-1370-1449
  source 1..80: mol_type = other DNA
agaagcctttatgtgtagggtatgagagagtggttgtgaagagagaactctctgccaagcccatccagagagttgagcct

SEQ ID NO: 12747 - DNA, 80 bp, synthetic construct
  misc_feature 1..80: note = Synthetic: >NC_014396.1-cand-1450-1529
  source 1..80: mol_type = other DNA
tgcacaacttgtataaccaaatgtgagcctcatggattggttgtccgatcaacagggttcaagatatcatcagcagttgc

SEQ ID NO: 12748 - DNA, 80 bp, synthetic construct
  misc_feature 1..80: note = Synthetic: >NC_014396.1-cand-1530-1609
  source 1..80: mol_type = other DNA
ttgtgctagcggagtttgcgtcacaggatcgcagagtccttccaccgagattacactcaagtatccagggatatcccagt

SEQ ID NO: 12749 - DNA, 80 bp, synthetic construct
  misc_feature 1..80: note = Synthetic: >NC_014396.1-cand-1630-1709
  source 1..80: mol_type = other DNA
gttcacatggcacacgatgatcagtcagttagctccaaaatagtagctcactgccctccccaggacccgtgcttagtgca

SEQ ID NO: 12750 - DNA, 80 bp, synthetic construct
  misc_feature 1..80: note = Synthetic: >NC_014396.1-cand-1700-1779
  source 1..80: mol_type = other DNA
gcttagtgcatgactgcatagtgtgtgctcatggcctgataaattaccagtgtcacactgctctcagtgcctttgttgtt

SEQ ID NO: 12751 - DNA, 80 bp, synthetic construct
  misc_feature 1..80: note = Synthetic: >NC_014396.1-cand-1780-1859
  source 1..80: mol_type = other DNA
gtgtttgtattcagttctattgcaataatttgtttagctattctttatagggtgcttaagtgcctgaagattgccccaag

SEQ ID NO: 12752 - DNA, 80 bp, synthetic construct
  misc_feature 1..80: note = Synthetic: >NC_014396.1-cand-1860-1939
  source 1..80: mol_type = other DNA
gaaagttctgaatccactaatgtggatcacagccttcatcagatggatatataagaagatggttgccagagtggcagaca

SEQ ID NO: 12753 - DNA, 80 bp, synthetic construct
  misc_feature 1..80: note = Synthetic: >NC_014396.1-cand-1940-2019
  source 1..80: mol_type = other DNA
acattaatcaagtgaacagggaaataggatggatggaaggaggtcagttggttctagggaaccctgcccctattcctcgt

SEQ ID NO: 12754 - DNA, 80 bp, synthetic construct
  misc_feature 1..80: note = Synthetic: >NC_014396.1-cand-2020-2099
  source 1..80: mol_type = other DNA
catgccccaatcccacgttatagcacatacctgatgttattattgattgtctcatatgcatcagcatgttcagaactgat

SEQ ID NO: 12755 - DNA, 80 bp, synthetic construct
  misc_feature 1..80: note = Synthetic: >NC_014396.1-cand-2100-2179
  source 1..80: mol_type = other DNA
tcaggcaagctccagaatcaccacttgctctacagagggtgttaacaccaagtgtagactgtctggcacagcattgatca

SEQ ID NO: 12756 - DNA, 80 bp, synthetic construct
  misc_feature 1..80: note = Synthetic: >NC_021547.1-cand-350-429
  source 1..80: mol_type = other DNA
gggcatactattctagttccaaagacgagaaatgctgaaatactcctagttaactctacatcagatttaaaacttaactc

SEQ ID NO: 12757 - DNA, 80 bp, synthetic construct
  misc_feature 1..80: note = Synthetic: >NC_021547.1-cand-430-509
  source 1..80: mol_type = other DNA
ttttccatcagaggcagttactagattggttgaagagaatgaacaattgcgtaaacaaattaaacatttaagagaacaac

SEQ ID NO: 12758 - DNA, 80 bp, synthetic construct
  misc_feature 1..80: note = Synthetic: >NC_021547.1-cand-520-599
  source 1..80: mol_type = other DNA
accaactgcaattttatgtgaagctttggaagacatgactgagaaaatgaaattggtcgaaagagaaaaagaaacggtta

SEQ ID NO: 12759 - DNA, 80 bp, synthetic construct
  misc_feature 1..80: note = Synthetic: >NC_021547.1-cand-610-689
  source 1..80: mol_type = other DNA
tctcgagtgtagcagaattaatcagaggttaaaaaaacagattcagatgtgtgaagaagaagctactgatagactggctt

SEQ ID NO: 12760 - DNA, 80 bp, synthetic construct
  misc_feature 1..80: note = Synthetic: >NC_021547.1-cand-690-769
  source 1..80: mol_type = other DNA
tggtgaactctcatcatagagaggagactttaatcatgaaacgagaaatttacagattgcaaatggagaacgtgacatta

SEQ ID NO: 12761 - DNA, 80 bp, synthetic construct
  misc_feature 1..80: note = Synthetic: >NC_021547.1-cand-880-959
  source 1..80: mol_type = other DNA
gacgtctgaccagtcagatgaatctgatcatgataatcatgaaaatagtgaatcagatttagaagacatgatgaatccag

SEQ ID NO: 12762 - DNA, 80 bp, synthetic construct
  misc_feature 1..80: note = Synthetic: >NC_021547.1-cand-980-1059
  source 1..80: mol_type = other DNA
agaggaggcgaaaatcctagaagacaggccagaatgttagaaatgagagaagaaatggaacgatttcatgaagacatgga

SEQ ID NO: 12763 - DNA, 80 bp, synthetic construct
  misc_feature 1..80: note = Synthetic: >NC_021547.1-cand-1070-1149
  source 1..80: mol_type = other DNA
ctaaactttgatctagacatgtagacctctttttcctttatttgtagacgcgacgcttgaccagggataagtatttggat

SEQ ID NO: 12764 - DNA, 80 bp, synthetic construct
  misc_feature 1..80: note = Synthetic: >NC_021548.1-cand-0-79
  source 1..80: mol_type = other DNA
gaaattaatctattcagtgtgtcgtgagagggctccatcaccctggtcaccatgacgcagtcagtttctctttctgattt

SEQ ID NO: 12765 - DNA, 80 bp, synthetic construct
  misc_feature 1..80: note = Synthetic: >NC_021548.1-cand-90-169
  source 1..80: mol_type = other DNA
actgaagatggatatatgccatcagacagagaatgtgttgcattggatagatatttatccaaagagcagaaggaactaag

SEQ ID NO: 12766 - DNA, 80 bp, synthetic construct
  misc_feature 1..80: note = Synthetic: >NC_021548.1-cand-180-259
  source 1..80: mol_type = other DNA
aaggatggaaaaaatgatagatcagctttaagaattaaaatgtttttatctccttcaccttccagacgattcactcaaca

SEQ ID NO: 12767 - DNA, 80 bp, synthetic construct
  misc_feature 1..80: note = Synthetic: >NC_021548.1-cand-270-349
  source 1..80: mol_type = other DNA
ccaatgagagaaataaaaacaaatacggatataccaagtacactatggactcttgtgactgattggttactaaatttact

SEQ ID NO: 12768 - DNA, 80 bp, synthetic construct
  misc_feature 1..80: note = Synthetic: >NC_021548.1-cand-360-439
  source 1..80: mol_type = other DNA
gaaaatcaggaaatgtttgaagattttattagttcaaaatttccggatgttttagcttcggcagacaagctagcccgctt

SEQ ID NO: 12769 - DNA, 80 bp, synthetic construct
  misc_feature 1..80: note = Synthetic: >NC_021548.1-cand-450-529
  source 1..80: mol_type = other DNA
ttggaggatagaaaagatgtgttgcacaagaatttttctaaagccatgaatgcctttggcgcctgtttttgggcaatcaa

SEQ ID NO: 12770 - DNA, 80 bp, synthetic construct
  misc_feature 1..80: note = Synthetic: >NC_021548.1-cand-540-619
  source 1..80: mol_type = other DNA
gccactgagggaaaatgtaatgttgtaagagccactgatgattcaatgatactagagtttcagccaataccagaatattt

SEQ ID NO: 12771 - DNA, 80 bp, synthetic construct
  misc_feature 1..80: note = Synthetic: >NC_021548.1-cand-630-709
  source 1..80: mol_type = other DNA
agatcaaaagctacattttataaattatacccactctcagacgaacaacccgttaatggcatgctcgctctaaaagcagt

SEQ ID NO: 12772 - DNA, 80 bp, synthetic construct
  misc_feature 1..80: note = Synthetic: >NC_026437.1-cand-670-749
  source 1..80: mol_type = other DNA
ccttgaaaactttagagcctatgtagatggattcgagccgaacggctgcattgagggcaagctttcccaaatgtcaaaag

SEQ ID NO: 12773 - DNA, 80 bp, synthetic construct
  misc_feature 1..80: note = Synthetic: >NC_026437.1-cand-760-839
  source 1..80: mol_type = other DNA
caaaattgaaccattcttgaggacgacaccacgccccctcagattgcctgatgggcctctttgccatcagcggtcaaagt

SEQ ID NO: 12774 - DNA, 80 bp, synthetic construct
  misc_feature 1..80: note = Synthetic: >NC_026437.1-cand-810-889
  source 1..80: mol_type = other DNA
atgggcctctttgccatcagcggtcaaagttcctgctgatggatgctctgaaattaagtattgaagacccgagtcacgag

SEQ ID NO: 12775 - DNA, 80 bp, synthetic construct
  misc_feature 1..80: note = Synthetic: >NC_026437.1-cand-930-1009
  source 1..80: mol_type = other DNA
agacattctttggctggaaagagcctaacatagtcaaaccacatgagaaaggcataaatcccaattacctcatggcttgg

SEQ ID NO: 12776 - DNA, 80 bp, synthetic construct
  misc_feature 1..80: note = Synthetic: >NC_026437.1-cand-1020-1099
  source 1..80: mol_type = other DNA
tagcagagctacaggacattgaaaatgaagagaagatcccaaggacaaagaacatgaagagaacaagccaattgaagtgg

SEQ ID NO: 12777 - DNA, 80 bp, synthetic construct
  misc_feature 1..80: note = Synthetic: >NC_026437.1-cand-1100-1179
  source 1..80: mol_type = other DNA
gcactcggtgaaaatatggcaccagaaaaagtagactttgatgactgcaaagatgttggagaccttaaacagtatgacag

SEQ ID NO: 12778 - DNA, 80 bp, synthetic construct
  misc_feature 1..80: note = Synthetic: >NC_026437.1-cand-1190-1269
  source 1..80: mol_type = other DNA
gagcccagatctctagcaagctgggtccaaaatgaattcaataaggcatgtgaattgactgattcaagctggatagaact

SEQ ID NO: 12779 - DNA, 80 bp, synthetic construct
  misc_feature 1..80: note = Synthetic: >NC_026437.1-cand-1270-1349
  source 1..80: mol_type = other DNA
tgatgaaataggagaagatgttgccccgattgaacatatcgcaagcatgaggaggaactattttacagcagaagtgtccc

SEQ ID NO: 12780 - DNA, 80 bp, synthetic construct
  misc_feature 1..80: note = Synthetic: >NC_026437.1-cand-1360-1439
  source 1..80: mol_type = other DNA
tactgaatacataatgaagggagtgtacataaatacggccttgctcaatgcatcctgtgcagccatggatgactttcagc

SEQ ID NO: 12781 - DNA, 80 bp, synthetic construct
  misc_feature 1..80: note = Synthetic: >NC_026437.1-cand-1520-1599
  source 1..80: mol_type = other DNA
tctcatttgagaaatgatactgatgtggtgaactttgtaagtatggagttctcactcactgacccgagactggagccaca

SEQ ID NO: 12782 - DNA, 80 bp, synthetic construct
  misc_feature 1..80: note = Synthetic: >NC_026437.1-cand-1600-1679
  source 1..80: mol_type = other DNA
caaatgggaaaaatactgtgttcttgaaataggagacatgctcttgaggactgcgataggccaagtgtcgaggcccatgt

SEQ ID NO: 12783 - DNA, 80 bp, synthetic construct
  misc_feature 1..80: note = Synthetic: >NC_026437.1-cand-1640-1719
  source 1..80: mol_type = other DNA
ctcttgaggactgcgataggccaagtgtcgaggcccatgttcctatatgtgagaaccaatggaacctccaagatcaagat

SEQ ID NO: 12784 - DNA, 80 bp, synthetic construct
  misc_feature 1..80: note = Synthetic: >NC_026437.1-cand-1760-1839
  source 1..80: mol_type = other DNA
cttcagcagattgagagcatgattgaggccgagtcttctgtcaaagagaaagacatgaccaaggaattctttgaaaacaa

SEQ ID NO: 12785 - DNA, 80 bp, synthetic construct
  misc_feature 1..80: note = Synthetic: >NC_026437.1-cand-1790-1869
  source 1..80: mol_type = other DNA
gagtcttctgtcaaagagaaagacatgaccaaggaattctttgaaaacaaatcggaaacatggccaatcggagagtcacc

SEQ ID NO: 12786 - DNA, 80 bp, synthetic construct
  misc_feature 1..80: note = Synthetic: >NC_026437.1-cand-1880-1959
  source 1..80: mol_type = other DNA
gaggaaggctctattgggaaagtgtgcaggaccttactggcaaaatctgtattcaacagtctatatgcgtctccacaact

SEQ ID NO: 12787 - DNA, 80 bp, synthetic construct
  misc_feature 1..80: note = Synthetic: >NC_026437.1-cand-2050-2129
  source 1..80: mol_type = other DNA
gctatatgaagcaatcgaggagtgcctgattaatgatccctgggttttgcttaatgcatcttggttcaactccttcctca

SEQ ID NO: 12788 - DNA, 80 bp, synthetic construct
  misc_feature 1..80: note = Synthetic: >NC_038298.1-cand-560-639
  source 1..80: mol_type = other DNA
aggcatttgtatgtttcgatgcccactgcacagtcaacaatgaaggcagatgaaatcacaccaggtcgttttaggacaat

SEQ ID NO: 12789 - DNA, 80 bp, synthetic construct
  misc_feature 1..80: note = Synthetic: >NC_038298.1-cand-620-699
  source 1..80: mol_type = other DNA
ccaggtcgttttaggacaattgtgtgtggactcttcccagcccaaatcaaggcaaggaacataataagcccggtcatggg

SEQ ID NO: 12790 - DNA, 80 bp, synthetic construct
  misc_feature 1..80: note = Synthetic: >NC_038298.1-cand-730-809
  source 1..80: mol_type = other DNA
ctgggttgataagattgaggactttctaaaggctgagtgccctttcctcccaaagcctaaaggacaaacagaaccttttc

SEQ ID NO: 12791 - DNA, 80 bp, synthetic construct
  misc_feature 1..80: note = Synthetic: >NC_038298.1-cand-810-889
  source 1..80: mol_type = other DNA
tttcaactaatggtgcttacttcctaaatcggcaagctcaggtagaggaatcaaaagttcctgacatagtggacttgatt

SEQ ID NO: 12792 - DNA, 80 bp, synthetic construct
  misc_feature 1..80: note = Synthetic: >NC_038298.1-cand-900-979
  source 1..80: mol_type = other DNA
aagcagagggtgcaaccttgtttgatgacatcgcaagtccccattcggcttgggtattttcatgtgcacctgatcgctgc

SEQ ID NO: 12793 - DNA, 80 bp, synthetic construct
  misc_feature 1..80: note = Synthetic: >NC_038298.1-cand-980-1059
  source 1..80: mol_type = other DNA
ccaccaactgcactttatgttgcaggtgtacctgagctgggtgcattctttgctatccttcaggatatgagaaatactat

SEQ ID NO: 12794 - DNA, 80 bp, synthetic construct
  misc_feature 1..80: note = Synthetic: >NC_038298.1-cand-1060-1139
  source 1..80: mol_type = other DNA
catggcatcaaagtctgtaggaactgctgaagaaaaactaaagaaaaaatctgccttttaccagtcctatctccgcagaa

SEQ ID NO: 12795 - DNA, 80 bp, synthetic construct
  misc_feature 1..80: note = Synthetic: >NC_038298.1-cand-1120-1199
  source 1..80: mol_type = other DNA
ccagtcctatctccgcagaacacaatcaatgggaatccaactggaccagaaaattataatcttatacatgttgcactggg

SEQ ID NO: 12796 - DNA, 80 bp, synthetic construct
  misc_feature 1..80: note = Synthetic: >NC_038298.1-cand-1220-1299
  source 1..80: mol_type = other DNA
ttccatcttggagatgatatggacccagaattaagacagcttgcacagagcctagtggatgtgaaggtaaaggagatctc

SEQ ID NO: 12797 - DNA, 80 bp, synthetic construct
  misc_feature 1..80: note = Synthetic: >NC_038298.1-cand-1300-1379
  source 1..80: mol_type = other DNA
caatcaagagccgctgaagatctaaagagttgcagcaagtgtatggtggtatttcgggctggtgccaattattaatcatc

SEQ ID NO: 12798 - DNA, 80 bp, synthetic construct
  misc_feature 1..80: note = Synthetic: >NC_038298.1-cand-1380-1459
  source 1..80: mol_type = other DNA
tcaggtctatctatctttaattacgggtgggttagagtagatgaatgtataatcctttaatgtgacgggtggtttaacag

SEQ ID NO: 12799 - DNA, 80 bp, synthetic construct
  misc_feature 1..80: note = Synthetic: >NC_038298.1-cand-1460-1539
  source 1..80: mol_type = other DNA
ggcactatggtatacactatatgattgcactcaattatgttaaccgtatagtcttgtcattgattgtagttatgtcaatg

SEQ ID NO: 12800 - DNA, 80 bp, synthetic construct
  misc_feature 1..80: note = Synthetic: >NC_038298.1-cand-1540-1619
  source 1..80: mol_type = other DNA
attatgtaatagtgtgataagtttgttattcaatgtttattgttgttaagttagtgataagttagtgttgaattagcatt

SEQ ID NO: 12801 - DNA, 80 bp, synthetic construct
  misc_feature 1..80: note = Synthetic: >NC_038298.1-cand-1620-1699
  source 1..80: mol_type = other DNA
atattagtgtaaggttagtgttaagttgatttagtttattatcaaattatgttaagttagtttaagttgttcattattga

SEQ ID NO: 12802 - DNA, 80 bp, synthetic construct
  misc_feature 1..80: note = Synthetic: >NC_038298.1-cand-1700-1779
  source 1..80: mol_type = other DNA
tcatttatcaggaactgtgatatagatacttgccaaatggactggaatatccctatagttgcactattcatactaatctc

SEQ ID NO: 12803 - DNA, 80 bp, synthetic construct
  misc_feature 1..80: note = Synthetic: >NC_038298.1-cand-1790-1869
  source 1..80: mol_type = other DNA
ataaatggatgtaaatttcattcctgctgctctgcgctttgcctactaatcaattactaacaacaacatctacctcatcc

SEQ ID NO: 12804 - DNA, 80 bp, synthetic construct
  misc_feature 1..80: note = Synthetic: >NC_039199.1-cand-10860-10939
  source 1..80: mol_type = other DNA
actcaataagatttgtcttggaagtttaggcattagttacaaatgtgtaaaacctttattacctaggtttatgagtgtaa

SEQ ID NO: 12805 - DNA, 80 bp, synthetic construct
  misc_feature 1..80: note = Synthetic: >NC_039199.1-cand-10940-11019
  source 1..80: mol_type = other DNA
atttcctacacaggttatctgtcagtagtagacctatggaattcccagcatcagttccagcttatagaacaacaaattac

SEQ ID NO: 12806 - DNA, 80 bp, synthetic construct
  misc_feature 1..80: note = Synthetic: >NC_039199.1-cand-11020-11099
  source 1..80: mol_type = other DNA
cattttgacactagtcctattaatcaagcactaagtgagagatttgggaatgaagatattaatttggtcttccaaaatgc

SEQ ID NO: 12807 - DNA, 80 bp, synthetic construct
  misc_feature 1..80: note = Synthetic: >NC_039199.1-cand-11100-11179
  source 1..80: mol_type = other DNA
aatcagctgtggaattagcataatgagtgtagtagaacaattaactggtaggagtccaaaacagttagttttaatacctc

SEQ ID NO: 12808 - DNA, 80 bp, synthetic construct
  misc_feature 1..80: note = Synthetic: >NC_039199.1-cand-11180-11259
  source 1..80: mol_type = other DNA
aattagaagaaatagacattatgccaccaccagtgtttcaagggaaattcaattataagctagtagataagataacttct

SEQ ID NO: 12809 - DNA, 80 bp, synthetic construct
  misc_feature 1..80: note = Synthetic: >NC_039199.1-cand-11220-11299
  source 1..80: mol_type = other DNA
agggaaattcaattataagctagtagataagataacttctgatcaacatatcttcagtccagacaaaatagatatgttaa

SEQ ID NO: 12810 - DNA, 80 bp, synthetic construct
  misc_feature 1..80: note = Synthetic: >NC_039199.1-cand-11340-11419
  source 1..80: mol_type = other DNA
aacagatcagttcctgaacaagagagagaattatttccatgggaataatcttattgagtctttgtcagcagcgttagcat

SEQ ID NO: 12811 - DNA, 80 bp, synthetic construct
  misc_feature 1..80: note = Synthetic: >NC_039199.1-cand-11400-11479
  source 1..80: mol_type = other DNA
tttgtcagcagcgttagcatgtcattggtgtgggatattaacagagcaatgtatagaaaataatattttcaagaaagact

SEQ ID NO: 12812 - DNA, 80 bp, synthetic construct
  misc_feature 1..80: note = Synthetic: >NC_039199.1-cand-11480-11559
  source 1..80: mol_type = other DNA
ggggtgacgggttcatatcggatcatgcttttatggacttcaaaatattcctatgtgtctttaaaactaaacttttatgt

SEQ ID NO: 12813 - DNA, 80 bp, synthetic construct
  misc_feature 1..80: note = Synthetic: >NC_039199.1-cand-11570-11649
  source 1..80: mol_type = other DNA
cccaagggaaaaacattaaagatgaagatatagtagatgaatcaatagataaactgttaaggattgataatactttttgg

SEQ ID NO: 12814 - DNA, 80 bp, synthetic construct
  misc_feature 1..80: note = Synthetic: >NC_039199.1-cand-11640-11719
  source 1..80: mol_type = other DNA
tactttttggagaatgttcagcaaggttatgtttgaatcaaaggttaagaaaaggataatgttatatgatgtaaaatttc

SEQ ID NO: 12815 - DNA, 80 bp, synthetic construct
  misc_feature 1..80: note = Synthetic: >NC_039199.1-cand-11720-11799
  source 1..80: mol_type = other DNA
tatcattagtaggttatatagggtttaagaattggtttatagaacagttgagatcagctgagttgcatgaggtaccttgg

SEQ ID NO: 12816 - DNA, 80 bp, synthetic construct
  misc_feature 1..80: note = Synthetic: >NC_039199.1-cand-11800-11879
  source 1..80: mol_type = other DNA
attgtcaatgccgaaggtgatctggttgagatcaagtcaattaaaatctatttgcaactgatagagcaaagtttattttt

SEQ ID NO: 12817 - DNA, 80 bp, synthetic construct
  misc_feature 1..80: note = Synthetic: >NC_039199.1-cand-11880-11959
  source 1..80: mol_type = other DNA
aagaataactgttttgaactatacagatatggcacatgctctcacaagattaatcagaaagaagttgatgtgtgataatg

SEQ ID NO: 12818 - DNA, 80 bp, synthetic construct
  misc_feature 1..80: note = Synthetic: >NC_039199.1-cand-11960-12039
  source 1..80: mol_type = other DNA
cactattaactccgattccatccccaatggttaatttaactcaagttattgatcctacagaacaattagcttatttccct

SEQ ID NO: 12819 - DNA, 80 bp, synthetic construct
  misc_feature 1..80: note = Synthetic: >NC_039199.1-cand-12040-12119
  source 1..80: mol_type = other DNA
aagataacatttgaaaggctaaaaaattatgacactagttcaaattatgctaaaggaaagctaacaaggaattacatgat

SEQ ID NO: 12820 - DNA, 80 bp, synthetic construct
  misc_feature 1..80: note = Synthetic: >NC_044854.1-cand-4950-5029
  source 1..80: mol_type = other DNA
cctgataagagcgaaggtccaataattgtaagaaagaatgtggatggcctagtctttttacgccgtaccatttcccgtga

SEQ ID NO: 12821 - DNA, 80 bp, synthetic construct
  misc_feature 1..80: note = Synthetic: >NC_044854.1-cand-5050-5129
  source 1..80: mol_type = other DNA
gactagaccgggcatccattgaaaggcagatctattggaccagagggcccaaccactcagacccttttgaaaccttagtg

SEQ ID NO: 12822 - DNA, 80 bp, synthetic construct
  misc_feature 1..80: note = Synthetic: >NC_044854.1-cand-5110-5189
  source 1..80: mol_type = other DNA
acccttttgaaaccttagtgccccaccagcaaagaaaagtccaattgatatcactgctgggtgaggcctcattgcatggt

SEQ ID NO: 12823 - DNA, 80 bp, synthetic construct
  misc_feature 1..80: note = Synthetic: >NC_044854.1-cand-5160-5239
  source 1..80: mol_type = other DNA
tcactgctgggtgaggcctcattgcatggtgaaaagttctacagaaaaatttctagcaaagtcatccaagagatcaagac

SEQ ID NO: 12824 - DNA, 80 bp, synthetic construct
  misc_feature 1..80: note = Synthetic: >NC_044854.1-cand-5270-5349
  source 1..80: mol_type = other DNA
gcaagccatgttccgctggatgcggttccatgatcttggtctgtggacaggagatcgcaatctcctacccgaatttgtaa

SEQ ID NO: 12825 - DNA, 80 bp, synthetic construct
  misc_feature 1..80: note = Synthetic: >NC_044854.1-cand-5510-5589
  source 1..80: mol_type = other DNA
catggattttcaataacttcgtccaggcaccccaaggagaatttactatttcccctaataatacccccggtgacattttg

SEQ ID NO: 12826 - DNA, 80 bp, synthetic construct
  misc_feature 1..80: note = Synthetic: >NC_044854.1-cand-5590-5669
  source 1..80: mol_type = other DNA
tttgatttacaattaggaccccaccttaatccatttctagcccacctctcacaaatgtataatggttgggtcggcaatat

SEQ ID NO: 12827 - DNA, 80 bp, synthetic construct
  misc_feature 1..80: note = Synthetic: >NC_044854.1-cand-5670-5749
  source 1..80: mol_type = other DNA
gcgtgtacgtatattgttggcagggaatgcttttacagctggtaagataatcatttgctgtgtcccccctggctttgatg

SEQ ID NO: 12828 - DNA, 80 bp, synthetic construct
  misc_feature 1..80: note = Synthetic: >NC_044854.1-cand-5750-5829
  source 1..80: mol_type = other DNA
ctagaatacttacaatagcccaagcaactctctttccacacttgattgctgatgttaggactcttgagcctgtggagctc

SEQ ID NO: 12829 - DNA, 80 bp, synthetic construct
  misc_feature 1..80: note = Synthetic: >NC_044854.1-cand-5830-5909
  source 1..80: mol_type = other DNA
cctctggaggacgtgcgcaacgttctctatcacaacagcagccagccgcagccaacaatgcggttggtagctatgttgta

SEQ ID NO: 12830 - DNA, 80 bp, synthetic construct
  misc_feature 1..80: note = Synthetic: >NC_044854.1-cand-5910-5989
  source 1..80: mol_type = other DNA
cactcccctccgcactggtggtggctccggaggtactgatgcctttgtggttgcgggcagggtgctcacgtgccccgccc

SEQ ID NO: 12831 - DNA, 80 bp, synthetic construct
  misc_feature 1..80: note = Synthetic: >NC_044854.1-cand-5990-6069
  source 1..80: mol_type = other DNA
ctgatttcagctttctgtttctcgtccccccctccgttgagcagaagactagggtttttagtgtccccaacatacccctg

SEQ ID NO: 12832 - DNA, 80 bp, synthetic construct
  misc_feature 1..80: note = Synthetic: >NC_044854.1-cand-6150-6229
  source 1..80: mol_type = other DNA
ccagaacgggcgctgccagatcgatggtcaactccagggcactacccctgtctcgctcagtcaactttgcaagattaggg

SEQ ID NO: 12833 - DNA, 80 bp, synthetic construct
  misc_feature 1..80: note = Synthetic: >NC_044854.1-cand-6230-6309
  source 1..80: mol_type = other DNA
gtaagacttcaagcaatgccagggtactcaacttaagtgaggtggatggcacaccctttatccctcttgagtctccagca

SEQ ID NO: 12834 - DNA, 80 bp, synthetic construct
  misc_feature 1..80: note = Synthetic: >NC_044854.1-cand-6310-6389
  source 1..80: mol_type = other DNA
ccagttggttttcccgacttaggaggttgtgactggcatgtaaacttcactttccaggctcagaatcaggacccatctca

SEQ ID NO: 12835 - DNA, 80 bp, synthetic construct
  misc_feature 1..80: note = Synthetic: >NC_044854.1-cand-6380-6459
  source 1..80: mol_type = other DNA
acccatctcaaagtgtgacctttgcaactaatgatgctagctttgttccctacttaggcagcatttctcctcacaatggg

SEQ ID NO: 12836 - DNA, 80 bp, synthetic construct
  misc_feature 1..80: note = Synthetic: >U31794.1-cand-4450-4529
  source 1..80: mol_type = other DNA
gggtctgggtcgggtggtcgggcgggctatgttcccttaggctctaggccttctactatagttgatgtcactcctgcacg

SEQ ID NO: 12837 - DNA, 80 bp, synthetic construct
  misc_feature 1..80: note = Synthetic: >U31794.1-cand-4530-4609
  source 1..80: mol_type = other DNA
accacctattgtggtggagtcagttgggcctacagatccttctattgttacactggtagaagaatctagtgttattaact

SEQ ID NO: 12838 - DNA, 80 bp, synthetic construct
  misc_feature 1..80: note = Synthetic: >U31794.1-cand-4650-4729
  source 1..80: mol_type = other DNA
tgaagttacatcctcttccacaaccacacctgctgtgttggatattacacccacatctagtactgtacatgtaagtagta

SEQ ID NO: 12839 - DNA, 80 bp, synthetic construct
  misc_feature 1..80: note = Synthetic: >U31794.1-cand-4670-4749
  source 1..80: mol_type = other DNA
caaccacacctgctgtgttggatattacacccacatctagtactgtacatgtaagtagtactactataacaaacccacta

SEQ ID NO: 12840 - DNA, 80 bp, synthetic construct
  misc_feature 1..80: note = Synthetic: >U31794.1-cand-4750-4829
  source 1..80: mol_type = other DNA
tatattgatcctccagtaattgaggctccacaaactggagaggtatctggtaatattttgattagcactcctacatctgg

SEQ ID NO: 12841 - DNA, 80 bp, synthetic construct
  misc_feature 1..80: note = Synthetic: >U31794.1-cand-4830-4909
  source 1..80: mol_type = other DNA
aatacatagctatgaggaaatacctatgcaaacatttgctatacacggtactggcaacgaacctattagtagtaccccta

SEQ ID NO: 12842 - DNA, 80 bp, synthetic construct
  misc_feature 1..80: note = Synthetic: >U31794.1-cand-4910-4989
  source 1..80: mol_type = other DNA
ttccaggttttagacgccttgctgctcccaggttatatagtagggcttttcagcaggttagggtcactgacccagcattt

SEQ ID NO: 12843 - DNA, 80 bp, synthetic construct
  misc_feature 1..80: note = Synthetic: >U31794.1-cand-4990-5069
  source 1..80: mol_type = other DNA
ttggacaaccccacaacattaatatctgctgataatcctgtttttgaaggtgctgacacaacgttgaccttttctccctc

SEQ ID NO: 12844 - DNA, 80 bp, synthetic construct
  misc_feature 1..80: note = Synthetic: >U31794.1-cand-5080-5159
  source 1..80: mol_type = other DNA
cctgatcctgattttatggatatagttgcattacataggcctgcatttactacacgtagaacaggtgtgcgttttagtag

SEQ ID NO: 12845 - DNA, 80 bp, synthetic construct
  misc_feature 1..80: note = Synthetic: >U31794.1-cand-5200-5279
  source 1..80: mol_type = other DNA
caaataggtgctcgtgtgcattattattatgatataagtcctattgcacaggctgatgaaattgaaatgcagccattatt

SEQ ID NO: 12846 - DNA, 80 bp, synthetic construct
  misc_feature 1..80: note = Synthetic: >U31794.1-cand-5240-5319
  source 1..80: mol_type = other DNA
ctattgcacaggctgatgaaattgaaatgcagccattattgtctacagacaattcatttgatggcctatatgatatttat

SEQ ID NO: 12847 - DNA, 80 bp, synthetic construct
  misc_feature 1..80: note = Synthetic: >U31794.1-cand-5320-5399
  source 1..80: mol_type = other DNA
gcaaatattgatgatgaggcacccatttcatttcgtcagtctggtgctacaccttctgcacaattacctattaaaccttc

SEQ ID NO: 12848 - DNA, 80 bp, synthetic construct
  misc_feature 1..80: note = Synthetic: >U31794.1-cand-5400-5479
  source 1..80: mol_type = other DNA
tacattatcctttgctagtaacacagctaatgttactgcccctttgggaaatgtttgggaaacaccattttattcaggtc

SEQ ID NO: 12849 - DNA, 80 bp, synthetic construct
  misc_feature 1..80: note = Synthetic: >U31794.1-cand-5480-5559
  source 1..80: mol_type = other DNA
ctgatatagttttacctacaggccccagtacttggcccttcgtacctcagtctccttctgatgttacacatgatgtatat

SEQ ID NO: 12850 - DNA, 80 bp, synthetic construct
  misc_feature 1..80: note = Synthetic: >U31794.1-cand-5640-5719
  source 1..80: mol_type = other DNA
agatggcgatgtggcggcctagtgacaataaggtgtacctacctccaacacctgtttcaaaggttgtggcaacggataca

SEQ ID NO: 12851 - DNA, 80 bp, synthetic construct
  misc_feature 1..80: note = Synthetic: >U31794.1-cand-5720-5799
  source 1..80: mol_type = other DNA
tatgtaaaacgtaccagtatattttatcatgcaggtagctctaggttgcttgctgttggccatccttattactctgtttc

SEQ ID NO: 12852 - DNA, 80 bp, synthetic construct
  misc_feature 1..80: note = Synthetic: >NC_003310.1-cand-143320-143399
  source 1..80: mol_type = other DNA
atcaacgctacccaataaatccgatgtcttgactacctggctcattgattatgttgaggatacatggggatctgatggta

SEQ ID NO: 12853 - DNA, 80 bp, synthetic construct
  misc_feature 1..80: note = Synthetic: >NC_001611.1-cand-125210-125289
  source 1..80: mol_type = other DNA
atcaagatgtgtatatttgtgaaaattgtggagacatagcagcacaaatcaaaagtattaatacatgtcttagatgttca

SEQ ID NO: 12854 - DNA, 80 bp, synthetic construct
  misc_feature 1..80: note = Synthetic: >NC_001611.1-cand-128720-128799
  source 1..80: mol_type = other DNA
gagcagcaggaataccaacaaacatattaccacagccgtattttttatgaatatcacatatcatgttaaaaaatcttgat

SEQ ID NO: 12855 - DNA, 80 bp, synthetic construct
  misc_feature 1..80: note = Synthetic: >NC_000883.2-cand-110-189
  source 1..80: mol_type = other DNA
gacttccggaattagggttggctctgggccagcttgcttggggttgccttgacactaagacaagcggcgcgccgcttgat

SEQ ID NO: 12856 - DNA, 80 bp, synthetic construct
  misc_feature 1..80: note = Synthetic: >NC_003310.1-cand-47360-47439
  source 1..80: mol_type = other DNA
tctaacatagttttaagaaagtcagaatctaagacctgatgttcatatattggttcatacatgaaatgatctctattgat

SEQ ID NO: 12857 - DNA, 80 bp, synthetic construct
  misc_feature 1..80: note = Synthetic: >NC_001611.1-cand-19310-19389
  source 1..80: mol_type = other DNA
cctattgccagatacatactaatattagcatccttatactgaaggcgcaccatatcatattcttcgtcatcgattgtgat

SEQ ID NO: 12858 - DNA, 80 bp, synthetic construct
  misc_feature 1..80: note = Synthetic: >NC_001611.1-cand-123530-123609
  source 1..80: mol_type = other DNA
taagttactttgaaacaggatttccaatcactatagaaaatgctctagtcgcatctcttaatccaaatatgatatgtgat

SEQ ID NO: 12859 - DNA, 80 bp, synthetic construct
  misc_feature 1..80: note = Synthetic: >AdVB7-cand-11770-11849
  source 1..80: mol_type = other DNA
atcaccgagcctgatgggagatggctgtatgatctgatcaacatcctgcaaagtattatagtgcaggaacgtagcctggg

SEQ ID NO: 12860 - DNA, 80 bp, synthetic construct
  misc_feature 1..80: note = Synthetic: >NC_003310.1-cand-85640-85719
  source 1..80: mol_type = other DNA
atcacgtaccggaacactggctagaaaaatcattaaaaagatggaggatatggtggtcgacggatacggacaagtagtta

SEQ ID NO: 12861 - DNA, 80 bp, synthetic construct
  misc_feature 1..80: note = Synthetic: >NC_001611.1-cand-141360-141439
  source 1..80: mol_type = other DNA
ctgtatctccgatcgttatagcgagaactcataccgcacttatatttttgatgggtaagccaacaacatctagacgtgat

SEQ ID NO: 12862 - DNA, 80 bp, synthetic construct
  misc_feature 1..80: note = Synthetic: >NC_001611.1-cand-121050-121129
  source 1..80: mol_type = other DNA
atcagaatacgtatccggtatttaacgattcttcacaagtgaaatgttgtcattatttcgatataaactcagataatagc

SEQ ID NO: 12863 - DNA, 80 bp, synthetic construct
  misc_feature 1..80: note = Synthetic: >NC_003310.1-cand-20630-20709
  source 1..80: mol_type = other DNA
atcagagtttttaatgactactatattatgttttataccatttcgtgtcacagctttgtagatttggatatagttaatcc

SEQ ID NO: 12864 - DNA, 80 bp, synthetic construct
  misc_feature 1..80: note = Synthetic: >AdVB7-cand-9370-9449
  source 1..80: mol_type = other DNA
ctcagagtgaagacgcctccgcgcatctccctgaagtggtgactgggaggctctccgttgggcagggacaccgcgctgat

SEQ ID NO: 12865 - DNA, 80 bp, synthetic construct
  misc_feature 1..80: note = Synthetic: >NC_001611.1-cand-32190-32269
  source 1..80: mol_type = other DNA
atcagtaaagaacactccacctataggattcttaatatgatacgcagtgctaactggcagacaacaagccgaagagtata

SEQ ID NO: 12866 - DNA, 80 bp, synthetic construct
  misc_feature 1..80: note = Synthetic: >NC_003310.1-cand-55720-55799
  source 1..80: mol_type = other DNA
gaaaaatatagttccattattgttattaacgtgaaacgtagtattggccatgccgcatactcccttatgactagactgat

SEQ ID NO: 12867 - DNA, 80 bp, synthetic construct
  misc_feature 1..80: note = Synthetic: >NC_003310.1-cand-74580-74659
  source 1..80: mol_type = other DNA
atcagttttaactggtagttccattagcctttccacttctgcagaataatcagaaattggttctttaccagaaaatccag

SEQ ID NO: 12868 - DNA, 80 bp, synthetic construct
  misc_feature 1..80: note = Synthetic: >NC_001611.1-cand-142120-142199
  source 1..80: mol_type = other DNA
tatgctattagaaatggataaaatcaaaattacggttgattcaaaaattggtaatgttgttaccatatcgtataacttgg

SEQ ID NO: 12869 - DNA, 80 bp, synthetic construct
  misc_feature 1..80: note = Synthetic: >AdVB7-cand-1890-1969
  source 1..80: mol_type = other DNA
cttttatattggataaatggatccgccaaactcacttcagcaagggatacgttttggatttcatagcagcagctttgtgg

SEQ ID NO: 12870 - DNA, 80 bp, synthetic construct
  misc_feature 1..80: note = Synthetic: >EVD70-cand-1090-1169
  source 1..80: mol_type = other DNA
cccagccagaaacatccacagatagattttacactttaaaatccaagaaatgggaaagcaacagtactgggtggtggtgg

SEQ ID NO: 12871 - DNA, 80 bp, synthetic construct
  misc_feature 1..80: note = Synthetic: >AdVB7-cand-16480-16559
  source 1..80: mol_type = other DNA
ccaccggtgaaggatgaaaaaaagccccgcaaaatcaagcgggtcaaaaataacaaaaaggaagaagatgacgatgatgg

SEQ ID NO: 12872 - DNA, 80 bp, synthetic construct
  misc_feature 1..80: note = Synthetic: >AdVB3-cand-8700-8779
  source 1..80: mol_type = other DNA
gtcctggtaggcgatctcggccatgaactgctcgatctcttcctcttgaagatctccgcggcccgctctctcgacggtgg

SEQ ID NO: 12873 - DNA, 80 bp, synthetic construct
  misc_feature 1..80: note = Synthetic: >NC_003310.1-cand-123010-123089
  source 1..80: mol_type = other DNA
ccacgaacttctaattggccgtctctaacggtaccataaactattttaccagcattagtaacagcttggacaatctgacc

SEQ ID NO: 12874 - DNA, 80 bp, synthetic construct
  misc_feature 1..80: note = Synthetic: >NC_001611.1-cand-22980-23059
  source 1..80: mol_type = other DNA
gtacacatatggaatatatctataatttgatccatgttcataggatactttatgaatggatacctgtattatttgcgtgg

SEQ ID NO: 12875 - DNA, 80 bp, synthetic construct
  misc_feature 1..80: note = Synthetic: >NC_001430.1-cand-5540-5619
  source 1..80: mol_type = other DNA
ccagtaaaagttaaggatgcttatgcccttagagatataaatgatgtgaacctggaaattactgttgtagaactagacag

SEQ ID NO: 12876 - DNA, 80 bp, synthetic construct
  misc_feature 1..80: note = Synthetic: >HCV.B3-cand-7230-7309
  source 1..80: mol_type = other DNA
ccagtcggacgctgtttgaccctacctgcgttttcaaccctacgcaggaaatggctggactccttttaaattagagtaca

SEQ ID NO: 12877 - DNA, 80 bp, synthetic construct
  misc_feature 1..80: note = Synthetic: >NC_001611.1-cand-79980-80059
  source 1..80: mol_type = other DNA
ttcacatcatcgaacttctgatcattaatatgctcatgaagattaggaaatgtttctgatggaggtctatcaataactgg

SEQ ID NO: 12878 - DNA, 80 bp, synthetic construct
  misc_feature 1..80: note = Synthetic: >HCV.B1-cand-6260-6339
  source 1..80: mol_type = other DNA
ctaggtattaagaagagagacatcctatccaagaagaccaaggatctgaccaagctgaaggagtgcatggacaagtatgg

SEQ ID NO: 12879 - DNA, 80 bp, synthetic construct
  misc_feature 1..80: note = Synthetic: >AdVB7-cand-11290-11369
  source 1..80: mol_type = other DNA
ccatcgcccgagcggcacccgcgggtgcaactgaaaaaggactctagcgaggcgtacgtgccccagcagaacctgttcag

SEQ ID NO: 12880 - DNA, 80 bp, synthetic construct
  misc_feature 1..80: note = Synthetic: >NC_001611.1-cand-127600-127679
  source 1..80: mol_type = other DNA
ccatctacttttccatccctaatagtatccagttccttttctagttctgaacgcatttctcgttccctatcaagcgattc

SEQ ID NO: 12881 - DNA, 80 bp, synthetic construct
  misc_feature 1..80: note = Synthetic: >NC_039477.1-cand-2390-2469
  source 1..80: mol_type = other DNA
ccatctcaaacacgcccgaatcaggtactatgtcaaatgtgtgcaagaagcagtctattccatcatacaaatcgccggcg

SEQ ID NO: 12882 - DNA, 80 bp, synthetic construct
  misc_feature 1..80: note = Synthetic: >NC_001430.1-cand-6010-6089
  source 1..80: mol_type = other DNA
ccatgaagtatttgagggagttaaggaacctgcagttttacatagcaaggacaagagactgaaggtagattttgaggaag

SEQ ID NO: 12883 - DNA, 80 bp, synthetic construct
  misc_feature 1..80: note = Synthetic: >NC_003310.1-cand-141780-141859
  source 1..80: mol_type = other DNA
gatgatttggttgtattggggaaggtaacaattaatgatctaaagatgatgctattttacatggatttatcatatcatgg

SEQ ID NO: 12884 - DNA, 80 bp, synthetic construct
  misc_feature 1..80: note = Synthetic: >NC_039476.1-cand-1550-1629
  source 1..80: mol_type = other DNA
tctcacaggggatcaaagagtcggactcataccacgaaacggtgtggaccattgggatgcatacaaaggtgagagagtcg

SEQ ID NO: 12885 - DNA, 80 bp, synthetic construct
  misc_feature 1..80: note = Synthetic: >NC_003310.1-cand-78490-78569
  source 1..80: mol_type = other DNA
cgactgtggtagatttgttctatagagccggttgccgcaaatagatagaactaccaatatgtttgtacaaatgttaaaca

SEQ ID NO: 12886 - DNA, 80 bp, synthetic construct
  misc_feature 1..80: note = Synthetic: >NC_003310.1-cand-127470-127549
  source 1..80: mol_type = other DNA
cgagaaacagaactattagataggacggtatatgtatttcctaacacatccatcaaagaaataaagtacatgataggaaa

SEQ ID NO: 12887 - DNA, 80 bp, synthetic construct
  misc_feature 1..80: note = Synthetic: >NC_001611.1-cand-124570-124649
  source 1..80: mol_type = other DNA
cgagtattaaccatgaaagaaagaagacccattctaggagataaatttaccactagaacgagtcaaaagggaacagtcgc

SEQ ID NO: 12888 - DNA, 80 bp, synthetic construct
  misc_feature 1..80: note = Synthetic: >NC_003310.1-cand-155380-155459
  source 1..80: mol_type = other DNA
cgagtttgcattctttagtagaaacatgaaaccagtactctctcataaagtggattatctcaaagaatacataccgaaag

SEQ ID NO: 12889 - DNA, 80 bp, synthetic construct
  misc_feature 1..80: note = Synthetic: >AdVB7-cand-3990-4069
  source 1..80: mol_type = other DNA
cgatcattgagaactcggtggatcttttccagtaccctgtaaaggtgggattgaatgtttagatacataggcattagtcc

SEQ ID NO: 12890 - DNA, 80 bp, synthetic construct
  misc_feature 1..80: note = Synthetic: >AdVB7-cand-5270-5349
  source 1..80: mol_type = other DNA
cgatcggcgccctgcatgtcggccaggtagcagtttaccatgagttcgtagttgagcgcctcggccgcgtggcctttggc

SEQ ID NO: 12891 - DNA, 80 bp, synthetic construct
  misc_feature 1..80: note = Synthetic: >HQ537729.1-cand-2010-2089
  source 1..80: mol_type = other DNA
cgcaagctaaaattgtaaaagattgtgcaacaatgtgtagacattataaacgagctgaaaaaagagaaatgacaatgtca

SEQ ID NO: 12892 - DNA, 80 bp, synthetic construct
  misc_feature 1..80: note = Synthetic: >AdVB7-cand-27700-27779
  source 1..80: mol_type = other DNA
cgcccgggaactcaccgagttcatctacttcgaactccccgaggagcaccctcagggtccggcccacggagtgcggatta

SEQ ID NO: 12893 - DNA, 80 bp, synthetic construct
  misc_feature 1..80: note = Synthetic: >AdVB3-cand-12720-12799
  source 1..80: mol_type = other DNA
cgcgaccgtgtctagcttgctgactcccaactcccgcctgctgctgctgctggtctccccctttactgacagcggtagca

SEQ ID NO: 12894 - DNA, 80 bp, synthetic construct
  misc_feature 1..80: note = Synthetic: >NC_009827.1-cand-400-479
  source 1..80: mol_type = other DNA
cgtcaagttcccgggcggcggccagatcgttggtggagtttacttgctgccgcgcaggggcccacgattgggtgtgcgcg

SEQ ID NO: 12895 - DNA, 80 bp, synthetic construct
  misc_feature 1..80: note = Synthetic: >AdVB7-cand-34880-34959
  source 1..80: mol_type = other DNA
cgcggtggccagcatgaataattcttgatgaagcatataatccagacatgttagcatcagttaaagagaaaaaacagcca

SEQ ID NO: 12896 - DNA, 80 bp, synthetic construct
  misc_feature 1..80: note = Synthetic: >AdVB7-cand-9030-9109
  source 1..80: mol_type = other DNA
gctgacatcgcccagcgcttccaagcgctccatggcctcgtagaagtccacggcaaagttgaaaaactgggagttacgcg

SEQ ID NO: 12897 - DNA, 80 bp, synthetic construct
  misc_feature 1..80: note = Synthetic: >NC_001611.1-cand-5080-5159
  source 1..80: mol_type = other DNA
cgcgttaacatatgagtgaacacagccatacatgaaagcgatgagaaataggattctcatctcgccaaaatatcactaga

SEQ ID NO: 12898 - DNA, 80 bp, synthetic construct
  misc_feature 1..80: note = Synthetic: >AdVB3-cand-3670-3749
  source 1..80: mol_type = other DNA
cgctactgctgccgccaacaccatccttggaatgggctattacggaagcatcgttgccaattccagttcctctaataacc

SEQ ID NO: 12899 - DNA, 80 bp, synthetic construct
  misc_feature 1..80: note = Synthetic: >NC_001430.1-cand-4330-4409
  source 1..80: mol_type = other DNA
cgctcctttgtatgcactagaagctaagagggtttctgccttagaaaggaaaattaacaactacatacagttcaagtcca

SEQ ID NO: 12900 - DNA, 80 bp, synthetic construct
  misc_feature 1..80: note = Synthetic: >NC_003310.1-cand-142020-142099
  source 1..80: mol_type = other DNA
gacgatgatgattgatcactattacacaattttgtttttgtactttctaatatagtgtttaggttctttttcatatgaga

SEQ ID NO: 12901 - DNA, 80 bp, synthetic construct
  misc_feature 1..80: note = Synthetic: >NC_003310.1-cand-106870-106949
  source 1..80: mol_type = other DNA
gacggatcttaccatcttctttgattaatgatttagaaatgaagttatgacattcatcaatgatgacgcatattctactc

SEQ ID NO: 12902 - DNA, 80 bp, synthetic construct
  misc_feature 1..80: note = Synthetic: >NC_003310.1-cand-152080-152159
  source 1..80: mol_type = other DNA
ttcgggactatttgactttgtcaactttgtaaaggatatgatatgttgtgattctagaatagtagtagctctatctagtc

SEQ ID NO: 12903 - DNA, 80 bp, synthetic construct
  misc_feature 1..80: note = Synthetic: >NC_006573.1-cand-660-739
  source 1..80: mol_type = other DNA
gactcaggccgtggcaactgggactgtattatgactagttatcaatatctgataatccaaaatacaacctgggaagatca

SEQ ID NO: 12904 - DNA, 80 bp, synthetic construct
  misc_feature 1..80: note = Synthetic: >NC_001611.1-cand-12670-12749
  source 1..80: mol_type = other DNA
ttcctacatggttaaagtacatgtacaattctatccatttgtcttccttaactatatatttgtatagataattacgagtc

SEQ ID NO: 12905 - DNA, 80 bp, synthetic construct
  misc_feature 1..80: note = Synthetic: >NC_001611.1-cand-113290-113369
  source 1..80: mol_type = other DNA
gacttggatgtttgttcagaggatgaaatagatagaatctataaaacgattaaacaatatcacgaaagtagaaaacgaaa

SEQ ID NO: 12906 - DNA, 80 bp, synthetic construct
  misc_feature 1..80: note = Synthetic: >NC_006573.1-cand-2900-2979
  source 1..80: mol_type = other DNA
tgctgtgagcttaggttgcccatatagacacctgcacttaatggcctttctgttctgatcacctttgactttaacttctc

SEQ ID NO: 12907 - DNA, 80 bp, synthetic construct
  misc_feature 1..80: note = Synthetic: >NC_001611.1-cand-73420-73499
  source 1..80: mol_type = other DNA
gtgtactacaaacaggcgatggtaaaaagactcttcgtcttcccaaaatgttagagacggaaatagttgtcaagattctc

SEQ ID NO: 12908 - DNA, 80 bp, synthetic construct
  misc_feature 1..80: note = Synthetic: >NC_001611.1-cand-137540-137619
  source 1..80: mol_type = other DNA
ttataaaataacaatagttcctggttcctcttccacgtctactagctcgtggtattatacgcatgcctagtaatagtctc

SEQ ID NO: 12909 - DNA, 80 bp, synthetic construct
  misc_feature 1..80: note = Synthetic: >NC_003310.1-cand-117900-117979
  source 1..80: mol_type = other DNA
gagatatagggctcgttctacctcctgccccttacccacctgtaataccaattgtggactcactatatatcgcatattta

SEQ ID NO: 12910 - DNA, 80 bp, synthetic construct
  misc_feature 1..80: note = Synthetic: >NC_003310.1-cand-36300-36379
  source 1..80: mol_type = other DNA
tgtaaaagcatatgttggccgggcggagccgaacattctccgatattcaatttttgtatatctataatgttattaacctc

SEQ ID NO: 12911 - DNA, 80 bp, synthetic construct
  misc_feature 1..80: note = Synthetic: >NC_001611.1-cand-101390-101469
  source 1..80: mol_type = other DNA
gaggttttagatttttagttacagaagtaatatcgaatattttatccaaaaagaatgagtaattaattgttttagaagga

SEQ ID NO: 12912 - DNA, 80 bp, synthetic construct
  misc_feature 1..80: note = Synthetic: >NC_003310.1-cand-85480-85559
  source 1..80: mol_type = other DNA
gagtattgggtagagtcttaccttactatcttccagactctaaggatccagaaggaagaggttatattcttaattcttta

SEQ ID NO: 12913 - DNA, 80 bp, synthetic construct
  misc_feature 1..80: note = Synthetic: >NC_003310.1-cand-116140-116219
  source 1..80: mol_type = other DNA
gtttgaatagtttgttttggaaatagatccttcaataacttatagttgggtggggaaaaatcaattttatcactagactc

SEQ ID NO: 12914 - DNA, 80 bp, synthetic construct
  misc_feature 1..80: note = Synthetic: >AdVB3-cand-6630-6709
  source 1..80: mol_type = other DNA
gataacagcgcccccctctgatgcttgctcgcacatagtcatagagttcatgtgagggggcgagaagacccgggcccaga

SEQ ID NO: 12915 - DNA, 80 bp, synthetic construct
  misc_feature 1..80: note = Synthetic: >NC_003310.1-cand-53340-53419
  source 1..80: mol_type = other DNA
gataataccaaacaccttgcgttggctaggtatatacatcaaacaggagactataagcctttgtttagtcgtctcaaaga

SEQ ID NO: 12916 - DNA, 80 bp, synthetic construct
  misc_feature 1..80: note = Synthetic: >AF028022.1-cand-2580-2659
  source 1..80: mol_type = other DNA
ccttctgacactttgctgtttctcgggccgttagagcaaggtggcattattttaaaacaatggtgtactacatcttgtgc

SEQ ID NO: 12917 - DNA, 80 bp, synthetic construct
  misc_feature 1..80: note = Synthetic: >AF028022.1-cand-2700-2779
  source 1..80: mol_type = other DNA
atgagatgccctgagcatactggatctttccggaaaatctgtggatttgctacgacacctgtatgtgagtaccaaggtaa

SEQ ID NO: 12918 - DNA, 80 bp, synthetic construct
  misc_feature 1..80: note = Synthetic: >AF028022.1-cand-2780-2859
  source 1..80: mol_type = other DNA
cactatatctggatacaagagaatgatggctacaaaggattcttttcaatcatttaatcttactgaccctcacataacta

SEQ ID NO: 12919 - DNA, 80 bp, synthetic construct
  misc_feature 1..80: note = Synthetic: >AF028022.1-cand-2860-2939
  source 1..80: mol_type = other DNA
caaataagcttgaatggatcgatccagatggcaatacacgagatcatgtcaatcttgtattgaatagagatgtgtcattt

SEQ ID NO: 12920 - DNA, 80 bp, synthetic construct
  misc_feature 1..80: note = Synthetic: >AF028022.1-cand-2910-2989
  source 1..80: mol_type = other DNA
aatcttgtattgaatagagatgtgtcatttcaagatttaagtgacaatccttgtaaggttgatttgcatacacaagctat

SEQ ID NO: 12921 - DNA, 80 bp, synthetic construct
  misc_feature 1..80: note = Synthetic: >AF028022.1-cand-3020-3099
  source 1..80: mol_type = other DNA
tacattgacttgcactgttggtttaactgaatgcccaagctttatgacatcaattaaagcatgtgatctagcaatgtgtt

SEQ ID NO: 12922 - DNA, 80 bp, synthetic construct
  misc_feature 1..80: note = Synthetic: >AF028022.1-cand-3130-3209
  source 1..80: mol_type = other DNA
gttcaaacacagtcaaagtggttggtaaaggtggacattcaggttcttcctttaagtgttgccatgacactgactgctct

SEQ ID NO: 12923 - DNA, 80 bp, synthetic construct
  misc_feature 1..80: note = Synthetic: >AF028022.1-cand-3180-3259
  source 1..80: mol_type = other DNA
tttaagtgttgccatgacactgactgctcttctgaaggccttgttgcatcagcaccacatcttgagagagtcactggttt

SEQ ID NO: 12924 - DNA, 80 bp, synthetic construct
  misc_feature 1..80: note = Synthetic: >AF028022.1-cand-3260-3339
  source 1..80: mol_type = other DNA
taaccaaatcgactcggacaaggtctatgatgatggtgcccctccatgtacatttaagtgctggttcactaaatctggag

SEQ ID NO: 12925 - DNA, 80 bp, synthetic construct
  misc_feature 1..80: note = Synthetic: >AF028022.1-cand-3360-3439
  source 1..80: mol_type = other DNA
aacggcaattggatagttgttgttgttcttgtggtggttctgattttctctataattttatttagcatcctttgtcctcg

SEQ ID NO: 12926 - DNA, 80 bp, synthetic construct
  misc_feature 1..80: note = Synthetic: >AF028022.1-cand-3450-3529
  source 1..80: mol_type = other DNA
aagaagactgtttaagtataccatgtatttacttaagcatttataaatgtatagccttattaacccactaatgcttatat

SEQ ID NO: 12927 - DNA, 80 bp, synthetic construct
  misc_feature 1..80: note = Synthetic: >AF028022.1-cand-3480-3559
  source 1..80: mol_type = other DNA
acttaagcatttataaatgtatagccttattaacccactaatgcttatataatccttgctatttaactttattactgtat

SEQ ID NO: 12928 - DNA, 80 bp, synthetic construct
  misc_feature 1..80: note = Synthetic: >AF028022.1-cand-3560-3639
  source 1..80: mol_type = other DNA
aaccctttattaaaaaaaacaaatactttactcacataaaacttcatattctcttaccgaggattttgttcctgcggagc

SEQ ID NO: 12929 - DNA, 80 bp, synthetic construct
  misc_feature 1..80: note = Synthetic: >AF028027.1-cand-0-79
  source 1..80: mol_type = other DNA
gcacactcgctagctgtcgaactatgtgtgccaggcctacatggttgggctactgttctgttgcttttaactttctgttt

SEQ ID NO: 12930 - DNA, 80 bp, synthetic construct
  misc_feature 1..80: note = Synthetic: >AF028027.1-cand-90-169
  source 1..80: mol_type = other DNA
ttaataccgacaattacattgattgttctaaaaatcctaaaggcattaacattttcttgctcacattatactagtgagtc

SEQ ID NO: 12931 - DNA, 80 bp, synthetic construct
  misc_feature 1..80: note = Synthetic: >AF028027.1-cand-180-259
  source 1..80: mol_type = other DNA
ttaatcctagaaaaagtaaaagttgaataccagaaaacaatgggctcaatggtatgcgatgtctgccaacacgaatgtga

SEQ ID NO: 12932 - DNA, 80 bp, synthetic construct
  misc_feature 1..80: note = Synthetic: >AdVE4-cand-21650-21729
  source 1..80: mol_type = other DNA
taccttgctccgcaaccaggaggcgctctaccgcttcctcaactcccactctgcctactttcgctgtcaccgcgcgcgca

SEQ ID NO: 12933 - DNA, 80 bp, synthetic construct
  misc_feature 1..80: note = Synthetic: >AdVE4-cand-21730-21809
  source 1..80: mol_type = other DNA
ttcagaaggcaaccgccttcgaccgcatgaatcaagacatgtaacagtgtgtgttttaaaaatatgtttaataaacagca

SEQ ID NO: 12934 - DNA, 80 bp, synthetic construct
  misc_feature 1..80: note = Synthetic: >AdVE4-cand-21810-21889
  source 1..80: mol_type = other DNA
ctttttatgtgacacatgcatttgagataattttattcttaaaaatcaaagggattctgccgggaggtttcggcatgacc

SEQ ID NO: 12935 - DNA, 80 bp, synthetic construct
  misc_feature 1..80: note = Synthetic: >AdVE4-cand-21860-21939
  source 1..80: mol_type = other DNA
gggattctgccgggaggtttcggcatgacccgcgggcagggacacattgcggaactggtacttggccagccacttgaact

SEQ ID NO: 12936 - DNA, 80 bp, synthetic construct
  misc_feature 1..80: note = Synthetic: >AdVE4-cand-21980-22059
  source 1..80: mol_type = other DNA
atcggtccacagcttccgtgtcagttgcagggcacccagcaggtcgggcgcggagatcttgaaatcgcagttgggacctg

SEQ ID NO: 12937 - DNA, 80 bp, synthetic construct
  misc_feature 1..80: note = Synthetic: >AdVE4-cand-22010-22089
  source 1..80: mol_type = other DNA
ggcacccagcaggtcgggcgcggagatcttgaaatcgcagttgggacctgcgttttgcgcgcgagagttgcggtacacgg

SEQ ID NO: 12938 - DNA, 80 bp, synthetic construct
  misc_feature 1..80: note = Synthetic: >AdVE4-cand-22110-22189
  source 1..80: mol_type = other DNA
atcagggccggatgcttcacgctcgccagcaccgtcgcgtcggtgatcccgtccacgtcgaggtcttcggcgttggccat

SEQ ID NO: 12939 - DNA, 80 bp, synthetic construct
  misc_feature 1..80: note = Synthetic: >AdVE4-cand-22270-22349
  source 1..80: mol_type = other DNA
gaattagcatcatttgggcctgggcggcgttcatccccgggtacatggccttcatgaaagcctccagctgcttaaacgcc

SEQ ID NO: 12940 - DNA, 80 bp, synthetic construct
  misc_feature 1..80: note = Synthetic: >AdVE4-cand-22290-22369
  source 1..80: mol_type = other DNA
tgggcggcgttcatccccgggtacatggccttcatgaaagcctccagctgcttaaacgcctgctgggccttggctccctc

SEQ ID NO: 12941 - DNA, 80 bp, synthetic construct
  misc_feature 1..80: note = Synthetic: >AdVE4-cand-22370-22449
  source 1..80: mol_type = other DNA
ggtaaagaagaccccgcaggacttgctagagaactgattggtagcgcacccggcgtcgtgcacgcagcagcgcgcgtcgt

SEQ ID NO: 12942 - DNA, 80 bp, synthetic construct
  misc_feature 1..80: note = Synthetic: >AdVE4-cand-22430-22509
  source 1..80: mol_type = other DNA
cacgcagcagcgcgcgtcgttgttggccagctgcaccacgctgcgcccccagcggttctgggtgatcttggcccggtcgg

SEQ ID NO: 12943 - DNA, 80 bp, synthetic construct
  misc_feature 1..80: note = Synthetic: >AdVE4-cand-22530-22609
  source 1..80: mol_type = other DNA
tgtccgttttcgctcgccacatccatctcgatcatgtgctccttatggatcatggcggtcccgtgcaggcatcgcagctt

SEQ ID NO: 12944 - DNA, 80 bp, synthetic construct
  misc_feature 1..80: note = Synthetic: >AdVE4-cand-22610-22689
  source 1..80: mol_type = other DNA
gccctcgacttcggtacagccgtgcagccacagcgcgcaccctgtgctctcccagtttttatgggcgatttgggaatgcg

SEQ ID NO: 12945 - DNA, 80 bp, synthetic construct
  misc_feature 1..80: note = Synthetic: >AdVE4-cand-22690-22769
  source 1..80: mol_type = other DNA
cgtgcacgaacccctgcaggaagcggcccatcatggtcgtcagggtcttgttactggtaaaggtcagcggaatgccgcgg

SEQ ID NO: 12946 - DNA, 80 bp, synthetic construct
  misc_feature 1..80: note = Synthetic: >AdVE4-cand-22770-22849
  source 1..80: mol_type = other DNA
tgctcctcgttaatgtacaggtggcagatgcggcgatacacctcgccctgctcgggcatcagttggaagttggatttcag

SEQ ID NO: 12947 - DNA, 80 bp, synthetic construct
  misc_feature 1..80: note = Synthetic: >AdVE4-cand-22850-22929
  source 1..80: mol_type = other DNA
gtcgctctccacgcggtagcgctccattagcatattcatgatttccatgcccttctcccaggccgatacaatgggcaggc

SEQ ID NO: 12948 - DNA, 80 bp, synthetic construct
  misc_feature 1..80: note = Synthetic: >EF397003.1-cand-3000-3079
  source 1..80: mol_type = other DNA
cacacaggctatatatgacggtttgtctgattcaaagttaaagtgttgtgttgttgatgctcttaggaatatttatgaaa

SEQ ID NO: 12949 - DNA, 80 bp, synthetic construct
  misc_feature 1..80: note = Synthetic: >EF397003.1-cand-3080-3159
  source 1..80: mol_type = other DNA
ctgaattttttatgtcaagaaaactgcatcgatatatcgatagtatggagaaccattcagagaacgttgatgattttctt

SEQ ID NO: 12950 - DNA, 80 bp, synthetic construct
  misc_feature 1..80: note = Synthetic: >EF397003.1-cand-3160-3239
  source 1..80: mol_type = other DNA
tcattctttgatggtggtgtctctgctcctgtgcgaggaaactggttacaaggaaacttaaataaatgttcatcattatt

SEQ ID NO: 12951 - DNA, 80 bp, synthetic construct
  misc_feature 1..80: note = Synthetic: >EF397003.1-cand-3240-3319
  source 1..80: mol_type = other DNA
tggagtggctgtatcattgttatttagagaaatatggactaaactcttcccagagcttgagtgtttctttgagtttgcac

SEQ ID NO: 12952 - DNA, 80 bp, synthetic construct
  misc_feature 1..80: note = Synthetic: >EF397003.1-cand-3320-3399
  source 1..80: mol_type = other DNA
atcattcagatgatgcactgttcatttatggttatttggaaccagaagatgatggaactgattggtttttatatgtgtct

SEQ ID NO: 12953 - DNA, 80 bp, synthetic construct
  misc_feature 1..80: note = Synthetic: >EF397003.1-cand-3400-3479
  source 1..80: mol_type = other DNA
caacaaatacaggcaggtaactatcactggcatgctgttaatcaagaaatgtggaaaagtatgttcaatcttcatgaaca

SEQ ID NO: 12954 - DNA, 80 bp, synthetic construct
  misc_feature 1..80: note = Synthetic: >EF397003.1-cand-3480-3559
  source 1..80: mol_type = other DNA
cttgcttcttatgggatcaataaaagtttcacccaaaaagacaacagtttctccaactaatgctgaatttctatctacat

SEQ ID NO: 12955 - DNA, 80 bp, synthetic construct
  misc_feature 1..80: note = Synthetic: >EF397003.1-cand-3560-3639
  source 1..80: mol_type = other DNA
tttttgagggttgtgctgtttcagttccgtttgttaagattttattaggatcattgtctgatttaccaggcttaggattc

SEQ ID NO: 12956 - DNA, 80 bp, synthetic construct
  misc_feature 1..80: note = Synthetic: >EF397003.1-cand-3640-3719
  source 1..80: mol_type = other DNA
tttgatgatttagctgcagcacagagtagatgtgttaaagccttagacctaggtgcatgtcctcaactctctcaactggc

SEQ ID NO: 12957 - DNA, 80 bp, synthetic construct
  misc_feature 1..80: note = Synthetic: >EF397003.1-cand-3720-3799
  source 1..80: mol_type = other DNA
tattgtattgtgtacaagtaaggttgagcgtctgtacgggactgcagatggtatggttaactcacccactgcattcctga

SEQ ID NO: 12958 - DNA, 80 bp, synthetic construct
  misc_feature 1..80: note = Synthetic: >EF397003.1-cand-3840-3919
  source 1..80: mol_type = other DNA
tgggtcaatgtcaattatggaacttgcaacagcaggtattgggatggctgataaaaacattttaaagaatgcattcatat

SEQ ID NO: 12959 - DNA, 80 bp, synthetic construct
  misc_feature 1..80: note = Synthetic: >EF397003.1-cand-3880-3959
  source 1..80: mol_type = other DNA
gggatggctgataaaaacattttaaagaatgcattcatatcatttagacatacaagaagagatgtagataggtatatatt

SEQ ID NO: 12960 - DNA, 80 bp, synthetic construct
  misc_feature 1..80: note = Synthetic: >EF397003.1-cand-3960-4039
  source 1..80: mol_type = other DNA
gggtttattcaaattcttaatgtcactcagtgatgatgtgtttcaacatgatcgtttaggtgaatttagttttgttggta

SEQ ID NO: 12961 - DNA, 80 bp, synthetic construct
  misc_feature 1..80: note = Synthetic: >EF397003.1-cand-4050-4129
  source 1..80: mol_type = other DNA
gaaagtttttacaccaaaatcagagtttgaattccatgaccaatattctcaagcttatctaaatgcatggacaaagcaac

SEQ ID NO: 12962 - DNA, 80 bp, synthetic construct
  misc_feature 1..80: note = Synthetic: >EF397003.1-cand-4130-4209
  source 1..80: mol_type = other DNA
atccggtatatgattatataatccctaggagtagagataacttattagtatatcttgtgaggaagttaaatgacccaagt

SEQ ID NO: 12963 - DNA, 80 bp, synthetic construct
  misc_feature 1..80: note = Synthetic: >EF397003.1-cand-4210-4289
  source 1..80: mol_type = other DNA
atagttactgcaatgactatgcagtcccctttacagttgagatttcgaatgcaagcaaaacagcatatgaaagtctgcaa

SEQ ID NO: 12964 - DNA, 80 bp, synthetic construct
  misc_feature 1..80: note = Synthetic: >EVA91-cand-4240-4319
  source 1..80: mol_type = other DNA
taccccttttagagtcccagattgccaacattgagcagtcagcagctagtcaggaggatttagaaaatttgttcagcaac

SEQ ID NO: 12965 - DNA, 80 bp, synthetic construct
  misc_feature 1..80: note = Synthetic: >EVA91-cand-4330-4409
  source 1..80: mol_type = other DNA
tggcccattactgtagaaagttccagccactctacgcttcagaagcaaagagaatatatgccatggagaaaagaatcaat

SEQ ID NO: 12966 - DNA, 80 bp, synthetic construct
  misc_feature 1..80: note = Synthetic: >EVA91-cand-4410-4489
  source 1..80: mol_type = other DNA
aattacatgcagttcaagagcaaacaccgaattgaacctgtatgtctaataattagaggaccccctggcactggcaaatc

SEQ ID NO: 12967 - DNA, 80 bp, synthetic construct
  misc_feature 1..80: note = Synthetic: >EVA91-cand-4490-4569
  source 1..80: mol_type = other DNA
actggcaacaggtattattggaagagctattgcagaaaaatatcattctagtgtatactccttacctcctgacccagatc

SEQ ID NO: 12968 - DNA, 80 bp, synthetic construct
  misc_feature 1..80: note = Synthetic: >EVA91-cand-4570-4649
  source 1..80: mol_type = other DNA
attttgacggttataagcaacaagtagtcacagtaatggatgatctttgccaaaacccagacgggaaagacatgtcactc

SEQ ID NO: 12969 - DNA, 80 bp, synthetic construct
  misc_feature 1..80: note = Synthetic: >EVA91-cand-4650-4729
  source 1..80: mol_type = other DNA
ttttgccagatggtatctacggtggaatttataccacccatggctagcttggaggagaaaggtgtctcattcacctcaaa

SEQ ID NO: 12970 - DNA, 80 bp, synthetic construct
  misc_feature 1..80: note = Synthetic: >EVA91-cand-4730-4809
  source 1..80: mol_type = other DNA
attcgtgattgcctccaccaattcatccaacatcatagtcccgactgtctcagatagtgatgccatcaggagaagattct

SEQ ID NO: 12971 - DNA, 80 bp, synthetic construct
  misc_feature 1..80: note = Synthetic: >EVA91-cand-4810-4889
  source 1..80: mol_type = other DNA
atatggattgtgatattgaggttcccgagtcatttaggacaccccagggaaggctagacgctgctcgagctgccaaactt

SEQ ID NO: 12972 - DNA, 80 bp, synthetic construct
  misc_feature 1..80: note = Synthetic: >EVA91-cand-4890-4969
  source 1..80: mol_type = other DNA
tgttcagaaaacaacactgctaacttcaaaaaatgtagccccctggtttgtggtaaagccattcaacttagggataggaa

SEQ ID NO: 12973 - DNA, 80 bp, synthetic construct
  misc_feature 1..80: note = Synthetic: >EVA91-cand-4970-5049
  source 1..80: mol_type = other DNA
atcaggagttagatatggcctggattctgttgtctcagaactgatcagggaatacaacaaccgctcggcagttggtaaca

SEQ ID NO: 12974 - DNA, 80 bp, synthetic construct
  misc_feature 1..80: note = Synthetic: >EVA91-cand-5050-5129
  source 1..80: mol_type = other DNA
ctattgaggcacttttccaaggcccaccccaatttaaaccagttaggataacccttgacaaaccagcaccagatgcaatt

SEQ ID NO: 12975 - DNA, 80 bp, synthetic construct
  misc_feature 1..80: note = Synthetic: >EVA91-cand-5130-5209
  source 1..80: mol_type = other DNA
agtgaccttctggcaagtgtggatagtgaagaggtcaggcaatattgtagggatcagggttggattattccagagaagcc

SEQ ID NO: 12976 - DNA, 80 bp, synthetic construct
  misc_feature 1..80: note = Synthetic: >EVA91-cand-5210-5289
  source 1..80: mol_type = other DNA
tactaacatcgagagacatgtgaacagggctctaatgattctacaatcagttactactgtggttgcagtgatctcacttg

SEQ ID NO: 12977 - DNA, 80 bp, synthetic construct
  misc_feature 1..80: note = Synthetic: >EVA91-cand-5290-5369
  source 1..80: mol_type = other DNA
tgtatgtcatctataaactctttgccgggttccaaggtgcctattcagggatgcccaaaacagcagttaagaaaccagta

SEQ ID NO: 12978 - DNA, 80 bp, synthetic construct
  misc_feature 1..80: note = Synthetic: >EVA91-cand-5400-5479
  source 1..80: mol_type = other DNA
ttagactttgccctctctctattgaagaagaacatcagaaaatgccaaacagatcaaggacacttcaccttattaggaat

SEQ ID NO: 12979 - DNA, 80 bp, synthetic construct
  misc_feature 1..80: note = Synthetic: >EVA91-cand-5450-5529
  source 1..80: mol_type = other DNA
agatcaaggacacttcaccttattaggaattagagatagactggctgtactcccaagacatgcttcaccaggagactcaa

SEQ ID NO: 12980 - DNA, 80 bp, synthetic construct
  misc_feature 1..80: note = Synthetic: >EVB74-cand-3320-3399
  source 1..80: mol_type = other DNA
gtgggcaactataggttggttaatagacaccttgccacacacactgattggcaaaactgcgtgtgggaagattacaatag

SEQ ID NO: 12981 - DNA, 80 bp, synthetic construct
  misc_feature 1..80: note = Synthetic: >EVB74-cand-3400-3479
  source 1..80: mol_type = other DNA
ggacttgctagtcagtacgaccacagcccatggttgcgacaccatagccagatgtcggtgcaaaaccggagtttacttct

SEQ ID NO: 12982 - DNA, 80 bp, synthetic construct
  misc_feature 1..80: note = Synthetic: >EVB74-cand-3480-3559
  source 1..80: mol_type = other DNA
gtgcatcaaagaacaaacattacccggtcacttttgaaggcccaggtcttgtagaagtccaagaaaatgaatactaccct

SEQ ID NO: 12983 - DNA, 80 bp, synthetic construct
  misc_feature 1..80: note = Synthetic: >EVB74-cand-3530-3609
  source 1..80: mol_type = other DNA
gtagaagtccaagaaaatgaatactaccctaagaggtaccagtcacatgtgttgttggctgcgggcttttcagagccagg

SEQ ID NO: 12984 - DNA, 80 bp, synthetic construct
  misc_feature 1..80: note = Synthetic: >EVB74-cand-3640-3719
  source 1..80: mol_type = other DNA
tggtgtcattggcatagtgacaatgggtggcgagggcgtcgttggtttcgctgacgtgcgcgatctcctgtggctggaag

SEQ ID NO: 12985 - DNA, 80 bp, synthetic construct
  misc_feature 1..80: note = Synthetic: >EVB74-cand-3720-3799
  source 1..80: mol_type = other DNA
atgacgctatggaacaaggtgtcaaggattatgtggagcagctcggaaacgctttcggttccggtttcactaaccagatt

SEQ ID NO: 12986 - DNA, 80 bp, synthetic construct
  misc_feature 1..80: note = Synthetic: >EVB74-cand-3800-3879
  source 1..80: mol_type = other DNA
tgtgagcaggttaacctcctcaaggaatcacttgttgggcaagattccatcctagaaaaatcactcaaagccctggtgaa

SEQ ID NO: 12987 - DNA, 80 bp, synthetic construct
  misc_feature 1..80: note = Synthetic: >EVB74-cand-3880-3959
  source 1..80: mol_type = other DNA
aatcatttcagcattagttatcgtggtgagaaatcacgatgacttaatcacagtaaccgccacccttgcactgattggtt

SEQ ID NO: 12988 - DNA, 80 bp, synthetic construct
  misc_feature 1..80: note = Synthetic: >EVB74-cand-3960-4039
  source 1..80: mol_type = other DNA
gcacctcatcaccgtggcgttggcttaagcaaaaagtgtcacagtactatggaatcccaatggccgagaggcaaaacaac

SEQ ID NO: 12989 - DNA, 80 bp, synthetic construct
  misc_feature 1..80: note = Synthetic: >EVB74-cand-4120-4199
  source 1..80: mol_type = other DNA
tgagtggctgaaggtaaagatcctgccagaggttaaggaaaagcatgagtttttaaacaggttaaagcaactacctctgc

SEQ ID NO: 12990 - DNA, 80 bp, synthetic construct
  misc_feature 1..80: note = Synthetic: >EVB74-cand-4200-4279
  source 1..80: mol_type = other DNA
tggaaagccagatagccaccattgagcagagtgcaccttcacagggtgaccaagaacagttgttctcgaatgtccaatac

SEQ ID NO: 12991 - DNA, 80 bp, synthetic construct
  misc_feature 1..80: note = Synthetic: >EVB74-cand-4280-4359
  source 1..80: mol_type = other DNA
tttgcacattactgcagaaagtatgcgcccctgtacgccactgaagcaaagagagtgttctccttggagaagaaaatgag

SEQ ID NO: 12992 - DNA, 80 bp, synthetic construct
  misc_feature 1..80: note = Synthetic: >EVB74-cand-4440-4519
  source 1..80: mol_type = other DNA
ccgtggcaaccaatttgatcggacgctcacttgctgagaagctcaacagctcagtgtactcgttaccacctgatccagac

SEQ ID NO: 12993 - DNA, 80 bp, synthetic construct
  misc_feature 1..80: note = Synthetic: >EVB74-cand-4520-4599
  source 1..80: mol_type = other DNA
cacttcgatggctacaagcagcaggccgttgtgatcatggatgacttatgccaaaatccagatgggaaagatgtatctct

SEQ ID NO: 12994 - DNA, 80 bp, synthetic construct
  misc_feature 1..80: note = Synthetic: >EVB74-cand-4580-4659
  source 1..80: mol_type = other DNA
gatgggaaagatgtatctctattttgtcagatggtgtctagtgtggattttgtacctcccatggcagccttggaagagaa

SEQ ID NO: 12995 - DNA, 80 bp, synthetic construct
  misc_feature 1..80: note = Synthetic: >EVB74-cand-4660-4739
  source 1..80: mol_type = other DNA
agggatcctcttcacatcgccatttgtgctggcgtcaaccaacgcaggatccatcaatgcgccaactgtgtcggacagta

SEQ ID NO: 12996 - DNA, 80 bp, synthetic construct
  misc_feature 1..80: note = Synthetic: >EVB82-cand-770-849
  source 1..80: mol_type = other DNA
aggtgcacacgagactggattgaacgctagtggaaattccattatacactacacaaatattaattattacaaggactctg

SEQ ID NO: 12997 - DNA, 80 bp, synthetic construct
  misc_feature 1..80: note = Synthetic: >EVB82-cand-850-929
  source 1..80: mol_type = other DNA
catctaattcagctaatcggcaagacttcacacaagacccaggcaaatttactgaaccagtcaaggatgtaatgattaaa

SEQ ID NO: 12998 - DNA, 80 bp, synthetic construct
  misc_feature 1..80: note = Synthetic: >EVB82-cand-920-999
  source 1..80: mol_type = other DNA
aatgattaaaaccctaccagcattaaattcaccaagtgcagaggagtgcggctatagcgaccgagtgcgctcaatcacct

SEQ ID NO: 12999 - DNA, 80 bp, synthetic construct
  misc_feature 1..80: note = Synthetic: >EVB82-cand-970-1049
  source 1..80: mol_type = other DNA
gctatagcgaccgagtgcgctcaatcaccttaggcaattcaaccataacgacgcaagagtgtgccaatgtggtggtggct

SEQ ID NO: 13000 - DNA, 80 bp, synthetic construct
  misc_feature 1..80: note = Synthetic: >EVB82-cand-1080-1159
  source 1..80: mol_type = other DNA
gatgaagcaacagcagaagaccagcccacccaaccagacgtggctacgtgtcgcttctacacactagattcagtttcttg

SEQ ID NO: 13001 - DNA, 80 bp, synthetic construct
  misc_feature 1..80: note = Synthetic: >EVB82-cand-1160-1239
  source 1..80: mol_type = other DNA
ggaagagacatcacaaggttggtggtggaagtttcccgatgcactgcaggacatgggactgttcggacaaaatatgatgt

SEQ ID NO: 13002 - DNA, 80 bp, synthetic construct
  misc_feature 1..80: note = Synthetic: >EVB82-cand-1260-1339
  source 1..80: mol_type = other DNA
ggatacaccattcacgtccaatgtaatgcttccaaattccatcagggatgtttgctggttgtatgcgtacccgaggctga

SEQ ID NO: 13003 - DNA, 80 bp, synthetic construct
  misc_feature 1..80: note = Synthetic: >EVB82-cand-1320-1399
  source 1..80: mol_type = other DNA
gtatgcgtacccgaggctgagatgggatgttcgaaagttgacgatactgtcagcgcagcggaactatccaagggcgagag

SEQ ID NO: 13004 - DNA, 80 bp, synthetic construct
  misc_feature 1..80: note = Synthetic: >EVB82-cand-1400-1479
  source 1..80: mol_type = other DNA
tgcttgctcattcaccagcggcaaggccactgcggcagcaggtgcggttcaaactgcggtatttaatgctggcatgggag

SEQ ID NO: 13005 - DNA, 80 bp, synthetic construct
  misc_feature 1..80: note = Synthetic: >EVB82-cand-1480-1559
  source 1..80: mol_type = other DNA
ttggcgttggtaacctaacaatatatcctcaccaatggataaacttgagaaccaacaacagtgctactattgttatgcca

SEQ ID NO: 13006 - DNA, 80 bp, synthetic construct
  misc_feature 1..80: note = Synthetic: >EVB82-cand-1560-1639
  source 1..80: mol_type = other DNA
tacattaattgtgtgcctatggacaatatgttcagacactacaacttcaccctcatgctaataccctttgcaccgatgaa

SEQ ID NO: 13007 - DNA, 80 bp, synthetic construct
  misc_feature 1..80: note = Synthetic: >EVB82-cand-1650-1729
  source 1..80: mol_type = other DNA
gggacgtcctatgtgccaatcaccatcacaatagcaccaatgaaagctgaatacaatgggttacgactagccgccgccca

SEQ ID NO: 13008 - DNA, 80 bp, synthetic construct
  misc_feature 1..80: note = Synthetic: >EVB82-cand-1740-1819
  source 1..80: mol_type = other DNA
cctgtactcaataccccgggtagcaaccaatttttaacctcggatgactaccaatcgccatgtgcaatgccagagtttga

SEQ ID NO: 13009 - DNA, 80 bp, synthetic construct
  misc_feature 1..80: note = Synthetic: >EVB82-cand-1850-1929
  source 1..80: mol_type = other DNA
agtgcacaatctaatggaaattgctgaggtagactcagtggtgccagtgaacaacactgaaggcaaaatggaaggaaccg

SEQ ID NO: 13010 - DNA, 80 bp, synthetic construct
  misc_feature 1..80: note = Synthetic: >EVB82-cand-1900-1979
  source 1..80: mol_type = other DNA
acaacactgaaggcaaaatggaaggaaccgaagcatttcagataccagtcattgcgggaaatactgaaaacaaactgccc

SEQ ID NO: 13011 - DNA, 80 bp, synthetic construct
  misc_feature 1..80: note = Synthetic: >EVB82-cand-1960-2039
  source 1..80: mol_type = other DNA
atactgaaaacaaactgcccatcttcagtttccaggtaaaccctggaggcagtactgtgctacaaagaactctccttggg

SEQ ID NO: 13012 - DNA, 80 bp, synthetic construct
  misc_feature 1..80: note = Synthetic: >HCV.A10-cand-7020-7099
  source 1..80: mol_type = other DNA
tcaccttgcttcaatgaagtgacgtgggaaaatgccacctttctgaagagagggtttctaccagaccatcaattcccatt

SEQ ID NO: 13013 - DNA, 80 bp, synthetic construct
  misc_feature 1..80: note = Synthetic: >HCV.A10-cand-7090-7169
  source 1..80: mol_type = other DNA
aattcccattcttgattcatcccacaatgcccatgaaagagatccacgaatctatacgctggaccaaggatgcgtgcaat

SEQ ID NO: 13014 - DNA, 80 bp, synthetic construct
  misc_feature 1..80: note = Synthetic: >HCV.A10-cand-7170-7249
  source 1..80: mol_type = other DNA
acccaagaccatgtgcgctctctgtgtttattagcttggcacaatggtaaggatgaatatgaaaaatttgtgagcacaat

SEQ ID NO: 13015 - DNA, 80 bp, synthetic construct
  misc_feature 1..80: note = Synthetic: >HCV.A10-cand-7240-7319
  source 1..80: mol_type = other DNA
tgagcacaattagatcagtcccagttgggaaagcattggcaattccgaattttgagaatttgagaagaaattggctcgaa

(The sequence listing continues in the following parts.)

What is claimed is:

1. A method of enriching a sample for one or more target viral nucleic acids comprising the steps of:
a. providing a probe set comprising at least two nucleic acid probes complementary to one or more target viral nucleic acids, wherein the nucleic acid probes are affixed to a support;
b. capturing the one or more target viral nucleic acids on the support;
c. using the one or more captured target viral nucleic acids as a template strand to produce one or more nucleic acid duplexes immobilized on the support, wherein the one or more target viral nucleic acids hybridize to one or more probes of the probe set on the support;
d. contacting a transposase and transposon with the one or more nucleic acid duplexes under conditions wherein the one or more nucleic acid duplexes and transposon composition undergo a transposition reaction to produce one or more tagged nucleic acid duplexes, wherein the transposon composition comprises a double stranded nucleic acid molecule comprising a transferred strand and a non-transferred strand;
e. contacting the one or more tagged nucleic acid duplexes with a nucleic acid modifying enzyme under conditions to extend a 3′ end of an immobilized strand to a 5′ end of the template strand to produce one or more end-extended tagged nucleic acid duplexes;
f. amplifying the one or more end-extended tagged nucleic acid duplexes to produce a plurality of tagged nucleic acid strands;
g. contacting the plurality of tagged nucleic acid strands with a probe set to create an enriched library; and
h. amplifying the enriched library.

2. The method of claim 1, wherein the sample comprises a sample from a mammal.

3. The method of claim 1, wherein the sample comprises a blood sample, a serum sample, a tissue sample, and/or a whole blood sample.

4. The method of claim 1, comprises a freshwater sample, a wastewater sample, a saline water sample, or a combination thereof.

5. The method of claim 1, wherein the probe set is biotinylated.

6. The method of claim 1, wherein the one or more target viral nucleic acids are viral RNA molecules.

7. The method of claim 1, wherein the one or more target viral nucleic acids are genomic viral DNA or RNA molecules.

8. The method of claim 1, wherein the probe set further comprises at least two DNA probes that each hybridize to at least one target virus molecule from an adenovirus, Aichivirus, Andes virus, Anjozorobe hantavirus, Araraquara virus, Bayou virus, Bermejo virus, Black Creek Canal virus, Castelo dos Sonhos virus, Chapare virus, Chikungunya virus, Choclo virus, coxsackievirus, Crimean-Congo haemorrhagic fever virus, Dengue virus, Dobrava virus, Eastern equine encephalitis virus, Ebola virus, enterovirus, Guanarito virus, Hantaan virus, Hendra virus, hepatitis A virus, hepatitis B virus, hepatitis C virus, human coronavirus, human immunodeficiency virus 1, human immunodeficiency virus 2, human metapneumovirus, human papillomavirus, influenza A virus, influenza B virus, Japanese encephalitis virus, Juquitiba virus, KI polyomavirus Stockholm 60, Kyasanur forest disease virus, Laguna Negra virus, Lassa virus, Lechiguanas virus, Lujo virus, Machupo virus, Maciel virus, Marburg virus, Merkel cell polyomavirus, Middle East respiratory syndrome-related coronavirus, monkeypox virus, Monongahela hantavirus, Mopeia Lassa virus, Nipah virus, norovirus, Omsk hemorrhagic fever virus, orthohantavirus, parainfluenza, parechovirus, parvovirus, polyomavirus, Puumala virus, respiratory syncytial virus, rhinovirus A, rhinovirus B, rhinovirus C, Rift Valley fever, Rio Mamore virus, rotavirus A, rotavirus B, rotavirus B, rotavirus C, rotavirus H, rubella virus, Saaremaa virus, Sabia virus, salivirus, Sangassou virus, sapovirus, SARS coronavirus, Seoul virus, sin nombre virus, tick-borne encephalitis virus, torque teno virus, Tula virus, variola virus, Venezuelan equine encephalitis virus, West Nile virus, Western equine encephalomyelitis virus, yellow fever virus, and/or Zika virus.

9. The method of claim 1, wherein the probe set further comprises at least two DNA probes that each hybridize to at least one target virus molecule selected from Table 2.

10. The method of claim 1, wherein the probe set further comprises at least two DNA probes that each hybridize to at least one target virus molecule selected from Adeno-associated virus 2 (AAV2), Aichi virus 1 (AiV-A1), Alkhumra hemorrhagic fever virus (AHFV), Andes virus (ANDV), Anjozorobe virus (ANJV), Araucaria virus, Australian bat lyssavirus (ABLV), Bayou virus (BAYV), BK polyomavirus (BKPyV), Black Creek Canal virus (BCCV), Bombali virus (BOMV), Bourbon virus (BRBV), Bundibugyo virus (BDBV), Cache Valley virus (CVV), California encephalitis virus (CEV), Cedar virus (CedV), Chapare virus (CHAPV), Chikungunya virus (CHIKV), Choclo virus (CHOV), Colorado tick fever virus (CTFV), Crimean-Congo hemorrhagic fever virus (CCHFV), Crimean-Congo hemorrhagic fever virus 2 (CCHFV-2), Dengue virus (DENV), Dobrava-Belgrade virus (DOBV), Duvenhage virus (DUVV), Eastern equine encephalitis virus (EEEV), Ebola virus (EBOV), Enterovirus A, Enterovirus B, Enterovirus C, Enterovirus D, Epstein-Barr virus (EBV), European bat lyssavirus (EBLV), Ghana virus (GhV), Guanarito virus (GTOV), Hantaan virus (HTNV), Heartland virus (HRTV), Hendra virus (HeV), Henipavirus unclassified, Hepatitis A virus (HAV), Hepatitis B virus (HBV), Hepatitis C virus (HCV), Hepatitis D virus (HDV), Hepatitis E virus (HEV), Herpes simplex virus 1 (HSV1), Herpes simplex virus 2 (HSV2), Human adenovirus A, Human adenovirus B, Human adenovirus C, Human adenovirus D, Human adenovirus E, Human adenovirus F, Human adenovirus G, Human bocavirus (HBOV), Human coronavirus 229E (HCoV_229E), Human coronavirus HKU1 (HCOV_HKU1), Human coronavirus NL63 (HCoV_NL63), Human coronavirus OC43 (HCOV_OC43), Human cytomegalovirus (HCMV), Human immunodeficiency virus 1 (HIV-1), Human immunodeficiency virus 2 (HIV-2), Human metapneumovirus (HMPV), Human papillomavirus 11 (HPV11), Human papillomavirus 16 (HPV16; high-risk), Human papillomavirus 18 (HPV18; high-risk), Human papillomavirus 26 (HPV26), Human papillomavirus 31 (HPV31; high-risk), Human papillomavirus 33 (HPV33; high-risk), Human papillomavirus 35 (HPV35; high-risk), Human papillomavirus 39 (HPV39; high-risk), Human papillomavirus 40 (HPV40), Human papillomavirus 42 (HPV42), Human papillomavirus 43 (HPV43), Human papillomavirus 44 (HPV44), Human papillomavirus 45 (HPV45; high-risk), Human papillomavirus 51 (HPV51; high-risk), Human papillomavirus 52 (HPV52; high-risk), Human papillomavirus 53 (HPV53), Human papillomavirus 54 (HPV54), Human papillomavirus 56 (HPV56; high-risk), Human papillomavirus 58 (HPV58; high-risk), Human papillomavirus 59 (HPV59; high-risk), Human papillomavirus 6 (HPV6), Human papillomavirus 61 (HPV61), Human papillomavirus 66 (HPV66; high-risk), Human papillomavirus 68 (HPV68; high-risk), Human papillomavirus 69 (HPV69), Human papillomavirus 70 (HPV70), Human papillomavirus 73 (HPV73), Human papillomavirus 82 (HPV82), Human parainfluenza virus 1 (HPIV-1), Human parainfluenza virus 2 (HPIV-2), Human parainfluenza virus 3 (HPIV-3), Human parainfluenza virus 4 (HPIV-4), Human parechovirus (HPeV), Human parvovirus B19 (B19V), Human polyomavirus 6 (HPyV6), Human polyomavirus 7 (HPyV7), Human polyomavirus 9 (HPyV9), Human respiratory syncytial virus A (HRSV-A), Human respiratory syncytial virus B (HRSV-B), Influenza A virus, Influenza B virus, Influenza C virus, Isla Vista virus, Itapua virus, Jamestown Canyon virus (JCV), Japanese encephalitis virus (JEV), JC polyomavirus (JCPyV), Junin virus (JUNV), Juquitiba virus, KI polyomavirus (KIPyV), Kyasanur Forest disease virus (KFDV), La Crosse virus (LACV), Lagos bat virus (LBV), Laguna Negra virus (LANV), Langya virus, Lassa virus (LASV), LI polyomavirus (LIPyV), Lloviu virus (LLOV), Lujo virus (LUJV), Luxi virus (LUXV), Lymphocytic choriomeningitis virus (LCMV), Machupo virus (MACV), Mamastrovirus 1 (MAstV1), Mamastrovirus 6 (MAstV6), Mamastrovirus 8 (MAstV8), Mamastrovirus 9 (MAstV9), Maporal virus (MAPV), Marburg virus (MARV), Mayaro virus (MAYV), Measles virus (MV), Menangle virus (MenV), Merkel cell polyomavirus (MCPyV), Middle East respiratory syndrome-related coronavirus (MERS-COV), Mojiang virus (MojV), Mokola virus (MOKV), Monkeypox virus (MPV), Monongahela hantavirus, Muleshoe virus, Mumps virus (MuV), Murray Valley encephalitis virus (MVEV), MW polyomavirus (MWPyV), New Jersey polyomavirus (NJPyV), Nipah virus (NiV), Norovirus, Omsk hemorrhagic fever virus (OHFV), Onyong-nyong virus (ONNV), Oropouche virus (OROV), Paranoa virus, Powassan virus (POWV), Punta Toro virus (PTV), Puumala virus (PUUV), Rabies virus (RABV), Ravn virus (RAVV), Reston virus (RESTV), Rhinovirus A (RV-A), Rhinovirus B (RV-B), Rhinovirus C (RV-C), Rift Valley fever virus (RVFV), Ross River virus (RRV), Rotavirus A (RVA), Rotavirus B (RVB), Rotavirus C (RVC), Rubella virus (RuV), Sabia virus (SBAV), Salivirus A (SaV-A), Sandfly fever Sicilian virus (SFCV), Sangassou virus (SANGV), Sapovirus, Semliki Forest virus (SFV), Seoul virus (SEOV), Severe acute respiratory syndrome coronavirus (SARS-COV), Severe acute respiratory syndrome coronavirus 2 (SARS-COV-2), Severe fever with thrombocytopenia syndrome virus (SFTSV), Simian virus 40 (SV40), Sin nombre virus (SNV), Sindbis virus (SINV), Snowshoe hare virus (SSHV), Sosuga virus (SoRV), St. Louis encephalitis virus (SLEV), STL polyomavirus (STLPyV), Sudan virus (SUDV), Tacheng tick virus 2 (TcTV-2), Tahyna virus (TAHV), Tai Forest virus (TAFV), Tick-borne encephalitis virus (TBEV), Torque teno virus (TTV), Toscana virus (TOSV), Trichodysplasia spinulosa-associated polyomavirus (TSPyV), Tula virus (TULV), Usutu virus (USUV), Varicella-zoster virus (VZV), Variola virus (VARV), Venezuelan equine encephalitis virus (VEEV), West Nile virus (WNV), Western equine encephalitis virus (WEEV), WU polyomavirus (WUPyV), Yellow fever virus (YFV), and Zika virus (ZIKV).

11. The method of claim 1, wherein the at least two nucleic acid probes further comprise two or more, or five or more, or 10 or more, or 25 or more sequences, or all of the sequences selected from SEQ ID NOs: 213,288-214,878.

12. The method of claim 1, wherein the method further comprises depleting unwanted nucleic acid molecules from a nucleic acid sample.

13. The method of claim 12, wherein the depleting unwanted nucleic acid molecules comprises depleting unwanted cDNA library fragments from a library of cDNA fragments prepared from RNA, wherein the unwanted cDNA library fragments comprise those prepared from unwanted RNA sequences, further comprising:
a. preparing a solid support comprising at least one immobilized oligonucleotide, wherein each immobilized oligonucleotide comprises a nucleic acid sequence corresponding to an unwanted RNA sequence or its complement,
b. adding the library of fragments to the solid support and hybridizing the library fragments to at least one immobilized oligonucleotide to allow binding of unwanted library fragments to at least one immobilized oligonucleotide, and
c. collecting library fragments not bound to at least one immobilized oligonucleotide.

14. The method of claim 13, wherein the at least one immobilized oligonucleotide comprises a sequence comprising any one or more of SEQ ID NOs: 213,288-214,878 or its complement.

15. The method of claim 14, wherein depleting unwanted nucleic acid molecules comprises depleting off-target RNA nucleic acid molecules from a nucleic acid sample comprises:
a. contacting a nucleic acid sample comprising at least one RNA or DNA target sequence and at least one off-target RNA molecule from a first species with a probe set comprising at least two DNA probes complementary to discontiguous sequences along the full length of the at least one off-target RNA molecule from a second species, thereby hybridizing the DNA probes to the off-target RNA molecules to form DNA:RNA hybrids, wherein each DNA:RNA hybrid is at least 5 bases apart, or at least 10 bases apart, along a given off-target RNA molecule sequence from any other DNA:RNA hybrid, wherein the off-target DNA comprises at least one small noncoding RNA chosen from RN7SK, RN7SL1, RN7SL2, RN7SL5P, RPPH1, SNORD3A;
b. contacting the DNA:RNA hybrids with a ribonuclease that degrades the RNA from the DNA:RNA hybrids, thereby degrading the off-target RNA molecules in the nucleic acid sample to form a degraded mixture;
c. separating the degraded RNA from the degraded mixture;
d. sequencing the remaining RNA from the sample;
e. evaluating the remaining RNA sequences for the presence of off-target RNA molecules from the first species, thereby determining gap sequence regions; and
f. supplementing the probe set with additional DNA probes complementary to discontiguous sequences in one or more of the gap sequence regions.

16. The method of claim 15, wherein the probe set comprises any one or more of SEQ ID NOs: 213,288-214,878, or its complement.

17. A composition comprising a probe set comprising at least one DNA probe comprising at least one sequence of SEQ ID NOs: 1-213,280, or its complement.

18. A kit comprising a probe set comprising:
a. at least one DNA probe comprising at least one sequence comprising at least one of SEQ ID NOs: 1-213,280, or its complement; and
b. a buffer.

19. The kit of claim 18, wherein the buffer is a wash buffer and/or an elution buffer.

20. The kit of claim 18, further comprising an RNA depletion buffer, a probe depletion buffer, and/or a probe removal buffer.

21. The kit of claim 18, further comprising:
a. a ribonuclease;
b. a DNase; and
c. RNA purification beads.

22. The kit of claim 21, wherein the ribonuclease is Rnase H.

23. The kit of claim 18, further comprising a nucleic acid destabilizing chemical comprising betaine, DMSO, formamide, glycerol, or a derivative thereof, or a mixture thereof.

24. The kit of claim 18, wherein the at least one DNA probe comprises 2 or more, 5 or more, 10 or more, 25 or more, 50 or more, 100 or more, 200 or more, 300 or more, 400 or more, 500 or more, 600 or more, 700 or more, 800 or more, 900 or more, 1000 or more, 1100 or more probes comprising sequences selected from SEQ ID NOs: 1-213,280, or its complement.

25. The kit of claim 18, further comprising at least one DNA probe comprising at least one sequence comprising at least one of SEQ ID NOs: 213,288-214,878.
